United States Patent Application Publication US 2021/0199660 A1 - sequence listing, part 53

SEQ ID NO: 759396 - DNA, 120 bp, Artificial Sequence
  ENSG00000214595_56 (sequence is synthesized)
aacttttacaaagatgttttgctattgtttctatatacttcaagaatgttcatttttacaaataagttgaacaagacagcctaagttagatgcaccgaagtactagaaatatcgctagcc

SEQ ID NO: 759397 - DNA, 120 bp, Artificial Sequence
  ENSG00000214595_57 (sequence is synthesized)
tctgttctccagtttagctttcaaaaccaaatgagccatgtataaaggagttgagaaacttaatttttaaatgtttcatttgcagagttttatatccattaagtgcctttgaaagtttcc

SEQ ID NO: 759398 - DNA, 120 bp, Artificial Sequence
  ENSG00000214595_58 (sequence is synthesized)
agttgtgtgggctgctgtctcacctcccaccaatttctcctttctccatatggtgctaaaacctcaaagctgaggagggctgcaggacccttagcagattcagtgtgtcacccttgtcct

SEQ ID NO: 759399 - DNA, 120 bp, Artificial Sequence
  ENSG00000214595_59 (sequence is synthesized)
gtgttcacgccaaggcttcctaaatgaaagacatcggttacctgcttatgggaaggtgagcagcaaaggaattgaagttcgggacagggtagaattatgggttttcattgtgtttcatgc

SEQ ID NO: 759400 - DNA, 120 bp, Artificial Sequence
  ENSG00000214595_60 (sequence is synthesized)
caaacccacaaaatccaaaatagaattcaagttaaacaaacttctactacaaaatggaaggggaaaaaggctcaggaaggtctatgagaatgagctgacttatctcgttaaatcttaaga

SEQ ID NO: 759401 - DNA, 120 bp, Artificial Sequence
  ENSG00000214595_61 (sequence is synthesized)
taaatgagggtaacccaaggctgcaccttggtgtaccaccctgagtggagttgaggtgacttcatttgattgcttcaggcgaactatataggtcaagtccagattataaaaaaattatct

SEQ ID NO: 759402 - DNA, 120 bp, Artificial Sequence
  ENSG00000214595_62 (sequence is synthesized)
gcagaacaaattgtaaacccaaggaatagctggtaaatcaaaattataaagtgagttagagttccttggagttggttgtatgacggaatatgacttggacaatctttaccagaagccatc

SEQ ID NO: 759403 - DNA, 120 bp, Artificial Sequence
  ENSG00000214595_63 (sequence is synthesized)
cgtaagcccctcagtcacactttccatgtagctgaccagtgactacaggatgtggctgacagtgctcactgaaaggagagttggtgcgggactggtggttctgagcacatagacgcctat

SEQ ID NO: 759404 - DNA, 120 bp, Artificial Sequence
  ENSG00000214595_64 (sequence is synthesized)
tagtccttctggtcagtgaacgaaaattctagacctacagttactggctacttgcatttgtcagtttagagaaaaggtaaaatgaggcattttcaattgtagaatagactaacatttacc

SEQ ID NO: 759405 - DNA, 120 bp, Artificial Sequence
  ENSG00000214595_65 (sequence is synthesized)
acagaagtgcttcagcattctaaatggattagatcactcattaagctatttttatatgccaatttactaatgccttacatcaatccactaataggttgttgggcccgcagtagagtccct

SEQ ID NO: 759406 - DNA, 120 bp, Artificial Sequence
  ENSG00000214595_66 (sequence is synthesized)
atgcagtcccaattctgttttctgtaaccatgtgactggtgatgcagagtgataaccatgtctgcctatcttgtactagactcttcatgctgatcggatcttgcattgaaataaccatgt

SEQ ID NO: 759407 - DNA, 120 bp, Artificial Sequence
  ENSG00000214595_67 (sequence is synthesized)
ggaagaacaatgaatcgattaatgatgacatgtacaaccatatttaaagagcaatagtgtccgtgtgtcatgaaaaacttatttgtaaacgtttatatggtatgattttgattttatgta

SEQ ID NO: 759408 - DNA, 120 bp, Artificial Sequence
  ENSG00000214595_68 (sequence is synthesized)
tgttcataaatcctgcactgtatgatatatgtgagttaaaacattggtgcatgaatttattttcaaagtataaaacacatcacttaaacattttatgtgtcaaataaaatttgattatgt

SEQ ID NO: 759409 - DNA, 120 bp, Artificial Sequence
  ENSG00000214595_69 (sequence is synthesized)
ggctcctgaggacagcttgaaactccagttcatacacgggtgggtggcctgtcatgggcgcccgtatgtgttcctctgtctctgcctggctgtcaccaaccttagcaccaggcttaaggg

SEQ ID NO: 759410 - DNA, 120 bp, Artificial Sequence
  ENSG00000214595_70 (sequence is synthesized)
atcccctcccctcagtgtcgtcctcctcctggctagctcttctctgcaatgtgcacttgtacctgtggttgctattttaagtgtgactctctatccacttccctcgttgatgttctgtgg

SEQ ID NO: 759411 - DNA, 120 bp, Artificial Sequence
  ENSG00000214595_71 (sequence is synthesized)
ccatcacagtgtgattgtctctagatttctcagacttcatataattccatgacttaaagggtgctgctgctcattgctgctgcacttctttctcatcaccatcttcacttcctctttctc

SEQ ID NO: 759412 - DNA, 120 bp, Artificial Sequence
  ENSG00000214595_72 (sequence is synthesized)
ctttcccctaatcccctgctgtgttttgctggctccaccataggacagtattttcttcaaatattttctgcacatgtgcccaacataattttgaattttgtaaaattatatgcacccttg

SEQ ID NO: 759413 - DNA, 120 bp, Artificial Sequence
  ENSG00000214595_73 (sequence is synthesized)
catattttaagtagacaactaaaactttttaatgtcggtttaaatggctgagaagatactatctgtattatgaatacatcagtcctttaaatggatgcaaaggaacctaaatgccataaa

SEQ ID NO: 759414 - DNA, 81 bp, Artificial Sequence
  ENSG00000214595_74 (sequence is synthesized)
agtcctttaaatggatgcaaaggaacctaaatgccataaatgtttgattctcactatgatcaacttaaaaaatatgtgaga

SEQ ID NO: 759415 - DNA, 120 bp, Artificial Sequence
  ENSG00000214595_75 (sequence is synthesized)
agacatggtgaaatctcatctctacaaaaaactagccagatgtggtggcgtgtacctctagtcccagctacccaggagggaagttgaggttggggaatcacctgagttggggaggtctag

SEQ ID NO: 759416 - DNA, 120 bp, Artificial Sequence
  ENSG00000214595_76 (sequence is synthesized)
gctgcagtgagctgtgatcttgccagtgcactccagcctggttaacagtgaggccctgtcccaaaaggggaaaaaaaatacctgaagaagtccttctaaaacaggaagctattttacatc

SEQ ID NO: 759417 - DNA, 120 bp, Artificial Sequence
  ENSG00000214595_77 (sequence is synthesized)
attcatatttctacctaagttcacatttccattctaattttcccataaaattttaccctaacataatctttttatgcttgagagtcctttgtcaccatgtcataccctctgcaagaaaaa

SEQ ID NO: 759418 - DNA, 120 bp, Artificial Sequence
  ENSG00000214595_78 (sequence is synthesized)
aaatttttctgtggtcctaagactctaactcagcccaatacaatatccactagccacacacagtcactgagcacttaaaatacggctattctgaaaaaagatgttctgcatgtgtaaaat

SEQ ID NO: 759419 - DNA, 120 bp, Artificial Sequence
  ENSG00000214595_79 (sequence is synthesized)
gcacaccaattttgaagacttactatgaaaagaggaatgtaagatatctcataagtttttatattgattacatgttgatatagtaatatcttagatgtgttttgggtttaaaatgttact

SEQ ID NO: 759420 - DNA, 120 bp, Artificial Sequence
  ENSG00000214595_80 (sequence is synthesized)
gaaataaatttttttttctaatatggcaacaaatttttaattaggaggatcatgttatttttctgttagtgttgctccattaacagtttatttgaattatagttattagtaaagtcgact

SEQ ID NO: 759421 - DNA, 120 bp, Artificial Sequence
  ENSG00000214595_81 (sequence is synthesized)
aaatcaacatgaatatattactaattgtgacatataattattaagcacagaaaaattttgttggaaattattttaatatgatggattggttttcagttgcaagatctgtgcatttatatt

SEQ ID NO: 759422 - DNA, 120 bp, Artificial Sequence
  ENSG00000214595_82 (sequence is synthesized)
acttactgttagaatgtaacaaagtttaatattgagtctattctcagttctcatttttgtatagatgtaagcagtgagaaagtttattctcttaaataattaggtaagaatggaggccat

SEQ ID NO: 759423 - DNA, 120 bp, Artificial Sequence
  ENSG00000214595_83 (sequence is synthesized)
tttatagcaatgttattcaattcttcagactcctgtgataggccaaaaaagtcatatttgattttgatatatcacaaaaaataatctttcagctggtaattccattaagtctctgtacaa

SEQ ID NO: 759424 - DNA, 120 bp, Artificial Sequence
  ENSG00000214595_84 (sequence is synthesized)
ttttgttgaaagcaaagaattggaaatcacttgatttgcaggattccttagccagtcattagagttgttttctttcaacatgcatacttgtattttgaattgttcctttgttttggtgcc

SEQ ID NO: 759425 - DNA, 120 bp, Artificial Sequence
  ENSG00000214595_85 (sequence is synthesized)
cctggaagggtctgtgtcccggagtaatacagtgtaataggattccagatggaggagaggaatggctttctgcagtgggcggaaggcatttatgagaggggagatgggaaaggaatacct

SEQ ID NO: 759426 - DNA, 120 bp, Artificial Sequence
  ENSG00000214595_86 (sequence is synthesized)
gtgcctcatcacagatgtgttctcagatgatcgtttttaagaaaaagcgcacacaacagctgaggatctgctaacagattctgttacaatgttcagtgcccatgtgcctttttgagagtc

SEQ ID NO: 759427 - DNA, 120 bp, Artificial Sequence
  ENSG00000214595_87 (sequence is synthesized)
atctcatgccctcagacggccacatatcctcatttaaacattgctgtcctatgtgacacctggggttccacttgtacatgttcacgtcaatatgttagccttgcctctgacacctcctgc

SEQ ID NO: 759428 - DNA, 120 bp, Artificial Sequence
  ENSG00000214595_88 (sequence is synthesized)
cttagcacctaagtgaaaaaatactgcagtatttcatggtgccaaacctgacttagagcaggtcatgtttgttgcggtgaatcagaaaattccgaaatcctctgcagagagtcattcacc

SEQ ID NO: 759429 - DNA, 120 bp, Artificial Sequence
  ENSG00000214595_89 (sequence is synthesized)
gcttcattttgagtggtctgtgtaatctgtatcaaagcacttcagcaatagaaaagcagcttttctcaggctggtgccttgccccttgtttttcttctgtcctagcatctggtgaaggat

SEQ ID NO: 759430 - DNA, 120 bp, Artificial Sequence
  ENSG00000214595_90 (sequence is synthesized)
tgtcaatgtcaccagaatcagaagcaccgtttgtcatgaggctgcagcatgctggaaaggaggccccaccgtgtgcatctgccacttgctttcaaagcaggcaaattgtttccctaatct

SEQ ID NO: 759431 - DNA, 120 bp, Artificial Sequence
  ENSG00000214595_91 (sequence is synthesized)
tccgtcttataaatagattttttgagaccgactgctgtttatagaccacctgtcctcccttaccccagccttcctgcctgctgaatcagcactaagtctgaacacgactttccactccta

SEQ ID NO: 759432 - DNA, 120 bp, Artificial Sequence
  ENSG00000214595_92 (sequence is synthesized)
cttacattgagctcagctgtttgcccaaccctgatcaggggtcaaaatagttggcagccaaggcccagcaatacaatttgttgccgaggcgtgttgtcagtgtacctccctgctcgttct

SEQ ID NO: 759433 - DNA, 120 bp, Artificial Sequence
  ENSG00000214595_93 (sequence is synthesized)
tctctgcattaatgatgtcctttctgtcttgcgatataaaatcattttgaagttaatagccttgaaccccaatattcactttttaaagtaatattttcctctacaatattaaataggaaa

SEQ ID NO: 759434 - DNA, 120 bp, Artificial Sequence
  ENSG00000214595_94 (sequence is synthesized)
aaagttttgtggggatttaatgaatgaagatttataaattgctagagacctggaggagcagcagatggaggcatgaggactccaactgaccatcttcggagaaaaagggaagcttttctg

SEQ ID NO: 759435 - DNA, 120 bp, Artificial Sequence
  ENSG00000214595_95 (sequence is synthesized)
atgactgctgttgagattgaattcttggcaacaaatgacagctcataaatctgcctgcccaagtggtttttcttctggtctttgtttctagtattcctcactgtcattccactcccttct

SEQ ID NO: 759436 - DNA, 120 bp, Artificial Sequence
  ENSG00000214595_96 (sequence is synthesized)
agtagtactcagattcagcttctcatcagaactctgttccccccagactaaaatacagaatttaagtttaatatttctgataatataccatctgcctttacagataatttcagggaaagc

SEQ ID NO: 759437 - DNA, 120 bp, Artificial Sequence
  ENSG00000214595_97 (sequence is synthesized)
acatttctggatttcaaaagcaacagaaatgcaattttcctgctagaaaaccctctgcagctatgggtggctcaccagttttatgcccgaaacattaatagaaatggaagaaagaaatat

SEQ ID NO: 759438 - DNA, 120 bp, Artificial Sequence
  ENSG00000214595_98 (sequence is synthesized)
ttcttaatattaaaatagtatatattttatatacttgttggatagtgttactgcctctatttaacacaaagttgacttaacaccattatgttaataacacaattcatatttggaattgct

SEQ ID NO: 759439 - DNA, 120 bp, Artificial Sequence
  ENSG00000214595_99 (sequence is synthesized)
cccaagccttatgacacattcccaaaacaggatacctgcagaattgcccaggagaacattttggattgacattagccagtgctgtttccaagcaggaatatcaaggattaaagttctttg

SEQ ID NO: 759440 - DNA, 120 bp, Artificial Sequence
  ENSG00000214595_100 (sequence is synthesized)
caagcaggaatatcaaggattaaagttctttggaagaacagtagattttacagtaaaaagtaaataaaagttacttaaatatctatttgcataatattaacaatgatacatatttacata

SEQ ID NO: 759441 - DNA, 120 bp, Artificial Sequence
  ENSG00000214595_101 (sequence is synthesized)
tttacataaatacataagaaatttagacaaataaataaagcttatatgtatggccttagagtgcttaagtagatagaaacttttaaaaacaggaggccgggcatggtggctcacgtctgt

SEQ ID NO: 759442 - DNA, 120 bp, Artificial Sequence
  ENSG00000214595_102 (sequence is synthesized)
ggggcatgatagaagcgacaacgaagtaatccttaacggaatgataccttgcttccagggtcatctaagctcccaagagggcctaattcacagagaagctgattcagtcctacccctcac

SEQ ID NO: 759443 - DNA, 120 bp, Artificial Sequence
  ENSG00000214595_103 (sequence is synthesized)
tttacacttctgtgtctcgatcactgccagcctcatttatagagcaaggctgaacaattaacctgcttctggctggctgtgctgttttggcaagggtgattgttctgtaccactcatcgc

SEQ ID NO: 759444 - DNA, 120 bp, Artificial Sequence
  ENSG00000214595_104 (sequence is synthesized)
ccaggaagtgagatttctccacagaggaggagcatggttggtagctgtggtggcatcgtcagctgtgctgctggtggctgtgctgacgtgtgccagctgtgcaaccaggcactcagaagt

SEQ ID NO: 759445 - DNA, 120 bp, Artificial Sequence
  ENSG00000214595_105 (sequence is synthesized)
tgctcctcccctgattggtgagaatattttaaatgaacctactctttagcagctcacagaaactagagaaattcagaattggaccatagagatcttatttacaagatactcaagatttta

SEQ ID NO: 759446 - DNA, 120 bp, Artificial Sequence
  ENSG00000214595_106 (sequence is synthesized)
ttttcaagatctctgtgagacgatccgatctgtttaaacaatttccccgcatgcaatctttgctaatttttatgagtgatttcggttacctccattacaaatgaattttttagtcttttt

SEQ ID NO: 759447 - DNA, 120 bp, Artificial Sequence
  ENSG00000214595_107 (sequence is synthesized)
tttttttttttccctaaagatcattccaattttagtctagtatacaagtatcccatttaagaaccaaggctgatctcttatagaagtagttacagggtgtaacatcactgtcaatcaggg

SEQ ID NO: 759448 - DNA, 120 bp, Artificial Sequence
  ENSG00000214595_108 (sequence is synthesized)
cagaataatgcaatgattaatcaggtacatctgtgctcctttatttgtgcttgtgttactctggtagtgtgactaggggaacaatgaataggagggatcttggacaaaaaagaattatca

SEQ ID NO: 759449 - DNA, 120 bp, Artificial Sequence
  ENSG00000214595_109 (sequence is synthesized)
tggacaaaaaagaattatcaacaagaacacttcccaggctaatctgaaagttttgctgctagaaagcttagggacaaaggccgggcgcggtagctcacgcccgtaatcccagcactttgg

SEQ ID NO: 759450 - DNA, 120 bp, Artificial Sequence
  ENSG00000214595_110 (sequence is synthesized)
gggacaggcagagggagggggcggccccagtcctccggggcgtcgctgtttccaagcggcgagatctcgcctagtaaccggcagctgaggttcactagcgcggcgttgtggccccgcccc

SEQ ID NO: 759451 - DNA, 120 bp, Artificial Sequence
  ENSG00000214595_111 (sequence is synthesized)
gaaaatggatgagaagaaagatgggaaaatggcctgctgttgttgtcatgggctggccataggctttgcagcctggagctgagcttgggtgtcaacaggtgcctataagcgccaggtgca

SEQ ID NO: 759452 - DNA, 120 bp, Artificial Sequence
  ENSG00000214595_112 (sequence is synthesized)
tgaggtccccctggggaagcaggtaactgaagccgtggtcattgagaagatcacctgggcctcctggacaaggtgactgactggaagaaaaaacttgaggaaaaggtcacaagggagtct

SEQ ID NO: 759453 - DNA, 120 bp, Artificial Sequence
  ENSG00000214595_113 (sequence is synthesized)
aaatacattcagcgtcctgggagatgaagtcattggaatctggccacgaaatgcagacaaggctgatgtcaactgcgcatgtgtgacccacgctggcctgaacattgtcacaggagatga

SEQ ID NO: 759454 - DNA, 120 bp, Artificial Sequence
  ENSG00000214642_0 (sequence is synthesized)
atgaagatactttgtatttttctgacctttgtcttcactgtgtcttgtggtccatcagttccacagaaaaaaacaagagaagttgcagagagaaaaagagaatgtcagcttgttcgtggt

SEQ ID NO: 759455 - DNA, 120 bp, Artificial Sequence
  ENSG00000214642_1 (sequence is synthesized)
ccggaatgcaacagctgggaatatgtatattattactgcaatgttaacccctgctgtgcggtatgggaataccaaaagccaatcattaacaaaatcactagtaaactccatcaaaaataa

SEQ ID NO: 759456 - DNA, 120 bp, Artificial Sequence
  ENSG00000214643_0 (sequence is synthesized)
tgtgccgtgaaagacacctatagttgctttatcatgagaggcaaatgtcgacatgagtgtcatgattttgaaaaaccaattggtttctgcacaaaactaaatgccaactgttatatgtag

SEQ ID NO: 759457 - DNA, 71 bp, Artificial Sequence
  ENSG00000214643_1 (sequence is synthesized)
cccgccaccacgcccggataacggtcttaatctcctgacctagttatccgccagcctcggcctcccaaagt

SEQ ID NO: 759458 - DNA, 120 bp, Artificial Sequence
  ENSG00000214643_2 (sequence is synthesized)
ctcggcctcccaaagtgctggaattacgggtgtaaaatgtaaatattgagagggtaaaatatctttctggagagttgcattttggtcgatgtcaactggagacacaagagtgaccagatt

SEQ ID NO: 759459 - DNA, 120 bp, Artificial Sequence
  ENSG00000214652_0 (sequence is synthesized)
gggctcttcaatatggcaaggccttcgtctcctagcttctaggctctgagtccagtacccgtctgtactattccatctcttccgctccattagctcctcggtgactccaccatagcccct

SEQ ID NO: 759460 - DNA, 120 bp, Artificial Sequence
  ENSG00000214652_1 (sequence is synthesized)
gttatcctgtgacctgcaggtactgggagatccatagggaagaaggcggaacatccggaggctgggaaatgcgagtgctaacattcagggatgtggctgtagaattctccccagaagagt

SEQ ID NO: 759461 - DNA, 120 bp, Artificial Sequence
  ENSG00000214652_2 (sequence is synthesized)
gggaatgcctggactctgctcagcagcgtttgtatagggatgtgatgttagagaactacggaaacctgttctccttgggtcttgctatctttaagccagacttgattacctatctggagc

SEQ ID NO: 759462 - DNA, 120 bp, Artificial Sequence
  ENSG00000214652_3 (sequence is synthesized)
aaagaaaagagccttggaatgcgaggagacagaagacagtagccaaacacccagctggctctttgcattttactgcagagatattgctggagcacgacataaacgattcatttcaaaaag

SEQ ID NO: 759463 - DNA, 120 bp, Artificial Sequence
  ENSG00000214652_4 (sequence is synthesized)
tgatcctgagaaaatctggaagctgtgaccttaatactttacgtttaaagaaagactaccaacgtgtgggtaattgcaaggggcagaaaagcagttataatggcattcatcaatgtttgt

SEQ ID NO: 759464 - DNA, 120 bp, Artificial Sequence
  ENSG00000214652_5 (sequence is synthesized)
cagctacccgtagcaaaacctgtcaatataataaatgtggcaaagcttttgggttgtgctcaatcttcactgaacataagaaaatttttagcagagagaaatgctacaaatgtgaagaat

SEQ ID NO: 759465 - DNA, 120 bp, Artificial Sequence
  ENSG00000214652_6 (sequence is synthesized)
gtggcaaagactgtaggttgtcagattttaccatacagaagagaattcatactgcagatagaagttacaaatgtgaagaatgtggcaaagcctgtaaaaagttctcaaaccttactgaac

SEQ ID NO: 759466 - DNA, 120 bp, Artificial Sequence
  ENSG00000214652_7 (sequence is synthesized)
ctacaaatgtgaagaatgtggcaaaacatttacctgttcctcagcccttactaaacacaagagaaatcatactggagacagaccctacaaatgcgaagaatgtcacaaagcctttaggtg

SEQ ID NO: 759467 - DNA, 81 bp, Artificial Sequence
  ENSG00000214652_8 (sequence is synthesized)
aaacacaagagaaatcatactggagacagaccctacaaatgcgaagaatgtcacaaagcctttaggtgttgctcagacctt

SEQ ID NO: 759468 - DNA, 120 bp, Artificial Sequence
  ENSG00000214652_9 (sequence is synthesized)
atactggagagaaaccctacaaatgtaatgaatgtggaaaagcttttatgtggatctcggcccttagtcaacataacagaattcatactggagagaaaccctacatttgtgaagaatgtg

SEQ ID NO: 759469 - DNA, 120 bp, Artificial Sequence
  ENSG00000214652_10 (sequence is synthesized)
aaccctacatttgtgaagaatgtggcaaagcctttacctactcctcaacccttattagccacaagagaattcatatggaattgagaccttacaaatgtgaagaatgtggcaaaaccttta

SEQ ID NO: 759470 - DNA, 82 bp, Artificial Sequence
  ENSG00000214652_11 (sequence is synthesized)
gctttacctgctcctcaaaccttattaaacacaagagaattcatatggaagtgagaccttacaaatgtgaagaatgtggcaa

SEQ ID NO: 759471 - DNA, 120 bp, Artificial Sequence
  ENSG00000214652_12 (sequence is synthesized)
gagaattcatatggaagtgagaccttacaaatgtgaagaatgtggcaaaacctttaagtggttcccagacctgactaatcataagagaattcacactggagagaagccctacaaatgtga

SEQ ID NO: 759472 - DNA, 120 bp, Artificial Sequence
  ENSG00000214652_13 (sequence is synthesized)
gcaaaacctttacctgctcctcaagccttattaaacacaagagaagtcatactggagacagacctacaagtgcaaagaatgtggcaaagcctttaggtggttctcagaccttactaaaca

SEQ ID NO: 759473 - DNA, 120 bp, Artificial Sequence
  ENSG00000214652_14 (sequence is synthesized)
actaaacataaggtaattcatactggagataaaccttacaaatgtaatgaatgtggaaaagcttttacgtggatcttggcccttagtaaacacaagagaattcatactggagagaaaccc

SEQ ID NO: 759474 - DNA, 120 bp, Artificial Sequence
  ENSG00000214652_15 (sequence is synthesized)
tgaagaatgtggcaaagcctttatccgctcctcaacccttacaagccacaagagaattcatatggaagagagaccttacaaatgtgaagaatgcggcaaaacctgtgtttctcagacctg

SEQ ID NO: 759475 - DNA, 120 bp, Artificial Sequence
  ENSG00000214652_16 (sequence is synthesized)
actaatcaaaagagaattcaccctggagagaatccctacaaatctgaagaatgtaacaaaggctataggtggttctgagaccttgctaaacataagataattcatattggagagaaaccc

SEQ ID NO: 759476 - DNA, 120 bp, Artificial Sequence
  ENSG00000214652_17 (sequence is synthesized)
tacaaatgtaatgaatgtggaaaaggttttatgtggatctcggcccttagaaaacataagagaattcatactggagagacaccctacatccatgaagaatgtggcaaggcctttacctac

SEQ ID NO: 759477 - DNA, 120 bp, Artificial Sequence
  ENSG00000214652_18 (sequence is synthesized)
tcctcaatccttattaaccacaagagaattcatatggaagagggaccttacaaatgcgaagaatgtggcaaaacctttatgtggctctcagactttactaatcataagagaattcaccct

SEQ ID NO: 759478 - DNA, 120 bp, Artificial Sequence
  ENSG00000214652_19 (sequence is synthesized)
tacaaatgtgaagaatgtggcaaagtattgagctcgttctcacacgtcattagacataagacaattcatagtagagagaagctccacaagtgttaaaaatgtggaaaagcctttaacaat

SEQ ID NO: 759479 - DNA, 120 bp, Artificial Sequence
  ENSG00000214652_20 (sequence is synthesized)
gcctttaacaattcgtcatattgtgttcaacatcagagacttactactgaacaaatgtagtataaaggtaatgacttgaagaacatttaataacatcttagagggtctctaagaacttgc

SEQ ID NO: 759480 - DNA, 120 bp, Artificial Sequence
  ENSG00000214652_21 (sequence is synthesized)
ttgcttcataactgggtgcttttgtgttggatgcatatatagccctttactattatgtaatgccattttttgtctttttaaaaaaatctgttgatttaaagtctgttttgtcagaaacta

SEQ ID NO: 759481 - DNA, 120 bp, Artificial Sequence
  ENSG00000214652_22 (sequence is synthesized)
tgtaatccttgcttttttactgttttctatttgcttggtagacttttccctttattttgagcttatttgaaatgggtatctcaattacagcataccattagatcttggttctttatttgc

SEQ ID NO: 759482 - DNA, 120 bp, Artificial Sequence
  ENSG00000214652_23 (sequence is synthesized)
cactctgttttttaatttgggcatttaacccatgtacatttaaggtttgtattcatatgtgtggatttgattctgtcatgatcatcttagctggctattttgcacatttgtttatgtggt

SEQ ID NO: 759483 - DNA, 120 bp, Artificial Sequence
  ENSG00000214652_24 (sequence is synthesized)
ggctttatcatgtcagtggtttgtgtactttagtgtgtttttgtagtgactgtttatagtctttttcttatttagggctttcttcagaagatcttttaaggcaggtcttgtggtaacaga

SEQ ID NO: 759484 - DNA, 120 bp, Artificial Sequence
  ENSG00000214652_25 (sequence is synthesized)
tttcctcagcatttgcttatctgaatacgatcatatttattttttgcttctgaagcttactttggccggatgtgaacttctggattagaattcttttttaaagaaagttgaatattggcc

SEQ ID NO: 759485 - DNA, 120 bp, Artificial Sequence
  ENSG00000214652_26 (sequence is synthesized)
attaatctcttttgacttgagggatctcagctgcaaggttcattgttgtctgagcttctttttagaggtgacctggtctttctctctagctgcctttaacatatttttttctctcatttt

SEQ ID NO: 759486 - DNA, 120 bp, Artificial Sequence
  ENSG00000214652_27 (sequence is synthesized)
gaccttggagaatctcatgattatgtatcttggggatgaccttctcgtggggtatattattggggttctccacatttcttgcctttgaatgttggcctctctagtttggggaaattctca

SEQ ID NO: 759487 - DNA, 120 bp, Artificial Sequence
  ENSG00000214652_28 (sequence is synthesized)
tggatggtatcccgaaatatgtatttcaagttgttttcattctctccatcactttcaagcactctctttaattatagatttggtttatttacataatctgttatttcttggaggttttgt

SEQ ID NO: 759488 - DNA, 120 bp, Artificial Sequence
  ENSG00000214652_29 (sequence is synthesized)
tcattcctctttatacttttttcactattcttgtctgtcttatttcagaaagccagtcttgaagctctgagattcttccctctgcttggcctattcttctattaacacttgtgattacat

SEQ ID NO: 759489 - DNA, 120 bp, Artificial Sequence
  ENSG00000214652_30 (sequence is synthesized)
tataaaggttttgtattgtgtttttcagttctatcatgttggccatatttttctctagactggctgttttttccatcacttcctgcaattatttttttcttctttgcattgggttgcaac

SEQ ID NO: 759490 - DNA, 120 bp, Artificial Sequence
  ENSG00000214652_31 (sequence is synthesized)
ttacctttgtagatcaatgaagtttgcttctacccatattctgaattctgcttctgtcatcttaggccttgctggtaatgtaatttggtcatttggatgaaagaagtcactctggctttt

SEQ ID NO: 759491 - DNA, 120 bp, Artificial Sequence
  ENSG00000214652_32 (sequence is synthesized)
tgtgttttcaacatttttgcactgattttgtctcatctttgtgggcgtatctttaaagttgctgaactttgaatggggtttggttttttggatcctatttgatggtcttgagtatttgat

SEQ ID NO: 759492 - DNA, 83 bp, Artificial Sequence
  ENSG00000214652_33 (sequence is synthesized)
tggttttttggatcctatttgatggtcttgagtatttgattgtggtaaaaggtggattcagccaacaggctttgttcctggga

SEQ ID NO: 759493 - DNA, 120 bp, Artificial Sequence
  ENSG00000214652_34 (sequence is synthesized)
aggctgcatactctaaatgctcagctcacaacttagagtctgcatactctaactctgggggagttgtattgagccccaactgtgttctgtggctccttgtgatttggagtctgccactct

SEQ ID NO: 759494 - DNA, 120 bp, Artificial Sequence
  ENSG00000214652_35 (sequence is synthesized)
tggcaggagcaaagcagctgggaggggagtgggggttacctgctggagactgtgtgctatttcactaaaggtggtgttggcttggggcaggatactggccagtaaaggttttgatgcctt

SEQ ID NO: 759495 - DNA, 120 bp, Artificial Sequence
  ENSG00000214652_36 (sequence is synthesized)
ctctgtgccccccaagaaggaatgattgttcagagtgtgggaggataccctgttctccgcacagttttaccacaaaggccagggtggggctttctggctctctacccgccaaagcttcat

SEQ ID NO: 759496 - DNA, 120 bp, Artificial Sequence
  ENSG00000214652_37 (sequence is synthesized)
ctacaatagcaattgctgggagtggcaggggcatactacatttccattttctggtggggcaagcaaagccaaactcacctttgcagacatgtgccagcaaagtaatatggggagttgcca

SEQ ID NO: 759497 - DNA, 120 bp, Artificial Sequence
  ENSG00000214652_38 (sequence is synthesized)
tggtcttgggggaagctggagtatagggaagaaacatgtgagctggtgcagtcacaggggctgccttgccggagctcttcatgggtcaggcatggcccaccagtgcagatgctatggtat

SEQ ID NO: 759498 - DNA, 120 bp, Artificial Sequence
  ENSG00000214652_39 (sequence is synthesized)
gggctcctagggtacctgagactgccctgtaagcagttgtggccagactggatccctgggagaggccagcagaccaaggagtgctcagttggatcagcttcttctgatttgcaagaccat

SEQ ID NO: 759499 - DNA, 120 bp, Artificial Sequence
  ENSG00000214652_40 (sequence is synthesized)
cctgcagaaattaggtccaacagttcccctagggctaaagtctcttatgggagaaagttgagcctatggaaatggccgtcaatggccacactctactacaggtgctcttgcactaaaccc

SEQ ID NO: 759500 - DNA, 120 bp, Artificial Sequence
  ENSG00000214652_41 (sequence is synthesized)
tctgggtaccacatgagctgggttgctgccccacctctttgcctgtcttctggttgctgcatctcagagacgtgtaggccagcaatcactcagtgcagtccgaccaggatggaggatctg

SEQ ID NO: 759501 - DNA, 120 bp, Artificial Sequence
  ENSG00000214652_42 (sequence is synthesized)
tgcttttggccaaattaggggttcactggtaatgagcagtgggtagtttgtgggacccatggaggatggactggccctctctccttgggtaaactacagctcgtttgaggtgtgaataag

SEQ ID NO: 759502 - DNA, 120 bp, Artificial Sequence
  ENSG00000214652_43 (sequence is synthesized)
gcacttagggtgttggatttttcattagtctgagggtagcaaggacagttctactgcagaggcaatggcaaaaatattttcagttgctcttggaggctctgtctagggagttgcgaagtt

SEQ ID NO: 759503 - DNA, 120 bp, Artificial Sequence
  ENSG00000214652_44 (sequence is synthesized)
gctactggctcaatagctctggcaatgattggctagtggcccaggcctggagaacttgcccagtgagaatatatgagaacaggcactcacgtaacagtctggccacttttctgaagggct

SEQ ID NO: 759504 - DNA, 120 bp, Artificial Sequence
  ENSG00000214652_45 (sequence is synthesized)
gctgcagtatgctgggtgtccactgcagtttctagtcacctcagattttccagtacctgacaacattatcaccagtgaatactgtaaaacagcaacaatggcagcatgcccttttttcta

SEQ ID NO: 759505 - DNA, 120 bp, Artificial Sequence
  ENSG00000214652_46 (sequence is synthesized)
agagctccatctaagggaggtatagaccggtttccagccccaaagcaactgtaggaggtagctggaaacccctgttgaaaggtcttacccagtgaggagaacatgactggggacccactt

SEQ ID NO: 759506 - DNA, 86 bp, Artificial Sequence
  ENSG00000214652_47 (sequence is synthesized)
cctctactaaaatacaaaaaaagaaaattagccaggtgtggcggcatgcaccagtagtctcagctaatcgggaggctgaggcagga

SEQ ID NO: 759507 - DNA, 83 bp, Artificial Sequence
  ENSG00000214652_48 (sequence is synthesized)
gagtgcagtctagccacatttttgtaggacagctctgctgtgcagaagtaccacttccacccccagtttatttggactcttca

SEQ ID NO: 759508 - DNA, 120 bp, Artificial Sequence
  ENSG00000214652_49 (sequence is synthesized)
agaagtaccacttccacccccagtttatttggactcttcaaagccagaaggctggaacagctaagtcacacaaacagcaaaaatggccgctcactcttccctttaggagctgtatcccaa

SEQ ID NO: 759509 - DNA, 120 bp, Artificial Sequence
  ENSG00000214652_50 (sequence is synthesized)
agaggattcaaaactccactgatcaaagagcacctgtggtggtagctggagaccctggttgggaactgctttgcagtgaggaggaatgagattggggacctgctttaacagacagtctgg

SEQ ID NO: 759510 - DNA, 120 bp, Artificial Sequence
  ENSG00000214652_51 (sequence is synthesized)
ccatgtctttttagagcgcctgtactgtgctaggagatcctttctgtccccgatcagcttgggctcttcaacacatgaaggttggaatggctaagttgcccaagaagcaaagatggcggc

SEQ ID NO: 759511 - DNA, 120 bp, Artificial Sequence
  ENSG00000214652_52 (sequence is synthesized)
ccactcctctttctggtagctccatcccagggaggtaccgtactgctaccaatggttggctggaattttaagccagtagttcttaccctgtggggcactgtggaagtgggtcctgcagac

SEQ ID NO: 759512 - DNA, 120 bp, Artificial Sequence
  ENSG00000214652_53 (sequence is synthesized)
catcactgctcagccccctggatttcgcctcttgcctatgggtatgtacaaggttataacctcctgtttgctgagttgcagctactttttctgggaagcctggaaagccagagtatctga

SEQ ID NO: 759513 - DNA, 120 bp, Artificial Sequence
  ENSG00000214652_54 (sequence is synthesized)
ggctcttgaatctctgcacaggcctcagtggctgctctgctgagactccacatagctctgtgtgttaaattgaaggccttggtgaagtgggttcctgagggtatctcctcacccgaaggt

SEQ ID NO: 759514 - DNA, 120 bp, Artificial Sequence
  ENSG00000214652_55 (sequence is synthesized)
tgcagagatctgtgggagaatcatgggtttctagggtcacacatgcactcactgctttactgggtggggaggttcctttggctccatgttgttccctggtggcccattgtcctgccttgc

SEQ ID NO: 759515 - DNA, 120 bp, Artificial Sequence
  ENSG00000214652_56 (sequence is synthesized)
tttactccattctccgtaagttaagttgtttctttcattagttccaatgcaagtacctggatgtttcagttgaaggtgctgtatctatgcacaccttgcattcttctctgtgagagctac

SEQ ID NO: 759516 - DNA, 120 bp, Artificial Sequence
  ENSG00000214652_57 (sequence is synthesized)
acagtctagctccttctacttttttatattaaaataatttattttcaaaggcaaatattgatgtaatttaactcttacatttgatgctatgtcttcattctagaatttatgtgaaagaac

SEQ ID NO: 759517 - DNA, 120 bp, Artificial Sequence
  ENSG00000214652_58 (sequence is synthesized)
atggtcaatggttgctgcaccagagttaggagaagttcttccgtatcagatgaaaagatttatatactttcctatggaagattaagagaaatgaaatctaagatacatgaagaaattcta

SEQ ID NO: 759518 - DNA, 120 bp, Artificial Sequence
  ENSG00000214652_59 (sequence is synthesized)
agtggaaaggccacttagtggttgatttacaacagcattataagtgacagggtgatagaagtgtggtaagtgattaggataatattctgcatagtaagagaaacaatttgaattttagaa

SEQ ID NO: 759519 - DNA, 120 bp, Artificial Sequence
  ENSG00000214652_60 (sequence is synthesized)
ggaaattgctttaccatttgcaaactaaggtaattaaaatacagtgagtttcaaaatgcctttttaatgacaatgtatgaacttaatttattttaataaaccaaaattattgttattgag

SEQ ID NO: 759520 - DNA, 120 bp, Artificial Sequence
  ENSG00000214652_61 (sequence is synthesized)
ttaaggctattttacactgaatgtgtatcttgccactgatgttaacttatcccatcttacccaaggttgtaggtcaacagatggtaacaatatactattgtgtgactgtggaataacatc

SEQ ID NO: 759521 - DNA, 120 bp, Artificial Sequence
  ENSG00000214652_62 (sequence is synthesized)
tctagtgatttctttgtcagtggtctttaacttaccataatttggagaatatgattcctacaaattaacatttttgtttttcttgtaactacaggttattatgatgtttgtaatgaagat

SEQ ID NO: 759522 - DNA, 120 bp, Artificial Sequence
  ENSG00000214652_63 (sequence is synthesized)
gagtataatggagctatatgtttctgaattctgaacaactatttacaaaattttatcctacttttttctgttgaaaatatgacttctctcgtctgctaaacacgtacagacctttagttt

SEQ ID NO: 759523 - DNA, 120 bp, Artificial Sequence
  ENSG00000214652_64 (sequence is synthesized)
tgatttacatcaatttaaatatacaaatgtatcactgtaaaataaactttaagtgtaacagatttatagagaaaatattcgtatttgtttatggttgtatacctattttgagaagaaaag

SEQ ID NO: 759524 - DNA, 120 bp, Artificial Sequence
  ENSG00000214652_65 (sequence is synthesized)
aaaaatattagagtgaaacagataattttacatgtgttgatatcttgccagcaaaccagtaatttcaaagattttgaaagaaaatctgttttctctgctttgtattaaattcatttatct

SEQ ID NO: 759525 - DNA, 120 bp, Artificial Sequence
  ENSG00000214652_66 (sequence is synthesized)
gaaatgttattgctcctgacttagaatcatcttttgcaaattctttttttgtttgtttgtctgttttcttgttgttcaccataggcataatatatcattttcttgtcatctaatttcaga

SEQ ID NO: 759526 - DNA, 120 bp, Artificial Sequence
  ENSG00000214652_67 (sequence is synthesized)
aaacattatttgtactatcccctcagagattatgaaagtgactgataaaatttaatggtgttcataaaataattttcacatgtaatttcacactgagtgtattattgtatgttatttagt

SEQ ID NO: 759527 - DNA, 120 bp, Artificial Sequence
  ENSG00000214652_68 (sequence is synthesized)
atttcacactgagtgtattattgtatgttatttagtatattttacattttgtttcaattagagaatgctatttaatccaattttcatttagttattgatcattttactttgtaaaattga

SEQ ID NO: 759528 - DNA, 120 bp, Artificial Sequence
  ENSG00000214654_0 (sequence is synthesized)
atatgcataaaatgtattctgaatattcaagaaactgataaccctggttgcctccagagagaactggagagctgcagaataggaatgaggggtccctttttattgtataccttttaaaac

SEQ ID NO: 759529 - DNA, 120 bp, Artificial Sequence
  ENSG00000214654_1 (sequence is synthesized)
tgaaaaccattcagcaggtattctaggataaaagctcaggttgattggcaagaaaccttatcctcaaaagttgaggcacaaagtactttactgcaattgctgttagactagagtgatcct

SEQ ID NO: 759530 - DNA, 120 bp, Artificial Sequence
  ENSG00000214654_2 (sequence is synthesized)
gagatgcgtttgggcataattggcacctggactcaataatttctaagaccctgaagttgctcacaggcaacatgcaagtgactttctgcagacttcggactcaccagtggtgtttcattc

SEQ ID NO: 759531 - DNA, 120 bp, Artificial Sequence
  ENSG00000214654_3 (sequence is synthesized)
tatttaatgtcatcctatttcatgccttgctttttgggactgactttgtggaggaatactttctgcattctttgccttatatagatgtgaaagttcttgaaattaagaataaggcaagaa

SEQ ID NO: 759532 - DNA, 120 bp, Artificial Sequence
  ENSG00000214654_4 (sequence is synthesized)
aattgaacatcgaacccctaagaagtaatctctccaaatattatgtcctgagccagtcagaaatatgtaaagggaagaacatttttttgctgtctcttatcttcagtagcccaggaaatg

SEQ ID NO: 759533 - DNA, 120 bp, Artificial Sequence
  ENSG00000214654_5 (sequence is synthesized)
gaacaagacgggacctcattaggaaaacttggggcaatgtgaccagtgtccaagggcatcccattctcacactgtttgctctgggaatgcctgtttcggtaactacccagaaagagatca

SEQ ID NO: 759534 - DNA, 120 bp, Artificial Sequence
  ENSG00000214654_6 (sequence is synthesized)
gctttctgccctaatgccctgttcattctcaaggtggatgaagagacgtttgtcaatctaccaagcttggtagactatcttctcaatctgaaagaacacctagaagatatctatgtagga

SEQ ID NO: 759535 - DNA, 120 bp, Artificial Sequence
  ENSG00000214654_7 (sequence is synthesized)
agagttcttcatcaggttacacccaatagagatcctcagaacagagactttgtccctcttagtgagtacccagaaaaatactacccagattactgcagtggtgaggcctttataatgtcc

SEQ ID NO: 759536 - DNA, 120 bp, Artificial Sequence
  ENSG00000214654_8 (sequence is synthesized)
caagatgtggctcgaatgatgtatgtggttttcaaagaagtacccatgatggtgccagctgatgtgtttgtaggaatttgtgctaagttcattggccttatacccatccacagctcaagg

SEQ ID NO: 759537 - DNA, 120 bp, Artificial Sequence
  ENSG00000214654_9 (sequence is synthesized)
ttttctgggaaaaggcacattagatacaacagatgttgctataagttcatttttacatcctcagaaattgcagatcctgaaatgcccctagcatggaaggaaattaatgatggaaaagaa

SEQ ID NO: 759538 - DNA, 120 bp, Artificial Sequence
  ENSG00000214654_10 (sequence is synthesized)
tgtacactgtttgagacatcctatgagctcatttcctgcaaacttctgacgtaccttgacagctttaaacgttttcacatggggaccataaaaaacaatctcatgtattttgctgattag

SEQ ID NO: 759539 - DNA, 120 bp, Artificial Sequence
  ENSG00000214654_11 (sequence is synthesized)
gatttctttaattttccttatgagtctactattttaaagttaccttctaccctgttatggaaagcatcccttctttcccatgttttatgtaggttctctgaatctttaattttatttgca

SEQ ID NO: 759540 - DNA, 120 bp, Artificial Sequence
  ENSG00000214654_12 (sequence is synthesized)
aaggtacaaaatgttttctgtgctctggtgtgctcaattactgagatctcaaatttttaaaaaatttaagttggtgtagcataattcttttcaaaatgaaatatttctctcaaaagagag

SEQ ID NO: 759541 - DNA, 120 bp, Artificial Sequence
  ENSG00000214654_13 (sequence is synthesized)
atttcgcagctaaggaaatggaggcagtaggaggcagtaactccaaaaccctgttttcccgtctctaaaatccagatcccatcaacccattcgttgctcccaggtcccttgctctcggaa

SEQ ID NO: 759542 - DNA, 120 bp, Artificial Sequence
  ENSG00000214654_14 (sequence is synthesized)
tcgtgttccgcgcggcactgacctgagcgagcgccccggggcccgggacctcgcgccgggttcacagctactaggcacgctcggaccgccagagccttgcagcggccgggtccgctccgc

SEQ ID NO: 759543 - DNA, 120 bp, Artificial Sequence
  ENSG00000214654_15 (sequence is synthesized)
agccatggcgcctgcagggaaagaaaaacagccaaggcgcggcgggtcagcagagccgcgggcgcctaagagtcccctccccgaccggccccgcctcgcatacagacccggacctgcggc

SEQ ID NO: 759544 - DNA, 120 bp, Artificial Sequence
  ENSG00000214654_16 (sequence is synthesized)
gaacgcgtgccgcgcggccctcacggtgcttaggctgggtgcaacctagaacggaggttcctttcgtaccgtacatccaggtttgcacagcgcgcttatgtccctcctccaatctgatct

SEQ ID NO: 759545 - DNA, 120 bp, Artificial Sequence
  ENSG00000214654_17 (sequence is synthesized)
agttaagagacgtgtccaaattcatacaacctgttgggcacctctttatcccgaacgctgttctaggggatagggttagtgaacaaaaaacgcaaaagcccctgaccgcctgggccttac

SEQ ID NO: 759546 - DNA, 120 bp, Artificial Sequence
  ENSG00000214654_18 (sequence is synthesized)
atctattaggaggaggaagacagataaactaaggctcgtgcaaaggagaaaaataaagcaaggtgactttctgcagacttcggactcaccagtggtgtttcattctatttaatgtcatcc

SEQ ID NO: 759547 - DNA, 120 bp, Artificial Sequence
  ENSG00000214655_0 (sequence is synthesized)
gccgccgagcgcttcgtcccggccctaagtctcggagactggccaagatcaccgcttgcaccgcgctgttgggcgaggcccggtcccgtctctttcccaggcctgagattctcgcccggc

SEQ ID NO: 759548 - DNA, 80 bp, Artificial Sequence
  ENSG00000214655_1 (sequence is synthesized)
ccaggcctgagattctcgcccggcacggccgccctgagcgccccggccacccccagccccggctcgcccctcaggccccg

SEQ ID NO: 759549 - DNA, 120 bp, Artificial Sequence
  ENSG00000214655_2 (sequence is synthesized)
gggggtgcgggccccatggagctgatgtttgcagagtgggaggacggagagcgcttctcattcgaggattcggaccgttttgaggaggattcactctgttccttcatctccgaggccgag

SEQ ID NO: 759550 - DNA, 120 bp, Artificial Sequence
  ENSG00000214655_3 (sequence is synthesized)
agcctctgccagaactggcggggatggcgcaaacagtcagcggggcccaattcccccactggcggcggtggcggaggtggcagtggcggtaccagaatgcgagatggactggtgatccca

SEQ ID NO: 759551 - DNA, 120 bp, Artificial Sequence
  ENSG00000214655_4 (sequence is synthesized)
ttggtggagctgtcagcaaagcaggtggcatttcatatcccatttgaagtggtggagaaagtttacccaccagtgcctgagcagctacagctccgaattgctttttggagcttccctgag

SEQ ID NO: 759552 - DNA, 120 bp, Artificial Sequence
  ENSG00000214655_5 (sequence is synthesized)
aatgaagaggacattcggctgtattcgtgcctggccaatggcagtgcggatgagtttcagcgaggggatcagctcttccgcatgcgggctgtgaaggacccattgcagatagggttccac

SEQ ID NO: 759553 - DNA, 120 bp, Artificial Sequence
  ENSG00000214655_6 (sequence is synthesized)
ctgagtgctacagtggtgccacctcagatggtccctcctaaaggggcctacaacgtggctgtgatgtttgaccgctgccgggtcacttcctgcagctgtacctgtggggctggggccaaa

SEQ ID NO: 759554 - DNA, 120 bp, Artificial Sequence
  ENSG00000214655_7 (sequence is synthesized)
tggtgcacccacgtcgtggcactctgtctcttccgcatccacaacgcttctgcagtctgcctgcgagccccagtctcagagtccctgtcccggctacagagggaccagctgcaaaagttt

SEQ ID NO: 759555 - DNA, 120 bp, Artificial Sequence
  ENSG00000214655_8 (sequence is synthesized)
gctcagtacctcatcagtgagctccctcagcagatcctccccacagctcagcgtctcctggacgaactcctgtcttcccagtcaacagccatcaatacagtgtgtggagctccggacccc

SEQ ID NO: 759556 - DNA, 120 bp, Artificial Sequence
  ENSG00000214655_9 (sequence is synthesized)
acagcagggccctcagcatcggaccagagtacttggtatctggatgaatcgacactcactgacaacatcaaaaagacactgcacaagttctgtggcccctcccctgtggtcttcagtgat

SEQ ID NO: 759557 - DNA, 120 bp, Artificial Sequence
  ENSG00000214655_10 (sequence is synthesized)
gtgaactccatgtatctgtcttccacggagccgccagccgctgctgaatgggcatgtctgctgcgccctctgaggggccgtgagccagagggcgtctggaacctgctaagcattgtgcgg

SEQ ID NO: 759558 - DNA, 120 bp, Artificial Sequence
  ENSG00000214655_11 (sequence is synthesized)
gagatgttcaagcggagggacagcaatgctgcccccttgttggaaatcctcactgaccagtgcctcacctatgaacagataacaggttggtggtatagcgtacgtacctcagcctcacac

SEQ ID NO: 759559 - DNA, 120 bp, Artificial Sequence
  ENSG00000214655_12 (sequence is synthesized)
agcagtgccagtgggcacacgggccgtagcaacgggcagtcagaggtggcagcccatgcctgtgccagcatgtgtgacgagatggtcacactgtggaggctggccgtgctggaccctgca

SEQ ID NO: 759560 - DNA, 120 bp, Artificial Sequence
  ENSG00000214655_13 (sequence is synthesized)
ctcagcccccagcggcgccgggaactgtgtacgcagctgcggcagtggcaactgaaggtgattgagaacgtcaagcggggccaacacaagaagacgctggagcggctcttccccggcttc

SEQ ID NO: 759561 - DNA, 120 bp, Artificial Sequence
  ENSG00000214655_14 (sequence is synthesized)
cggccagcggtggaggcctgctacttcaactgggaagaggcctacccacttcctggtgtcacctacagcggcactgacaggaagctggcactgtgctgggcccgggccctgccctctcgg

SEQ ID NO: 759562 - DNA, 120 bp, Artificial Sequence
  ENSG00000214655_15 (sequence is synthesized)
ccaggtgcctcccgctctgggggcctggaggaatcccgggaccggccccgaccccttcctactgagccagctgtgcggcccaaggagcctgggaccaagcgaaagggcttgggtgagggg

SEQ ID NO: 759563 - DNA, 120 bp, Artificial Sequence
  ENSG00000214655_16 (sequence is synthesized)
gtcccctcatcacagcggggtccccgccgcctctcagctgaagggggagataaagctctacataagatgggtccaggtgggggcaaagccaaggcactgggtggggctggcagtgggagc

SEQ ID NO: 759564 - DNA, 120 bp, Artificial Sequence
  ENSG00000214655_17 (sequence is synthesized)
aagggctcagcaggtggcggaagcaagcgacggctgagcagcgaagacagctccctggagccagacctggccgagatgagcctggatgacagcagcctggccctgggcgcagaggccagc

SEQ ID NO: 759565 - DNA, 120 bp, Artificial Sequence
  ENSG00000214655_18 (sequence is synthesized)
accttcgggggattccctgagagccctccaccctgtcctctccacggtggctcccgaggcccttccactttccttcctgagcccccagatacttatgaagaagatggtggtgtgtacttc

SEQ ID NO: 759566 - DNA, 120 bp, Artificial Sequence
  ENSG00000214655_19 (sequence is synthesized)
tcggaagggcctgagcctcccacagcctctgttggcccccctggcctactgcctggggatgtctgtacccaggacgacctcccttctacagatgagagtggcaatgggcttcccaaaacc

SEQ ID NO: 759567 - DNA, 120 bp, Artificial Sequence
  ENSG00000214655_20 (sequence is synthesized)
aaagaggcagcccctgcagttggagaggaggatgatgactaccaggcgtactatctgaatgcccaggatggggctgggggcgaggaagagaaggccgagggcggggctggggaggagcac

SEQ ID NO: 759568 - DNA, 120 bp, Artificial Sequence
  ENSG00000214655_21 (sequence is synthesized)
gacctgtttgctgggctgaagccactggaacaggagagtcgcatggaggtactgtttgcctgtgctgaggccctgcatgcgcatggctatagcagtgaggcctcccgtctcactgtggag

SEQ ID NO: 759569 - DNA, 120 bp, Artificial Sequence
  ENSG00000214655_22 (sequence is synthesized)
cttgcccaggatctgctagccaacccacccgacctcaaggtagagccgccccctgccaagggcaagaagaacaaggtatccacgagccgtcagacctgggtggctaccaacaccctgagc

SEQ ID NO: 759570 - DNA, 120 bp, Artificial Sequence
  ENSG00000214655_23 (sequence is synthesized)
aaggcggccttcctgttgacagtgctaagtgagcgtccagagcaccacaacctggccttccgagttggcatgtttgccttggagctacagaggcctccagcttctaccaaggccttggag

SEQ ID NO: 759571 - DNA, 120 bp, Artificial Sequence
  ENSG00000214655_24 (sequence is synthesized)
gtgaagctggcataccaggagtctgaggtggctgccctgctcaagaagatccctctgggtccaagtgagatgagtaccatgcggtgccgggcagaggaacttcgggaggggacactctgt

SEQ ID NO: 759572 - DNA, 120 bp, Artificial Sequence
  ENSG00000214655_25 (sequence is synthesized)
agtggtttctcccacaggttcccggcccccaagtcgcaactggaacagcgagacacctggggatgaggagcttggatttgaagcagcagttgctgccttgggcatgaagacaacagtgag

SEQ ID NO: 759573 - DNA, 120 bp, Artificial Sequence
  ENSG00000214655_26 (sequence is synthesized)
cgaggcagaacatcccctcttatgtgaaggcacacgtcgggagaagggtgacctggcattagcactaatgatcacttacaaggacgaccaggccaagcttaagaagatcttagacaaact

SEQ ID NO: 759574 - DNA, 120 bp, Artificial Sequence
  ENSG00000214655_27 (sequence is synthesized)
cttggaccgagagagccagacacataagccacagacgctgagttctttctactcatctagccgcccaaccacagccagccagaggtctccttcaaagcacgggggcccatctgccccagg

SEQ ID NO: 759575 - DNA, 120 bp, Artificial Sequence
  ENSG00000214655_28 (sequence is synthesized)
ggccctgcaaccactgacctcaggctctgcagggcctgctcaaccagggagtgtggcaggggctgggccaggccccactgagggcttcacagagaagaatgtgcctgagagttccccaca

SEQ ID NO: 759576 - DNA, 120 bp, Artificial Sequence
  ENSG00000214655_29 (sequence is synthesized)
ttccccctgtgagggtcttccatctgaggcagctttgaccccaaggccagaagggaaggttcctagccgcttggcacttggcagtcgtggaggctataatggacggggatgggggtcccc

SEQ ID NO: 759577 - DNA, 120 bp, Artificial Sequence
  ENSG00000214655_30 (sequence is synthesized)
aggacggcctaagaagaagcacacaggcatggccagcattgacagcagtgcccctgaaacaacatcggatagttcccccaccttaagccggagaccacttcgagggggctgggcccccac

SEQ ID NO: 759578 - DNA, 120 bp, Artificial Sequence
  ENSG00000214655_31 (sequence is synthesized)
ctcctggggtcgaggtcaggacagtgacagcattagcagctcttcttcggactccctgggctcctcatcctccagtggaagtcgccgggccagtgccagtggaggagcccgggcgaagac

SEQ ID NO: 759579 - DNA, 120 bp, Artificial Sequence
  ENSG00000214655_32 (sequence is synthesized)
tgttgaagttggcaggtacaagggccgccgccccgagagtcatgcccctcatgtacccaatcagccatcagaggcagctgcacacttctacttcgagctggcgaagacagtgctgatcaa

SEQ ID NO: 759580 - DNA, 120 bp, Artificial Sequence
  ENSG00000214655_33 (sequence is synthesized)
ggcagggggcaacagcagcacttccattttcacacatccatcttcctcagggggccaccagggtcctcaccgcaacctgcacctttgcgccttcgagattgggctttatgcccttggcct

SEQ ID NO: 759581 - DNA, 120 bp, Artificial Sequence
  ENSG00000214655_34 (sequence is synthesized)
gcacaactttgtttctcccaactggctctcacgtacttattcttcccacgtttcctggattacaggccaggccatggagataggcagcgcagccctgactatactggtagaatgctggga

SEQ ID NO: 759582 - DNA, 120 bp, Artificial Sequence
  ENSG00000214655_35 (sequence is synthesized)
tgggcacctgacaccccctgaggttgcatccctggctgacagggcatcacgggcaagagactccaatatggtgagggcggcagcagagctggccctgagctgcctgcctcacgcccatgc

SEQ ID NO: 759583 - DNA, 120 bp, Artificial Sequence
  ENSG00000214655_36 (sequence is synthesized)
attgaaccctaatgagatccagcgggccctggtgcagtgcaaggaacaggacaacctgatgttggagaaggcctgcatggcagtggaagaggcagctaagggtgggggcgtgtaccctga

SEQ ID NO: 759584 - DNA, 120 bp, Artificial Sequence
  ENSG00000214655_37 (sequence is synthesized)
agtgttgtttgaggttgctcaccagtggttctggctgtatgagcaaactgcaggtggctcatccacagcccgtgaaggggctacaagctgtagtgccagtgggatcagggcaggtgggga

SEQ ID NO: 759585 - DNA, 120 bp, Artificial Sequence
  ENSG00000214655_38 (sequence is synthesized)
agctgggcggggtatgcctgagggtagagggggcccagggactgagccggttacagtggcagcggcagcagtgacagcagcagccacagtggtgcccgtcatatcggtggggtctagttt

SEQ ID NO: 759586 - DNA, 120 bp, Artificial Sequence
  ENSG00000214655_39 (sequence is synthesized)
atacccgggtccaggactggggcatggccactcccctggcctgcacccctacactgctctacagccccacctgccctgtagccctcagtatctcactcacccagctcaccctgcccaccc

SEQ ID NO: 759587 - DNA, 120 bp, Artificial Sequence
  ENSG00000214655_40 (sequence is synthesized)
catgcctcacatgccccggcctgccgtcttccctgtgcccagctctgcatacccacagggtgtgcatcctgcattcctaggggctcagtacccttattcagtgactcctccctcacttgc

SEQ ID NO: 759588 - DNA, 120 bp, Artificial Sequence
  ENSG00000214655_41 (sequence is synthesized)
tgccactgctgtgtctttccccgttccttccatggcacccatcacagtacatccctaccacacagagccagggcttccactgcccaccagtgtggcctgtgagttgtggggccagggaac

SEQ ID NO: 759589 - DNA, 120 bp, Artificial Sequence
  ENSG00000214655_42 (sequence is synthesized)
agtgagcagtgtccatccagcatccacgtttccagccatccaaggtgcctcactgcctgccctgaccacacagcccagccctctggtgagcggaggttttccaccgcccgaggaggagac

SEQ ID NO: 759590 - DNA, 120 bp, Artificial Sequence
  ENSG00000214655_43 (sequence is synthesized)
acacagtcagccagtcaatccccacagcctgcaccacctgcatgctgcctaccgtgtcggaatgctggcactggagatgctgggtcgccgggcacacaacgatcaccccaacaacttctc

SEQ ID NO: 759591 - DNA, 120 bp, Artificial Sequence
  ENSG00000214655_44 (sequence is synthesized)
ccgctcccccccctacactgatgatgtcaaatggttgctggggctggcagcaaagctgggagtgaactacgtgcaccagttctgtgtgggggcagccaagggggtgctgagcccgtttgt

SEQ ID NO: 759592 - DNA, 120 bp, Artificial Sequence
  ENSG00000214655_45 (sequence is synthesized)
gctgcaggagatcgtcatggagacgctgcagcggctgagtcccgctcatgcccacaaccacctgcgtgccccggccttccaccaactggtgcagcgctgccagcaggcatacatgcagta

SEQ ID NO: 759593 - DNA, 120 bp, Artificial Sequence
  ENSG00000214655_46 (sequence is synthesized)
catccaccaccgcttgattcacctgactcctgcggactacgacgactttgtgaatgcgatccggagtgcccgcagcgccttctgcctgacgcccatgggcatgatgcagttcaacgacat

SEQ ID NO: 759594 - DNA, 120 bp, Artificial Sequence
  ENSG00000214655_47 (sequence is synthesized)
cctacagaacctcaagcgcagcaaacagaccaaggagctgtggcagcgggtctcactcgagatggccaccttctccccctgagtctttcacccttagggtcctatacagggacccaggcc

SEQ ID NO: 759595 - DNA, 120 bp, Artificial Sequence
  ENSG00000214655_48 (sequence is synthesized)
tgtggctatgggggcccctcacacagggggagtgaaacttggctggacagatcatcctcactcagttccctggtagcacagactgacagctgctcttgggctatagcttggggccaagat

SEQ ID NO: 759596 - DNA, 120 bp, Artificial Sequence
  ENSG00000214655_49 (sequence is synthesized)
gtctcacaccctagaagcctagggctgggggagacagccctgtctgggagggggcgttgggtggcctctggtatttatttggcatttataaatatataaactccttttttactctagtcg

SEQ ID NO: 759597 - DNA, 120 bp, Artificial Sequence
  ENSG00000214655_50 (sequence is synthesized)
ttcctagctcttgctcagagttgaggccttggtcgggtatgtgtgcgtgcgcggggggcggagggttacctcagctcctggggtggagggaggctctctgccaggccagagctgagatct

SEQ ID NO: 759598 - DNA, 120 bp, Artificial Sequence
  ENSG00000214655_51 (sequence is synthesized)
gtaagttgggtccctagggcagaggtggccacccccgtctcatgcccctccccctgccccccaggagtgaactacgtgcaccagttctgtgtgggggcagccaagggggtgctgagcccg

SEQ ID NO: 759599 - DNA, 120 bp, Artificial Sequence
  ENSG00000214655_52 (sequence is synthesized)
gtgtaccctgaagtgttgtttgaggttgctcaccagtggttctggctgtatgagcaaactgcaggtggctcatccacagcccgtgaaggggctacaaccccacctgccctgtagccctca

SEQ ID NO: 759600 - DNA, 120 bp, Artificial Sequence
  ENSG00000214655_53 (sequence is synthesized)
cttgttgtgaagggctgtatggtaatgggaaggtcaggatgacatgtgtgagccaactagtgcctgtaagacaggaattcagggcaaaaatgtgtgctatatggctgggcgtggtggccc

SEQ ID NO: 759601 - DNA, 120 bp, Artificial Sequence
  ENSG00000214655_54 (sequence is synthesized)
atgcttgtaatcgcagcgctttgggaggctgaagcaggaggattgtttgagctcaggagttcatgaccagcctgggcaacctagcaagacctcatctctacttaaaaaaaaaaaaaaaaa

SEQ ID NO: 759602 - DNA, 120 bp, Artificial Sequence
  ENSG00000214655_55 (sequence is synthesized)
actgcactccagcctggaggacagagcgagactctatctcaaaaaaaacatgtcaggatagcagcttgtgggggtgaagcacgacagcaacatcctaatcaagtttggcatcttcccctt

SEQ ID NO: 759603 - DNA, 120 bp, Artificial Sequence
  ENSG00000214655_56 (sequence is synthesized)
aaggggagctgtccccggccgggagctgtccccgactgggagctgtcccaagcttagaacagacttcagaactcgcttttccggccttcctggggtgggctggcttctccacacctgtgt

SEQ ID NO: 759604 - DNA, 120 bp, Artificial Sequence
  ENSG00000214655_57 (sequence is synthesized)
gtgtgtgtgtgcgcgcgcgcgcgtgcgcgcgctgtgacagggagatcctgtggacagaaagtaaatctttcgtcactcctttgccttagagaggggataagggagaagaatcttgtcttt

SEQ ID NO: 759605 - DNA, 120 bp, Artificial Sequence
  ENSG00000214655_58 (sequence is synthesized)
gaagaatcttgtctttgacttgggaatacttaagtgagttcagtctgaggcataccggaaagtagaggaagagaatgtgggtagggggctgattgtgaagaagtgaccacttgtggcttg

SEQ ID NO: 759606 - DNA, 120 bp, Artificial Sequence
  ENSG00000214655_59 (sequence is synthesized)
tcaccgcattgcaaagtgcattgggagcttcttgcttcggggtgatgatctctgatcccagaagcaccaagaagggatcctacccagaggaaaatagaggtgaactggcctgccagagag

SEQ ID NO: 759607 - DNA, 120 bp, Artificial Sequence
  ENSG00000214681_0 (sequence is synthesized)
actcttcctgttggagtcctgatcggaggagtgcgggccggagggtgatgggaccatctagcccctaaccatgggcccagaagagaagaccatcatgacagaaaggtctgcagctgtttt

SEQ ID NO: 759608 - DNA, 120 bp, Artificial Sequence
  ENSG00000214681_1 (sequence is synthesized)
catccaggcctggtggcggggcatgctggtgcgacgcacactgctgcatgcagccctcagggcttggatcattcagtgctggtggaggcaggtgctggagaagctgctggcaaagaggcg

SEQ ID NO: 759609 - DNA, 120 bp, Artificial Sequence
  ENSG00000214681_2 (sequence is synthesized)
ctgcagtcctgggtccgcatgtggtgtgtccgccagcgttactgtcgtttgctcaacgctgtccgcatcatccaggtctattggcgctggcacagctgccattcccgtgtctttattgag

SEQ ID NO: 759610 - DNA, 120 bp, Artificial Sequence
  ENSG00000214681_3 (sequence is synthesized)
ggccactatgaactcaaagaaaaccaacttaatattcaacttgaaatctctttgggcttacaggcttgtaaggtgcaacaatgcataccccttccattaaaagaatgaccaggtctgcta

SEQ ID NO: 759611 - DNA, 120 bp, Artificial Sequence
  ENSG00000214686_0 (sequence is synthesized)
ccctaaggatcaaggccatggacacgcaaaatttagagaagacagccataaagattcagtcatggtggcgtggaaacatggtgcgccggacgttactgcaggcagcactcagagcctggg

SEQ ID NO: 759612 - DNA, 120 bp, Artificial Sequence
  ENSG00000214686_1 (sequence is synthesized)
gtgcaggcacaggttcgaatgtggcaggcccgcaggcggttcctccaggcacgccaagcggcctgcatcatccagtctcactggcgctggcatgccagccaaacccgaggcctgatccgg

SEQ ID NO: 759613 - DNA, 120 bp, Artificial Sequence
  ENSG00000214686_2 (sequence is synthesized)
ggccactatgaggtcagagccagccggctggagcttgacatcgaaatcctcatgacctagggcgctgacagagccaaggaggctggatctctcttccaataaagacccttactgaccata

SEQ ID NO: 759614 - DNA, 120 bp, Artificial Sequence
  ENSG00000214688_0 (sequence is synthesized)
ctcgggcttcttgtggagaggcaggagagtgaaggcctgccgcgggtgaggcctccagtccacggacggccacaggccactgcggctggaatcacaggagccatgagcacagagggcccc

SEQ ID NO: 759615 - DNA, 120 bp, Artificial Sequence
  ENSG00000214688_1 (sequence is synthesized)
agcctcgccagctccccagccatcagccccctcgcctttctctcagctcccgtcactcccgggacccttgcagaggcaactgaccccctccccatgctcatcgccctggcctgcatcttc

SEQ ID NO: 759616 - DNA, 120 bp, Artificial Sequence
  ENSG00000214688_2 (sequence is synthesized)
ctcctgctggccacctgtctgctgttcatgacgctctgcaagccggccgcgctggacccgagccgccgcagggctcacgagtgcatgccccaccaccctgggagccccagtgagccccag

SEQ ID NO: 759617 - DNA, 120 bp, Artificial Sequence
  ENSG00000214688_3 (sequence is synthesized)
ctccggctctggaagcgcctgggctccttgcgcctctccctgcacagcttccgccatggccggcccaccgtccctcgacagcccctgccgggccccgaggacaaccgcagccactgtgac

SEQ ID NO: 759618 - DNA, 120 bp, Artificial Sequence
  ENSG00000214688_4 (sequence is synthesized)
tacatggaatctaccaagatgtaatggggtgtccacaaacatgcccccacatccccctaggtctacctgtagatcctcctgcttcagagaccggtgctgcaggctgcaggaagacagtgg

SEQ ID NO: 759619 - DNA, 120 bp, Artificial Sequence
  ENSG00000214688_5 (sequence is synthesized)
cccaagcagtctgggacacacactcaccccccgaagctccttgcatgcccaggccagcgccctttcccaaagatgatcctcagaagagcaccttcctctctgcagaccccctcgctgctg

SEQ ID NO: 759620 - DNA, 120 bp, Artificial Sequence
  ENSG00000214688_6 (sequence is synthesized)
cttgatgaaagacttctggtcaagagatgtgcactcgtggtcatctgggcctttggcctgaggctccacagggtacaacctggggctcgtaaccacctcctagaagcagcaccctcgctc

SEQ ID NO: 759621 - DNA, 120 bp, Artificial Sequence
  ENSG00000214688_7 (sequence is synthesized)
gccacagaagccttgccctccaggtgccaaagcccagcatggagaagttgccaaatggcaaaggttccctttagtcaagtgaaatgctcagcctacaccggggccaagacactgtcctgg

SEQ ID NO: 759622 - DNA, 120 bp, Artificial Sequence
  ENSG00000214688_8 (sequence is synthesized)
catctgtgctggcccagtgctggggcaaaacctcggggctctcttccttgggtttcccgggtgctgccagcatctgcctggtgccctgtgggagcagctgcctccctcctggtggaacag

SEQ ID NO: 759623 - DNA, 120 bp, Artificial Sequence
  ENSG00000214688_9 (sequence is synthesized)
atgcctgggtgccagctgggaggaggagcaaacagggctctccaagcatggtcttggcagccgtcttggtggcccctcttcagggcacccacgttgggatcaatcaggaagggattgaag

SEQ ID NO: 759624 - DNA, 120 bp, Artificial Sequence
  ENSG00000214688_10 (sequence is synthesized)
atgatcgaggaggctcccttcagaggccagggcgggtgctgtgacagagtggcaagaggcagggcatttccagcagctggaggtgatgccacctggactcggaggaggacagctcacagc

SEQ ID NO: 759625 - DNA, 120 bp, Artificial Sequence
  ENSG00000214688_11 (sequence is synthesized)
agctccacacctcacccagggaaagcggcagcctccccgagggtgggatggtctggacctctccaggacagctgtggggtcccaagtcctgcccacactagggatgctatctgtggtttt

SEQ ID NO: 759626 - DNA, 120 bp, Artificial Sequence
  ENSG00000214688_12 (sequence is synthesized)
ggtgagtgctttgctgatgacccgtcaaagcagtcccaccccaggatgggcttctcagaatcccaaacccttgacctctcctcacaacgcgagggttaaacactttggtcaggtcccaaa

SEQ ID NO: 759627 - DNA, 120 bp, Artificial Sequence
  ENSG00000214688_13 (sequence is synthesized)
tttgaagggtgggcagagggaggacctgggctgcccagctcctgtcccagtcagctggccaggatcccaccacaaagctgccccacccccatcctgctgtgacccacagtgcagccagcc

SEQ ID NO: 759628 - DNA, 120 bp, Artificial Sequence
  ENSG00000214688_14 (sequence is synthesized)
acgtctccccaaggagtgagctctggcttgccactccccagctccaaaaccttcactggctccctaatgccaaatggatatagccaaagctcctcagcgcagtgtgcagtgccctctggg

SEQ ID NO: 759629 - DNA, 120 bp, Artificial Sequence
  ENSG00000214688_15 (sequence is synthesized)
agctggctccaattaatctttctagcctcatcttgatccaaaactccaggaaaactgaaagacctgtcacccactaactgtggcttatgcttcacacacacccactctgtgaagccctcc

SEQ ID NO: 759630 - DNA, 120 bp, Artificial Sequence
  ENSG00000214688_16 (sequence is synthesized)
tgcctggagccgcccctactgtctcctacctctcttggggaggaaaaggaacattctcttggcagcatgggtcctttttgtctatgtcttctctttcctaccagcttgggagcttgcaga

SEQ ID NO: 759631 - DNA, 120 bp, Artificial Sequence
  ENSG00000214688_17 (sequence is synthesized)
gagccagacattgtccagcccctcactttgactccccagttctgtgcacagaagtatgaggcttctgtgtacagagtgaagcgtggcccagcctgggtgtgtccccaccctctgaggcag

SEQ ID NO: 759632 - DNA, 120 bp, Artificial Sequence
  ENSG00000214688_18 (sequence is synthesized)
gagtcttggtggaagctggcataacacagagcctcatcttccctcagatgactctagaaagatttctctccaagcaggctctattggagaagcccactgtcccttccttccaagtcaatc

SEQ ID NO: 759633 - DNA, 120 bp, Artificial Sequence
  ENSG00000214688_19 (sequence is synthesized)
tggagaagtcatcctgagacgctgcatttctccctgagaaatgggagaactcagggctgccctatattaactcgctggctctaggatttcagtaagagtagtattgtgtaaatagaaacc

SEQ ID NO: 759634 - DNA, 120 bp, Artificial Sequence
  ENSG00000214688_20 (sequence is synthesized)
aagtctttgggtttagaaagtggggcaggcctcctccctaagggttttgttccttcctcccttcctgctcagtaacctcttcctggtttgcttcccctggggcctccctgcaaatcctag

SEQ ID NO: 759635 - DNA, 120 bp, Artificial Sequence
  ENSG00000214688_21 (sequence is synthesized)
gctggattcagcctgtagccatccacctcaccagcaggccctgctggccactaggcactgtcttcctggaggttggggtgggggttgaggctgccctgaggcctgaagaaggaaaagtcc

SEQ ID NO: 759636 - DNA, 120 bp, Artificial Sequence
  ENSG00000214688_22 (sequence is synthesized)
aggagggggagggctctcaattgggtttcaggcaccaggccaggggggtatgctccaagtcctcacaagctgaggccctgatcgagagaaccctctacttcctccttctggagctagcca

SEQ ID NO: 759637 - DNA, 120 bp, Artificial Sequence
  ENSG00000214688_23 (sequence is synthesized)
ccacactctcgcaaatcctcagggctttctgggctctctgtgtttctgggagtcagctccctgctccccagccctttcctgcccgcctcctggtcccgatgcagggaggggagcattgcc

SEQ ID NO: 759638 - DNA, 120 bp, Artificial Sequence
  ENSG00000214688_24 (sequence is synthesized)
agcctcccacgcttctgtccctcccaagcccgggagcctgccccagtgggcaggcccagattccctgtttggctcagcctccgagtcggaaaccccatagttggtaaagagactcattca

SEQ ID NO: 759639 - DNA, 120 bp, Artificial Sequence
  ENSG00000214688_25 (sequence is synthesized)
ctccgggcctccctccccacccagcaactgaggcctctgggcagaggtgtgggtgcacacccaaattgttttcagggtcctcccttctctccctctgagccttggagctgttgcgcctgc

SEQ ID NO: 759640 - DNA, 120 bp, Artificial Sequence
  ENSG00000214688_26 (sequence is synthesized)
tccctgggcaaaggagccctttcttcttgtgcctgtttacttcccaagaggggagcctcggccaagggctctgtgaaagcagctctgttctgggccttgctgggccctggctctcttctc

SEQ ID NO: 759641 - DNA, 120 bp, Artificial Sequence
  ENSG00000214688_27 (sequence is synthesized)
aactcctttccgggaaattgtgacgtctctttctccccgctactctgaaaggcccttctgggtggggcgggagatatgcagggggaggccaagtcttcctcctgtttgtggggagccaga

SEQ ID NO: 759642 - DNA, 120 bp, Artificial Sequence
  ENSG00000214688_28 (sequence is synthesized)
gccctatcctcagctctgcaacctgggggcccacactccctgggatgggagagggcctgggtccccctttccccacagcaccttccagagcagcggacccaccctgggcccccacctgct

SEQ ID NO: 759643 - DNA, 120 bp, Artificial Sequence
  ENSG00000214688_29 (sequence is synthesized)
tccgcctctggtgccactgagcatgtgccctcagggccgtgtgtggctccgcctcccccagcccaccacctgccccagaggccacgggccacctgcctgcaagatgctgtggccttcagg

SEQ ID NO: 759644 - DNA, 120 bp, Artificial Sequence
  ENSG00000214688_30 (sequence is synthesized)
gatgtcctcagggacgctggcctcatagctgctctgcagaaagatgggccggttgtcattcacatccaggacagtgacgaacacggtggctgtgcccgtgtgtcgcttccctacagggcc

SEQ ID NO: 759645 - DNA, 120 bp, Artificial Sequence
  ENSG00000214688_31 (sequence is synthesized)
gttgtctgtgggagttgaaggaagacaggtgttagcagctgcctgagagaggggcacacttcctgtgactttgcacactcccgggcaccggccagagaggtgccctgttccgccccatct

SEQ ID NO: 759646 - DNA, 120 bp, Artificial Sequence
  ENSG00000214688_32 (sequence is synthesized)
gccctagcctttgcaaggggtgacttcctttttagcttaggaataacactaacagtatcaaatacttagataacaccatgtgccagccattcttctaacccattcagtcctcacagcaac

SEQ ID NO: 759647 - DNA, 120 bp, Artificial Sequence
  ENSG00000214688_33 (sequence is synthesized)
cccatgaagcagacactttactgtcatccccattttacagaggaggtaactgaggcactcaagtggattgaatgatggctcccaaaaaaaacagacccatgttaaacccctgggaacctg

SEQ ID NO: 759648 - DNA, 120 bp, Artificial Sequence
  ENSG00000214688_34 (sequence is synthesized)
tgaagattaatttatttgggaaaagggcctttgaaaatgtaattacgttaaggatcttgagaagtgatcatcctgggtgagctgggtggcccataaacccaatggcaagtgtccttacaa

SEQ ID NO: 759649 - DNA, 120 bp, Artificial Sequence
  ENSG00000214688_35 (sequence is synthesized)
gagaaaggcagagggacatttgagacagagaggaggaggccacatgcagatggaggcagaggctggagttatgctgccacaagccaccgaatgcctagcgactccagaaactgggacggt

SEQ ID NO: 759650 - DNA, 120 bp, Artificial Sequence
  ENSG00000214688_36 (sequence is synthesized)
caaggactgattctctctagagcctttggaggaagcgtgaccctgccgacaccttaatttctaacttctggccttgagaaccaggagagaatacacttctgctgttttaagtttgtggta

SEQ ID NO: 759651 - DNA, 120 bp, Artificial Sequence
  ENSG00000214688_37 (sequence is synthesized)
gtttgtcgtggcaaatttaggatgcagatacaggtactaagagcaaaaagccaactgctgtcagggactggcgggtatagcacctgggtcaaacacctggatgggccccgctggaagggc

SEQ ID NO: 759652 - DNA, 120 bp, Artificial Sequence
  ENSG00000214688_38 (sequence is synthesized)
agctgtcctccactccagtccacagcggacaggcagaatgtgggcccagagacaccagatcttctgatttctcatgagaaattgaacatctgagcttttaaataaaatctcctgatcttt

SEQ ID NO: 759653 - DNA, 120 bp, Artificial Sequence
  ENSG00000214688_39 (sequence is synthesized)
actctgctggccaggctgaccgagggctgcagggcacagcagagcctggcagggctggggtcacaggcactgcccagggctccttgggcctcccttccacagctgagaagacctctccac

SEQ ID NO: 759654 - DNA, 120 bp, Artificial Sequence
  ENSG00000214694_0 (sequence is synthesized)
gtgcagggaagaggaggtggcctgagccaggacgatgaggatgcaatgttgaagaataagctggagaagagaagtaaccggcactatggaaaaaaccaaaacaaagcaaggagagaatga

SEQ ID NO: 759655 - DNA, 120 bp, Artificial Sequence
  ENSG00000214694_1 (sequence is synthesized)
acatatgccggtgaataatccttccacgcagatttaccagttgcaggccctagcctccgaactcaaaactggtttcacagaagcaatgcaagaactgtcaagaattcaacatggagaata

SEQ ID NO: 759656 - DNA, 120 bp, Artificial Sequence
  ENSG00000214694_2 (sequence is synthesized)
tgctttggaagaaaaggttaagagctgcagatgttccatggaagaaaaagttactgagatgaagaattcattaaactatttcaaggaagagctgagcaatgccatgtcgatgatccaagc

SEQ ID NO: 759657 - DNA, 120 bp, Artificial Sequence
  ENSG00000214694_3 (sequence is synthesized)
catcacttccaaacaagaagaaatgcaacagaaaatcgagcagcttcaacaggagaagcgaagagaatctcgaaaagttaaagccaagaaaactcaaaaagaagagcacagctcacaggc

SEQ ID NO: 759658 - DNA, 120 bp, Artificial Sequence
  ENSG00000214694_4 (sequence is synthesized)
cgggcctgcccaagcacaaggaagtccttttcgttctatcaatatccctgagcctgttcttccaagcgaagactttaccaaccttttgccttctcaggcctacgagaaagcccaagagtc

SEQ ID NO: 759659 - DNA, 120 bp, Artificial Sequence
  ENSG00000214694_5 (sequence is synthesized)
cagatctgttcatgtaggagacagtaatgtaaaaggaatgatgggtcctggagtgaacccaacaactccagaagcagaagaaaacctcaagtcttgcctctcggctgatatccagtccaa

SEQ ID NO: 759660 - DNA, 120 bp, Artificial Sequence
  ENSG00000214694_6 (sequence is synthesized)
gggccatctcccatctggcatgtggaggcagcctaaggatggtaaagaatggggtgaagaatacgtcacaaaagaccacccagataaactcaaggaggctggccagggtagacacagctc

SEQ ID NO: 759661 - DNA, 120 bp, Artificial Sequence
  ENSG00000214694_7 (sequence is synthesized)
cttggaaaacgttttatgtgaaacctccttagctgctaaaagacagactgtggccctggaactgcttgaatctgaaagaaaatatgtcattaacatctctctgatcttgaagataaaagc

SEQ ID NO: 759662 - DNA, 120 bp, Artificial Sequence
  ENSG00000214694_8 (sequence is synthesized)
cacattccaggggtcagatggaaagaggaattccaaagagagaagcctcttccctggctctttacggtacctcgtccagcagcacctggatctgcttcacgcactgcaggaaagggtcct

SEQ ID NO: 759663 - DNA, 120 bp, Artificial Sequence
  ENSG00000214694_9 (sequence is synthesized)
gaagtggccacgccaaggcgttcttggagatttattccttaagttaacaaatgacgagaataatttcttggattattatgttgcctacctaagggacctgcctgagtgcatctcattggt

SEQ ID NO: 759664 - DNA, 120 bp, Artificial Sequence
  ENSG00000214694_10 (sequence is synthesized)
tcatgttgtagtcctgaaagagggtgatgaagagattaaatctgacatctacacgttgttttttcacatagtccagcgcatccctgaatatctgatacatctgcagaacgtcctgaagtt

SEQ ID NO: 759665 - DNA, 120 bp, Artificial Sequence
  ENSG00000214694_11 (sequence is synthesized)
cacagagcaggagcaccctgactattatctactactggtgtgtgtccagcgcctccgagtatttatctcacactacaccctgctgtttcaatgcaatgaagatttgcttattcagaaacg

SEQ ID NO: 759666 - DNA, 120 bp, Artificial Sequence
  ENSG00000214694_12 (sequence is synthesized)
gaaaaagctcaagaagtcatccatggcgaagctgtacaaagggctggcttcccagtgtgccaatgctgggcaagatgcttcccccactgcaggtcctgaggctgtccgtgacactgggat

SEQ ID NO: 759667 - DNA, 120 bp, Artificial Sequence
  ENSG00000214694_13 (sequence is synthesized)
ccactcagaagagttgctgcaaccctacccttctgctcccagttctggccctgccatcacacatctgatgcccccagtgaagaaaagccaacagcagcaaagcctgatggagagcatgca

SEQ ID NO: 759668 - DNA, 120 bp, Artificial Sequence
  ENSG00000214694_14 (sequence is synthesized)
gcccgggaagcccagtgactgggagctggagggcaggaagcacgagcggcccgagagccttctggcaccgacgcagttctgcgcggccgagcaggacgtgaaggcgctggccgggcccct

SEQ ID NO: 759669 - DNA, 120 bp, Artificial Sequence
  ENSG00000214694_15 (sequence is synthesized)
gcaggccatcccggagatggacttcgagtcctctccggcggagccgctgggcaacgtggagcgctccctgcgcgccccggccgagctcctgcccgatgcccgcggcttcgtgcccgcggc

SEQ ID NO: 759670 - DNA, 120 bp, Artificial Sequence
  ENSG00000214694_16 (sequence is synthesized)
ctacgaagagttcgagtacggcggcgagatcttcgcgctgcccgcgccctacgacgaggagccgttccaggctccggccctcttcgagaactgctcgcctgcctcctccgagtccagcct

SEQ ID NO: 759671 - DNA, 120 bp, Artificial Sequence
  ENSG00000214694_17 (sequence is synthesized)
agcagcagcgcctacaaactggaggcggcggcgcaggcgcacggcaaggccaagccgctgagccgctctctcaaagagttcccgcgtgcgccgccagccgacggcgtggccccacgcctc

SEQ ID NO: 759672 - DNA, 120 bp, Artificial Sequence
  ENSG00000214694_18 (sequence is synthesized)
ggccgcgcgcccatcaaggccgagcgcgccgcgcaggcgcacggcccggccgccgccgccgtcgccgcccgcggcgcatccaggaccttcttcccccaacagaggtcccaaagcgaaaaa

SEQ ID NO: 759673 - DNA, 120 bp, Artificial Sequence
  ENSG00000214694_19 (sequence is synthesized)
caacagaggtcccaaagcgaaaaacagacctatttggaagtaaggagggagatgcatttagaagatactaccagattctgtcccaaagaagaaagagaaagtgaacaaacatctttcagc

SEQ ID NO: 759674 - DNA, 120 bp, Artificial Sequence
  ENSG00000214694_20 (sequence is synthesized)
gatcaaaatcccaggcaagaccagaaggggggctttcgcagctccttccgcaagctctttaaaaagaagtccagtggatcagaatacagggaaaaaactaatgagaatccctcaatggat

SEQ ID NO: 759675 - DNA, 120 bp, Artificial Sequence
  ENSG00000214694_21 (sequence is synthesized)
ccttcacccaccaaacaagatttcttcagaaaccgacttgctcttgcaaatgaccttgaccaaggaacagctgtgtaaaacatacttaaagttgtattgtcaagtggtaagatgaggata

SEQ ID NO: 759676 - DNA, 80 bp, Artificial Sequence
  ENSG00000214694_22 (sequence is synthesized)
cgatgtataaatccctgaggaaaactaatataaatacttacatatgaaactaaacatacaagacattgaagagatgaaga

SEQ ID NO: 759677 - DNA, 120 bp, Artificial Sequence
  ENSG00000214694_23 (sequence is synthesized)
tacaagacattgaagagatgaagattagtttctggttaagatctggctttttgaacctcaacactggggaaaagggaaatgaagacttttcacatcattacagaaaaacacaataaattt

SEQ ID NO: 759678 - DNA, 120 bp, Artificial Sequence
  ENSG00000214694_24 (sequence is synthesized)
ggaggaaaataaatgtttgtaagaatgaaaacttccaacttgaagtcattccccgagtataatactgagcatgttcatatttaacatggatttgaattttatgcttcctaggcatttaac

SEQ ID NO: 759679 - DNA, 120 bp, Artificial Sequence
  ENSG00000214694_25 (sequence is synthesized)
ttattaactcatccagtgttcttaaactaatatacactatgttaggggccagttctgtcttgcttcatgtcttccaaaaaccctaaggcaatatctaacatcccttaaggcaaaggatta

SEQ ID NO: 759680 - DNA, 120 bp, Artificial Sequence
  ENSG00000214694_26 (sequence is synthesized)
attaacagaactgtattttatatgttgcatatctgagttatggagaatttgtgcttaaaccatgattcagaaggttcaaagcttaaaaacacattgatctccaaacttgttctgtggtta

SEQ ID NO: 759681 - DNA, 120 bp, Artificial Sequence
  ENSG00000214694_27 (sequence is synthesized)
tggaaatcagtaaagggaacaaggatttctgtagaaactggggagagaggaaggcaaagaaacattttcccttgtgtgggttgagctgaggatggaaacagtccagtctgtgttttattg

SEQ ID NO: 759682 - DNA, 120 bp, Artificial Sequence
  ENSG00000214694_28 (sequence is synthesized)
agtactcagtattcaagacccactcgtgatcttgagtgtcacacacactcacaaccagatggactaggaaaaaagcagtgatttagccacatcttgttaaaaagactttctgcagcctga

SEQ ID NO: 759683 - DNA, 120 bp, Artificial Sequence
  ENSG00000214694_29 (sequence is synthesized)
aaagaaggtggcaatagcaccaaaacttcaatggctcacacacagcagttgctacaaacagcaggtcaaagtgaaaattcaggattgcagcacttgactgttttcctattttgtaaagaa

SEQ ID NO: 759684 - DNA, 120 bp, Artificial Sequence
  ENSG00000214694_30 (sequence is synthesized)
accaagctcttaaagcttagaggaatcagattgcaacgaggcctgcctggctctggggtgataaaatgtgctctgtttccacatggatatgtgcaagatggtcagcatccttgatatgcc

SEQ ID NO: 759685 - DNA, 120 bp, Artificial Sequence
  ENSG00000214694_31 (sequence is synthesized)
ccaaacatcagatttataatagaaaaaaaattgggtttaaacaatttgtctttattcccaggcagttcggtatagtaaattaggggtatttggtttctgttcattcaaaatcttggtact

SEQ ID NO: 759686 - DNA, 120 bp, Artificial Sequence
  ENSG00000214694_32 (sequence is synthesized)
caaactggtgtcttcagaagctgttcctctattgaagcgtttgttgataaaataggcaaaggttcacatgtaagtgttgcaagttttcttctccttgtctgatgacaaattaggaactca

SEQ ID NO: 759687 - DNA, 120 bp, Artificial Sequence
  ENSG00000214694_33 (sequence is synthesized)
cctactgcgttttgaatagtagttgtctggaacacataaaggatcactgccaagttttttgagtttccaggatctaagtttaagccaagatttttgtttcccagaagtttatgaattcat

SEQ ID NO: 759688 - DNA, 120 bp, Artificial Sequence
  ENSG00000214694_34 (sequence is synthesized)
ttgaaattagatttttctcttattatgtggccggcagtgcttgcaagcacaacgccaaatcgactggacgtggaaagtgaaatactacagaagtcacaatctattaaataaaatgttaac

SEQ ID NO: 759689 - DNA, 120 bp, Artificial Sequence
  ENSG00000214694_35 (sequence is synthesized)
tcatttaaaagcctggttagcatactacggtctcgtttcaggggaagtcaagcctctctactgcttctttttataacctttaagttaattcagaacccagataagccttgatctgaggat

SEQ ID NO: 759690 - DNA, 120 bp, Artificial Sequence
  ENSG00000214694_36 (sequence is synthesized)
ttctgacatgagaaaactggagaaggtgcagagctggaatggattacccaagtggcttaagcaagataaaggaagaatgcaccctcgactggggactcaaatggactgatctgagttgtt

SEQ ID NO: 759691 - DNA, 120 bp, Artificial Sequence
  ENSG00000214694_37 (sequence is synthesized)
gactattgattggctttggtctcttttgtggtggttgagattatagtatctctgcaatctgattactgtacgaatttctgcattctaccaaatgtagcatatatgtgtggttggcttcaa

SEQ ID NO: 759692 - DNA, 120 bp, Artificial Sequence
  ENSG00000214694_38 (sequence is synthesized)
aaaaatgggaacgcaactggtgaagatttctgtggtccttggggctggtggtgacatcaaagctttcctattttcagattttaggtccagtggatcagaatacagggaaaaaactaatga

SEQ ID NO: 759693 - DNA, 120 bp, Artificial Sequence
  ENSG00000214694_39 (sequence is synthesized)
ggagatagagaccttcacagcaaactttatctgagacatctctctatcttttttggcataatatgtgttcagagagccagtttgccactgtacaacctgagaactgttatttccattctg

SEQ ID NO: 759694 - DNA, 120 bp, Artificial Sequence
  ENSG00000214694_40 (sequence is synthesized)
tcccagttctggccctgccatcacgaacgtaatttgtttctgagtgtgaagatccacaagtcgaacagaagttgagttttccattattccgtatgactctgctagggcaagcaagggaga

SEQ ID NO: 759695 - DNA, 120 bp, Artificial Sequence
  ENSG00000214694_41 (sequence is synthesized)
cactagtaaatgaggtctgtagattttcaggaggcttgtttctcaaacaaaagaaaaattcaaggtccaatggtgccacttacagtaatttccagcaaattgaattaacttttcatgcat

SEQ ID NO: 759696 - DNA, 120 bp, Artificial Sequence
  ENSG00000214694_42 (sequence is synthesized)
gaagggcttgtttggctggtggccccacacacccagaatgctgcttcgggatgaagctaggcatggagccagatgcagcagaaaacctgagaaagggttctcttccctctgaggctggga

SEQ ID NO: 759697 - DNA, 120 bp, Artificial Sequence
  ENSG00000214694_43 (sequence is synthesized)
gggccgaaggctcatacccacaaggattcaaaagggagagtcaagttgacatcattaaaaaaatcctgaaaaatgcccaaaatatttggggaaaagaatgaccttctgattgtttccatc

SEQ ID NO: 759698 - DNA, 120 bp, Artificial Sequence
  ENSG00000214700_0 (sequence is synthesized)
aagttgagagaaatttgtgcctttgaactccatggcatattcatcctctaacagcgacatagaggacgacagctccaaatccaattccaacctgagcctctctgtgggctatttcccctg

SEQ ID NO: 759699 - DNA, 120 bp, Artificial Sequence
  ENSG00000214700_1 (sequence is synthesized)
tgaggacaccccctgtgaggacacaacctcctgggaagatgcaccttccaagggtccttccatccactttctgcctcccgtccaaggggcatgggggactgaaaggatagggagacgcat

SEQ ID NO: 759700 - DNA, 120 bp, Artificial Sequence
  ENSG00000214700_2 (sequence is synthesized)
gaagagacaagaccaaattcaggatgaaccagagcagttttgcaaactaagcatcttcctggcctgggacgtggacattggctccgataacacagactcaagagctaataggcttctaaa

SEQ ID NO: 759701 - DNA, 120 bp, Artificial Sequence
  ENSG00000214700_3 (sequence is synthesized)
cgctgtatttcctgaaactgctcagcaagatttccagctatccagcggctcccctccggaaatggttcagatgataagccaggcaaccgccagccaaaggacaagcgctccagagatctc

SEQ ID NO: 759702 - DNA, 120 bp, Artificial Sequence
  ENSG00000214700_4 (sequence is synthesized)
ctcaatcctgtcagagcagccagagaaggatgacactccttcacacacacaggcccagtgctgcctgaactttgggtgggccttcagctggctgaggcagcgtatcctcccctctctgct

SEQ ID NO: 759703 - DNA, 120 bp, Artificial Sequence
  ENSG00000214700_5 (sequence is synthesized)
gaggagggatcaccctgtgaatgccaccaaaagtccccatcggtcagcaccaacgaaaagactctttcacagaggcaagagaattcaacctcaagaaacccttgaattaggacatcccat

SEQ ID NO: 759704 - DNA, 120 bp, Artificial Sequence
  ENSG00000214700_6 (sequence is synthesized)
atagacagatttttaaactttttggaaagtttaaaataatccataataaggattccattaataatccccatcagtttgttttttcctcaataaacaaaataaatgctcttgttaccccac

SEQ ID NO: 759705 - DNA, 120 bp, Artificial Sequence
  ENSG00000214706_0 (sequence is synthesized)
atgggccccaaaaaatcttggcgaagtcacttttttccactgcctgaggtttggctgttgctcctgttatcccaagctctaagcccttcccatggtccccagacccaggcaggggtaggt

SEQ ID NO: 759706 - DNA, 120 bp, Artificial Sequence
  ENSG00000214706_1 (sequence is synthesized)
ctcgtctggagtgtcccgctgccaagtgccctgagaagccagtcctgccttggtgctccactgagggacgcttcggagttaaccaccgtgcacttgttcccgacgcggggctggggcgcg

SEQ ID NO: 759707 - DNA, 120 bp, Artificial Sequence
  ENSG00000214706_2 (sequence is synthesized)
cgcagggcattgtgggtgcatagttcagccagcgcgtcgtcggctgctagccgccgtcgcctgcgcgctcaggcctctgggattagtagttttagcctcgtggatggcggggcgcctcgc

SEQ ID NO: 759708 - DNA, 120 bp, Artificial Sequence
  ENSG00000214706_3 (sequence is synthesized)
gaagatggtggcgcgcgtggcgtgtggctcccgtcgtctggccaagtctcagcgcagcgcaccggccggcgtctcgttggcctggagcccacacccaccgggtccctgaccccgcgcccc

SEQ ID NO: 759709 - DNA, 120 bp, Artificial Sequence
  ENSG00000214706_4 (sequence is synthesized)
ccgcgcccggttcccggcatgcctcgcgcccgtaagggcaacacgctccggaagggtggtcagcgccgtggaggaggtgcccggagcagtgcccaagctgactcgggttccagtgacgat

SEQ ID NO: 759710 - DNA, 120 bp, Artificial Sequence
  ENSG00000214706_5 (sequence is synthesized)
gaggcagccagtgaggcccgcagcaccgccagtgaatgccccagccttctcagcaccactgcagaggacagccttgggggggatgtcgtggatgagcagggccagcaggaagaccttgag

SEQ ID NO: 759711 - DNA, 120 bp, Artificial Sequence
  ENSG00000214706_6 (sequence is synthesized)
gaaaagctgaaggagtatgtggactgtctcacagacaagagtgccaagacccggcagggtgctcttgagagcctgcgcctggccctagcgtcccgcctactccccgacttcttgctggag

SEQ ID NO: 759712 - DNA, 120 bp, Artificial Sequence
  ENSG00000214706_7 (sequence is synthesized)
cgccgcctcacgctagccgatgccctggaaaagtgcctcaagaaagggaagggcgaggaacaagccctggctgctgctgtgctaggcctgctctgcgtgcagctgggccctggacctaag

SEQ ID NO: 759713 - DNA, 120 bp, Artificial Sequence
  ENSG00000214706_8 (sequence is synthesized)
ggtgaggagctgtttcacagcctgcagcctctgctggtctctgtgctcagtgacagcacagctagccctgctgcccggctccactgtgcttctgcccttggcctgggctgctacgtggct

SEQ ID NO: 759714 - DNA, 120 bp, Artificial Sequence
  ENSG00000214706_9 (sequence is synthesized)
gcctgctctctgctgccctgcaggcctgggcattgctgctcaccatctgccctagcacccaaatcagccacatccttgacaggcagctgccccggctgccccagctcttgtccagtgaaa

SEQ ID NO: 759715 - DNA, 120 bp, Artificial Sequence
  ENSG00000214706_10 (sequence is synthesized)
gtgtgaacctgcggatcgctgccggtgaaaccattgcactgctctttgagcttgcccgggaccttgaggaggagtttgtttacgaggacatggaggccctctgcagtgtcctgcgcactc

SEQ ID NO: 759716 - DNA, 120 bp, Artificial Sequence
  ENSG00000214706_11 (sequence is synthesized)
tggccactgacagtaacaagtaccgtgccaaggctgatcgtcggcgccagcgctctactttccgcgccgtgctgcactccgtggagggcggtgaatgcgaagaagagatagtgcgcttcg

SEQ ID NO: 759717 - DNA, 120 bp, Artificial Sequence
  ENSG00000214706_12 (sequence is synthesized)
gctttgaggtgctctacatggacagctgggctcggcaccggatctacgctgccttcaaggaagtgctgggttcgggcatgcaccaccacctccagaacaatgagctactccgtgacatct

SEQ ID NO: 759718 - DNA, 120 bp, Artificial Sequence
  ENSG00000214706_13 (sequence is synthesized)
ttggcctgggccctgtgctgttgctggatgccactgccctgaaggcctgcaaggttccacgctttgagaagcacctgtacaatgctgctgccttcaaagcccggaccaaggctcgaagcc

SEQ ID NO: 759719 - DNA, 120 bp, Artificial Sequence
  ENSG00000214706_14 (sequence is synthesized)
gtgtgcgggacaagcgggcagacatcctgtgaagcaggacctgctgaagaggagactttctatgcccttggtccgtatttttaacagaagacagtgcaacaactggtctccaccagtatt

SEQ ID NO: 759720 - DNA, 120 bp, Artificial Sequence
  ENSG00000214706_15 (sequence is synthesized)
tgtcactttattttttttaatgacaaaaccaaaaacagacatggggtgggtagctgggggcccggacacttgggaccctgacccctttgtccctgcactcagccctgtggccccttcctg

SEQ ID NO: 759721 - DNA, 120 bp, Artificial Sequence
  ENSG00000214706_16 (sequence is synthesized)
tcctgtctcaggccaggctaaatatgtgccttcctcagggctgtggggcaggcactagggggcctttcccttcctttcctttctcaggccttgctcccccaggatgacccactcttaggg

SEQ ID NO: 759722 - DNA, 120 bp, Artificial Sequence
  ENSG00000214706_17 (sequence is synthesized)
gggtggtggcatctggacaaatgccaccacagcaggtggggtggcaaagctacctggaatggatttgtgtgctgatttttaaggattattacagataattaaacagaacggtcagccttc

SEQ ID NO: 759723 - DNA, 120 bp, Artificial Sequence
  ENSG00000214706_18 (sequence is synthesized)
gaccttgaggtgcgagggacaaggatggggggtgcttggtgacaccacctgcccatcacaggctggatgcagggggtgccacacaaaacagaacagctttaggtcattatgcagaggagg

SEQ ID NO: 759724 - DNA, 120 bp, Artificial Sequence
  ENSG00000214706_19 (sequence is synthesized)
tggccccaaaacagatttatctcctagatgtcatgatgggtgccctcagcagtggtgtcctggcctgacagaggccaaggaggggtcaaaggggccaggcagagaagagagggtctctca

SEQ ID NO: 759725 - DNA, 120 bp, Artificial Sequence
  ENSG00000214706_20 (sequence is synthesized)
tagccctgctgcccggctccacgtgagtgtgcctgtgccccatgaaacccttcctgcaccttatccctcagcagagtggtgggttccccctatcttcagcctcctttactctgaggggag

SEQ ID NO: 759726 - DNA, 120 bp, Artificial Sequence
  ENSG00000214706_21 (sequence is synthesized)
catctagggctgtaactctgcctctgagctcccctgcctctctgtgctcctaggacctggtctcttgccttgcctgcttagaaagtgttttcagccggttctatggcttggggggcagct

SEQ ID NO: 759727 - DNA, 120 bp, Artificial Sequence
  ENSG00000214706_22 (sequence is synthesized)
gtcggctggtgggccccaggcgtggactaccattcccatggtgctctacgcgcagctagccgccgtcgcctgcgcgctcaggcctctgggattagtagttttagcctcgtggatgtgggc

SEQ ID NO: 759728 - DNA, 120 bp, Artificial Sequence
  ENSG00000214706_23 (sequence is synthesized)
ccaggtggccttgcagggggggatgtcgtggatgagcagggccagcaggaagaccttgaggaaaagctgaaggagtatgtggactgtctcacagacaagaggtacccctggctgccagcc

SEQ ID NO: 759729 - DNA, 120 bp, Artificial Sequence
  ENSG00000214706_24 (sequence is synthesized)
attggccacgtgcgtgcccaacttgagctcgctgcccactgcctgttgggagtccgcgctcccagcggtgacccggccagcccctccgggcctcagttgcctgctgggtggacaaactca

SEQ ID NO: 759730 - DNA, 120 bp, Artificial Sequence
  ENSG00000214706_25 (sequence is synthesized)
ccggacagggcaggaagccagtcctcttgccaaaccctgatcctttcctggactggtcaaggaagttggcgggagtcctggcctgctccggtgaagagagggagggggctctgttgggaa

SEQ ID NO: 759731 - DNA, 120 bp, Artificial Sequence
  ENSG00000214706_26 (sequence is synthesized)
catttcctggaggcctggaattctgtagaggccggaagaggacccccagccctttcccttcccagctccccagggtgtcactctctgtccccactctagcacctgtacaatgctgctgcc

SEQ ID NO: 759732 - DNA, 120 bp, Artificial Sequence
  ENSG00000214706_27 (sequence is synthesized)
catccaggcagctgccccggctgccccagctcttgtccagtgaaagtgtgaacctgcggatcgctgccggtgaaaccattgcactgctctttgagcttgcccgggaccttgaggtgcgag

SEQ ID NO: 759733 - DNA, 120 bp, Artificial Sequence
  ENSG00000214711_0 (sequence is synthesized)
ctgactgcaccgggattagagcttgcccaggcgcttaaagaagcaaaatctcctgtgcaggagcagcagagactcctcaggaagactcactggactgtacccaccacctgccatgtctct

SEQ ID NO: 759734 - DNA, 120 bp, Artificial Sequence
  ENSG00000214711_1 (sequence is synthesized)
gtggccacctttccgatgcagatggaagctggcgccaaggtactctaggagggcgtctccacagcaaccccaacaggactttgaggccctgctggcagagtgcctgaggaatggctgcct

SEQ ID NO: 759735 - DNA, 120 bp, Artificial Sequence
  ENSG00000214711_2 (sequence is synthesized)
ctttgaagacaccagcttcccggccaccctgagctccatcggcagtggctccctgctgcagaagctgccaccccgcctgcagtggaagaggcccccggagctgcacagcaatccccagtt

SEQ ID NO: 759736 - DNA, 120 bp, Artificial Sequence
  ENSG00000214711_3 (sequence is synthesized)
ttattttgccaaggccaaaaggctggatctgtgccaggggatagtaggagactgctggttcttggctgctttgcaagctctggccttgcaccaggacatcctgagccgggttgttcccct

SEQ ID NO: 759737 - DNA, 120 bp, Artificial Sequence
  ENSG00000214711_4 (sequence is synthesized)
gaatcagagtttcactgagaagtatgctggcatcttccggttctggttctggcactatgggaactgggttcctgtggtgatcgatgaccgtctgcctgtgaatgaggctggccagctggt

SEQ ID NO: 759738 - DNA, 120 bp, Artificial Sequence
  ENSG00000214711_5 (sequence is synthesized)
ctttgtctcctccacctataagaacttgttctggggagcacttctggaaaaggcctatgccaagctctctggttcctatgaagacttgcagtcaggacaggtgtctgaagcccttgtaga

SEQ ID NO: 759739 - DNA, 120 bp, Artificial Sequence
  ENSG00000214711_6 (sequence is synthesized)
cttcactggaggggtgacaatgaccatcaacctggcagaagcccatggcaacctctgggacatcctcatcgaagccacctacaacagaaccctcattggctgccagacccactcagggga

SEQ ID NO: 759740 - DNA, 120 bp, Artificial Sequence
  ENSG00000214711_7 (sequence is synthesized)
gaagattctggagaatgggctggtggaaggccatgcctatactctcacaggaatcaggaaggtgacctgcaaacatagacctgaatatctcgtcaagctacggaacccctggggaaaggt

SEQ ID NO: 759741 - DNA, 120 bp, Artificial Sequence
  ENSG00000214711_8 (sequence is synthesized)
ggaatggaaaggagactggagtgacagttcaagtaaatgggagctgctgagccccaaggagaagattctgcttctgaggaaagacaatgacggagaattctggatgacgctgcaggactt

SEQ ID NO: 759742 - DNA, 120 bp, Artificial Sequence
  ENSG00000214711_9 (sequence is synthesized)
taaaacacatttcgtgctcctggttatctgtaaactgaccccaggcctgttgagccaggaggcggcccagaagtggacgtacaccatgcgggaggggagatgggagaagcggagcacagc

SEQ ID NO: 759743 - DNA, 120 bp, Artificial Sequence
  ENSG00000214711_10 (sequence is synthesized)
tggtggccagaggcagttgctgcaggacacattttggaagaacccgcagttcctgctgtctgtctggaggcccgaggagggcaggagatccctgaggccctgcagcgtgctggtgtccct

SEQ ID NO: 759744 - DNA, 120 bp, Artificial Sequence
  ENSG00000214711_11 (sequence is synthesized)
gctccagaagcccaggcacaggtgccgcaagcggaagcctctcctcgccattggcttctacctgtataggatgaacaagtaccatgatgaccagaggagactgccccctgagttcttcca

SEQ ID NO: 759745 - DNA, 120 bp, Artificial Sequence
  ENSG00000214711_12 (sequence is synthesized)
gagaaacactcctctgagccagcctgataggtttctcaaggagaaagaagtgagtcaggagctgtgtctggaaccagggacgtacctcatcgtgccctgcatattggaggcccaccagaa

SEQ ID NO: 759746 - DNA, 120 bp, Artificial Sequence
  ENSG00000214711_13 (sequence is synthesized)
gtcagagttcgtcctcagggtcttctccaggaagcacatcttttatgaaattggcagcaattctggtgtcgtcttctcaaaggagatagaagaccaaaatgaaaggcaggatgaattctt

SEQ ID NO: 759747 - DNA, 120 bp, Artificial Sequence
  ENSG00000214711_14 (sequence is synthesized)
caccaaattctttgaaaagcatccagagattaatgcagttcaacttcagaacctcctgaaccagatgacctggtcaagtctggggagcagacagcccttctttagcctggaagcctgcca

SEQ ID NO: 759748 - DNA, 120 bp, Artificial Sequence
  ENSG00000214711_15 (sequence is synthesized)
gcagctgaagctctctcagaaggttttccacaagcaagaccgtgggtcaggatacctgaactgggagcagctgcacgctgccatgagggaggcaggaatcatgctcagtgatgacgtctg

SEQ ID NO: 759749 - DNA, 120 bp, Artificial Sequence
  ENSG00000214711_16 (sequence is synthesized)
tcagctgatgctcatccgctacggcggcccccgcctccagatggactttgtcagtttcatccacttgatgctgcgtgtagagaacatggaggatgtcttccaaaacttaacccaagatgg

SEQ ID NO: 759750 - DNA, 120 bp, Artificial Sequence
  ENSG00000214711_17 (sequence is synthesized)
caaagggatatacctccagaagccagagtggatgatgatggcactgtactcctgagaaggctgagtctcacctgccctcactgaagactctgcatgtggcccaagagcagcctttggctg

SEQ ID NO: 759751 - DNA, 120 bp, Artificial Sequence
  ENSG00000214711_18 (sequence is synthesized)
agaccaacccatgcccaccctacttactgatcttcaggacagcctcactagccgtcaccttctcagctgggaaggtttctcttctgcagccctccccgtgcatggccagcatgcagaaag

SEQ ID NO: 759752 - DNA, 120 bp, Artificial Sequence
  ENSG00000214711_19 (sequence is synthesized)
ggaagggaggaagtaaagattacatcagatttgtaaaagctagccatccttccctgaggccacaaccttgtcacaagcggagatgttacctgacatggcctaagcattctgactccagag

SEQ ID NO: 759753 - DNA, 120 bp, Artificial Sequence
  ENSG00000214711_20 (sequence is synthesized)
ctggtgtggttagcctccatacaacactgcctctgtggctgcaaactcaagtgactttagacatgccacatgttctcacatggtggggtaatcatctaggttttaaggtctgaaatggga

SEQ ID NO: 759754 - DNA, 120 bp, Artificial Sequence
  ENSG00000214711_21 (sequence is synthesized)
atgatatatccttagacatttagtcccagcatctgcaaattgatagagacataggctaagtttcagctgtttggggatggggtcagggatatagtgggctttcagaaacacagacagtaa

SEQ ID NO: 759755 - DNA, 120 bp, Artificial Sequence
  ENSG00000214711_22 (sequence is synthesized)
gagaattggcagagtccaggtggggtgggctggctctggcatctgaggtcatggggtagtcttcttctgacaatatctccgtatgattggatctggggcaacctagtagatttaaaacac

SEQ ID NO: 759756 - DNA, 120 bp, Artificial Sequence
  ENSG00000214711_23 (sequence is synthesized)
ctgagttctcaaagggcttcctgcttgtgacaggtgtgtctatttgcttgatatatagactatcagatccatttcaaatctgtccagaaattctctgtctatctacttcaaaggacaaaa

SEQ ID NO: 759757 - DNA, 120 bp, Artificial Sequence
  ENSG00000214711_24 (sequence is synthesized)
acaaacccatgctaaattatagagtcaatcagtgggtggttggtatatctgattttttgaactaccatgaaacaccttgtttatgtcatccctctcaaccaagaatacaggtgcaaaacc

SEQ ID NO: 759758 - DNA, 120 bp, Artificial Sequence
  ENSG00000214711_25 (sequence is synthesized)
agaacaatggcctttttccaaagtctatgcaatttattcataagttagcacctcagagccatttattactacaggttgagcatcccaaatctgaaaaccccaaatctgaaatactccaaa

SEQ ID NO: 759759 - DNA, 120 bp, Artificial Sequence
  ENSG00000214711_26 (sequence is synthesized)
atctaaaatttctgagagtagacatgaaactcaaaggaaataggggcattttggattttgaatttttgggtttgaggtgttcaactgacaagtctataatgcagatatcctgaaatctga

SEQ ID NO: 759760 - DNA, 120 bp, Artificial Sequence
  ENSG00000214711_27 (sequence is synthesized)
aacacttctggtcccaagcattttagttaagagatagtcaacctgtattctatttaatcttaatttacaaacaattctaacaaacatggctgtttgatttccaactccatagcagactca

SEQ ID NO: 759761 - DNA, 120 bp, Artificial Sequence
  ENSG00000214711_28 (sequence is synthesized)
ggaaggaagctgaatgaagagataaaagtgtgtccattggcagaggactaaaggagatttgagcacctgtcagatgggtactgtaccagaagaaaggagcactttgaaagcgtagcttat

SEQ ID NO: 759762 - DNA, 120 bp, Artificial Sequence
  ENSG00000214711_29 (sequence is synthesized)
ggggtaggaaagtattttatttaggaaaaaaaacccttcatttattccaaatgataaaatgtaaaatgggtttccataaagtgccagatacatgagatgttgttgattttataaatgatg

SEQ ID NO: 759763 - DNA, 120 bp, Artificial Sequence
  ENSG00000214711_30 (sequence is synthesized)
atcatgtatttacagccttttacagttttttatatccattgacttatttgtgtctttgtctttaaaatctgccattgcaaatagctgttttaataaaccaattttgccttggcccctgaa

SEQ ID NO: 759764 - DNA, 120 bp, Artificial Sequence
  ENSG00000214711_31 (sequence is synthesized)
attcatcacactccctgctttgaatcgcctctccttcagttgctgaggtcaattccctaggaaaacagcaggatcttgattgcaccatcccactcaacagcctcgcttgggtaagggaaa

SEQ ID NO: 759765 - DNA, 120 bp, Artificial Sequence
  ENSG00000214711_32 (sequence is synthesized)
caccaaaagcagaaaaatccatgctgaaggaccccaggaccagcaccagttcctgagcatctttcccgggctgagcagcagagactcctcaggaagactcactggactgtacccaccacc

SEQ ID NO: 759766 - DNA, 80 bp, Artificial Sequence
  ENSG00000214717_0 (sequence is synthesized)
gcgcgtgtggcctccccgcctgtcccgggtcgggctccaaccaagcagcccccgtgcagccgcccccccgcgcaccctga

SEQ ID NO: 759767 - DNA, 120 bp, Artificial Sequence
  ENSG00000214717_1 (sequence is synthesized)
cgcccaagacatcaggcggctctgcctgccgcctgcggtcggccagtgaccgcgcgcccccgccaggccccggaggggaggagcgggcgtcccagggacctcgacccctacccaccccag

SEQ ID NO: 759768 - DNA, 120 bp, Artificial Sequence
  ENSG00000214717_2 (sequence is synthesized)
ccaggcaggtccccacgcatgagcagccgtccagcaggcaggctccggtggagaagcaatggagaataaaagcctggagagctcccagacagacctgaagctggtggcccacccccgcgc

SEQ ID NO: 759769 - DNA, 120 bp, Artificial Sequence
  ENSG00000214717_3 (sequence is synthesized)
caagagcaaggtgtggaagtatttcggcttcgacaccaacgccgagggatgcatcctgcagtggaagaaaatctactgccgcatctgcatggcccagatcgcctactccggaaacacctc

SEQ ID NO: 759770 - DNA, 120 bp, Artificial Sequence
  ENSG00000214717_4 (sequence is synthesized)
caacctgtcctaccacctggagaagaaccaccccgaggaattctgcgagttcgtcaagagcaacacggagcagatgcgtgaagccttcgccaccgccttctccaagctgaagcccgagtc

SEQ ID NO: 759771 - DNA, 120 bp, Artificial Sequence
  ENSG00000214717_5 (sequence is synthesized)
gtcccagcagcccgggcaggacgcgctggccgtcaaggccggccacggctacgacagcaagaagcagcaggagctgacggccgccgtgctgggcctcatctgcgaggggctgtacccagc

SEQ ID NO: 759772 - DNA, 120 bp, Artificial Sequence
  ENSG00000214717_6 (sequence is synthesized)
ctccatcgtggacgagcccaccttcaaggtgctgctgaagacggccgacccccggtatgagctgcccagccggaagtacatctctaccaaggccatccctgagaagtacggggccgtccg

SEQ ID NO: 759773 - DNA, 120 bp, Artificial Sequence
  ENSG00000214717_7 (sequence is synthesized)
ggaggtgatcctgaaggagctggccgaggccacctggtgtggcatctccaccgacatgtggaggagtgagaatcagaaccgcgcctacgtcacgctggccgcccacttcctgggcctggg

SEQ ID NO: 759774 - DNA, 120 bp, Artificial Sequence
  ENSG00000214717_8 (sequence is synthesized)
cgcccccaactgcctgtccatgggctcccgctgcctgaagaccttcgaggtgcccgaagagaacacggcggagaccatcacgcgagtgctctatgaggtcttcatcgagtggggcatcag

SEQ ID NO: 759775 - DNA, 120 bp, Artificial Sequence
  ENSG00000214717_9 (sequence is synthesized)
cgccaaggtcttcggggccaccaccaactatggcaaggacatcgtgaaggcgtgctccctgctggacgtcgcagtgcacatgccctgcctgggccacaccttcaatgccggcatccagca

SEQ ID NO: 759776 - DNA, 120 bp, Artificial Sequence
  ENSG00000214717_10 (sequence is synthesized)
ggccttccagctcccgaagctgggggcgctgctgtcgcgctgccgcaaactggtggagtacttccagcagtctgccgtggccatgtacatgctctatgagaagcagaagcagcagaacgt

SEQ ID NO: 759777 - DNA, 120 bp, Artificial Sequence
  ENSG00000214717_11 (sequence is synthesized)
ggagcagcagttcgtcatcgccggggtcttggtggaggacagcaacaaccaccacctcatgctggaggccagcgagtgggccaccatcgaggggctggtggagctcctgcagcccttcaa

SEQ ID NO: 759778 - DNA, 120 bp, Artificial Sequence
  ENSG00000214717_12 (sequence is synthesized)
gcaggtggccgagatgctgtcggcctccaggtaccccaccatcagcatggtgaagccgctgctgcacatgctcctgaacaccacgctcaacatcaaggagaccgactccaaggagctcag

SEQ ID NO: 759779 - DNA, 120 bp, Artificial Sequence
  ENSG00000214717_13 (sequence is synthesized)
catggccaaggaggtcatcgccaaggagctttccaagacctaccaggagacgcccgagatcgacatgtttctcaacgtggccaccttcctggacccccgctacaagaggctgcccttcct

SEQ ID NO: 759780 - DNA, 120 bp, Artificial Sequence
  ENSG00000214717_14 (sequence is synthesized)
ctccgccttcgagcggcagcaggtggagaatcgcgtggtggaagaggccaagggcctgctggacaaggtcaaagacggcggctaccggccggctgaggacaagatcttcccggtgcccga

SEQ ID NO: 759781 - DNA, 120 bp, Artificial Sequence
  ENSG00000214717_15 (sequence is synthesized)
ggagcctcccgtcaagaagctcatgcggacatccacgccgccgcccgccagcgtcatcaacaacatgctggccgagatcttctgccagacaggcggcgtggaggaccaggaagagtggca

SEQ ID NO: 759782 - DNA, 120 bp, Artificial Sequence
  ENSG00000214717_16 (sequence is synthesized)
tgcccaggtggtggaggagctgagcaacttcaagtcccagaaggtgcttggcctcaacgaagaccccctcaagtggtggtcagaccgcctggccctcttccccctgctgcccaaggtgct

SEQ ID NO: 759783 - DNA, 120 bp, Artificial Sequence
  ENSG00000214717_17 (sequence is synthesized)
gcagaagtactggtgcgtgacggccacgcgcgtcgcccctgagcgtctcttcggatccgccgccaacgtggtcagcgccaagaggaaccggctggctcccgcgcacgtggacgagcaggt

SEQ ID NO: 759784 - DNA, 120 bp, Artificial Sequence
  ENSG00000214717_18 (sequence is synthesized)
gtttctgtatgagaacgcccggagtggggcagaggcggaacccgaggaccaggacgagggggagtggggcctggaccaggagcaggtgttctccttgggggatggcgtcagcggcggttt

SEQ ID NO: 759785 - DNA, 120 bp, Artificial Sequence
  ENSG00000214717_19 (sequence is synthesized)
ctttggcattagggacagcagcttcctgtagcgaggaagcgtgttgtcttacaagtcatccccgcagcagcccattggatgctttgctgtaaatacttacccggtcagcttggttttgaa

SEQ ID NO: 759786 - DNA, 120 bp, Artificial Sequence
  ENSG00000214717_20 (sequence is synthesized)
cctcagagaccatccactgtctttgacacctagaaggtggaaaaaggaaagagatttgagaagtgagagagggtcgggggcggtggctcctgtctataatcgcagcactttgggaggccg

SEQ ID NO: 759787 - DNA, 120 bp, Artificial Sequence
  ENSG00000214717_21 (sequence is synthesized)
cggccggggcagccatgtcgccattgtctgcggcgcgggcggccctgcgggtctacgcggtaggcgccgcggtgatcctggcgcagctgctgcggcgctgccgcgggggcttcctggagc

SEQ ID NO: 759788 - DNA, 120 bp, Artificial Sequence
  ENSG00000214717_22 (sequence is synthesized)
gcgagactctctcaaaaagaaaaaagaagacacaagagaggtggctttgagtgggtttcctttcctcccctattcccggggcccggacgacttctgcttgggaactgccaacgcttctgc

SEQ ID NO: 759789 - DNA, 120 bp, Artificial Sequence
  ENSG00000214717_23 (sequence is synthesized)
ttgggaattgcgtgcagcagagcctagaggagctgttccttccttcacagatacttaagacctccaccatgtctgattcgagttctccctgggagggtttagaagaaacgcaggaacatt

SEQ ID NO: 759790 - DNA, 120 bp, Artificial Sequence
  ENSG00000214717_24 (sequence is synthesized)
ctgggtggcgtcgaaggagcctttcccgatcatcatgtgtgacttctgcgaggtccagatcactgaattcatgtttacattctcgtgcaagcagggacctcttgcttctgagaaatgggg

SEQ ID NO: 759791 - DNA, 120 bp, Artificial Sequence
  ENSG00000214717_25 (sequence is synthesized)
aagagaccttttagccaaaatgcccttcttaaaaagagagacctttttttttaatgttcggttaaaaatgtgacagatgagtacaaaaatgcagacacttaacaaaaagcaaacagaaaa

SEQ ID NO: 759792 - DNA, 120 bp, Artificial Sequence
  ENSG00000214717_26 (sequence is synthesized)
aaaagtgtggaatgtgttgtattttcgacaggttgctgccagagagcctgcttcctgctgcctgccgaaatttcactttgcggagttggtccttaaaactgggcggtggccgggcgtggt

SEQ ID NO: 759793 - DNA, 120 bp, Artificial Sequence
  ENSG00000214717_27 (sequence is synthesized)
ggtggaggttgcagtgagccaagactacgccactgcactccagcctggaggccagagtgagactccgtctcaaaacaaaacaaaagtgggtggctcacgggtccggaggttatgtcttcg

SEQ ID NO: 759794 - DNA, 120 bp, Artificial Sequence
  ENSG00000214717_28 (sequence is synthesized)
caaaagtgggtggctcacgggtccggaggttatgtcttcggtgtctcagccctaaaagtccagttcccccgtgcggccagcttttccacataaggtgtttttgatttgattaccggaaag

SEQ ID NO: 759795 - DNA, 120 bp, Artificial Sequence
  ENSG00000214717_29 (sequence is synthesized)
gactcttgattcttctcttttaaactgaataccataggggaaatgaattttaaaatattgcccccggaggggttttccgtggctggattcctgcgagttgctttcagtcattcagggaaa

SEQ ID NO: 759796 - DNA, 120 bp, Artificial Sequence
  ENSG00000214717_30 (sequence is synthesized)
cagaaagacgttttccaacatgtagaactgctttttaactggaggaaaaatacttcaggaggcttagcatattgcttggattctacgtgcagcgggttctctgcctccgtgaagacaagc

SEQ ID NO: 759797 - DNA, 120 bp, Artificial Sequence
  ENSG00000214717_31 (sequence is synthesized)
tgggctggggagaacggtgtctaggagggatgaccccactcagctccaggcagtgttctgccgagaccccaagaactcggggtgtcagagggcaaaggaactacctgcctttcacggctg

SEQ ID NO: 759798 - DNA, 120 bp, Artificial Sequence
  ENSG00000214717_32 (sequence is synthesized)
ctgacttctcagggctgcaagcagcacagaatgttatccttacgtcctgagccggtttaagtctgtggaaaaggaagcacgggagaaatccacgtaacctttgctttctttttaagggaa

SEQ ID NO: 759799 - DNA, 120 bp, Artificial Sequence
  ENSG00000214717_33 (sequence is synthesized)
gcggttccgccgtgaacttggaaccctcagctccgggtgttctcggcagaagggcagctggaagggacacagtggggcaggctttggggttgctccctgttctgccccgaggccggggac

SEQ ID NO: 759800 - DNA, 120 bp, Artificial Sequence
  ENSG00000214717_34 (sequence is synthesized)
gcagggcagcccacgcctccgtgggctccattctgtagcattgccagcgttctcttcacgtctctaacaatccttcgcttttcctcactcacgtggaaatgtgaactgtcccggctctgt

SEQ ID NO: 759801 - DNA, 120 bp, Artificial Sequence
  ENSG00000214717_35 (sequence is synthesized)
cttcatttttatttttaagccatcgttcccctcctgaacggttgccccttatttaatgctgtaaagttggactgttgttcaataaaccagagcaatgcattagctcctcattcatttgtc

SEQ ID NO: 759802 - DNA, 120 bp, Artificial Sequence
  ENSG00000214732_0 (sequence is synthesized)
acctcaccatcaagaaaggccctggtccaggatgtgcaaggtgtgatgaaatcacagggctggggaaggtcagctcggggtcacaagaagcctgatgggcaggaaagagcatgaaagccc

SEQ ID NO: 759803 - DNA, 120 bp, Artificial Sequence
  ENSG00000214732_1 (sequence is synthesized)
cagccagcctcacatgtgcggctgggaggactcacagaaaccctctgtacccagtcatgggccaaagacaccgtcatgcaagggggtgaaggctccacactcgtcccggccccgggcgtg

SEQ ID NO: 759804 - DNA, 120 bp, Artificial Sequence
  ENSG00000214732_2 (sequence is synthesized)
ttgtggactctaaggggcagaatccggacaagctcaggttcaatttctacacctcccagtactccaactccctgaaccccttctacactttgcagaagcctacctgtggctacctgtacc

SEQ ID NO: 759805 - DNA, 120 bp, Artificial Sequence
  ENSG00000214732_3 (sequence is synthesized)
gccgggacactgaccacacccgcaagcgctttgatgtgcctcctgccaacttggtcttgtggcgctcctaggcctgagccaaacggaagcccccgacccttcaccctcacccctgtgacc

SEQ ID NO: 759806 - DNA, 120 bp, Artificial Sequence
  ENSG00000214732_4 (sequence is synthesized)
tcaggtccccaaggggaagggctgctcactgcaggaggagtgacctatattcgggctaagacagctgtgccatgcccacctattgacaatgataaagggaggtctctcttctcagcagca

SEQ ID NO: 759807 - DNA, 120 bp, Artificial Sequence
  ENSG00000214736_0 (sequence is synthesized)
tcctccaccgaggcccatgcgaagctttccactatggcttccagcactgtcccggtgagcgctgctggctcggctaatgaaactcccgaaataccggacaacgtgggagattggcttcgg

SEQ ID NO: 759808 - DNA, 120 bp, Artificial Sequence
  ENSG00000214736_1 (sequence is synthesized)
ggcgtctaccgctttgccactgataggaatgacttccggaggaacttgatactaaatttgggactctttgctgcgggagtttggctggccaggaacttgagtgacattgacctcatggca

SEQ ID NO: 759809 - DNA, 120 bp, Artificial Sequence
  ENSG00000214736_2 (sequence is synthesized)
gtttgattcagatgggcacttttcttccccttccctgcctagtttccttttgttccttgagtccacgcagaattccattctctggtcagcagacaggcttaagctaaagtattgcctcta

SEQ ID NO: 759810 - DNA, 120 bp, Artificial Sequence
  ENSG00000214736_3 (sequence is synthesized)
ttctgtaaagttctgtacatagttcccaagcttctgcagggggtgatttttgctcttgtcctgagaaataacagtgctgttttaaaaaacatttgaaataaataccgcacacaaaggcag

SEQ ID NO: 759811 - DNA, 120 bp, Artificial Sequence
  ENSG00000214753_0 (sequence is synthesized)
gtcgtcctccgcgcgcgcctgcccgcggctggggaaccaagggcctggaggggaaacagctccctgctgcgttgttttgggctccgtgagccgaaagggggaggggagacgaaggagaag

SEQ ID NO: 759812 - DNA, 120 bp, Artificial Sequence
  ENSG00000214753_1 (sequence is synthesized)
acgaaggagaagcaaacactgcgcagcgggaccgtgcgcggcctccgctcctgcgtgcgtgcgctcgctcgcgcgggctcagtgctggcgcgtgaggcggaggcgggcggcggcggcggc

SEQ ID NO: 759813 - DNA, 120 bp, Artificial Sequence
  ENSG00000214753_2 (sequence is synthesized)
ggactcggtcgacggttcgcaggggaggaggcggcgggaggcggaggaggcggcggcggcgatggaggtgaagcggctgaaagtgaccgagctgcggtcggagctgcagcggcggggcct

SEQ ID NO: 759814 - DNA, 120 bp, Artificial Sequence
  ENSG00000214753_3 (sequence is synthesized)
gagctgcagcggcggggcctggactcgcgcggcctcaaggtggatctggcgcagcggctgcaggaggcgctggacgccgagatgctcgaggacgaggccggcggcggcggggccgggccc

SEQ ID NO: 759815 - DNA, 120 bp, Artificial Sequence
  ENSG00000214753_4 (sequence is synthesized)
gcctcggcctgtggccgcgtcgggcggcggcccgggcggggacgaggaggaggacgaagaggaggaggaggaggacgaggaggcgctgcttgaggacgaggacgaggagccaccccctgc

SEQ ID NO: 759816 - DNA, 120 bp, Artificial Sequence
  ENSG00000214753_5 (sequence is synthesized)
ctgctcaagccttgggtcaggccgcgcagccgccgccggagcccccggaggcggcagccatggaggccgcggccgagccagatgcttccgagaagccggcggaggccacggccgggtcag

SEQ ID NO: 759817 - DNA, 120 bp, Artificial Sequence
  ENSG00000214753_6 (sequence is synthesized)
ggtaaatggtggcgaagagcagggcctcggcaagagggaggaagacgaacccgaggagcggagcggggacgagacgccgggatccgaggtgccgggtgacaaggccgccgaggaacaggg

SEQ ID NO: 759818 - DNA, 120 bp, Artificial Sequence
  ENSG00000214753_7 (sequence is synthesized)
agatgaccaggatagtgaaaagtcaaaaccagcaggctcagatggtgagcggcggggggtaaagagacagcgggatgagaaggatgaacatggccgagcttactatgaattccgagagga

SEQ ID NO: 759819 - DNA, 120 bp, Artificial Sequence
  ENSG00000214753_8 (sequence is synthesized)
ggcttaccacagccgctcaaagtctccactgcctcctgaagaagaggcaaaagatgaggaggaggatcaaactcttgtgaacctggacacgtatacctcggatctgcattttcaagtgag

SEQ ID NO: 759820 - DNA, 120 bp, Artificial Sequence
  ENSG00000214753_9 (sequence is synthesized)
caaagaccgctatggagggcagccacttttctcagagaagttccccaccctttggtctggggcaaggagtacttacggagtgacaaagggaaaagtctgctttgaggcaaaggtaaccca

SEQ ID NO: 759821 - DNA, 120 bp, Artificial Sequence
  ENSG00000214753_10 (sequence is synthesized)
gaatctcccaatgaaagaaggctgcacagaggtctctctccttcgagttgggtggtctgttgatttttcccgtccacagcttggtgaagatgaattctcttacggtttcgatggacgagg

SEQ ID NO: 759822 - DNA, 120 bp, Artificial Sequence
  ENSG00000214753_11 (sequence is synthesized)
actcaaggcagaaaatggacaatttgaggaatttggccagacttttggggagaatgatgttattggctgctttgctaattttgagactgaagaagtagaactttccttctccaagaatgg

SEQ ID NO: 759823 - DNA, 120 bp, Artificial Sequence
  ENSG00000214753_12 (sequence is synthesized)
agaagacctaggtgtggcattctggatcagcaaggattccctggcagaccgggcccttctaccccatgtcctctgcaaaaattgtgttgtagaattaaacttcggtcagaaggaggagcc

SEQ ID NO: 759824 - DNA, 120 bp, Artificial Sequence
  ENSG00000214753_13 (sequence is synthesized)
cttcttcccaccaccagaagagtttgtgttcattcatgctgtgcctgttgaggagcgtgtacgcactgcagtccctcccaagaccatagaggaatgtgaggtgattctgatggtgggact

SEQ ID NO: 759825 - DNA, 120 bp, Artificial Sequence
  ENSG00000214753_14 (sequence is synthesized)
acccggatctggaaagacccagtgggcactgaaatatgcaaaagaaaaccctgagaaaagatacaatgtcctgggagctgagactgtgctcaatcaaatgaggatgaagggtctcgagga

SEQ ID NO: 759826 - DNA, 120 bp, Artificial Sequence
  ENSG00000214753_15 (sequence is synthesized)
gccagagatggaccccaaaagccgagaccttttagttcagcaagcctcccagtgccttagtaagctggtccagattgcttcccggacaaagaggaactttattcttgatcagtgtaatgt

SEQ ID NO: 759827 - DNA, 120 bp, Artificial Sequence
  ENSG00000214753_16 (sequence is synthesized)
gtacaattctggccaacggcggaagctattgctgttcaagaccttctctcggaaagtggtggtggttgtccctaatgaggaagattggaagaagaggctggagttgaggaaggaagtaga

SEQ ID NO: 759828 - DNA, 120 bp, Artificial Sequence
  ENSG00000214753_17 (sequence is synthesized)
gggagatgatgtgcctgaatctataatgctggagatgaaagccaacttctctttgcctgaaaaatgcgactatatggatgaggtgacatatggggagctggagaaggaggaagctcagcc

SEQ ID NO: 759829 - DNA, 120 bp, Artificial Sequence
  ENSG00000214753_18 (sequence is synthesized)
cattgtcactaagtacaaggaggaggcaaggaagcttctgcccccctccgagaagcggacaaatcgccgaaacaaccgaaacaagcgtaaccggcagaaccgaagccggggccaaggcta

SEQ ID NO: 759830 - DNA, 120 bp, Artificial Sequence
  ENSG00000214753_19 (sequence is synthesized)
tgtgggcgggcagcgccgaggctacgacaaccgggcctacgggcagcagtactgggggcagcctggaaacagagggggttaccgtaatttctatgatcgatacaggggagactatgatcg

SEQ ID NO: 759831 - DNA, 120 bp, Artificial Sequence
  ENSG00000214753_20 (sequence is synthesized)
attttacgggcgagattatgagtacaacagatacagagactattacagacaatacaatcgggattggcagagttactactaccaccacccccaggacagagaccgatactacaggaatta

SEQ ID NO: 759832 - DNA, 120 bp, Artificial Sequence
  ENSG00000214753_21 (sequence is synthesized)
gaagctgaatctctgggggtgccaggcacccccgcaaaacacaaccaaggaaaacaggggctgtcggggtggggctgagctgccggggaggggtggtggggggggagggtgctcaagcag

SEQ ID NO: 759833 - DNA, 120 bp, Artificial Sequence
  ENSG00000214753_22 (sequence is synthesized)
gggtgggggaggggggaggtggaaacaaacaacaaaactgtacattttttttaaagtttgttgaaaagaatattgtcttattctataaaacatttcaaacctagttagagatttgtaatc

SEQ ID NO: 759834 - DNA, 120 bp, Artificial Sequence
  ENSG00000214753_23 (sequence is synthesized)
aaaaaacatttgcgcagaaagcagcacttagggctgcctgttctataccctacagtcagacaggaaaagaactgaaaatggcacccttctgacattctgaggcagctggactggcagcca

SEQ ID NO: 759835 - DNA, 120 bp, Artificial Sequence
  ENSG00000214753_24 (sequence is synthesized)
agtaaaggagagtgatgaggtggtgtggggagggtggggaggcagcgcgagggtgctctccacagcaggtaggagcaggcaggagtggggacagagggagagcttgtgactgggacagtg

SEQ ID NO: 759836 - DNA, 120 bp, Artificial Sequence
  ENSG00000214753_25 (sequence is synthesized)
aaaataaacgattggctcttatcaatcacttgcaccaactaaccgtttgtattttctttaccgacctttcccttttgggatatgtggtctggtgggctgggaggcttacagtgtcccaac

SEQ ID NO: 759837 - DNA, 120 bp, Artificial Sequence
  ENSG00000214753_26 (sequence is synthesized)
tctccattttcctgtgcctttgtgctgtttggctgaggcatggagactgccagtgggtggttctattttacaggattcccaggccaagaaagcctggggactgtccttgatggcagagca

SEQ ID NO: 759838 - DNA, 120 bp, Artificial Sequence
  ENSG00000214753_27 (sequence is synthesized)
gaatagcctgccccttctatagacccattgattaattcctgtaaaatcttggggagaatgggattgcagccctcagcctaaagattgtgatttgccagtctctagtctctgtcttccaag

SEQ ID NO: 759839 - DNA, 120 bp, Artificial Sequence
  ENSG00000214753_28 (sequence is synthesized)
gttgagagaggtgggaggtctctgaaatcatccctgttagagtgtctgtcctcttacagtgcgagagaaggaacgtttctcagggtttcagctcacacgaaaacacagcaggattctttt

SEQ ID NO: 759840 - DNA, 120 bp, Artificial Sequence
  ENSG00000214753_29 (sequence is synthesized)
cactgcagcgggatatgtatataggtgaatcctgtggtgtgggctcacaggcccaggtgctgagaatagcaactagcaactattttctacagtgtggagggctcgtgccctgctggtttt

SEQ ID NO: 759841 - DNA, 120 bp, Artificial Sequence
  ENSG00000214753_30 (sequence is synthesized)
tttgatacacaggtagagaatgaatagaagaggggagggtggtgggggggggtgggaggcagctcagtggggctgctgaaccttgggaagagtgtgagtgtgaacgtgtgtaaatgtgcg

SEQ ID NO: 759842 - DNA, 120 bp, Artificial Sequence
  ENSG00000214753_31 (sequence is synthesized)
tgtgaaagggagcaccccttcccgacttctagaaacaaaattccttttggggcgctttccctgtgtgtccccagagaggcctctagccaggagccttcagttgggatagtttcatttgtg

SEQ ID NO: 759843 - DNA, 120 bp, Artificial Sequence
  ENSG00000214753_32 (sequence is synthesized)
actttaccaataccctcccagttcttgatagacagctgtaggttgctgggttcaagaatatgggtgggatatggaatgctctttcaatgtctagcttcagttttcattcatcctcctgct

SEQ ID NO: 759844 - DNA, 120 bp, Artificial Sequence
  ENSG00000214753_33 (sequence is synthesized)
cagcactgtcagccaagagcttactcagcagacaccacatactgcagcagttcctagtgagaaaatctgtgccactagaaaatgcttcacttccatttcctcacctgggcagttctctgt

SEQ ID NO: 759845 - DNA, 120 bp, Artificial Sequence
  ENSG00000214753_34 (sequence is synthesized)
ttaaaattgtgggctgatttggtcttcctctcctcctcccactgttactgccctgcagcccttgttcaggtgtacagacccttattctggcctctagtgtccttgtctgtcatgacacac

SEQ ID NO: 759846 - DNA, 120 bp, Artificial Sequence
  ENSG00000214753_35 (sequence is synthesized)
ccttccgcccaaatacctctgaccccaaggctggaatggggctggtaggagataagtttgcttactcatagtcatgtcctttctcttggcacctgcttccctgcggtgtcctcaaatgga

SEQ ID NO: 759847 - DNA, 120 bp, Artificial Sequence
  ENSG00000214753_36 (sequence is synthesized)
tttctgtgtggcagtggagtgattgcatgaatttttctgtaacacattaactttgtattattattaagggagtttgagaaagctttgcttataatgtcaaggcaaggaggtaaaaactgg

SEQ ID NO: 759848 - DNA, 120 bp, Artificial Sequence
  ENSG00000214753_37 (sequence is synthesized)
agcccaaagaaattcccttagggcaagattatgttataatagaaaattgaatttcctgaggcagtggctgccaccccttttcagatgtttagtcctgcaaatagcatctttcttgtagtc

SEQ ID NO: 759849 - DNA, 120 bp, Artificial Sequence
  ENSG00000214753_38 (sequence is synthesized)
tgtgacatggatggggatgctagggcccttaggggcaaggggactaaactaaatcaagttgagtttttttccagcaggggttaggggaggtactcgctgttgatatttgacactagaaag

SEQ ID NO: 759850 - DNA, 120 bp, Artificial Sequence
  ENSG00000214753_39 (sequence is synthesized)
taatcttttttacaaaactgtttttctaggtgggtggaaagtgaaactgccacatccttgttggtttagtccaagagatcatttgcaacaacagtagatgtccgggttttgtttctgtct

SEQ ID NO: 759851 - DNA, 120 bp, Artificial Sequence
  ENSG00000214753_40 (sequence is synthesized)
ttttattatgaaaaactatgttaagggggaaaatgtggattatggtaaccagaggaatccctagccttgttttccttagaagacttgtttagtgttttatcagacgtctgttgtagttgt

SEQ ID NO: 759852 - DNA, 120 bp, Artificial Sequence
  ENSG00000214753_41 (sequence is synthesized)
agacaggaaagcttgtgagaaaaacaccacatggagcctgtaaatgtttttgcacaacctgtaaagcattcttggaagtggccagtaaaaaggggttttaccatttaaaaaaaaaatgta

SEQ ID NO: 759853 - DNA, 120 bp, Artificial Sequence
  ENSG00000214753_42 (sequence is synthesized)
actgtgtcattgtttacatctgtaactttttcctcccctgttctcattacaccattctggcgaaaatgtaggcaaagtagcttccagttttagaataaataaccatttggattgaattca

SEQ ID NO: 759854 - DNA, 120 bp, Artificial Sequence
  ENSG00000214753_43 (sequence is synthesized)
agtctccactgcctcctgaagaagaggcaaaagatgaggaggaggatcaaactcttgtgaacctggacacgtgtatgtataaggcagacagactgtggtttttaactaatctcctaaaag

SEQ ID NO: 759855 - DNA, 120 bp, Artificial Sequence
  ENSG00000214756_0 (sequence is synthesized)
ctttcggagggtggtgagctagtctgcggacgctgtataccctcctccacttcccgctgcagccaataaaggccgttcctaccatagtctgtgtccgcgttcttttttccgggactgcag

SEQ ID NO: 759856 - DNA, 120 bp, Artificial Sequence
  ENSG00000214756_1 (sequence is synthesized)
agttcggggaagctgtacgccgcctttcgctacgcggaatttgcagatcttcccctggacctcaggcctctccggctggagtagggtggacgcttcacataagcttctctggtcgaactt

SEQ ID NO: 759857 - DNA, 120 bp, Artificial Sequence
  ENSG00000214756_2 (sequence is synthesized)
acccgaatctccagatggccgcgctgcgtcgaatgctccacttgccgagcctgatgatggggacgtgccgcccctttgcgggctcactggctgatagttgcctggcggaccgctgtctct

SEQ ID NO: 759858 - DNA, 120 bp, Artificial Sequence
  ENSG00000214756_3 (sequence is synthesized)
gggatcggctgcatgcccagcctcgtttgggcactgtccccaccttcgactggttctttggatacgacgaagtccaggggctcctactgccattgctgcaggaggcacaggctgccagtc

SEQ ID NO: 759859 - DNA, 120 bp, Artificial Sequence
  ENSG00000214756_4 (sequence is synthesized)
ctctgcgagtgctggatgtgggctgtgggacttccagcctatgtacaggcctctacaccaaatctccacacccagtggatgtgctgggggtggacttttctcctgtggctgtggcccaca

SEQ ID NO: 759860 - DNA, 120 bp, Artificial Sequence
  ENSG00000214756_5 (sequence is synthesized)
tgaatagcctcctggagggtggcccaggccaaacacctctatgccctggacaccctgcctcaagcctccacttcatgcacgccgatgctcagaacctgggggctgtggcttcttcaggct

SEQ ID NO: 759861 - DNA, 120 bp, Artificial Sequence
  ENSG00000214756_6 (sequence is synthesized)
ctttccaactactgctggacaaaggcacatgggatgctgttgcccggggaggtctgcctagggcttaccagcttctatcagaatgcttgagggttctaaaccctcaggggaccctgattc

SEQ ID NO: 759862 - DNA, 120 bp, Artificial Sequence
  ENSG00000214756_7 (sequence is synthesized)
agttctcagatgaggaccctgatgtgcgactgccctgcctggaacaagggtcctatggctggactgtgactgtgcaggagctaggcccgttcaggggcatcacctactttgcttacttga

SEQ ID NO: 759863 - DNA, 120 bp, Artificial Sequence
  ENSG00000214756_8 (sequence is synthesized)
gtcctggcttccacatttactagctgggtgccatattgctgaatgtttctgttccccagtttactcatctgcagagtgagaataacttggagttacggagattacatacaatgatgtgcg

SEQ ID NO: 759864 - DNA, 120 bp, Artificial Sequence
  ENSG00000214756_9 (sequence is synthesized)
caatatttagcacaaaatgaatgctgaaaagagaaggtacaattgggtcattccccagtttcaactaactggagctcctaaaagcagcagacaggaactgaatcaaaacccctgcgctga

SEQ ID NO: 759865 - DNA, 120 bp, Artificial Sequence
  ENSG00000214756_10 (sequence is synthesized)
ctgacttgtataatctagtggcctaacctgtaagcctcatttttgtcacctgtaaaaggagattgtaagaggatgggtataaggagcttcataaacctggatgagatatttgagggggag

SEQ ID NO: 759866 - DNA, 120 bp, Artificial Sequence
  ENSG00000214756_11 (sequence is synthesized)
ggaacaatacttaccctcaaagctattaggaggcaggagatgggaatattccacaaagccacttctacaaacacgggagcctgttgagtcccagaagggacagtggttggtggcttccag

SEQ ID NO: 759867 - DNA, 120 bp, Artificial Sequence
  ENSG00000214756_12 (sequence is synthesized)
acatgctgtgtcctcaagaatccaacaagcatcttcttcatcctggtcctgcccccagctgagtccagcgttaaatgttcttaaaggacttctagggtcctgtgggctccaagcccagcc

SEQ ID NO: 759868 - DNA, 120 bp, Artificial Sequence
  ENSG00000214756_13 (sequence is synthesized)
gcccagcctgggatggaggaagagaggggacaaaaatattactgatatattatcaaattacaaaactaggccaggcatgctggctcatacctataatcacagcactttgggaggccaagg

SEQ ID NO: 759869 - DNA, 120 bp, Artificial Sequence
  ENSG00000214756_14 (sequence is synthesized)
ttgcttgagccctggcaataaagtgacacccctaactctacaaaaacaaatgagcccgggatagtggcacaggcatgtagttccaactactcaggaggctgagctgggaggactgcttga

SEQ ID NO: 759870 - DNA, 120 bp, Artificial Sequence
  ENSG00000214756_15 (sequence is synthesized)
accctgggaggtcaaagctgcaatgggccatgataagctgctgcacttgagctaaaaattaatttctgtggtattttttgcttataaaaaaatagagcaattatatcactaagagcctaa

SEQ ID NO: 759871 - DNA, 120 bp, Artificial Sequence
  ENSG00000214756_16 (sequence is synthesized)
cagagtggggagggtaaggtgggttcctcgtgagtcaggagtgtagtccctgaaattgtgattctcaaaccctacggtgggccgtgcgtggtggctcacggctgtaatgctaacactttg

SEQ ID NO: 759872 - DNA, 120 bp, Artificial Sequence
  ENSG00000214756_17 (sequence is synthesized)
ccaggccgaggcgggcagatcgcttggcccaggagttcgagaccaacctagggcaacatagcgagaccctgtctacaaaaaaaattaaccgggcacgatggcgcctatagtcctagctac

SEQ ID NO: 759873 - DNA, 88 bp, Artificial Sequence
  ENSG00000214756_18 (sequence is synthesized)
agtcctagctactcaggaggctgaggtggaggcttcagtgagccatcattgtgctactgtactcaaccctgggtcgacgccagtgtgt

SEQ ID NO: 759874 - DNA, 120 bp, Artificial Sequence
  ENSG00000214756_19 (sequence is synthesized)
aaggggaagtaccttcattgggttgttctgaaaatcatgaagtaaaagtgtttagcatagtacctggtacatagtaaatgctcaaaagaatgtagcttcttgggaggctgaggcgggcag

SEQ ID NO: 759875 - DNA, 86 bp, Artificial Sequence
  ENSG00000214756_20 (sequence is synthesized)
gaggctgaggcaggagacttgcttggctgccactgcactccgcctgggcaacagagggtgactctgtctcaaaaaaaaaaaaaaaa

SEQ ID NO: 759876 - DNA, 120 bp, Artificial Sequence
  ENSG00000214756_21 (sequence is synthesized)
agtgtggttttagctgtagtagccagattgggcggccgggagtggtgggggtgccgggtggaaggctctgggcggggtctcaggaccctccttttcttggcggggatcgggcttgtggtg

SEQ ID NO: 759877 - DNA, 120 bp, Artificial Sequence
  ENSG00000214756_22 (sequence is synthesized)
acggaggaagagggaaagggctctggccccctcggcgtcatgtcttcggtgctggcggcttcccatccgctggttctatcctcaaacgccgggacaccgggaatctcggagaaggacaac

SEQ ID NO: 759878 - DNA, 120 bp, Artificial Sequence
  ENSG00000214756_23 (sequence is synthesized)
cgagatccagctggctcctccatcggggtgctcacactttctcatttgatttcaggtctgcggacgctgtataccctcctccacttcccgctgcagccaataaaggccgttcctaccata

SEQ ID NO: 759879 - DNA, 120 bp, Artificial Sequence
  ENSG00000214782_0 (sequence is synthesized)
cagttgtacaccatgaccgaacaggtgattggagccaacagtgtacctggcattattgccccagataatgttcacgtcatccagcccagcaaccctgtggcctctggaaatcatctgcag

SEQ ID NO: 759880 - DNA, 120 bp, Artificial Sequence
  ENSG00000214782_1 (sequence is synthesized)
ccttcagaggtgaccacttacccaatctcaccaaaagtaatccactgtgatacaggaagagcaaacttacagaatctactcgtggtgaaccagaactcagcagcaggtgtacagagtcaa

SEQ ID NO: 759881 - DNA, 120 bp, Artificial Sequence
  ENSG00000214782_2 (sequence is synthesized)
cccattgggtatcagcgacagtatccagtgggaacagccagtttgcagacggtgcctggagtgatccaatacacacagggaaccacgaatctccagacatggcctggagaccttcagaat

SEQ ID NO: 759882 - DNA, 120 bp, Artificial Sequence
  ENSG00000214782_3 (sequence is synthesized)
cctctgaatgctaaccctgggctgacacacacctcaaactcatcccagtggaacacgtcatttgcatcatttacttcatttaatcccaagaaattcataaatgaggaggtcagaacatta

SEQ ID NO: 759883 - DNA, 120 bp, Artificial Sequence
  ENSG00000214782_4 (sequence is synthesized)
ggggtgagtgccatccagatcctcatcggcctgacgcacattttctctgcaattaaccctgtgctgtattactatccttttgtgacctggttgtcagggtacccgctctggggaggatta

SEQ ID NO: 759884 - DNA, 120 bp, Artificial Sequence
  ENSG00000214782_5 (sequence is synthesized)
gatcttcattatcattacagatctgagcctttactatgtgacgacatattcaaaggcggtttctggcggtcttctcccctttgccctcctggagttcatcctcacttgtgtggtctcaca

SEQ ID NO: 759885 - DNA, 120 bp, Artificial Sequence
  ENSG00000214782_6 (sequence is synthesized)
ttttgggtgccaggctacctgctgcagacaatttgagaatgtggcagtgattccaaccgtattcagtttcaacccagccaataccaccaccagccctgtcaatgctaccactggtcctgt

SEQ ID NO: 759886 - DNA, 120 bp, Artificial Sequence
  ENSG00000214782_7 (sequence is synthesized)
caatgctgccactggccctgtcagtgccaccaatggtcctgtcaatactaccattcaccctgtcaacaccaccaccagccctgtcaacaccaccaccagccctgtcaatgttaccactgg

SEQ ID NO: 759887 - DNA, 120 bp, Artificial Sequence
  ENSG00000214782_8 (sequence is synthesized)
tcctgtcaatgctaacattggccctgtcaatgtgacaactggccccgttaacactaccactgcccctgccaaagctaccaccagttgtgtcaatgctatccacaccagcaatgtaccccc

SEQ ID NO: 759888 - DNA, 120 bp, Artificial Sequence
  ENSG00000214782_9 (sequence is synthesized)
gaaccctcgtaccaagaaatagctgatttgcacagagatagatgacatgggatgcctgtctcaatgacaaggggatacactgtagctgtatcttttcttctccctgaaacttccatgacc

SEQ ID NO: 759889 - DNA, 120 bp, Artificial Sequence
  ENSG00000214782_10 (sequence is synthesized)
atgaccctagccttgttgccagactgaaatgaacaagcatttcctctcctcttcactcctaagcttcatttttgtttgttattgatgtcttttttttcattcataaataattttcctttg

SEQ ID NO: 759890 - DNA, 120 bp, Artificial Sequence
  ENSG00000214787_0 (sequence is synthesized)
agaagttctcaacacatcctttaaggttccaaacatctactagaaaaggagtgcagatttaaactgagtgaggtgtggagtgggggaagctgactgtgtctggaacaaagaactttgagg

SEQ ID NO: 759891 - DNA, 120 bp, Artificial Sequence
  ENSG00000214787_1 (sequence is synthesized)
aacttgcccagagccctgcactcatcagacctgcagcagacattgcaggcctgaagaaagcaccttttctgctgccatgacaaccatgcaaggaatggaacagaccactccaggggctgg

SEQ ID NO: 759892 - DNA, 120 bp, Artificial Sequence
  ENSG00000214787_2 (sequence is synthesized)
ccctgatgtgccccagctgggaaacatagatgtcatacattcatatctgtgtaaaggattgcaagagaagttcttcaagaggaaacccaaagtccttggggttttgtgtggacataagtt

SEQ ID NO: 759893 - DNA, 120 bp, Artificial Sequence
  ENSG00000214787_3 (sequence is synthesized)
ttcaactcattcggtatccttatcagttgcagcaggaattagaacaacaaaaggtctggttggaggtagtctaggaaagaatatcaccagttcagtcttggctatatcagggatcttaat

SEQ ID NO: 759894 - DNA, 120 bp, Artificial Sequence
  ENSG00000214787_4 (sequence is synthesized)
caatgcaataagcttgacgttttattcattccgttaccattactgtaaccacgatcagttgtcaagtaattgttacatgactatgtccattttaatgggtacggatggcatggtgctcct

SEQ ID NO: 759895 - DNA, 120 bp, Artificial Sequence
  ENSG00000214787_5 (sequence is synthesized)
cttaagtgtgctggaattctgcattgctgtggccctctctgcctttggatgtaaagtgctttgttgtagccccagtgagagcaaaaataaaattagaagcaatactttcatgtgctacct

SEQ ID NO: 759896 - DNA, 120 bp, Artificial Sequence
  ENSG00000214787_6 (sequence is synthesized)
cctttctattcagatgcaatatgatggaaagagactaaatgttgatgtcgacagtactgtatggtgctccggagatggacagtatctggaaaaagtctattatgacattctatcttcttg

SEQ ID NO: 759897 - DNA, 64 bp, Artificial Sequence
  ENSG00000214787_7 (sequence is synthesized)
agtatctggaaaaagtctattatgacattctatcttcttggttgaggattgaaagtatttatcg

SEQ ID NO: 759898 - DNA, 120 bp, Artificial Sequence
  ENSG00000214787_8 (sequence is synthesized)
cccggctgccatcccatctaggaagtggggagcgcctcttcccggccaccatcccatctgggaggtgaggagtgtctccgcccggccgcccatcttctgagatgtggggagcgcctttgc

SEQ ID NO: 759899 - DNA, 62 bp, Artificial Sequence
  ENSG00000214787_9 (sequence is synthesized)
agtgtacccaatagctcattgagaacgggccatgaggacaatggcggttttgtggaatagaa

SEQ ID NO: 759900 - DNA, 120 bp, Artificial Sequence
  ENSG00000214787_10 (sequence is synthesized)
agtgatgtttattatttcagtatccttatcagttgcagcaggaattagaacaacaaaaggtctgggtacggatggcatggtgctcctcttaagtgtgctggaattctgcattgctgtggc

SEQ ID NO: 759901 - DNA, 120 bp, Artificial Sequence
  ENSG00000214787_11 (sequence is synthesized)
cctctctgcctttggatgtaaagtgctttgttgtagccccagtgagtttgtgctaattacaccatcaaattctcacatggcagaaatagcatctcccacaccacttaagacagtttgatg

SEQ ID NO: 759902 - DNA, 120 bp, Artificial Sequence
  ENSG00000214787_12 (sequence is synthesized)
gtatgttgcgtacacaatttgggggtcagtgatgtatccttatcagttgcagcaggaattagaacaacaaaaggtctggaattatctgaagaatttaagctggagaataatgggatcata

SEQ ID NO: 759903 - DNA, 120 bp, Artificial Sequence
  ENSG00000214787_13 (sequence is synthesized)
tttgtgttttggcgagagatcagagttgaaaccactataaggagacaagttagaagactattgaaataagataaaggttggaggtagtctaggaaagaatatcaccagttcagtcttggc

SEQ ID NO: 759904 - DNA, 120 bp, Artificial Sequence
  ENSG00000214787_14 (sequence is synthesized)
gtagacagcagtgtaaagtaattaacagagatatatctgaggatgatgttggattgcttaattaattttcatttctttctaggttggaggtagtctaggaaagaatatcaccagttcagt

SEQ ID NO: 759905 - DNA, 120 bp, Artificial Sequence
  ENSG00000214814_0 (sequence is synthesized)
tggtgaggttgcctgtaactgacttcaaaaggccattccaccattccgtcaagccagctgctttagaacggttgggaacaccgtgagaccagtgaattccacgagcacgaacccactgct

SEQ ID NO: 759906 - DNA, 120 bp, Artificial Sequence
  ENSG00000214814_1 (sequence is synthesized)
gcgcttcatttgctgtgaagtgagtcccttgatcagagcaatgctgtgtggaccatcgtgaaggtggacaaggcattttaaaggggatgtttgggctgaaggtgaagaagaagagaaata

SEQ ID NO: 759907 - DNA, 120 bp, Artificial Sequence
  ENSG00000214814_2 (sequence is synthesized)
aggcagagaaggggttaatcctagccaacaaggctgcgaaagatagtcaaggtgacactgaagcactgcaggaggagccttctcaccaggaaggaccgagaggagatttggtccatgatg

SEQ ID NO: 759908 - DNA, 120 bp, Artificial Sequence
  ENSG00000214814_3 (sequence is synthesized)
atgcttctatctttcctgtcccctcagcttctccaaagagaagatcaaaactgttgactaagatccatgatggggaggtcagatcccaaaattatcaaattgccataaccatcaccgagg

SEQ ID NO: 759909 - DNA, 120 bp, Artificial Sequence
  ENSG00000214814_4 (sequence is synthesized)
ctcgccagctggtgggtgagaacattgacccagttgtgaccattgagattggggatgagaagaagcaaagcacagtgaaggaaggaaccaacagcccattttataatgaatactttgtct

SEQ ID NO: 759910 - DNA, 120 bp, Artificial Sequence
  ENSG00000214814_5 (sequence is synthesized)
tcgacttcattgggccccaagtgcatctttttgacaagatcatcaaaatctccgtctttcaccacaagctgataggaagtgtactgattggctctttcaaagtagacctggggaccgtgt

SEQ ID NO: 759911 - DNA, 120 bp, Artificial Sequence
  ENSG00000214814_6 (sequence is synthesized)
acaaccaacctggtcatcagttctgcaacaagtgggccctgctcacagaccctggtgacatcaggactggcaccaaggggtacctgaaatgtgacatcagtgtcatgggaaaaggtgatg

SEQ ID NO: 759912 - DNA, 120 bp, Artificial Sequence
  ENSG00000214814_7 (sequence is synthesized)
tcttgaagaccagccctaaaacttctgacaccgaggagccaatagaaaagaaccttttgatccccaatgggtttccactggagagaccgtgggccagattctatgtgagactctacaaag

SEQ ID NO: 759913 - DNA, 120 bp, Artificial Sequence
  ENSG00000214814_8 (sequence is synthesized)
cagaagggttgcccaaaatgaattcaagcatcatggcgaacgtcaccaaggcatttgtgggtgacagtaaggacctggtggatccctttgtggaggtctcctttgctgggcagatggggc

SEQ ID NO: 759914 - DNA, 120 bp, Artificial Sequence
  ENSG00000214814_9 (sequence is synthesized)
gaaccacagtgcagaagaactgtgctgatcctgtgtggcatgaacaggtgatcttcaaggaaatgttccctcccttgtgtcggagggtgaaaatccaggtgtgggatgaaggcagcatga

SEQ ID NO: 759915 - DNA, 120 bp, Artificial Sequence
  ENSG00000214814_10 (sequence is synthesized)
atgacgtagccctggcaacccatttcattgacctgaagaaaatctccaacgaacaggatggagacaaaggctttctgcccacctttgggcctgcctggattaacctgtatggctcgccca

SEQ ID NO: 759916 - DNA, 120 bp, Artificial Sequence
  ENSG00000214814_11 (sequence is synthesized)
ggaaccacagtctgatggatgactaccaggaaatgaacgaaggctttggggaaggtgtgtcattcaggggcagaatcttggtagaaattgctgtggaaatcctctcaggacgggcacagg

SEQ ID NO: 759917 - DNA, 120 bp, Artificial Sequence
  ENSG00000214814_12 (sequence is synthesized)
aatctaaattttccaaggccctgaaggagctcaagttgccttccaaggacaaagactccaaatcttccaaaggtaaagacaaggctgacaaaactgaagatggaaaatcccaacaggctt

SEQ ID NO: 759918 - DNA, 120 bp, Artificial Sequence
  ENSG00000214814_13 (sequence is synthesized)
caaacaaaactaactcaaccgaggtggaggtggaatcgttcgatgtccccccggagattgtaccagaaaaaaatgaggaatttttactctttggagcattttttgaagctaccatgattg

SEQ ID NO: 759919 - DNA, 120 bp, Artificial Sequence
  ENSG00000214814_14 (sequence is synthesized)
accggaagattggagataaacccatcagctttgaagtttctattggtaattttggaaacctgattgatggaggatcccatcatgggagtaagaagtcagctgaatcagctgaagaagacc

SEQ ID NO: 759920 - DNA, 120 bp, Artificial Sequence
  ENSG00000214814_15 (sequence is synthesized)
tccttccactgcttcacgaagggcaaggggatgtggcccatgatgttcccattcctatggcctccaccactcacccggagaagccactggtgacagaagggaacaggaattacaactatt

SEQ ID NO: 759921 - DNA, 120 bp, Artificial Sequence
  ENSG00000214814_16 (sequence is synthesized)
tgccatttgaggctaagaagccctgtgtctatttcatcagctcttggggagaccagaccttcaggctgcactggtccaacatgctggagaaaatggcagacttcctggaagaaagtatag

SEQ ID NO: 759922 - DNA, 120 bp, Artificial Sequence
  ENSG00000214814_17 (sequence is synthesized)
aagaagtgagagaattgatcaagatttcacaggaggcacctgaagagaaaatgaaaacagtgctcagtgacttcatcagtcggagcagtgcctttatctctgaagcagaaaaaaagccca

SEQ ID NO: 759923 - DNA, 120 bp, Artificial Sequence
  ENSG00000214814_18 (sequence is synthesized)
agatgttgaaccaaaccactttagataagaagcgacttacgctctgctggcaggagctggaagcaatgtgcaaggaggccaaggggatcattcagcagcagaagaaaaagttatctgttg

SEQ ID NO: 759924 - DNA, 120 bp, Artificial Sequence
  ENSG00000214814_19 (sequence is synthesized)
atgaaatgattcacgaagcccaaaactttgtggaaaaaatccgctttcttgttgatgagccccagcacactatccctgacgttttcatctggatgctcagcaacaacaggagagtggcct

SEQ ID NO: 759925 - DNA, 120 bp, Artificial Sequence
  ENSG00000214814_20 (sequence is synthesized)
atgcccgcatcgcctccaaagacctcctctattcccctgtcgcggggcagatgggcaaacactgcggcaagatcaaaactcacttcctcaaacctcctgggaaacgaccggctggttggt

SEQ ID NO: 759926 - DNA, 120 bp, Artificial Sequence
  ENSG00000214814_21 (sequence is synthesized)
ctgtgcaagcaaaagtcgacgtgtacctgtggctgggctccatcaagcatgccagtgccattttggacaacttgccagtaggctatgaagcagaaatgtcctccaaaggggctggcacca

SEQ ID NO: 759927 - DNA, 120 bp, Artificial Sequence
  ENSG00000214814_22 (sequence is synthesized)
atcaccccccatctaacctgctctaccaagaacagcatgtttttcagctgagggctcacatgtaccaagcccggggcctcatcgcagctgacagcaatggactttcagacccttttgcca

SEQ ID NO: 759928 - DNA, 120 bp, Artificial Sequence
  ENSG00000214814_23 (sequence is synthesized)
aagtcacgttcctttctcactgccagacaacaaagataatctcccagaccctctctccgacctggaaccagatgctgctgttcaatgatttggtgctgcatggagatgtgaaggagctgg

SEQ ID NO: 759929 - DNA, 120 bp, Artificial Sequence
  ENSG00000214814_24 (sequence is synthesized)
cagagtccccgcccttagtggtggtggagctgtatgacagcgacgctgtggggaagccagaatatttgggtgccacagtggctgctcctgttgtgaagctggctgaccaggactatgagc

SEQ ID NO: 759930 - DNA, 120 bp, Artificial Sequence
  ENSG00000214814_25 (sequence is synthesized)
atctccttgctgtatttgaactgctgcaggttcctccttctgggctgcaaggcctcccacccgttgagccaccagacatcacccagatctacccggttcctgccaacattcggccggtgc

SEQ ID NO: 759931 - DNA, 120 bp, Artificial Sequence
  ENSG00000214814_26 (sequence is synthesized)
tgagcaaataccgagtggaggttctcttctggggagttcgggaaatgaagaaggtgcagctcctctctgtggatcggcctcaggctctcattgagtgcggaggacaaggtgtgaagtcct

SEQ ID NO: 759932 - DNA, 120 bp, Artificial Sequence
  ENSG00000214814_27 (sequence is synthesized)
gcgtgatccagagctacaagaacaacccgaacttcagcatccaggcagacgctttcgaagtggaactgcctgagaacgagcttctgcacccgccactgagcatctgcgtggtggactgga

SEQ ID NO: 759933 - DNA, 120 bp, Artificial Sequence
  ENSG00000214814_28 (sequence is synthesized)
gagcttttgggaggagtacccttgtgggcacctacaccatcaactacttgaagcagtttttgtgtaaactcagagagccccttgcccccatcacacaggtggatggaacccagcctgggc

SEQ ID NO: 759934 - DNA, 120 bp, Artificial Sequence
  ENSG00000214814_29 (sequence is synthesized)
acgatatttcagattcgctaacagccactgagtcctctggagcccacagctcctcccaggatcccccagcagatcacatttatgtggatgttgagccacctcccacagtggtgcccgact

SEQ ID NO: 759935 - DNA, 120 bp, Artificial Sequence
  ENSG00000214814_30 (sequence is synthesized)
ctgcccaggcccagccggccatcctggttgacgtccctgactcatccccgatgctggagcctgaacacacacctgtagcccaggagccaccaaaagatggaaaacctaaggatcccagga

SEQ ID NO: 759936 - DNA, 120 bp, Artificial Sequence
  ENSG00000214814_31 (sequence is synthesized)
agccttcccggaggtccactaagaggagaaagaggaccatagcagatgaatctgctgaaaacgtgattgactggtggtctaagtattatgcctccctgaagaaagcccagaaggcaaagg

SEQ ID NO: 759937 - DNA, 120 bp, Artificial Sequence
  ENSG00000214814_32 (sequence is synthesized)
agagaaatcccaagggaaaaaaaggcaatacagaggcaaagccagatgaggtagtggtagatatagaagatgggccaaagaagaagaaagacaaaatgctcaagaagaaacccaaagatg

SEQ ID NO: 759938 - DNA, 120 bp, Artificial Sequence
  ENSG00000214814_33 (sequence is synthesized)
atggaatccccaacctggccatcttgcagatatatgacggtgatctcgagagtgaattcaacaattttgaagactgggtgaaaacttttgagctcttcagaggcaagtctacggaagatg

SEQ ID NO: 759939 - DNA, 120 bp, Artificial Sequence
  ENSG00000214814_34 (sequence is synthesized)
accatggtcttgatggagaccgagtcataggaaaatttaagggctccttctgcatctacaaaagcccccaggattctagctctgaggacagcgggcagctgagaatccagcaagggattc

SEQ ID NO: 759940 - DNA, 120 bp, Artificial Sequence
  ENSG00000214814_35 (sequence is synthesized)
cgcccaatcaccctgtcacagtgctgatcagagtatacattgtcgcggcatttaatcttagtccagctgatccagatggcaaatcagatccctacattgtgatcaagcttggcaagacag

SEQ ID NO: 759941 - DNA, 120 bp, Artificial Sequence
  ENSG00000214814_36 (sequence is synthesized)
aaatcaaagaccgggataaatacatccctaaacaactgaacccagtatttggaaggtcatttgagatccaagccacattcccaaaagagtccctgctctccatcctgatctatgaccatg

SEQ ID NO: 759942 - DNA, 120 bp, Artificial Sequence
  ENSG00000214814_37 (sequence is synthesized)
acatgattggcacagatgaccttattggtgagaccaagatcgacctggagaaccgcttctacagcaaacaccgagccatctgtggcttgcagagccagtatgagatagaaggatacaatg

SEQ ID NO: 759943 - DNA, 120 bp, Artificial Sequence
  ENSG00000214814_38 (sequence is synthesized)
cctggagagacacgtccaaacccaccgaaatcctcactaagctctgcaaagacaacaagctggatggaccctactttcaccctgggaaaatacagataggaaaccaagtcttttctggaa

SEQ ID NO: 759944 - DNA, 120 bp, Artificial Sequence
  ENSG00000214814_39 (sequence is synthesized)
aaactatcttcactgaagaggacactgatgagacagtggagtcttatgaacacctggccctcaaggttttacactcttgggaggatatcccggaagtcgggtgtaggctggttcctgaac

SEQ ID NO: 759945 - DNA, 120 bp, Artificial Sequence
  ENSG00000214814_40 (sequence is synthesized)
acatagaaactcggccactgtaccacaaggataagccaggaatggagcagggccgcctgcagatgtgggtggacatgtttcccaaggatatgcctcaacctggacctcctgttgacatct

SEQ ID NO: 759946 - DNA, 120 bp, Artificial Sequence
  ENSG00000214814_41 (sequence is synthesized)
ctccaaggcgacccaaaggatacgaattgagagtgaccatctggaacactgaagatgtcattttagaggatgagaatatcttcacaggccaaaaatcaagtgatatttatgtgaaagggt

SEQ ID NO: 759947 - DNA, 120 bp, Artificial Sequence
  ENSG00000214814_42 (sequence is synthesized)
ggttaaagggcttggaggatgacaagcaggagacagatgtgcattacaactccctgactggagagggcaacttcaactggcgcttcctgtttccctttcagtatctcccagctgagaagc

SEQ ID NO: 759948 - DNA, 120 bp, Artificial Sequence
  ENSG00000214814_43 (sequence is synthesized)
aaatggtcattaccaagagggagaacatcttctctttagagaagatggagtgtaagactcctgctgtgttggtgctgcaggtttgggattttgaaaggctgtcctcagatgacttcctgg

SEQ ID NO: 759949 - DNA, 120 bp, Artificial Sequence
  ENSG00000214814_44 (sequence is synthesized)
gcaccctggaaatgaacctcaacagtttccctcgagcagctaagtctgccaaagcctgtgatcttgccaagtttgaaaatgcaagtgaggagaccaagatctctatattccagcaaaaac

SEQ ID NO: 759950 - DNA, 120 bp, Artificial Sequence
  ENSG00000214814_45 (sequence is synthesized)
gtgtgcgtggctggtggcctttttctaaaagcaaagaactcacaggcaaggttgaagctgagttccacctagttacagcagaagaagctgagaaaaatcctgttggaaaagcccgaaagg

SEQ ID NO: 759951 - DNA, 120 bp, Artificial Sequence
  ENSG00000214814_46 (sequence is synthesized)
agccagagcccctggccaagcccaaccgcccagacacctccttttcgtggttcatgagcccctttaagtgcctgtactacctcatctggaagaattacaaaaagtacatcatcattgctt

SEQ ID NO: 759952 - DNA, 120 bp, Artificial Sequence
  ENSG00000214814_47 (sequence is synthesized)
tcattctcatcatcctcatcatcttcctcgtccttttcatctacaccttgccaggagccatcagccgaaggatcgttgtgggctcatagaggatcatggaggacccagatcctcgccata

SEQ ID NO: 759953 - DNA, 120 bp, Artificial Sequence
  ENSG00000214814_48 (sequence is synthesized)
tactaatcctctcttccttatctgggagcatctaagaacatgtcccatgcatggcactgtgctgagtgctaaggggacagatcaacccttcttggaagagatggaaaagaaacatttcct

SEQ ID NO: 759954 - DNA, 120 bp, Artificial Sequence
  ENSG00000214814_49 (sequence is synthesized)
ccctgctccaacccctgcctccaagtttcaaacttgtaaggcatgttttatcccttgggcagcatgaaataaggcactttcacctcatggtaatcaacaatgacctcaaattgacttaga

SEQ ID NO: 759955 - DNA, 120 bp, Artificial Sequence
  ENSG00000214819_0 (sequence is synthesized)
gagacgctcaagagagcaagatgttctcctgttgcttccccacttcgagaggttgctgcttcaggaatggagggagtgagagccttttccgacaatgccgaagaaggctcatccctcacc

SEQ ID NO: 759956 - DNA, 120 bp, Artificial Sequence
  ENSG00000214819_1 (sequence is synthesized)
ccagacgcctgtggccctttgtaagaaggcgcacccaggtaccacaggacagcccggggcaggccctagctggccaggccacaccagagatcccatcggggctgcctctgcacattgtcc

SEQ ID NO: 759957 - DNA, 120 bp, Artificial Sequence
  ENSG00000214819_2 (sequence is synthesized)
ttgtccaggaggagattcgggagcccatggaggcacagacacatgctcctggtccgtacgcagacatagcagcacttgcggcaccggctgtcgagccaaagccagcatgggaagagcccc

SEQ ID NO: 759958 - DNA, 120 bp, Artificial Sequence
  ENSG00000214819_3 (sequence is synthesized)
ctccagagagagcgctggaggtggagggagctccagccaaggaccagcccagccaggagctgcctgaaatcatggcacctactgtagccactggccttaatgctggagctgaaaacgtgg

SEQ ID NO: 759959 - DNA, 120 bp, Artificial Sequence
  ENSG00000214819_4 (sequence is synthesized)
acatggaggcggagaccagggcattcagactggactcctgtacctcgctggagagaggcttctctcattcgccggaaccacagccctgctgctgcagggcctgtttattgtgctaattct

SEQ ID NO: 759960 - DNA, 120 bp, Artificial Sequence
  ENSG00000214819_5 (sequence is synthesized)
ggtggggtatatctctgtgaaggtgatgctcaagagcattaaaacaaggctgggaagaagagttccagcagctcctcctgctctcagacgcaatcttctcctccaggcatggaagtgtgt

SEQ ID NO: 759961 - DNA, 120 bp, Artificial Sequence
  ENSG00000214819_6 (sequence is synthesized)
ctgcaactgggcatccaggctgtttgcccctaatgtgctgccccgaacgggctcttaacaggtgggcaggggttgaggggaccaggaggtggctccaaagggtacagcaaggaaagcttt

SEQ ID NO: 759962 - DNA, 120 bp, Artificial Sequence
  ENSG00000214819_7 (sequence is synthesized)
taaagacagctgttgtgctccaggctctccatgccaccacctgccctagcatttattaatagtgttagaattacaagtttatgaaatgaaatataaataaagtttgatttctgaaacttc

SEQ ID NO: 759963 - DNA, 120 bp, Artificial Sequence
  ENSG00000214827_0 (sequence is synthesized)
gatttacaaaggaatgaatctgcatgaaagtttaccaacaagatccctgcctgccttttgcaggctctcctgcaaccatctacttcatttttgatctcaggaagaccagagctgaggctt

SEQ ID NO: 759964 - DNA, 120 bp, Artificial Sequence
  ENSG00000214827_1 (sequence is synthesized)
aggtggagaaaagcagggctagaattggaacccaaagcccagaatggcaggagaggatgtgggggctccacccgatcacctctgggttcaccaagagggtatctaccgcgacgaatacca

SEQ ID NO: 759965 - DNA, 120 bp, Artificial Sequence
  ENSG00000214827_2 (sequence is synthesized)
gccaagtcaccttcttacctcccagctacctctcatgtggcaactctacccggaggagcgctacatggataacaactctcgcttgtggcagatacagcatcatttaatggtcaggggagt

SEQ ID NO: 759966 - DNA, 120 bp, Artificial Sequence
  ENSG00000214827_3 (sequence is synthesized)
acaggagctgttgcttaagcttttgcctgatgactaacctggtgctgggattctacgaagatatgctcctttgttctgttcagtatttggcaatcacttcatccactactgcagtgcacc

SEQ ID NO: 759967 - DNA, 120 bp, Artificial Sequence; identical to SEQ ID NO: 648292
  ENSG00000214827_4 (sequence is synthesized)

SEQ ID NO: 759968 - DNA, 120 bp, Artificial Sequence; identical to SEQ ID NO: 648293
  ENSG00000214827_5 (sequence is synthesized)

SEQ ID NO: 759969 - DNA, 120 bp, Artificial Sequence; identical to SEQ ID NO: 648294
  ENSG00000214827_6 (sequence is synthesized)

SEQ ID NO: 759970 - DNA, 120 bp, Artificial Sequence
  ENSG00000214827_7 (sequence is synthesized)
gggtcatgaagaatactgcaagtgaaactgcagagagaggttacgtaggcagaaagcaagtcaacaaaagcacttagtcaggatccgtaacttgaaattgactcctttggaaattgccat

SEQ ID NO: 759971 - DNA, 120 bp, Artificial Sequence
  ENSG00000214827_8 (sequence is synthesized)
ctggacctgggatctgatgaatcccacaaaagtcagcaccttctacagaacagatgccctgatcaccaaggacttggtactgatttagagagaagagagcagctcctagcagcatcaaca

SEQ ID NO: 759972 - DNA, 120 bp, Artificial Sequence
  ENSG00000214827_9 (sequence is synthesized)
tctatttgtcgcttatttgccctgcagcaattcacctgcctttccttctcccatcctgtaaatatcctaggttttgctccagtgtttcccatcccagtactgacctaatttggatctgct

SEQ ID NO: 759973 - DNA, 120 bp, Artificial Sequence
  ENSG00000214827_10 (sequence is synthesized)
gagtatttagagggctctgaaaagagatatgcattgatgaaattagctacaaaggcttgtgggcctttttttctatctgaaatcgtgtcttcaaattactggaagttgctgatcaaaatt

SEQ ID NO: 759974 - DNA, 120 bp, Artificial Sequence
  ENSG00000214827_11 (sequence is synthesized)
gtgggctcttgaattcattctctgattacagatattttaaataagctggtttctataagaacttcaagaaaaaccattttagctgcttaactggcacctttctcaggaagtaataacacc

SEQ ID NO: 759975 - DNA, 120 bp, Artificial Sequence
  ENSG00000214827_12 (sequence is synthesized)
aaatattgctgattcctaggaaaacatttactacttgtaaagaatttcctgagttaaagtagttataacagtttatatacattaaaagtaaggttttactttaaaaaaaaaagtcttggg

SEQ ID NO: 759976 - DNA, 120 bp, Artificial Sequence
  ENSG00000214827_13 (sequence is synthesized)
aataatagctaccatgtattggagtcctttccaggcactattgtatgtactttatatactttatcacatttaatcctcctgtcaatgctttgaggtaggtatgattcccattttatatat

SEQ ID NO: 759977 - DNA, 120 bp, Artificial Sequence
  ENSG00000214827_14 (sequence is synthesized)
gagtaataaaaaaagctcaaggagtttaatcatttatcaagggtttcttctgcgaatgatagagccaggctgcgccgtcggctcctctagcctaacgttggtttacagtattcaaaaaga

SEQ ID NO: 759978 - DNA, 120 bp, Artificial Sequence
  ENSG00000214827_15 (sequence is synthesized)
gttgattgaattcaaggttttttttccatgtaaagctatttatatcttccaagcctaatgaaatggatattataaaaatacagttgattcatcctatgtttgggaagagtatttttagtg

SEQ ID NO: 759979 - DNA, 120 bp, Artificial Sequence
  ENSG00000214827_16 (sequence is synthesized)
taattattttccagcaattgtaagggcatatactgcttgtctcagaagaaaattccacgtagaggggctttaaagtctttatggaaaaaagaaaaataaaaatcatttttcttgttttag

SEQ ID NO: 759980 - DNA, 120 bp, Artificial Sequence
  ENSG00000214827_17 (sequence is synthesized)
agccctgcatttcactccattccagggtttctgggacacccgagaaagcacgtagtccagggagcacgtctgccaactgaaggccttgacaaatgactttctgtactggctgagggccag

SEQ ID NO: 759981 - DNA, 120 bp, Artificial Sequence
  ENSG00000214827_18 (sequence is synthesized)
ggcccagcgtactgataaggaagctcttccagaaaaagggttgatttacaaaggaatgaatctgcatgaaagtttaccaacaagatccctgcctgccttttgcaggctctcctgcaacca

SEQ ID NO: 759982 - DNA, 120 bp, Artificial Sequence
  ENSG00000214827_19 (sequence is synthesized)
agtggcccagggtgggagacctggaagttttagcctagctgttctcaaggcggattaattagcccaagaaacattatattcatgagacgagtttcctaagggcacgagtccagcaaattc

SEQ ID NO: 759983 - DNA, 120 bp, Artificial Sequence
  ENSG00000214842_0 (sequence is synthesized)
gacagatcctttccattcgctgtcatgtctctccctcagcccacgccgcggatggccgagctcagaaagcctacctcctctttaacgcctcctgaggacccggattcccaaccacctagt

SEQ ID NO: 759984 - DNA, 120 bp, Artificial Sequence
  ENSG00000214842_1 (sequence is synthesized)
agcaagcggctctgtcttgaggagcctggaggtgtctttaaggcgggctggcgactgcctctggtgcctcgcttgtctgaggcggaaaaagtctgggagttgtcccctagacccttcaag

SEQ ID NO: 759985 - DNA, 120 bp, Artificial Sequence
  ENSG00000214842_2 (sequence is synthesized)
ggactccttgtttcaacgaatgctattttcgataactccacagactcgtgtgtggagaaatcagtcagtgggaagcagatatgtaatctgaaatgctcaaatctcaaattccaaatgagt

SEQ ID NO: 759986 - DNA, 120 bp, Artificial Sequence
  ENSG00000214842_3 (sequence is synthesized)
agctgtttgcagtctcccccctcacaaagtcctgattctgatttgagggcttcaggaaggtctgaggcaggcctgcatgacagagaggctttcagtgtgcaccgcagtaatagctccaaa

SEQ ID NO: 759987 - DNA, 120 bp, Artificial Sequence
  ENSG00000214842_4 (sequence is synthesized)
gcaggggttagtcaacttctgcccagcacctctatacacgatatacatggaattagaaatgagaatcgaaaacaacagtttgtccaaggaagagacaatgttcacaaagaaaatccattt

SEQ ID NO: 759988 - DNA, 120 bp, Artificial Sequence
  ENSG00000214842_5 (sequence is synthesized)
ttagatgttaccttttacaaggaaactaaatcaccatttcatgaaattaagaacagatgtaaagctaacagtgttgtgccatcaaataaaagagaaaataacatttcatcatctgtacta

SEQ ID NO: 759989 - DNA, 120 bp, Artificial Sequence
  ENSG00000214842_6 (sequence is synthesized)
aaaatatcaaaatctcaaaaccagcccagcttggaaattgccaaacctagctattttagagatagcggcacaataagtgtccctcagtttccaatggacttaaatagcaaaatgtcctct

SEQ ID NO: 759990 - DNA, 120 bp, Artificial Sequence
  ENSG00000214842_7 (sequence is synthesized)
gtctatttaaaggaaatagcgaagaaaaagaatgacaaaaaagaggcatatgttagggatttcacaaacatttactggtcccaaaatagacctgatgttaagaagcaaaagttacagaat

SEQ ID NO: 759991 - DNA, 120 bp, Artificial Sequence
  ENSG00000214842_8 (sequence is synthesized)
gataaaaaaactgtagaagcggaaaacattttttccaaatgttatgaaaatgactacccatcactcagtagccaaaatacttgtaagagaaaagacttgatcagttcaaactactgtaac

SEQ ID NO: 759992 - DNA, 120 bp, Artificial Sequence
  ENSG00000214842_9 (sequence is synthesized)
tgcagtagtatccagtgtaatgtaagagactctagaaagaatttcgctatactagaaaatgcaaattgggaggaagcagaatgtctggacagttacgtacttaccaggctggaaaaatct

SEQ ID NO: 759993 - DNA, 120 bp, Artificial Sequence
  ENSG00000214842_10 (sequence is synthesized)
caaaactgggactgtaacgttagacatattttgagaagaaatagaggaaattgttggattataaataattgcaagactaaatgtgaaaatatgaaaaaaactgaagaaaaatggaattgg

SEQ ID NO: 759994 - DNA, 120 bp, Artificial Sequence
  ENSG00000214842_11 (sequence is synthesized)
ctattattattagaaatagaccttttaagcaaggaagattaccactgtgcaaaagtcatcaatgcatatgaagaacaatcaaagcttctcgtaagagaaatattaggtagtcagacagct

SEQ ID NO: 759995 - DNA, 120 bp, Artificial Sequence
  ENSG00000214842_12 (sequence is synthesized)
ttaataacgactgtttggctaaatggtaaaggagaaaatgataatactctacagttgagatacaatactacacaaaaagtctttcatgtgaacaacccttttgaaagtttcattatagaa

SEQ ID NO: 759996 - DNA, 120 bp, Artificial Sequence
  ENSG00000214842_13 (sequence is synthesized)
attttttatttccataaaagtatttcaggaaataaaaaagataatagtattttaacctgctgtaacattttgaagtgtaaaaagcaaattggtataattggtattcaaaatctaataacc

SEQ ID NO: 759997 - DNA, 120 bp, Artificial Sequence
  ENSG00000214842_14 (sequence is synthesized)
agaaacatgaatacaaatataaagaatggaattttaagcatatatttacaagatagtgtttcagaacctttagatattctattgaaaactaacatagcttttttgctcaataactttgac

SEQ ID NO: 759998 - DNA, 120 bp, Artificial Sequence
  ENSG00000214842_15 (sequence is synthesized)
taacaagaattgaaaatgattttgaattagaagaggaatgcattttcaagtgcatgctttatttgaagtatccaaaaaatatagtggaaaatcatactgcatatctagtaaagattttaa

SEQ ID NO: 759999 - DNA, 120 bp, Artificial Sequence
  ENSG00000214842_16 (sequence is synthesized)
cttcttcaagactattagaagataatatgaaacctatgttaaagaaaaggaagttatttagaactgaacaagtttttgaaaagtctaagaaaaaactcattaattccttcagtatgacaa

SEQ ID NO: 760000 - DNA, 120 bp, Artificial Sequence
  ENSG00000214842_17 (sequence is synthesized)
ctcaaaatacaggttttccgatttttgaaacatatgaaaaaattccccttttaatggactttgatgacatggatgaaatttctttaataagagaaattacttgtcagaatatgagttgtc

SEQ ID NO: 760001 - DNA, 120 bp, Artificial Sequence
  ENSG00000214842_18 (sequence is synthesized)
ctcaacaagttgtgaatgtggaaaattgggctcactataattctagtactgttaaagcacatggtaattcttgtcctcaatttatacagaacaaccgaggatacattaatgaaaattttt

SEQ ID NO: 760002 - DNA, 120 bp, Artificial Sequence
  ENSG00000214842_19 (sequence is synthesized)
atgaagtaaatatgcacagccaagatttaaatatggaaagaaaacagggacataataagatcagtaactttgactgtgagcacatatttgaagatctctgcaatgttaggcaacaggcca

SEQ ID NO: 760003 - DNA, 120 bp, Artificial Sequence
  ENSG00000214842_20 (sequence is synthesized)
taccagcaagccacaacataatacataatgaagagacccataccacttctataactcaagtactaaatttttggaacttgctaagtgaaatagaagaaaaaaaatatgacttaattttga

SEQ ID NO: 760004 - DNA, 120 bp, Artificial Sequence
  ENSG00000214842_21 (sequence is synthesized)
aagaggaagtaaaagtcacagctgaaagtttaacaaatagttgccaagttcacaaagatactaagatagaaaaggaagagaaagatagtttttttccaatggatgacatgttttctgtac

SEQ ID NO: 760005 - DNA, 120 bp, Artificial Sequence
  ENSG00000214842_22 (sequence is synthesized)
agtcagtttcattaataagtaaggaagtaaatgtggaagaaaataaatatgttaatcaaaattatgtaacaaatacaaatgaatatgagagtattttgccagaaagggagatagctaatt

SEQ ID NO: 760006 - DNA, 120 bp, Artificial Sequence
  ENSG00000214842_23 (sequence is synthesized)
caaaggattttcacagaaagaatgactctgcattatatattaatcatcaatttgaaactggtctgagtgaagggaatgatgaatgttttcaggacttagctgctaaatatttatcaacag

SEQ ID NO: 760007 - DNA, 120 bp, Artificial Sequence
  ENSG00000214842_24 (sequence is synthesized)
aagctctgacaatagtaaaagattttgagatgaagagaaaatttgacttagtacttgaagaacttcgtatgtttcatgaaattagtagggaaaatgaacttctaagcactgtggaaacaa

SEQ ID NO: 760008 - DNA, 120 bp, Artificial Sequence
  ENSG00000214842_25 (sequence is synthesized)
acaatgggcaagaaaattactttggagaaaatgatgctgagaaggtaaaaatggagatagaaaaagatttgaaaatggttgtggtcaacaaaatacgtgcatcttcctcgttccatgata

SEQ ID NO: 760009 - DNA, 120 bp, Artificial Sequence
  ENSG00000214842_26 (sequence is synthesized)
ctatagcaggtcctaatatgggcaaaagtcaccaaagtttatttaaatggaaaactgtacccaataatggagaacaggaagttcctaatgagagttgttatccaagtagatcagaggaag

SEQ ID NO: 760010 - DNA, 120 bp, Artificial Sequence
  ENSG00000214842_27 (sequence is synthesized)
aattactttactctacttctgagaaagattgtgaaacacctttacctaaaagacctgcttttctccctgatgaatgtaaagaagaatttaattatttattgagaggaggtagtcactttc

SEQ ID NO: 760011 - DNA, 120 bp, Artificial Sequence
  ENSG00000214842_28 (sequence is synthesized)
cacatggcatttcaagagtacgaccgcttaagacatgcagtaggccaatcaggattggtttgtcaagaaaagcaaggattaaacaacttcatccttatctgaaacaaatgtgttacggaa

SEQ ID NO: 760012 - DNA, 120 bp, Artificial Sequence
  ENSG00000214842_29 (sequence is synthesized)
acttaaaagaaaatttttgactttcatatttcaaaacattttacaacatctagaaatgttttgttttctttggatatatgttcttccagcttgggggtttggggcttgctttattataaa

SEQ ID NO: 760013 - DNA, 120 bp, Artificial Sequence
  ENSG00000214842_30 (sequence is synthesized)
gtggagaagtttttttttttgagtgtataaattatggtattacctttcaaagttataaaatattttatggatttttatatgatataaaaatgtacacattaaagccgtttcattattgga

SEQ ID NO: 760014 - DNA, 120 bp, Artificial Sequence
  ENSG00000214860_0 (sequence is synthesized)
gccagacttagctgaccagccagcaaggacgcccgctgcctcccacctgccctcctgccctccttcaccagccaagcccagcctgagccagcacctgcctttatgaccatgttcaaggga

SEQ ID NO: 760015 - DNA, 120 bp, Artificial Sequence
  ENSG00000214860_1 (sequence is synthesized)
ctgagcaaaggctcccaggggaaggggtcccccaaggactccccagccaaggggtcccccaaaggctcccccagcaagcacagctgaatgccacccaggagctgaccctgctcatctccc

SEQ ID NO: 760016 - DNA, 120 bp, Artificial Sequence
  ENSG00000214860_2 (sequence is synthesized)
acatgcaagccagcgccgaccaggtggagcgggacatcctggagacgcagaagaggctgcagcaggaccggctgaacagtgagcagagccaggccctgcagcaccagcaggagacgggca

SEQ ID NO: 760017 - DNA, 120 bp, Artificial Sequence
  ENSG00000214860_3 (sequence is synthesized)
gcagcctgaaggaggccgaggtgctgctcaaggacctcttcctggacgtggacaaggcccggcggctcaagcacccgcaggctgaggagactgagaaggacatcgagcagctgcacgagc

SEQ ID NO: 760018 - DNA, 120 bp, Artificial Sequence
  ENSG00000214860_4 (sequence is synthesized)
gggtgacccaggagtgtgcggagtactgtgccctgtacgagaagatggtgctgccgccccgacgtgggatccaaggtcgactgggcacacgtgctggagcagaaacagaagctggtctgc

SEQ ID NO: 760019 - DNA, 120 bp, Artificial Sequence
  ENSG00000214860_5 (sequence is synthesized)
gcaggccagtatgggccgggcatggcggagctggaggaacagatcgcggagctcaacatcgtgcagaaggagatcaacgaccaaggagagcagctgcggagcctggtggggccggatgcc

SEQ ID NO: 760020 - DNA, 120 bp, Artificial Sequence
  ENSG00000214860_6 (sequence is synthesized)
gccaccatccggagccaataccgagacctactgagggcggcgtcgtggcgcgggcagagcctgggcagcctgtacacgcactgcagggctgcacgtggcagctgagcgccctggcggagc

SEQ ID NO: 760021 - DNA, 120 bp, Artificial Sequence
  ENSG00000214860_7 (sequence is synthesized)
agcagcgccgcatcctgcagcaggactggagcgacctcatggccgaccctgcgggcgtgcggcgggaatacgagcacttcaagcagcacgagctgctgagccaggagcagagcgtaaacc

SEQ ID NO: 760022 - DNA, 120 bp, Artificial Sequence
  ENSG00000214860_8 (sequence is synthesized)
caggcccaccaggaggccctgaagatggagtggcagaacttcctgaacctgtgcatctgccaggagacccagctccagcacgtggaggactacagccggattctgtgtccatcttcctct

SEQ ID NO: 760023 - DNA, 120 bp, Artificial Sequence
  ENSG00000214860_9 (sequence is synthesized)
cctcattgactctgcatgaaggggatttctggtggagtaagggtagcagctcttgccgcacgtgcagagagagaggaacttccagtgcccgctatggagccacagcccacagcatgggga

SEQ ID NO: 760024 - DNA, 120 bp, Artificial Sequence
  ENSG00000214860_10 (sequence is synthesized)
agtccccatccagaggcagtgctgcagctagaggtagctccagagtcctccgggccctgcaccgatacagccaaagaccagcaaagcgacaagctgccagacctcatgccacctgctgta

SEQ ID NO: 760025 - DNA, 120 bp, Artificial Sequence
  ENSG00000214860_11 (sequence is synthesized)
gccactgggctcagccctggagctgagagcatcgctggagatagacgtggcagagaagaggttgcgagcatggccccagccagcagctcccacgctgcccctagtcctgggcatggagcg

SEQ ID NO: 760026 - DNA, 120 bp, Artificial Sequence
  ENSG00000214860_12 (sequence is synthesized)
agccttggtgtcagagaccagggtgtgcagtctgagctcctctaccttactaaagagaggcctcttttatttaccagagccacagccctgctgcctcaggaccttttcattctgccggtg

SEQ ID NO: 760027 - DNA, 120 bp, Artificial Sequence
  ENSG00000214860_13 (sequence is synthesized)
ctggggctgtctatctgcaagctggaggtgttgagagcaggaaaaggaggctgtgaggaagggttcgggcagctcctcctgctctcagaggtggcctcctcctccaggcatggaggtctg

SEQ ID NO: 760028 - DNA, 120 bp, Artificial Sequence
  ENSG00000214860_14 (sequence is synthesized)
tccactactgggcttctgggctatttgcccctgatttgctccctggtacgggctcttcttaacaggcaggcaaggggtgcggggaccaggtgagggcttcaaagggtacagtaccaaatc

SEQ ID NO: 760029 - DNA, 120 bp, Artificial Sequence
  ENSG00000214860_15 (sequence is synthesized)
ttccaaactcagcacttgtgccctggggtctccaaactgtcttctgccctagaatttattcatactgttaaattaccagtttatgcaaatgatatgtaaataaagctcaattttttgaaa

SEQ ID NO: 760030 - DNA, 80 bp, Artificial Sequence
  ENSG00000214866_0 (sequence is synthesized)
agccccgtcccgtccccgtccagcccccgtcccgtccccgtcccgtccccgtcctgcgccagcggctggagcggacctcc

SEQ ID NO: 760031 - DNA, 120 bp, Artificial Sequence
  ENSG00000214866_1 (sequence is synthesized)
cgctgcccgcgctgccgcagcctctcggccccggcgagcgaggagcggggcgcggctatgggaacccgcgggccctccgcgccggtggacaccacgcccgccaagaccatcgtggtgtac

SEQ ID NO: 760032 - DNA, 120 bp, Artificial Sequence
  ENSG00000214866_2 (sequence is synthesized)
cgcaacggggacccgttctacgtgggcaagaagttcgtgctgtcgcggcgccgcgcggccaccttcgaggcgctgctggagcagctcacggagcaggtggacgtcccgttcggcgtgcgc

SEQ ID NO: 760033 - DNA, 120 bp, Artificial Sequence
  ENSG00000214866_3 (sequence is synthesized)
cgcctcttcacgcccacgcgtgggcaccgggtgctggggctggacgcgctgcaggcgggcggcaagtacgtggcggcgggccgcgagcgcttcaaggagctcgattatattcatatagtt

SEQ ID NO: 760034 - DNA, 120 bp, Artificial Sequence
  ENSG00000214866_4 (sequence is synthesized)
ccccgaaaacctgcaaagataaggaagttgaaggaaatcaaaccagtggtgcattgtgatataaatgtgccttccaagtggcaaacatatcatcgtatatctcgacatataaatgttttt

SEQ ID NO: 760035 - DNA, 120 bp, Artificial Sequence
  ENSG00000214866_5 (sequence is synthesized)
acaaatggaagattatttattccacctgcaaaaatcattatacccaaatttagtctgtccgattgggacatcgtgctggccacgatcggagaaaaagtcttccctctaggaggcgttcgg

SEQ ID NO: 760036 - DNA, 120 bp, Artificial Sequence
  ENSG00000214866_6 (sequence is synthesized)
aaattatttacaatgaatgggcatcttttgggcgactcaaaggatttgcaagacaatcacttttatgttgctgtgggactggagaccttcaaatattttccttactggaagtctccaagg

SEQ ID NO: 760037 - DNA, 120 bp, Artificial Sequence
  ENSG00000214866_7 (sequence is synthesized)
gtgcccagtgaggtccaacaaaggtatgcgaatgttgaaaaaaactcacagagaaagaaaaaagtggactccaaaggaaaagaaccttgtaaatatgatggcataccccctaaaacacag

SEQ ID NO: 760038 - DNA, 120 bp, Artificial Sequence
  ENSG00000214866_8 (sequence is synthesized)
caaaggggtgcagaaggtgacgtgtataaagcaccgactcctagcaaggaaacccaaggggcgctggacgtcaaagaggagcacaatgtgcagctggaggtgcctgtggaccagagacaa

SEQ ID NO: 760039 - DNA, 120 bp, Artificial Sequence
  ENSG00000214866_9 (sequence is synthesized)
gctgagatagttaaagaagatgaagagatacatgagaacacccctgattttgagggcaacaaggataaagaagatgcaaggctttgtgaagacgttgaaagaaagatggcccgggagtgg

SEQ ID NO: 760040 - DNA, 120 bp, Artificial Sequence
  ENSG00000214866_10 (sequence is synthesized)
aaacctgtagattaacaaaaccacctttattattacctgaagtccacttttcttcaaccatggggcttccacgtcacatatggacattttaacagcaagaaaatcacatgtggggtgaaa

SEQ ID NO: 760041 - DNA, 120 bp, Artificial Sequence
  ENSG00000214866_11 (sequence is synthesized)
ctaaagccccacacagtggtgtcttctcgaaagccaaagacgaggtttcataattgagctccatttcttcttattccctttctcagtgatatttctttttagtaaacattttaaagaatg

SEQ ID NO: 760042 - DNA, 120 bp, Artificial Sequence
  ENSG00000214866_12 (sequence is synthesized)
aaacgtggttctttatcattaagcccccaaaagatcattcagaaagtgagaagaatttgaaaaaacgtgtgtatattttcccctcatgatatttttttcctggaatgtgtacgggaaggt

SEQ ID NO: 760043 - DNA, 120 bp, Artificial Sequence
  ENSG00000214866_13 (sequence is synthesized)
atctcatttatatgtaacttggaggttgtcacaaaagcaggtactgataacctttgctatgtaaagttcaaagtataaaaatgttttaccttctgaataactagttcaaagtgaaaagga

SEQ ID NO: 760044 - DNA, 120 bp, Artificial Sequence
  ENSG00000214866_14 (sequence is synthesized)
aaaaaatccagggttcgctggtgacatggtttggctgtatgtcctcactcaaatctcatgtcgaattgtaatccccatgtgttggaggagggggccggtgggaggtgattgaatcatggg

SEQ ID NO: 760045 - DNA, 120 bp, Artificial Sequence
  ENSG00000214866_15 (sequence is synthesized)
ccttgctgttctcgtgatagtgagtgagtgctcccgagatccagttgtttaaaagtgtgtagcacttcccccttcactctctctctcctgctctgccatgtgaaaaagattcttgcttcc

SEQ ID NO: 760046 - DNA, 85 bp, Artificial Sequence
  ENSG00000214866_16 (sequence is synthesized)
ccccttcactctctctctcctgctctgccatgtgaaaaagattcttgcttccccttcgcccttctgctcctcctatacagcctgc

SEQ ID NO: 760047 - DNA, 120 bp, Artificial Sequence
  ENSG00000214866_17 (sequence is synthesized)
tcgggaagacgatggtgtccgtgggaggtgacagagcgggaccctggcgaggatcccttgagtggatgtcaccatcgtccaaatcaaaccagtggtgcattgtgatataaatgtgccttc

SEQ ID NO: 760048 - DNA, 120 bp, Artificial Sequence
  ENSG00000214866_18 (sequence is synthesized)
aatatgaacatatcagtcacttctgacagccaagcagcacgacaggatgccgtagtgacaagttccaggtgcaacgtgtataagaagataattgtgacattttttccccccaaaggcttc

SEQ ID NO: 760049 - DNA, 120 bp, Artificial Sequence
  ENSG00000214866_19 (sequence is synthesized)
tcactaagacaagaagaataaacacctgaggaacaagagtcctctgagcagccatgcctgggacagccacactgagagcagccacctgagatgccagagtcccccacgcagccatgcctg

SEQ ID NO: 760050 - DNA, 120 bp, Artificial Sequence
  ENSG00000214866_20 (sequence is synthesized)
ggacagccacacccagagcggccacctgagacgccggagtcccccacacagctgtcctcaggacagccacaccgagagcagccacctgagatgccggagtcccccacgcagccgtcctca

SEQ ID NO: 760051 - DNA, 120 bp, Artificial Sequence
  ENSG00000214872_0 (sequence is synthesized)
agatggagcagaaggaagggaagctctctgaggatgggaccaccgtctccccagctgcggacaaccctgagatgtcaggaggtggagcccctgcagaggagaccaaaggcacagctggaa

SEQ ID NO: 760052 - DNA, 120 bp, Artificial Sequence
  ENSG00000214872_1 (sequence is synthesized)
aggccatcaatgaggggcctcccactgagtcaggaaagcaggaaaaggcaccagccgaggacggcatgtcagcagaactccagggggaagcaaatggattagatgaggtcaaagtggaat

SEQ ID NO: 760053 - DNA, 120 bp, Artificial Sequence
  ENSG00000214872_2 (sequence is synthesized)
ctcagagggaggctggtgggaaagaggatgctgaggctgaacttaaaaaggaggatggtgagaaggaagagaccactgtgggttctcaggagatgactggcaggaaagaagagaccaaat

SEQ ID NO: 760054 - DNA, 120 bp, Artificial Sequence
  ENSG00000214872_3 (sequence is synthesized)
ctgaacccaaagaggctgaggaaaaggagagcacgctggcctctgagaagcagaaggctgaggagaaagaggccaaacctgaatctgggcagaaagccgatgccaatgacagagacaagc

SEQ ID NO: 760055 - DNA, 120 bp, Artificial Sequence
  ENSG00000214872_4 (sequence is synthesized)
ctgaacctaaggcaacagttgaggaggaggacgccaagacagcctctcaggaggagacaggccagaggaaagagtgcagcactgaacccaaggagaaggctactgatgaagaggccaagg

SEQ ID NO: 760056 - DNA, 120 bp, Artificial Sequence
  ENSG00000214872_5 (sequence is synthesized)
ctgaatcgcagaaggctgttgtggaggatgaggctaaggctgaacccaaggagcccgatgggaaagaggaggccaaacatggtgcaaaagaggaggctgatgcaaaagaggaggcggagg

SEQ ID NO: 760057 - DNA, 120 bp, Artificial Sequence
  ENSG00000214872_6 (sequence is synthesized)
agctccccagaggagtggcctgagagccccactggggaggggcacaacctcagcacagatgggctgggtccagactgtgtagcttccggacagaccagtccttcagccagtgagtcttca

SEQ ID NO: 760058 - DNA, 120 bp, Artificial Sequence
  ENSG00000214872_7 (sequence is synthesized)
cccagcgacgtgccccagagtccccctgagtccccttcctcaggggagaagaaggagaaggcaccagagcgcagggtatcagcccctgctcggccccgggggccccgggcacagaaccgc

SEQ ID NO: 760059 - DNA, 120 bp, Artificial Sequence
  ENSG00000214872_8 (sequence is synthesized)
aaagccatcgtggacaagtttggcggggcagcttccggccccacggccttgttccgcaacactaaggcagccggggcagccattggtggtgtcaagaacatgctcttggagtggtgccga

SEQ ID NO: 760060 - DNA, 120 bp, Artificial Sequence
  ENSG00000214872_9 (sequence is synthesized)
gccatgacaaaaaaatacgagcatgtggacatccagaacttctcctccagctggagcagtggtatggccttctgtgccctcatccacaagttcttccctgacgcctttgactacgcagag

SEQ ID NO: 760061 - DNA, 120 bp, Artificial Sequence
  ENSG00000214872_10 (sequence is synthesized)
ctggatcccgcaaagcgccggcacaacttcaccctggccttctccacagcagagaaactggctgactgtgctcagctgctggacgtggatgacatggtgcggttggctgtgcccgactcc

SEQ ID NO: 760062 - DNA, 120 bp, Artificial Sequence
  ENSG00000214872_11 (sequence is synthesized)
aagtgcgtctacacatacatccaggaactgtaccgcagccttgtgcagaaaggactggtgaagaccaagaagaagtgaggaggtgactggctctgtgggcagagatgggcagggtgccca

SEQ ID NO: 760063 - DNA, 120 bp, Artificial Sequence
  ENSG00000214872_12 (sequence is synthesized)
gctcagcagccacggcccgggggttcccttctgctccatggaggcaccagagccaggggcttaggcaagggtgtgtggcgttggttttaactgcattaaaagtacttttgtaaaatcctg

SEQ ID NO: 760064 - DNA, 120 bp, Artificial Sequence
  ENSG00000214872_13 (sequence is synthesized)
gaacctaaggcaacagttgaggaggaggacgccaagacagcctctcaggaggagacagttgtggaggatgaggctaaggctgaacccaaggagcccgatgggaaagaggaggccaaacat

SEQ ID NO: 760065 - DNA, 120 bp, Artificial Sequence
  ENSG00000214891_0 (sequence is synthesized)
atggattcagacaccctgcgagtcttccagaatgagctcatttgctgcatttgcgtgaactacttcatagacccggtcaccactgactgtgtgcacagcttttgcaggccctgcctctgc

SEQ ID NO: 760066 - DNA, 120 bp, Artificial Sequence
  ENSG00000214891_1 (sequence is synthesized)
ctctgctcagaagaaggcagagcaccaatgcgctgccctttgtgcagaaaaatctcagagaagcccaacttcaacaccaatgtggcactcaaaaagctggcttccctagccagacagacc

SEQ ID NO: 760067 - DNA, 120 bp, Artificial Sequence; identical to SEQ ID NO: 698354
  ENSG00000214891_2 (sequence is synthesized)

SEQ ID NO: 760068 - DNA, 120 bp, Artificial Sequence
  ENSG00000214891_3 (sequence is synthesized)
atggctcacagccacagcccaataggatgggctgctgaggaatgcagggtacagaaacttataaaggaaatggactatttatggaaaatcaatcaagagacacaaaacaatctaaatcag

SEQ ID NO: 760069 - DNA, 120 bp, Artificial Sequence
  ENSG00000214891_4 (sequence is synthesized)
gaaactagcaaattttgttcattagtggactatgtgtcattaaggaaggtgataatcactattcagtatcaaaagatgcatatatttctcgatgaggaggagcaacggcatctgcaggca

SEQ ID NO: 760070 - DNA, 120 bp, Artificial Sequence
  ENSG00000214891_5 (sequence is synthesized)
ctacaagacagtcaagtgagaatgacccaacatttagaagggatgaaagacatgtacagagagctgtgggagacataccacatgcctgacgtggagctgctccaggatgtgggaaatata

SEQ ID NO: 760071 - DNA, 120 bp, Artificial Sequence
  ENSG00000214891_6 (sequence is synthesized)
tcggcaagaactgatttggcacagatgccaaagccccagccagtgaacccagagctcacttcatggtgcataactggagtcctagacatgctcaacaacttcagagtggataatgctctg

SEQ ID NO: 760072 - DNA, 120 bp, Artificial Sequence
  ENSG00000214891_7 (sequence is synthesized)
agtacagaaatgactccttgctatataagcctttctgaggatgtgagacgtgtgatatttggagatgaccatcgcagtgcacccatggatccccaaggagtggagagctttgctgtgtgg

SEQ ID NO: 760073 - DNA, 120 bp, Artificial Sequence
  ENSG00000214891_8 (sequence is synthesized)
tgtgcgcaagcattcacctccggcaagcattactgggaagtggatgtgacccactcctccaactggattctgggagtctgtcgagattctaggacagcagataccaatatagttattgat

SEQ ID NO: 760074 - DNA, 120 bp, Artificial Sequence
  ENSG00000214891_9 (sequence is synthesized)
tctgacaaaacatttttttcaatttcttcaaagacgagcaatcactatagtctctccaccaattctccacctttaatccagtatgtgcaaaggcctctgggttgggttggggtgtttctg

SEQ ID NO: 760075 - DNA, 120 bp, Artificial Sequence
  ENSG00000214891_10 (sequence is synthesized)
gattatgataatggatctgtgagtttttttgatgtttctaaaggttctcttatctatggttttcctccttcctccttctcttcccctctgaggcctttcttttgctttggttgtacatga

SEQ ID NO: 760076 - DNA, 120 bp, Artificial Sequence
  ENSG00000214897_0 (sequence is synthesized)
acacgcttccacgctgcggagctgaggtgatctcttcagacccttcggagagacccagatatctgacttcccactgagagacccggaattgcccagagtttgagaaagctgtgtcggaga

SEQ ID NO: 760077 - DNA, 120 bp, Artificial Sequence
  ENSG00000214897_1 (sequence is synthesized)
ctgcaacagtcagcacacattcctgattgatcaggctccctccctcaagtcctctgcgatggctctggcgatgcttcgggactggtgcaggtggatgggtgcgaacgcagagcgctccct

SEQ ID NO: 760078 - DNA, 120 bp, Artificial Sequence
  ENSG00000214897_2 (sequence is synthesized)
gctcatcctgggtatccctgatgactgcaaggaacatgagttccaggaggccgtgcgggctgccctgtcgcccctgggcaggtaccgagtactcaccaagcacttcagaaaggagctcgg

SEQ ID NO: 760079 - DNA, 120 bp, Artificial Sequence
  ENSG00000214897_3 (sequence is synthesized)
ggccaaggcagccttggtggagttcgctgagtatttaaaccgaagcttgattccccatcaaataccaggcaatggggggccctggaaagtgatcttcctgccccaagtacctgttattga

SEQ ID NO: 760080 - DNA, 120 bp, Artificial Sequence
  ENSG00000214897_4 (sequence is synthesized)
gtttcaggatatgcccagttttcctgcacagccccagggtcaagcagtagcaaaagctgcaggtgagggaggaggcgcaggtgaggcaggaggtgtaggtgaggtaggagcagcaggtga

SEQ ID NO: 760081 - DNA, 69 bp, Artificial Sequence
  ENSG00000214897_5 (sequence is synthesized)
gtgaggcaggaggtgtaggtgaggtaggagcagcaggtgaggcaggaggcacaggtgaggcaggagcaa

SEQ ID NO: 760082 - DNA, 120 bp, Artificial Sequence
  ENSG00000214897_6 (sequence is synthesized)
gaggcaggagcagcaggtgaggcaggagctgtgggtgaggcaggagctgcaggtgaggcaggagctgtgggtgaagcaggagggacaaatgtaacaaaagcctgggtccagccttggcgc

SEQ ID NO: 760083 - DNA, 120 bp, Artificial Sequence
  ENSG00000214897_7 (sequence is synthesized)
ggtccagccttggcgctgcaccctacagcctgtgctggaaaacagggcctaccgggaattgagacccttttccaggagggagcagccaggctgcgaggaagagtcctttgagagctgggt

SEQ ID NO: 760084 - DNA, 120 bp, Artificial Sequence
  ENSG00000214897_8 (sequence is synthesized)
ggagcatgccaaggatatgctgcagctgtggtgccatgcgtcggaaagggagaagaagaggtggctgctggagagcttgggcggcccggccctggaagtcgtgagcggcctcctggagga

SEQ ID NO: 760085 - DNA, 120 bp, Artificial Sequence
  ENSG00000214897_9 (sequence is synthesized)
agataccaacttgtccgcgctggactgcctggcggcgctggggcaggtatttaggaaccaggacactcgaatgacttcgaggctgaagttcctgacctgcacgcaggggccccaggaggg

SEQ ID NO: 760086 - DNA, 120 bp, Artificial Sequence
  ENSG00000214897_10 (sequence is synthesized)
gctgtttgccttcgtggtgcgcctggaaggcctgctgcagagggctgtggagaagggggccgtctgcccagccttggccaattacctgcgactacagcaggtgctgtcttgggcccgccc

SEQ ID NO: 760087 - DNA, 120 bp, Artificial Sequence
  ENSG00000214897_11 (sequence is synthesized)
cagcgaggcactccaggataccctgagagggatgcagctggagaagaggccacctggcttcctggggctgctccggctcatccgggagatggaggcatgggcagccttcccagcgaggag

SEQ ID NO: 760088 - DNA, 120 bp, Artificial Sequence
  ENSG00000214897_12 (sequence is synthesized)
cagtggagagtgaagacccagctgctgcccaggcctccccagcccaggggaatgccagcgaggctggtcccggagcagaagatgctgccgaggccgcttctgccaccaaagaggctgcaa

SEQ ID NO: 760089 - DNA, 120 bp, Artificial Sequence
  ENSG00000214897_13 (sequence is synthesized)
ggggagcccctgccgctggggaaggtgaaagtgcccctgcaggccccgaaggcctaggtcaggcaaggcccatagaggtcccctggggctcctccccagcccggatgagcagtgctgtct

SEQ ID NO: 760090 - DNA, 120 bp, Artificial Sequence
  ENSG00000214897_14 (sequence is synthesized)
gggtgttcccaagaggtcttagctggggtccagagggcctcatccaggtgagaggccaggaagccaggaaacccccactggaggggctccagaccatcttggaggagccggaaaacgagg

SEQ ID NO: 760091 - DNA, 120 bp, Artificial Sequence
  ENSG00000214897_15 (sequence is synthesized)
atgaggatggggccggggacgagggccagcccaagtcctcccagggcaaataggctcctagggccccggggcctcctctcctctcaggcagcagcgccttggaggcagacagaggccagg

SEQ ID NO: 760092 - DNA, 120 bp, Artificial Sequence
  ENSG00000214897_16 (sequence is synthesized)
ccagggccagtccctcaccccacattcaggagtaagggccccccacctcccccaaggggctctggccaccacccccattccttccctgtgacccggatgaccacgtttgatacaaaatgg

SEQ ID NO: 760093 - DNA, 120 bp, Artificial Sequence
  ENSG00000214897_17 (sequence is synthesized)
ggtggggagaggcgcccccccgctcccttgcacccagcacacccagccccagccccaaaccctgccgccacggggggctggcctggagggagccctgagtgggcagctgtggcctgggtg

SEQ ID NO: 760094 - DNA, 120 bp, Artificial Sequence
  ENSG00000214897_18 (sequence is synthesized)
ggggcacctgaagatgtctgcccccaacccaggccgtgagttgggagagacagggggaaagaggccctctcaaggttgccagctgcctgggtctctcaagaggggtcagcccacttgcca

SEQ ID NO: 760095 - DNA, 120 bp, Artificial Sequence
  ENSG00000214897_19 (sequence is synthesized)
tctccggggcaggctgccctctgttccgggaagctcaccctcacctgtgtgacccacgcgcccagcagacgcccacccactgctagccatcatttctgcgaaaagtcatgtactgtgcgc

SEQ ID NO: 760096 - DNA, 120 bp, Artificial Sequence
  ENSG00000214897_20 (sequence is synthesized)
ccatgcaggcggccacctctgggcccggggcacgtgctgtgagcttcctgcgagcccaggctctgcttgctgctgtcctgcatcgtgagcaccacctctgctttcctggcgtagatctag

SEQ ID NO: 760097 - DNA, 120 bp, Artificial Sequence
  ENSG00000214897_21 (sequence is synthesized)
gccaggggctgcttgttctcgtggagctgcgtgtgttcttctctgagcagcctctccccggagacccccagcgcagtcccaggagatggcgggaaggaggcaccagggcacggcggacgc

SEQ ID NO: 760098 - DNA, 120 bp, Artificial Sequence
  ENSG00000214897_22 (sequence is synthesized)
tcaccccgtgaccacgatggtgaccctgactgcgggaagaagaaccggacccggggcacagcggggctgcgtgaggatccacaagaactatgctttggcgtttcacccctgttgttactt

SEQ ID NO: 760099 - DNA, 120 bp, Artificial Sequence
  ENSG00000214897_23 (sequence is synthesized)
gtgactcagtttcttcagcctggtggggtgttccctggtgtttcccagtgttctgtgactgtcctgtgaaggccatagggatgggctcaggagggggctccctgaagccagtggacactg

SEQ ID NO: 760100 - DNA, 120 bp, Artificial Sequence
  ENSG00000214897_24 (sequence is synthesized)
ccagagtccactgtcctggcaaaaggcagaccctggggccctcgggaaggagggaggtggcagcgggggcagcagcgggagggggagcagatgacgtgccttgccaggaaccccaggagg

SEQ ID NO: 760101 - DNA, 120 bp, Artificial Sequence
  ENSG00000214897_25 (sequence is synthesized)
agggggcctgggacctgtgtcctgtggtggctgtttacagtttctctctgtattgtggtttccttctcttcaatagtttcagtatatgtttctcttcaataaatttcattccgtgttcca

SEQ ID NO: 760102 - DNA, 120 bp, Artificial Sequence
  ENSG00000214929_0 (sequence is synthesized)
ggcaccctcagtgctcagttgcttcaggcagctgagctattcagaccatggagaatatcctctgttttctgaacagctatactgagacagggctgagccctgactcacattggttggata

SEQ ID NO: 760103 - DNA, 120 bp, Artificial Sequence
  ENSG00000214929_1 (sequence is synthesized)
tcgaccccaacttcatctgcttgagtgggttggggttgtttatactgtacttgttctacgtggtattgaccctgtattcgtcacccaccgaaaaaaataatgacatccaaaagcatcagg

SEQ ID NO: 760104 - DNA, 120 bp, Artificial Sequence
  ENSG00000214929_2 (sequence is synthesized)
gcagagccaagaggagaaggaaaggtgggacattcaaaggtttcccagactggaaaagtttccagagagaagaggaagaggaaaggaagctgctttctcttctgaaaagctttggacctc

SEQ ID NO: 760105 - DNA, 120 bp, Artificial Sequence
  ENSG00000214929_3 (sequence is synthesized)
ctgtttcctgcagtcctcggggccagcatcatgataccaaccactttcgtcgactgttatgcccagaccccgtctgtcgggtgtgtaagagagcaactgctgatatccagcaactgctgt

SEQ ID NO: 760106 - DNA, 120 bp, Artificial Sequence
  ENSG00000214929_4 (sequence is synthesized)
cttgggagtccctgaaagatgctgctccctctgtgtcccctttggcttcttcggcttctgcgactgagtcatcgttcactctggcttccaccccctcagcaacccctccagaagacctaa

SEQ ID NO: 760107 - DNA, 120 bp, Artificial Sequence
  ENSG00000214929_5 (sequence is synthesized)
tactgtcccctcggcctaaggcctctccaccaccccccttaattctctcacctgacctgatcaccaccttagctgacttattttcaccctcaccactgagggaccctctgccaccacagc

SEQ ID NO: 760108 - DNA, 120 bp, Artificial Sequence
  ENSG00000214929_6 (sequence is synthesized)
ctgtttctcccttggattccaagttccccatagaccattccccaccccaacagcttccctttccccttctcccaccacatcacattgagagagtggagtccagcctccaacctgaagcca

SEQ ID NO: 760109 - DNA, 120 bp, Artificial Sequence
  ENSG00000214929_7 (sequence is synthesized)
gtttgtctctgaacaccatcttttcatttggctccaccctatgccaagatatttcgcaggccatgaatcccattgattcttgtgctcgtcatcacggaccaccaatcccatctgctttac

SEQ ID NO: 760110 - DNA, 120 bp, Artificial Sequence
  ENSG00000214929_8 (sequence is synthesized)
caccggaagattgcactgtgactcagtctaaatcaagtctcaccatcttgaagacttttccggaaatgttatctctaggtggctctggtgggtcatccacctctgccccaacaatcaaag

SEQ ID NO: 760111 - DNA, 120 bp, Artificial Sequence
  ENSG00000214929_9 (sequence is synthesized)
gcattgaccattcacaccttgcatcttcagaattcacctggtggcagcctcatgccaaggactctttttcctctaattttgtgccatctgatttcatggaggagcttcttacccttcatt

SEQ ID NO: 760112 - DNA, 120 bp, Artificial Sequence
  ENSG00000214929_10 (sequence is synthesized)
cttctgaggcctttttaggggggcactctgtggccaacctcatagagcctgttaacatctcatttctcagccatgacattctggcactcctggagagacaagtcaaaaaaaggggtgatt

SEQ ID NO: 760113 - DNA, 120 bp, Artificial Sequence
  ENSG00000214929_11 (sequence is synthesized)
tcctgatgtggaaagaaaatggaaagaaaccaggatcattcccaaaacaacttaggccaaactaccaactaaattcctcacggaatatgttaacctcaattgctgttaagcatgacttgg

SEQ ID NO: 760114 - DNA, 120 bp, Artificial Sequence
  ENSG00000214929_12 (sequence is synthesized)
cagaatcctttcctttttgggccagtaaaggcaaactagaatggcagcacatccatcagcagcctccacactctaaatgctttgaagaccatttagagcaaaaatatgtccagctcttct

SEQ ID NO: 760115 - DNA, 120 bp, Artificial Sequence
  ENSG00000214929_13 (sequence is synthesized)
ggggtctcccatctttgcacagcgagtctctgcatcctactgttcttgtccaacgtggccattcctccatgtttgtattcttcaatggcattacaaatacatctatatcccatgaatccc

SEQ ID NO: 760116 - DNA, 120 bp, Artificial Sequence
  ENSG00000214929_14 (sequence is synthesized)
cagtacttccccctccccaacctctgtccttgcctagtacccaaccactacccttgcctcaaaccctgccccaaggtcagtccccacatctcactcaggtgaagtccctggctcaacctc

SEQ ID NO: 760117 - DNA, 120 bp, Artificial Sequence
  ENSG00000214929_15 (sequence is synthesized)
aatctccattccgagccctactacctagtcctctattcctgattaggatctgtggagtgtgttttcatagaccccagaacgaggcacggtctcttttgccatctgaaattaaccatctgg

SEQ ID NO: 760118 - DNA, 120 bp, Artificial Sequence
  ENSG00000214929_16 (sequence is synthesized)
agtggaacgtgttgcagaaagtgcaggaaagtttgtggggcttaccctctgtggttcaaaaatcccaggaagacttttgtcctccagctcccaatcctgaattggtcagaaagtccttca

SEQ ID NO: 760119 - DNA, 120 bp, Artificial Sequence
  ENSG00000214929_17 (sequence is synthesized)
aggtccatgttccgatctccatcattcctggagattttccactcagctctgaggtaaggaagaaactagagcaacacattcgaaggaggctcatccagcgcagatggggcctgccccgca

SEQ ID NO: 760120 - DNA, 120 bp, Artificial Sequence
  ENSG00000214929_18 (sequence is synthesized)
gaatccatgagtctctgtcattgctacgtcctcagagcaaaatttcagagctatctgtgtcagagagaattcatggaccgttaaatatctctttggttgagggtcagaggtgcaatgttc

SEQ ID NO: 760121 - DNA, 120 bp, Artificial Sequence
  ENSG00000214929_19 (sequence is synthesized)
taaagaagtccgcatcaagcttccctagaagcttccacgagaggagctcaaatatgctttccatggagaatgtggggaattatcagggatacagccaggagactgtcccaaaagatcacc

SEQ ID NO: 760122 - DNA, 120 bp, Artificial Sequence
  ENSG00000214929_20 (sequence is synthesized)
aggatctgaggtctaactctgagagagacctagaaactcatatgatgcatctgtcagggaatgactcaggggtgagactaggtcagaaacaacttgaaaatgccctgacagtacgtttga

SEQ ID NO: 760123 - DNA, 120 bp, Artificial Sequence
  ENSG00000214929_21 (sequence is synthesized)
gcaagaaatttgaggaaatcaatgagggtcgaatgcctgggactgtgcatagttcatggcactcagtcaagcagacaatgtctcttcctgagaaatcccacagccaaattaaacatcgaa

SEQ ID NO: 760124 - DNA, 120 bp, Artificial Sequence
  ENSG00000214929_22 (sequence is synthesized)
atctggtaacattggtgagtgaggaccactgcgttgatacttcccaggaaatttccttccttagttccaacaaacaaaagatgttggaagcccatattaaaactttccgtatgaggatgc

SEQ ID NO: 760125 - DNA, 120 bp, Artificial Sequence
  ENSG00000214929_23 (sequence is synthesized)
tgtggggccttcccctcaaggtccttgaatccatagaaatcttcaaatcgaaagcggacctttccacttccttttcccatttcgaccttccctcctcagccaccttcatctctcagggag

SEQ ID NO: 760126 - DNA, 120 bp, Artificial Sequence
  ENSG00000214929_24 (sequence is synthesized)
attccaaagatggggtctctaagtcccgtagtcgaagcacttttcaaggagaaaagttgggaacaacaagctcagtccccatccttgatcgtcctcaccctgtctcctcacctgtcgtcc

SEQ ID NO: 760127 - DNA, 120 bp, Artificial Sequence
  ENSG00000214929_25 (sequence is synthesized)
aagaagggcaggggaccctgagaagacaattttctgatactgaccatgaccttatagagacagattccaaagacggggcctccacatcccttagaagaggtactacagattttcaaagcg

SEQ ID NO: 760128 - DNA, 120 bp, Artificial Sequence
  ENSG00000214929_26 (sequence is synthesized)
aaaaattagattcaacaagctcattccccatcctcggtcattcttaccttgtcacttcacctgtcaaccaagaaaagcaggggaccctgagaagagaattctctgatactgacaatgatc

SEQ ID NO: 760129 - DNA, 120 bp, Artificial Sequence
  ENSG00000214929_27 (sequence is synthesized)
ttacagaaagtgtccggacaacagaggatggcagacagacttttctgcccccgccacacagcatcgtagacgaagtcagtcagaaacagactgtactggccagtagatgcagcgcagagc

SEQ ID NO: 760130 - DNA, 120 bp, Artificial Sequence
  ENSG00000214929_28 (sequence is synthesized)
tgcccataatgcaagctggagctggctgtgagtcatgggataagagaaagagttcctttcataatgtagacaggcttcagggcagtagaaagacctttcctgtcaccaatgctcttcaat

SEQ ID NO: 760131 - DNA, 120 bp, Artificial Sequence
  ENSG00000214929_29 (sequence is synthesized)
cacaaactaggaacaacttgacaaccagcaagtcaggaagctgctcactgacaaatgtgaaagcaagcacttccaatgaaactgaaattttcccaccaagaatatcagttcctcaagatc

SEQ ID NO: 760132 - DNA, 120 bp, Artificial Sequence
  ENSG00000214929_30 (sequence is synthesized)
ctaaatcatcataccttaaaaatcagatgttgagccagttaaagttggtccagaggaagcatagccaacctcagagccatttcactgacatgtcttttgccttagataacttgagttcca

SEQ ID NO: 760133 - DNA, 120 bp, Artificial Sequence
  ENSG00000214929_31 (sequence is synthesized)
aggacttactgactaattcccagggcatctcgagtggggacatgggaacttcccaggtggtgcatgtccacttggaggacagcggaatccgtgtggcacagaagcaggagcccagggtcc

SEQ ID NO: 760134 - DNA, 120 bp, Artificial Sequence
  ENSG00000214929_32 (sequence is synthesized)
ctacctgtgtcttacagaagtgtcaagttacgaatttcccaccagctgtaaacagagtgagtcctgtgagacccaaaggaggagagcttgatggaggggatgcagggctggggacatccc

SEQ ID NO: 760135 - DNA, 120 bp, Artificial Sequence
  ENSG00000214929_33 (sequence is synthesized)
aacgcaggagaaagagcctccctgttcataacaagacatcaggggaggtgcttgggagcaaatcttccccaaccttgaaaacacagcctcctcctgaaaaccttttcagaaaatggatga

SEQ ID NO: 760136 - DNA, 120 bp, Artificial Sequence
  ENSG00000214929_34 (sequence is synthesized)
agacctctttgcagtggtttaataaacccagcatatcatatgaagaacaagaaagttcctgggaaaagggtagctccctgtcatcatgtgtgcagaatattggtcgagttataagagctg

SEQ ID NO: 760137 - DNA, 120 bp, Artificial Sequence
  ENSG00000214929_35 (sequence is synthesized)
cctttactgggactactgaagctcagaaaattaggaaagacactagggagttcctagaagagaagctggggcataggcatgggatagatatcacctgtccccaagagcccctttccttcc

SEQ ID NO: 760138 - DNA, 120 bp, Artificial Sequence
  ENSG00000214929_36 (sequence is synthesized)
cagtggggcttgggaaagctcagcacaacccagaagtgcatgtcagagcagagcctgtccagggctgtccctgcaactacagggctccctcctgcaaagtgacacgtaccaaatcttgca

SEQ ID NO: 760139 - DNA, 120 bp, Artificial Sequence
  ENSG00000214929_37 (sequence is synthesized)
gccaacaagctatctttgttggccagaattatcctacaaggattagacagatcatagacaaggacagacagccccagaaagttgaggcatttaaggggaagatactgtgtcaaagccatc

SEQ ID NO: 760140 - DNA, 120 bp, Artificial Sequence
  ENSG00000214929_38 (sequence is synthesized)
cccaatccatgccccacaggaagcctgtgccacatccaaaccccacttgccggcgtcaggtcagcctggtgtgtccagccgtcccaaccagtgctaaaagccctgtgtttagtgatgtgc

SEQ ID NO: 760141 - DNA, 120 bp, Artificial Sequence
  ENSG00000214929_39 (sequence is synthesized)
ctttcctaactggacagaaaatgcttccaaagcatttacagggaggaaaatttccccccacaaaataattcactccttgttgagaatcttgattctccccaataaatgttccaataagaa

SEQ ID NO: 760142 - DNA, 120 bp, Artificial Sequence
  ENSG00000214929_40 (sequence is synthesized)
gtcagttactagatgcagtcttagaaaacagagccctcagaagacaggctcatgggaaagcaatcagacctgagacactgctcagaggccctgctctgcccatttacgggcaggacaaag

SEQ ID NO: 760143 - DNA, 120 bp, Artificial Sequence
  ENSG00000214929_41 (sequence is synthesized)
tgatggacctgagcaatgggtgttgcccaattggtggccaactgagatatccaggagggactgctggtgggcttggagtcagagcttctgtctcacaactttgcatacgtactttgactt

SEQ ID NO: 760144 - DNA, 120 bp, Artificial Sequence
  ENSG00000214940_0 (sequence is synthesized)
cccgctgagcgtcgacacagtcgctgttggcctggtgtccagcgtggttgtctatcccgtctacctggccatcctctttctcttccggatgtcccggagcaaggtggctgggagcctgag

SEQ ID NO: 760145 - DNA, 120 bp, Artificial Sequence
  ENSG00000214940_1 (sequence is synthesized)
ccccacacctgccgggcagtaggtgctggacatcgacagctgcctggactcgtccgtgctggacagctccttcctcacgttctcaggcctccacgctgaggtgagggctctactgggggt

SEQ ID NO: 760146 - DNA, 120 bp, Artificial Sequence
  ENSG00000214940_2 (sequence is synthesized)
cctgggctgggctgggggtcctgccgccttggcgcagcttggactccagacactgtgcacctctcagcaggcctttgctggacaggtgaagagtgacttgtttctggatgattctaagag

SEQ ID NO: 760147 - DNA, 84 bp, Artificial Sequence; identical to SEQ ID NO: 656958
  ENSG00000214940_3 (sequence is synthesized)

SEQ ID NO: 760148 - DNA, 79 bp, Artificial Sequence
  ENSG00000214940_4 (sequence is synthesized)
tcttcccatctcaggaggtccaaccgccgtagacaggaaggaattaaaattgtcctggaagacatctttactttatgga

SEQ ID NO: 760149 - DNA, 120 bp, Artificial Sequence
  ENSG00000214940_5 (sequence is synthesized)
taaaattgtcctggaagacatctttactttatggagacaggtggaaaccaaagttcgagctaaaatccgtaagatgaaggtgacaacaaaagtcaaccgtcatgacaaaatcaatggaaa

SEQ ID NO: 760150 - DNA, 89 bp, Artificial Sequence
  ENSG00000214940_6 (sequence is synthesized)
agaacatctgaggaaactaagcatgaaagaacgtgagcacagagaagaggagaggcaggtgtcagaggcagaggaaaatgggaaattgg

SEQ ID NO: 760151 - DNA, 89 bp, Artificial Sequence; identical to SEQ ID NO: 653735
  ENSG00000214940_7 (sequence is synthesized)

SEQ ID NO: 760152 - DNA, 120 bp, Artificial Sequence
  ENSG00000214941_0 (sequence is synthesized)
actccgtctcgccctgccccggcggggggtcaggatcctccacaggtaggcgcagtcagctggagcgtcgcggcggtccgccggtcgtggagggcgtgtcctgcggcgcgatggccgtag

SEQ ID NO: 760153 - DNA, 120 bp, Artificial Sequence
  ENSG00000214941_1 (sequence is synthesized)
tgttgccggcggttgtggaggagctcctgagcgagatggcggcggcggtgcaggagagcgcgcgaattcctgatgaatatctgttatcgctgaagtttctctttggctcatcagccaccc

SEQ ID NO: 760154 - DNA, 120 bp, Artificial Sequence
  ENSG00000214941_2 (sequence is synthesized)
aggccttggacctagttgatcgacagtccatcaccttaatctcatcacccagtggaaggcgtgtttaccaggtccttggaagttccagtaaaacatacacatgtttggcttcttgtcatt

SEQ ID NO: 760155 - DNA, 120 bp, Artificial Sequence
  ENSG00000214941_3 (sequence is synthesized)
actgttcatgtcctgcatttgcattctcagtgctacggaagagtgacagcatcctgtgcaagcatctcttggcagtttacctgagtcaggttatgaggacctgtcagcagctaagtgtct

SEQ ID NO: 760156 - DNA, 120 bp, Artificial Sequence
  ENSG00000214941_4 (sequence is synthesized)
ctgacaagcagttgactgacatattattgatggagaagaaacaagaagcataaaaggtacagattgagcatcattctttcaaaatagaatcctgtcaagaaatgcattgaaagcgtcatg

SEQ ID NO: 760157 - DNA, 120 bp, Artificial Sequence
  ENSG00000214941_5 (sequence is synthesized)
attcacatggaaaagaggtgaaatggatcttcagacacttcatgttactgtcccttttccctccaggactgcaggaggtgctgtgggttggagccgtgggctgtggagggtttgtgtatg

SEQ ID NO: 760158 - DNA, 120 bp, Artificial Sequence
  ENSG00000214941_6 (sequence is synthesized)
atgagaagccctgtacagtcttgtcaagaaataccctgagccagtctctgagacgcttcggtaaaaaatgtccctggatggaatcaagattttaaattcaaataaagcctaatatcatgt

SEQ ID NO: 760159 - DNA, 71 bp, Artificial Sequence
  ENSG00000214941_7 (sequence is synthesized)
gaatcaagattttaaattcaaataaagcctaatatcatgttgtgtccacattatttagtggtgcagtggcg

SEQ ID NO: 760160 - DNA, 90 bp, Artificial Sequence
  ENSG00000214941_8 (sequence is synthesized)
ggaattacatgcatgagccactgcgcctgaccctatttagtcttaagtaactaactgaattactagtaatttttaaaaggttggaatggt

SEQ ID NO: 760161 - DNA, 120 bp, Artificial Sequence
  ENSG00000214941_9 (sequence is synthesized)
ctaactgaattactagtaatttttaaaaggttggaatggtgggccaaacagtaagatgaagtttcgacgagtaggtcagttcttttccttgggtccaggaaactattgagcagcaacaga

SEQ ID NO: 760162 - DNA, 120 bp, Artificial Sequence
  ENSG00000214941_10 (sequence is synthesized)
agatcagagcagagatgtggctaaacagtagcaggtatgaaaagacttagaggttctggtttctgtaagcttcaaatatctgtgatgcttgtgccaaaacagcttaagtagactgtattg

SEQ ID NO: 760163 - DNA, 120 bp, Artificial Sequence
  ENSG00000214941_11 (sequence is synthesized)
tttgagagttagtatcgagaacaagggaagaactggtttcactctgcacttctgatctttacaacagggcaattgaaggaacagactaaaaatcgtgtcctggaaggaaactacaggtac

SEQ ID NO: 760164 - DNA, 120 bp, Artificial Sequence
  ENSG00000214941_12 (sequence is synthesized)
taccagggattttcagtctgaagaagaaaagacaaaatagatgacagaaggagtattagaagggagagcgatgagactcagttggacaccgagagagcaaagaagcaataatacgtgaag

SEQ ID NO: 760165 - DNA, 120 bp, Artificial Sequence
  ENSG00000214941_13 (sequence is synthesized)
atgaaaatgaaatcaatttcagcataagaagacaagaacttatggtaaagctgcccacagccagaagaggatcctagaaggacaggaattccctgtctgcagcatttcataagcatgtaa

SEQ ID NO: 760166 - DNA, 120 bp, Artificial Sequence
  ENSG00000214941_14 (sequence is synthesized)
tattgttgcagggatactgcagaaggagttgaagcagtggacagacagatgatataggtgattttacagcctaagaaagccctgtgcttgtgcccccaaaacatgaggtgctagtgaatg

SEQ ID NO: 760167 - DNA, 120 bp, Artificial Sequence
  ENSG00000214941_15 (sequence is synthesized)
aatgctgggggaaagcccagggcctaggtgttgcaatgttctgtggttggcagatgctttttgttttgttaaaaagtgcaacagataaaatttatcaatacttttctgctactcaggaaa

SEQ ID NO: 760168 - DNA, 120 bp, Artificial Sequence
  ENSG00000214941_16 (sequence is synthesized)
ggaggagctcctgagcgagatggcggcggcggtgcaggagagcgcgcgaagtacgggaccgaggtcttcctgatgaatatctgttatcgctgaagtttctctttggctcatcagccaccc

SEQ ID NO: 760169 - DNA, 120 bp, Artificial Sequence
  ENSG00000214941_17 (sequence is synthesized)
ccacattcgtaactgatgtgccctaagtgtatctcaactgcaagagacaggattgaaccaaaaccccttcaagatctaaagctgtgttctctgacatcagattcaacgcaatcatctccc

SEQ ID NO: 760170 - DNA, 120 bp, Artificial Sequence
  ENSG00000214941_18 (sequence is synthesized)
cgcggcggtccgccggtcgtggagggcgtgtcctgcggcgcgatggccgtagtgttgccggcggttgtggaggagctcctgagcgagatggcggcggcggtgcaggagagcgcgcgaagc

SEQ ID NO: 760171 - DNA, 120 bp, Artificial Sequence
  ENSG00000214941_19 (sequence is synthesized)
cgcgcgaagtacgggaccgagttcctgatgaatatctgttatcacagtgtctcactctgtcactgaggctggagtacagtggcgcgatctcaactcactgcagcctctgcctcccaggtt

SEQ ID NO: 760172 - DNA, 62 bp, Artificial Sequence
  ENSG00000214941_20 (sequence is synthesized)
acacaccgaggcaggtggatgatgaggtcaggagttccgcctgccttggcctcccaaggtgc

SEQ ID NO: 760173 - DNA, 120 bp, Artificial Sequence
  ENSG00000214941_21 (sequence is synthesized)
accacacctggccttaaaaaaattcttaaaggctgaagtttctctttggctcatcagccacccaggccttggacctagttgatcgacagtccatcaccttaatctcatcacccagtggaa

SEQ ID NO: 760174 - DNA, 120 bp, Artificial Sequence
  ENSG00000214941_22 (sequence is synthesized)
tgcccaggctggtctcaaactcctaggttcaagcgatcctcccaccttggcctctcacaatattgggattacaggtccttggaagttccagtaaaacatacacatgtttggcttcttgtc

SEQ ID NO: 760175 - DNA, 120 bp, Artificial Sequence
  ENSG00000214943_0 (sequence is synthesized)
agtagcatcagcaagaagaaagacatatgaaatgaaggcaaagtgtcactgattttgttcactctgttcctagtgagaaattgatggtgtagagtcactttggcctgctcaagaccaatc

SEQ ID NO: 760176 - DNA, 120 bp, Artificial Sequence
  ENSG00000214943_1 (sequence is synthesized)
tggcatgaagatacaggtctgaggtcattatggatctgatcaactctactgattacctgatcaatgcctctactttagtaagaaacagcactcagtttctagctcctgcatcaaaaatga

SEQ ID NO: 760177 - DNA, 120 bp, Artificial Sequence
  ENSG00000214943_2 (sequence is synthesized)
ttattgccctttctttgtacatttcatctataattggtaccatcaccaatggcctctatctatgggtgctaagattcaagatgaaacagactgtcaatactctcttattttttcatctca

SEQ ID NO: 760178 - DNA, 120 bp, Artificial Sequence
  ENSG00000214943_3 (sequence is synthesized)
ttctctcttattttatttcaacaatgattctgccatttatggccacctcccaacttcaagacaatcactggaactttggaactgccttgtgcaaggtcttcaatggcactttgtctctgg

SEQ ID NO: 760179 - DNA, 120 bp, Artificial Sequence
  ENSG00000214943_4 (sequence is synthesized)
ggatgttcacctctgttttcttcctttcggccatcggtcttgatcgttaccttctcactcttcacccagtgtggtcccagcagcaccgaaccccgcgctgggcttccagcattgtcctgg

SEQ ID NO: 760180 - DNA, 120 bp, Artificial Sequence
  ENSG00000214943_5 (sequence is synthesized)
gattttcagagagacacatcatgaccgtaaaggaaaggtgacttgccaaaataactatgctgtgtctactaactgggaaagcaaggagatgcaagcatcaaggcagtggattcatgtggc

SEQ ID NO: 760181 - DNA, 120 bp, Artificial Sequence
  ENSG00000214943_6 (sequence is synthesized)
ctgtttcatcagccgcttcttgctgggctttcttctgcctttcttcatcatcatcttttgttatgaaagagtagccagcaaggtgaaagagaggagcctgtttaaatccagcaagccctt

SEQ ID NO: 760182 - DNA, 120 bp, Artificial Sequence
  ENSG00000214943_7 (sequence is synthesized)
caaagttatgatgactgccattatctctttctttgtgtgttggatgccctaccatatacaccagggcttacttctcactacgaaccagtcactacttttagagttgactttgatacttac

SEQ ID NO: 760183 - DNA, 120 bp, Artificial Sequence
  ENSG00000214943_8 (sequence is synthesized)
agtgctaaccacttctttcaatactatcttttctcccacactctacttatttgttggggagaatttcaaaaaggtcttcaagaagtccattcttgctctgtttgagtcaacatttagtga

SEQ ID NO: 760184 - DNA, 120 bp, Artificial Sequence
  ENSG00000214943_9 (sequence is synthesized)
agattcttctgtagaaaggacacaaacctaaactcagaagcctaaatttaaattctagattcttaagcaaacacgcacttggtcaattataccaataggatataccttctgcttttgtat

SEQ ID NO: 760185 - DNA, 120 bp, Artificial Sequence
  ENSG00000214944_0 (sequence is synthesized)
tcattgcagatgcgaaagccatggagttgagctgcagcgaagcacctctttacgggcagatgatgatctatgcgaagtttgacaaaaatgtgtatcttcctgaagatgctgagttttact

SEQ ID NO: 760186 - DNA, 120 bp, Artificial Sequence
  ENSG00000214944_1 (sequence is synthesized)
ttacttatgacggatctcatcagcgacatgtcatgattgcagagcgcatcgaggataacgttctccagtccagcgtcccaggccatgggcttcaggagacggtgacggtatctgtgtgcc

SEQ ID NO: 760187 - DNA, 120 bp, Artificial Sequence
  ENSG00000214944_2 (sequence is synthesized)
tctgctcggaaggttactctccggtgaccatgggctctggctcagtgacctacgtggacaacatggcttgcaggctggctcgtctgctggtgacgcaggccaatcgcctcacagcctgca

SEQ ID NO: 760188 - DNA, 120 bp, Artificial Sequence
  ENSG00000214944_3 (sequence is synthesized)
gccaccagaccctgctgaccccatttgccttgacggcaggagcactgcctgccttggatgaggagctcgtgctggctctgacccatctggaattgcctctagagtggactgtgttgggaa

SEQ ID NO: 760189 - DNA, 120 bp, Artificial Sequence
  ENSG00000214944_4 (sequence is synthesized)
gttcttcacttgaagtatcttctcacagagaatctcttctacacctggctatgagatggggcctggctaaactttcccagttcttcttgtgtctcccggggggagtccaggccttggctt

SEQ ID NO: 760190 - DNA, 120 bp, Artificial Sequence
  ENSG00000214944_5 (sequence is synthesized)
tacccaacgaagagggtgccacaccattagacttagctttacgtgaaggacactccaagctggtggaagacgtcacaaattttcagggcagatggtccccaagcttctcccgagtgcagc

SEQ ID NO: 760191 - DNA, 120 bp, Artificial Sequence
  ENSG00000214944_6 (sequence is synthesized)
tcagtgaagaagcctccttgcattacattcactcatcggaaacgctgaccctgaccctgaaccacacagccgagcatttgttggaggcagatattaaactcttccggaaatacttttggg

SEQ ID NO: 760192 - DNA, 120 bp, Artificial Sequence
  ENSG00000214944_7 (sequence is synthesized)
atagagcctttcttgtcaaggcctttgagccagaagccaggccagaggaaagaacagctatgccctccagcggtgcagaaactgaagaagagattaagaattcagtgtccagcagatcag

SEQ ID NO: 760193 - DNA, 120 bp, Artificial Sequence
  ENSG00000214944_8 (sequence is synthesized)
cagctgaaaaggaagatataaagcgtgtcaaaagcctggtggttcaacacaatgaacatgaagaccagcacagcctagatttggatcgctccttcgatatcctaaaaaaatccaagccgc

SEQ ID NO: 760194 - DNA, 120 bp, Artificial Sequence
  ENSG00000214944_9 (sequence is synthesized)
cctcgacattgcttgctgcaggccggctttcagacatgctgaatggaggtgatgaagtctacgctaactgtatggtgattgatcaggttggtgatttggatatcagctatattaatatag

SEQ ID NO: 760195 - DNA, 120 bp, Artificial Sequence
  ENSG00000214944_10 (sequence is synthesized)
agggaatcactgccactaccagccctgaatccagaggttgcactctgtggcctcagagcagcaaacacacccttcctacagaaaccagtcccagtgtgtacccacttagtgaaaatgtcg

SEQ ID NO: 760196 - DNA, 120 bp, Artificial Sequence
  ENSG00000214944_11 (sequence is synthesized)
aagggacagcacacactgaagcccagcagtccttcatgtcaccatcaagttcgtgtgcttccaacttgaatctttcttttggttggcatggatttgaaaaggaacaaagtcatctaaaga

SEQ ID NO: 760197 - DNA, 120 bp, Artificial Sequence
  ENSG00000214944_12 (sequence is synthesized)
aaagaagttctagccttgatgccttggacgccgacagtgaaggggaagggcattctgagccatcccacatctgttacactccagggtctcagagctcctcaagaactgggattcctagtg

SEQ ID NO: 760198 - DNA, 120 bp, Artificial Sequence
  ENSG00000214944_13 (sequence is synthesized)
gggatgaattggactcttttgagactaacactgaaccggattttaatatctccagggctgaatcccttcctctatcaagtaatctacagtcgaaggaatcactgctttctggagttcgct

SEQ ID NO: 760199 - DNA, 120 bp, Artificial Sequence
  ENSG00000214944_14 (sequence is synthesized)
cacgttcttattcttgctcatcacccaaaatttctttaggaaaaactcgtttggtgcgtgaattaacagtatgcagttcaagtgaagagcaaagagcttacagcttatcggagccaccaa

SEQ ID NO: 760200 - DNA, 120 bp, Artificial Sequence
  ENSG00000214944_15 (sequence is synthesized)
gagaaaacagaattcaggaagaagaatgggataaatacatcatacctgccaaatcagagtctgaaaaatataaagtgagtcgaactttcagtttcctcatgaataggatgactagccctc

SEQ ID NO: 760201 - DNA, 120 bp, Artificial Sequence
  ENSG00000214944_16 (sequence is synthesized)
ggaataaatcaaagacaaaaagcaaggatgccaaagataaagagaagctgaatcgacatcagtttgccccaggaacattctctggggttctgcagtgtttggtttgtgataaaacactcc

SEQ ID NO: 760202 - DNA, 120 bp, Artificial Sequence
  ENSG00000214944_17 (sequence is synthesized)
tggggaaagagtcactgcagtgttctaactgtaatgcaaatgtgcacaaaggttgtaaagatgctgcgcctgcatgcaccaagaaattccaagagaaatataacaagaacaaaccacaga

SEQ ID NO: 760203 - DNA, 120 bp, Artificial Sequence
  ENSG00000214944_18 (sequence is synthesized)
ccatccttggaaattcttcatttagagacatcccacagcctggtctctccttgcacccttcttcctccgtgcctgttggattgccgactggaaggagggagactgtgggacaggtccatc

SEQ ID NO: 760204 - DNA, 120 bp, Artificial Sequence
  ENSG00000214944_19 (sequence is synthesized)
cattgtccagaagtgttccaggcaccaccttggaaagcttcaggaggtcagccacatccttggagtctgagagtgaccataacagctgcagaagcaggtctcattctgatgagctgctac

SEQ ID NO: 760205 - DNA, 120 bp, Artificial Sequence
  ENSG00000214944_20 (sequence is synthesized)
agtccatgggctcttctccctctacagagtctttcataatggaagatgttgtggattcttctctgtggagtgacctcagcagtgatgcccaggagtttgaagcagaatcttggagtcttg

SEQ ID NO: 760206 - DNA, 120 bp, Artificial Sequence
  ENSG00000214944_21 (sequence is synthesized)
tggtggatccctcattttgtaataggcaggagaaggatgtcatcaaaagacaggatgtcatttttgagctaatgcaaacagagatgcatcacatccagaccctgttcatcatgtctgaga

SEQ ID NO: 760207 - DNA, 120 bp, Artificial Sequence
  ENSG00000214944_22 (sequence is synthesized)
tcttcaggaaaggcatgaaagaggagctgcagctggaccacagcaccgtggataaaattttcccctgtttagatgagttgcttgaaatccacaggcatttcttctacagtatgaaggaac

SEQ ID NO: 760208 - DNA, 120 bp, Artificial Sequence
  ENSG00000214944_23 (sequence is synthesized)
gaaggcaggaatcctgtgctggcagcgacaggaattttgtgatcgaccgaattggagatattttggtacaacagttttcagaagaaaatgcaagtaaaatgaagaaaatatatggagaat

SEQ ID NO: 760209 - DNA, 120 bp, Artificial Sequence
  ENSG00000214944_24 (sequence is synthesized)
tttaaagaactccagcagaataaaaagtttcagaattttattaagctccgaaatagtaatcttttggctcgacgccgaggaattccagaatgcattctgttggtcactcagcgtattaca

SEQ ID NO: 760210 - DNA, 120 bp, Artificial Sequence
  ENSG00000214944_25 (sequence is synthesized)
aaataccctgtcttggtggaaaggatattgcagtacacaaaggaaagaactgaggaacataaagacttacgcaaagcgctttgcttaattaaagacatgattgcaacagtggatttaaaa

SEQ ID NO: 760211 - DNA, 120 bp, Artificial Sequence
  ENSG00000214944_26 (sequence is synthesized)
gtcaatgaatatgagaaaaaccaaaaatggcttgagatcctaaataagattgaaaacaaaacatacacgaagctcaaaaatggacatgtgtttaggaagcaggcactgatgagtgaagaa

SEQ ID NO: 760212 - DNA, 120 bp, Artificial Sequence
  ENSG00000214944_27 (sequence is synthesized)
aggactctgttatatgatggccttgtttactggaaaactgctacaggtcgtttcaaagatatcctagctctacttctaactgatgtgctgctctttttacaagaaaaagaccagaaatac

SEQ ID NO: 760213 - DNA, 120 bp, Artificial Sequence
  ENSG00000214944_28 (sequence is synthesized)
atctttgcagccgttgatcagaagccatcagttatttcccttcaaaagcttattgctagagaagttgctaatgaggagagaggaatgtttctgatcagtgcttcatctgctggtcctgag

SEQ ID NO: 760214 - DNA, 120 bp, Artificial Sequence
  ENSG00000214944_29 (sequence is synthesized)
atgtatgaaattcacaccaattccaaggaggaacgcaataactggatgagacggatccagcaggctgtagaaagttgtcctgaagaaaaagggggaaggacaagtgaatctgatgaagac

SEQ ID NO: 760215 - DNA, 120 bp, Artificial Sequence
  ENSG00000214944_30 (sequence is synthesized)
aagaggaaagctgaagccagagtggccaaaattcagcaatgtcaagaaatactcactaaccaagaccaacaaatttgtgcgtatttggaggagaagctgcatatctatgctgaacttgga

SEQ ID NO: 760216 - DNA, 120 bp, Artificial Sequence
  ENSG00000214944_31 (sequence is synthesized)
gaactgagcggatttgaggacgtccatctagagccccacctccttattaaacctgacccaggcgagcctccccaggcagcctcattactggcagcagcactgaaagaagctgagagccta

SEQ ID NO: 760217 - DNA, 120 bp, Artificial Sequence
  ENSG00000214944_32 (sequence is synthesized)
caagttgcagtgaaggcctcacagatgggcgccgtgagtcaatcatgtgaggacagttgtggagactctgtcttggcggacacactcagttctcatgatgtaccaggatcaccgactgcc

SEQ ID NO: 760218 - DNA, 120 bp, Artificial Sequence
  ENSG00000214944_33 (sequence is synthesized)
tcattagtcacaggagggagagaaggaagaggctgttcggatgtggatcccgggatccagggtgtggtaaccgacttggccgtctctgatgcaggggagaaggtggaatgtagaaatttt

SEQ ID NO: 760219 - DNA, 120 bp, Artificial Sequence
  ENSG00000214944_34 (sequence is synthesized)
ccaggttcttcacaatcagagattatacaagccatacagaatttaacccgtctcttatacagccttcaggccgccttgaccattcaggacagccacattgagatccacaggctggttctc

SEQ ID NO: 760220 - DNA, 120 bp, Artificial Sequence
  ENSG00000214944_35 (sequence is synthesized)
cagcagcaggagggcctgtctctcggccactctatcctccgaggcggccccttgcaggaccagaagtctcgcgacgcggacaggcagcatgaggagctggccaatgtgcaccagcttcag

SEQ ID NO: 760221 - DNA, 120 bp, Artificial Sequence
  ENSG00000214944_36 (sequence is synthesized)
caccagctccagcaggagcagcggcgctggctgcgcaggtgtgagcagcagcagcgggcgcaggcgaccagggagagctggctgcaggagcgggagcgggagtgccagtcgcaggaggag

SEQ ID NO: 760222 - DNA, 120 bp, Artificial Sequence
  ENSG00000214944_37 (sequence is synthesized)
ctgctgctgcggagccggggcgagctggacctccagctccaggagtaccagcacagcctggagcggctgagggagggccagcgcctggtggagagggagcaggcgaggatgcgggcccag

SEQ ID NO: 760223 - DNA, 120 bp, Artificial Sequence
  ENSG00000214944_38 (sequence is synthesized)
cagagcctgctgggccactggaagcacggccggcagaggagcctgcccgcggtgctccttccgggtggccccgaggtaatggaacttaatcgatctgagagtttatgtcatgaaaactca

SEQ ID NO: 760224 - DNA, 120 bp, Artificial Sequence
  ENSG00000214944_39 (sequence is synthesized)
ttcttcatcaatgaagctttagtacaaatgtcatttaacactttcaacaaactgaatccatcagttatccatcaggatgccacttaccctacaactcaatctcattctgacttggtgagg

SEQ ID NO: 760225 - DNA, 120 bp, Artificial Sequence
  ENSG00000214944_40 (sequence is synthesized)
actagtgaacatcaagtagacctcaaggtggacccttctcagccttcgaatgtcagtcacaaactgtggacagccgctggttccggccatcagatacttcctttccatgaaagcagcaag

SEQ ID NO: 760226 - DNA, 120 bp, Artificial Sequence
  ENSG00000214944_41 (sequence is synthesized)
gattcttgtaaaaatggctccagtatgacaaagtgcagttgtacgttgacatctcccccgggactgtggactggaaccacatctactttgaaagatttggacacctcccacactgagtcc

SEQ ID NO: 760227 - DNA, 120 bp, Artificial Sequence
  ENSG00000214944_42 (sequence is synthesized)
ccaaccccccatgactcaaattcacaccgccctcaactgcaggcgtttataacagaagcaaagctaaatctaccgacaaggacaatgaccagacaagatggggaaactggagatggagcc

SEQ ID NO: 760228 - DNA, 120 bp, Artificial Sequence
  ENSG00000214944_43 (sequence is synthesized)
aaagaaaatattgtttacctctaattgtgttgtcatttttccaaacaaaacaaaacactggcacttttgggagaaactttttgtctccattccttatgtatgtgtgattgtctgtgtcca

SEQ ID NO: 760229 - DNA, 120 bp, Artificial Sequence
  ENSG00000214944_44 (sequence is synthesized)
aattgctttaagaataatatttaatatttcctggaagctcatttttttggcatgagtctaattaaattattgaaagccaccctgtttgtataatctttaacttatcaaatctaatttcag

SEQ ID NO: 760230 - DNA, 120 bp, Artificial Sequence
  ENSG00000214944_45 (sequence is synthesized)
atttctggaggagaaactaacttgaataagcaggactattttaaaagttgttttgacgctagagtaaaattccatgtcacattttctacccaatcatctggatttcaagattccttttaa

SEQ ID NO: 760231 - DNA, 120 bp, Artificial Sequence
  ENSG00000214944_46 (sequence is synthesized)
gatctcaatgaagcaatttggatttaaagagtggtattcacaaggggtgaactttcacagtcagggcagttgcctcagtgcccacataggcagaggaggatgtgggaaagggtttttctc

SEQ ID NO: 760232 - DNA, 120 bp, Artificial Sequence
  ENSG00000214944_47 (sequence is synthesized)
agctagtttttgtgtgctcatttcttctgggagcattaaaagtggtgatctgttacagtcactattcaactgggcacgtgttgtgattggtcagtcactgagccagggatacagtccgga

SEQ ID NO: 760233 - DNA, 120 bp, Artificial Sequence
  ENSG00000214944_48 (sequence is synthesized)
cgccaggcgttggcatcgccggggagagccttccggactccgggcggcggctggctgggggcgcgttccgaggcgccctcaggcagggcgcgggggcagagcctcgcctgggttctggag

SEQ ID NO: 760234 - DNA, 120 bp, Artificial Sequence
  ENSG00000214944_49 (sequence is synthesized)
tggttcagcatcatcttttaacaaggcccagaggcccagagcccccatcaagtcattttgatgtaaatagtgaactttgttagagccctcacttctatcaatcagctgtcctgtccctgc

SEQ ID NO: 760235 - DNA, 120 bp, Artificial Sequence
  ENSG00000214944_50 (sequence is synthesized)
cagcacctggagcaccaactaccactccctggaaagaacccttccctgcagttttttaaggacaaaactgcccactcctcattaagtttgctgcctggatacacttttccacaaaggaaa

SEQ ID NO: 760236 - DNA, 120 bp, Artificial Sequence
  ENSG00000214944_51 (sequence is synthesized)
actggcatatcctgccttccgagtagtatgggtctctgtgtgagaaaccaggagatattttcatcttgttcggaaatacttgtatgtattttggtgtcaataaatatcttgtacctcatt

SEQ ID NO: 760237 - DNA, 120 bp, Artificial Sequence
  ENSG00000214944_52 (sequence is synthesized)
aattaacactttaaacatcatctgtatagtttgaacaagaagttgtccctctgaatggttggctcttgtgtagagtgaatcaaagtcctccctagcatgggaataaatcggtactgatga

SEQ ID NO: 760238 - DNA, 120 bp, Artificial Sequence
  ENSG00000214944_53 (sequence is synthesized)
ctggctggggacgccccgagttcttcctgagtctctactgtttcatctgttgatttcaccaaaacaaaaagatggattctgactccgactcaccttttaactactcgtggccttcctttc

SEQ ID NO: 760239 - DNA, 120 bp, Artificial Sequence
  ENSG00000214944_54 (sequence is synthesized)
attgctttgccaacattgctgcaacagatgtgagcatttattattaaagtggaaaagtctagggccaacctgaccctattcctttgttgataacccttgtcttctgccttatgcttgagg

SEQ ID NO: 760240 - DNA, 120 bp, Artificial Sequence
  ENSG00000214944_55 (sequence is synthesized)
acttttcattttttaatcatatggatattatgagaatatgtctatagagtaggtgtcatttaattatttttcttaggaaacagtgagaacttttgatgtgtccttttgggcgctttttca

SEQ ID NO: 760241 - DNA, 120 bp, Artificial Sequence
  ENSG00000214944_56 (sequence is synthesized)
atacaggtatttttataaaactttcatacttagactaaatcttagtcttttgatttttattcagtttatttgaactgtggtttgcttcattaatactagtaatgttttttctttaaagat

SEQ ID NO: 760242 - DNA, 120 bp, Artificial Sequence
  ENSG00000214944_57 (sequence is synthesized)
tttatccctaggagagaaatgatttctcatatggggtcaaaacatacacacatactcagtatgtgtccattttcaatttgtcccttctgtactgctttgcactctaaatgggaactttta

SEQ ID NO: 760243 - DNA, 120 bp, Artificial Sequence
  ENSG00000214944_58 (sequence is synthesized)
aaattaaaagcttccaagggcattcacagagatctctttggttttgtggaatccttccaaatcttggtaattatttcctgtgatgttgccaaacttttcataggcagataccgtaactca

SEQ ID NO: 760244 - DNA, 120 bp, Artificial Sequence
  ENSG00000214944_59 (sequence is synthesized)
aaatgtttttttaatctggttggtaatgtcctctgggctttagagtatctattttcccttaatcatttcagcctcctgttagcgatctattaaacaaataaatttcagcttagttttttg

SEQ ID NO: 760245 - DNA, 120 bp, Artificial Sequence
  ENSG00000214944_60 (sequence is synthesized)
tgcatgaccttcctgctataatacaaagatataacagtaatgagactagctttagccacttacatatctcctaaaaatggtattaactgctattcttaggcattatgttataaaaacatt

SEQ ID NO: 760246 - DNA, 120 bp, Artificial Sequence
  ENSG00000214944_61 (sequence is synthesized)
atttacctaaagtctccaaatagttgttttttatttttatgtcttcataatgcaatgtagctcaagtaatttctggtttgggactcaaaggaaggatactactaggtttatgtggattct

SEQ ID NO: 760247 - DNA, 120 bp, Artificial Sequence
  ENSG00000214944_62 (sequence is synthesized)
taagttctcatgaatgattgactagggagagacctcagcaagagagtgagatgtaggacaggaatgcacagccttgtgaatttatgtgccgagttcgtattcagaagactcgcttaacta

SEQ ID NO: 760248 - DNA, 120 bp, Artificial Sequence
  ENSG00000214944_63 (sequence is synthesized)
tcacccaaccaccagcagcaaactaccttcccacaggagaggatgatattgcttttgggctttgtttcttttctctataaattcacaggtcctacccctaggacagatgtagacacacct

SEQ ID NO: 760249 - DNA, 120 bp, Artificial Sequence
  ENSG00000214944_64 (sequence is synthesized)
ctctggaacgccaaaaaccttgcctttggaggtaacttagaaaaaggccagaaatattaagagaagtgaattcgggcctgcgttttgtgtttcgaggtagttccaaccgaaagggtaaac

SEQ ID NO: 760250 - DNA, 120 bp, Artificial Sequence
  ENSG00000214944_65 (sequence is synthesized)
agcttacagtggtcacgtaaagtaaaggcaatgactgtctctggttgaaggggacttgatatatttttttaaattagaaaaaaactgagaataaatatgctagcctaaatgaatatcata

SEQ ID NO: 760251 - DNA, 120 bp, Artificial Sequence
  ENSG00000214944_66 (sequence is synthesized)
ggcatataataatgacactggggtttcaagtatgaggatctaaagagtagttggtgggttatactgctctgtttgccggccaaatatcggaccttccccaacccctaccctgcctcattt

SEQ ID NO: 760252 - DNA, 120 bp, Artificial Sequence
  ENSG00000214944_67 (sequence is synthesized)
ttgatatgatttattcattacagttttgaaagaactttttaacttttcaggttttttaaaaaaggagtccctgcggtcaattacagaacaagcccttaaacctaatctcatgtgcatcaa

SEQ ID NO: 760253 - DNA, 120 bp, Artificial Sequence
  ENSG00000214944_68 (sequence is synthesized)
ctgagaaaacaactcagaaaaccagaaatatacacacggctccctccgtctccctcctttctctctccctctctctttctctctctctcacacacacgaagtttggtggtatggttaaag

SEQ ID NO: 760254 - DNA, 120 bp, Artificial Sequence
  ENSG00000214944_69 (sequence is synthesized)
cagaagtgccagaaaattcttgatctgtgccatcctacactttagttcatgtcagaattcatttatgaaaacattgtttcaaaacattttaaatataaaaaaaaatagaatgtagagatt

SEQ ID NO: 760255 - DNA, 120 bp, Artificial Sequence
  ENSG00000214944_70 (sequence is synthesized)
tggtttaggtaatttccccgaacctagctatcctgttatatgtatagttgtaggctacttagttccataaaggtttctaagataagagcataaagagtatacttttcatcctgtgcaggt

SEQ ID NO: 760256 - DNA, 120 bp, Artificial Sequence
  ENSG00000214944_71 (sequence is synthesized)
ggtaacaaccttacttccacaaggtcttatgtgcgtaagataaaatggataaaatgtcttcagtagttagagatcagaagattaaattgaactcaagattggaagattaaattgaactca

SEQ ID NO: 760257 - DNA, 120 bp, Artificial Sequence
  ENSG00000214944_72 (sequence is synthesized)
gaacttctttaacaacatcccttgattaattaagatatatagatgcagtatagctttttaattctatacttcttttttttttcttttttaaacatcagcaccactaattatcttcctctc

SEQ ID NO: 760258 - DNA, 120 bp, Artificial Sequence
  ENSG00000214944_73 (sequence is synthesized)
tcaagttctgctttatctaatcctgagtttctagtttcagaatgcgcacgtatgtttttcattttgacacagcccagattcatcaggggagttgtactgccctgggtgatttccttttaa

SEQ ID NO: 760259 - DNA, 120 bp, Artificial Sequence
  ENSG00000214944_74 (sequence is synthesized)
aagaagaacctcattatgccattgaggagtctctgtctaaaaatacgtgcagggatctgctgagggatctgctgctctcagcctcgccccagggacagctggagaggctcccctctgcag

SEQ ID NO: 760260 - DNA, 120 bp, Artificial Sequence
  ENSG00000214944_75 (sequence is synthesized)
ctgcccgagcccgcggtcgtgccttccctcccttcaggccaggcagtgaaggtctccttgtctgtatccacatctctcatgactggggagagtttcaaagggacacccgtggcatttgcc

SEQ ID NO: 760261 - DNA, 120 bp, Artificial Sequence
  ENSG00000214944_76 (sequence is synthesized)
agaaccattgagaggctctttagaggggtctgatgtcgggattcaggtagaggaagtaccgaagctggctggtggggtcctgtaccccaaggcctcttcagttctgggtcagactggaac

SEQ ID NO: 760262 - DNA, 120 bp, Artificial Sequence
  ENSG00000214944_77 (sequence is synthesized)
atggtgctatgagagtttgattctctttataaagttgttcaaggcacaaggctagttctaaatgaaggtctacaactgtgactgaatgggtcggttctgcaaatgacttggagaactggg

SEQ ID NO: 760263 - DNA, 120 bp, Artificial Sequence
  ENSG00000214944_78 (sequence is synthesized)
ctcttcttcatcaggcttatgtcagcctgaggttataagccaagcagacagctctattttcagtcttcagtatacatgatgagtatcttctacttctaggaaagttctgttcactggaga

SEQ ID NO: 760264 - DNA, 120 bp, Artificial Sequence
  ENSG00000214944_79 (sequence is synthesized)
ccctctggcccaccctgaaattggatacagggacagggacctgatctgtgttttattcttctgccttgtcatcagcttctttcccatttgattttcctaatttctatgagggagtgagaa

SEQ ID NO: 760265 - DNA, 120 bp, Artificial Sequence
  ENSG00000214944_80 (sequence is synthesized)
acagagtggtgaattctttagtgatgcctttggccactctttaagagttaggaatagcacccaatagtagaaccatttttcaaatgacagagaaacctataaaatgtccctcattgtaag

SEQ ID NO: 760266 - DNA, 120 bp, Artificial Sequence
  ENSG00000214944_81 (sequence is synthesized)
tgaataagtgctgatcagcttgaacaaaatggacttgtttttagctgatctcatctgaagccgtttccgtttagacaaaaacttctttgtattagaagaggtctttgaaatcctagagga

SEQ ID NO: 760267 - DNA, 120 bp, Artificial Sequence
  ENSG00000214944_82 (sequence is synthesized)
ctctcattttccaaagacataagtatttttattaaagaaaaaagcatttcctatattggaaataaagttttaaaaagacacaataaaaattatacaaacaaacagtgtcataaagtgaat

SEQ ID NO: 760268 - DNA, 120 bp, Artificial Sequence
  ENSG00000214944_83 (sequence is synthesized)
atcgattttgtcagggtctggattggacatggttctaataaaacactgttttgggctttgaaaattctagttttaatcagtgcaaggtgggcacagtttaagttttaactgagttcacat

SEQ ID NO: 760269 - DNA, 120 bp, Artificial Sequence
  ENSG00000214944_84 (sequence is synthesized)
gggtaaagaaataaaatcctgccaacagagatttaatggatgaagtgaaatctgtatttggtacttaaaaatatttcgggactagtttctatgttttcatagtttaaatacatagtattt

SEQ ID NO: 760270 - DNA, 120 bp, Artificial Sequence
  ENSG00000214944_85 (sequence is synthesized)
gtaaatctaaagcataacaagaaatgtgagaaaaacaacacatttagaaattgttaaaaaataagttattcagagatagggacaggttcttggtttgtatgactatgagaccgtgaagta

SEQ ID NO: 760271 - DNA, 120 bp, Artificial Sequence
  ENSG00000214944_86 (sequence is synthesized)
ttagccatctccgccttcctagaaagatgtctccctcctgcttcggactcctccttcctcctaaaccttgtttatcgtctgctgctcttgcactggccacaagagagactttttacagac

SEQ ID NO: 760272 - DNA, 120 bp, Artificial Sequence
  ENSG00000214944_87 (sequence is synthesized)
ttaagtctgccaagagaccttgcttttgttctacagcacctgttttaaatttcacccttcccaggaggcattttcctattaagtgagagtgagatgtagattctaccctctgtaacacaa

SEQ ID NO: 760273 - DNA, 120 bp, Artificial Sequence
  ENSG00000214944_88 (sequence is synthesized)
acgacacacgaacacttcagtgcaagaaagaaaagtacaaagatggtgatactttgtgcggttcgtcagttgctgtctgttagcgtgtaagccccatgtgggcagggaccacatgcattg

SEQ ID NO: 760274 - DNA, 120 bp, Artificial Sequence
  ENSG00000214944_89 (sequence is synthesized)
cgctcatccaagcacctcatctaagaatactcaatatgtattattttgtggtgtttcctattttgaaatatgtgttggccgtgtacagaagaacccggtgggctggccgatgtttgacgc

SEQ ID NO: 760275 - DNA, 120 bp, Artificial Sequence
  ENSG00000214944_90 (sequence is synthesized)
tgtcctttttgtttctgtctcgatggcgtgcttccagcattagtcacaggagggagagaaggaagaggctgttcggatgtggatcccgggatccagggtgtggtaaccgacttggccgtc

SEQ ID NO: 760276 - DNA, 120 bp, Artificial Sequence
  ENSG00000214944_91 (sequence is synthesized)
tctgatgcaggggagaaggtattgtgaactgatttgttagtaaacggcagcggttactgtgtataataaaatagcctcaggttctggtctgtcacggcagtcagtggggcaaaggtgctt

SEQ ID NO: 760277 - DNA, 120 bp, Artificial Sequence
  ENSG00000214944_92 (sequence is synthesized)
ttctgaattgttctcaattgatttaaatattcatatttaaactttctaacttatttcttcttcaaatgtgcttgcactgcctgtgtcatgtaggtgtaaacaaagcaacgattgaaaagt

SEQ ID NO: 760278 - DNA, 120 bp, Artificial Sequence
  ENSG00000214944_93 (sequence is synthesized)
tattaaaaagattaaaaactctcctgtgtatatgtgtgtctgtgctctctgacttctggtctttctgccctgcaaacctttgcttctcacccactatgtctggcagctctggcacccggg

SEQ ID NO: 760279 - DNA, 120 bp, Artificial Sequence
  ENSG00000214944_94 (sequence is synthesized)
ggcccttttgcaaccagatggcgccaaagtaattgaaacaccttttactttggaatattcttgcttctttcaccttccttgaccctcctctccttgcagagttgatttcctgtcaccacc

SEQ ID NO: 760280 - DNA, 120 bp, Artificial Sequence
  ENSG00000214944_95 (sequence is synthesized)
cacatttcacctactttttttgtggttaatttttaattaatctgaccagtttttgcttggggcacagcgattcccaaagggaatcctcttttttgacttactgctatagacatagatatt

SEQ ID NO: 760281 - DNA, 120 bp, Artificial Sequence
  ENSG00000214944_96 (sequence is synthesized)
aactctctctttaagaattaaatacataaaacttcctattaatgtctactgaaagtgagatgtcagaaatagggaaggaataaaatatgattctgggaggtggctagttggcctcttcct

SEQ ID NO: 760282 - DNA, 120 bp, Artificial Sequence
  ENSG00000214944_97 (sequence is synthesized)
gcttgtcagggctccagagtttagctttatctaaaattgaattaggtacattaataggtgccaatatgtgtcaatgtgaaaaaatggcaaatgtcagatcttctcacatatacaacatat

SEQ ID NO: 760283 - DNA, 120 bp, Artificial Sequence
  ENSG00000214944_98 (sequence is synthesized)
tttacatattatatactttttgtgtatattacataagactgagaaatcaagtcaaggacttttaaaatccagagaaaagacagctgtgactgagtgttcttttttaaacttcagaggcca

SEQ ID NO: 760284 - DNA, 120 bp, Artificial Sequence
  ENSG00000214944_99 (sequence is synthesized)
aaatgagcataggaatgtaatattttactccttctgattgtaagctttctaatgtattgcttcttaaaatgttcctgcttttcatcacttttaagtgtgaagtttgtggtgtccaactgt

SEQ ID NO: 760285 - DNA, 120 bp, Artificial Sequence
  ENSG00000214944_100 (sequence is synthesized)
gttaatagaaaagagagagtgaattggacagtaataatttaatcttgaacgcaaagttgggtggctcctacccctaaagtctccctcttccactccaattcagctacaggtagataattg

SEQ ID NO: 760286 - DNA, 120 bp, Artificial Sequence
  ENSG00000214944_101 (sequence is synthesized)
aggttaagtgtctgggttcttctttggattaagctatctgcaaaattttttgcttaataaggcattttgaaagattaatacattaataaacccaggtaaagggcaggatcacttgaaatc

SEQ ID NO: 760287 - DNA, 120 bp, Artificial Sequence
  ENSG00000214944_102 (sequence is synthesized)
aaacttttaaaaggtgtataatggatattttgtcattagcttcctctacaaggtaaggttagaacaaatttctgaaagaatattaaaaaatgaaatctgactcaaatgcagaaataatgg

SEQ ID NO: 760288 - DNA, 120 bp, Artificial Sequence
  ENSG00000214944_103 (sequence is synthesized)
ataaatcgccaactgcagttttaaacatttaccacaaggtggcagaacaactccattaaaaacgcgaaatttcctgtcttgtgtcaaacctagtggcttttgggcataagtaaccgcggg

SEQ ID NO: 760289 - DNA, 120 bp, Artificial Sequence
  ENSG00000214944_104 (sequence is synthesized)
tagcacagtccaactcatttctatggttctaatttttatagactataaaaactctgtgccatatggtcttactacagaagcagtggagtgtggatgggccacgacagagccagaagagca

SEQ ID NO: 760290 - DNA, 120 bp, Artificial Sequence
  ENSG00000214944_105 (sequence is synthesized)
gcgagaacgccaaccatccctctagggcgggggttcttagagcctgttctctcccatagggtttggcacagatctaatgtctttaagcttcatctccattttcagcctctgtcttttctc

SEQ ID NO: 760291 - DNA, 120 bp, Artificial Sequence
  ENSG00000214944_106 (sequence is synthesized)
tatcagaggggctgcttacgagtgaaatctttaattggcagtccaagggaagcggaggtctggctagctcatcctggcatcatcagcctaaactaattgaatttaacaagttcaaaatta

SEQ ID NO: 760292 - DNA, 120 bp, Artificial Sequence
  ENSG00000214944_107 (sequence is synthesized)
cccgaggacatgaccatggctggctgctttttatggcttaaaattagatgagacagtaggcccttgaggacagggcatctgatggtctcccatagcgtaaggtgtgaagtttacagtggg

SEQ ID NO: 760293 - DNA, 120 bp, Artificial Sequence
  ENSG00000214944_108 (sequence is synthesized)
tgatcgatatttatttattgaatggcgtgccatcgagttcaactgggagtcattcacttgttgagtgtccgtgctatgtcaagcatcattcttataatatggagcacatggacaaagtct

SEQ ID NO: 760294 - DNA, 120 bp, Artificial Sequence
  ENSG00000214944_109 (sequence is synthesized)
cgctactcactggtttgcatcctagggagagaaggccgacaataaatgaataaacaagtgttcaattatggaggctgcaaaccatcactatccacgtgtgcccttaatgtgtgctgtgga

SEQ ID NO: 760295 - DNA, 120 bp, Artificial Sequence
  ENSG00000214944_110 (sequence is synthesized)
agagacaaagaacaaggcatagaccctctccctaaagaacagacggtctcctgtggctggttcgtggcctctgctgctagtacttctactatggcagtcactggtctggtgatctctgac

SEQ ID NO: 760296 - DNA, 120 bp, Artificial Sequence
  ENSG00000214944_111 (sequence is synthesized)
tgtggtgggatctagagcagcccagctacgcgcgccactatggccaccgtctgagtctggtttcttttcccaactgctgtatatgttgatatcgtgaatctcaaacattgagaaaaggag

SEQ ID NO: 760297 - DNA, 120 bp, Artificial Sequence
  ENSG00000214944_112 (sequence is synthesized)
ttaaggccagacatgatattctttctttaactttcaatctgtcctctagaatataagaggtcagcctgacccaaaagacaacttcagtctgggcacagagaactcaattcacattgtggt

SEQ ID NO: 760298 - DNA, 120 bp, Artificial Sequence
  ENSG00000214944_113 (sequence is synthesized)
ttgcacaaggtaaatgttgttacttgagttttcagggtgtccttactgtcatcccttgttgttttaaggggtgattgggtgaaaattgccatccatctcaaacatcgactttgcgtgaag

SEQ ID NO: 760299 - DNA, 120 bp, Artificial Sequence
  ENSG00000214944_114 (sequence is synthesized)
gacgctcttgttgtcaagtgtttgtttgattctataggcttttatttctgggaggaaactgagtcagtatagataaggtaatcaagtttagagatagcaaagtgatttacccaaggtcat

SEQ ID NO: 760300 - DNA, 120 bp, Artificial Sequence
  ENSG00000214944_115 (sequence is synthesized)
acattttgggacactgcagggcagcttttcagaagtagaatggttattcattttcttgttttttatgtattttaggtggaatgtagaaattttccaggttcttcacaatcagagattata

SEQ ID NO: 760301 - DNA, 120 bp, Artificial Sequence
  ENSG00000214944_116 (sequence is synthesized)
caagccatacagaatttaacccgtctcttatacagccttcaggtaactatcctcctctaatctttgaccttgtgaatggttctcttaatgcaattctctttgatgattcccagactttaa

SEQ ID NO: 760302 - DNA, 120 bp, Artificial Sequence
  ENSG00000214944_117 (sequence is synthesized)
aaatgagaacaagtgagaggtagggaatgatcttaaaagaatgacaaccttctaagtgtgatgtgttggactcacatggttttgtaatcagaggcaacaccatgactacattttatacca

SEQ ID NO: 760303 - DNA, 120 bp, Artificial Sequence
  ENSG00000214944_118 (sequence is synthesized)
ttcttctctgaaatcataaaacagttcatatctttaaaaaatattgatgaatatgatctggcttgacatttacaatgaaactcttaggtgagtgtagcatgacttcacattttctgatga

SEQ ID NO: 760304 - DNA, 120 bp, Artificial Sequence
  ENSG00000214944_119 (sequence is synthesized)
aaacctaaattcacacctaaaattctttgacttctccatgtggccatcagcctttagagcagttaagtaatccatatgttgctttactcttttgtttgttcatccactcaacatttatta

SEQ ID NO: 760305 - DNA, 120 bp, Artificial Sequence
  ENSG00000214944_120 (sequence is synthesized)
atttattaatgttgaggggatgaacacacagtgcctgtctctgtgctgactgtgctgagggctgagcacacaaaggcaaattagccacacagcctgctctcaaatagcttactgcctttc

SEQ ID NO: 760306 - DNA, 120 bp, Artificial Sequence
  ENSG00000214944_121 (sequence is synthesized)
aaggaagagcagacataaaaaagaaatcatgcttgcatttaggattaaatggttggatgatcccttaggctggggtccccaaaccccagggtgcagagtgttacctgtctgggctgcaca

SEQ ID NO: 760307 - DNA, 120 bp, Artificial Sequence
  ENSG00000214944_122 (sequence is synthesized)
gcaggaggtgagctgggggcaagcgagcagtaccacctgaactccgcctcctgtgagatcagtggcagcattagattcttataggagcgtgaaccctattgtgaactgtgcatgcaatct

SEQ ID NO: 760308 - DNA, 120 bp, Artificial Sequence
  ENSG00000214944_123 (sequence is synthesized)
agggatctaggttgccccctccttatgagaatctaatgcttgatgatctgaggtggtacgctttcatcctgaaaccattctcaccacatcccagcccatccattaaaaaaaaaaaaaaaa

SEQ ID NO: 760309 - DNA, 120 bp, Artificial Sequence
  ENSG00000214944_124 (sequence is synthesized)
atccacggaaggaggaggggctgaaggttaaattgatcactaattactaataatttaaccaatcatgcctgcataatgaagcttccataaaaacccaaaaggacgggccgggcacggtgg

SEQ ID NO: 760310 - DNA, 120 bp, Artificial Sequence
  ENSG00000214944_125 (sequence is synthesized)
gctcccatcagcagatcctgataattatttcttttgcagagattaagaattcagtgtccagcagatcagcagctgaaaaggaagatataaagcgtgtcaaaagcctggtggttcaacaca

SEQ ID NO: 760311 - DNA, 120 bp, Artificial Sequence
  ENSG00000214944_126 (sequence is synthesized)
ataacgcttttacctatactcgtaggggcatcccagatccaggtttagagtggacaagaagcaagtaaattttaacataaaatattccttcctggtaaccttatctatttcctgaaacgc

SEQ ID NO: 760312 - DNA, 120 bp, Artificial Sequence
  ENSG00000214944_127 (sequence is synthesized)
gctccaggcccacagcgtccccgcattggttggctgggtgggccgaggaacagtggcaacatctgtgtttgtgcggcttctcccgccttgacccctgcctgggtatccacacatctcctc

SEQ ID NO: 760313 - DNA, 120 bp, Artificial Sequence
  ENSG00000214946_0 (sequence is synthesized)
cttgccgtctctatgtctggagctcttagagataagacatagaggtgtctggttctgagaaaaggaagttttgctaagtgagagacacaactgactcaactgactcagaaaactgattat

SEQ ID NO: 760314 - DNA, 120 bp, Artificial Sequence
  ENSG00000214946_1 (sequence is synthesized)
attcctggtccctgaacgatcctatagagacatccagtccctgactccacctgcctccaggtgcccagaacagcccatcgtggggacttcaccctcagcaagtggacgccgtttgtcctg

SEQ ID NO: 760315 - DNA, 120 bp, Artificial Sequence
  ENSG00000214946_2 (sequence is synthesized)
ccagggcaggatggagatggatggggacccgtataacctgcctgcccaggggcaaggcaatatcatcattactaagtatgagcagggacaccgagctggggcagcagtggacttggggca

SEQ ID NO: 760316 - DNA, 120 bp, Artificial Sequence
  ENSG00000214946_3 (sequence is synthesized)
tgagcaggttgatgtcagaaaatacaccaataacctcgggattgtgcatgagatggagctgccccacgtcagtgccctggaggtgaagcaaagacgcaaggaaagtaaacgtaccaacaa

SEQ ID NO: 760317 - DNA, 120 bp, Artificial Sequence
  ENSG00000214946_4 (sequence is synthesized)
gtggcaaaagatgcttgcagactggacaaaatataggagcaccaagaagctgtctcaaagagtatacaaagtcattcccctggcggtacggggccgggcgtggtcacttttgctagatat

SEQ ID NO: 760318 - DNA, 120 bp, Artificial Sequence
  ENSG00000214946_5 (sequence is synthesized)
tgacagaatcaagtcccagaacccaggcaaatataaggtcatgaaggagaagggcaagaggtcctccagaatcatccactgcatccagctagatgtcagccacaccctgcagaaacacat

SEQ ID NO: 760319 - DNA, 120 bp, Artificial Sequence
  ENSG00000214946_6 (sequence is synthesized)
gatgttcatacaaagattcggagtcaagcagcaggaattatgtgacatcctcgtggcctattctgcatataaccctgaggtgggctaccacagggacctgagccgcatcactgccatcct

SEQ ID NO: 760320 - DNA, 120 bp, Artificial Sequence
  ENSG00000214946_7 (sequence is synthesized)
ccctgtggtattctacagcccaaatactgcctggctcgagaggctcctatcgcaccaggagcaggtgctgcacaagtccttcccaaagatcatgagacacctgggcaaggaagggctgtg

SEQ ID NO: 760321 - DNA, 120 bp, Artificial Sequence
  ENSG00000214946_8 (sequence is synthesized)
cattgagggttccatgctgacgaggctcctccggtgtttccttgatgggaaatccttcgggctcaccctgagactgtgggatgtgttcatcttggagggcgcgcgggtactgacagccat

SEQ ID NO: 760322 - DNA, 120 bp, Artificial Sequence
  ENSG00000214946_9 (sequence is synthesized)
ggtgcatgcatcattcaaaatacacaggaagcacctcatgaagctttcctggagcactgtctgggagtttcaggagcgactctctcagagctgggccctggaggacaacgcggtcctcag

SEQ ID NO: 760323 - DNA, 120 bp, Artificial Sequence
  ENSG00000214946_10 (sequence is synthesized)
gaaccttcaaacctctatgaaggaactcacaaaaaaacactgggacctgccacccccagggagcttgctacaaaatgcacattgctataccatagcctggggcttgcaatccaaggctgg

SEQ ID NO: 760324 - DNA, 120 bp, Artificial Sequence
  ENSG00000214946_11 (sequence is synthesized)
caaggattcctgcacgtcaagggcctcaggtgactttcatgcacacccaagtcagaaggctctcctgaatcctggatgtcaccttcctgcccaaaaaaggaggaacgagggtcaaccagc

SEQ ID NO: 760325 - DNA, 120 bp, Artificial Sequence
  ENSG00000214946_12 (sequence is synthesized)
agcagaccagtcacaaaaagagatgaaatgtgagtgcatggccttcctgacacccagacaaaactttgggcacaaagccaggctgcagctctggccactgacttggaccagggatgcccc

SEQ ID NO: 760326 - DNA, 120 bp, Artificial Sequence
  ENSG00000214946_13 (sequence is synthesized)
catgcaggccggtgtgccctggctgctcttgacaccctctggctcctgacaccctctcttcggctgcctgcgttaggaagggagaacctgccagttttcagaagaaaatgtagctttatt

SEQ ID NO: 760327 - DNA, 120 bp, Artificial Sequence
  ENSG00000214946_14 (sequence is synthesized)
ataacataggaaagactgcaagttattacgggaggaggaggaggcctgaaacagctcctgaaaatgagagggaaaaggaaggtgtaaatatgttggtaataaaatctccaaccacagcat

SEQ ID NO: 760328 - DNA, 120 bp, Artificial Sequence
  ENSG00000214946_15 (sequence is synthesized)
actggtgctgagcactcgcccacctgtccacttgccgtctctatgtctggagctcttagagataagacatagaggtgtctggttctgagaaaaggaagttttgctaagtgagagacacaa

SEQ ID NO: 760329 - DNA, 120 bp, Artificial Sequence
  ENSG00000214946_16 (sequence is synthesized)
ctgactcaactgactcaggaaaacaaagtcccctcctgtattgacagctgggaattgtggtgtccaccgtcctcgacctgcgacggggtctccatgagcacagaggctgctctggagtca

SEQ ID NO: 760330 - DNA, 120 bp, Artificial Sequence
  ENSG00000214946_17 (sequence is synthesized)
tctcttgggggtgttgcaacttcttgaaaattcagtgtttgtccaccaggacgtagtaggcaggacttcagctcgctgctggcagaaaagggctgaagcccagactcctggtgtcacatg

SEQ ID NO: 760331 - DNA, 120 bp, Artificial Sequence
  ENSG00000214946_18 (sequence is synthesized)
gacccaatcaccacgtctcagatgaagaaacgaccttcccctcctggtgttgccccaaagcctaggagcttggcagggtcccacacaggatggtccttgtaggagacaggtttgacaagt

SEQ ID NO: 760332 - DNA, 120 bp, Artificial Sequence
  ENSG00000214946_19 (sequence is synthesized)
tgctgaggtgcctgatgggccaggcacttgtcatgaaatgagtttgcatcctgggggagcctcttcttcactggaaacctggcaaggatccaatttcccctttgcctgaaccccatagga

SEQ ID NO: 760333 - DNA, 120 bp, Artificial Sequence
  ENSG00000214946_20 (sequence is synthesized)
gcatagcagatagggaggggggtcacccaggtggctgttcctgcttggcccccactttccagaccattccaggcagggagagctgctgagctgactgcatgagctgcccacatggaggac

SEQ ID NO: 760334 - DNA, 120 bp, Artificial Sequence
  ENSG00000214946_21 (sequence is synthesized)
ccagccaccccttatgtccggcaggcagcccttgggctgttgcaggaccgtggccagttcttggtattgctcaagtcccctgggccttcagactggcgggtgacttcaagggaccaacca

SEQ ID NO: 760335 - DNA, 120 bp, Artificial Sequence
  ENSG00000214946_22 (sequence is synthesized)
ccctgggcctctcctgggacaaacacttgccttcacccactatcgatgtcttgctcagccctcagaggagcgtggttggcgtggattacttcatgccttgattctgccttcccggaaacc

SEQ ID NO: 760336 - DNA, 120 bp, Artificial Sequence
  ENSG00000214946_23 (sequence is synthesized)
acggtggcagcaggcttggatgtcaccaagccaccgtgtttcatgctatttctggaagttctcgcctttgtggcctcggaaaggaaggcgatctggtgctttggggaaggccctcgggat

SEQ ID NO: 760337 - DNA, 120 bp, Artificial Sequence
  ENSG00000214946_24 (sequence is synthesized)
gctcctccagatggtcttcttcaggccttttgctcagcattggtctgatcagttctgccagctctgggccatgatctcttggcactggcgcggctttccttcaataattccataaactcc

SEQ ID NO: 760338 - DNA, 120 bp, Artificial Sequence
  ENSG00000214946_25 (sequence is synthesized)
tgactcaggggctggaggacaccgactctgggcccacttgacctgggcaatggcccattatgatgggtgccatgacctcaaaatgtcactggtgctgagtgaccgcccacctgcccaccc

SEQ ID NO: 760339 - DNA, 120 bp, Artificial Sequence
  ENSG00000214946_26 (sequence is synthesized)
ggactgggaatcgggtggtcggtaaggcagagggggtggcctgtgggcctgtgtggtggtgagtgggccacggctgtcactgggaggggtggcctttcctgctggactctgttcccatga

SEQ ID NO: 760340 - DNA, 120 bp, Artificial Sequence
  ENSG00000214946_27 (sequence is synthesized)
ggacttgaccaaaacccaaaccaagaactgcagtcctggctcagagtccactgcctgtttgaaccaagaccccagctgaaggctggacctgaccaaaacttggggcatttatggcctgag

SEQ ID NO: 760341 - DNA, 120 bp, Artificial Sequence
  ENSG00000214946_28 (sequence is synthesized)
gatggcatgtcatggcatcaccattccagactaccagctccagttccttcagagggtctcagcccctggggcctgccctttcctggcttcttcaagttgggtcccttcagggccccaaag

SEQ ID NO: 760342 - DNA, 120 bp, Artificial Sequence
  ENSG00000214946_29 (sequence is synthesized)
ccctggacccagcatccacgggccactgtcagacgcctggcagctccgctaactccatcatggctcatttgacagcaaagacgcaaggaaagtaaacgtaccaacaagtggcaaaagatg

SEQ ID NO: 760343 - DNA, 120 bp, Artificial Sequence
  ENSG00000214946_30 (sequence is synthesized)
cttgcagactggacaaaatataggagcaccaagaaggtaacatggggaggaagtggcccgcgtgactgctctctgcagagccaggagacaggcacccatggttgtgacctggcaccgtct

SEQ ID NO: 760344 - DNA, 120 bp, Artificial Sequence
  ENSG00000214946_31 (sequence is synthesized)
gcctctcagtgggtgggtggtaccccatccttgccataggactgcaggcctgttcgccagctttgctctgcggggtcgccccatgtcctttctcactggagtgttcttctgtctgtagct

SEQ ID NO: 760345 - DNA, 120 bp, Artificial Sequence
  ENSG00000214946_32 (sequence is synthesized)
cctgccctcgtggcaggtgcagttcacaggtgctgccccaggcctggcacagtggcctccccagcctggcccaggggagggagcatgaacaatccctgactgtgccctttcgggccatgt

SEQ ID NO: 760346 - DNA, 120 bp, Artificial Sequence
  ENSG00000214946_33 (sequence is synthesized)
gagcttggacacttgctgcaggagtccccccatgctccttgtcaactgagttgtgcgtgacctgctcagtcctcatgtccagtgccaggggaggggtgcagaggctgcacctcaaatccc

SEQ ID NO: 760347 - DNA, 120 bp, Artificial Sequence
  ENSG00000214946_34 (sequence is synthesized)
ctggggcctgaggcaggtgtccccaaagacctgtgccacctctggtgacataagtcctcccaggtggcctcagtcctcctaggtgacatctttccacggtgactctggctcttgcaggag

SEQ ID NO: 760348 - DNA, 120 bp, Artificial Sequence
  ENSG00000214946_35 (sequence is synthesized)
ggtggacagctgcccccggggccttacacagccatgccaggggacagccaccctggccggtgaccctgacttccaggcaaggtgcctgccttgtatcccagcttgtttggagcctccagg

SEQ ID NO: 760349 - DNA, 120 bp, Artificial Sequence
  ENSG00000214946_36 (sequence is synthesized)
atgtccctgctgaggtcctacagcagcctgggtctggacaggaaccccctcacctcaagtcagacggctttcatccctaacatcagagggcatggatacctccccctggctgccctctgt

SEQ ID NO: 760350 - DNA, 120 bp, Artificial Sequence
  ENSG00000214946_37 (sequence is synthesized)
cgtccgaagccagccccaactttgtgcaggcaccactcacctccctgagtgtcttcctgcctcccagctggctgtgctcccagccaccctccctccctacagatgggccaacaaagccaa

SEQ ID NO: 760351 - DNA, 120 bp, Artificial Sequence
  ENSG00000214946_38 (sequence is synthesized)
gatggaagtgtctgcccatcccatgtcccccagcctgacccccacatccaagagatagccacatagcccccagctcccaccctgttctccccgctggcgcctgccttgtggtgtcaaatg

SEQ ID NO: 760352 - DNA, 120 bp, Artificial Sequence
  ENSG00000214946_39 (sequence is synthesized)
caggctgccctcctggcacctggacccaggaggccgctaggcagtgcctccagccagggacctcctccccagggctgaggctacatgctggggtcaccacatgggagggagggaggcctc

SEQ ID NO: 760353 - DNA, 120 bp, Artificial Sequence
  ENSG00000214946_40 (sequence is synthesized)
gtgttgtgcagcacttgcacataagacgcacacaggtgtctggttctgtggtgcatgaacgacttttctaagtgagagacacagcagcctgagcagactcaggtgagtgacctctgggca

SEQ ID NO: 760354 - DNA, 120 bp, Artificial Sequence
  ENSG00000214946_41 (sequence is synthesized)
gatgccgaggagggtcacccctgagcactcaccgggtgcatgttctgcactgacggcgtggaccatcctctcctttgtcctcacagaaactctgtggcgatgggtgctgtccccaaatgt

SEQ ID NO: 760355 - DNA, 120 bp, Artificial Sequence
  ENSG00000214946_42 (sequence is synthesized)
tttgctagatattgacagaatcaagtcccagaacccaggcaaatataaggtaagtccctcccacactcagctaggagtacaaacaagctagactgtatcaggagcccaggactccagctg

SEQ ID NO: 760356 - DNA, 120 bp, Artificial Sequence
  ENSG00000214946_43 (sequence is synthesized)
gagggaacgttgagcctgggttgggagtgggggctgtggtcagacgcacatcctgggcatagatggtaactcaggcaccacaggtgcgctgggctctgctgaccctccctggtgtcagaa

SEQ ID NO: 760357 - DNA, 120 bp, Artificial Sequence
  ENSG00000214946_44 (sequence is synthesized)
tttctgcagaaggaaaccttccttccttccttccagaagtgctgactgtgggatgactgccgtttggggcagggagtcttttgtctgttctgaggctgcttcctcctcttggccctgccc

SEQ ID NO: 760358 - DNA, 120 bp, Artificial Sequence
  ENSG00000214954_0 (sequence is synthesized)
atgactgagagattgttaataaaagcattgagtggtggtaaaaatacgaagatcattactttgaatgggaagaagatgacaaagatgccctcagcattaggaaaactgcctggcctgaag

SEQ ID NO: 760359 - DNA, 120 bp, Artificial Sequence
  ENSG00000214954_1 (sequence is synthesized)
actctagtccttcagaataacctaatccccaaagtgtgtccagagttatgcaacttgacccagttgacaacactaaatctgggaaacaaccttttagaagaagttccggaagagatgaaa

SEQ ID NO: 760360 - DNA, 120 bp, Artificial Sequence
  ENSG00000214954_2 (sequence is synthesized)
tatcttacatctctgaagaatctccatttatctggaaataggatctgtagatttgcacctggagcctgtgatggcttacaaaatttaatcctgcttaatctgaacaacaatcatcttacg

SEQ ID NO: 760361 - DNA, 120 bp, Artificial Sequence
  ENSG00000214954_3 (sequence is synthesized)
cagcttcctcaagaagtcagcagattaaaaagtcttacttatatgagtataaattataaccaactagccagcattcctagagaactttgttttcttgagaatcttgttgaacttcaactt

SEQ ID NO: 760362 - DNA, 120 bp, Artificial Sequence
  ENSG00000214954_4 (sequence is synthesized)
ggagttttgccggaggaactttgtgatcttaaaaaactaagaatcctagacatagctggaaatattattcagatatttccatcaggatttcaggatctgaagctgagggaattctactgt

SEQ ID NO: 760363 - DNA, 120 bp, Artificial Sequence
  ENSG00000214954_5 (sequence is synthesized)
gagggaaacccactgttcctgcagcagccagtgatttctacacagcaggagaacgtctggagtctacaggaaataacatcaagatttgtaatgaatcagctagcagaaaataaccctttc

SEQ ID NO: 760364 - DNA, 120 bp, Artificial Sequence
  ENSG00000214954_6 (sequence is synthesized)
ctaatggatgacatagaacggtacccacaagtcaggagcatgatctctcagggaaaaacatgtgcaatatgtggacagtactttataaccgtatggctggaatgtgttcgatttgttcct

SEQ ID NO: 760365 - DNA, 120 bp, Artificial Sequence
  ENSG00000214954_7 (sequence is synthesized)
ccaccaaaggactggaagataagcaagaatctgaagctggtgcctctccaagtattaatttgttcttacaaatgttttactcaacgtgaccctaacctctttggaattgctcaggtgtag

SEQ ID NO: 760366 - DNA, 60 bp, Artificial Sequence
  ENSG00000214954_8 (sequence is synthesized)
aaaaaaaaaaaaagccaggcgtggtggcacatacctactacttgggaagctgaagccagc

SEQ ID NO: 760367 - DNA, 120 bp, Artificial Sequence
  ENSG00000214954_9 (sequence is synthesized)
ctgggtgacagagtgagactgtctcaaaaggaaaaaaaaattcttctaattatggcttacaaaatttaatcctgcttaatctgaacaacaatcatcttacgcagcttcctcaagaagtca

SEQ ID NO: 760368 - DNA, 81 bp, Artificial Sequence
  ENSG00000214954_10 (sequence is synthesized)
ttacaaaatttaatcctgcttaatctgaacaacaatcatcttacgcagcttcctcaagaagtcagcagagtctggccctac

SEQ ID NO: 760369 - DNA, 120 bp, Artificial Sequence
  ENSG00000214954_11 (sequence is synthesized)
cagcctcccgagtagctggtattacaggagtaaaacagaaatttatttctcatagttctggaagttgggaagtgaagaccaaggtgctggcagatgtgatgtctgattaaaaagtcttac

SEQ ID NO: 760370 - DNA, 120 bp, Artificial Sequence
  ENSG00000214954_12 (sequence is synthesized)
caacctaatacaagcaacaacagccagaatttatttggtactgagtgtgcatctggtgctctgctaaatatgtcacctggaatacctcaattaatgtccaaaataaccccatgacaccag

SEQ ID NO: 760371 - DNA, 120 bp, Artificial Sequence
  ENSG00000214954_13 (sequence is synthesized)
ggaagaaaaataattccattataacgttcccaatctaagcactacaatctgccttcagcttgcttagattctaggtgtgctttttttggcttaaaaaagtacaaaaaaaaattgaaaaat

SEQ ID NO: 760372 - DNA, 120 bp, Artificial Sequence
  ENSG00000214954_14 (sequence is synthesized)
tcagatttaatttttggacaggaacatttcataggtggtgctgctgtgtactttttaattcattacttcataaggcttataatgtgattgtctcaattttattgatgctaaaatgattag

SEQ ID NO: 760373 - DNA, 120 bp, Artificial Sequence
  ENSG00000214954_15 (sequence is synthesized)
tgggttattaacctgatcacttgattataaagttcctcatcaacctttcatctaatactttcagtctccaattatgatttttgcatagctccattattttattagaatttgcaaaaattg

SEQ ID NO: 760374 - DNA, 120 bp, Artificial Sequence
  ENSG00000214954_16 (sequence is synthesized)
ttaaaaaactaagaatcctagacatagctggaaatattattcagatatttccatcaggaaaatggccagatatggtggctcacggctgcaatcccagcatttcgggaggctgtggcggga

SEQ ID NO: 760375 - DNA, 120 bp, Artificial Sequence
  ENSG00000214954_17 (sequence is synthesized)
atcagcctggacaacatggtgaaacccctatctctacaaaacaaacaaaccaccaaaaaaattagctgggtttagtggtacaccctgtggtcccagttacttgaggtgaaagtatcactc

SEQ ID NO: 760376 - DNA, 120 bp, Artificial Sequence
  ENSG00000214954_18 (sequence is synthesized)
gctgggtttagtggtacaccctgtggtcccagttacttgaggtgaaagtatcactcaagcctgggaggtagaggttgcagtaagctgagatcatactccagcctgggcaacacagtgaga

SEQ ID NO: 760377 - DNA, 120 bp, Artificial Sequence
  ENSG00000214954_19 (sequence is synthesized)
tcttttatgaacatgtagtcagatctgctacagagagactttagtttctttccttacctcttttttcctttcttttattttaacttaaaaaaataaaacttaaaaattttgtaagttgta

SEQ ID NO: 760378 - DNA, 120 bp, Artificial Sequence
  ENSG00000214954_20 (sequence is synthesized)
ctctcatatttaataatatgagactgaaatgaaaaagaattttgcatgtttaatctttttttgttggagatatttacatactactcttgaaatataggaggagacaacacttttaaaaaa

SEQ ID NO: 760379 - DNA, 120 bp, Artificial Sequence
  ENSG00000214954_21 (sequence is synthesized)
attcttgaagaagcttcagaagcttttgctagccagaaacaacattggagttttgccggaggtaagcaaaacatggaaccacagtagtttgctgttggagaagaactcaacatgatggga

SEQ ID NO: 760380 - DNA, 120 bp, Artificial Sequence
  ENSG00000214960_0 (sequence is synthesized)
agatcggcagcctcagctgctgccgtagctgtcgggatcgtcccctgcggggcagcaacagcggggctccgacggctgaggggggcgccttctgcttgcgcgctctgcgtccctctccgt

SEQ ID NO: 760381 - DNA, 120 bp, Artificial Sequence
  ENSG00000214960_1 (sequence is synthesized)
gtccctctccgtggtctgcccttcgccccgcgaccccggccgagggtgggagcagcgcggggtcgcatcggcccgaggctagcggggctcgccgttccgcccgcagccatggaggccggg

SEQ ID NO: 760382 - DNA, 120 bp, Artificial Sequence
  ENSG00000214960_2 (sequence is synthesized)
ggccggcggagccgggtccttgcctgagtggtcagcgcggcgcggaccacacggcttccgcctccctgcagagcgtggccgggaccgagcccgggcgccacccgcaagccgtggcagctg

SEQ ID NO: 760383 - DNA, 120 bp, Artificial Sequence
  ENSG00000214960_3 (sequence is synthesized)
gctgtgttgcctgccggggggtgcggggagaggatgggggtccccaccccgaagcaattctgccccatcctggagaggccgctcatcagctacaccctacaggccctggagagagtatgt

SEQ ID NO: 760384 - DNA, 120 bp, Artificial Sequence
  ENSG00000214960_4 (sequence is synthesized)
tggataaaggacattgttgtggcagtaactggagagaacatggaagtaatgaaaagtattattcagaagtatcagcataaacgcatctcactggtcgaagctggagtgacccgccacagg

SEQ ID NO: 760385 - DNA, 120 bp, Artificial Sequence
  ENSG00000214960_5 (sequence is synthesized)
tcaattttcaatggactaaaagcactggcagaagatcagatcaactctaaactctctaagccagaagtagtgattatccatgatgctgtgagaccatttgttgaggaaggtgtccttctt

SEQ ID NO: 760386 - DNA, 120 bp, Artificial Sequence
  ENSG00000214960_6 (sequence is synthesized)
aaagttgtcacagctgctaaggaacacggggcagcaggagccattcgacctcttgtatctactgtcgtcagtccatctgctgatggttgcttagactactcgctagaacgtgccagacac

SEQ ID NO: 760387 - DNA, 120 bp, Artificial Sequence
  ENSG00000214960_7 (sequence is synthesized)
agagcaagtgaaatgccccaagcttttctatttgatgtgatttatgaagcatatcagcagtgtagtgactatgacttggaatttggaactgagtgtttgcaattggccctaaaatactgt

SEQ ID NO: 760388 - DNA, 120 bp, Artificial Sequence
  ENSG00000214960_8 (sequence is synthesized)
tgcactaaagccaaacttgtagaaggatcacctgacctctggaaggtgacctacaaacgagatctctatgcggctgaatcgattattaaggagagaatttcccaagagatttgtgtagtt

SEQ ID NO: 760389 - DNA, 120 bp, Artificial Sequence
  ENSG00000214960_9 (sequence is synthesized)
atggatacagaagaagataacaaacatgtaggtcatcttcttgaagaagtgctgaaaagtgaattaaatcatgtaaaagtcacatctgaggctctgggtcatgctggcagacatcttcag

SEQ ID NO: 760390 - DNA, 120 bp, Artificial Sequence
  ENSG00000214960_10 (sequence is synthesized)
caaatcatcttagatcaatgctacaattttgtttgtgtgaatgttacaacctctgattttcaagaaacccagaagttactgagcatgcttgaagagagtagtctttgcattttatatcct

SEQ ID NO: 760391 - DNA, 120 bp, Artificial Sequence
  ENSG00000214960_11 (sequence is synthesized)
gttgttgttgtttcagttcattttcttgattttaaattagtacctcccagtcagaaaatggaaaacctaatgcagattagagaatttgcaaaggaagtaaaagaaagaaatattttgtta

SEQ ID NO: 760392 - DNA, 120 bp, Artificial Sequence
  ENSG00000214960_12 (sequence is synthesized)
tatgggcttctcatatcttacccacaggatgatcagaagctacaggagagtttaaggcaaggtgctatcattattgcttcattaatcaaggaaagaaattctggactcattggtcagctt

SEQ ID NO: 760393 - DNA, 120 bp, Artificial Sequence
  ENSG00000214960_13 (sequence is synthesized)
ctgatagcatgaagaacacaaaaaattacctattttctaaaacatctatttgcgtatcttaattgtgctttgtgcccccgctgctgtgtgtggtagaatgtttcagttgtcttttatatc

SEQ ID NO: 760394 - DNA, 120 bp, Artificial Sequence
  ENSG00000214960_14 (sequence is synthesized)
ttctctataatttgtaggatgtgatgcttagattataaagcagattaatgtttatatctgtgaaataaagaatacttttgtgtatgacaaatattaattgcctgaaccagaaaaaaatag

SEQ ID NO: 760395 - DNA, 120 bp, Artificial Sequence
  ENSG00000214960_15 (sequence is synthesized)
tagataagtggaaaataatagccttcaaatgaatctttccacagagacatgaacggtcaaatagaaataatgatggggtgagctattctttcaaggaatgagaatttagaaaacttcagt

SEQ ID NO: 760396 - DNA, 120 bp, Artificial Sequence
  ENSG00000214960_16 (sequence is synthesized)
tattatcctaactgttaattaataatttacactattatgaagctaatggataaacttcagaattattctcacttctataattgtcctgtcaccaggtgatattttgtctttttgtcttgt

SEQ ID NO: 760397 - DNA, 120 bp, Artificial Sequence
  ENSG00000214960_17 (sequence is synthesized)
gttaaaaatgtctacactttaataaaaaagggtgagtgggataccagggaacggaactgtttgtttctagcattttccccatttgccacatattactcaagatccctaaaacagatgtca

SEQ ID NO: 760398 - DNA, 120 bp, Artificial Sequence
  ENSG00000214960_18 (sequence is synthesized)
tttccttcttttctgtttttaaattgtatgttatttttggtttatgaactataattatgacttacattattttaaagggtctctagtttttctgaatgaacttaaaagtgtctggaaagt

SEQ ID NO: 760399 - DNA, 120 bp, Artificial Sequence
  ENSG00000214960_19 (sequence is synthesized)
ttcgtaggtgattctggtcaatccctggttagttatcttctataaggtagagaatctattgtacatcatagagttaaattagttatttcaattcagatactgctaccttttaaaatcaag

SEQ ID NO: 760400 - DNA, 120 bp, Artificial Sequence
  ENSG00000214960_20 (sequence is synthesized)
ttcttatttccagttttcattggtatatacatctgaaatattaatattttcccttgcatgttataattatgggtgtcctttaattcattagaggtgacttttaatctatacatacactta

SEQ ID NO: 760401 - DNA, 87 bp, Artificial Sequence
  ENSG00000214960_21 (sequence is synthesized)
taattcattagaggtgacttttaatctatacatacacttactctatttattttattttttattgttttgaaatgcagtcgccctctg

SEQ ID NO: 760402 - DNA, 120 bp, Artificial Sequence
  ENSG00000214960_22 (sequence is synthesized)
ttgaaacagattagggcttaggctgcacgtggaaactataaaagttgcatgaagtgttttcagttaaagatacactatacaatatctaccttgtggaatttttatttaacatgttgggtg

SEQ ID NO: 760403 - DNA, 120 bp, Artificial Sequence
  ENSG00000214960_23 (sequence is synthesized)
attttccctctagtgttcaagtatatatatagtaggagagtttatattttacattctcctaattgaaatgtgttatttgaatgtaggcttgtatctaaattcctgggcctgccctttttc

SEQ ID NO: 760404 - DNA, 120 bp, Artificial Sequence
  ENSG00000214960_24 (sequence is synthesized)
tctctctaggaatattaagaaatttaaaatccattaatttaagtttttgaggatggaaataggtaagcaatgtgtggattgtggttaggaatgtctgtgcctttgttcagatgtcggctg

SEQ ID NO: 760405 - DNA, 120 bp, Artificial Sequence
  ENSG00000214960_25 (sequence is synthesized)
tgtgtgtgacgaaaaccacagctgccaagtccccaacatgcacctgttgaagtcatcaggtgaaaatgtttaagactttgaaagtgctcataaaggaagaaggggaaatgttatcaaggc

SEQ ID NO: 760406 - DNA, 120 bp, Artificial Sequence
  ENSG00000214960_26 (sequence is synthesized)
tttaaagagagggtaagtgccttgaagaagaatgcagtaaactgggcatatttgtggcacagcaaaatcaccctgatcgctggagtgctggctgagttaacatagacttcagcttaagga

SEQ ID NO: 760407 - DNA, 120 bp, Artificial Sequence
  ENSG00000214960_27 (sequence is synthesized)
atcctacagcagacaagaatttatctcagagtacttactatgacattaccctaggcaactggtaacatttagtataatttagttaataaaatattaagttgtgcctggaaaaaatagcat

SEQ ID NO: 760408 - DNA, 120 bp, Artificial Sequence
  ENSG00000214960_28 (sequence is synthesized)
ttggtccttcatagcaggcaaagcaattcacagcattgggaaaaaaaaatacatacatacatatacatgtatgtatacccatatatatgtatatacatgcatgtatacccatatatatgt

SEQ ID NO: 760409 - DNA, 120 bp, Artificial Sequence
  ENSG00000214960_29 (sequence is synthesized)
acttacatgtatatacatatatatgtatgtacgtacatatatacccatatctatgtatgtacgtacatatatacccgtatatatgtacgtacatatatacacatatatgtatgcacgtac

SEQ ID NO: 760410 - DNA, 120 bp, Artificial Sequence
  ENSG00000214960_30 (sequence is synthesized)
gcacgtacatatatacacatatatgtatgtacgtacatatatacacattatgtacatacatatatacgtatatatgtacatgcatgtatgtatgtatatacgtacgcatacacacatata

SEQ ID NO: 760411 - DNA, 120 bp, Artificial Sequence
  ENSG00000214960_31 (sequence is synthesized)
tatacgtacgcatacacacatatatgtatatacgtacgcatacacacatatatgtatatacgtacgcatacacacatatatgtatatacgtacgcatacacacatatatgtatatacgta

SEQ ID NO: 760412 - DNA, 120 bp, Artificial Sequence
  ENSG00000214960_32 (sequence is synthesized)
tatacacacatatatgtatatacgtacgtatatatgtatttttatgttttatgtatatgtattttatatgtatatatatctgcacatccttcactattttcatgaggaaattggagctca

SEQ ID NO: 760413 - DNA, 120 bp, Artificial Sequence
  ENSG00000214960_33 (sequence is synthesized)
ctcagggatcttagttaccttgccaaaatcatgtgactgaatagtaacaaaagtttgggcttaaaataaggaagactgataataagtgttaagcttatattcctgtctaacaatgacccc

SEQ ID NO: 760414 - DNA, 120 bp, Artificial Sequence
  ENSG00000214960_34 (sequence is synthesized)
tggcaaagacatctgatatataagccacgtctgatatataagacgtgatatataagccagaggcactgaatgaacattggcgaaatggacaagaagggtgggacacttatgtccagggac

SEQ ID NO: 760415 - DNA, 120 bp, Artificial Sequence
  ENSG00000214960_35 (sequence is synthesized)
taggtgaaagtcctggagcttttggctttccagccaccttcccagcataaagaaattgtagctaaagttaagggaatgaatagaagtattggccaaaagagaaattattttgttgtttaa

SEQ ID NO: 760416 - DNA, 80 bp, Artificial Sequence
  ENSG00000214960_36 (sequence is synthesized)
cagaggtaactttacagttacattttcatcactgcttctgtaaatttactttagtaaaagctgtctattctcactttatt

SEQ ID NO: 760417 - DNA, 120 bp, Artificial Sequence
  ENSG00000214960_37 (sequence is synthesized)
taaatttactttagtaaaagctgtctattctcactttattttccaaaatctcttaaaaaataatagtgattatgcttcaaggtttctgaaaatgcttccacttgtgggaaattttgttgc

SEQ ID NO: 760418 - DNA, 120 bp, Artificial Sequence
  ENSG00000214960_38 (sequence is synthesized)
aaaatggttttctttctaaacttacgctagttagttaaatgcaaattaaagttagtcgtcttaggagttcatcatagcgtgagtaatggtttgattaatgacattttggtagaggtccta

SEQ ID NO: 760419 - DNA, 120 bp, Artificial Sequence
  ENSG00000214960_39 (sequence is synthesized)
ttttttttcataaaagtgctcaatttgagatgacttgttgcaagtatactcatttacaggtaagagtcagctccctatattctctcagagtcattgttatggttattattgtaagtattt

SEQ ID NO: 760420 - DNA, 120 bp, Artificial Sequence
  ENSG00000214960_40 (sequence is synthesized)
tacattaatttaacagaaattttttcttccctaacttataactcaactttatgtaaatacagtgatcatcttataaaaatcaaattacagaatgtcttaaaatctgtaaatttgactttg

SEQ ID NO: 760421 - DNA, 120 bp, Artificial Sequence
  ENSG00000214960_41 (sequence is synthesized)
ttttaatgttgaaactacaaattcacagaggcataaatctaacatcttaattaaaatgtcaaccatatgcaagaagaaagatagaagttatttagaaagtttaatttgaaaacagaataa

SEQ ID NO: 760422 - DNA, 120 bp, Artificial Sequence
  ENSG00000214960_42 (sequence is synthesized)
tgaagcattttaattgatataggatttgttagtatggcttaaaatcagtggactagaagtagctgtgtaggtggtggttggcattatagttgcatttatatatgttcttattaatttcag

SEQ ID NO: 760423 - DNA, 120 bp, Artificial Sequence
  ENSG00000214960_43 (sequence is synthesized)
tcagtttcaaaattgtaagaagcatatgcatatttttaaggtgacattgaaaagtactataaagattctaaatatgttgtttttacaaaacaaaatgtaaataaattattgatttaaaat

SEQ ID NO: 760424 - DNA, 86 bp, Artificial Sequence
  ENSG00000214960_44 (sequence is synthesized)
tacagaagaagataacaaacatgtaggtcatcttcttgaagaagtgctgaaaagtgaattaaatatggagtctcactctgttgcca

SEQ ID NO: 760425 - DNA, 120 bp, Artificial Sequence
  ENSG00000214960_45 (sequence is synthesized)
gcctccaccatgcccattagctgtgtaattttatcatgatagcacagttggaaagagaacaggctctgttatcagactgcttgcactttggatgttagctctgtttcctaatttccttat

SEQ ID NO: 760426 - DNA, 120 bp, Artificial Sequence
  ENSG00000214960_46 (sequence is synthesized)
atctggcatgcagtacgttttcaatgcatttgaactataattaaactttcagtgataagttggcagagtggtgtgacagtattagatagtacagactgttagttcccatacttcagtgct

SEQ ID NO: 760427 - DNA, 120 bp, Artificial Sequence
  ENSG00000214960_47 (sequence is synthesized)
gtactggatacatgagttgttaaaattaacaaattaaccagtgtcttctacctcctcctttctaaagaatctaatttgaattagtatgctttaatttaaagtttatagctgaaagatgac

SEQ ID NO: 760428 - DNA, 120 bp, Artificial Sequence
  ENSG00000214960_48 (sequence is synthesized)
agtgaactttcttactgtatatattcttacattcatgtcattacctactatctcccttaaacaattgtttattcttagtcatataagtaaatatatatgtgatagccactacaatcctta

SEQ ID NO: 760429 - DNA, 120 bp, Artificial Sequence
  ENSG00000214960_49 (sequence is synthesized)
tgttgataccttaaaaatcattttggttttctggaactaatcctccaatagatgctctagtgagggctcatgggcacagtattcccaagttcttcgatgtgaataaaattattcttttgc

SEQ ID NO: 760430 - DNA, 82 bp, Artificial Sequence
  ENSG00000214967_0 (sequence is synthesized)
ctgactttggtggaagtccttggttacttatcattactgtgtttctgagaagttataaatttgccatctccctctgcacaag

SEQ ID NO: 760431 - DNA, 79 bp, Artificial Sequence
  ENSG00000214967_1 (sequence is synthesized)
atcttcccatctcaggaggtccaaccgccgtagacaggaaggaattaaaattgtcctggaagacatctttactttatgg

SEQ ID NO: 760432 - DNA, 120 bp, Artificial Sequence
  ENSG00000214967_2 (sequence is synthesized)
aggaattaaaattgtcctggaagacatctttactttatggagacaggtggaaaccaaagttcgagctaaaatccgtaagatgaaggtgacaacaaaagtcaaccgtcatgacaaaatcaa

SEQ ID NO: 760433 - DNA, 86 bp, Artificial Sequence
  ENSG00000214967_3 (sequence is synthesized)
atcaatggaaagaggaagaccgccaaagaacatctgaggaaactaagcatgaaagaacgtgagcacagagaagaggagaggcaggt

SEQ ID NO: 760434 - DNA, 88 bp, Artificial Sequence; identical to SEQ ID NO: 656961
  ENSG00000214967_4 (sequence is synthesized)

SEQ ID NO: 760435 - DNA, 120 bp, Artificial Sequence
  ENSG00000214978_0 (sequence is synthesized)
atggacagggccaagcagcagcaggcgctgctcctcctccctgtctgcctcgccctcaccttctccctcaccgccgtggtcagcagccactggtgtgaggggacccgacgggtggtgaag

SEQ ID NO: 760436 - DNA, 120 bp, Artificial Sequence
  ENSG00000214978_1 (sequence is synthesized)
ccactgtgccaggaccagccgggagggcagcactgcattcacttcaaacgggacaacagcagcaatggcaggatggacaacaatagccaggctgtcctgtacatttgggagctgggtgat

SEQ ID NO: 760437 - DNA, 120 bp, Artificial Sequence
  ENSG00000214978_2 (sequence is synthesized)
gacaagttcattcagcgggggttccatgtggggctctggcagtcctgcgaggagagcctcaacggtgaagatgaaaagtgtaggagtttccggagtgtagtgccagctgaagaacaaggt

SEQ ID NO: 760438 - DNA, 120 bp, Artificial Sequence
  ENSG00000214978_3 (sequence is synthesized)
ctgatactgacaagcgccatcctcctgggctccagagtgagttgtcgcagccctgggttccactggctcagggtggatgccttggtagccatcttcatggtgctggcagggcttctaggc

SEQ ID NO: 760439 - DNA, 120 bp, Artificial Sequence
  ENSG00000214978_4 (sequence is synthesized)
atggtggcccacatgatgtacacaaccatttttcaaatcactgtgaaccttggaccagaagattggaagcctcagacctgggactatggctggtcatattgccttgcctggggttctttc

SEQ ID NO: 760440 - DNA, 120 bp, Artificial Sequence
  ENSG00000214978_5 (sequence is synthesized)
gccctctgcctggctgtgtcggtctcggccatgagcaggttcacggcagcccgcctggaattcaccgagaagcagcaggcacagaacggcagtcggcactctcaacacagcttcctggaa

SEQ ID NO: 760441 - DNA, 120 bp, Artificial Sequence
  ENSG00000214978_6 (sequence is synthesized)
cccgaggcttcggagagcatttggaaaacaggagctgctccttgccctgctgaacaagccttcaggaatgtttctggacacctcccaccaggcgccccaggcaaggtgtccatatgctag

SEQ ID NO: 760442 - DNA, 120 bp, Artificial Sequence
  ENSG00000215009_0 (sequence is synthesized)
ctgtagtacttctgtgtccatagcagtagacaaagtcctttgggaaccatgaagatttttttccgctaccagacatttagattcatctggctcaccaagccacctggccggcgcttacac

SEQ ID NO: 760443 - DNA, 120 bp, Artificial Sequence
  ENSG00000215009_1 (sequence is synthesized)
aaagatcaccagctttggacgcctctgactcttgctgactttgaagccataaatcgctgtaacaggccattgcctaaaaactttaactttgctgcagatgtgctggaccagtggtcccaa

SEQ ID NO: 760444 - DNA, 120 bp, Artificial Sequence
  ENSG00000215009_2 (sequence is synthesized)
aaggagaagacaggggagagaccagctaacccagccctgtggtgggtgaatggcaaaggggatgaggtaaaatggagcttcagagaactgggctccttgtcccgaaaagctgccaacgtg

SEQ ID NO: 760445 - DNA, 120 bp, Artificial Sequence
  ENSG00000215009_3 (sequence is synthesized)
ctcaccaagccctgtggcctgcagagaggagaccgtttggccgtgattctgcccagaatccctgagtggtggctggtcaatgtagcttgcatacgaacagggatcatcttcatgccggga

SEQ ID NO: 760446 - DNA, 120 bp, Artificial Sequence
  ENSG00000215009_4 (sequence is synthesized)
acaatccagctgacagcaaaagacatcctctaccggctgcgagcatccaaggccaagtgcattgtggccagtgaggaggtggccccagcggtggagtccattgtattggagtgtcctgac

SEQ ID NO: 760447 - DNA, 120 bp, Artificial Sequence
  ENSG00000215009_5 (sequence is synthesized)
cttaagacaaaactcctggtgtctccacaaagctggaatgggtggctcagcttccaggagttatttcaattcgcctctgaagagcacagctgtgtggaaacaggaagtcaagaaccaatg

SEQ ID NO: 760448 - DNA, 120 bp, Artificial Sequence
  ENSG00000215009_6 (sequence is synthesized)
accatttatttcaccagtgggaccacaggctttcctaaaatggcccagcactctcagagcagcctcggcattgggttcaccctctgcggaaggtattggctggacttgaagtcctcagat

SEQ ID NO: 760449 - DNA, 120 bp, Artificial Sequence
  ENSG00000215009_7 (sequence is synthesized)
atcatatggaatatgtctgacacgggctgggtcaaggccgccattggcagtgtgttttcttcctggctgtgtggagcctgtgtttttgtgcatcgaatggcacagtttgacactgacacc

SEQ ID NO: 760450 - DNA, 120 bp, Artificial Sequence
  ENSG00000215009_8 (sequence is synthesized)
agtctgcggcactgcttgaccggaggggagccactcaacccagaagtgctggagcagtggagggtgcaaactgggctggagctatatgagggctatggacagacggaagtgggaatgatt

SEQ ID NO: 760451 - DNA, 120 bp, Artificial Sequence
  ENSG00000215009_9 (sequence is synthesized)
tgtgccaatcagaaaggccaagaaattaaaccaggttcaatggggaaaggaatgctgccctatgatgtccagattatagatgaaaatggcaatgttctaccacctggcaaagaaggggaa

SEQ ID NO: 760452 - DNA, 120 bp, Artificial Sequence
  ENSG00000215009_10 (sequence is synthesized)
attgccctcagactcaaacctacacggcccttctgtttcttctctaaatatgtggacaatccacagaaaactgctgccacgataagaggagatttttatgtcactggagacagaggagtg

SEQ ID NO: 760453 - DNA, 120 bp, Artificial Sequence
  ENSG00000215009_11 (sequence is synthesized)
atggacagtgatgggtatttctggtttgtcggcagagctgatgatgtcattatatcctctgggtaccgtattgggccatttgaagtggagagtgcactcattgagcatccagcagttgtt

SEQ ID NO: 760454 - DNA, 120 bp, Artificial Sequence
  ENSG00000215009_12 (sequence is synthesized)
gaatcggctgttgtcagtagtccagatcaaatccgcggagaggtggtgaaagcttttgttgtcttagctgcaccctttaagtcctacaacccagagaaattaactcttgaacttcaggat

SEQ ID NO: 760455 - DNA, 120 bp, Artificial Sequence
  ENSG00000215009_13 (sequence is synthesized)
catgtgaaaaaatcaactgcaccttacaaatatccaagaaaggtggaatttgttcaagaactcccaaagacaatcactgggaaaatcaaacgcaacgttttaagagaccaagaatggaga

SEQ ID NO: 760456 - DNA, 120 bp, Artificial Sequence
  ENSG00000215009_14 (sequence is synthesized)
ggaagatagtttgataacaaagctgaagggttaagcagtaatatggttgctttcttttagtatttgttccgataattcagcgactactctcttaaaatgtttaagatctttcctgcttga

SEQ ID NO: 760457 - DNA, 120 bp, Artificial Sequence
  ENSG00000215009_15 (sequence is synthesized)
aaactcaactgttgattttttggtttttacttagctaaaaagtttaaaagtaaataaaagcctcaaaaacgtatggatgaaaattgttataatgaccaaactgacaaaggtaatgatgat

SEQ ID NO: 760458 - DNA, 120 bp, Artificial Sequence
  ENSG00000215009_16 (sequence is synthesized)
gatttgtagtgtttaaaatagcaggaataaaatgattgcttagaacaagaaagtgcacattgaatctgtatttcatttaccttgtgcctgattgattcaaaataaacatatatcctaaga

SEQ ID NO: 760459 - DNA, 120 bp, Artificial Sequence
  ENSG00000215009_17 (sequence is synthesized)
gggcttttggaaatcatttctttatacaaagcaaagtctcaagggcctcagcttttgaaacgtatttgacagaatggagggggaacaactgcaacactctgaggcaggaaatccagactt

SEQ ID NO: 760460 - DNA, 120 bp, Artificial Sequence
  ENSG00000215009_18 (sequence is synthesized)
ctgcttcaaatagctcaggatttgctagtgttgctaaatctgtagctacttaagaaactggttctaaataacagattaggagtctgaagtctaaacaaatacttcatttctaattcaatg

SEQ ID NO: 760461 - DNA, 120 bp, Artificial Sequence
  ENSG00000215012_0 (sequence is synthesized)
ctctggacgctgcgcggcgctcctaggagcaggcgttcccgactccggcaagagggtcagtgtggaggcgggagcccgggcggccggcttgaactccgtgcacgcgggcctggagctgcg

SEQ ID NO: 760462 - DNA, 120 bp, Artificial Sequence
  ENSG00000215012_1 (sequence is synthesized)
cccctgcgtcttttcccgacttctgatccgcagaggggcactcggagccccagcctgggtcgcagtgccttcggtctgcgggcctcagtttctcggtggcgcctggactctcgccctcag

SEQ ID NO: 760463 - DNA, 120 bp, Artificial Sequence
  ENSG00000215012_2 (sequence is synthesized)
agggaggcccgtcccacggtctgtggctacggatcccaggaccctcttcgcgggcgattcgcgtagcctcagattgcctcggatgatggcctgcgactgacagtctctcagctcttctca

SEQ ID NO: 760464 - DNA, 120 bp, Artificial Sequence
  ENSG00000215012_3 (sequence is synthesized)
gctctcctgaggctgcagctgtcagctccctgatcctcagcacttgcctggaccagtgcgggtctgccacgccctgttcagccatccctgtcctgttgtgtcgtgcaagccacatctgtc

SEQ ID NO: 760465 - DNA, 120 bp, Artificial Sequence
  ENSG00000215012_4 (sequence is synthesized)
cacacccccaccacccaccagtgctggctctcctctcttctcccctgtgctcccagcatgcctcgtggccggtgccgtcagcagggccctcgcattcccatctgggcagccgccaattat

SEQ ID NO: 760466 - DNA, 120 bp, Artificial Sequence
  ENSG00000215012_5 (sequence is synthesized)
gccaacgcacatccatggcagcagatggacaaggcgtctcctggggtggcatacaccccccttgtggatccctggattgagcggccctgctgtggggacaccgtgtgtgtgcgaacgacc

SEQ ID NO: 760467 - DNA, 120 bp, Artificial Sequence
  ENSG00000215012_6 (sequence is synthesized)
atggagcagaagagcacagctagtggcacttgtggcggtaaacctgcagaaaggggtcccctagctgggcacatgcccagctcccgaccccacagggtggacttctgctgggtaccaggc

SEQ ID NO: 760468 - DNA, 120 bp, Artificial Sequence
  ENSG00000215012_7 (sequence is synthesized)
tcagacccaggcacctttgatggctccccgtggctactggaccgcttcttggcccagctgggcgattacatgtccttccactttgagcactatcaggacaacatcagccgtgtctgcgag

SEQ ID NO: 760469 - DNA, 120 bp, Artificial Sequence
  ENSG00000215012_8 (sequence is synthesized)
atcctcaggcgcctaacaggccgagcccaggcctgggcagccccctaccttgatggggacctgcccctgcctgacgattacgagctcttctgccaggatctcaaggaagttgttcaagac

SEQ ID NO: 760470 - DNA, 120 bp, Artificial Sequence
  ENSG00000215012_9 (sequence is synthesized)
ccgaacagttttgctgagtaccatgctgtggttacctgtcccctgcccctggcctccagccagctgccagtggcccctcagctgcctgtggtgaggcaatacttagctaggttcttagag

SEQ ID NO: 760471 - DNA, 120 bp, Artificial Sequence
  ENSG00000215012_10 (sequence is synthesized)
ggcctggcactcgacatgggtactgcccccaggtctttaccagccgccatggccacccctgctgtgtctgggtccaactctgtatctagaagtgctctgttcgagcagcagctgaccaag

SEQ ID NO: 760472 - DNA, 120 bp, Artificial Sequence
  ENSG00000215012_11 (sequence is synthesized)
gagagcacccctgggcccaaggagcccccagtcctgcccagttctacatgtagctccaagcctggtcctgtggaaccagcctcttcccagccagaggaggcagcccccacacctgtccct

SEQ ID NO: 760473 - DNA, 120 bp, Artificial Sequence
  ENSG00000215012_12 (sequence is synthesized)
agactgtcggagtcagctaatcctcctgcccagagaccagacccagctcatccaggaggtccaaaaccccagaaaacagaggaggaggttttggagacagagggagaccaggaggtgtcc

SEQ ID NO: 760474 - DNA, 120 bp, Artificial Sequence
  ENSG00000215012_13 (sequence is synthesized)
ttaggtaccccacaggaggtggtggaggccccggagaccccaggagagccaccactttctcctgggttctgaacacagcccaggtgggaacaatgctgcccctcatgatgaagtggcctg

SEQ ID NO: 760475 - DNA, 120 bp, Artificial Sequence
  ENSG00000215012_14 (sequence is synthesized)
tgtggcttgagcgccccatagtccccagtcagagcagagtggtgtccccagatgacttcagaccccatagctgggcaagatgcgcttgttttggactctgcgctgagcagaaccagctcc

SEQ ID NO: 760476 - DNA, 120 bp, Artificial Sequence
  ENSG00000215012_15 (sequence is synthesized)
cccaactccagcagagcttgacctccgccctgtgccctttccctgctgctggctctctgctgcatccctgcccgtcttctgggagtgccgtctcacccaggcctgctcccacgagggggt

SEQ ID NO: 760477 - DNA, 120 bp, Artificial Sequence
  ENSG00000215012_16 (sequence is synthesized)
cgttttgtagatcaactctcagcagatagttgcatcatctttgtcacctccacccccataaaacaccccccttggtgtcttccacactggctgggactgaactgggtctgccacgtctgc

SEQ ID NO: 760478 - DNA, 120 bp, Artificial Sequence
  ENSG00000215012_17 (sequence is synthesized)
cctgttgggacctcgttcctgtatggggtttctgtgtctgtccccctagccccaccctctctgctccctgtgacttctgtcccagctggaatgtgaggaaggctgcctggaggaagtggc

SEQ ID NO: 760479 - DNA, 120 bp, Artificial Sequence
  ENSG00000215012_18 (sequence is synthesized)
cactttgattctgggggatgagtgggatagcatcttggcaaagaatgatgtttcctgtgggattaccagcagttctgggcagctggaaggtttggatgcaggaaggtgggatgcaagccc

SEQ ID NO: 760480 - DNA, 120 bp, Artificial Sequence
  ENSG00000215012_19 (sequence is synthesized)
cttgccaggctcagctgcaggcattcgccctttgtgtgttaacactgtagctctaatcgtgcctggtgttctgaagcaggctcctcttccctgctgctgtgctgccatcccctgctcact

SEQ ID NO: 760481 - DNA, 120 bp, Artificial Sequence
  ENSG00000215012_20 (sequence is synthesized)
ccgcactcgcatgcattgcggattcagcacttaagccctagtgtgtaaatgacttggatctccctcctggcagactgtgaccctcagcacaggggctctgtcttagtcagctctgtggcc

SEQ ID NO: 760482 - DNA, 120 bp, Artificial Sequence
  ENSG00000215012_21 (sequence is synthesized)
tggtacacaattggtgctcattaaacacgtgttggattactggctgaggtggtgcagtggctgcctaccagcaagtctttgtttcccattctgtcaggagcagaggcctggccatgagca

SEQ ID NO: 760483 - DNA, 120 bp, Artificial Sequence
  ENSG00000215012_22 (sequence is synthesized)
ttccaggtcagcattgcagctgtggtttctggcaggggctttgagggtccaagggtctgatcaaagaagctgggtggggctgagtagggggtgggtggctctgcaggtagagaactgact

SEQ ID NO: 760484 - DNA, 120 bp, Artificial Sequence
  ENSG00000215012_23 (sequence is synthesized)
tccgagagctgtaggtgaagtgaggaccaggcagcagtccagagctgtgaggccccaggcccagaggaatggaatgaagaaagacctgttccacacaaggaggggttttctagtggaagc

SEQ ID NO: 760485 - DNA, 120 bp, Artificial Sequence
  ENSG00000215012_24 (sequence is synthesized)
tgagcttggaagctcctggagccaagtttaccacaggataggcaggtacagccgcccagtgtgtgcagtgtgtgcccactctggtgcttggacaagaagttcaagtccctttcaggttta

SEQ ID NO: 760486 - DNA, 120 bp, Artificial Sequence
  ENSG00000215012_25 (sequence is synthesized)
caattgtgaaaacaacaaaacaacaccttcctggaaagtaggaagaaaaagcagaaatgtgaattggaaatacagccaactattttaggaaaaactaattagcaagcatctgattaaact

SEQ ID NO: 760487 - DNA, 60 bp, Artificial Sequence
  ENSG00000215012_26 (sequence is synthesized)
tattttaggaaaaactaattagcaagcatctgattaaacttattcagaaactggccggga

SEQ ID NO: 760488 - DNA, 120 bp, Artificial Sequence
  ENSG00000215012_27 (sequence is synthesized)
aaaaaaaaacaacaaaaaacaaaaaccttatttagaaaaatataaattgttgggattattttatggtaactatcactagaaaaggctctgggttcagatggttttatgtgtgagttattt

SEQ ID NO: 760489 - DNA, 120 bp, Artificial Sequence
  ENSG00000215012_28 (sequence is synthesized)
atttcagggcacagataccttgtaggtaaaacaactggaaaccttggaaataggtgggaagctatttttagaaagcaggtatagccctggtagcaaagcaagtgagctggcagaagaaac

SEQ ID NO: 760490 - DNA, 120 bp, Artificial Sequence
  ENSG00000215012_29 (sequence is synthesized)
ccattttcagtcttgattctggtcagatgtgagaagtccctggatgtcctggcccagccccatgcttctgtgccaggtcacagctgccctccgtccgatgactcaggccccatcccccct

SEQ ID NO: 760491 - DNA, 120 bp, Artificial Sequence
  ENSG00000215012_30 (sequence is synthesized)
tttgtgggttgggtcagactgctccctgatgcctacctccagtgcactgtggcctggctcacctgtgggtctggcagtagaacccagagttgctctctaggatggacagcctagtcaccc

SEQ ID NO: 760492 - DNA, 120 bp, Artificial Sequence
  ENSG00000215012_31 (sequence is synthesized)
agctgacctttaccctgtcccacaggcttctggacaggccaccttccccatctccctttagtggacctgaagtggatactccagcctgggattgctgccttctcttttgaaccctgtcct

SEQ ID NO: 760493 - DNA, 120 bp, Artificial Sequence
  ENSG00000215012_32 (sequence is synthesized)
attggggctttggggcttttgtgcccttgggacccaggcagctcctgggggtgtgtgagttatggtctgccgtgtgtctgagggccagtcatgcagcatccacctaggcaggcttgagag

SEQ ID NO: 760494 - DNA, 120 bp, Artificial Sequence
  ENSG00000215012_33 (sequence is synthesized)
tccttgggagagtccaggtgacctggtttttaattaaaacgcgtcctgtttattgtggttgggctctgcccagaaaggaaggtagggccttgaagtggtgatgtccaggtttcctgcaca

SEQ ID NO: 760495 - DNA, 120 bp, Artificial Sequence
  ENSG00000215012_34 (sequence is synthesized)
ggtagggtggaggcaacgatggactctggcatggccttccagacaggcagtgcacacagctcctttcagagtggctttgttgccagctgctgcagcacctgctttcagacagatgatgac

SEQ ID NO: 760496 - DNA, 120 bp, Artificial Sequence
  ENSG00000215012_35 (sequence is synthesized)
caagctgctttcctgctgggggaaggaggcattccccctgggttgtttttctcttctggcccccacacactggcagacccgaaggcagggtgctcaggagctgcagagcctggcagggtt

SEQ ID NO: 760497 - DNA, 120 bp, Artificial Sequence
  ENSG00000215012_36 (sequence is synthesized)
tgctggacatgctcagggacgggccatggtgctggctctgctttctaatcatggtgtcagtccttcacttcccttggaaatacccagagattttatttcctgaagataggacatgatggg

SEQ ID NO: 760498 - DNA, 120 bp, Artificial Sequence
  ENSG00000215012_37 (sequence is synthesized)
tgctgtgagatggtatttaaagtacctgtctgcaaggaaaactttaaaataggaagtactaaggataaggtcctatgggatattggaatattttataaagccacaatagttaaagcactt

SEQ ID NO: 760499 - DNA, 120 bp, Artificial Sequence
  ENSG00000215012_38 (sequence is synthesized)
agatgtggacagatgagcagagaatagaggactttgaaacgggccaaataaatatggaaatttagtacaggctagaggtgtttccaattaacgagtaaaatggattattcagtaaaagca

SEQ ID NO: 760500 - DNA, 120 bp, Artificial Sequence
  ENSG00000215012_39 (sequence is synthesized)
gttggccctctggaaaatagtaaagccatgtatgtgcctcactctttatgccagtacatattccagattaaagatttcaatgttacaattatgaaagtactagaggaaaatatgggtgaa

SEQ ID NO: 760501 - DNA, 120 bp, Artificial Sequence
  ENSG00000215012_40 (sequence is synthesized)
tttttttttttttttttttttgcctatgattccaggattttaaaagttttagatgcccagagttgtggaggtatggagaagtggaccttctcatactgttggtgggaatacacaataata

SEQ ID NO: 760502 - DNA, 120 bp, Artificial Sequence
  ENSG00000215012_41 (sequence is synthesized)
taatttgaccacgtaacaattctaggcacatgcatgctgtgactacttgctaggtgcatgaaggctcttgccaggggtggtcatggttcggtaccactacatgggggtttagagcaggga

SEQ ID NO: 760503 - DNA, 120 bp, Artificial Sequence
  ENSG00000215012_42 (sequence is synthesized)
ctggaggttggccttgcctcctcccctccccgcatgagctgagggtccttacctgacctttttgagctgtgaccagagtttttcctcatggggtggttagaagggttgaatgagaatgat

SEQ ID NO: 760504 - DNA, 120 bp, Artificial Sequence
  ENSG00000215012_43 (sequence is synthesized)
gcccatgcagtgccttggctggggtctgggccctctaacacccacctcatgggtgtcactgttttttgaacagcagaactggaaaagcccaaagatccagcaataaaggagcaaggcaaa

SEQ ID NO: 760505 - DNA, 120 bp, Artificial Sequence
  ENSG00000215012_44 (sequence is synthesized)
taaagctgttaccctgcaggatcagtcagcatgagccagattgtgctgcagtaacaaagatctccaacagcgcagcggctacagttggcactgcttatttcttgcttgcacctgtgggcc

SEQ ID NO: 760506 - DNA, 120 bp, Artificial Sequence
  ENSG00000215012_45 (sequence is synthesized)
accgtggctggggcctgtcagacctgtgctgacgacagcctacctggacatatttctccatgctcactgaggcaggggaaaggccacagcaggccacaagtaatgtgtgtcaccccactt

SEQ ID NO: 760507 - DNA, 120 bp, Artificial Sequence
  ENSG00000215012_46 (sequence is synthesized)
ccatttctgtggccaaaggaagccacagagccacacctgagttccataggacggcagcagctgatcatcctatgggctggggtgctcagtatggagaagtacaagcagccacccagcgtg

SEQ ID NO: 760508 - DNA, 120 bp, Artificial Sequence
  ENSG00000215012_47 (sequence is synthesized)
gggctggttggtgctgctgaggatgggaggatgggaggggcctgcatccatcccagggcaacatacctgtttgtctgctggggctgcctgacaaaggaccgcaggctaggggacttaaac

SEQ ID NO: 760509 - DNA, 120 bp, Artificial Sequence
  ENSG00000215012_48 (sequence is synthesized)
aacagacatttcctcatgattctggagctagaagcctgagatcaaggtgtgggcagggttggtttctcctgaggcctcgctccttggcctgcagatagccatcttcttgccgtgtccctg

SEQ ID NO: 760510 - DNA, 120 bp, Artificial Sequence
  ENSG00000215012_49 (sequence is synthesized)
tctgtgtctgtgtcctaatctctcataagctcactagtctattggatcagggcccaccctcatgacctcatttaaccctgaattacctctttaaagaccctgtcttcaaatgtaagtact

SEQ ID NO: 760511 - DNA, 120 bp, Artificial Sequence
  ENSG00000215012_50 (sequence is synthesized)
aggggttaggacttgaacataaaaatattgaagggacatagttctgcccacagcggtgcccgcgataggcttctctggttttgtctttgctgttcctggcagcgctatattgggcaggct

SEQ ID NO: 760512 - DNA, 120 bp, Artificial Sequence
  ENSG00000215012_51 (sequence is synthesized)
tctgtggtctccacatgcctgtgtgcagagtcccccaggccctgggttctggggcccatactgaggagtggggatggccaagccttggctgttgagtaggcagtgcccagttgtgctgta

SEQ ID NO: 760513 - DNA, 120 bp, Artificial Sequence
  ENSG00000215012_52 (sequence is synthesized)
tgggatgctgtttctcacttaagaaatctttccctacctggggggtacaaaggcattatcctgtattcccaggttgtaactttctgcctttgacattcaaccttgagtccacctgtaagt

SEQ ID NO: 760514 - DNA, 120 bp, Artificial Sequence
  ENSG00000215012_53 (sequence is synthesized)
gtaactgcggcagaagggaggggtctgctgtcatccttgatagcctgtgatgagcagagcccctctgccgaccgcgatgcacatgtaatatgagcaagaaataaatttttgatgtgcgaa

SEQ ID NO: 760515 - DNA, 120 bp, Artificial Sequence
  ENSG00000215012_54 (sequence is synthesized)
gtttgtgggggcacctggagacatttgggccgttctcgcagtctcgggaagccgcgcccgctccttgcctggcctcacggcggccgatctcgttctccactttctaggtggcgcctggac

SEQ ID NO: 760516 - DNA, 120 bp, Artificial Sequence
  ENSG00000215018_0 (sequence is synthesized)
aaagacacttttatttcccacagaacagaacaatatcaaatagctaacttcacccccaaccacagtccttgctgttggcatttactcaactagtctttaattcctgtttgacaaacttta

SEQ ID NO: 760517 - DNA, 120 bp, Artificial Sequence
  ENSG00000215018_1 (sequence is synthesized)
taaggtgctacaagacagatgatttttcaccatctaccataatgtggaacagatattttgtcttctatctcctgcttttgtcagcgtttacgagtcaaacagtatccggacaaagaaaga

SEQ ID NO: 760518 - DNA, 120 bp, Artificial Sequence
  ENSG00000215018_2 (sequence is synthesized)
aaggaccaaaatcaaatttgcttgcaaggaaaagtgatgtccagggctccatttgtttcatagatattgtcttcatcgtggacagctctgaaagttctaaaattgccctctttgataaac

SEQ ID NO: 760519 - DNA, 120 bp, Artificial Sequence
  ENSG00000215018_3 (sequence is synthesized)
agaaagattttgtggatagcttgagtgacaagattttccaattgactcctggtcgctccttggaatatgacatcaaactggcagcccttcagtttagcagctctgtccaaattgatccac

SEQ ID NO: 760520 - DNA, 120 bp, Artificial Sequence
  ENSG00000215018_4 (sequence is synthesized)
ctttttcttcctggaaggacctgcagacatttaagcagaaggtcaagtctatgaatttaatagggcaaggtaccttctcttattatgccatttccaatgccactaggctacttaagagag

SEQ ID NO: 760521 - DNA, 120 bp, Artificial Sequence
  ENSG00000215018_5 (sequence is synthesized)
aagggcgtaaggatggtgtgaaagtggttttgctgatgactgatggcatcgaccatccaaagaatccagatgttcaaagtatttctgaagatgccagaatttcaggaatatcatttatca

SEQ ID NO: 760522 - DNA, 120 bp, Artificial Sequence
  ENSG00000215018_6 (sequence is synthesized)
ccattgcactttctacggtagtcaatgaagccaaacttcgtttgatttctggggattcatccagtgaacccactttactgttgagtgatccaacccttgtagataaaattcaagatcgtc

SEQ ID NO: 760523 - DNA, 120 bp, Artificial Sequence
  ENSG00000215018_7 (sequence is synthesized)
tggatatcttatttgaaaagaagtgtgaacgcaagatttgtgaatgtgagaagggagatccaggtgatccagggcctcctggtacacatggaaatccaggtatcaaaggtgagcgaggac

SEQ ID NO: 760524 - DNA, 120 bp, Artificial Sequence
  ENSG00000215018_8 (sequence is synthesized)
caaaaggaaacccgggcaacgctcaaaaaggagaagctggagaaagaggtccagggggaattcctgggtacaagggtgacaagggtgaacgtggggaatgtggtaaaccagggataaaag

SEQ ID NO: 760525 - DNA, 120 bp, Artificial Sequence
  ENSG00000215018_9 (sequence is synthesized)
gtgacaagggatccccagggccatatggaccaaagggacccagaggaattcagggaattactggacctccaggagacccaggcccaaaggggtttcaaggcaataagggtgagccaggtc

SEQ ID NO: 760526 - DNA, 120 bp, Artificial Sequence
  ENSG00000215018_10 (sequence is synthesized)
ctcctggtccttatggttctccaggagctcctggaattggacagcaaggtattaagggagaaagaggccaagaaggaagaccgggagctccaggacccattggagttggtgagcctggac

SEQ ID NO: 760527 - DNA, 120 bp, Artificial Sequence
  ENSG00000215018_11 (sequence is synthesized)
agccaggtccccgtggtcctgagggagtaccaggagagaggggcttacccggagaaggatttccaggaccaaagggtgaaaaaggttctgaaggaccaactggcccacagggattacaag

SEQ ID NO: 760528 - DNA, 120 bp, Artificial Sequence
  ENSG00000215018_12 (sequence is synthesized)
gcctgtcaatcaaaggggagaagggggatataggacctgtgggaccccaaggaccaatgggtatccctggaatcgggagtcaaggggaacagggaatccaaggtcctattggtccacctg

SEQ ID NO: 760529 - DNA, 120 bp, Artificial Sequence
  ENSG00000215018_13 (sequence is synthesized)
gtccacaagggcccgcaggacagggcttacctggttccaagggagaagtaggccaaatgggacctacaggccctcgaggaccagtgggaattggagtacaaggtccaaagggagagccag

SEQ ID NO: 760530 - DNA, 120 bp, Artificial Sequence
  ENSG00000215018_14 (sequence is synthesized)
gctcaatagggctcccaggacaaccaggagtaccaggagaagatggagctgcagggaagaagggagaagcggggcttccgggagcaagaggcccagaaggaccacctggaaaaggacagc

SEQ ID NO: 760531 - DNA, 120 bp, Artificial Sequence
  ENSG00000215018_15 (sequence is synthesized)
ctggccccaagggtgacgaaggcaagaaagggagcaaaggaaatcaaggacagaggggacttccagggcccgaaggaccaaagggtgaaccgggcattatgggcccttttggaatgcctg

SEQ ID NO: 760532 - DNA, 120 bp, Artificial Sequence
  ENSG00000215018_16 (sequence is synthesized)
gaacatcaattcctggaccacctgggccaaagggagatagaggaggacctgggatacctggatttaagggagaacctggactttctattcgaggaccaaagggtgtccaaggccctcggg

SEQ ID NO: 760533 - DNA, 120 bp, Artificial Sequence
  ENSG00000215018_17 (sequence is synthesized)
agtgggagacactggagcaaagggagagcctggggtcagaggccctccaggtccttctgggcctcggggcgtaggaacccaagggccaaagggtgatactgggcagaaaggcttgcctgg

SEQ ID NO: 760534 - DNA, 120 bp, Artificial Sequence
  ENSG00000215018_18 (sequence is synthesized)
ccctcctggcccccctggctatggatcacagggaattaaaggggaacaaggaccacaaggcttcccaggcccaaagggcacaatgggccatggcctcccaggccagaagggagagcacgg

SEQ ID NO: 760535 - DNA, 120 bp, Artificial Sequence
  ENSG00000215018_19 (sequence is synthesized)
agaacggggcgatgtgggaaagaaaggtgataaaggagaaattggagagcctggatctccaggaaaacagggtttacaaggacccaaaggagacctaggacttacaaaagaagaaattat

SEQ ID NO: 760536 - DNA, 120 bp, Artificial Sequence
  ENSG00000215018_20 (sequence is synthesized)
caaacttattacagaaatatgtggttgtgggcccaaatgcaaagagactccactagagctggtgtttgtgatcgacagctcagaaagcgtggggccagagaactttcagatcattaaaaa

SEQ ID NO: 760537 - DNA, 120 bp, Artificial Sequence
  ENSG00000215018_21 (sequence is synthesized)
ttttgtgaagactatggctgaccgggttgctctggaccttgccacggcccgcataggcataatcaactatagccataaggtggagaaggtggctaatttgaagcagttctccagcaagga

SEQ ID NO: 760538 - DNA, 120 bp, Artificial Sequence
  ENSG00000215018_22 (sequence is synthesized)
tgacttcaagttggctgtggacaacatgcagtatctgggggaaggcacatacacagccactgctctgcaagcagccaacgacatgtttgaagatgcaaggccaggtgtaaaaaaagtggc

SEQ ID NO: 760539 - DNA, 120 bp, Artificial Sequence
  ENSG00000215018_23 (sequence is synthesized)
cttggtcatcactgatggacagacagattctcgtgataaagagaaactgacagaggtggtgaagaatgccagtgacaccaatgtggagatatttgtgataggggtggtgaagaaaaatga

SEQ ID NO: 760540 - DNA, 120 bp, Artificial Sequence
  ENSG00000215018_24 (sequence is synthesized)
tcccaactttgaaatattccacaaagaaatgaatctaattgctactgacccagagcatgtttaccagtttgatgatttctttaccctgcaagacaccctgaagcaaaaattgtttcaaaa

SEQ ID NO: 760541 - DNA, 120 bp, Artificial Sequence
  ENSG00000215018_25 (sequence is synthesized)
aatttgtgaggattttgattcctatctcgttcaaatttttggttcatcgtcacctcaacctggatttgggatgtcaggggaagaactcagtgaatctactccagagcctcaaaaagaaat

SEQ ID NO: 760542 - DNA, 120 bp, Artificial Sequence
  ENSG00000215018_26 (sequence is synthesized)
ttctgagtcattgagtgtcaccagagaccaggatgaagatgataaggctccagagccaacgtgggctgatgatctgcctgccactacctcatctgaggccaccaccacccccaggccact

SEQ ID NO: 760543 - DNA, 120 bp, Artificial Sequence
  ENSG00000215018_27 (sequence is synthesized)
gctcagcacccctgtggatggggcagaggatcctagatgtttggaagccttgaagcctggaaactgtggtgaatatgtggttcgatggtattatgacaaacaggtcaactcttgtgcccg

SEQ ID NO: 760544 - DNA, 120 bp, Artificial Sequence
  ENSG00000215018_28 (sequence is synthesized)
attttggttcagtggctgtaatggctcaggaaatagattcaacagtgaaaaggaatgtcaagaaacctgcattcaaggatgagcaagtaaattggcctgtctctatcaaaagcatagaac

SEQ ID NO: 760545 - DNA, 120 bp, Artificial Sequence
  ENSG00000215018_29 (sequence is synthesized)
tccctaatttccacatattcacccaatacaaatacagcactatatttgagtgtatactgagtatttacaacttatacatgtaattgaattctcactacagccctaggatgtacatattat

SEQ ID NO: 760546 - DNA, 120 bp, Artificial Sequence
  ENSG00000215018_30 (sequence is synthesized)
taaccacttatataggtaagaaagctgaggctctgagaagtttagtaacttgtcaactgtcacccaactaaaaagtttcagagctgaggatttagacttagagctgtgtaacttcaatac

SEQ ID NO: 760547 - DNA, 120 bp, Artificial Sequence
  ENSG00000215018_31 (sequence is synthesized)
acagactctatctacttcacaacctgcaatgtgattctgattcctttaattcctgttgtatgtactatgtcagctcaaacccctacccctgtccctgcccatacctccacccactcacct

SEQ ID NO: 760548 - DNA, 120 bp, Artificial Sequence
  ENSG00000215018_32 (sequence is synthesized)
ccctaacctccttatgtccctcgcagtagcaagatgtaggtgataggaaggacttcggtgtgagaattagaaatgatgtaaatgtttacgcaggagtgctgggataggagtcgggatggt

SEQ ID NO: 760549 - DNA, 120 bp, Artificial Sequence
  ENSG00000215018_33 (sequence is synthesized)
gagggtagttagatttttgcctcacttgccctgaaagtggtaatagggagaaaccaatctgaattacaattacttaaatgtatcacagactgtcactttgtattcctccaacatgtttgg

SEQ ID NO: 760550 - DNA, 120 bp, Artificial Sequence
  ENSG00000215018_34 (sequence is synthesized)
taacaagtgtttaatgtatgttaaaacaaagaaggtttttatacccttccattaaaatatgtcagtgggcccttccattttatggagtggaatgggaaggcccttgacagccaggaacca

SEQ ID NO: 760551 - DNA, 120 bp, Artificial Sequence
  ENSG00000215018_35 (sequence is synthesized)
aaagtgagccaccaaattgaaatgcgagtaatggagagtaacggagaattgactctgtcattttataatacttttgcaagatcctgtctgggaagagcattagttctgagctgagttcag

SEQ ID NO: 760552 - DNA, 120 bp, Artificial Sequence
  ENSG00000215018_36 (sequence is synthesized)
tgggaagagcattagttctgagctgagttcagacagcacttgcatatttctttcttttttttttttttcccccagacagaatcttgctctgtcatccagcctgggtgacacagcaagact

SEQ ID NO: 760553 - DNA, 120 bp, Artificial Sequence
  ENSG00000215018_37 (sequence is synthesized)
aaatactttctccttctatcaggtctaccctcattcaattcaacagtgcaaaaaagagcactcacggaagaaggagatggaagaatagccatcttggcagaaataatgatatgtataatt

SEQ ID NO: 760554 - DNA, 80 bp, Artificial Sequence
  ENSG00000215018_38 (sequence is synthesized)
acatgcttgtcaatttaaaaacatgataagatgaacaccagtgaacacatcacctagagaatgaagcaaacatcaaaaat

SEQ ID NO: 760555 - DNA, 120 bp, Artificial Sequence
  ENSG00000215018_39 (sequence is synthesized)
gtgaacacatcacctagagaatgaagcaaacatcaaaaattctattgcagcttcccgtgtggccctccgccatcccagctctctattccatgccagggatatcccattttgaacttcgta

SEQ ID NO: 760556 - DNA, 120 bp, Artificial Sequence
  ENSG00000215018_40 (sequence is synthesized)
tttaccatgtcaatgtgctgttgacatttataggtaattttacatgtaaaactctatatatctctatgtgttgccaaacaataaatatttagccttgcttattttacagttttacaaaaa

SEQ ID NO: 760557 - DNA, 120 bp, Artificial Sequence
  ENSG00000215018_41 (sequence is synthesized)
tgataaaagcaactagttcaggatatgattatatttcttaatggttgttttttattcttgtctcttcttccatcctctattcacaatactcgtaattacttttccaaattctagagaaga

SEQ ID NO: 760558 - DNA, 120 bp, Artificial Sequence
  ENSG00000215018_42 (sequence is synthesized)
gggttctgaaaaaagttaatgttgccaagaagttaattgacttgattaatttgaaatggacctggatctgttggtttgaagattgcctaggtggtaatagaaaagtgatctaggagaaga

SEQ ID NO: 760559 - DNA, 120 bp, Artificial Sequence
  ENSG00000215018_43 (sequence is synthesized)
gggttcaattaataccttagtcacattcaagaagtttttgatattaaaatatatatattgaaaaaaacataaagtctttaaaaaattagtaacttgttatttgttgtgtcttttcaggga

SEQ ID NO: 760560 - DNA, 120 bp, Artificial Sequence
  ENSG00000215018_44 (sequence is synthesized)
acagggaattaaagtaagtgaatagggttgtgctggagtcacctctgatttcaccagagtgattgggagaagaggttgtagataacgcaaaaatggctattatgaaatagatttattgtg

SEQ ID NO: 760561 - DNA, 120 bp, Artificial Sequence
  ENSG00000215018_45 (sequence is synthesized)
agcctcgcagttaaatggcatccagtgtttagagacatcatctggaagtgtaaaaatggtatgagtacaatacttcagcaaatgctaaacattatataaattgcttggtgcaaaagtgaa

SEQ ID NO: 760562 - DNA, 120 bp, Artificial Sequence
  ENSG00000215018_46 (sequence is synthesized)
gctgccgacattcagccaaaatggcctgccctacttcagctcattcctgcatcagggactcgccaggatggctgattattaaaagcttagctcaaatgtcacctccccgaccacccatac

SEQ ID NO: 760563 - DNA, 120 bp, Artificial Sequence
  ENSG00000215018_47 (sequence is synthesized)
agaaagcattactaccccaacccctctgtatgttttccatgtagcgtgtatcactttctgagatcatcttcctcatttatttctctgcatattccatgagagtgaaggttttcctggagc

SEQ ID NO: 760564 - DNA, 120 bp, Artificial Sequence
  ENSG00000215018_48 (sequence is synthesized)
aggcttcttgctttgttccctcctaacttcatgtcaccagaactaggtgtaccattcagtaggagctctacaacttgttgaatgaatggaaaatgaataaatgatcaatattaccctaaa

SEQ ID NO: 760565 - DNA, 120 bp, Artificial Sequence
  ENSG00000215018_49 (sequence is synthesized)
aaaggaaacccgggcaacgctcaaaaaggagaagctggagaaagaggtccagggggaattcctgggtacaagggtgacaagcaatattctagggaagacagggaagtagagcataataat

SEQ ID NO: 760566 - DNA, 120 bp, Artificial Sequence
  ENSG00000215018_50 (sequence is synthesized)
gaaaaatatgtagcatgcttgctgccaagcccggctctcctacagcagtcctcgctaactcatcatggcacctgttcccactaactcacgatgcaatctcacttcagaacctttctctca

SEQ ID NO: 760567 - DNA, 120 bp, Artificial Sequence
  ENSG00000215021_0 (sequence is synthesized)
ctttcgccagccttacgggcccgaaccctcgtgtgaagggtgcagtacctaagccggagcggggtagaggcgggccggcacccccttctgacctccagtgccgccggcctcaagatcaga

SEQ ID NO: 760568 - DNA, 120 bp, Artificial Sequence
  ENSG00000215021_1 (sequence is synthesized)
catggcccagaacttgaaggacttggcgggacggctgcccgccgggccccggggcatgggcacggccctgaagctgttgctgggggccggcgccgtggcctacggtgtgcgcgaatctgt

SEQ ID NO: 760569 - DNA, 120 bp, Artificial Sequence
  ENSG00000215021_2 (sequence is synthesized)
gttcaccgtggaaggcgggcacagagccatcttcttcaatcggatcggtggagtgcagcaggacactatcctggccgagggccttcacttcaggatcccttggttccagtaccccattat

SEQ ID NO: 760570 - DNA, 120 bp, Artificial Sequence
  ENSG00000215021_3 (sequence is synthesized)
ctatgacattcgggccagacctcgaaaaatctcctcccctacaggctccaaagacctacagatggtgaatatctccctgcgagtgttgtctcgacccaatgctcaggagcttcctagcat

SEQ ID NO: 760571 - DNA, 120 bp, Artificial Sequence
  ENSG00000215021_4 (sequence is synthesized)
gtaccagcgcctagggctggactacgaggaacgagtgttgccgtccattgtcaacgaggtgctcaagagtgtggtggccaagttcaatgcctcacagctgatcacccagcgggcccaggt

SEQ ID NO: 760572 - DNA, 120 bp, Artificial Sequence
  ENSG00000215021_5 (sequence is synthesized)
atgatgtggccatcacagagctgagctttagccgagagtacacagctgctgtagaagccaaacaagtggcccagcaggaggcccagcgggcccaattcttggtagaaaaagcaaagcagg

SEQ ID NO: 760573 - DNA, 120 bp, Artificial Sequence
  ENSG00000215021_6 (sequence is synthesized)
aacagcggcagaaaattgtgcaggccgagggtgaggccgaggctgccaagatgcttggagaagcactgagcaagaaccctggctacatcaaacttcgcaagattcgagcagcccagaata

SEQ ID NO: 760574 - DNA, 120 bp, Artificial Sequence
  ENSG00000215021_7 (sequence is synthesized)
tctccaagacgatcgccacatcacagaatcgtatctatctcacagctgacaaccttgtgctgaacctacaggatgaaagtttcaccaggggaagtgacagcctcatcaagggtaagaaat

SEQ ID NO: 760575 - DNA, 120 bp, Artificial Sequence
  ENSG00000215021_8 (sequence is synthesized)
gagcctagtcaccaagaactccacccccagaggaagtggatctgcttctccagtttttgaggagccagccaggggtccagcacagccctaccccgccccagtatcatgcgatggtccccc

SEQ ID NO: 760576 - DNA, 120 bp, Artificial Sequence
  ENSG00000215021_9 (sequence is synthesized)
acaccggttccctgaacccctcttggattaaggaagactgaagactagccccttttctggggaattactttcctcctccctgtgttaactggggctgttggggacagtgcgtgatttctc

SEQ ID NO: 760577 - DNA, 120 bp, Artificial Sequence
  ENSG00000215021_10 (sequence is synthesized)
agtgatttcctacagtgttgttccctccctcaaggctgggaggagataaacaccaacccaggaattctcaataaatttttattacttaacctgaagtcaaggcttcacgtgttcatgaac

SEQ ID NO: 760578 - DNA, 120 bp, Artificial Sequence
  ENSG00000215021_11 (sequence is synthesized)
ggggtgagggcttctgagatgcaggaggaggaaagactccatgggtggggctcctgacccaggacagggtctccctgactctctcccaccacagcccagcaggaggcccagcgggcccaa

SEQ ID NO: 760579 - DNA, 120 bp, Artificial Sequence
  ENSG00000215021_12 (sequence is synthesized)
cgtgctctctggcccttggctccttgttgggggtggggactacagatgagatctgaaatcttagtggtagtacctgagccatgactccccactgtaaggccagatcaatagcattggtgg

SEQ ID NO: 760580 - DNA, 120 bp, Artificial Sequence
  ENSG00000215021_13 (sequence is synthesized)
ccttgccttcatttctggtgctgcccctagttcctggcagcagcctgcagggaggcccacaggtggggtccacggtagggctgggcacaagccacctgagcgcaaccttggatctgacag

SEQ ID NO: 760581 - DNA, 120 bp, Artificial Sequence
  ENSG00000215021_14 (sequence is synthesized)
cccagaggaggactggagcaagggagtgtggtaaggacagggccagggattgagacctgcccttgcgtgtaccttaaccctcctcaccttggagaagcactgagcaagaaccctggctac

SEQ ID NO: 760582 - DNA, 120 bp, Artificial Sequence
  ENSG00000215021_15 (sequence is synthesized)
gacctttcacccttgacgccgacccagcagtggctatagtcggacgtgcaacaggattcaacgctgctcttttcccaccctcctcatccctgcccctaggatagtgggtgctgcgagaac

SEQ ID NO: 760583 - DNA, 120 bp, Artificial Sequence
  ENSG00000215021_16 (sequence is synthesized)
ctccagcagcatacaaactgttgttttccagagggacaagagaatctctccttgtctgtggtcgtggagaggagcaggccaaaaaacgcgtggtgaggggaaaccgggcaaggctagtga

SEQ ID NO: 760584 - DNA, 120 bp, Artificial Sequence
  ENSG00000215029_0 (sequence is synthesized)
agacgcagaggcgaggccgccagtcgaggacgaggaggagataacatcaagatgccgaagactgaggaaactgtgctccagaatgatcccagtgtagcagagaatggggcccctgagcct

SEQ ID NO: 760585 - DNA, 120 bp, Artificial Sequence
  ENSG00000215029_1 (sequence is synthesized)
aaaacaccagggcagagccagaaaagcaagagtttctgtttagatgaccagtctcctgacctgatgtcttttctgtcacagatctgatagagacagttaatgaagtttccaagctgagca

SEQ ID NO: 760586 - DNA, 120 bp, Artificial Sequence
  ENSG00000215029_2 (sequence is synthesized)
tttcacatgaaattgtagtaaaccaagatttctatgtggaagagaccattttgcctccaaacagtgtagaaggcaggtttgcggaggcaatgtacaatgctttttggaaccatctgaaag

SEQ ID NO: 760587 - DNA, 120 bp, Artificial Sequence
  ENSG00000215029_3 (sequence is synthesized)
aacagctattgagtactcctcctgacttcacttgtgcccttgaacttctaaaagatgttaaggagaaccgcctaagaaatgagatagaagaagctctggacacagatctcctcaagcagg

SEQ ID NO: 760588 - DNA, 120 bp, Artificial Sequence
  ENSG00000215029_4 (sequence is synthesized)
aagcagaacatggggccctggatgtccctcatctttctaactacattctcaatttgatggctctgctatgtgcaccggttcgagatgaagcgatacagaaactagagaccataagagatc

SEQ ID NO: 760589 - DNA, 120 bp, Artificial Sequence
  ENSG00000215029_5 (sequence is synthesized)
cagtgcagttactgaggggcatcctccgtgttctgggcctaatgaaaatggacatggtgaactataccatccagagctttcgaccctacctgcaggaacattccatccagtatgaacaag

SEQ ID NO: 760590 - DNA, 120 bp, Artificial Sequence
  ENSG00000215029_6 (sequence is synthesized)
ctaaattccaggaactccttgataaacagcccagtctcctcgattataccacaaaatggctaaccaaagcagccacagacatcactacactatgtccgagttctcctgactcacctagct

SEQ ID NO: 760591 - DNA, 120 bp, Artificial Sequence
  ENSG00000215029_7 (sequence is synthesized)
aatggtgctataccaaggctacctgaacctcctcctctgggatcttgaaaacgtagaattcccagagactctgctgatggacagaatccggctccaggaactggcattccagttgcacca

SEQ ID NO: 760592 - DNA, 120 bp, Artificial Sequence
  ENSG00000215029_8 (sequence is synthesized)
gttaactgtcctggcctcagtcttgctagtggccagaagcttctctggtgaagttttattcagatcacctgaatttgtggatagactgaaatgcaccaccaaggccctaactgaggaatt

SEQ ID NO: 760593 - DNA, 120 bp, Artificial Sequence
  ENSG00000215029_9 (sequence is synthesized)
tatctccaggcctgaagagactatgctgagtgtgagtgaacaggtgtctcaggaagtccatcaaggccttaaggacatgggcctcactactctgagcagtgaaaacacagcatctcttct

SEQ ID NO: 760594 - DNA, 120 bp, Artificial Sequence
  ENSG00000215029_10 (sequence is synthesized)
aggccaactccagaacatcaccaagaaagagaactgcattcgtagcattgttgatcagtggatccgtttttttctcaaatgctgtttgcttcatggcatgcaggagtctctgctacactt

SEQ ID NO: 760595 - DNA, 120 bp, Artificial Sequence
  ENSG00000215029_11 (sequence is synthesized)
tcctggaggcctcattctcattgaaaaggagttggcagaactgggctggaagtttctcaatctgatgcatcataatcagcaggtatttggcccatactatgctgagatcctaaaacacat

SEQ ID NO: 760596 - DNA, 120 bp, Artificial Sequence
  ENSG00000215029_12 (sequence is synthesized)
catccatccagctcaagcacaagaaacagatgtggagcctaactgatagtgctggaccccagctatggcaacagggactcaggagagagaggtcagcatgtttctgggaggacatcacct

SEQ ID NO: 760597 - DNA, 120 bp, Artificial Sequence
  ENSG00000215029_13 (sequence is synthesized)
gtggttagtcgaacagtcagccctcttcctcgctatagccaggacacagggatgcaggggtcaagcatgtaagcaccaactggcccaatccccttcactaataaacctctgagctgcaag

SEQ ID NO: 760598 - DNA, 120 bp, Artificial Sequence
  ENSG00000215029_14 (sequence is synthesized)
cagaactgggctggaagtttctcaatctgatgcatcataatcagcagagtcatttttcacaaaacgaaatctttccagaagatcacgaataagagagatcaaagctaggcagcttgagtt

SEQ ID NO: 760599 - DNA, 120 bp, Artificial Sequence
  ENSG00000215029_15 (sequence is synthesized)
gaagtagagctggaagaaggagttttgaggactgtttcaaaaccactggactagatgatctctaaagtggtgacatggacataggataatggttatagacagtccccctcccaacgggaa

SEQ ID NO: 760600 - DNA, 120 bp, Artificial Sequence
  ENSG00000215029_16 (sequence is synthesized)
aatagaaagtttcttccttgggcaaggggtagggagaaggaatgtttctctaagatagaaagatctacaaaatcacttctttatagaccaagagtatgtctcagagccatcatctttaag

SEQ ID NO: 760601 - DNA, 80 bp, Artificial Sequence
  ENSG00000215041_0 (sequence is synthesized)
gcgctgccccggtgtcagcggagatggcggcagggtcgggtgggagtgggggctctgggggaggccctggaccggggccg

SEQ ID NO: 760602 - DNA, 120 bp, Artificial Sequence
  ENSG00000215041_1 (sequence is synthesized)
ggtccaacgggggtctgggcagcggcggggaactgcacccgcgcactgggcgcttggtgagcctgtcggcctgtgggcgtacggcgcggcggcagcagccgggccaggagtttaaccacg

SEQ ID NO: 760603 - DNA, 120 bp, Artificial Sequence
  ENSG00000215041_2 (sequence is synthesized)
ggctggtgttgagccgagaacccttgcgcgatggacgcgtcttcaccgtccgcatcgaccgcaaggtcaactcctggagcggctccattgagattggggtgacagcgctggaccccagtg

SEQ ID NO: 760604 - DNA, 120 bp, Artificial Sequence
  ENSG00000215041_3 (sequence is synthesized)
tgctggactttccaagcagtgccacgggcctgaaggggggctcgtgggtagtgtcgggctgctctgtgctgagagatggacgctctgtgttggaggagtatggtcaggacctggaccagc

SEQ ID NO: 760605 - DNA, 120 bp, Artificial Sequence
  ENSG00000215041_4 (sequence is synthesized)
ttggtgaaggggaccgcgtgggcgtggagcgcacagttgctggggagcttcggctctgggtgaatgggcgggattgcggtgtggctgccacaggcctgccccctcgtgtctgggccgtcg

SEQ ID NO: 760606 - DNA, 120 bp, Artificial Sequence
  ENSG00000215041_5 (sequence is synthesized)
tggacctttatggcaagtgcacccagatcaccgtgctaccccctgagccaggcttcagcccccctactcccatccccacacctcccctcgagcccttggcccccactgaagactctgcct

SEQ ID NO: 760607 - DNA, 120 bp, Artificial Sequence
  ENSG00000215041_6 (sequence is synthesized)
tggctgaacaggggacctctgcagatgaagccttcatggtgtccccagcgcaggcccggccggagacgtttcctaacagccttgagtcgcataatgactttgccaacatggagctgtctg

SEQ ID NO: 760608 - DNA, 120 bp, Artificial Sequence
  ENSG00000215041_7 (sequence is synthesized)
aggtggtgagcaacaccatcctgtctgcctacaatggagggctcctgaatgtgaacctgagctccccaccggcaggggaaggcctgggatctagcggtgctgccacctcgcccattctca

SEQ ID NO: 760609 - DNA, 120 bp, Artificial Sequence
  ENSG00000215041_8 (sequence is synthesized)
cttccaacgatgccctgctctttcatgaaaagtgcgggaccctcatcaaactcagcaacaataataagacggctgagcgccggcggcccctggatgaattcaacaatggggttgtcatga

SEQ ID NO: 760610 - DNA, 120 bp, Artificial Sequence
  ENSG00000215041_9 (sequence is synthesized)
ccaatcgcccccttcgggacaatgagatgtttgagatccgtatcgacaagcttgttgataagtggtcaggctccattgagattggggtcaccacccacaaccccaacagtttggagtacc

SEQ ID NO: 760611 - DNA, 120 bp, Artificial Sequence
  ENSG00000215041_10 (sequence is synthesized)
cagccaccatgaccaacctccagtcaggcaccatcatgatgagcggctgtggaatcctgaccaatggcaagggcacccgccgggagtactgcgaattcagtctggatgagttgcaggagg

SEQ ID NO: 760612 - DNA, 120 bp, Artificial Sequence
  ENSG00000215041_11 (sequence is synthesized)
gtgaccacattggcctcacaaggaagtccaactctgccctacacttcttcattaatggtatcgatcagggagtggcaacccccttgacgcccccagtggtgtatggtgtggtggacttgt

SEQ ID NO: 760613 - DNA, 120 bp, Artificial Sequence
  ENSG00000215041_12 (sequence is synthesized)
acgggatggcagtgaaggtgaccatcgtccacaataacaaccacagtgaccgtctccgccgaaacaacgccatcctgcgggcgctgtcccccgagggtgctctccgccgtgctgcccctg

SEQ ID NO: 760614 - DNA, 120 bp, Artificial Sequence
  ENSG00000215041_13 (sequence is synthesized)
ccgcccaggcagaacctgagcgcctgctcttccaccccaactgtgggcagaaggcagccatcacccacgagggacgcactgccctgaggccccatgccaccgatgacttcaatcacggcg

SEQ ID NO: 760615 - DNA, 120 bp, Artificial Sequence
  ENSG00000215041_14 (sequence is synthesized)
tggtgctgagcagcagagccctgcgggatggagaggtgttccaggtgcgcatcgacaagatggtggacaaatgggctggctccattgaaattggtgtcaccacccacaaccctgcctacc

SEQ ID NO: 760616 - DNA, 120 bp, Artificial Sequence
  ENSG00000215041_15 (sequence is synthesized)
tccagttgccctccaccatgaccaacttgcgctctgggacctggatgatgactgggaatggggtgatgcacaatgggacgaccatcctggatgaatacgggcacaatctggaccgcctca

SEQ ID NO: 760617 - DNA, 120 bp, Artificial Sequence
  ENSG00000215041_16 (sequence is synthesized)
aggcaggggacacggtgggcgtggtacggcgggaggacgggactctccacttctttgtcaatgggatgactcagggccctgctgcctggaacgtgcccccgggcgtctatgctgtcgtcg

SEQ ID NO: 760618 - DNA, 120 bp, Artificial Sequence
  ENSG00000215041_17 (sequence is synthesized)
atctctatggccaggcggcccaggccaccattgtggacgacgtggaggtggctccagttcctgaaccactccctgaggggaacaaccaggtgtctccaagctctccgtcctcaggggccg

SEQ ID NO: 760619 - DNA, 120 bp, Artificial Sequence
  ENSG00000215041_18 (sequence is synthesized)
ggggctctgacctgcgcttccatcagctgcacggcagtaacgcagtcatcactaacgggggccgcaccgccctccgccacaactgtcgcagcgagtttaatgacgccatcgtcatctcca

SEQ ID NO: 760620 - DNA, 120 bp, Artificial Sequence
  ENSG00000215041_19 (sequence is synthesized)
accgggccctgcgggatggagagctgtttgaaattgtcattcagaagatggtggaccgctggtcaggctccattgaggctggagtgactgctattcggcctgaagacctggaattcccca

SEQ ID NO: 760621 - DNA, 120 bp, Artificial Sequence
  ENSG00000215041_20 (sequence is synthesized)
acaccatgacagacattgactatgacacatggatgctgagtggtacagccatcatgcaagacggtaacacgatgcgcaacaattatgggtgtgacctggatgcgctgggcacaggtgcac

SEQ ID NO: 760622 - DNA, 120 bp, Artificial Sequence
  ENSG00000215041_21 (sequence is synthesized)
aacggccaggaccaaggcgctgcctgctcgggcctgcctccgggtaaagaggtgtatgcggtagtcgatctctatggccagtgtgtccaagtgtccatcaccaatgccaccggccccatg

SEQ ID NO: 760623 - DNA, 120 bp, Artificial Sequence
  ENSG00000215041_22 (sequence is synthesized)
gacaacagcctggcgaccagcaacactgccaccgagaagtccttcccactgcactccccagtggctggcgtggctcaccgattccacagtacttgcggcaagaacgtcactctagaggag

SEQ ID NO: 760624 - DNA, 120 bp, Artificial Sequence
  ENSG00000215041_23 (sequence is synthesized)
gatggcacgagggcagtgcgtgccgctggctatgctcatggccttgtcttcagtaccaaggagctgagggctgaggaagtctttgaggtgaaagtggaagagctagatgagaagtgggca

SEQ ID NO: 760625 - DNA, 120 bp, Artificial Sequence
  ENSG00000215041_24 (sequence is synthesized)
ggttccctgcggctggggctgaccacactagcaccgggggagatgggacccggggcaggcggtggtggcccagggctgcctccttccctgccagagctccggacgaagaccacttggatg

SEQ ID NO: 760626 - DNA, 120 bp, Artificial Sequence
  ENSG00000215041_25 (sequence is synthesized)
gtatccagctgtgaagtgaggcgtgatgggcagctccagaggatgaactatggccggaacctagagaggctgggggtggggagccgtgtgggtgttcgtcggggggcagatgacacgatg

SEQ ID NO: 760627 - DNA, 120 bp, Artificial Sequence
  ENSG00000215041_26 (sequence is synthesized)
cacatcctggtggatggagaggatatggggcctgcagccactggcattgccaagaacgtgtgggctgtgttggatctctacgggccagtccgcggtgtgtcaattgtcagttccacgaga

SEQ ID NO: 760628 - DNA, 120 bp, Artificial Sequence
  ENSG00000215041_27 (sequence is synthesized)
ctggaggagtcagaaggcacccagcctccttcccccagttcagacaccggcagtgagggcgaggaggatgacgagggcgaggagcatggcctgggaggccagaatgaagtgggtattata

SEQ ID NO: 760629 - DNA, 120 bp, Artificial Sequence
  ENSG00000215041_28 (sequence is synthesized)
cccaccaccctcgagttcctggagaaccatgggaagaatatccttttgtctaatgggaaccgtacggccacacgggtggccagctacaatcagggcatcgttgtcatcaaccaacctctg

SEQ ID NO: 760630 - DNA, 120 bp, Artificial Sequence
  ENSG00000215041_29 (sequence is synthesized)
gtgccccagctgctggtgcaggtgcggatagatttcctaaaccgacagtggacatcttcccttgtcctgggagtcatcacctgcgcgcctgagaggctcaacttccctgcttctgcctgt

SEQ ID NO: 760631 - DNA, 120 bp, Artificial Sequence
  ENSG00000215041_30 (sequence is synthesized)
gccctcaaacgggcagcctggctgctgcggggccgtggggtcttccacaacggtctcaagatctgcgagaagtttgggcccaatctggacacgtgccctgaaggcaccatcctgggactg

SEQ ID NO: 760632 - DNA, 120 bp, Artificial Sequence
  ENSG00000215041_31 (sequence is synthesized)
cggctggacagctctggggggctgcatcttcatgttaatggggtggaccagggggtagctgtgccagatgtgccccagccctgccatgcgcttgtggacctctatgggcagtgtgagcag

SEQ ID NO: 760633 - DNA, 120 bp, Artificial Sequence
  ENSG00000215041_32 (sequence is synthesized)
gtgacaatcgtgaaccctgagccaggggctgccagtgggaaaagtgctggaacccaaggggacatggagaaagcagacatggtggacggtatcaaagagagtgtgtgctggggtccacca

SEQ ID NO: 760634 - DNA, 120 bp, Artificial Sequence
  ENSG00000215041_33 (sequence is synthesized)
cctgccgctagtcctctaaagagctgcgagtaccatgccctttgctctcgcttccaagaactcctgctgcttcccgaagattatttcatgcctccgccaaagcgaagcctgtgctactgt

SEQ ID NO: 760635 - DNA, 120 bp, Artificial Sequence
  ENSG00000215041_34 (sequence is synthesized)
gagtcttgccggaagctgcgaggagacgaggcccacaggcgcagaggggagcctccccgggaatatgcactgccctttggctggtgcaggttcaacctcagagtgaatccccgcctggag

SEQ ID NO: 760636 - DNA, 120 bp, Artificial Sequence
  ENSG00000215041_35 (sequence is synthesized)
gctgggacactaaccaagaagtggcacatggcatatcacgggagcaatgttgccgctgtacggagagtgctggaccgaggggagctgggagcaggtactgcctccatcctgagctgccgt

SEQ ID NO: 760637 - DNA, 120 bp, Artificial Sequence
  ENSG00000215041_36 (sequence is synthesized)
cctttgaagggagaacctggggtagggttcgaggagcctggcgagaactgtgcacctcctcgggaggagcagccccctcctgtgctgctttccccctcccttcaatatgctggggcggag

SEQ ID NO: 760638 - DNA, 120 bp, Artificial Sequence
  ENSG00000215041_37 (sequence is synthesized)
accctggcctccaaagtgcaattccgggaccccaaatcccagcggacgcaccaggctcaggtggcgttccaggtgtgtgtgcgccctggctcctacaccccgggacccccttccgctgcc

SEQ ID NO: 760639 - DNA, 120 bp, Artificial Sequence
  ENSG00000215041_38 (sequence is synthesized)
cttggagaacctcctgaccctcacttcagtccagccgaacttgagtgggtcactaaggagaagggggccacactcctctgtgccctgctggtacgggtggaatgaggggtgagacaccac

SEQ ID NO: 760640 - DNA, 120 bp, Artificial Sequence
  ENSG00000215041_39 (sequence is synthesized)
tactacaagcacagtcgggccgcgggcccatggactctgagtggcgactgcctccacctcattcccgtgactcgtggcatgcgcaggtgctggagcttggcagccgcgcaggagcatgta

SEQ ID NO: 760641 - DNA, 120 bp, Artificial Sequence
  ENSG00000215041_40 (sequence is synthesized)
ggcaggctctcagatgtaggtggcaagtggcacagctccatgtccggaggcccagcactccgtctgatgggaggagtcgtgggagcccagctccaggccctggtacccctcttcatgcac

SEQ ID NO: 760642 - DNA, 120 bp, Artificial Sequence
  ENSG00000215041_41 (sequence is synthesized)
tgatttggggaacatgactcccttttactcccctaccccacatcacttaatttatttccgtttttgtttctggttactgtgaatcccagaggagtctctccctgtgcccacatgaagctg

SEQ ID NO: 760643 - DNA, 120 bp, Artificial Sequence
  ENSG00000215041_42 (sequence is synthesized)
ctttttccggggccaccgggcgggagtggggaagggtgggcgcacggaagatgggggcctctgtacagttgttactgactctgatttctaaggagccaataaacaccgtctcagagcctc

SEQ ID NO: 760644 - DNA, 120 bp, Artificial Sequence
  ENSG00000215041_43 (sequence is synthesized)
caagctctgtctgactaccctctcccctgcaggtgacaatcgtgaaccctgagccaggggctgccagtgggaaaagtgctggaacccaaggggacatggagaaagcagacatggtggacg

SEQ ID NO: 760645 - DNA, 120 bp, Artificial Sequence
  ENSG00000215041_44 (sequence is synthesized)
agcaaagggcgggacagctgccgcggtggagtctgacctctggaagacagccggtctctcctcccagatctgcgagaagtttgggcccaatctggacacgtgccctgaaggcaccatcct

SEQ ID NO: 760646 - DNA, 120 bp, Artificial Sequence
  ENSG00000215041_45 (sequence is synthesized)
gttcaacctcaggaaaagccaggaagtgccagggacttcctgtctaaggaagagcctcgtgaagctcctccactggggagtcagtggccttcgttgtatctgccccgcttgtccacctcc

SEQ ID NO: 760647 - DNA, 120 bp, Artificial Sequence
  ENSG00000215041_46 (sequence is synthesized)
gctgaggaagtctttgaggtaggccgtagtgatgtgacagaggggctgcgaggcccatcacgacagggccagcttatgttttctctgtctcgtaggtgaaagtggaagagctagatgaga

SEQ ID NO: 760648 - DNA, 120 bp, Artificial Sequence
  ENSG00000215041_47 (sequence is synthesized)
tacacttcttcattaatggtatcgatcagggtaagggccgcccagagagagcctctgggccggggctttcggtggggctgggactgggggctgtacctcatcctcctgcttctctttggt

SEQ ID NO: 760649 - DNA, 120 bp, Artificial Sequence
  ENSG00000215041_48 (sequence is synthesized)
gcttggcctccctgtgtttgactttctcccctcattctccctgtccactcccacacccccgtaccttcctgccacaggagtggcaacccccttgacgcccccagtggtgtatggtgtggt

SEQ ID NO: 760650 - DNA, 120 bp, Artificial Sequence
  ENSG00000215045_0 (sequence is synthesized)
atggccaccactgccacgccggccacgaaccagggctggccagaggactttggcttccggctaggtggctctggcccctgcttcgtcctggaggtggccaaggggagcagcgcgcatgcc

SEQ ID NO: 760651 - DNA, 120 bp, Artificial Sequence
  ENSG00000215045_1 (sequence is synthesized)
ggaggactgcggccaggagaccagatcctggaggtggaggggctggcggtgggcggtctgagccgcgagcgcctcgtgcgcctggcacggcgctgcccacgtgtgccgcccagtctgggc

SEQ ID NO: 760652 - DNA, 80 bp, Artificial Sequence
  ENSG00000215045_2 (sequence is synthesized)
gtgctcccggctcccgacggtggccccggcccaggatccggccccgcggccccgaccacagtcttgcgggccccgcggtg

SEQ ID NO: 760653 - DNA, 120 bp, Artificial Sequence
  ENSG00000215045_3 (sequence is synthesized)
gccggccgcaagcgcccggacgcggtgcaccgagagcgcaggcgcaaggcccaagagttcagccgcaaggtggatgaaatcttgggggaccagccaactgccaaggagcaggtgttcgct

SEQ ID NO: 760654 - DNA, 120 bp, Artificial Sequence
  ENSG00000215045_4 (sequence is synthesized)
gcactgaagcagtttgcagctgagcagcgggtggatgatctggtgtggactctcaccctggcgctgccccgagaggcctgcgggccactcctggacaacctcaggatcttcatccccaag

SEQ ID NO: 760655 - DNA, 120 bp, Artificial Sequence
  ENSG00000215045_5 (sequence is synthesized)
aagcaccgggcgcgcttcgacgaggtggtgtctcagggcctcctgggcaagctgtgccgcgcacgccgggcccagggcgcgcagcgactgcgccggagccgcagcgaggagcggccggag

SEQ ID NO: 760656 - DNA, 120 bp, Artificial Sequence
  ENSG00000215045_6 (sequence is synthesized)
ccccgccgcgccgccccgatgagccgcccccgcgcagggcctccttgctggtgggcggcctcgccggccccgggggcgcgcgcaggactgtccgagtctacaaaggcaacaagagcttcg

SEQ ID NO: 760657 - DNA, 120 bp, Artificial Sequence
  ENSG00000215045_7 (sequence is synthesized)
cgagtctacaaaggcaacaagagcttcggcttcacacttcgcggccacgggcctgtctggatcgagtctgtcctgcctgggagcccagctgacaatgctgccctcaagtcaggtgaccgg

SEQ ID NO: 760658 - DNA, 120 bp, Artificial Sequence
  ENSG00000215045_8 (sequence is synthesized)
atcctcttcctcaatggactggacatgaggaactgctcccacgacaaggtggtgtccatgctgcagggcagtggtgccatgcccacgctggtggtggaggaagggctcgtcccatttgcc

SEQ ID NO: 760659 - DNA, 120 bp, Artificial Sequence
  ENSG00000215045_9 (sequence is synthesized)
agtgactccgattctctggactcacccaacccgtcgtcggcgctcacctccctgcagtgggtggcggagatcctgccgtccagcatccgggtccaagggaggaccttcagccagcagctg

SEQ ID NO: 760660 - DNA, 120 bp, Artificial Sequence
  ENSG00000215045_10 (sequence is synthesized)
gagcacctactcacacctcctgagcgctatggggtctgccgggccctcgagagcttcttccagcacaggaacatcgacaccctcatcgttgacgtctaccctgtgctggacacccctgcc

SEQ ID NO: 760661 - DNA, 120 bp, Artificial Sequence
  ENSG00000215045_11 (sequence is synthesized)
aagcaggtcctgtggcagttcatctaccagctgctgacctatgaggagcaggagctctgtcaggagaaaatcgcatgcttcctgggctacacggccatgacagcagagccggagcctgag

SEQ ID NO: 760662 - DNA, 120 bp, Artificial Sequence
  ENSG00000215045_12 (sequence is synthesized)
ctggacctggagtccgagcccacgcctgagccccagccgcggagctccctgcgggcttcctccatgtgccgccgcagcctccggtcccagggcctggaggccggcctcagctgcggtccc

SEQ ID NO: 760663 - DNA, 120 bp, Artificial Sequence
  ENSG00000215045_13 (sequence is synthesized)
agcgagtgccctgagatgcctcttcccctgatcccaggcgagcgccaggcaggcgacggcacgtccctccctgagacccccaaccccaagatgatgtcagccgtctatgcagagcttgag

SEQ ID NO: 760664 - DNA, 120 bp, Artificial Sequence
  ENSG00000215045_14 (sequence is synthesized)
tctcgactgaacagcagcttcaaagggaagatggggaccgtgtccaaatcccgggcttcccctccaggccccagcccagcagtcaccacagggcccaggaccctgtccggcgtctcatgg

SEQ ID NO: 760665 - DNA, 120 bp, Artificial Sequence
  ENSG00000215045_15 (sequence is synthesized)
ccgctgtgttcggggggtctggcctcccccagcagctctgagtcccacccctacgccagcctggacagcagcagggcaccctccccacagccaggccccgggcccatctgccccgacagc

SEQ ID NO: 760666 - DNA, 120 bp, Artificial Sequence
  ENSG00000215045_16 (sequence is synthesized)
cccccaagcccggaccccacccgcccgcccagccgcaggaagctcttcaccttctcccaccctgtgcgaagccgcgatactgaccgcttcctggacgtgctgagcgagcagctgggcccc

SEQ ID NO: 760667 - DNA, 120 bp, Artificial Sequence
  ENSG00000215045_17 (sequence is synthesized)
cgggtcaccatcgtggatgatttcctgaccccggagaacgactacgaggagatgagcttccatgatgaccagggcagcttcgtaaccaatgagcggagcagcgccagcgactgcatcagc

SEQ ID NO: 760668 - DNA, 120 bp, Artificial Sequence
  ENSG00000215045_18 (sequence is synthesized)
agcagtgaagaaggcagctccctgacctactcctccatctctgaccacatccccccacccccgctcagccccccaccaccgccacccctgcctttccatgacgctaagcccagctcccgc

SEQ ID NO: 760669 - DNA, 120 bp, Artificial Sequence
  ENSG00000215045_19 (sequence is synthesized)
agctctgatggttcccggggccctgctcaggcgctggccaagcccctcacccaactcagccacccagtccctccaccacccccaccgcccctgcccccacccgtgccctgtgcacccccc

SEQ ID NO: 760670 - DNA, 120 bp, Artificial Sequence
  ENSG00000215045_20 (sequence is synthesized)
atgctgtcccggggcctgggccaccggcgcagtgagaccagccacatgagcgtcaagcgcttgcggtgggaacaggtggagaactcagaaggcaccatctggggtcagctcggggaagac

SEQ ID NO: 760671 - DNA, 120 bp, Artificial Sequence
  ENSG00000215045_21 (sequence is synthesized)
tctgactacgataagctgagtgacatggtgaaatacctcgacctggagctccacttcggcacccagaaacctgctaaaccggtgccggggccggagcccttccggaagaaggaggtggtg

SEQ ID NO: 760672 - DNA, 120 bp, Artificial Sequence
  ENSG00000215045_22 (sequence is synthesized)
gagatcctgtcccataagaaggcctacaacacctccatcctcttggcacacctgaagctgagccccgcggagctgcgccaggtgctgatgagcatggagccccggcgcctggagcccgca

SEQ ID NO: 760673 - DNA, 120 bp, Artificial Sequence
  ENSG00000215045_23 (sequence is synthesized)
catctcgcgcagctgctgctcttcgcgcccgacgccgacgaggagcagcgctaccaggccttccgcgaggcgcccggccgcctcagcgagccggaccagttcgtcctgcagatgctgtca

SEQ ID NO: 760674 - DNA, 120 bp, Artificial Sequence
  ENSG00000215045_24 (sequence is synthesized)
gttcccgaatacaagacacgcctgcgcagcctccacttccaggccaccctccaggagaagacagaggagatccgaggcagccttgaatgcttgcgccaggcctccctggagctcaaaaac

SEQ ID NO: 760675 - DNA, 120 bp, Artificial Sequence
  ENSG00000215045_25 (sequence is synthesized)
agtcggaagctcgccaagatcctggagtttgtgttggccatgggcaactatctcaacgatggacagcccaaaaccaacaagactacgggcttcaagatcaactttctgacagagctgaac

SEQ ID NO: 760676 - DNA, 120 bp, Artificial Sequence
  ENSG00000215045_26 (sequence is synthesized)
tccaccaagacagtggatgggaagtccaccttcctgcacatccttgccaaatcgctgagccagcacttccctgaactcctgggctttgctcaggacctgcccaccgtgcccctggctgcc

SEQ ID NO: 760677 - DNA, 120 bp, Artificial Sequence
  ENSG00000215045_27 (sequence is synthesized)
aaagtgaaccaacgggccctgaccagtgacctggctgacctccatggcactatcagcgagatacaggatgcctgccagagcatttccccctctagcgaggacaagtttgcaatggtcatg

SEQ ID NO: 760678 - DNA, 120 bp, Artificial Sequence
  ENSG00000215045_28 (sequence is synthesized)
tcgtccttcctggagacggcccagccagcacttcgggcgctcgacgggctgcagcgcgaggccatggaggagctgggcaaggcgctggccttctttggggaggattccaaggccaccacc

SEQ ID NO: 760679 - DNA, 120 bp, Artificial Sequence
  ENSG00000215045_29 (sequence is synthesized)
tctgaggctttcttcggcatctttgcagagttcatgagcaaattcgagcgagcgctgagtgacctgcaggccggggagggcctgcgcagctccgggatggtttcacccctggcctggtga

SEQ ID NO: 760680 - DNA, 120 bp, Artificial Sequence
  ENSG00000215045_30 (sequence is synthesized)
ggagtcgcggcgcgctcgctccattcctgggctcggctaccccctgcccttcggcacctgccgcgccgcggtccccggctccagatggggaaggaccagggcttctctcggcactttcgg

SEQ ID NO: 760681 - DNA, 120 bp, Artificial Sequence
  ENSG00000215045_31 (sequence is synthesized)
aggtccggggccactgtgccccgggctctgagcacaccgccagcctctcctgcagctacctcagccgccgagctgtggtcgggccctcctctgccagcccttgttcctacccccaggccc

SEQ ID NO: 760682 - DNA, 120 bp, Artificial Sequence
  ENSG00000215045_32 (sequence is synthesized)
agagccagatgctgtaggagcaggtgctgagtgtgcctgcacatggaggaccgtgctctgtcggcttcttgggcccacttcccacttcgctcccaggctgtcaggggggcctggagggtg

SEQ ID NO: 760683 - DNA, 120 bp, Artificial Sequence
  ENSG00000215113_0 (sequence is synthesized)
atgagctcccccgacaaggtgtccgtttgtggggccggtttcgacctggagggtggcaaaaaggctggctcccgcacggccagccccggagccccaggggcccacagccacggcctcgat

SEQ ID NO: 760684 - DNA, 120 bp, Artificial Sequence
  ENSG00000215113_1 (sequence is synthesized)
ttgggggtgccgggcagcggcgatggcaagagcgagagcgggttcacagatccagagggcttcagcttcgagtctgagagcgaattgatagagcaaggaagggtggtgctctggggccgg

SEQ ID NO: 760685 - DNA, 120 bp, Artificial Sequence
  ENSG00000215113_2 (sequence is synthesized)
gaaggccggccaggcaccccggtggatgaccaaggggacgttgtggactactcattctacctggctgacgaaccagccgccatcgtgccgccgcccagcgtccagggacacccgttccca

SEQ ID NO: 760686 - DNA, 120 bp, Artificial Sequence
  ENSG00000215113_3 (sequence is synthesized)
gaaggtgccgctgccgaagggtcggctgagaattgggcagatgcggaggtcggtcccagtgggagagacgtgctgggccacagccctggaaaatggcagcaggcctctgccggccgtctc

SEQ ID NO: 760687 - DNA, 120 bp, Artificial Sequence
  ENSG00000215113_4 (sequence is synthesized)
cacctctgcggtcctgggccagtgcgggcctggaagaacccggaaaggggctcgaagagcagatggagcctccgcgtggatccccagcagccctctgcgaaaggccccaccaggctgcct

SEQ ID NO: 760688 - DNA, 120 bp, Artificial Sequence
  ENSG00000215113_5 (sequence is synthesized)
acccacgactctgattccgcagatgagagcagcgacttaccactgatgaaggtaggcatttgccgcaacgaaggaagccaggccaagcccggcagccccaagaagcgagcagacacatcc

SEQ ID NO: 760689 - DNA, 120 bp, Artificial Sequence
  ENSG00000215113_6 (sequence is synthesized)
agacaggcaagcttccactgcaaggagagttacctgcctgtgccgggccgtttcctgacctctgctccccgcggactcactccagtcgcagagaggccggctgtgggagagctggaggac

SEQ ID NO: 760690 - DNA, 120 bp, Artificial Sequence
  ENSG00000215113_7 (sequence is synthesized)
aaaggtggaggtcaggcccagctgctcaggagctgctgctgcaggggccctgccccagggcctttcgaggaggaagatggccggggggaagaagtccctagggggtgcctctcaactggc

SEQ ID NO: 760691 - DNA, 120 bp, Artificial Sequence
  ENSG00000215113_8 (sequence is synthesized)
cctggggagaggctttcctgcctgcggagagagactctcagccgctcccccggagccggccaccttcccgccattctctggtgtgcggccacaggggatgtccaagaaaccccaaaagcc

SEQ ID NO: 760692 - DNA, 120 bp, Artificial Sequence
  ENSG00000215113_9 (sequence is synthesized)
taagcacagcagccctgggaagaaaccagcagggaggaagaccagggagtcccaggctgcggccagagaagataatgacccaaatagagatgaggtcccaagagcccaacttcccaccca

SEQ ID NO: 760693 - DNA, 120 bp, Artificial Sequence
  ENSG00000215113_10 (sequence is synthesized)
caggccaggactgcctcgcctgtctgtgcgtcgtggagaattcagcagtagcgaccccaacatcagagctccccaacttccgggaacttcagagccctcggcctacagcccgggaggcct

SEQ ID NO: 760694 - DNA, 120 bp, Artificial Sequence
  ENSG00000215113_11 (sequence is synthesized)
cgtgcccagacgccatgcaccctccggtaaccagcagccgcctgtccatcccccaagaccggaaaggcagcagcagcccccgggagcccagggctgtcctcggtgcatctggctgcagag

SEQ ID NO: 760695 - DNA, 120 bp, Artificial Sequence
  ENSG00000215113_12 (sequence is synthesized)
ggaaattgaggaccttacacagcagctagcggccatgcagttcctcactgacaagttccaggacctttgaagttggagccagcatcttcctacaagatgaacagctgccacctttggagc

SEQ ID NO: 760696 - DNA, 120 bp, Artificial Sequence
  ENSG00000215113_13 (sequence is synthesized)
tccggagctgcagccaagcgggttccctccatatcctgttcagccagggcttcctctcttccgctgcatttgcccccttcccaacgcagttcaaagcaatttgaaataaagtcgttctca

SEQ ID NO: 760697 - DNA, 120 bp, Artificial Sequence
  ENSG00000215114_0 (sequence is synthesized)
agcgggcgccgctagccagcggaagatggcggagggcggaggccctgagcccggcgagcaggagaggaggtcttccgggccgcggcctccgagcgcgcgggatttgcagttggccttggc

SEQ ID NO: 760698 - DNA, 120 bp, Artificial Sequence
  ENSG00000215114_1 (sequence is synthesized)
agaattgtatgaagatgaagtgaagtgcaaatcttccaagtctaatagacctaaagccacagtcttcaagagcccacggacaccacctcaacggttttactcaagtgaacatgaatacag

SEQ ID NO: 760699 - DNA, 120 bp, Artificial Sequence
  ENSG00000215114_2 (sequence is synthesized)
tggattaaatatagttcgaccttcaactgggaaaattgtgaatgaacttttcaaagaggcaagggaacatggggctgtccctctgaatgaagccacaagagcttcaggtgatgataaatc

SEQ ID NO: 760700 - DNA, 120 bp, Artificial Sequence
  ENSG00000215114_3 (sequence is synthesized)
taagtcatttacaggtggaggatacagattgggtagttctttttgtaagcggtctgaatatatctatggagaaaatcagctgcaagatgttcagattttgcttaaactgtggagcaatgg

SEQ ID NO: 760701 - DNA, 120 bp, Artificial Sequence
  ENSG00000215114_4 (sequence is synthesized)
tttcagtttagatgatggagaattgagaccttacaatgaaccaacaaatgctcaatttctggagtctgttaagagaggagagattcccctggagcttcagcgccttgttcatggtggcca

SEQ ID NO: 760702 - DNA, 120 bp, Artificial Sequence
  ENSG00000215114_5 (sequence is synthesized)
agtgaatttggatatggaggatcatcaggatcaagaatacataaaacctagattgaggttcaaggcttttagtggagaagggcaaaaacttggaagccttacacctgaaatagtcagtac

SEQ ID NO: 760703 - DNA, 120 bp, Artificial Sequence
  ENSG00000215114_6 (sequence is synthesized)
accttcctctccagaagaggaggataaatcaatacttaatgcagttgttcttattgatgattcagtgccaacaacaaaaattcaaatcaggttagcagatgggagtcgtttgatacaaag

SEQ ID NO: 760704 - DNA, 120 bp, Artificial Sequence
  ENSG00000215114_7 (sequence is synthesized)
attcaatagtacacacaggatcctggatgtccggaactttattgtacagtctcgtcctgaatttgcggctcttgactttattcttgtgacttcatttccgaataaagagctaacagatga

SEQ ID NO: 760705 - DNA, 120 bp, Artificial Sequence
  ENSG00000215114_8 (sequence is synthesized)
aagcctgacactgctagaagcagatattcttaacactgtgttactccagcaactaaaataatattgttcctgtccatgcagtagcatgtgggaatagatgatgtgccgtattaataagga

SEQ ID NO: 760706 - DNA, 120 bp, Artificial Sequence
  ENSG00000215114_9 (sequence is synthesized)
caatacttcagcattaaaaacagccaaattatttttattatttttacagataaattttggttttattgttattctgtcttccaatctgaatatagacaaatttggattaggaatagacct

SEQ ID NO: 760707 - DNA, 120 bp, Artificial Sequence
  ENSG00000215114_10 (sequence is synthesized)
tgagataagtatgtttgagtttttagttgaaggactggcttatgttgatagtttttggatttctaggcaaatgagttgttacatgcttagtgttaatgtaacaacatttgtttgcagaga

SEQ ID NO: 760708 - DNA, 120 bp, Artificial Sequence
  ENSG00000215114_11 (sequence is synthesized)
aaaatgaacaaaacccctttttgataaatgcatttggtaaaatttgcactaaagtttcttgatgcagcattgaccaacagccattaagaaatcttttgatcaaataagttgaaaatttgt

SEQ ID NO: 760709 - DNA, 120 bp, Artificial Sequence
  ENSG00000215114_12 (sequence is synthesized)
ttgtctataatatatactgaaacgtgtcttttgattttgaaattgtttgatcatacaataattatttctcctattaagattttacacatcctttttacttactgatttagatatattact

SEQ ID NO: 760710 - DNA, 120 bp, Artificial Sequence
  ENSG00000215114_13 (sequence is synthesized)
tcagaaactacagttttgccttgtattttacagaattatgactgttgtgaacttaaacagaaacacataaaggtcagcaattctttttttttttttttttgatatggagttttgctcttg

SEQ ID NO: 760711 - DNA, 74 bp, Artificial Sequence
  ENSG00000215114_14 (sequence is synthesized)
ccatgcctggctaatttttgtacttttgctagagacagcgtttctctgtgttgatcaggctggtctcgaactcc

SEQ ID NO: 760712 - DNA, 120 bp, Artificial Sequence
  ENSG00000215114_15 (sequence is synthesized)
ggcatgagccaccacgcccagcctaaaggtcagcagttcttaagaagatatggtaaacagcaacaatattttaaaatcaagtaattacagttcctcccagagcttgcgttgatcacattc

SEQ ID NO: 760713 - DNA, 120 bp, Artificial Sequence
  ENSG00000215114_16 (sequence is synthesized)
atttattcattcaacacatttttctaggaaactcactgtatacactaaacactattctgtgtgctcaacctagaatgtcttctccagaacaagactagtgtagaaatacaggaatgtaaa

SEQ ID NO: 760714 - DNA, 120 bp, Artificial Sequence
  ENSG00000215114_17 (sequence is synthesized)
ttctgtcagacggactagatctaaagaattaccagcataaatgtttgcatttctgctgaagccagaagcttttccttcttcctagacaccatttcatccttaattattacttctggttag

SEQ ID NO: 760715 - DNA, 120 bp, Artificial Sequence
  ENSG00000215114_18 (sequence is synthesized)
ttttccattgccaccataacaagttacaaaatgtggcttaaaatagcacaaatttattatcttcacaattctgtaggttaggagtccaggttaagagtttcgcggtgccaagatcaattt

SEQ ID NO: 760716 - DNA, 120 bp, Artificial Sequence
  ENSG00000215114_19 (sequence is synthesized)
gtcattccaccttctacaggacatcctcattccttggcttgtgacctccttcttccatcttaaaaaccagtgctgtttcatctctatgacccttctgttaccacatctctctgacaccag

SEQ ID NO: 760717 - DNA, 120 bp, Artificial Sequence
  ENSG00000215114_20 (sequence is synthesized)
tgtggagaggttctctgcaggactcatgattaaatgaggcccaccggatatccaatctaggcttatctccttgtcttgaaatccatagtaaccttaattacatctgcaaaatctctttta

SEQ ID NO: 760718 - DNA, 120 bp, Artificial Sequence
  ENSG00000215114_21 (sequence is synthesized)
ccatctaaggttacatacaggtttggagattaggacattaacattttacatggaacattattcttgcctactacagttcccacccaccccccgctccactcctgtgttaaagattcagat

SEQ ID NO: 760719 - DNA, 120 bp, Artificial Sequence
  ENSG00000215114_22 (sequence is synthesized)
tcatcacaaataaatttacatcactcataggtgctcaaaagtcacaatccattattacagcatcaactctaaatccaaaatcttatctgagtctcaccaactcaaaagtctcaaatctca

SEQ ID NO: 760720 - DNA, 120 bp, Artificial Sequence
  ENSG00000215114_23 (sequence is synthesized)
cattgaagccatctaaattaagtttgggagaggatctgtgtgtgatttctgggacataattccaactgtgcacttgtgaacctagaaaacaagttatctgttcccaagtatgatggcatg

SEQ ID NO: 760721 - DNA, 120 bp, Artificial Sequence
  ENSG00000215114_24 (sequence is synthesized)
acaggcagacaataatagttacacacgttcctgttcaaaaagcagaaacagatggaaaaaggagccatcagcaccaatcaatttacaaaaccagcgaggcacccttctttaagtttcaag

SEQ ID NO: 760722 - DNA, 120 bp, Artificial Sequence
  ENSG00000215114_25 (sequence is synthesized)
gcctgggagtaatcttcagctcactgctgttctctgggcttgttgactgtctcagagtcatctttactttttcacaaaaggtagcacacgtttgcagctgagtatcaacttatcagtttg

SEQ ID NO: 760723 - DNA, 120 bp, Artificial Sequence
  ENSG00000215114_26 (sequence is synthesized)
ttcttcttttatattctctaaagctttctgttaaaaatggtggtgcttctgctgctataacgttgtcaagaaacttgtgggtcttttacatatgtcacagggatgcactcatttagatag

SEQ ID NO: 760724 - DNA, 120 bp, Artificial Sequence
  ENSG00000215114_27 (sequence is synthesized)
gaggctcctcacgtatctttcctggaaaatcctgtctctgtttttggctttttctgaaatagctgagaggatctatgattcacacccttaatatcttcaaagagtcttgtgtgtgacctg

SEQ ID NO: 760725 - DNA, 120 bp, Artificial Sequence
  ENSG00000215114_28 (sequence is synthesized)
atattcagaccttttgatgtttctgaagtattagcaaaaggttatacagccatatcttcatcactttctctagagtaaaggctgtcctgacggtgaatcttagttttagtggcttttgcc

SEQ ID NO: 760726 - DNA, 120 bp, Artificial Sequence
  ENSG00000215114_29 (sequence is synthesized)
atttgaataggccgcgaatttcccaaatcatcaagtcctggtttctttatatttaacaggtcttccctcaatctacctctttccacattttactataatcagcaagaagacagcaggctg

SEQ ID NO: 760727 - DNA, 120 bp, Artificial Sequence
  ENSG00000215114_30 (sequence is synthesized)
taccttccacagcttgcttggaaatatcctcagctaaatattgaagtcatcacttaaaagttctgctttacacataacggcaggacacaactcagcttagcttttcgccactatgtaaca

SEQ ID NO: 760728 - DNA, 120 bp, Artificial Sequence
  ENSG00000215114_31 (sequence is synthesized)
aggactcctttcctccacttctccagtaacatattcctcattttttaccaacagtctattcatgatgatttagatattctatggcaatcgaggtattctctattatgctcctttcttcaa

SEQ ID NO: 760729 - DNA, 120 bp, Artificial Sequence
  ENSG00000215114_32 (sequence is synthesized)
ggccgccctagcattaacattccatatttctactaacagtctgtttaaggcagtttagcttcttttctggcatgctcctcagaattcttccagcctccacctactgcccaattccagagc

SEQ ID NO: 760730 - DNA, 120 bp, Artificial Sequence
  ENSG00000215114_33 (sequence is synthesized)
cacttttctacttttaggtatttgttacagcagcacctcaagtacctagaaaactcttttatgcctgcttctctgccagatgacttgaatatggtactagatttggaattcacctttctc

SEQ ID NO: 760731 - DNA, 120 bp, Artificial Sequence
  ENSG00000215114_34 (sequence is synthesized)
cagggtcactgtttatttcaaagaggtgaatttacctgtgctagggttttcacactgggagtgctaccagaactaccacaggatgaaagtggtgagcccaccactgcagagaagttttct

SEQ ID NO: 760732 - DNA, 120 bp, Artificial Sequence
  ENSG00000215114_35 (sequence is synthesized)
cagtgccgtaatatagaggaattctcaaaataagccctactccttttcacttactgaaaacaacttggataatgtgtaacagccagccccatttcaaaaagattaccaggggtaaaacaa

SEQ ID NO: 760733 - DNA, 120 bp, Artificial Sequence
  ENSG00000215114_36 (sequence is synthesized)
ctttttcatgggtcaaaatcatcttccgaagaaaatgatttcttaaaagaattgaacattgtaaatcaaagggcattgtcctgttttggattaacaaaacaggaaaaataaccaatcctt

SEQ ID NO: 760734 - DNA, 120 bp, Artificial Sequence
  ENSG00000215114_37 (sequence is synthesized)
gtaaaattatttgaaattttcttgtttttatcagttgagtgcctatagatgcacatacaaaaacaactgccatttttgtatataatagtcttccaagatagagatttacattaggagaga

SEQ ID NO: 760735 - DNA, 120 bp, Artificial Sequence
  ENSG00000215114_38 (sequence is synthesized)
attaaacatccaggagggatgaacagtatttcatgtgtgctatgtagtgttttgcttcattgagagtcattttcatgaattatttttactactgcagtcatcttaaatttataatcatct

SEQ ID NO: 760736 - DNA, 120 bp, Artificial Sequence
  ENSG00000215114_39 (sequence is synthesized)
caaaaaagatgtcacaatgaacagacaaccatctgtgaggtcagtcattttgcatgatgtatgtaatcaaaaagtttgaaatgtctgcttactaataaagaatgttttcactgaaactta

SEQ ID NO: 760737 - DNA, 120 bp, Artificial Sequence
  ENSG00000215114_40 (sequence is synthesized)
cattgcatgtatgcctgaaattcagcaacttatgttagaaatcttttaatgtggcattactgctggcagaagatttcaaaaggttagtttgaagttataatttgtgaaagtaaactcaga

SEQ ID NO: 760738 - DNA, 120 bp, Artificial Sequence
  ENSG00000215114_41 (sequence is synthesized)
tattcagtgctctcacccatccaaagaacattgtaacttaccagctcttcttgctaaaggatgaggaatcaagtgattttgctatgataataaaagcttttctgtgttatgattaaacta

SEQ ID NO: 760739 - DNA, 120 bp, Artificial Sequence
  ENSG00000215114_42 (sequence is synthesized)
gcagcgggcgccgctagccagcggaagatggcggagggcggaggccctgagcccggcgagcaggagaggaggtcttccgggccgcggcctccgagcgcgcgggatttgcagaacttaata

SEQ ID NO: 760740 - DNA, 120 bp, Artificial Sequence; identical to SEQ ID NO: 760683
  ENSG00000215115_0 (sequence is synthesized)

SEQ ID NO: 760741 - DNA, 120 bp, Artificial Sequence; identical to SEQ ID NO: 760684
  ENSG00000215115_1 (sequence is synthesized)

SEQ ID NO: 760742 - DNA, 120 bp, Artificial Sequence; identical to SEQ ID NO: 760685
  ENSG00000215115_2 (sequence is synthesized)

SEQ ID NO: 760743 - DNA, 120 bp, Artificial Sequence; identical to SEQ ID NO: 760686
  ENSG00000215115_3 (sequence is synthesized)

SEQ ID NO: 760744 - DNA, 120 bp, Artificial Sequence; identical to SEQ ID NO: 760687
  ENSG00000215115_4 (sequence is synthesized)

SEQ ID NO: 760745 - DNA, 120 bp, Artificial Sequence; identical to SEQ ID NO: 760688
  ENSG00000215115_5 (sequence is synthesized)

SEQ ID NO: 760746 - DNA, 120 bp, Artificial Sequence; identical to SEQ ID NO: 760689
  ENSG00000215115_6 (sequence is synthesized)

SEQ ID NO: 760747 - DNA, 120 bp, Artificial Sequence; identical to SEQ ID NO: 760690
  ENSG00000215115_7 (sequence is synthesized)

SEQ ID NO: 760748 - DNA, 120 bp, Artificial Sequence; identical to SEQ ID NO: 760691
  ENSG00000215115_8 (sequence is synthesized)

SEQ ID NO: 760749 - DNA, 120 bp, Artificial Sequence; identical to SEQ ID NO: 760692
  ENSG00000215115_9 (sequence is synthesized)

SEQ ID NO: 760750 - DNA, 120 bp, Artificial Sequence; identical to SEQ ID NO: 760693
  ENSG00000215115_10 (sequence is synthesized)

SEQ ID NO: 760751 - DNA, 120 bp, Artificial Sequence; identical to SEQ ID NO: 760694
  ENSG00000215115_11 (sequence is synthesized)

SEQ ID NO: 760752 - DNA, 120 bp, Artificial Sequence; identical to SEQ ID NO: 760695
  ENSG00000215115_12 (sequence is synthesized)

SEQ ID NO: 760753 - DNA, 120 bp, Artificial Sequence; identical to SEQ ID NO: 760696
  ENSG00000215115_13 (sequence is synthesized)

SEQ ID NO: 760754 - DNA, 120 bp, Artificial Sequence; identical to SEQ ID NO: 408635
  ENSG00000215126_0 (sequence is synthesized)

SEQ ID NO: 760755 - DNA, 120 bp, Artificial Sequence
  ENSG00000215126_1 (sequence is synthesized)
cggtacggcgtgttggtcccagcggttcagctgaggtagggacgtgctgtaggccggaatgttaccggctgttggatctgtggatgaggaagaggatcctgcggaggaggattgtcctga

SEQ ID NO: 760756 - DNA, 120 bp, Artificial Sequence; identical to SEQ ID NO: 408637
  ENSG00000215126_2 (sequence is synthesized)

SEQ ID NO: 760757 - DNA, 120 bp, Artificial Sequence; identical to SEQ ID NO: 408638
  ENSG00000215126_3 (sequence is synthesized)

SEQ ID NO: 760758 - DNA, 120 bp, Artificial Sequence; identical to SEQ ID NO: 408639
  ENSG00000215126_4 (sequence is synthesized)

SEQ ID NO: 760759 - DNA, 120 bp, Artificial Sequence
  ENSG00000215126_5 (sequence is synthesized)
agaccctggtgcagtggcttctatgttttgggttgatgccgaattagggagtgatatttaccttgatggtatcataactattgtggattcaaaatatggattaaaacatttaacagaaga

SEQ ID NO: 760760 - DNA, 120 bp, Artificial Sequence
  ENSG00000215126_6 (sequence is synthesized)
gaaacctgatggccttatcaatgaagctactaggcaagttgctttggcagatatcattctcattaataaaacagacttggtcccagaagaagatgtaaagaaattaagaacgacacttag

SEQ ID NO: 760761 - DNA, 120 bp, Artificial Sequence
  ENSG00000215126_7 (sequence is synthesized)
aaacttcagcatgtgccaggaacacaacctcaccttgatcagagtattgttacaatcacatttgacgtaccaggaaatgcaaaggaagaacatcttaatatgtttattcagaatcttctg

SEQ ID NO: 760762 - DNA, 120 bp, Artificial Sequence; identical to SEQ ID NO: 710286
  ENSG00000215126_8 (sequence is synthesized)

SEQ ID NO: 760763 - DNA, 120 bp, Artificial Sequence; identical to SEQ ID NO: 710287
  ENSG00000215126_9 (sequence is synthesized)

SEQ ID NO: 760764 - DNA, 120 bp, Artificial Sequence; identical to SEQ ID NO: 710288
  ENSG00000215126_10 (sequence is synthesized)

SEQ ID NO: 760765 - DNA, 120 bp, Artificial Sequence; identical to SEQ ID NO: 710289
  ENSG00000215126_11 (sequence is synthesized)

SEQ ID NO: 760766 - DNA, 120 bp, Artificial Sequence
  ENSG00000215126_12 (sequence is synthesized)
acaatatccttttttttaaagaatggtatttcacaaaaatatcttttgaaattggctttggagtttacatatactgaacatgaaagtttataataatgatgatacaactttcaacattgt

SEQ ID NO: 760767 - DNA, 120 bp, Artificial Sequence; identical to SEQ ID NO: 710291
  ENSG00000215126_13 (sequence is synthesized)

SEQ ID NO: 760768 - DNA, 120 bp, Artificial Sequence
  ENSG00000215126_14 (sequence is synthesized)
tgttgccctgtagaaacttaaggtataaggttgacctgcttcaagaacgttagggaatcacatatattgttgatggctaattgttatataaatggtaatacataaaattagtccccagtg

SEQ ID NO: 760769 - DNA, 120 bp, Artificial Sequence
  ENSG00000215126_15 (sequence is synthesized)
actctttcctaatgtcagtcttccctaactttacccaggatggttaattcactttcccatggatgcatcctgtcagttcctgtctttactcataatgtattctcactctgccaatccctg

SEQ ID NO: 760770 - DNA, 120 bp, Artificial Sequence
  ENSG00000215126_16 (sequence is synthesized)
agttctttcttgttctgtttttttttttaatttattctatagagcctattctgtctctccccccttcctatgtgaagtcttccctgactcaagtggtctcagttttccctgaactcttgt

SEQ ID NO: 760771 - DNA, 120 bp, Artificial Sequence
  ENSG00000215126_17 (sequence is synthesized)
tgacttcatcttccttaactgtcaaccatgcattgtcttccagcttgcttgtatatcttctttgtccatagccaaggctgatcagcataggacaatcaggacaatatgaatgatgctgaa

SEQ ID NO: 760772 - DNA, 120 bp, Artificial Sequence
  ENSG00000215126_18 (sequence is synthesized)
atatgtgctaacagtcattttgctgactgttctggagactcccattccttttgaaaacaaagatggacttttcaaatgaagttatagttcagggactttgttttgaattattttgtaaga

SEQ ID NO: 760773 - DNA, 120 bp, Artificial Sequence
  ENSG00000215126_19 (sequence is synthesized)
cctgaactaataaaagccctatacagagagacattcggtagctattattattggttatctttaatgtgtacaatgctttgagcgtgatggctcaaaattactattcttagtatttataag

SEQ ID NO: 760774 - DNA, 120 bp, Artificial Sequence; identical to SEQ ID NO: 710325
  ENSG00000215126_20 (sequence is synthesized)

SEQ ID NO: 760775 - DNA, 120 bp, Artificial Sequence
  ENSG00000215126_21 (sequence is synthesized)
gtgtgtatttctttttgtcaggctgtaatacatatgcatacatgtttcttcttgatatgggagaacttctatgtggtgctgatgggaaatatttttaatactccactctccttacccaag

SEQ ID NO: 760776 - DNA, 120 bp, Artificial Sequence
  ENSG00000215126_22 (sequence is synthesized)
tttgtttttctcctgagccctagtttgaaagctgtatattgttggagtggagggaaggagaagggaaaagtggtgattcagagagccaaatggggcaatgtggcttttaggctctgctct

SEQ ID NO: 760777 - DNA, 120 bp, Artificial Sequence; identical to SEQ ID NO: 710328
  ENSG00000215126_23 (sequence is synthesized)

SEQ ID NO: 760778 - DNA, 120 bp, Artificial Sequence; identical to SEQ ID NO: 710329
  ENSG00000215126_24 (sequence is synthesized)

SEQ ID NO: 760779 - DNA, 120 bp, Artificial Sequence
  ENSG00000215126_25 (sequence is synthesized)
ataccactaaaggcagaagagaatgaaatcatcccacccactgacccgttcccaatctgagcatatggatagggcccaaagcagcaaagaattggacaacttaaaatgacagctctctat

SEQ ID NO: 760780 - DNA, 120 bp, Artificial Sequence
  ENSG00000215126_26 (sequence is synthesized)
caagtggatgagtgagcaagtgactaaaatcttctgtgaattcttcagtgtatggtgcttgccaatgcatctgagaatctagggactttctgaaatagtacttccttgctatgaggactg

SEQ ID NO: 760781 - DNA, 120 bp, Artificial Sequence
  ENSG00000215126_27 (sequence is synthesized)
tctgaaatagtacttccttgctatgaggactgaagttggattagaatccttttcaatgaagatcagatgtcctgagtagaattcttactattggagttgatctctctaatgtattagatc

SEQ ID NO: 760782 - DNA, 120 bp, Artificial Sequence
  ENSG00000215126_28 (sequence is synthesized)
ttttttccttttttttttttttcttggcgattttaatgctttggaaaagatctcatggttttatctccaaaggaggaaattaatttgatgccatggaaattagttttctagtcgtatgcc

SEQ ID NO: 760783 - DNA, 120 bp, Artificial Sequence
  ENSG00000215126_29 (sequence is synthesized)
aaattagttttctagtcgtatgccttgaatgagtgaagaatttctttttcatggtggtactaaatttggggaaagctatagaaactttcatctggaagcttacacttttcctcttttttg

SEQ ID NO: 760784 - DNA, 120 bp, Artificial Sequence
  ENSG00000215126_30 (sequence is synthesized)
aaaatttggtgagagacttggatattttattattttctgtaaaagagtgtaatttgttatacaggtctaatattgatccttttttggaagtatggaaagaatctgagtataaagcagaat

SEQ ID NO: 760785 - DNA, 120 bp, Artificial Sequence
  ENSG00000215126_31 (sequence is synthesized)
tacctctggatggcatgtattctcaaggacactgtcacagtgaaacagtttatttagaagcttgtgtttccaaactgttgaatttgatattcacaaaattggcatgtgtaaactttatta

SEQ ID NO: 760786 - DNA, 120 bp, Artificial Sequence
  ENSG00000215126_32 (sequence is synthesized)
attcacaaaattggcatgtgtaaactttattaaactttaagctatttcctaagatgaagatgacaaacttggagggaaacttcattcatttggtttatttttatttttatttttatttat

SEQ ID NO: 760787 - DNA, 81 bp, Artificial Sequence
  ENSG00000215126_33 (sequence is synthesized)
ttatttatttttatctttttgagacagaatctcactctggtttgagacagaatctcactctgtcccccaagttggagtgcg

SEQ ID NO: 760788 - DNA, 87 bp, Artificial Sequence
  ENSG00000215126_34 (sequence is synthesized)
tgtatttttagtagagacggtttcgccacattggccaggttggtgtcaaactcctggcctcaagcccccgtgccccttgtttgtgac

SEQ ID NO: 760789 - DNA, 120 bp, Artificial Sequence
  ENSG00000215126_35 (sequence is synthesized)
tcccaaagtggagcccccgtgccccttgtttgtgacctgtcaatataaatatgctcagtagcggggggaggggtggggggtgaaaaaggaaatatgtttaatattaagactttggccttt

SEQ ID NO: 760790 - DNA, 120 bp, Artificial Sequence
  ENSG00000215126_36 (sequence is synthesized)
tagtgtaaactgatattcaaaaatttcttcatagaacatttgcttctttgcttgatcatttttctaattctgtacatctaaaatgcccagaatttgagttgctgttatagtctactaaca

SEQ ID NO: 760791 - DNA, 120 bp, Artificial Sequence
  ENSG00000215126_37 (sequence is synthesized)
tagaactttggagtaataagatgggaatttgtctctcttttgccaagacaagcattcgtaatctaacacagtattgttgccacgagtacgagtatgtgatagactgttgagaataaagaa

SEQ ID NO: 760792 - DNA, 120 bp, Artificial Sequence
  ENSG00000215126_38 (sequence is synthesized)
agcaggcacagttggtcagtcctaagataaaggagatgttttttcttatatgtttgtgcattaaagaaaaaaaaatcttgaatctgaccaatgatgttttttttccttgtaagaaaattt

SEQ ID NO: 760793 - DNA, 120 bp, Artificial Sequence
  ENSG00000215126_39 (sequence is synthesized)
aacaaatgtttggcaagcttctggaatctaaatttgaaattatacatttgtcattttctttaaatatttcttcaccttagctttgattatgagaaatcactgtcctctgctgttcttttt

SEQ ID NO: 760794 - DNA, 73 bp, Artificial Sequence
  ENSG00000215126_40 (sequence is synthesized)
ctttgattatgagaaatcactgtcctctgctgttctttttttttttttttcttttgaggcggagtctcactct

SEQ ID NO: 760795 - DNA, 76 bp, Artificial Sequence
  ENSG00000215126_41 (sequence is synthesized)
gtcctctgtgattttctgggcttatgttaaaattataactcaatcaccagtctttataaatttgcttttttatatt

SEQ ID NO: 760796 - DNA, 120 bp, Artificial Sequence
  ENSG00000215126_42 (sequence is synthesized)
aactcaatcaccagtctttataaatttgcttttttatatttaaaccaaacctaatgctaattgtgatatgttatttattctcacctgatttgaatcattggattcaattaaatgagttta

SEQ ID NO: 760797 - DNA, 120 bp, Artificial Sequence
  ENSG00000215126_43 (sequence is synthesized)
attatcattaagtaattctaagagaaataatgtctattcggatggtgggaattttctttctacatgcagccccattctgaatgaatgaaatcaaatcacgtgaagatcagggtcctagag

SEQ ID NO: 760798 - DNA, 120 bp, Artificial Sequence
  ENSG00000215126_44 (sequence is synthesized)
taacttaatattttgtacattggttatttgactcctcatttttatattacatgttatatcaagggagggggtataaaagaaatacaaaaattgcagaggtatctggaatgtacctatttg

SEQ ID NO: 760799 - DNA, 120 bp, Artificial Sequence
  ENSG00000215126_45 (sequence is synthesized)
ttaattctatttgtcatttcttttgtttcatcttttgagtaataagctgcttggaaaagtttctgttctttagctgattttttagctataaaaatgtatttgaaaagctcataaatttca

SEQ ID NO: 760800 - DNA, 120 bp, Artificial Sequence
  ENSG00000215126_46 (sequence is synthesized)
gcattgaaaagataattgaaagtttaaaaaaaacctaattcattgaagtaataaccaaataattttcaatcttgattcaactgtgattcaaatcttacaccatttgcccacttctatgaa

SEQ ID NO: 760801 - DNA, 120 bp, Artificial Sequence
  ENSG00000215126_47 (sequence is synthesized)
ttttatgtataaaattttttaagagtcagagtttttttttcttgattaattggatgtatttcacagaatttccaactgctcacgttagttttcttccttttagagttgatctctctaatg

SEQ ID NO: 760802 - DNA, 120 bp, Artificial Sequence
  ENSG00000215126_48 (sequence is synthesized)
tgccttgtctcagatgagactttggacttcggactgtggacttttgagttaacactgaaatgaattaatgctgaaatgaattaagactttgggagacggttgagaagccatgactcattt

SEQ ID NO: 760803 - DNA, 76 bp, Artificial Sequence
  ENSG00000215126_49 (sequence is synthesized)
ttaacactgaaatgaattaatgctgaaatgaattaagactttgggagacggttgagaagccatgactcattttaaa

SEQ ID NO: 760804 - DNA, 120 bp, Artificial Sequence
  ENSG00000215126_50 (sequence is synthesized)
tcaggaggacacagcttttgagataccatcttggaagcagagaccagccctcactagacacaaacttcctggcaccttgattttggacttcatagcctctagaactgtgctgggaagaca

SEQ ID NO: 760805 - DNA, 120 bp, Artificial Sequence
  ENSG00000215126_51 (sequence is synthesized)
ccaggagctctgaggctcacagctggcagtctagttccactcagtctctacttgagaaattctttctttggaagtacagcagaggccttagccactcatctgctggcagaggtagcagaa

SEQ ID NO: 760806 - DNA, 120 bp, Artificial Sequence
  ENSG00000215126_52 (sequence is synthesized)
aattatcaccgggtatttagttattcagaggctgctctactgagaagatgaacaaatttcttgtccaaaacaatgtatttcaaacgtgcccctcgggcctttcccgtgttgctcactggt

SEQ ID NO: 760807 - DNA, 120 bp, Artificial Sequence; identical to SEQ ID NO: 408665
  ENSG00000215126_53 (sequence is synthesized)

SEQ ID NO: 760808 - DNA, 120 bp, Artificial Sequence
  ENSG00000215126_54 (sequence is synthesized)
gagttgctaattccaaaaaaacagcacatatgctgaggaaagtataatacctaatatatatggtttaagcaatgtaaaattccatgaatatgttcctttcatcttaaaatttgtgattta

SEQ ID NO: 760809 - DNA, 120 bp, Artificial Sequence; identical to SEQ ID NO: 710350
  ENSG00000215126_55 (sequence is synthesized)

SEQ ID NO: 760810 - DNA, 120 bp, Artificial Sequence; identical to SEQ ID NO: 330307
  ENSG00000215126_56 (sequence is synthesized)

SEQ ID NO: 760811 - DNA, 120 bp, Artificial Sequence
  ENSG00000215126_57 (sequence is synthesized)
aactttctttaggtgccagcattattttcatattaggaagcaggagaaagttaaggaactctaaacaatactagaatggttatatatatatttaagtttgtattaaacctgttggaatgg

SEQ ID NO: 760812 - DNA, 120 bp, Artificial Sequence
  ENSG00000215126_58 (sequence is synthesized)
taaagaaatttactgacatatttaaccatacaaaatagtgttgctaaaagactagtttttctctttattctgtgcatatgtatatatatgaatgtgtgtttttttttaagaaattttaaa

SEQ ID NO: 760813 - DNA, 120 bp, Artificial Sequence
  ENSG00000215126_59 (sequence is synthesized)
aaaacttaatctgccagcttttctctattggaatttgcgaacaacttgtaaaattggaattacagaatattagaatagtcagttatggaaagtcacttcattatccttgtgtcactaaat

SEQ ID NO: 760814 - DNA, 120 bp, Artificial Sequence
  ENSG00000215126_60 (sequence is synthesized)
gctgaaggtacagtttactgttgcagacttttggacaaagtccttttcttggctgttataaaaactatatttggttttaaacagaaacactggttttagtacaaatcatctttgtctact

SEQ ID NO: 760815 - DNA, 120 bp, Artificial Sequence
  ENSG00000215126_61 (sequence is synthesized)
ttcatttttctttattattttcatgactgaaaaggagctttggaaatcactgcataaggcttgatttatttgcacaactttctttagggttgcagctagaacaaacctgtgtgctttgaa

SEQ ID NO: 760816 - DNA, 120 bp, Artificial Sequence
  ENSG00000215126_62 (sequence is synthesized)
atgttaccttctgctctctgttcccaagtacagagaaataatgttgcaaatctcacttctgctgaacattatgcttcctgatgcatttagcagacactaaacatttgttgtactctaaac

SEQ ID NO: 760817 - DNA, 120 bp, Artificial Sequence
  ENSG00000215126_63 (sequence is synthesized)
aaagttacaaaggactagaagaattcttgttctgtatttagaaacccactcacattacttgatatttgggtatttaagtcatgaaaggtatttcttctaggaagcagtgattctaaagtg

SEQ ID NO: 760818 - DNA, 120 bp, Artificial Sequence
  ENSG00000215126_64 (sequence is synthesized)
tatgcttaaccagtcagttgagtgtctactcttgtgtgttcacaagtgtgcacaaagtttttggtaaattaagaatattatttcaaataaattaatttcatccccataggagccagttta

SEQ ID NO: 760819 - DNA, 120 bp, Artificial Sequence
  ENSG00000215126_65 (sequence is synthesized)
gattgcaacccatttctaaaacaaattatttaatataaccaaactcctttaacttctcaacttttcccactaaaactgtgaaacattatataaaatctttaatcaataggatatgataca

SEQ ID NO: 760820 - DNA, 120 bp, Artificial Sequence
  ENSG00000215126_66 (sequence is synthesized)
tatttcatcattttgtttcaggttttggttgtgataaataacactgaaaaaccatcctaatatatgtattaactttatcattagaaaaggggattgttcaaaaaaaaaatcaatacacag

SEQ ID NO: 760821 - DNA, 120 bp, Artificial Sequence; identical to SEQ ID NO: 330318
  ENSG00000215126_67 (sequence is synthesized)

SEQ ID NO: 760822 - DNA, 120 bp, Artificial Sequence; identical to SEQ ID NO: 710358
  ENSG00000215126_68 (sequence is synthesized)

SEQ ID NO: 760823 - DNA, 120 bp, Artificial Sequence
  ENSG00000215126_69 (sequence is synthesized)
aagtgaaaaatatatttgaaagggatatcatgtgccacttaaacagattaaccattcaggtcctcttttaaaactaaataagcttgtggtcaatgtttcatctttgtcacgttacaatgt

SEQ ID NO: 760824 - DNA, 120 bp, Artificial Sequence; identical to SEQ ID NO: 710360
  ENSG00000215126_70 (sequence is synthesized)

SEQ ID NO: 760825 - DNA, 120 bp, Artificial Sequence; identical to SEQ ID NO: 710361
  ENSG00000215126_71 (sequence is synthesized)

SEQ ID NO: 760826 - DNA, 120 bp, Artificial Sequence; identical to SEQ ID NO: 587595
  ENSG00000215126_72 (sequence is synthesized)

SEQ ID NO: 760827 - DNA, 120 bp, Artificial Sequence
  ENSG00000215126_73 (sequence is synthesized)
tcaaaatatttgtcttttgtttttatattacttgaaggattacttggctaggtataaaatttatcagtcacacttttttccccctcaactttgtaaatgttgttccataatctcctagtg

SEQ ID NO: 760828 - DNA, 120 bp, Artificial Sequence; identical to SEQ ID NO: 710344
  ENSG00000215126_74 (sequence is synthesized)

SEQ ID NO: 760829 - DNA, 120 bp, Artificial Sequence; identical to SEQ ID NO: 710345
  ENSG00000215126_75 (sequence is synthesized)

SEQ ID NO: 760830 - DNA, 120 bp, Artificial Sequence; identical to SEQ ID NO: 710346
  ENSG00000215126_76 (sequence is synthesized)

SEQ ID NO: 760831 - DNA, 120 bp, Artificial Sequence
  ENSG00000215126_77 (sequence is synthesized)
aaattataatatgcccttagttcttctaagaacattttccttgtttattaccatgaatacttttttttggtcaaattattagatcctctacttcatgacaccagtttttttaatactgaa

SEQ ID NO: 760832 - DNA, 120 bp, Artificial Sequence; identical to SEQ ID NO: 710348
  ENSG00000215126_78 (sequence is synthesized)

SEQ ID NO: 760833 - DNA, 120 bp, Artificial Sequence; identical to SEQ ID NO: 710349
  ENSG00000215126_79 (sequence is synthesized)

SEQ ID NO: 760834 - DNA, 120 bp, Artificial Sequence
  ENSG00000215126_80 (sequence is synthesized)
acagcatttaatgcaatagaagcaatgaatgaagttacccagagaagcatttaacagaagagaaacctgatggccttatcaatgaagctactagatccataaatggactaggacaaatct

SEQ ID NO: 760835 - DNA, 83 bp, Artificial Sequence
  ENSG00000215126_81 (sequence is synthesized)
acatgcagtgattgatttttcttacttcaagtggatgagtgagcaagtgactaaaatcttctgtgaattcttcagtgatagtc

SEQ ID NO: 760836 - DNA, 120 bp, Artificial Sequence
  ENSG00000215131_0 (sequence is synthesized)
aggcaggggagagcagggccctgctgcacccaagtcctggttgctcctccccaccacactggccctccatggaagccttggtctgtgcattttctgagctgcacataagagaagatgcag

SEQ ID NO: 760837 - DNA, 120 bp, Artificial Sequence
  ENSG00000215131_1 (sequence is synthesized)
tgagccaggcccaaggacgccccggccaccctgacgcaccccccaacatctacgaggggggcctggggtccccgcagccgcagtgccccagtgcccagggaagcaagcccaagaacttcc

SEQ ID NO: 760838 - DNA, 120 bp, Artificial Sequence
  ENSG00000215131_2 (sequence is synthesized)
ggctgcgccacctccggggcctgggcctctacctggagagccacccgccacccactggccagtgtgagagccactggctgggccggcttatggctgggggctgcctgccacagcctgagg

SEQ ID NO: 760839 - DNA, 120 bp, Artificial Sequence
  ENSG00000215131_3 (sequence is synthesized)
gcacagcctgggccctggacctgccacaggggactctgggcccacgtaacagcctctgttcagcccttctggaagcccgattgcccagggacagcctgggaagcagtgcttccagttcca

SEQ ID NO: 760840 - DNA, 120 bp, Artificial Sequence
  ENSG00000215131_4 (sequence is synthesized)
acaagggtgccctcccccagcctagtccttctaggctcaggcccaagaggtcctgggggacctgggaagaggccatgtgtcccttgtgcaagagaacccgctctggggccctggagaggc

SEQ ID NO: 760841 - DNA, 120 bp, Artificial Sequence
  ENSG00000215131_5 (sequence is synthesized)
catagggatcccgagtgccaggactgggtacaggaggggcaggatggccgaggaggcagcctgagcaggaggggctcggcccccggcagtggccctgccacatggggtggcccaggcagc

SEQ ID NO: 760842 - DNA, 120 bp, Artificial Sequence
  ENSG00000215131_6 (sequence is synthesized)
ggcccagcgcccaggcctgggcctcgggagaatgtgatggggagagggaggaggaggaggttccgagggaggggcagaagcaatagaagcatggccgtgcccttgcagcctgcttagact

SEQ ID NO: 760843 - DNA, 120 bp, Artificial Sequence
  ENSG00000215131_7 (sequence is synthesized)
ccagtcagccacttgtacctgggaggccgggctgagtgcagaatcaggcccccccgccaccgcctccctgagaggccggggagcccacagctctgatctcaataaaagccaaggcctgca

SEQ ID NO: 760844 - DNA, 120 bp, Artificial Sequence
  ENSG00000215148_0 (sequence is synthesized)
ggggcgctgctgctggcgctgctgctggctcgggctggactcgggaagccgggtgagctcggggcgctacaggcgggaccgggggcagcgaggaggccgggaggtggaggccgcgaggag

SEQ ID NO: 760845 - DNA, 120 bp, Artificial Sequence
  ENSG00000215148_1 (sequence is synthesized)
ggccgcgaggaggcctgcggccaccgggaaattcacgcgctggtggcgggcggagtggagtccgcgcgcgggcgctggccatggcaggccagcctgcgcctgaggagacgccaccgatgt

SEQ ID NO: 760846 - DNA, 120 bp, Artificial Sequence
  ENSG00000215148_2 (sequence is synthesized)
ggagggagcctgctcagccgccgctgggtgctctcggctgcgcactgcttccaaaagcactactatccctccgagtggacggtccagctgggcgagctgacttccaggccaactccttgg

SEQ ID NO: 760847 - DNA, 120 bp, Artificial Sequence
  ENSG00000215148_3 (sequence is synthesized)
aacctgcgggcctacagcagtcgttacaaagtgcaggacatcattgtgaaccctgacgcacttggggttttacgcaatgacattgccctgctgagactggcctcttctgtcacctacaat

SEQ ID NO: 760848 - DNA, 120 bp, Artificial Sequence
  ENSG00000215148_4 (sequence is synthesized)
gcaccggccggactgctgggtgaccggctgggggttaatcagccccagtggcacacctctgccacctccttacaacctccgggaagcacaggtcaccatcttaaacaacaccaggtgtaa

SEQ ID NO: 760849 - DNA, 120 bp, Artificial Sequence
  ENSG00000215148_5 (sequence is synthesized)
ttacctgtttgaacagccctctagccgtagtatgatctgggattccatgttttgtgctggtgctgaggatggcagtgtagacacctgcaaaggtgactcaggtggacccttggtctgtga

SEQ ID NO: 760850 - DNA, 120 bp, Artificial Sequence
  ENSG00000215148_6 (sequence is synthesized)
caaggatggactgtggtatcaggttggaatcgtgagctggggaatggactgcggtcaacccaatcggcctggtgtctacaccaacatcagtgtgtacttccactggatccggagggtgat

SEQ ID NO: 760851 - DNA, 120 bp, Artificial Sequence
  ENSG00000215148_7 (sequence is synthesized)
gtcccacagtacacccaggccaaacccctcccagctgttgctgctccttgccctgctgtgggctccctgactcctgcagccattctgagtgcaccagaaactgtgaggctgcagtgggga

SEQ ID NO: 760852 - DNA, 120 bp, Artificial Sequence
  ENSG00000215148_8 (sequence is synthesized)
ccacagtattggctcacctcctctgggctgtgggcgcttcagggacagggttgggactgcctgctggatcagattccggccccttttgtctcgtttgctaataaatacgtgtgcatgttc

SEQ ID NO: 760853 - DNA, 120 bp, Artificial Sequence
  ENSG00000215174_0 (sequence is synthesized)
atggtgtcttctgcacagctggacttcaacctgcaggctcttctgggacagctcagccaggatgacttgtgcaagttcaagtctctgatcaggaccgtctccctgggaaatgagctgcaa

SEQ ID NO: 760854 - DNA, 120 bp, Artificial Sequence
  ENSG00000215174_1 (sequence is synthesized)
aagatcccccagacataggtagacaaggctgatgggaagcaactggcagaaatcatcaccagccattgccacagctactggatgaagatagagaccatccaggtctttgaaaagatgcac

SEQ ID NO: 760855 - DNA, 120 bp, Artificial Sequence
  ENSG00000215174_2 (sequence is synthesized)
cgagcggatctgtctgagaaagtaaaggatgaactcagagaagacactttgaaatcaagcctgtatcattagggaaaacagggaaagaagagccaaaacctatagacctgaaacaaatgc

SEQ ID NO: 760856 - DNA, 120 bp, Artificial Sequence
  ENSG00000215174_3 (sequence is synthesized)
tggggcgtttcgaagcagaagcactagagtttatagaaacggaggaagatgtcaccagcctaagagaagctaaagaagtcttgaaaggagaaaagccaggtaaagaggataggtacagga

SEQ ID NO: 760857 - DNA, 120 bp, Artificial Sequence
  ENSG00000215174_4 (sequence is synthesized)
gtatattgaagacgaagttctggcaaatgtggaaaacctggcctggagacctcaaagtggtccatattatggctcagagatacaagatgctgatcccgttcagcaaccccagggtgcttc

SEQ ID NO: 760858 - DNA, 120 bp, Artificial Sequence
  ENSG00000215174_5 (sequence is synthesized)
ccgggccctgcccacacacggtggtgctgcatggtcctgcgggccttgggaaaaccacgctggccaagaaattaatgctggactgggcagaggacaacctcagccagaaatttagatagg

SEQ ID NO: 760859 - DNA, 120 bp, Artificial Sequence
  ENSG00000215174_6 (sequence is synthesized)
ctttctacctcacctgcaaggagctcatctgcctgggcccgtgcagttttgcagagctggtcttcaggaactggcctgaattgcaggatgacattccaaacatcctagcccaagcacaga

SEQ ID NO: 760860 - DNA, 120 bp, Artificial Sequence
  ENSG00000215174_7 (sequence is synthesized)
aaatcctgttcgtggtcgacggctttgatgagctgggagccccacctggggcactgatctaggacatctgtggggactgggagaagcagaagccggtgccggtcttcttggggaggttac

SEQ ID NO: 760861 - DNA, 120 bp, Artificial Sequence
  ENSG00000215174_8 (sequence is synthesized)
tgaagaggaagattttacccagggccgccgtgctggtcaccacgtggcctgcgggccctgagagacctccggctgttggtggagcggccgatctatgtaagggtggaggagttcctggag

SEQ ID NO: 760862 - DNA, 120 bp, Artificial Sequence
  ENSG00000215174_9 (sequence is synthesized)
aaggacaggagggcatatttcctgagacactttggagacgaggaccaagccatgtgtgcctttgagctgatgagaagaaacgcggccctgttccagcctgtctcggcacccatggtgtgc

SEQ ID NO: 760863 - DNA, 120 bp, Artificial Sequence
  ENSG00000215174_10 (sequence is synthesized)
tggatcatgtgcatgagtctgaagctgcagaggttagaaggggaaggacccgccccacccgcacggggctgttcctgcgcttcctttgcggccggttcccgcagggcgcacagctctggg

SEQ ID NO: 760864 - DNA, 120 bp, Artificial Sequence
  ENSG00000215174_11 (sequence is synthesized)
gcgtgctgcgggcgctgagcctcctggcggcacagggcctgtgggcgcagatgtcagtgttccgtggagaggacttggcgaggctcggggtgcaggagttcaacatccgcccgtccctgg

SEQ ID NO: 760865 - DNA, 120 bp, Artificial Sequence
  ENSG00000215174_12 (sequence is synthesized)
acagagacatcctccgccaggacatagtctctaaaggctgctattcctacatccacctcagcttccagcagtttttcactgtgctgttccacgccctggagaaggaggaggaggaggagg

SEQ ID NO: 760866 - DNA, 120 bp, Artificial Sequence
  ENSG00000215174_13 (sequence is synthesized)
aaccccgacctgatccaagcaagacacttcttattcggcttcgccaacgagaagaaagccaaggagttggagaccactttgggctgcctgatgtcaccggagatcaaaaaggaattactg

SEQ ID NO: 760867 - DNA, 120 bp, Artificial Sequence
  ENSG00000215174_14 (sequence is synthesized)
tgatgagagataaattgtgaaaaggttggacactcaacaatgatgaacccgaaggagctcttgtgctgtctgtacgagtctcaggaggaggagctggtgaagggagtgatggctccgttc

SEQ ID NO: 760868 - DNA, 120 bp, Artificial Sequence
  ENSG00000215174_15 (sequence is synthesized)
aaagaaatatccctgcacttaaatgcagtagacattatgctgttttcaatctgcctcaagcattgtcgaaacttgcagaaaatgccactgcaggcagcaaaggcaaagctcccagagaat

SEQ ID NO: 760869 - DNA, 120 bp, Artificial Sequence
  ENSG00000215174_16 (sequence is synthesized)
gtcactgtgtctgaatcagatgctgaagttgagagatcccaggatgatcaacacatgcttcctttctggaccgacctttgttccatatttggctcaaataaggatctgatcattctagaa

SEQ ID NO: 760870 - DNA, 120 bp, Artificial Sequence
  ENSG00000215174_17 (sequence is synthesized)
atcaataatagctttcttggtgccacattagtaaggatcctgtgtgaacaaatagcttctgacacctgtcgtctccagagagtgatgttcaaaaacatttcaccagctgatgcttatcgg

SEQ ID NO: 760871 - DNA, 120 bp, Artificial Sequence
  ENSG00000215174_18 (sequence is synthesized)
aacctctgcctagctctttgaggtcacaagactgtaagatatctgacccttcaaggcaatgaccagaatgatatgcttcctgcattgtgtaaggtcttgagacactcaaaatgtaacctg

SEQ ID NO: 760872 - DNA, 120 bp, Artificial Sequence
  ENSG00000215174_19 (sequence is synthesized)
caatatctcgggttggtgtctttttccaccaccacttagcaatgggctgatctctccttggcccttgaagtcaaccagtccctgacatgtgtaaacctctctcacaatgagctcttggat

SEQ ID NO: 760873 - DNA, 120 bp, Artificial Sequence
  ENSG00000215174_20 (sequence is synthesized)
gagggtgccaagttgctgtacacaactttgagacacccaaaatgcttcctgccgaggttgttgttggaaaactgtcactttatagaaggcaattgcaagaactttgctgctgttttggtt

SEQ ID NO: 760874 - DNA, 120 bp, Artificial Sequence
  ENSG00000215174_21 (sequence is synthesized)
gtcagcggggagctgacacacctgtgcttggccaagaaccccccactcggggatacatgggtgatgtttctgtgtaagggtttgagttacccccattgtaaactacagaccctggtgctg

SEQ ID NO: 760875 - DNA, 120 bp, Artificial Sequence
  ENSG00000215174_22 (sequence is synthesized)
tgggactgcgacataactagcaatggctgctgttatctcgcagagcttctccaagaaaaatcaagcctaatgtgcttggatctgggactgaatcacataggagttactggagtgaagctc

SEQ ID NO: 760876 - DNA, 120 bp, Artificial Sequence
  ENSG00000215174_23 (sequence is synthesized)
ctatgtgaggctttgaagaaaccactgtgtaacttgagatgtctgtggttgtgggggtgttccatccctctgttcagttgtgaggacctctgctctgtgctcagctgcaaccacagcctc

SEQ ID NO: 760877 - DNA, 120 bp, Artificial Sequence
  ENSG00000215174_24 (sequence is synthesized)
gtcgttctggacctgagccagaatcccttggggtctagtggagtaaagatgctgtttgaaaccttgacacatccaaattgcaccctccagacactcaggttgaaaatagatgactttaat

SEQ ID NO: 760878 - DNA, 120 bp, Artificial Sequence
  ENSG00000215174_25 (sequence is synthesized)
gttgaactcgataagctgctggaagaaatagaagaaaacaacccacaactgcctgctgataactgagaaacatgatcctttgggggggaaaaaaggctttcttttcattacttcattatc

SEQ ID NO: 760879 - DNA, 120 bp, Artificial Sequence
  ENSG00000215182_0 (sequence is synthesized)
ctcagaggctgctgagggacagggcactcttccccgccgtccacacaatgagtgttggccggaggaagctggccctgctctgggccctggctctcgctctggcctgcacccggcatacag

SEQ ID NO: 760880 - DNA, 120 bp, Artificial Sequence
  ENSG00000215182_1 (sequence is synthesized)
gccatgcccaggatggctcctccgaatccagctacaagcaccaccctgccctctctcctatcgcccgggggcccagcggggtcccgctccgtggggcgactgtcttcccatctctgagga

SEQ ID NO: 760881 - DNA, 120 bp, Artificial Sequence
  ENSG00000215182_2 (sequence is synthesized)
ccatccctgtggtacgagcctccaacccggcgcacaacgggcgggtgtgcagcacctggggcagcttccactacaagaccttcgacggcgacgtcttccgcttccccggcctctgcaact

SEQ ID NO: 760882 - DNA, 120 bp, Artificial Sequence
  ENSG00000215182_3 (sequence is synthesized)
acgtgttctccgagcactgcggtgccgcctacgaggattttaacatccagctacgccgcagccaggagtcagcggcccccacgctgagcagggtcctcatgaaggtggatggcgtggtca

SEQ ID NO: 760883 - DNA, 120 bp, Artificial Sequence
  ENSG00000215182_4 (sequence is synthesized)
tccagctgaccaagggctccgtcctggtcaacggccacccggtcctgctgcccttcagccagtctggggtcctcattcagcagagcagcagctacaccaaggtggaggccaggctgggcc

SEQ ID NO: 760884 - DNA, 120 bp, Artificial Sequence
  ENSG00000215182_5 (sequence is synthesized)
ttgtcctcatgtggaaccacgatgacagcctgctgctggagctggacaccaaatacgccaacaagacctgtgggctctgtggggacttcaacgggatgcccgtggtcagcgagctcctct

SEQ ID NO: 760885 - DNA, 120 bp, Artificial Sequence
  ENSG00000215182_6 (sequence is synthesized)
cccacaacaccaagctgacacccatggaattcgggaacctgcagaagatggacgaccccacggaccagtgtcaggaccctgtccctgaacccccgaggaactgctccactggctttggca

SEQ ID NO: 760886 - DNA, 120 bp, Artificial Sequence
  ENSG00000215182_7 (sequence is synthesized)
tctgtgaggagctcctgcacggccagctgttctctggctgcgtggccctggtggacgtcggcagctacctggaggcttgcaggcaagacctctgcttctgtgaagacaccgacctgctca

SEQ ID NO: 760887 - DNA, 120 bp, Artificial Sequence
  ENSG00000215182_8 (sequence is synthesized)
gctgcgtctgccacacccttgccgagtactcccggcagtgcacccatgcaggggggttgccccaggactggcggggccctgacttctgcccccagaagtgccccaacaacatgcagtacc

SEQ ID NO: 760888 - DNA, 120 bp, Artificial Sequence
  ENSG00000215182_9 (sequence is synthesized)
acgagtgccgctccccctgcgcagacacctgctccaaccaggagcactcccgggcctgtgaggaccactgtgtggccggctgcttctgccctgaggggacggtgcttgacgacatcggcc

SEQ ID NO: 760889 - DNA, 120 bp, Artificial Sequence
  ENSG00000215182_10 (sequence is synthesized)
agaccggctgtgtccctgtgtcaaagtgtgcctgcgtctacaacggggctgcctatgccccaggggccacctactccacagactgcaccaactgcacctgctccggaggccggtggagct

SEQ ID NO: 760890 - DNA, 120 bp, Artificial Sequence
  ENSG00000215182_11 (sequence is synthesized)
gccaggaggttccatgcccgggtacctgctctgtgcttggaggtgcccacttctcaacgtttgacgggaagcaatacacggtgcacggcgactgcagctatgtgctgaccaagccctgtg

SEQ ID NO: 760891 - DNA, 120 bp, Artificial Sequence
  ENSG00000215182_12 (sequence is synthesized)
acagcagtgccttcactgtactggctgagctgcgcaggtgcgggctgacggacagcgagacctgcctgaagagcgtgacactgagcctggatggggcgcagacggtggtggtgatcaagg

SEQ ID NO: 760892 - DNA, 120 bp, Artificial Sequence
  ENSG00000215182_13 (sequence is synthesized)
ccagtggggaagtgttcctgaaccagatctacacccagctgcccatctctgcagccaacgtcaccatcttcagaccctcaaccttcttcatcatcgcccagaccagcctgggcctgcagc

SEQ ID NO: 760893 - DNA, 120 bp, Artificial Sequence
  ENSG00000215182_14 (sequence is synthesized)
tgaacctgcagctggtgcccaccatgcagctgttcatgcagctggcgcccaagctccgtgggcagacctgcggtctctgtgggaacttcaacagcatccaggccgatgacttccggaccc

SEQ ID NO: 760894 - DNA, 120 bp, Artificial Sequence
  ENSG00000215182_15 (sequence is synthesized)
tcagtggggtggtggaggccaccgctgcggccttcttcaacaccttcaagacccaggccgcctgccccaacatcaggaacagcttcgaggacccctgctctctgagcgtggagaatgaga

SEQ ID NO: 760895 - DNA, 120 bp, Artificial Sequence
  ENSG00000215182_16 (sequence is synthesized)
agtatgctcagcactggtgctcgcagctgaccgatgccgacggccccttcggccggtgccatgctgccgtgaagccgggaacctactactcgaactgcatgtttgacacctgcaactgtg

SEQ ID NO: 760896 - DNA, 120 bp, Artificial Sequence
  ENSG00000215182_17 (sequence is synthesized)
agcggagcgaggactgcctgtgcgccgcgctgtcctcctacgtgcacgcctgtgccgccaagggcgtgcagctcggcggctggagggacggcgtctgcacgaagcctatgaccacttgcc

SEQ ID NO: 760897 - DNA, 120 bp, Artificial Sequence
  ENSG00000215182_18 (sequence is synthesized)
ccaagtcaatgacgtaccactaccatgtcagcacctgccagcccacctgccgctccctgagcgagggggacatcacctgcagtgttggcttcatccccgtggatggctgcatctgtccca

SEQ ID NO: 760898 - DNA, 120 bp, Artificial Sequence
  ENSG00000215182_19 (sequence is synthesized)
agggcaccttcctggacgacacgggcaagtgtgtgcaggccagcaactgtccctgctaccacagaggctccatgatccccaatggggagtcggtgcacgacagcggggctatctgcacct

SEQ ID NO: 760899 - DNA, 120 bp, Artificial Sequence
  ENSG00000215182_20 (sequence is synthesized)
gcacacatgggaagctgagctgcatcggaggccaagcccccgccccagtgtgtgctgcgcccatggtgttctttgactgccgaaatgccacgcccggggacacaggggctggctgtcaga

SEQ ID NO: 760900 - DNA, 120 bp, Artificial Sequence
  ENSG00000215182_21 (sequence is synthesized)
agagctgccacacactggacatgacctgttacagcccccagtgtgtgcctggctgcgtgtgccccgacgggctggtggcggacggcgagggcggctgcatcactgcggaggactgcccct

SEQ ID NO: 760901 - DNA, 120 bp, Artificial Sequence
  ENSG00000215182_22 (sequence is synthesized)
gcgtgcacaatgaggccagctaccgggccggccagaccatccgggtgggctgcaacacctgcacctgtgacagcaggatgtggcggtgcacagatgacccctgcctggccacctgcgccg

SEQ ID NO: 760902 - DNA, 120 bp, Artificial Sequence
  ENSG00000215182_23 (sequence is synthesized)
tgtacggggacggccactacctcaccttcgacggacagagctacagcttcaacggagactgcgagtacacgctggtgcagaaccactgtggcgggaaagacagcacccaggactcctttc

SEQ ID NO: 760903 - DNA, 120 bp, Artificial Sequence
  ENSG00000215182_24 (sequence is synthesized)
gtgttgtcaccgagaacgtcccctgcggcaccacagggaccacctgctccaaggccatcaagattttcctggggggcttcgagctgaagctaagccatgggaaggtggaggtgatcggga

SEQ ID NO: 760904 - DNA, 120 bp, Artificial Sequence
  ENSG00000215182_25 (sequence is synthesized)
cggacgagagccaggaggtgccatacaccatccggcagatgggcatctacctggtggtggacaccgacattggcctggtgctgctgtgggacaagaagaccagcatcttcatcaacctca

SEQ ID NO: 760905 - DNA, 120 bp, Artificial Sequence
  ENSG00000215182_26 (sequence is synthesized)
gccccgagttcaagggcagggtctgcggcctgtgtgggaacttcgacgacatcgccgttaatgactttgccacgcggagccggtctgtggtgggggacgtgctggagtttgggaacagct

SEQ ID NO: 760906 - DNA, 120 bp, Artificial Sequence
  ENSG00000215182_27 (sequence is synthesized)
ggaagctctccccctcctgcccagatgccctggcgcccaaggacccctgcacggccaaccccttccgcaagtcctgggcccagaagcagtgcagcatcctccacggccccaccttcgccg

SEQ ID NO: 760907 - DNA, 120 bp, Artificial Sequence
  ENSG00000215182_28 (sequence is synthesized)
cctgccacgcacacgtggagccggccaggtactacgaggcctgcgtgaacgacgcgtgcgcctgcgactccgggggtgactgcgagtgcttctgcacggctgtggccgcctacgcccagg

SEQ ID NO: 760908 - DNA, 120 bp, Artificial Sequence
  ENSG00000215182_29 (sequence is synthesized)
cctgccatgaagtaggcctgtgtgtgtcctggcggaccccgagcatctgccctctgttctgcgactactacaaccccgaaggccagtgcgagtggcactaccagccctgcggggtgccct

SEQ ID NO: 760909 - DNA, 120 bp, Artificial Sequence
  ENSG00000215182_30 (sequence is synthesized)
gcctgcgcacctgccggaacccccgtggagactgcctgcgggacgtccggggcctggaaggctgctaccccaagtgcccaccagaggctcccatctttgatgaggacaagatgcagtgtg

SEQ ID NO: 760910 - DNA, 120 bp, Artificial Sequence
  ENSG00000215182_31 (sequence is synthesized)
tggccacctgcccaaccccgcctctgccaccacggtgccacgtccatgggaagtcctaccggccaggtgcagtggtgccctcggacaagaactgccagtcctgcctttgtacggagcgcg

SEQ ID NO: 760911 - DNA, 120 bp, Artificial Sequence
  ENSG00000215182_32 (sequence is synthesized)
gcgtggagtgcacctacaaagctgaggcctgtgtctgcacctacaatggacagcgcttccacccaggggacgtcatctaccacacgacggatggcacgggtggctgcatctccgcccgct

SEQ ID NO: 760912 - DNA, 120 bp, Artificial Sequence
  ENSG00000215182_33 (sequence is synthesized)
gcggggccaacggcaccattgagaggagggtctacccctgcagccccaccacccctgtccccccaaccaccttctccttctccacacccccgcttgtcgtgagctccacgcacaccccca

SEQ ID NO: 760913 - DNA, 120 bp, Artificial Sequence
  ENSG00000215182_34 (sequence is synthesized)
gcaatggcccaagcagcgcgcacacaggccctccgagcagcgcctggcccaccacagcaggcacttctcccaggacgaggctgcccacagcctctgcctcactgccgccggtctgtgggg

SEQ ID NO: 760914 - DNA, 120 bp, Artificial Sequence
  ENSG00000215182_35 (sequence is synthesized)
aaaagtgcctgtggtcgccatggatggatgtcagccgccctggacggggcacggacagcggtgacttcgacacactggagaacctccgcgcccatgggtaccgggtgtgcgaatcaccca

SEQ ID NO: 760915 - DNA, 120 bp, Artificial Sequence
  ENSG00000215182_36 (sequence is synthesized)
ggtcggtggagtgccgagctgaggacgcccccggagtgccgctccgagccctggggcagcgtgtgcagtgcagcccggatgtggggctgacctgtcgtaacagggagcaggcatcggggc

SEQ ID NO: 760916 - DNA, 120 bp, Artificial Sequence
  ENSG00000215182_37 (sequence is synthesized)
tctgctacaactaccagatcagggtccagtgctgcacgcccctaccctgctccacctctagcagtccagcccagaccactcctccaactacctccaagaccactgaaacccgggcctcag

SEQ ID NO: 760917 - DNA, 120 bp, Artificial Sequence
  ENSG00000215182_38 (sequence is synthesized)
gctcctcagctcccagcagcacacctggcaccgtgtctctctctacagccaggacgacacctgccccaggtaccgctacctctgtcaaaaaaactttctcaactcccagccctccgccag

SEQ ID NO: 760918 - DNA, 120 bp, Artificial Sequence
  ENSG00000215182_39 (sequence is synthesized)
tgccggcaacatcaacatcatccatgtcgaccacggccccggggacctctgtggtctccagcaagcccacccccacggagcccagcacatcctcctgcctgcaggagctttgcacctgga

SEQ ID NO: 760919 - DNA, 120 bp, Artificial Sequence
  ENSG00000215182_40 (sequence is synthesized)
ccgagtggatcgatggcagctaccctgctcctggaataaatggtggagattttgacacatttcaaaatttgagagacgaaggatacacattctgtgaaagtcctcgaagcgtgcagtgcc

SEQ ID NO: 760920 - DNA, 120 bp, Artificial Sequence
  ENSG00000215182_41 (sequence is synthesized)
gggcagagagcttccccaacacgccgctggcagacctggggcaggacgtcatctgcagccacacagaggggctgatttgcctgaacaagaaccagctcccacccatctgctacaactatg

SEQ ID NO: 760921 - DNA, 120 bp, Artificial Sequence
  ENSG00000215182_42 (sequence is synthesized)
agatccgcatccagtgttgcgagacggtgaacgtgtgcagagacatcaccagactgccaaagaccgtcgcaacgacacggccgactccacatccaaccggagctcagacccagaccacct

SEQ ID NO: 760922 - DNA, 120 bp, Artificial Sequence
  ENSG00000215182_43 (sequence is synthesized)
tcaccacacacatgccctcggcctccacagagcaacccacggcaacctccaggggtgggcccacagcaaccagcgtcacacagggcacccacaccacactagtcaccagaaactgtcatc

SEQ ID NO: 760923 - DNA, 120 bp, Artificial Sequence
  ENSG00000215182_44 (sequence is synthesized)
cccggtgcacctggacaaagtggttcgacgtggacttcccgtcccccggaccccatggtggagacaaggaaacctacaacaacatcatcaggagtggggaaaaaatctgccgccgacctg

SEQ ID NO: 760924 - DNA, 120 bp, Artificial Sequence
  ENSG00000215182_45 (sequence is synthesized)
aggagatcaccaggctccagtgccgagccaagagccacccagaggtgagcatcgaacacctgggccaggtggtgcagtgcagccgggaagagggcctggtgtgccggaaccaggaccagc

SEQ ID NO: 760925 - DNA, 120 bp, Artificial Sequence
  ENSG00000215182_46 (sequence is synthesized)
agggacccttcaagatgtgcctcaactacgaggtgcgtgtgctctgctgcgagacccccagaggctgccacatgacctccacacctggctccacctctagcagtccagcccagaccactc

SEQ ID NO: 760926 - DNA, 120 bp, Artificial Sequence
  ENSG00000215182_47 (sequence is synthesized)
cttcaacaacctccaagaccactgaaacccaggcctcaggctcctcagcccccagcagcacacctggcaccgtgtctctctctacagccaggacgacacctgccccaggtaccgctacct

SEQ ID NO: 760927 - DNA, 120 bp, Artificial Sequence
  ENSG00000215182_48 (sequence is synthesized)
ctgtcaaaaaaactttctcaactcccagccctccgccagtgccggcaacatcaacatcatccatgtcgaccacggccccggggacctctgtggtctccagcaagcccacccccacggagc

SEQ ID NO: 760928 - DNA, 120 bp, Artificial Sequence
  ENSG00000215182_49 (sequence is synthesized)
ccagcacatcctcctgcctgcaggagctttgcacctggaccgagtggattgatggcagctaccctgctcctggaataaatggtggagattttgacacatttcaaaatttgagagacgaag

SEQ ID NO: 760929 - DNA, 120 bp, Artificial Sequence
  ENSG00000215182_50 (sequence is synthesized)
gatacacattctgtgaaagtcctcgaagcgtgcagtgccgggcagagagcttccccaacacgccgctggcagacctggggcaggacgtcatctgcagccacacagaggggctgatttgcc

SEQ ID NO: 760930 - DNA, 120 bp, Artificial Sequence
  ENSG00000215182_51 (sequence is synthesized)
tgaacaagaaccagctcccacccatctgctacaactatgagatccgcatccagtgttgcgagacggtgaacgtgtgcagagacatcaccagaccgccaaagaccgtcgcaacgacacggc

SEQ ID NO: 760931 - DNA, 120 bp, Artificial Sequence
  ENSG00000215182_52 (sequence is synthesized)
cgactccacatccaaccggagctcagacccagaccaccttcaccacacacatgccctcggcctccacagagcaacccacggcaacctccaggggtgggcccacagcaaccagcgtcacac

SEQ ID NO: 760932 - DNA, 120 bp, Artificial Sequence
  ENSG00000215182_53 (sequence is synthesized)
agggcacccacaccacaccagtcaccagaaactgtcatccccggtgcacctggacaacgtggttcgacgtggacttcccgtcccccggaccccatggtggagacaaggaaacctacaaca

SEQ ID NO: 760933 - DNA, 120 bp, Artificial Sequence
  ENSG00000215182_54 (sequence is synthesized)
acatcatcaggagtggggaaaaaatctgccgccgacctgaggagatcaccaggctccagtgccgagccaagagccacccagaggtgagcatcgaacacctgggccaggtggtgcagtgca

SEQ ID NO: 760934 - DNA, 120 bp, Artificial Sequence
  ENSG00000215182_55 (sequence is synthesized)
gccgggaagagggcctggtgtgccggaaccaggaccagcagggacccttcaagatgtgcctcaactacgaggtgcgtgtgctctgctgcgagacccccaaaggctgccccgtgacctcca

SEQ ID NO: 760935 - DNA, 120 bp, Artificial Sequence
  ENSG00000215182_56 (sequence is synthesized)
cacctgtgacagctcctagcacccctagtgggagagccaccagcccaactcagagcacctcctcttggcagaaatccaggacaaccactttggtgacaaccagcacaacctccactccac

SEQ ID NO: 760936 - DNA, 120 bp, Artificial Sequence
  ENSG00000215182_57 (sequence is synthesized)
agaccagtacaacctatgcccatacaaccagcacaacctctgctcctacagccagaacaacctctgctcctacaaccagaacaacctctgcctctccagccagcacaacctctggtcctg

SEQ ID NO: 760937 - DNA, 120 bp, Artificial Sequence
  ENSG00000215182_58 (sequence is synthesized)
cctctgcctctccagccagcacaacctctggtcctggaaatactcccagccctgttcctaccaccagcacaatctctgctcctacaactagcataacctctgcccctacaaccagcacaa

SEQ ID NO: 760938 - DNA, 70 bp, Artificial Sequence
  ENSG00000215182_59 (sequence is synthesized)
cccgtacaagcagcacaacctctgccactaccaccagcagaatctctggtcctgaaactactcccagccc

SEQ ID NO: 760939 - DNA, 120 bp, Artificial Sequence
  ENSG00000215182_60 (sequence is synthesized)
caagcagcacaacctctgccactaccaccagcagaatctctggtcctgaaactactcccagccctgttcctaccaccagcacaacctctgccactacaaccagcacaacctcagctccta

SEQ ID NO: 760940 - DNA, 120 bp, Artificial Sequence
  ENSG00000215182_61 (sequence is synthesized)
caagcagcacaacctccagtccacagaccagcacaacctcggctcctacaaccagcacaacttctggtcctggaactaccccaagccctgttcccacgaccagcacaacctctgccccta

SEQ ID NO: 760941 - DNA, 120 bp, Artificial Sequence
  ENSG00000215182_62 (sequence is synthesized)
caacaagaacaacttctgctcctaaaagcagcacaacctctgccgctacaaccagcacaacctctggtcctgaaactactcctagacctgttcctaccaccagcacaacctcttctccta

SEQ ID NO: 760942 - DNA, 72 bp, Artificial Sequence
  ENSG00000215182_63 (sequence is synthesized)
acaacctcttcttctacaaccagcacaacctctggtgctggaactactcccagccctgttcccaccaccagc

SEQ ID NO: 760943 - DNA, 71 bp, Artificial Sequence
  ENSG00000215182_64 (sequence is synthesized)
cctacaaccagcacaacctctgcccctataagcagcacaacctctgccataccacgagcacaacctctgct

SEQ ID NO: 760944 - DNA, 120 bp, Artificial Sequence
  ENSG00000215182_65 (sequence is synthesized)
acaacctctggtcctggaactactcccagtgctgttcccaccaccagcataacctctgcacctacaaccagcacaaactctgcccctataagcagcacaacctctgccactacaaccagc

SEQ ID NO: 760945 - DNA, 120 bp, Artificial Sequence
  ENSG00000215182_66 (sequence is synthesized)
acaacctctgccactacaaccagcagaatctctggtcctgaaactactcccagccctgttcctaccgccagcacaacctctgcttctacaactagcacaacctctggtcctggaactact

SEQ ID NO: 760946 - DNA, 120 bp, Artificial Sequence
  ENSG00000215182_67 (sequence is synthesized)
gaactactcccagccctgttcctaccaccagcacaatctctgttcctaccaccagcacaacttctgcttctacaaccagcacaacctctgcttctacaaccagcacaacctctggtcctg

SEQ ID NO: 760947 - DNA, 120 bp, Artificial Sequence
  ENSG00000215182_68 (sequence is synthesized)
acaacctctgcccctacaaccagcacaatctcggccccaacaaccagcacaacctctgccactacaaccagcacgacctctgctcctacacccagaagaacctcagcccctacaaccagc

SEQ ID NO: 760948 - DNA, 120 bp, Artificial Sequence
  ENSG00000215182_69 (sequence is synthesized)
cacccagaagaacctcagcccctacaaccagcacaatctctgcctctaccaccagcacaacctctgcgactacaaccagcacaacctctgctactacaaccagcacaatctctgccccta

SEQ ID NO: 760949 - DNA, 120 bp, Artificial Sequence
  ENSG00000215182_70 (sequence is synthesized)
caaccagcacaactttgtctcctacaaccagcacaacctctactactataaccagcacaacttctgcccctataagcagcacaacttccacaccacagaccagcacaacttcggctccta

SEQ ID NO: 760950 - DNA, 74 bp, Artificial Sequence
  ENSG00000215182_71 (sequence is synthesized)
acaacttccacaccacagaccagcacaacttcggctcctacaaccagcacaacttctggtcctggaactacttc

SEQ ID NO: 760951 - DNA, 79 bp, Artificial Sequence
  ENSG00000215182_72 (sequence is synthesized)
cctccactgcttgttcccaccaccagtacaacctctgctcctacaaccagaacaacctctgctcctacaaccagcacaa

SEQ ID NO: 760952 - DNA, 120 bp, Artificial Sequence
  ENSG00000215182_73 (sequence is synthesized)
caagcagcacaacctcagctactacaaccagcacaatctctgttcctacaaccagcacaacttctgttcctggaactactcccagccctgttcctaccaccagcacaatctctgttccta

SEQ ID NO: 760953 - DNA, 71 bp, Artificial Sequence
  ENSG00000215182_74 (sequence is synthesized)
cccagccctgttcctaccaccagcacaatctctgttcctaccaccagcacaacttctgcttcaccaccagc

SEQ ID NO: 760954 - DNA, 60 bp, Artificial Sequence
  ENSG00000215182_75 (sequence is synthesized)
acaacctctgcccctacaaccagcacaatctcggccccaacaaccagcacaccctctgcc

SEQ ID NO: 760955 - DNA, 120 bp, Artificial Sequence
  ENSG00000215182_76 (sequence is synthesized)
cctctacccctacaagcagcacaacctcctctccacagaccagcacaacctcggcttctaccaccagcataacttctggtcctggaactaccccaagccctgttcccaccaccagcacaa

SEQ ID NO: 760956 - DNA, 120 bp, Artificial Sequence
  ENSG00000215182_77 (sequence is synthesized)
caaccagcacaacctctgccgctacaaccagcacaatctcggccccaacaaccagcacaacgtctgctcctacaaccagcacaacctctgcctctacagccagcaaaacctctggtcttg

SEQ ID NO: 760957 - DNA, 120 bp, Artificial Sequence
  ENSG00000215182_78 (sequence is synthesized)
gaactactcccagccctattcctaccaccagcacaacctctcctcctacaaccagcacaacttctgcctctacagccagcaaaacctctggtcctggaaccactcccagccctgttccca

SEQ ID NO: 760958 - DNA, 120 bp, Artificial Sequence
  ENSG00000215182_79 (sequence is synthesized)
ccaccagcacaatctttgctcctagaaccagcaccacttctgcctctacaaccagcacaacccctggtcctggaaccactcccagccccgttcccaccaccagcacagcctctgtttcaa

SEQ ID NO: 760959 - DNA, 120 bp, Artificial Sequence
  ENSG00000215182_80 (sequence is synthesized)
agaccagcacaagccatgtttccatatccaagacaacccactcccaaccagtcaccagagactgtcatctccggtgcacctggaccaagtggtttgacatagacttcccatcccctggac

SEQ ID NO: 760960 - DNA, 120 bp, Artificial Sequence
  ENSG00000215182_81 (sequence is synthesized)
cccacggcggggacaaggaaacctacaacaacatcatcaggagtggggaaaaaatctgccgccgacctgaggagatcaccaggctccagtgccgagccgagagccacccggaggtgagca

SEQ ID NO: 760961 - DNA, 120 bp, Artificial Sequence
  ENSG00000215182_82 (sequence is synthesized)
ttgaacacctgggccaggtggtgcagtgcagccgtgaagagggcctggtgtgccggaaccaggaccagcagggacccttcaagatgtgcctcaactacgaggtgcgtgtgctctgctgcg

SEQ ID NO: 760962 - DNA, 120 bp, Artificial Sequence
  ENSG00000215182_83 (sequence is synthesized)
agacccctaaaggttgccccgtgacctccacacctgtgacagctcctagcacccctagtgggagagccaccagcccaactcagagcacttcctcttggcagaaatccaggacaaccactt

SEQ ID NO: 760963 - DNA, 88 bp, Artificial Sequence
  ENSG00000215182_84 (sequence is synthesized)
ctcccacaaccagcacaacttctgcccctacaaccagcacaacctccactccacagaccagcatatcctctgcccctacaagcagcac

SEQ ID NO: 760964 - DNA, 120 bp, Artificial Sequence
  ENSG00000215182_85 (sequence is synthesized)
ctccacagaccagcatatcctctgcccctacaagcagcacaacctcggctcctacaagcagcacaatctctgctcgtacaaccagcataatctctgcccctacaaccagcacaacctctt

SEQ ID NO: 760965 - DNA, 120 bp, Artificial Sequence
  ENSG00000215182_86 (sequence is synthesized)
tacaaccagcacaacctctgcccctacaagcagcacaacctccactccacagaccagcaaaacctcagctgctacaagcagcacaacctccggttctggaactactcccagccctgttac

SEQ ID NO: 760966 - DNA, 120 bp, Artificial Sequence
  ENSG00000215182_87 (sequence is synthesized)
gttctggaactactcccagccctgttaccaccaccagcacagcctctgtttcaaagaccagcacaagccatgtttctgtatccaagacaacccactcccaaccagtcaccagagactgtc

SEQ ID NO: 760967 - DNA, 120 bp, Artificial Sequence
  ENSG00000215182_88 (sequence is synthesized)
atccccggtgcacctggaccaaatggtttgatgtggactttccatcccctggaccccacggtggggacaaggaaacctacaacaacatcatcaggagtggggaaaaaatctgccgccgac

SEQ ID NO: 760968 - DNA, 120 bp, Artificial Sequence
  ENSG00000215182_89 (sequence is synthesized)
ctgaggagatcaccaggctccagtgccgagccaagagccacccggaggtgagcatcgaacacctgggccaggtggtgcagtgcagccgcgaagagggcctggtgtgccggaaccaggacc

SEQ ID NO: 760969 - DNA, 120 bp, Artificial Sequence
  ENSG00000215182_90 (sequence is synthesized)
agcagggacccttcaagatgtgcctcaactacgaggtgcgtgtgctttgctgcgagacccccaaaggctgccccgtgacctccacatctgtgacagctcctagcacccctagtgggagag

SEQ ID NO: 760970 - DNA, 120 bp, Artificial Sequence
  ENSG00000215182_91 (sequence is synthesized)
ccaccagcccaactcagagcacctcctcttggcagaaatccaggacaaccactttggtgacaagcagcataacctccactacacagaccagcacaacctctgcccctacaactagcacaa

SEQ ID NO: 760971 - DNA, 120 bp, Artificial Sequence
  ENSG00000215182_92 (sequence is synthesized)
cccctgcttctatacccagcacaacctctgccccaacaaccagcacaacctctgctcccacaacgagcacaacttctgcccctacaaccagcacaacctccactccacagaccaccacat

SEQ ID NO: 760972 - DNA, 86 bp, Artificial Sequence
  ENSG00000215182_93 (sequence is synthesized)
cctacaaccagcacaacctccactccacagaccaccacatcctctgcccctacaagcagcacaacctcggctcctacctctctgcc

SEQ ID NO: 760973 - DNA, 120 bp, Artificial Sequence
  ENSG00000215182_94 (sequence is synthesized)
cagccagcacaacgtcagctcctacgagcacttcctcggctcctacaaccaacacaacctctgcccctacaactagcactacctctgctcccataaccagcacaatctctgcccctacaa

SEQ ID NO: 760974 - DNA, 120 bp, Artificial Sequence
  ENSG00000215182_95 (sequence is synthesized)
cacaacctccactccacagaccagcacaatctcttcccctacaaccagcacaacctccactccgcagaccagcacaacctcttcccctacaactagcacaacctcagctcctacaaccag

SEQ ID NO: 760975 - DNA, 120 bp, Artificial Sequence
  ENSG00000215182_96 (sequence is synthesized)
cacaacttctgcccctacaaccagcacaacctccactccacagaccagcatatcctctgcccctacaagcagcacaacctctgctcctacagccagcacaatctctgcccctacaaccag

SEQ ID NO: 760976 - DNA, 120 bp, Artificial Sequence
  ENSG00000215182_97 (sequence is synthesized)
ctttccatacaaccagcacaacctctccccctacaagcagcacaagctccactccacagaccagcaaaacctcagctgctacaagcagcacaacctccggttctggaactactcccagcc

SEQ ID NO: 760977 - DNA, 120 bp, Artificial Sequence
  ENSG00000215182_98 (sequence is synthesized)
ccgttcccaccaccagcacagcctctgtttcaaagaccagcacaagccatgtttctgtatccaagacaacccactcccaaccagtcaccagagactgtcatccccggtgcacctggacca

SEQ ID NO: 760978 - DNA, 120 bp, Artificial Sequence
  ENSG00000215182_99 (sequence is synthesized)
agtggtttgacgtggactttccatcccctggaccccacggtggggacaaggaaacctacaacaacatcatcaggagtggggaaaaaatctgccgccgacctgaggagatcaccaggctcc

SEQ ID NO: 760979 - DNA, 120 bp, Artificial Sequence
  ENSG00000215182_100 (sequence is synthesized)
agtgccgagccgagagccacccggaggtgagcatcgaacacctgggccaggtggtgcagtgcagccgggaagagggcctggtgtgccggaaccaggaccagcagggacccttcaagatgt

SEQ ID NO: 760980 - DNA, 120 bp, Artificial Sequence
  ENSG00000215182_101 (sequence is synthesized)
gcctcaactacgaggtgcgtgtgctctgctgcgagacccccaaaggctgccccgtgacctccacacctgtgacagctcctagcacccctagtgggagagccaccagcccaactcagagca

SEQ ID NO: 760981 - DNA, 120 bp, Artificial Sequence
  ENSG00000215182_102 (sequence is synthesized)
gggagagccaccagcccaactcagagcacttcctcttggcagaaatccaggacaaccactttggtgacaaccagcacaacctccactccacagaccagcacaacctctgcccctacaacc

SEQ ID NO: 760982 - DNA, 79 bp, Artificial Sequence
  ENSG00000215182_103 (sequence is synthesized)
agcacaacctctgcccctacaaccagcacgacctcagctcctacacacagaacgacttctggtctctgctccaacaacc

SEQ ID NO: 760983 - DNA, 84 bp, Artificial Sequence
  ENSG00000215182_104 (sequence is synthesized)
caaccttggctcctacaaccagcacaacctctgctccaacaaccagcacaaactctgctcctacaaccagcacaatctctgcct

SEQ ID NO: 760984 - DNA, 120 bp, Artificial Sequence
  ENSG00000215182_105 (sequence is synthesized)
ctcttcccctacaagcagcacaacctccactccacagaccagcaaaacctcagctgctacaagcagcacaacctccggttctggaactactccaagccctgttcccaccaccagcacaac

SEQ ID NO: 760985 - DNA, 80 bp, Artificial Sequence
  ENSG00000215182_106 (sequence is synthesized)
agcacaacctctggtcctggaactactccaagccctgttcccagcaccagtacaacctctgctgatctgctcctacaagc

SEQ ID NO: 760986 - DNA, 62 bp, Artificial Sequence
  ENSG00000215182_107 (sequence is synthesized)
aactctgcctctacagccagcacaacctctggtcctggaagtactcccagccctgttcccac

SEQ ID NO: 760987 - DNA, 62 bp, Artificial Sequence
  ENSG00000215182_108 (sequence is synthesized)
gctcctacaaccagaacaacctctgcctctacagccagcacaacctctggtcctggaaccct

SEQ ID NO: 760988 - DNA, 120 bp, Artificial Sequence
  ENSG00000215182_109 (sequence is synthesized)
ccagccctgttcccaccacaagcacaacctctgcttctacaaccagcacaatctctctccctacaaccagcacaacctctgctcctataaccagcatgacctctggtcctggaactactc

SEQ ID NO: 760989 - DNA, 120 bp, Artificial Sequence
  ENSG00000215182_110 (sequence is synthesized)
ctctgctcctacaaccagcacaacctctgcctctacagccagcacaacctctggtcctggaacttctctcagccctgttcccaccacgagcacaacctctgctcctacaactagcacaac

SEQ ID NO: 760990 - DNA, 87 bp, Artificial Sequence
  ENSG00000215182_111 (sequence is synthesized)
gacctctggtcctggaactactcccagccccgttcccaccaccagcacaacccctgtttcaaagaccagcacaagccatctttctgt

SEQ ID NO: 760991 - DNA, 120 bp, Artificial Sequence
  ENSG00000215182_112 (sequence is synthesized)
caacccctgtttcaaagaccagcacaagccatctttctgtatccaagacaacccactcccaaccagtcaccagtgactgtcatcctctgtgcgcctggacaaagtggttcgacgtggact

SEQ ID NO: 760992 - DNA, 120 bp, Artificial Sequence
  ENSG00000215182_113 (sequence is synthesized)
tcccatcccctggaccccacggcggggacaaggaaacctacaacaacatcatcaggagtggggaaaaaatctgccgccgacctgaggagatcaccaggctccagtgccgagccgagagcc

SEQ ID NO: 760993 - DNA, 120 bp, Artificial Sequence
  ENSG00000215182_114 (sequence is synthesized)
acccggaggtgaacattgaacacctgggtcaggtggtgcagtgcagccgtgaagagggcctggtgtgccggaaccaggaccagcagggacccttcaagatgtgcctcaactacgaggtgc

SEQ ID NO: 760994 - DNA, 120 bp, Artificial Sequence
  ENSG00000215182_115 (sequence is synthesized)
gcgtgctctgctgcgagacccccagaggctgcccggtgacctctgtgaccccatatgggacttctcctaccaatgctctgtatccttccctgtctacttccatggtatccgcctccgtgg

SEQ ID NO: 760995 - DNA, 120 bp, Artificial Sequence
  ENSG00000215182_116 (sequence is synthesized)
catccacctctgtggcatccagctctgtggcatccagctctgtggcttactccacccaaacctgcttctgcaacgtggctgaccggctctaccctgcaggatccaccatataccgccaca

SEQ ID NO: 760996 - DNA, 120 bp, Artificial Sequence
  ENSG00000215182_117 (sequence is synthesized)
gagacctcgctggccattgctattatgccctgtgtagccaggactgccaagtggtcagaggggttgacagtgactgtccgtccaccacgctgcctcctgccccagccacgtccccttcaa

SEQ ID NO: 760997 - DNA, 120 bp, Artificial Sequence
  ENSG00000215182_118 (sequence is synthesized)
tatccacctccgagcccgtcactgagctgggatgcccaaatgcggttccccccagaaagaaaggtgagacctgggccacacccaactgctccgaggccacctgtgagggcaacaacgtca

SEQ ID NO: 760998 - DNA, 120 bp, Artificial Sequence
  ENSG00000215182_119 (sequence is synthesized)
tctccctgcgcccgcgcacgtgcccgagggtggagaagcccacttgtgccaacggctacccggctgtgaaggtggctgaccaagatggctgctgccatcactaccagtgccagtgtgtgt

SEQ ID NO: 760999 - DNA, 120 bp, Artificial Sequence
  ENSG00000215182_120 (sequence is synthesized)
gcagcggctggggtgacccccactacatcaccttcgacggcacctactacaccttcctggacaactgcacgtacgtgctggtgcagcagattgtgcccgtgtatggccacttccgcgtgc

SEQ ID NO: 761000 - DNA, 120 bp, Artificial Sequence
  ENSG00000215182_121 (sequence is synthesized)
tcgtcgacaactacttctgcggtgcggaggacgggctctcctgcccgaggtccatcatcctggagtaccaccaggaccgcgtggtgctgacccgcaagccagtccacggggtgatgacaa

SEQ ID NO: 761001 - DNA, 120 bp, Artificial Sequence
  ENSG00000215182_122 (sequence is synthesized)
acgagatcatcttcaacaacaaggtggtcagccccggcttccggaaaaacggcatcgtggtctcgcgcatcggcgtcaagatgtacgcgaccatcccggagctgggagtccaggtcatgt

SEQ ID NO: 761002 - DNA, 120 bp, Artificial Sequence
  ENSG00000215182_123 (sequence is synthesized)
tctccggcctcatcttctccgtggaggtgcccttcagcaagtttgccaacaacaccgagggccagtgcggcacttgcaccaacgacaggaaggatgagtgccgcacgcctagggggacgg

SEQ ID NO: 761003 - DNA, 120 bp, Artificial Sequence
  ENSG00000215182_124 (sequence is synthesized)
tggtcgcttcctgctccgagatgtccggcctctggaacgtgagcatacccgaccagccagcctgccaccggcctcacccgacgcccaccacggtcgggcccaccacagttgggtctacca

SEQ ID NO: 761004 - DNA, 120 bp, Artificial Sequence
  ENSG00000215182_125 (sequence is synthesized)
cggtcgggcccaccacagttgggtctaccacggtcgggcccaccacaccgcctgctccgtgcctgccatcacccatctgccagctgattctgagcaaggtctttgagccgtgccacactg

SEQ ID NO: 761005 - DNA, 120 bp, Artificial Sequence
  ENSG00000215182_126 (sequence is synthesized)
tgatccccccactgctgttctatgagggctgcgtctttgaccggtgccacatgacggacctggatgtggtgtgctccagcctggagctgtacgcggcactctgtgcgtcccacgacatct

SEQ ID NO: 761006 - DNA, 120 bp, Artificial Sequence
  ENSG00000215182_127 (sequence is synthesized)
gcatcgattggagaggccggaccggccacatgtgcccattcacctgcccagccgacaaggtgtaccagccctgcggcccgagcaacccctcctactgctacgggaatgacagcgccagcc

SEQ ID NO: 761007 - DNA, 120 bp, Artificial Sequence
  ENSG00000215182_128 (sequence is synthesized)
tcggggctctgccggaggccggccccatcaccgaaggctgcttctgtccggagggcatgaccctcttcagcaccagtgcccaagtctgcgtgcccacgggctgccccaggtgtctggggc

SEQ ID NO: 761008 - DNA, 120 bp, Artificial Sequence
  ENSG00000215182_129 (sequence is synthesized)
cccacggagagccggtgaaggtgggccacaccgtcggcatggactgccaggagtgcacgtgtgaggcggccacgtggacgctgacctgccgacccaagctctgcccgctgccccctgcct

SEQ ID NO: 761009 - DNA, 120 bp, Artificial Sequence
  ENSG00000215182_130 (sequence is synthesized)
gccccctgcccggcttcgtgcctgtgcctgcagccccacaggccggccagtgctgcccccagtacagctgcgcctgcaacaccagccgctgccccgcgcccgtgggctgtcctgagggcg

SEQ ID NO: 761010 - DNA, 120 bp, Artificial Sequence
  ENSG00000215182_131 (sequence is synthesized)
cccgcgcgatcccgacctaccaggagggggcctgctgcccagtccaaaactgcagctggacagtgtgcagcatcaacgggaccctgtaccagcccggcgccgtggtctcctcgagcctgt

SEQ ID NO: 761011 - DNA, 120 bp, Artificial Sequence
  ENSG00000215182_132 (sequence is synthesized)
gcgaaacctgcaggtgtgagctgccgggtggccccccatcggacgcgtttgtggtcagctgtgagacccagatctgcaacacacactgccctgtgggcttcgagtaccaggagcagagcg

SEQ ID NO: 761012 - DNA, 120 bp, Artificial Sequence
  ENSG00000215182_133 (sequence is synthesized)
ggcagtgctgtggcacctgtgtgcaggtcgcctgtgtcaccaacaccagcaagagccccgcccacctcttctaccccggcgagacctggtcagacgcagggaaccactgtgtgacccacc

SEQ ID NO: 761013 - DNA, 120 bp, Artificial Sequence
  ENSG00000215182_134 (sequence is synthesized)
agtgtgagaagcaccaggatgggctcgtggtggtcaccacgaagaaggcgtgccccccgctcagctgttctctggacgaggcccgcatgagcaaggacggctgctgccgcttctgcccgc

SEQ ID NO: 761014 - DNA, 120 bp, Artificial Sequence
  ENSG00000215182_135 (sequence is synthesized)
cgcccccgcccccgtaccagaaccagtcgacctgtgctgtgtaccataggagcctgatcatccagcagcagggctgcagctcctcggagcccgtgcgcctggcttactgccgggggaact

SEQ ID NO: 761015 - DNA, 120 bp, Artificial Sequence
  ENSG00000215182_136 (sequence is synthesized)
gtggggacagctcttccatgtactcgctcgagggcaacacggtggagcacaggtgccagtgctgccaggagctgcggacctcgctgaggaatgtgaccctgcactgcaccgacggctcca

SEQ ID NO: 761016 - DNA, 120 bp, Artificial Sequence
  ENSG00000215182_137 (sequence is synthesized)
gccgggccttcagctacaccgaggtggaagagtgcggctgcatgggccggcggtgccctgcgccgggcgacacccagcactcggaggaggcggaacccgagcccagccaggaggcagaga

SEQ ID NO: 761017 - DNA, 120 bp, Artificial Sequence
  ENSG00000215182_138 (sequence is synthesized)
gtgggagctgggagagaggcgtcccagtgtcccccatgcactgaccagcactgccgccctcctgacctccaaggagaacctcccatatgtcctctgagctcggcttccaaggccagtgga

SEQ ID NO: 761018 - DNA, 120 bp, Artificial Sequence
  ENSG00000215182_139 (sequence is synthesized)
acttgtgcccctgtccaggcggctgcagctttgaacacactgtccacgcccgctttcttgtggagggtgtgggctatgggtcacctgctgcctggaggaggggcccttacccaccccgcc

SEQ ID NO: 761019 - DNA, 120 bp, Artificial Sequence
  ENSG00000215182_140 (sequence is synthesized)
tgcagccacctctcaggaccagccccggggctggccgagctcctctggccatgcatccagcctgctgttctggggacgtgagcatcacctgagggtctcaggaatgacgcttggacatgg

SEQ ID NO: 761020 - DNA, 120 bp, Artificial Sequence
  ENSG00000215182_141 (sequence is synthesized)
tgatcagctgcctggtggctgcaggaggaagaacctcactcctacctcagccctcagcctgcgctcccctcctcagtacacggccaatctgttgcataaatacacttgagcattttgcaa

SEQ ID NO: 761021 - DNA, 120 bp, Artificial Sequence
  ENSG00000215183_0 (sequence is synthesized)
gagggcagggagatagtgtgagacaggagcccaggggagaaagacagaaactaagactcaaggagcaacgcaaagcaaagtcaaggagtcaagaccagagtagctgagcagaggccaaga

SEQ ID NO: 761022 - DNA, 120 bp, Artificial Sequence
  ENSG00000215183_1 (sequence is synthesized)
agggtctgagagggctgtgcagcagcaatggccctaaggatgctctgggctggacaggccaaggggatcctaggaggctgggggatcatctgcttggtgatgtctctactcctccagcac

SEQ ID NO: 761023 - DNA, 120 bp, Artificial Sequence
  ENSG00000215183_2 (sequence is synthesized)
gtcttggctccgcaaggactgtttccattgcacctgtctgcatcctgttggcgtgggctgctgtgacacgtcccagcatcccatcgacttcccggctgggtgtgaggtacgtcaggaggc

SEQ ID NO: 761024 - DNA, 120 bp, Artificial Sequence
  ENSG00000215183_3 (sequence is synthesized)
aggaacctgccagttctccttggtgcaaaaatctgaccctcggctgccctgcaaagggggagggcctgacccagaatggggctcagccaacacccctgttcctggggctcctgctcccca

SEQ ID NO: 761025 - DNA, 120 bp, Artificial Sequence
  ENSG00000215183_4 (sequence is synthesized)
ctccagctaaactcaactgatcatccatctgctgactgctcactgctgctgccacttccagggaaaccactagcagctgccaatgtattctgaacaaataaattaatgctatagctgaaa

SEQ ID NO: 761026 - DNA, 120 bp, Artificial Sequence
  ENSG00000215183_5 (sequence is synthesized)
aagacctttgggccctcgtgctagacaggccttcgaatccacctgctccagcccagagagcaggcccaggccgtgcctcccacaccgcagccgacctcagagcaccctgcctcaactccc

SEQ ID NO: 761027 - DNA, 120 bp, Artificial Sequence; identical to SEQ ID NO: 540132
  ENSG00000215186_0 (sequence is synthesized)

SEQ ID NO: 761028 - DNA, 120 bp, Artificial Sequence; identical to SEQ ID NO: 540133
  ENSG00000215186_1 (sequence is synthesized)

SEQ ID NO: 761029 - DNA, 120 bp, Artificial Sequence
  ENSG00000215186_2 (sequence is synthesized)
ggatagccagtaccaagaactagcagtagccctggagtcaagctcagtgacaatcagtcaactcaatgaaaacatagaatcattgaaacagcagaagaaacaagtggaacatcagctgga

SEQ ID NO: 761030 - DNA, 120 bp, Artificial Sequence
  ENSG00000215186_3 (sequence is synthesized)
atggagcggttagagacaatcaacatcctcacattggaaaaggcagacttgaagaccaccctttaccatactaaacgtgctgcccgacacttcgaagaagagtccaaggatctggctggc

SEQ ID NO: 761031 - DNA, 120 bp, Artificial Sequence
  ENSG00000215186_4 (sequence is synthesized)
cgcctgcaatactccttacagcgtattcaagaattggagcgggctctctgtgctgtgtctacacagcagcaggaagaggacaggtcctcgagctgcagagaagcggtcctccaccggcgg

SEQ ID NO: 761032 - DNA, 120 bp, Artificial Sequence
  ENSG00000215186_5 (sequence is synthesized)
ttacagcagaccataaaggagcgggcgctgctgaacgcacacgtgacacaggtgacagagtcactaaaacaagtccagctagagcgagacgaatatgctaaacacataaaaggagagagg

SEQ ID NO: 761033 - DNA, 120 bp, Artificial Sequence; identical to SEQ ID NO: 540138
  ENSG00000215186_6 (sequence is synthesized)

SEQ ID NO: 761034 - DNA, 120 bp, Artificial Sequence
  ENSG00000215186_7 (sequence is synthesized)
cagatggctaagcccccatccctggcgcccccagcagtgacctctgtggtggaacagctacaagatgaggccaaacacctgaggcaggaggtggaaggtctggagggaaagctccaatcc

SEQ ID NO: 761035 - DNA, 120 bp, Artificial Sequence
  ENSG00000215186_8 (sequence is synthesized)
agagagtgcgggagcaggagagactgtgtgaacaaaacgagaggcttcgggagcagcagaagacgctacaggagcagggtgagaggctgcgaaagcaggagcagaggctacgcaaacagg

SEQ ID NO: 761036 - DNA, 120 bp, Artificial Sequence
  ENSG00000215186_9 (sequence is synthesized)
aggagaggctgcgaaaggaggaggagaggctgcaaaagcaggaaaagaggctgtgggaccaggaggagaggctgtggaagaaggaggagaggctacaaaagcaggaggagaggctcgcgc

SEQ ID NO: 761037 - DNA, 120 bp, Artificial Sequence
  ENSG00000215186_10 (sequence is synthesized)
gcaggaggagaggctcgcgctctcccagaaccacaagctcgacaagcagctggccgagccacagtgcagcttcgaggatctgaacaacgagaaaaagagcgcactgcagttggagcagca

SEQ ID NO: 761038 - DNA, 120 bp, Artificial Sequence
  ENSG00000215186_11 (sequence is synthesized)
agctagacgaggagcacctagaagctgccagccagcagaaccaacagctagagacccagctaagcctcgtggctctcccgggagaaggagatggaggacaacatctggacagtgaggagg

SEQ ID NO: 761039 - DNA, 120 bp, Artificial Sequence
  ENSG00000215186_12 (sequence is synthesized)
aggaggcgcctcggcccacgccaaacatcccagaggacctggagagccgggaggccacgagcagctttatggacctcccgaaggagaaggcggacgggacggagcaggtggagagacgag

SEQ ID NO: 761040 - DNA, 120 bp, Artificial Sequence
  ENSG00000215186_13 (sequence is synthesized)
agcttggattcgtccagccttctggagtgacagacggcatgagagagtccttcaccgtatatgaaagccagggggcagtgccaaacacgcggcaccaggagatggaggatgtcatcaggc

SEQ ID NO: 761041 - DNA, 120 bp, Artificial Sequence
  ENSG00000215186_14 (sequence is synthesized)
tggcccagaaggaggaggagatgaaggtgaagctgctggagctgcaagagttggtgttgccccttgtgggcaaccatgaggggcatggcaaattcctcatcgctgcccagaaccctgctg

SEQ ID NO: 761042 - DNA, 120 bp, Artificial Sequence
  ENSG00000215186_15 (sequence is synthesized)
atgagcccactccaggggccccagccccccaggaacttggggctgccggtgagcaggatgatttttatgaagtgagcctggacaacaacgtggagcctgcaccaggagcggccagggagg

SEQ ID NO: 761043 - DNA, 120 bp, Artificial Sequence
  ENSG00000215186_16 (sequence is synthesized)
gttctccccatgacaaccccactgtacagcagatcgtgcagctgtctcctgtcatgcaggacacctaggagcacccaggcttgcccagcaaaccctgcgtgccattcttctaccaggcag

SEQ ID NO: 761044 - DNA, 90 bp, Artificial Sequence; identical to SEQ ID NO: 470833
  ENSG00000215186_17 (sequence is synthesized)

SEQ ID NO: 761045 - DNA, 120 bp, Artificial Sequence
  ENSG00000215187_0 (sequence is synthesized)
agaccagagccttggctcaaaggcaaacaaaaggaaatgcccggctccccatggctgtggccagcaccttcataccagggctcaaccctcagaaccctcattatatcccagggtacactg

SEQ ID NO: 761046 - DNA, 120 bp, Artificial Sequence
  ENSG00000215187_1 (sequence is synthesized)
gacactgcccactacttcggttcagcgtgggccagacctatgggcaggtgactggtcagctacttcgaggccctcctggcctagcctggccccctgtccaccgcacacttctgcctccca

SEQ ID NO: 761047 - DNA, 120 bp, Artificial Sequence
  ENSG00000215187_2 (sequence is synthesized)
ttcggcctccaagatctcctgaggttcccagggagagtctacctgtcaggcgtgggcaagaaaggctcagctccagcatgatccctgggtacacaggttttgtaccccgggcacagttca

SEQ ID NO: 761048 - DNA, 120 bp, Artificial Sequence
  ENSG00000215187_3 (sequence is synthesized)
tctttgccaagaactgcagccaggtctgggccgaggctctgagtgactttactcacttgcatgaaaagcaagggagtgaagagctaccaaaggaggccaagggaagaaaggacacagaga

SEQ ID NO: 761049 - DNA, 120 bp, Artificial Sequence
  ENSG00000215187_4 (sequence is synthesized)
tcggaagttcttcatgtcaggcttcactggctatgtgccctgcgcccgcttcctcttcggctccagctttcctgtgctcaccaaccaggcactgcaggaatttgggcagaagcactcacc

SEQ ID NO: 761050 - DNA, 120 bp, Artificial Sequence
  ENSG00000215187_5 (sequence is synthesized)
aggcagtgcccaggaccccaaacatctccccccacttcccagaacataccctcagaacctgggtcttttacctaactatgggggctacgtgccagggtataagttccagtttggccacac

SEQ ID NO: 761051 - DNA, 120 bp, Artificial Sequence
  ENSG00000215187_6 (sequence is synthesized)
atttggccatctcacccatgatgctctgggcctcagcaccttccagaagcagctcttggcttaggccactggacatcaagttcccttcccttttcatcctatcccagccatccttttgga

SEQ ID NO: 761052 - DNA, 120 bp, Artificial Sequence
  ENSG00000215187_7 (sequence is synthesized)
agggagagaggtgggtgggagggtgggagggtgggggaacacaaagagaaaatggtttggaggctgagcaccttttttattaataggtataataaataaataaataaatacataaacaga

SEQ ID NO: 761053 - DNA, 120 bp, Artificial Sequence
  ENSG00000215187_8 (sequence is synthesized)
tgggggctacgtgccaggtgagaagagcccccggggaggctttggggactggaatgtttgtttgtatgggtatggggtgggttgggtggtttgtgggggttgaaactaatagatatggga

SEQ ID NO: 761054 - DNA, 120 bp, Artificial Sequence
  ENSG00000215187_9 (sequence is synthesized)
gggctcagatcatgtggttcagctttattatcaggcagaaaaggaaaccgaggtagctacccacagtggggaattagggccagattttagagggctgtttggaggtctagccaactggct

SEQ ID NO: 761055 - DNA, 120 bp, Artificial Sequence
  ENSG00000215187_10 (sequence is synthesized)
tggaggtggtggaacaagcttctccctactccatggatgacagggaccctcggaagttcttcatgtcagctttcctgtgctcaccaaccaggcactgcaggaatttgggcagaagcactc

SEQ ID NO: 761056 - DNA, 120 bp, Artificial Sequence
  ENSG00000215187_11 (sequence is synthesized)
cagagccttggctcaaaggcaaacaaaaggaaatgcccggctccccatggctgtggccagcaccttcataccagggctcaaccctcagaaccctcattatatcccaggcgtgggccagac

SEQ ID NO: 761057 - DNA, 120 bp, Artificial Sequence
  ENSG00000215193_0 (sequence is synthesized)
acagaaggcgatgggccgagagctgaggaactacaactcctagagtactccgcgccgccgggacgccgcgcggctgcggggctgggcgagcgcaaagatgtccgcgcccgctgccgggag

SEQ ID NO: 761058 - DNA, 120 bp, Artificial Sequence
  ENSG00000215193_1 (sequence is synthesized)
gcgaggccaactcgggatatcccggagcctctggggaggcggtcactccgacgtctgaggacctgggccttggacccggactcgttatgaagagcgattcttcgacctctgcagcccccc

SEQ ID NO: 761059 - DNA, 120 bp, Artificial Sequence
  ENSG00000215193_2 (sequence is synthesized)
acccctgcgcagcagcgagccggtgcgcgcggtcccggcccgggcgccggccgtggaccttctggaggaggcggccgacctcctggtggtgcacctggacttccgggcggcgctggagac

SEQ ID NO: 761060 - DNA, 120 bp, Artificial Sequence
  ENSG00000215193_3 (sequence is synthesized)
gggcggcgctggagacctgcgagcgggcctggcagagtctggccaaccacgccgtggcagaggaacccgcgggcacctcattggaggtgaagtgctccctgtgtgttgtggggatccagg

SEQ ID NO: 761061 - DNA, 120 bp, Artificial Sequence
  ENSG00000215193_4 (sequence is synthesized)
ccctggcagaaatggatcggtggcaagaagtcctctcctgggtccttcagtattaccaggtccctgaaaagctaccccccaaagtcctggagctgtgcattcttttatacagcaaaatgc

SEQ ID NO: 761062 - DNA, 120 bp, Artificial Sequence
  ENSG00000215193_5 (sequence is synthesized)
aagagcctggagctgtgctggatgtggtgggtgcctggctccaagacccagccaatcaaaaccttccagaatatggagccttggcagaatttcacgtgcagcgggtgctgctgcctctgg

SEQ ID NO: 761063 - DNA, 120 bp, Artificial Sequence
  ENSG00000215193_6 (sequence is synthesized)
gctgcttatcggaggctgaggagctagtggtgggctctgcagcctttggtgaggagcggcgactggatgtacttcaggccattcacacagcgaggcagcagcagaaacaggaacactcag

SEQ ID NO: 761064 - DNA, 120 bp, Artificial Sequence
  ENSG00000215193_7 (sequence is synthesized)
gctctgaggaggcccagaagccaaacctggaaggctctgtctcccacaagttcctgtcactaccgatgttggttcgccagctttgggactctgcggtgagccacttcttttctctgccct

SEQ ID NO: 761065 - DNA, 120 bp, Artificial Sequence
  ENSG00000215193_8 (sequence is synthesized)
tcaaaaagagtctcctggctgccttgatcctctgtctcctggtggtgagatttgatccagcttccccttcctccctgcacttcctctacaagctggcccagctcttccgctggatccgga

SEQ ID NO: 761066 - DNA, 120 bp, Artificial Sequence
  ENSG00000215193_9 (sequence is synthesized)
aggctgcattttctcgcctctaccagctccgcatccgtgactgagggtccctgcgcaccacagcctctctgctcctcacgtccgtggccacagaagcagagcgacagagcgacacatcca

SEQ ID NO: 761067 - DNA, 120 bp, Artificial Sequence
  ENSG00000215193_10 (sequence is synthesized)
caggcgcccctggggaaatgggaccagcctaatctcgcggagtgcactgtgtcttgctgcctgggtgccctctcctttgcaccctacttcggctggtcgcggtagatgatgtggaaacaa

SEQ ID NO: 761068 - DNA, 120 bp, Artificial Sequence
  ENSG00000215193_11 (sequence is synthesized)
agcaggaccagcaggcacagcacctccagaacagtgccccggatgaccagaggccccttgaaaaggaggggtttggggacagggactgtgtccatgaaacattccatcttcttggtgaag

SEQ ID NO: 761069 - DNA, 120 bp, Artificial Sequence
  ENSG00000215193_12 (sequence is synthesized)
gcaaggggttggttcttcaggtcaggatgttaatggagctggaagttcagaaaaagcctggtgaagtgacccttggcctttcacttcttgagaaacatacttctttgctgggcatggtga

SEQ ID NO: 761070 - DNA, 74 bp, Artificial Sequence
  ENSG00000215193_13 (sequence is synthesized)
atacttcttgtgaggtgggtggatcacttgtggccaggagttcaaaacctgcctggccaacatggtgaaacccc

SEQ ID NO: 761071 - DNA, 120 bp, Artificial Sequence
  ENSG00000215193_14 (sequence is synthesized)
aggctgaggcaggagaatcacttgagccagggaggcaaaagttgcagtgagctgagattgtgctaccgcactctctcaaaacaaacaaaaaaacatgccccacaggacagtaccttaatt

SEQ ID NO: 761072 - DNA, 120 bp, Artificial Sequence
  ENSG00000215193_15 (sequence is synthesized)
acaaacaaaaaaacatgccccacaggacagtaccttaattagctagagtagatctgagagggcctcttcttgcctgcactgtgctccccagagctgatctaattctgtatcaataggctg

SEQ ID NO: 761073 - DNA, 120 bp, Artificial Sequence
  ENSG00000215193_16 (sequence is synthesized)
ttcccatggtcttgccatgcgcttgaagctgcaggagccttctcactgttcaggctggggtgtggttttcagaaccaccgggttgactactgaaaaccaagtgagccttacagctcttat

SEQ ID NO: 761074 - DNA, 120 bp, Artificial Sequence
  ENSG00000215193_17 (sequence is synthesized)
cgctgggtaaagtgatcttgcctggtgcctcttggtcttcagctcaattttccaggttgtcctggccaagtcttgctctgttacgctcagtgcctctgcccactctttccccgccagccc

SEQ ID NO: 761075 - DNA, 120 bp, Artificial Sequence
  ENSG00000215193_18 (sequence is synthesized)
ttccctcccgccctgcaaacttgtcccttggctgtttcaccaggttctgcctgtatccttgcctccttggtacacaccatttcaggttcttccctttctgtgtcccattgtcctagttat

SEQ ID NO: 761076 - DNA, 120 bp, Artificial Sequence
  ENSG00000215193_19 (sequence is synthesized)
gttctgttgtttgtgtaatgcccaaatttttctgctcgtgtggccttgaaaagtaggccagcctcagaggctgctgagctgaaaatggaactgagtaatcaggtgagctggaagggatgt

SEQ ID NO: 761077 - DNA, 120 bp, Artificial Sequence
  ENSG00000215193_20 (sequence is synthesized)
ggggggcggggcagacgggagacatgggttttgaaggcagtgaacaataaaaccttagggaggtggcaccgaggccttagcatttgaggagctgaaatgtttcagtgttgttttctcacc

SEQ ID NO: 761078 - DNA, 120 bp, Artificial Sequence
  ENSG00000215193_21 (sequence is synthesized)
agccacaagcatcttatgagtttctgtgcaaggaagcgtagagcactgctgtgctgtcaggatgaagaagggctttctgcaggggctggcctttctctacccagaggccaagcaggctgc

SEQ ID NO: 761079 - DNA, 120 bp, Artificial Sequence
  ENSG00000215193_22 (sequence is synthesized)
cctgcactgtgtccttggtgttgatgcccaaaatagagaaggtgcttgctagcttttccttggtacattttcgggggttgcaaggcaacaagttttcttttgttttgtttgtttgtttgt

SEQ ID NO: 761080 - DNA, 64 bp, Artificial Sequence
  ENSG00000215193_23 (sequence is synthesized)
gctgggactacaggtgcccaccacctcgcctggctaatatttttgtatttttagtagagtcacc

SEQ ID NO: 761081 - DNA, 120 bp, Artificial Sequence
  ENSG00000215193_24 (sequence is synthesized)
acaggtgtgagccatcgcgcccggccaacttttctttagaaaaatgagtaaagtaggtaaacttcacaggccccttagaattaaatccttagggcatggttcaagtctgtaggaagcaaa

SEQ ID NO: 761082 - DNA, 120 bp, Artificial Sequence
  ENSG00000215193_25 (sequence is synthesized)
tggttcaagtctgtaggaagcaaatctatacttttttatatgggcttttaagtaaagcttagaaccctggggggagaaaagcagtcaggtgaggtttgagattccttctatagaatgatt

SEQ ID NO: 761083 - DNA, 120 bp, Artificial Sequence
  ENSG00000215193_26 (sequence is synthesized)
tcttaaaatgaaaatctgggcccacttaactaccctagataaaacgcttcaatggcttcccatggctcactggataacatctaaattcttcatggaattgaaggcccctatgtgctggtt

SEQ ID NO: 761084 - DNA, 120 bp, Artificial Sequence
  ENSG00000215193_27 (sequence is synthesized)
ttggctaagatctcccctttgatgtgggtcccctgttgattatatgtgcggccttccagctgcccaccatcacagctacagctcgctccccttggcctctgtgccttggctcgcactgtt

SEQ ID NO: 761085 - DNA, 120 bp, Artificial Sequence
  ENSG00000215193_28 (sequence is synthesized)
cctactgaaggcctagcacctgctcttggcctggtgagcccctccaccttccaggcttactcaaagaattctttctgcccctccctgtgtcccgggacctgtttcatatcgcttctgtgg

SEQ ID NO: 761086 - DNA, 120 bp, Artificial Sequence
  ENSG00000215193_29 (sequence is synthesized)
tcgtgaccccatggtcttgtaattgtgaacttctttgctgccccttcgaagctggggagtgcttgttgcagatgcatccaagaggggtaattgcgtatcaacagtggatttgctggttgt

SEQ ID NO: 761087 - DNA, 120 bp, Artificial Sequence
  ENSG00000215193_30 (sequence is synthesized)
ttctacagggttctgaagcatgcaacatagaacagatacctttaaatttaggggcgctaaggaaagcaggaaccagtaatcctcttctgtggtgggatgggagggtgggggagaggggtg

SEQ ID NO: 761088 - DNA, 120 bp, Artificial Sequence
  ENSG00000215193_31 (sequence is synthesized)
gaatggagaggaaacaggctattgttggccagccctgggtggaggtgggtgcaagcaggacagatagtgcctgggggtgggggcggagggttcgcctctaggaaggggctagaagggatg

SEQ ID NO: 761089 - DNA, 120 bp, Artificial Sequence
  ENSG00000215193_32 (sequence is synthesized)
aggaaatagttcatagcttcgtgcaggtgatccctattctgcgtgtatgtgtttgcacatgagtgtttgtagaccatagaccattaaaaaatacggaattcaaaagttacaaaaagggta

SEQ ID NO: 761090 - DNA, 120 bp, Artificial Sequence
  ENSG00000215193_33 (sequence is synthesized)
ttcttggaaaagaaagttgtttttttttagtcttgctgtgttgcccaggctggacctgaactcctgggcttgagcaagtcttcccctcagcctctggagtagctgggcctacagtgtgtg

SEQ ID NO: 761091 - DNA, 120 bp, Artificial Sequence
  ENSG00000215193_34 (sequence is synthesized)
ctgccacacccagctaatacagtctttctactcccgctctctattccccagtttcttgcccagaggcaacccttgccagtctgtttatccctccagatacagtctctgatagtaaacttt

SEQ ID NO: 761092 - DNA, 120 bp, Artificial Sequence
  ENSG00000215193_35 (sequence is synthesized)
atagtaaacttttctttctcttacacaaatgatagtagtcacatacactacacacactgtgccacgtttaaaaagaaaaaaaacaattctcggctgggcgcggtggcgcatgcctgtaat

SEQ ID NO: 761093 - DNA, 65 bp, Artificial Sequence
  ENSG00000215193_36 (sequence is synthesized)
ggaggccaaggtgggtgaatcacctgaagtcaggagttcgagagagccgggcatggtggtgggta

SEQ ID NO: 761094 - DNA, 85 bp, Artificial Sequence
  ENSG00000215193_37 (sequence is synthesized)
cacttgaacccgggaggcaagcacctgggcaacaaagagtgaaacttggtctcagaaacgaaacaaaacacaaaaacctttctca

SEQ ID NO: 761095 - DNA, 120 bp, Artificial Sequence
  ENSG00000215193_38 (sequence is synthesized)
ttggtctcagaaacgaaacaaaacacaaaaacctttctcagtcccagcatatgtggagcagcctcattcttcatagctgtgtgtcattccgttgcgtgatggggtcacagagcacagacc

SEQ ID NO: 761096 - DNA, 120 bp, Artificial Sequence
  ENSG00000215193_39 (sequence is synthesized)
tggtgcccttttcctttttaatatgtggaaacccctccatgctttccaaagcctacaagtacagcagccccaagtttagggtgagcagcagtggtcagagctctttactattacttttgg

SEQ ID NO: 761097 - DNA, 120 bp, Artificial Sequence
  ENSG00000215193_40 (sequence is synthesized)
gcaaacgcaagccaggctggcaaccaccactgccgccgaggggagatacaagcaggccagttcacactctggacgttcagtttctttctacatctagaaggtggcctctgctatccactt

SEQ ID NO: 761098 - DNA, 120 bp, Artificial Sequence
  ENSG00000215193_41 (sequence is synthesized)
aaagcagcccaaggaactgtcagaaagcgaaagtgatgacatgaaccgcgagtagggcacctccctgtgccgtcgtctgctttccttcctccctcccagcctccctgtgccgtcctctgc

SEQ ID NO: 761099 - DNA, 120 bp, Artificial Sequence
  ENSG00000215193_42 (sequence is synthesized)
tttcctccctcccagcacggaaaagccgtggggccgatggactttggcctcacatccacagatggggcctgtgggaattctactgatttactctctggcctagtcaagcaacccacccac

SEQ ID NO: 761100 - DNA, 120 bp, Artificial Sequence
  ENSG00000215193_43 (sequence is synthesized)
ggcctggccaaggtcggcctcaccgccctggcctagcacctttggaaactgaatacatggagtgttaaccagaaaaatgtctggcccttttgcctcgctgcctctggaaacctcagtgtt

SEQ ID NO: 761101 - DNA, 120 bp, Artificial Sequence
  ENSG00000215193_44 (sequence is synthesized)
tcgggctggtaggaagctacaggacagacagtgggcacggtgcctagcagcctgtcgcgcccccgcccgcctctgcattcctccagcggtggtgtacggatccagacattgtttgccacc

SEQ ID NO: 761102 - DNA, 120 bp, Artificial Sequence
  ENSG00000215193_45 (sequence is synthesized)
tctaggcctcttgataaaacagcaagtatttttcttgtcttaaagcaatgcatgtatattttagaaaatattaattgcatagaaggaaatacaggactcgtgatcccaccactcagaaat

SEQ ID NO: 761103 - DNA, 120 bp, Artificial Sequence
  ENSG00000215193_46 (sequence is synthesized)
aattactattaatacggttgattttctttcagcttttttccccctaattaattaactaattcttttttttcctgcaactcctgcttcacagactttttttttttttttaacttggcatgg

SEQ ID NO: 761104 - DNA, 90 bp, Artificial Sequence
  ENSG00000215193_47 (sequence is synthesized)
agctagcctgggcaacctagtgggaccccatttcttttttttggggggggggtgggttataaaagcccttttataaagccaattttaaac

SEQ ID NO: 761105 - DNA, 120 bp, Artificial Sequence
  ENSG00000215193_48 (sequence is synthesized)
ggtgggttataaaagcccttttataaagccaattttaaacaagaaaaaaacaaaaagtttacaaaagaaaaaaagatacagaaaaagaataacttgcttcatatgtcccaaaaagagaaa

SEQ ID NO: 761106 - DNA, 120 bp, Artificial Sequence
  ENSG00000215193_49 (sequence is synthesized)
aaaataaacgggacaatgccaacatgctcaacaataaagggttctttttcttacttttttaatacaaaatacaagcaaaggatacacatacttaaaacagagctcaggagcagacacgca

SEQ ID NO: 761107 - DNA, 120 bp, Artificial Sequence
  ENSG00000215193_50 (sequence is synthesized)
gtcctgggaacccttcaataagagcaaagcaggagtttgttttttctttgtgcagatacatacagagactgggatatgtaaaaattaagtatcacaaaagaccatcacacgattctacca

SEQ ID NO: 761108 - DNA, 120 bp, Artificial Sequence
  ENSG00000215193_51 (sequence is synthesized)
acgattctaccaatgcatgttgcatctataattcacgaacatggtcaacaagatcatgttcacttcaaccccatttcatttaaattaaagaaaaaaacctggccgggcgcggtggctcac

SEQ ID NO: 761109 - DNA, 120 bp, Artificial Sequence
  ENSG00000215193_52 (sequence is synthesized)
gactccgtcttaaaaaaaaaaaaaacaaaaataaaccttttaaataaagtggttacattctaactttaacttccttagtaccatgctgcaggtttcagcactgttaaggtattgcaagaa

SEQ ID NO: 761110 - DNA, 120 bp, Artificial Sequence
  ENSG00000215193_53 (sequence is synthesized)
tgcccaaccctctggtgtctgattgtgtatctagcaacattgcagtatgaagaaaagagatgccccgggtacgaccccatttctattaaaaataaatgtaaacacccaaccctcttggca

SEQ ID NO: 761111 - DNA, 120 bp, Artificial Sequence
  ENSG00000215193_54 (sequence is synthesized)
gcccatgcacttgagaacctgtagaaaatggcagtgtgcaaccagcatggctgcgagctcagcgtcttcactagagagagtggaggtggttaggaaagggcaggcgggaaggggccatgt

SEQ ID NO: 761112 - DNA, 120 bp, Artificial Sequence
  ENSG00000215193_55 (sequence is synthesized)
tggccggacaactgcaggtgaagatgggattgtgaagtacagtccaaggcccactcaccaagggctggatccaaatatgtggggttgggattctgtgacctacttccaattttaatattg

SEQ ID NO: 761113 - DNA, 120 bp, Artificial Sequence
  ENSG00000215193_56 (sequence is synthesized)
acctgagctcatatttagctctacatgtttcccagctcgtattttccaacagcccctttaaaacttttagcatcctcttgtcacttttgtactatccaaggtgggacggacaggtgtcag

SEQ ID NO: 761114 - DNA, 120 bp, Artificial Sequence
  ENSG00000215193_57 (sequence is synthesized)
tatccaaggtgggacggacaggtgtcagataatagcagagacttggtgaagaaatgaaagcacttttgtagaagagtgtcatttcagaaaaaagccttttttttttgagatggagtctcg

SEQ ID NO: 761115 - DNA, 78 bp, Artificial Sequence
  ENSG00000215193_58 (sequence is synthesized)
tcgatctcctgacctcgtgatcctggagagaaaaaagcttctttaatgacgacctcaacataatttacatggagaagt

SEQ ID NO: 761116 - DNA, 120 bp, Artificial Sequence
  ENSG00000215193_59 (sequence is synthesized)
ttctttaatgacgacctcaacataatttacatggagaagtttcttaggtggaaaaccgatttgtatggtcctcagaatgtaacctacaggttcttgccctcagaaaaatgcatgcatact

SEQ ID NO: 761117 - DNA, 120 bp, Artificial Sequence
  ENSG00000215193_60 (sequence is synthesized)
tttatgttacaggcttattttccaaatgcggtagagggccatcccttctttggcttcttgccttgtctctgaccccactgactgccccttttctgcctccatagctagtttcttattttc

SEQ ID NO: 761118 - DNA, 80 bp, Artificial Sequence
  ENSG00000215193_61 (sequence is synthesized)
actgccccttttctgcctccatagctagtttcttattttcctttggcagatggaatcttgctcttgtcacctaggctgga

SEQ ID NO: 761119 - DNA, 120 bp, Artificial Sequence
  ENSG00000215193_62 (sequence is synthesized)
ggttcaagccagcgaggtagatattatcattttagagacagcaaaacagactcagaggggctaatgtgcccagtgccccaccgcttttaaatggtagagctgggatttgaatctaggcat

SEQ ID NO: 761120 - DNA, 120 bp, Artificial Sequence
  ENSG00000215193_63 (sequence is synthesized)
acaggtaccaggatttctgttcttatctcccccatagcacctggaatgaggccatccatgtaagaggccaagtaataaagatttgttgaatgaacttggattttggccttaggaattagg

SEQ ID NO: 761121 - DNA, 120 bp, Artificial Sequence
  ENSG00000215193_64 (sequence is synthesized)
gaaggaagaaatagaagcagcaagagttggtgagcaataagacccgcaccagggctgaagggtggaggtggggcaggggagggctctgtgctttggcatctgtttagtagtatcgtcgcc

SEQ ID NO: 761122 - DNA, 120 bp, Artificial Sequence
  ENSG00000215193_65 (sequence is synthesized)
cagctccctccagagaaagagcaggaggtgttcttctcagatgtaccagcaatgacaaagcctggcgggtgtcctcctgggtaggtataaatacaagctggtagtttcattggatgactc

SEQ ID NO: 761123 - DNA, 120 bp, Artificial Sequence
  ENSG00000215193_66 (sequence is synthesized)
acacagataagccatgctcttggttaccagtggacttagctgggtctcaaagaatgggctgctttctctggaaagctggggagctggtaaaattttttggtcgccccaccagagacatcc

SEQ ID NO: 761124 - DNA, 120 bp, Artificial Sequence
  ENSG00000215193_67 (sequence is synthesized)
tacccattcccagtccctctgtgggctctgacatctctgtccggcgggcaccccctgctctggaacattctgggaatgcttcccactccccttttagtacttgtttgtgttctgtcctgt

SEQ ID NO: 761125 - DNA, 120 bp, Artificial Sequence
  ENSG00000215193_68 (sequence is synthesized)
tcctggatttcatggtctccatggtgacaagtgcttgttttcagaggtgctaaagacaatggctaaaagatgtgctctattaatcctcccaggaaacatattttgcaaaagccttttttt

SEQ ID NO: 761126 - DNA, 120 bp, Artificial Sequence
  ENSG00000215193_69 (sequence is synthesized)
ttttttttttgagaaacaaggcctaaccccaatggagtaatttgctgcgtaaatgagagacatcatgggattgtggttaagagtgtgggtcccagacccataatgcccaagtttgtatct

SEQ ID NO: 761127 - DNA, 82 bp, Artificial Sequence
  ENSG00000215193_70 (sequence is synthesized)
ttgtaagctggagggcagtggcatgatctcgacacactgcaacatccacttcctaggttcaagcgattctcttgcctcagcc

SEQ ID NO: 761128 - DNA, 120 bp, Artificial Sequence
  ENSG00000215193_71 (sequence is synthesized)
aaataatctttcctgtgcctcagttacttcataggtttgttgtgaggattaactggtgctaatccatgtaaaacactgaaaaggtgcatagcatgtagtgagcaggtgctagttattatt

SEQ ID NO: 761129 - DNA, 120 bp, Artificial Sequence
  ENSG00000215193_72 (sequence is synthesized)
actgttgctcttaattaagtgaggtaaggaggggagagttggagtggtagaacccagcatcttgtgaacatcagaccacagaaaaggcagcacttctgattcctgttcttagcctaggaa

SEQ ID NO: 761130 - DNA, 60 bp, Artificial Sequence
  ENSG00000215193_73 (sequence is synthesized)
gaaaaggcagcacttctgattcctgttcttagcctaggaactaggctttgcaaatggctc

SEQ ID NO: 761131 - DNA, 76 bp, Artificial Sequence
  ENSG00000215193_74 (sequence is synthesized)
tctgatttcttaaagtgctaagcctttttatatattcatttcagaccatgtttaattttctaaatatgcaatacat

SEQ ID NO: 761132 - DNA, 120 bp, Artificial Sequence
  ENSG00000215193_75 (sequence is synthesized)
catttcagaccatgtttaattttctaaatatgcaatacattcatagggtttttgaaaaggcttgaaaaagtctagtgtgaaagcagtctgtattagtccattttcacactgctttagaga

SEQ ID NO: 761133 - DNA, 90 bp, Artificial Sequence
  ENSG00000215193_76 (sequence is synthesized)
agtatcagagactgggtaattgttgtgcatggctgtgaggcctcaggaaacaagcagtcatagtggaaggcaaaggggaagcaaggcaca

SEQ ID NO: 761134 - DNA, 120 bp, Artificial Sequence
  ENSG00000215193_77 (sequence is synthesized)
tcttacatggcagcagcagagagaatgaggggggatgccacactttaaaaccatcagaactcgtgagaactgactcactatcacaagaacaacaggggagaaactgttcctgtgatccag

SEQ ID NO: 761135 - DNA, 74 bp, Artificial Sequence
  ENSG00000215193_78 (sequence is synthesized)
gtcccatctcttcatttagcaagttcacctaccccaatggcagctatggccgttagttttttttttttttcttt

SEQ ID NO: 761136 - DNA, 76 bp, Artificial Sequence
  ENSG00000215193_79 (sequence is synthesized)
tatcacctcccatctcttcatttagcaagttcacctaccccaatggcagctatggccgttagtttttttttttttt

SEQ ID NO: 761137 - DNA, 71 bp, Artificial Sequence
  ENSG00000215193_80 (sequence is synthesized)
gccattagttttaaatttactcttccagaggtaaatttaatacaccaatacaaaaccagtatggatataga

SEQ ID NO: 761138 - DNA, 120 bp, Artificial Sequence
  ENSG00000215193_81 (sequence is synthesized)
taaatttaatacaccaatacaaaaccagtatggatatagatcctagtttcttctcctttttataaaaaaaacctgtagtatattatgtactctgttttattccttcctttttttttctta

SEQ ID NO: 761139 - DNA, 120 bp, Artificial Sequence
  ENSG00000215193_82 (sequence is synthesized)
tccttcctttttttttcttataaaaaatacagagatggggtcttactacactgaccaggctggtgttgaacttgcctcaagtgatcctcccatcttgacctcccaaagtgctgggattat

SEQ ID NO: 761140 - DNA, 120 bp, Artificial Sequence
  ENSG00000215193_83 (sequence is synthesized)
agatgatttttttatttttcaaagaagtggcatgattttgatgacaataaaggacaatatgtaattaatggtaattataatacagccttctagaggccaggtgcagtggcccatgcccgt

SEQ ID NO: 761141 - DNA, 74 bp, Artificial Sequence
  ENSG00000215193_84 (sequence is synthesized)
tacagccttctagaggccaggtgcagtggcccatgcccgtaatcccaccactttgggtggccaaggcaggtgga

SEQ ID NO: 761142 - DNA, 120 bp, Artificial Sequence
  ENSG00000215193_85 (sequence is synthesized)
cgagactctgtctcacacatacacacacaaaaaaagtataaatatatagctttctagatataggattggactggttttggttctggctctgttactaatttgccctataactttgcataa

SEQ ID NO: 761143 - DNA, 120 bp, Artificial Sequence
  ENSG00000215193_86 (sequence is synthesized)
ctgttactaatttgccctataactttgcataagtcatttaatctcgggtccaatttttctcacctccaagatggggacaaaaattatcttccttggctgggtgcggtggctcatgcctgc

SEQ ID NO: 761144 - DNA, 62 bp, Artificial Sequence
  ENSG00000215193_87 (sequence is synthesized)
aaattagctgggtgtgatggtgcacacctttaatcccagctactcaggaggaggctgaggca

SEQ ID NO: 761145 - DNA, 120 bp, Artificial Sequence
  ENSG00000215193_88 (sequence is synthesized)
tattattgtgtaaaatgagtaaaagtctataagaaaaactttgaaaagtattaagtaatacacatgtgtatgtgtgcgtgtgtagacatatatatataatatatatacacatatgcaatg

SEQ ID NO: 761146 - DNA, 120 bp, Artificial Sequence
  ENSG00000215193_89 (sequence is synthesized)
aatggagtaatgaaaatactatataataaatataaaatggattaaaactatataaaatagatgcatgaaatggctacatagatatggatgtttgcatataggcacatttagctggattaa

SEQ ID NO: 761147 - DNA, 120 bp, Artificial Sequence
  ENSG00000215193_90 (sequence is synthesized)
gttagatttaaatggtccaatagagaactgtgcatacaattacataggcaaccacaaatcaaccctttctctgggctatctaaaataatcaggtactagaccaaaaaatgacatgctgtc

SEQ ID NO: 761148 - DNA, 120 bp, Artificial Sequence
  ENSG00000215193_91 (sequence is synthesized)
tgccttaccttttagtgatgatttgtaggaagaggaaggtaggggctggtgagtggaaaagtagtagagtttgtgagggaatgttctgtatgtctgaagacaaagtctggagattggtgg

SEQ ID NO: 761149 - DNA, 120 bp, Artificial Sequence
  ENSG00000215193_92 (sequence is synthesized)
gccagaaggtgtgaatctactctgaaggacaggcaagagtccagcccagggaaaaaggtgcagatgggtaggatttgggtgggtacttgaattaaaaaaatgaatttgtgaggcaatatt

SEQ ID NO: 761150 - DNA, 120 bp, Artificial Sequence
  ENSG00000215193_93 (sequence is synthesized)
gctggagtcaaaaccaaaaaatcaaattgaccagggcaaaaaatagcctggggcctagcatggctctgctgccacgtaggatgactggacctctttccaggttcgtgttaacagtccata

SEQ ID NO: 761151 - DNA, 120 bp, Artificial Sequence
  ENSG00000215193_94 (sequence is synthesized)
ctacttatggtatacgtgaaatgctttctattcattcaagcaaccttactaaaaacaccccatgaaaataaaagtctatatcttcccttcaatatacattcatatgtgcttattttaagc

SEQ ID NO: 761152 - DNA, 120 bp, Artificial Sequence
  ENSG00000215193_95 (sequence is synthesized)
atatatctaccaatttgagtttggcattctttttcatttaatattattacctattcagcttccaacattatcacttccttactacacacatttgtttcctaggactgctgttaacaaatt

SEQ ID NO: 761153 - DNA, 120 bp, Artificial Sequence
  ENSG00000215193_96 (sequence is synthesized)
gccacaaatgtatggcttaaaacaacagaaatttattatctcacagctctgaaggccagaagtcagccaaagcctctgcctctgaaggctgtaggcaagattccttccttgtttcttcca

SEQ ID NO: 761154 - DNA, 120 bp, Artificial Sequence
  ENSG00000215193_97 (sequence is synthesized)
gcttctgctggctctaagtgttccctggcctgcgacagcatcactccaatccctgcctcagtcttcgcttgaccttcttcgtacctctgtatcttctctgccaaggatgcatgtcactga

SEQ ID NO: 761155 - DNA, 120 bp, Artificial Sequence
  ENSG00000215193_98 (sequence is synthesized)
atttaagagccaccctaatccaggatgatctcatcttgaggtcctcaattacatcaagatccttattccaaataatgtcacattctgagattttaggcaaacatatctttggggggccaa

SEQ ID NO: 761156 - DNA, 120 bp, Artificial Sequence
  ENSG00000215193_99 (sequence is synthesized)
aattcaatcccctaatccatgttagtaaccatgcagtgttccttcttatttctatgttgaccttttcagctctttctatttattgttattatttttgagatagagtttcaatcttgttgc

SEQ ID NO: 761157 - DNA, 120 bp, Artificial Sequence
  ENSG00000215193_100 (sequence is synthesized)
gagccaccatgcctggccagctctttctaactaaaaaataataataataataataaaaaataaaagatgatacttgcaaaatacctcaagtgtacctcatttacctcaaatatacctcat

SEQ ID NO: 761158 - DNA, 120 bp, Artificial Sequence
  ENSG00000215193_101 (sequence is synthesized)
ggtccgaaagtatttagtcagcaatgtaccattatagaaaaacacatagcttgtggctccaactttaaaaccagaataaccaagtgaaaagtcagtacagattctcacttctacttaaaa

SEQ ID NO: 761159 - DNA, 120 bp, Artificial Sequence
  ENSG00000215193_102 (sequence is synthesized)
aatcaaaggtacacattgggaattgaacagctatgttttttcttctttctagagatgtgacatacatattttctggtcagtaatattctaccaatggtattaattcaaagcaggtagatg

SEQ ID NO: 761160 - DNA, 120 bp, Artificial Sequence
  ENSG00000215193_103 (sequence is synthesized)
accagcgatgctgtttactacatcctacgcatgctgagatagatgagtgggacaccatctcggtaggaaagagtttgacaggaagaagaaattgcagagtccctgcctgtcccagagaac

SEQ ID NO: 761161 - DNA, 120 bp, Artificial Sequence
  ENSG00000215193_104 (sequence is synthesized)
ctaacaaactgatctatatggaaaggattttcagcaaacatgcacaaacacagttaatatgctggaagaagaggatagcttttagtctatttccagcacacggcctacactcactggtac

SEQ ID NO: 761162 - DNA, 120 bp, Artificial Sequence
  ENSG00000215193_105 (sequence is synthesized)
cccatacaacaggaatgaatgccgacttagcatttttgccttcacagcgctggcaactaaaaggctcacagatactctgatctttaagcagataatcatggaattctcaacatcatatcc

SEQ ID NO: 761163 - DNA, 120 bp, Artificial Sequence
  ENSG00000215193_106 (sequence is synthesized)
actaggttaggctgagggttcatctataaaagtatttttccaaaaataatgcttaaaagagacttctagaaacagtgggactgtatcaggatcaacagaagacttcttgacccaaagatt

SEQ ID NO: 761164 - DNA, 120 bp, Artificial Sequence
  ENSG00000215193_107 (sequence is synthesized)
caaatatagaactaggaattgattttcacatgtagtttttaggtaaaggacatctctttcagttgattcctacagccaagactagctttgatcctgggagattcagaaacctcaagatgg

SEQ ID NO: 761165 - DNA, 120 bp, Artificial Sequence
  ENSG00000215193_108 (sequence is synthesized)
gtagctggcttgagtaacatcctagataatagtcccagtcaaaaaccccattgaggttgaaggactggaaactgacctgtgtgaaaaagagctatcagtgcaggaaaagactcatgctga

SEQ ID NO: 761166 - DNA, 120 bp, Artificial Sequence
  ENSG00000215193_109 (sequence is synthesized)
ttttgaccttcctctgacccttttccctcaactgcttggtggggagtagcgaggagaaggagcatgtggcaccctcattggaggctggagcactgctgcagaaagtgatctcttactcat

SEQ ID NO: 761167 - DNA, 120 bp, Artificial Sequence
  ENSG00000215193_110 (sequence is synthesized)
acttcaagacacagcctaagtatgaccacctgtatggacccttccctaatgcccaggatcaagaaaagaatgtggccaccttccaaggctcagagtagctgtgcaatgacttgtgtcaaa

SEQ ID NO: 761168 - DNA, 120 bp, Artificial Sequence
  ENSG00000215193_111 (sequence is synthesized)
acccgatccagagcagcagtgatgaaatcaccctctcctttaagacctggcattacaatggcctcatcctgcatgtgggcaagtcagctctctgatggatggtgcaatttccttggtcat

SEQ ID NO: 761169 - DNA, 120 bp, Artificial Sequence
  ENSG00000215193_112 (sequence is synthesized)
taacctgaggtctggggcctttaaagctattgaggagccagtgaatggagaattcgacaacgcctggcatgattgagggtgacacatcacggcagatgatggctgaggagacattgccca

SEQ ID NO: 761170 - DNA, 120 bp, Artificial Sequence
  ENSG00000215193_113 (sequence is synthesized)
gaagtctcatcttaggtggttgagtaggaagtttgtgaagcaggtggtgggtgagatggagtgggtagagattcaggtatggagatgtcagtgtctaactttcttctagtctttgcaatt

SEQ ID NO: 761171 - DNA, 120 bp, Artificial Sequence
  ENSG00000215193_114 (sequence is synthesized)
tcacaaggaaaatcactaaaatgtgcgtctcttcatttaaaagaaaaaaaagttcatgccaaagctgctgggacaaagaggactcatgatagtgggttattccacactgttgacacactg

SEQ ID NO: 761172 - DNA, 120 bp, Artificial Sequence
  ENSG00000215193_115 (sequence is synthesized)
aatgtatgctggcagaagggcctcaggtggaatgctgggcatgggtttgccccacagcagtctgattcaaaagcacctgagagatgggaggagtactagggttactaaacacaagaaggt

SEQ ID NO: 761173 - DNA, 120 bp, Artificial Sequence
  ENSG00000215193_116 (sequence is synthesized)
gtttcaggagaaacacatcaagccatttgtttttgacccttaatacttaacatgaatgatgagttgcagaacagtcagtctttccaagatgtattgttctatcctcaatagctgcagcct

SEQ ID NO: 761174 - DNA, 120 bp, Artificial Sequence
  ENSG00000215193_117 (sequence is synthesized)
ctccaagccagtgggctggtgacatccaggatgatcctcttccttgcctggaggtgggatctagtgccacagcttgttcggggaagctggcatagaagatgatttgctcaacaaagtcac

SEQ ID NO: 761175 - DNA, 120 bp, Artificial Sequence
  ENSG00000215193_118 (sequence is synthesized)
cgctaaactatcgcttaggtctagtccccggcctatggcaccaagtactcctggtagtacttgtacacagaatttctctataataaccagaacatgtcatccatggtaatgtctgctaca

SEQ ID NO: 761176 - DNA, 120 bp, Artificial Sequence
  ENSG00000215193_119 (sequence is synthesized)
tatccaaccacagcatcaaattctgtctgatgaagggcaccagccccttcatctttatcatgcctaatattgtgaaggccatgtgctaaatccagcaatccgctccagtaggtgtccttc

SEQ ID NO: 761177 - DNA, 90 bp, Artificial Sequence
  ENSG00000215193_120 (sequence is synthesized)
atgtgctaaatccagcaatccgctccagtaggtgtccttcaggatacttttctgtcaagtaaatacatttattaaaaataggcatgtgca

SEQ ID NO: 761178 - DNA, 88 bp, Artificial Sequence
  ENSG00000215193_121 (sequence is synthesized)
aggcagaggtggcagtgagccgagatcgtgcgatcgtgctattgcactccagcctgggcgacagtgtgcgcatgtaaaagttaatctc

SEQ ID NO: 761179 - DNA, 120 bp, Artificial Sequence
  ENSG00000215193_122 (sequence is synthesized)
tgtaaaagttaatctcatggaggtagagagtagaatgacaattactagaggctgggcagggtgtgtatgtgggatgaagaggtggcttgatggacacaaacatagatagaaggagtgagt

SEQ ID NO: 761180 - DNA, 120 bp, Artificial Sequence
  ENSG00000215193_123 (sequence is synthesized)
tctaatgcttgatagcagaatagggtgaccattgttaacactgtattgggtgtttcaaaatagacggaataaaggatttgaaatgttctcaacacatagaaatgagaaatactcaaggtc

SEQ ID NO: 761181 - DNA, 120 bp, Artificial Sequence
  ENSG00000215193_124 (sequence is synthesized)
atgggtatcctggataccctgagttgatcactacacattctatgcatgtaatgaaatgtcacatctacttcaataatatgtacaaatattatttatcaaaaagcaggcatgtaggtgagt

SEQ ID NO: 761182 - DNA, 120 bp, Artificial Sequence
  ENSG00000215193_125 (sequence is synthesized)
tgattttcttccatgtcttcaaactcctggtaatacttgtccacaaaatttctctataataaccggaacatgtcatccatgataatgtgtactatatatccaaccacaacatcaaattct

SEQ ID NO: 761183 - DNA, 120 bp, Artificial Sequence
  ENSG00000215193_126 (sequence is synthesized)
gtatcagaggcagaagagaaggacagcatgaagctcgattcctccaactgtcctttggctggtggccctccaccctgcccacagcccggccagctcagccccgtctctgtcccatacaga

SEQ ID NO: 761184 - DNA, 120 bp, Artificial Sequence
  ENSG00000215193_127 (sequence is synthesized)
gccacagccacagtgagagcctggcagcctgcccggaggaggcttcttggcccagcccggtcaacacccacatgcaccaccaccaactttttgctattgtgaataacatagctgtaaaca

SEQ ID NO: 761185 - DNA, 120 bp, Artificial Sequence
  ENSG00000215193_128 (sequence is synthesized)
gattgcatatgaaagtgctgtgaaatcaccaagggctgagtagaacagttaagacgatagtagttgttttctttctgggtttttctcttgggctggtttttgaaagtggatctacaacat

SEQ ID NO: 761186 - DNA, 120 bp, Artificial Sequence
  ENSG00000215193_129 (sequence is synthesized)
tgatagagatcagtttttctgctcttccaacatactgccaggacgtggtccagaaagattgggtactttgcaatactcatagcaatatgtgaagtgattggaaaaaatgagactattcaa

SEQ ID NO: 761187 - DNA, 120 bp, Artificial Sequence
  ENSG00000215193_130 (sequence is synthesized)
ccagttgtttcagtgttggttaggaggaaaatgcccagaaaggggaacagttaatcatctacacaataccaagagcaggaggggatgaccgacggcttcatctttcctagtctatcccac

SEQ ID NO: 761188 - DNA, 89 bp, Artificial Sequence
  ENSG00000215193_131 (sequence is synthesized)
ggggatgaccgacggcttcatctttcctagtctatcccacacagacctttaggtgctcttttttttctttttttcgctctgtcgcccat

SEQ ID NO: 761189 - DNA, 120 bp, Artificial Sequence
  ENSG00000215193_132 (sequence is synthesized)
gggattacaggcatgagccatcgcacccgcctctttaggtgttcttttaggagctggtagcggaggaaggtggttacccatctgtgacagagccttggatgtcacgaggccacaggctgg

SEQ ID NO: 761190 - DNA, 120 bp, Artificial Sequence
  ENSG00000215193_133 (sequence is synthesized)
agagccttggatgtcacgaggccacaggctggcctttcctcctgtttacaggaggtgagttttcctgagttcccagcctcagtgttctctgcacagtctgtcactgactcccgctcccag

SEQ ID NO: 761191 - DNA, 120 bp, Artificial Sequence
  ENSG00000215193_134 (sequence is synthesized)
tgctcactgcctcttgttctcactgcctcctgttctcactgcctcctgtttctgctgagttctttgcatctgcctgatgttggtttaaagctccacccctcccaggggaatttgtcccat

SEQ ID NO: 761192 - DNA, 120 bp, Artificial Sequence
  ENSG00000215193_135 (sequence is synthesized)
gattcacctcctctttggtgatctcttgattgcggctgctgcagccatgtaaaccttaaaggcgagccaatttgtttgtgatccagtggccaaaatggttcaccctcaacttcccttaat

SEQ ID NO: 761193 - DNA, 120 bp, Artificial Sequence
  ENSG00000215193_136 (sequence is synthesized)
cccctgcagcatctgagacacatgggtgaatgtatgtaaggtacttggggctaaccaaagttaaatacatatgacaagtacctgaatctagataatctaatggtaagatatcgtttgctc

SEQ ID NO: 761194 - DNA, 120 bp, Artificial Sequence
  ENSG00000215193_137 (sequence is synthesized)
tctggacttcatgggctcaccccagcaatggggtgcctggaaatgaagagatctttcttgtgtctcatcctctgggctcccagcctccctcaacatcatgacctccatctgtaacaccca

SEQ ID NO: 761195 - DNA, 120 bp, Artificial Sequence
  ENSG00000215193_138 (sequence is synthesized)
ccatcctggagcagcatcctggatattggaactctgaagtctaacctaagagaacaaggacaagcctctctatgaaaggtttgcccttccagatccagttgagctctgctctggagccag

SEQ ID NO: 761196 - DNA, 120 bp, Artificial Sequence
  ENSG00000215193_139 (sequence is synthesized)
actctctgaagcatagcccagctctagctcttaccagttatgtgatcaggaatgagagttaatgtttctatgtttctgattcttcatttgtaaaatgaggataataaaaatttaacttca

SEQ ID NO: 761197 - DNA, 120 bp, Artificial Sequence
  ENSG00000215193_140 (sequence is synthesized)
gcgagcgcaaagatgtccgcgcccgctgccgggaggcgaggtgagtctttgatcgtaaccaggagcccggagctgaggcagttcctgcacgtgtcgcggggccggagaagctagggccag

SEQ ID NO: 761198 - DNA, 120 bp, Artificial Sequence
  ENSG00000215193_141 (sequence is synthesized)
gtattccagggatgcaagaatcctgcaaatctgacgtgtaaactgcttccccagcctccaggcgagcccagcttttgcctcagataggccccttccttttccttctcggggaatcgacct

SEQ ID NO: 761199 - DNA, 120 bp, Artificial Sequence
  ENSG00000215193_142 (sequence is synthesized)
tcctggagctgtgcgggaatgcatatcagtccacgtgggccaagcgggagttcagattggcaatgcctgctgggagctcttctgcctggaacacggcatccaggcagacggcacttttga

SEQ ID NO: 761200 - DNA, 120 bp, Artificial Sequence
  ENSG00000215193_143 (sequence is synthesized)
tgctcaagctagcaagatcaacgatgatgactccttcaccacctttttcagcgagactggcaatgggaagcatgtgccccgggccgtcatgatagatctggagcctactgtagtggatga

SEQ ID NO: 761201 - DNA, 120 bp, Artificial Sequence
  ENSG00000215193_144 (sequence is synthesized)
gctgatcacaggaaaggaggatgcagccaacaactatgcccggggccactacacggtgggcaaggagagcattgacctggtgctggaccgcatacggaagctgacagatgcttgctctgg

SEQ ID NO: 761202 - DNA, 120 bp, Artificial Sequence
  ENSG00000215193_145 (sequence is synthesized)
cctgcagggcttcctgattttccacagttttggtgggggcactggctccggcttcacttctctgctgatggaacgcctctccctggattatggcaagaaatccaagctggagtttgccat

SEQ ID NO: 761203 - DNA, 120 bp, Artificial Sequence
  ENSG00000215193_146 (sequence is synthesized)
ctacccagccccccaggtctctactgcagtggtggagccctacaactccatcctgaccacccacaccacactggaacattcagattgtgctttcatggtggacaacgaagccatctatga

SEQ ID NO: 761204 - DNA, 120 bp, Artificial Sequence
  ENSG00000215193_147 (sequence is synthesized)
catctgccgcaggaaccttgacattgagcgccctacctataccaacctcaaccgcctcatcagtcagattgtgtcctcaatcactgcttctctccgctttgacggggccctcaatgtgga

SEQ ID NO: 761205 - DNA, 120 bp, Artificial Sequence
  ENSG00000215193_148 (sequence is synthesized)
cctcactgagttccagaccaacctggtgccctacccccgcatccacttcccgctggtcacctacgcgcccatcatctctgccgagaaagcctatcacgaacagctctctgtggccgagat

SEQ ID NO: 761206 - DNA, 120 bp, Artificial Sequence
  ENSG00000215193_149 (sequence is synthesized)
aaccagctcctgctttgagcccaacagccagatggtgaagtgcgacccgagacatggcaagtacatggcctgctgcatgctctaccggggcgacgtggtgcccaaggatgtgaatgtcgc

SEQ ID NO: 761207 - DNA, 120 bp, Artificial Sequence
  ENSG00000215193_150 (sequence is synthesized)
tattgctgccatcaagaccaagaggaccatccagtttgtagactggtgtcccacaggcttcaaggtgggcatcaactaccagcccccgaccgtggtccccgggggagacctggccaaggt

SEQ ID NO: 761208 - DNA, 120 bp, Artificial Sequence
  ENSG00000215193_151 (sequence is synthesized)
gcagcgggccgtctgcatgctcagcaacaccacggccattgcggaggcctgggcccgcctcgaccacaagttcgacctcatgtacgccaagcgggcctttgtgcattggtatgtgggaga

SEQ ID NO: 761209 - DNA, 120 bp, Artificial Sequence
  ENSG00000215193_152 (sequence is synthesized)
ggggatggaagaaggagaattttctgaggccagggaagacttagctgccctggagaaggattatgaagaagtggggactgattcgtttgaagaagaaaatgaaggggaggaattttaaat

SEQ ID NO: 761210 - DNA, 120 bp, Artificial Sequence
  ENSG00000215203_0 (sequence is synthesized)
atgcttaaaagggagatgaagccagaaagtgacaggccacggaaagtccggtttcggatcgcgtcctctcacagtgggcgagttctgaaggaagtgtatgaagatgggcaaccgtcaggc

SEQ ID NO: 761211 - DNA, 120 bp, Artificial Sequence
  ENSG00000215203_1 (sequence is synthesized)
tctctggattctgaatgtgccagtatctgtgggatagatggactaggtgattccgatggacagcagaatggccacatagagtcagaaggtgatgagaatgagaatgaccaggatagcttg

SEQ ID NO: 761212 - DNA, 120 bp, Artificial Sequence
  ENSG00000215203_2 (sequence is synthesized)
ctggtgttagcaagggctgccagtgagaagggttttggtacaagaagagtcaacattttaagcaaaaatggcacagtcagaggcgtcaaatacaaagtgagtgctggccaggctctattt

SEQ ID NO: 761213 - DNA, 120 bp, Artificial Sequence
  ENSG00000215203_3 (sequence is synthesized)
aacaatttgaccaaagtattacagcaaccatcaactgatctagaatttgaccgtgtagtgatttataccacctgccttcgtgtggtccggacaacctttgaaagatgtgaactggttaga

SEQ ID NO: 761214 - DNA, 120 bp, Artificial Sequence
  ENSG00000215203_4 (sequence is synthesized)
aagagaaaaacatagccctgaatggtgaatatggaaaagagttagacgaacgatgccgacgagtttctgaagctccttccctccctgttgtgttcattgatggccattaccttgggggtg

SEQ ID NO: 761215 - DNA, 120 bp, Artificial Sequence
  ENSG00000215203_5 (sequence is synthesized)
ctgagaaaattttgtcaatgaatgaatcaggagaactgcaagacatcctaaccaaaattgagagagtacagcatccacatgagtgtccctcttgtggaggctttggctttcttccatgct

SEQ ID NO: 761216 - DNA, 120 bp, Artificial Sequence
  ENSG00000215203_6 (sequence is synthesized)
ccgtgtgccatgggagcaagatgtccatgtttcgaaactgcttcacagactctttcaaagccctgaagtgtacggcttgcaatgaaaatggtcttcagcgttgtaagaactgtgctggtt

SEQ ID NO: 761217 - DNA, 120 bp, Artificial Sequence
  ENSG00000215203_7 (sequence is synthesized)
aattggagcttctacccaggaaaaacctcattttattaatcaaaggcaatactttggtttatatatatatttttaaatggttatgtttatggattaatcaataaactttgtttattataa

SEQ ID NO: 761218 - DNA, 120 bp, Artificial Sequence
  ENSG00000215217_0 (sequence is synthesized)
agacgcgggctagacgctggcgctgagcaacctgaggcctgcagactccgactgggcccctgggcgggcgggacggaccgcggccaaggcgggggcgctggacggtggcggcatggagga

SEQ ID NO: 761219 - DNA, 120 bp, Artificial Sequence
  ENSG00000215217_1 (sequence is synthesized)
cgacgaggaggagaccaccgcgtccacgctgcggggcaagcccaggccgccgcccgtctcggcgcagtccgccttcagctacatcccgccgcggcgcctggaccccaaagagcacagcta

SEQ ID NO: 761220 - DNA, 120 bp, Artificial Sequence
  ENSG00000215217_2 (sequence is synthesized)
ctactaccgcccggcgcggacaggaattatttccctctatgattgtatttttaagaggcgcctagattatgatcagaagttgcaccgagatgacagagaacatgcaaaaagcctgggact

SEQ ID NO: 761221 - DNA, 120 bp, Artificial Sequence
  ENSG00000215217_3 (sequence is synthesized)
tcatgttaacgaagaggaacaggagaggccggttggagtgctgacgtcttctgtctatgggaagcgcatcaatcagcccattgagcccctaaaccgggactttggccgtgccaaccatgt

SEQ ID NO: 761222 - DNA, 120 bp, Artificial Sequence
  ENSG00000215217_4 (sequence is synthesized)
gcaggctgacttctacaggaagaacgacatccccagcctcaaggaacccggctttgggcacattgctccatcctgaagcatccccgtggcccacagggcatgtccgataccctgtggcct

SEQ ID NO: 761223 - DNA, 120 bp, Artificial Sequence
  ENSG00000215217_5 (sequence is synthesized)
ggcaagtttgcacagcgagaaggtggcatctggagcctcctttccccttctcatgacgcctaggagcttggctatgcctgtgttgcatctctacagtgggacacatgaacacgttagcag

SEQ ID NO: 761224 - DNA, 120 bp, Artificial Sequence
  ENSG00000215217_6 (sequence is synthesized)
cccccctcaggttgctgggttaggagcctgaccaacaacacctttagtacatgtgaagagtctctgatgtgatgattttcagctggaattatttttgatcaaatgaatctggagaccgat

SEQ ID NO: 761225 - DNA, 120 bp, Artificial Sequence
  ENSG00000215217_7 (sequence is synthesized)
tcattgtgagcacctgaataaaatgaaaactttgtttccccttggtaactgttgggttggtttctgttcactggctctctacatttgccaggattctttggggaggcagtcacaggagtg

SEQ ID NO: 761226 - DNA, 120 bp, Artificial Sequence
  ENSG00000215217_8 (sequence is synthesized)
gcacaattgaactctagaaactccatttttgtttttccagaggtctgaatcccaaataacagaattttgtgcagtagggaccaggagccctagtaaggatgggtggccctggtggccagc

SEQ ID NO: 761227 - DNA, 120 bp, Artificial Sequence
  ENSG00000215217_9 (sequence is synthesized)
aatgctcactattactgctcagagagagggggccagtcatgggaagaggctagatttcggtgttcaacaaacttgggtaaaattctggttgctgcattttctagatttgtgttctagggc

SEQ ID NO: 761228 - DNA, 120 bp, Artificial Sequence
  ENSG00000215217_10 (sequence is synthesized)
aagtcatatcatctacatgagcagacatttcctcatatttaaagtggaatttccaaacctagaggagttcatgcgggaggcaatgagctgctggagcacaggcataacacaggtacccag

SEQ ID NO: 761229 - DNA, 120 bp, Artificial Sequence
  ENSG00000215217_11 (sequence is synthesized)
tgtgtgccccacccagtgccccgtcatcacagcaatgacttgactttaaacagtcttctttttggaagcagtcgcttgtaacctaagttggaaatacttactttggagataatttgaaac

SEQ ID NO: 761230 - DNA, 120 bp, Artificial Sequence
  ENSG00000215217_12 (sequence is synthesized)
ttacccaagtattaaagtatcatcagctacatttttaatgaatggatcccttggaagaaatcatctctcatctaccatgattaaatttcccacagtttagcagtgaatgggcaggtggcc

SEQ ID NO: 761231 - DNA, 120 bp, Artificial Sequence
  ENSG00000215217_13 (sequence is synthesized)
taattaatttcaatactgatcgctccatcactggttttattgttttgaatatggaaaaaggattctctaaaaataaatgacactgaattccggcaatttcaaggctgagtgactcctaag

SEQ ID NO: 761232 - DNA, 120 bp, Artificial Sequence
  ENSG00000215217_14 (sequence is synthesized)
tatttctttatttttttgaaaacagtttttcagtgtaggtgtcttttatttatttcaaacaaatggcagtagtttatttcgaatgcctttgggtgcattataccatatttatagtaacat

SEQ ID NO: 761233 - DNA, 120 bp, Artificial Sequence
  ENSG00000215217_15 (sequence is synthesized)
aatagaaaatatataaagtttgggttatagaaatatttataaattattcattattcagacttgatttcaacaaagacaaggcatctgtaagtgactgtaataaatcaaagtcaaactaaa

SEQ ID NO: 761234 - DNA, 120 bp, Artificial Sequence
  ENSG00000215218_0 (sequence is synthesized)
agcaacactgcacgcaggtgcgcagccggcggctcatgaaggagctgcaggacatcgcgcgccttagcgaccgcttcatctccgtggagctggtggacgagagcctgttcgactggaacg

SEQ ID NO: 761235 - DNA, 120 bp, Artificial Sequence
  ENSG00000215218_1 (sequence is synthesized)
tgaagctgcaccaggtggacaaggactcggtgctgtggcaggacatgaaggagaccaacaccgagttcatcctgctcaacctcaccttccccgacaacttccccttctcgccgcccttca

SEQ ID NO: 761236 - DNA, 120 bp, Artificial Sequence
  ENSG00000215218_2 (sequence is synthesized)
tgcgggtgctcagcccgcgcctggagaacggctacgtgctggacggcggcgccatctgcatggagctgctcacgccgcgcggctggtccagcgcctacaccgtggaggccgtcatgcgcc

SEQ ID NO: 761237 - DNA, 120 bp, Artificial Sequence
  ENSG00000215218_3 (sequence is synthesized)
agttcgcagccagcctggtcaagggccagggacggatctgtagaaaagctggcaaatcaaaaaagtccttcagtcgcaaggaagctgaagctacctttaagagtttggtgaagacgcatg

SEQ ID NO: 761238 - DNA, 120 bp, Artificial Sequence
  ENSG00000215218_4 (sequence is synthesized)
aaaaatatggttgggtcaccccgcccgtgtccgacggctgatgtctgccacgtgcagtagacgctcgagcgcctgtccacacacacaccagtaccctgacatctcctcaatgctgtgcat

SEQ ID NO: 761239 - DNA, 120 bp, Artificial Sequence
  ENSG00000215218_5 (sequence is synthesized)
cctccacccgtttttactccagccagaactgcatcctgaatgcccaggagacgtttaagttatttatgaaaagatgtgtgtacagagaggaagagggagcaaatgccgttcggattatgt

SEQ ID NO: 761240 - DNA, 120 bp, Artificial Sequence
  ENSG00000215218_6 (sequence is synthesized)
ttcgattataaatgaatgatcacctcgaagtcactttagaacacatgttgagatggtgacatttcccagcctgcctgcccctctgcccaccccggtcacattgccctgagcttctttcca

SEQ ID NO: 761241 - DNA, 120 bp, Artificial Sequence
  ENSG00000215218_7 (sequence is synthesized)
tgacagcagctccgacgagccggcaggaaactcaatgcccctgctggctccatttccatgtaaatggcgccgttcatatttcacagggacgccgtgcatctccgccgtgcgtccccggca

SEQ ID NO: 761242 - DNA, 120 bp, Artificial Sequence
  ENSG00000215218_8 (sequence is synthesized)
cgtgtttgctgtgctctgtatctctgtttttcttcctggaaggtcaacataacttgaaaatgtgtctttctgtggcccatggtccgctgtgatgacatttagacctcatttgtgctatga

SEQ ID NO: 761243 - DNA, 120 bp, Artificial Sequence
  ENSG00000215218_9 (sequence is synthesized)
cctttggctcatgaaaacacaaatttaacattgccaggttctagtgatttaaaaccacaactgcccacttggtgaaaacgtgctctcgatgctgatttgtggtgtgctgctgtccacaga

SEQ ID NO: 761244 - DNA, 120 bp, Artificial Sequence
  ENSG00000215218_10 (sequence is synthesized)
taaaccagtgccattagatggaaggcagaggatactgcgaccacccctggcagacggtggcgtagacaccaggtgcgccctctggggctcagagcaacggatggtcagctgcgaacagtc

SEQ ID NO: 761245 - DNA, 120 bp, Artificial Sequence
  ENSG00000215218_11 (sequence is synthesized)
tcgtccgatgttaggaaatggtcctacggccgcgcctttgtgttcctgtcttctctccaccaccaaaagcaaaagatgatttcccattcactgcagtcatctgactcattttaatatctg

SEQ ID NO: 761246 - DNA, 120 bp, Artificial Sequence
  ENSG00000215218_12 (sequence is synthesized)
tgctagtgacaatgaatgtcagaactgccaaaggataccaagtgatcatacgatgatttgcatgatcgggtctatttcacccaatagtcacttgtgtgtcccccgaaattgggatgggtg

SEQ ID NO: 761247 - DNA, 120 bp, Artificial Sequence
  ENSG00000215218_13 (sequence is synthesized)
agcacccttgctgtggtgtaaacttcctgttatttaatctcccccacggtttcatttttctcttctgttaatacttagaactttctaagaaactccatgaaatgaggaaatactgtttct

SEQ ID NO: 761248 - DNA, 120 bp, Artificial Sequence
  ENSG00000215218_14 (sequence is synthesized)
aataatatgaggaaagaagtaaaaatgttcattccaagtggcaagtcttattggacacattttaaataaaatcatgcatacctgatacactgcctcaaggatccagtcattgtgggctat

SEQ ID NO: 761249 - DNA, 120 bp, Artificial Sequence
  ENSG00000215218_15 (sequence is synthesized)
ccttccatttaaaatatttcagatattcttaaattttttaaatattgcaaatactacaacatgtaattccagagcagcgttctaagtcaggtaccagaaatgagtcttaggaacccatag

SEQ ID NO: 761250 - DNA, 120 bp, Artificial Sequence
  ENSG00000215218_16 (sequence is synthesized)
tctttgcaaaaattcagtagattgaaatagtccccagaagcagccaaggagctgaagggatgattcgatcaagttcagatgttgccaattgtatcttactgctgtgaaggaggaaaagtc

SEQ ID NO: 761251 - DNA, 120 bp, Artificial Sequence
  ENSG00000215218_17 (sequence is synthesized)
ttccgggataatgtattcaattcttcaggcagttttgtctacttggggacctgcccattggttcaaggttttcagagatccaagaggccttgcctcaaagaacaaggattggcgcctttc

SEQ ID NO: 761252 - DNA, 120 bp, Artificial Sequence
  ENSG00000215218_18 (sequence is synthesized)
agcagggctgcccattcaccaaacttattgttacttttgtttttctttaccactttcttatttgcccccaagtgcacacaggcagctctgccagaccaaaatgacagtgtattaagaatg

SEQ ID NO: 761253 - DNA, 120 bp, Artificial Sequence
  ENSG00000215218_19 (sequence is synthesized)
cagggcctgctcagcttccctgtgagtcataatagtcgtgaaacttgatgacagtgaacttacgatgttcattcatccaaccctctatggtggcattctccatcctggaaacctgacatt

SEQ ID NO: 761254 - DNA, 120 bp, Artificial Sequence
  ENSG00000215218_20 (sequence is synthesized)
tggctgacggtctttggaccctggagctagtggtcatcatggaattacactgtggagatgaaagacctaggacagaaacatcttgctagggaaagcacctgagtttattcctttctaaat

SEQ ID NO: 761255 - DNA, 120 bp, Artificial Sequence
  ENSG00000215218_21 (sequence is synthesized)
attttcctcttctaatgaaaactaaaagcagctttactttagggggaaaaatatatccaaaggcaggtcatttcagtagtgtttattagctgattgaaaaacaggttcacggtgctctct

SEQ ID NO: 761256 - DNA, 120 bp, Artificial Sequence
  ENSG00000215218_22 (sequence is synthesized)
gagaactgcaccaaggggtgcagccaagagactggtctgaccccgggttgggctgggtggcagccggcgacagagcagagagacactcagctcagtgtcgctccttccatacactcagag

SEQ ID NO: 761257 - DNA, 120 bp, Artificial Sequence
  ENSG00000215218_23 (sequence is synthesized)
tttgatttttcttgcatggcatttccattaggtttgttagaaacttatagaagaaatcaattctttagtgaacgaaataccatttttcactcaattggtaagaatttttcattttaaaag

SEQ ID NO: 761258 - DNA, 120 bp, Artificial Sequence
  ENSG00000215218_24 (sequence is synthesized)
taaaactctaccattgcttggactgttaggagtgcggactccctttctggtagactcccttcgtaggcaagcacggtggtgcccagccatggaggcacccttaggacactgagcacaggc

SEQ ID NO: 761259 - DNA, 120 bp, Artificial Sequence
  ENSG00000215218_25 (sequence is synthesized)
ctggctgcctgtgccttggccacagcctccttccaccccactgaagtggacacctgcctctggagcccagggtgagaaggagaggcctgaagcctggggccacgttcccacacaagccaa

SEQ ID NO: 761260 - DNA, 120 bp, Artificial Sequence
  ENSG00000215218_26 (sequence is synthesized)
ggaacctattcctctttggacagacagcgagggaataatcagacagtgggtgcaaatgttcatgtcccgatagctccacacacccatgtatctgtgggaactcaaaccaagccagagccc

SEQ ID NO: 761261 - DNA, 120 bp, Artificial Sequence
  ENSG00000215218_27 (sequence is synthesized)
acagagccaaacaaacagaaaatcacaaacccatctgtcctcttctcaatgcagaactccttcccgtccaataattttcctgaaccaatcacccttgttattgggtatcttctccactgc

SEQ ID NO: 761262 - DNA, 120 bp, Artificial Sequence
  ENSG00000215218_28 (sequence is synthesized)
tgggtaaggcctgcacatggtctgtctgtaactttctagaagactgagaactgcttatgccttagggagttctatgtgagcagcaaggttattccccctagttacacacacacgcacatg

SEQ ID NO: 761263 - DNA, 120 bp, Artificial Sequence
  ENSG00000215218_29 (sequence is synthesized)
tgccaatactcctgcaaagacttgctgtttctaaaatccactactcagaaaaaccagggtgtcggcttaaagttttcagctccatctatcaaaatttgacctttttttaagagaaaaata

SEQ ID NO: 761264 - DNA, 120 bp, Artificial Sequence
  ENSG00000215218_30 (sequence is synthesized)
tgtagatgagtgaaaaagacctaggattgaaagacaaaaagccatgtgtccatgtaaccctggccagtcactccacctgcctgagccttggtttcctcagctgtgagctcctaccaggtc

SEQ ID NO: 761265 - DNA, 120 bp, Artificial Sequence
  ENSG00000215218_31 (sequence is synthesized)
agtgtgggaattggccaaaatgacgcagcagaagtgctttggagactaaagattgtcaacgaaatgtaagtgtcattttcgtagtattaggacgtttacattacagcaggctttaattag

SEQ ID NO: 761266 - DNA, 120 bp, Artificial Sequence
  ENSG00000215218_32 (sequence is synthesized)
aacccacttagatatcgactcagaatgatcaattacagtggttaaaatacacatacctggtaatcatatacttgctttctgtccccagttcttacattaagtcaaccaactgacccaaaa

SEQ ID NO: 761267 - DNA, 120 bp, Artificial Sequence
  ENSG00000215218_33 (sequence is synthesized)
atcaaccaataactaactggccatctctccactcactcagcattctcctcttaaatgcagggcatgcagaagattaaggtacagccccttccctggataggaactcaaaagataggaata

SEQ ID NO: 761268 - DNA, 120 bp, Artificial Sequence
  ENSG00000215218_34 (sequence is synthesized)
gcgcacaggcaccagcaccaagcaaggcaagtgccaaattgcactgcagaaattaaagacatgtgcaagtccagagattttctgactgaaaaccagaaagatttcatggagtaaatcagg

SEQ ID NO: 761269 - DNA, 120 bp, Artificial Sequence
  ENSG00000215218_35 (sequence is synthesized)
tttgagccatggctgggcaaagggaaggagaagggcaggtgtagcaggtgtagaaatgggaggggctgagggcaccttgaaagggagcgtggactctgtcctcactggccctgaacggga

SEQ ID NO: 761270 - DNA, 120 bp, Artificial Sequence
  ENSG00000215218_36 (sequence is synthesized)
gaactggagtccccttgccacctctcacctgcagagtccctattcatggagctgatttcaggaagcaggacacggtcccacctgacagcctagcctggcgtgtggagcttgccctgtgtg

SEQ ID NO: 761271 - DNA, 120 bp, Artificial Sequence
  ENSG00000215218_37 (sequence is synthesized)
tagcaattatatttcagtgtacccatccaatagcatgcgaaattttaatggaatttgctttctaaaggggcagagcttacttcctgactgtagtgagggtagagccactgaatctggaag

SEQ ID NO: 761272 - DNA, 120 bp, Artificial Sequence
  ENSG00000215218_38 (sequence is synthesized)
accacttagcctaattttacaccctctgcagtgaaggaggcgagcccagagactttgaggggcttgtccacagtaggacaggagccacaaggccactgccttactgtggctttctgatcc

SEQ ID NO: 761273 - DNA, 120 bp, Artificial Sequence
  ENSG00000215218_39 (sequence is synthesized)
tttatgttgcttcatgagactattaggcaattcatgtggccctcaccaaacacacactcttcaccccatcattgaatcagtacagttgcaagtcttccaagccagctgagaaacacccac

SEQ ID NO: 761274 - DNA, 120 bp, Artificial Sequence
  ENSG00000215218_40 (sequence is synthesized)
aggatccattctgtgcccaaagcaaattggagcaaagggcagaaattccctccaactgttttgggaagcttctgtaaggggcttggagctcagcctatgggactgtagtcagaactttgt

SEQ ID NO: 761275 - DNA, 120 bp, Artificial Sequence
  ENSG00000215218_41 (sequence is synthesized)
aatttttttctccaaagacagtgaaatcatgtacagctctgttcttagttttctgctaggttctacttatccttctaatttttgcagcctctagttcccatagtattaaatatcattttt

SEQ ID NO: 761276 - DNA, 120 bp, Artificial Sequence
  ENSG00000215218_42 (sequence is synthesized)
aagcccagggcctgtctgatccacagaatgtggtcaataatctggaaaggcaaacaaactctgttgacattcgggaaagcaataagtaatgttagtttggttccagaagaaacacgggag

SEQ ID NO: 761277 - DNA, 120 bp, Artificial Sequence
  ENSG00000215218_43 (sequence is synthesized)
caaagtgtgctggccaaacagcaacaatcaaagcagaggggagcaagattttctttcaaggtcatgataaggctagacaaatagagtgcaatgagggggtcaggtgcgaggccgtcctcc

SEQ ID NO: 761278 - DNA, 120 bp, Artificial Sequence
  ENSG00000215218_44 (sequence is synthesized)
caggtcagtaaggccgcatggagggataaagagatccctgcactgcccccaaccgccaattcaccctgtgtctctcgcagaattaaagccaggaggtggctttctctttccttctactgg

SEQ ID NO: 761279 - DNA, 120 bp, Artificial Sequence
  ENSG00000215218_45 (sequence is synthesized)
tggtaaattaagtgactgtcctactttgtagacatgcaatcgttttgtacctctagaccttgggcagtcactggtgatgacactaattgaactaacacagaaactgctgtcacctgatgt

SEQ ID NO: 761280 - DNA, 120 bp, Artificial Sequence
  ENSG00000215218_46 (sequence is synthesized)
gcttggtttcattcctgcctgccttctctacaacgtgacttcatttcatgaatgtggttgccattatgacagtgctaggatgctgatctgtacaccatgagtgactgcgaactttcagac

SEQ ID NO: 761281 - DNA, 120 bp, Artificial Sequence
  ENSG00000215218_47 (sequence is synthesized)
tctcaccgcaattcatggggagactttggtgtatcctgtttccagagttgtcctcttctgtgatcctcaaaagaagagaaaaaaacgcatgtggcataaatcaacaggaaagaaatgttt

SEQ ID NO: 761282 - DNA, 120 bp, Artificial Sequence
  ENSG00000215218_48 (sequence is synthesized)
accactggaagatggtgagtgcatgagtcaaataatctagaggcactgccctaatgagaaaaaaaaaacaatgattctagaaaataaaactttaaaaccaataaacgtctttacacggaa

SEQ ID NO: 761283 - DNA, 120 bp, Artificial Sequence
  ENSG00000215251_0 (sequence is synthesized)
gctgtgaggctcggagtcgccggaggagccagtatctgtgtcgccgccgcccgcggcgtccccggtttggtgttgcggcgcccaccttcgggaggatcagtatctggcaccaattctgac

SEQ ID NO: 761284 - DNA, 120 bp, Artificial Sequence
  ENSG00000215251_1 (sequence is synthesized)
ccagtcatttgtgatccctggctcttgtgatatgctgaagatttccaggcagtttttgtggaacacctccccgtccagctctaatcaagcaccatataaacaagaaattgcctggtcaaa

SEQ ID NO: 761285 - DNA, 120 bp, Artificial Sequence
  ENSG00000215251_2 (sequence is synthesized)
tctgtgaggactgtattctgactgccaaagagatcaatactgacaccagaatggcagctactctcaagtcattaaaacttgtaagataccgagcattttgcagtccttctgcctttggtg

SEQ ID NO: 761286 - DNA, 120 bp, Artificial Sequence
  ENSG00000215251_3 (sequence is synthesized)
cagtccgaagtgtgtcatactggaatgtgagcagcacacagcatgggggacaggaccctccagaacacattagcctctgccattctgccaaaaaagttaagaacatatgtagcaccttct

SEQ ID NO: 761287 - DNA, 120 bp, Artificial Sequence
  ENSG00000215251_4 (sequence is synthesized)
cttctcggagaatcctgacaaccagcagtgcccacccaggtttggaattcagcaagacttcttcctctaaggccagtacattgcagctgggctcacccagggccacaggagttgatgaag

SEQ ID NO: 761288 - DNA, 120 bp, Artificial Sequence
  ENSG00000215251_5 (sequence is synthesized)
aggacgtagaagtgtttgattcctttgaaaacatgcgagttttcctacagctaagaccagaataccgtgttcacagctataatgcatctgagacttctcagctcctgtctgtttcagaag

SEQ ID NO: 761289 - DNA, 120 bp, Artificial Sequence
  ENSG00000215251_6 (sequence is synthesized)
gtgaactaattttgcacaaagtcagagttaatcaaaataatctccaggctcaagtcattgttgattatttgtgtaagctgagctctttgcctgcagagcagcatcctgtcttgctgggca

SEQ ID NO: 761290 - DNA, 120 bp, Artificial Sequence
  ENSG00000215251_7 (sequence is synthesized)
gtaccagctttgctctgctctgccagctgagtgtgaagaagatacagctctttgatacccaagatctgatcaatgttttgaaagcttttgtcattttaggaatccctcactcccattcaa

SEQ ID NO: 761291 - DNA, 120 bp, Artificial Sequence
  ENSG00000215251_8 (sequence is synthesized)
tgctagatgtgtatgagaccaagtgttgccatcaggtatgggagatgaatatggatcagctccttttggtggctgatctctggaggtacttaggccgcaaagtacctaggtttttaaaca

SEQ ID NO: 761292 - DNA, 120 bp, Artificial Sequence
  ENSG00000215251_9 (sequence is synthesized)
ttttttctagttatcttaatttgcactggaaggatctatccttgtctcagctagttcacttaatttatgttataggtgaaaatcgtcaggtatcccaggacctaatgcaaaaattggaat

SEQ ID NO: 761293 - DNA, 120 bp, Artificial Sequence
  ENSG00000215251_10 (sequence is synthesized)
cattgatccttaaatatatagatttgatcaatttggaggaggttggtaccatctgtttggggttctttaaatcaagtactaatctctctgaatttgtcatgcggaaaattggagacttgg

SEQ ID NO: 761294 - DNA, 120 bp, Artificial Sequence
  ENSG00000215251_11 (sequence is synthesized)
caatttcatgaagcagattggagagatagctcctcagcgaattccttccctgggagttcaaggtgtcatgcacctgactctttactgctcggccttacgcttcctgaatgaaggagtaat

SEQ ID NO: 761295 - DNA, 120 bp, Artificial Sequence
  ENSG00000215251_12 (sequence is synthesized)
gaatgcagtggctgcgtctttgcctcctagagtggcacactgtcgaagtaaagatgttgccaagattctgtggtcatttggaactctgaattataagccacccaatgcagaagaatttta

SEQ ID NO: 761296 - DNA, 120 bp, Artificial Sequence
  ENSG00000215251_13 (sequence is synthesized)
ctccagcctgataagtgagattcacagaaagatgcctgaattcaaccagtacccagaacacctgcccacctgcctgctgggcctggcatttttggagtactttccagtagagttaattga

SEQ ID NO: 761297 - DNA, 120 bp, Artificial Sequence
  ENSG00000215251_14 (sequence is synthesized)
tttcgctctcagtccagggtttgtcaggttagctcaggagagaactaagtttgacctccttaaggaactatataccctcgatggtacagttggcattgagtgtccagattacagaggcaa

SEQ ID NO: 761298 - DNA, 120 bp, Artificial Sequence
  ENSG00000215251_15 (sequence is synthesized)
tcgtcttagtactcaccttcagcaagaggggtctgaattgctgtggtatttagcagagaaggatatgaattcaaagcctgaattcttagaaactgtctttttactggagaccatgctggg

SEQ ID NO: 761299 - DNA, 120 bp, Artificial Sequence
  ENSG00000215251_16 (sequence is synthesized)
ggggccccagtacgtcaagcaccatatgattttgcctcatacccgatcttctgacttagaggtccagcttgatgttaacctgaagccattaccatttaatagagaagccacgccggctga

SEQ ID NO: 761300 - DNA, 120 bp, Artificial Sequence
  ENSG00000215251_17 (sequence is synthesized)
aaatgtagccaaattaaggcttgagcatgtgggagtcagccttacagatgatttgatgaataagttactaaaagggaaagcaagaggacatttccagggcaaaactgagtcagagcctgg

SEQ ID NO: 761301 - DNA, 120 bp, Artificial Sequence
  ENSG00000215251_18 (sequence is synthesized)
gcagcagcccatggagttggagaataaggcagctgtacctctggggggcttcctttgcaatgtagcagataaatcaggggccatggagatggctggcctgtgccccgcagcctgcatgca

SEQ ID NO: 761302 - DNA, 120 bp, Artificial Sequence
  ENSG00000215251_19 (sequence is synthesized)
gaccccaagaatgaagctggctgttcagttcacaaacaggaaccagtattgctatggctccagggatctccttggactgcacaatatgaagaggcggcagctggctcggcttggctaccg

SEQ ID NO: 761303 - DNA, 120 bp, Artificial Sequence
  ENSG00000215251_20 (sequence is synthesized)
tgtggtagagttatcctactgggaatggctcccactactgaaacgaactcgcttagaaaagttggcgtttcttcatgagaaagtattcacctctgctctctgaagggcatttaggggcat

SEQ ID NO: 761304 - DNA, 120 bp, Artificial Sequence
  ENSG00000215251_21 (sequence is synthesized)
ttctatggcaaagctataggtgtatactgtaccaggtgttgcaaaatgattataaaagccagaatgtaagtttggcgataaaatagtgtgttgaggagacttaattgtatccaaggcagg

SEQ ID NO: 761305 - DNA, 120 bp, Artificial Sequence
  ENSG00000215251_22 (sequence is synthesized)
ttagagctagtgtatgttactgtgaattgtaatgtagttggattgtacaaattactgcaaatgtatacatgttactcttagtaaataataaacatcttaatatgtcctacggtcaagtaa

SEQ ID NO: 761306 - DNA, 120 bp, Artificial Sequence
  ENSG00000215252_0 (sequence is synthesized)
agttacgcagctgtcttccaggtgactggatgtgttgatcagcgctcgctgggatttggctgacgtggccccagccccgcctccctccccaccccacaatggcagaagaaactggacaga

SEQ ID NO: 761307 - DNA, 120 bp, Artificial Sequence
  ENSG00000215252_1 (sequence is synthesized)
gtaaattagctgcagccaagaaaaagttcaaagaatattggcagagaaaccgccctggtgttccagcagcagcgaagaggaacacgaaagcaaatggcagtagccctgagacggccgctt

SEQ ID NO: 761308 - DNA, 120 bp, Artificial Sequence
  ENSG00000215252_2 (sequence is synthesized)
ctggtggttgccactcatctgaggcttcctcctccgcctcctcctctctgcatgcgcgtcagagcccgtgccaagaacaagcagcagtcctgaactcgaggtccataaaaatcagtcgac

SEQ ID NO: 761309 - DNA, 81 bp, Artificial Sequence
  ENSG00000215252_3 (sequence is synthesized)
tgagaaacagaaagctgaaagggagctagagggtcaaatccagagattgaacacagagaaaaagaaactaaatacggacct

SEQ ID NO: 761310 - DNA, 120 bp, Artificial Sequence
  ENSG00000215252_4 (sequence is synthesized)
agagattgaacacagagaaaaagaaactaaatacggacctgtatcacatgaaacattctctcagatactttgaagaagagtccaaggatctggccggccgcctgcaacgttcatcgcagc

SEQ ID NO: 761311 - DNA, 120 bp, Artificial Sequence
  ENSG00000215252_5 (sequence is synthesized)
gtataggagagttagagtggtctctctgtgctgtcgccgccacacagaagaagaagccggatgggttctcgagccgcagtaaagcacttctcaagcggcagttagagcagtccatacggg

SEQ ID NO: 761312 - DNA, 120 bp, Artificial Sequence
  ENSG00000215252_6 (sequence is synthesized)
agcagatactgctgaaaggacacgtgacacagttgaaggagtcgcttaaagaagtccagctggagagagatcaatatgctgaacaaataaaaggagagagggcccagtggcagcagagga

SEQ ID NO: 761313 - DNA, 120 bp, Artificial Sequence
  ENSG00000215252_7 (sequence is synthesized)
tgaggaaaatgtcgcaggaggtttgcacattgaaggaggagaagaagcatgatacgcatcgggtagaggagctggagaggagcttgtccagactcaaaaaccagatggctgagccactgc

SEQ ID NO: 761314 - DNA, 120 bp, Artificial Sequence
  ENSG00000215252_8 (sequence is synthesized)
ccccggatgccccagcagtgtcctctgaggtggagctgcaagacctgaggaaggagctggagagagtggcaggagagctccaggctcaggtggaaaacaatcagtgcatcagtctcctga

SEQ ID NO: 761315 - DNA, 120 bp, Artificial Sequence
  ENSG00000215252_9 (sequence is synthesized)
accgtgggcaaaaggagaggcttcgcgagcaggaggagaggcttcaggagcagcaggagaggcttcgggaacgggagaagaggcttcagcagctggccgagccacagagcgacttggagg

SEQ ID NO: 761316 - DNA, 120 bp, Artificial Sequence
  ENSG00000215252_10 (sequence is synthesized)
gcaagtaaaggagctgcaggagaagctgggccaggtgatggagacgctcacctcggccgagaaggagccagaggcagcagtcccagcctcagggactgggggcgagtctagcggccttat

SEQ ID NO: 761317 - DNA, 120 bp, Artificial Sequence
  ENSG00000215252_11 (sequence is synthesized)
tcccagcctcagggactgggggcgagtctagcggccttatggacctcctggaggagaaggcggacctgagggagcatgtggagaaactggaacttggattcatccagtaccggagagaga

SEQ ID NO: 761318 - DNA, 120 bp, Artificial Sequence
  ENSG00000215252_12 (sequence is synthesized)
gatgccatcagaaagtacatcgccttctaacagagccaggggacagtgccaaagatgcgtcaccgggaggaggccatcatcaggctggcccaggacaaggaggagaggaaggtgaagctg

SEQ ID NO: 761319 - DNA, 120 bp, Artificial Sequence
  ENSG00000215252_13 (sequence is synthesized)
ctggagctgcaggagatggtgttgcggcttgtggcagctacagcgaggggcacggcaaattcctggccgctgcccggaaccctgctgctgaacccagtccaggagccccagccccccagg

SEQ ID NO: 761320 - DNA, 120 bp, Artificial Sequence
  ENSG00000215252_14 (sequence is synthesized)
agctcggggctgccgacaagcatggtgatctttgtgaggcgagcctcaccaacagcgtggagcctgcacaaggagaagccagggagggttcttcccaggacaaccctactgcacagccag

SEQ ID NO: 761321 - DNA, 87 bp, Artificial Sequence
  ENSG00000215252_15 (sequence is synthesized)
cttttgctgggcttggctgccgagaagaaggagataaacaccaccatcatcaaagagctgctcaagaaatttttaaaaacgaaacaa

SEQ ID NO: 761322 - DNA, 79 bp, Artificial Sequence
  ENSG00000215252_16 (sequence is synthesized)
tgggcttggctgccgagaagaaggagataaacaccaccatcatcaaagagctgctcaagaaatttttaaaaacgaaact

SEQ ID NO: 761323 - DNA, 72 bp, Artificial Sequence
  ENSG00000215252_17 (sequence is synthesized)
taaaagagagtgggtctctgtgatttcataattgtaggtcattagcatgcatatcgagtttgcccttacgtg

SEQ ID NO: 761324 - DNA, 120 bp, Artificial Sequence
  ENSG00000215252_18 (sequence is synthesized)
ttcaaacacacaaagacccactctttgcacaaaactgttctcgctggtttggaataggctcccgtgcttttttaatgttattgcagcatggatgttcattacagaattcagataaaattt

SEQ ID NO: 761325 - DNA, 120 bp, Artificial Sequence
  ENSG00000215252_19 (sequence is synthesized)
acagaattcagataaaatttgctaatgttctgctatgatgtttgatctcatcttaatcacagtgagctcttccatagctcaatatgcggtttgccctcaagtgtgcactgtttattactt

SEQ ID NO: 761326 - DNA, 120 bp, Artificial Sequence
  ENSG00000215252_20 (sequence is synthesized)
aatatgcggtttgccctcaagtgtgcactgtttattactttgtaatatgccactatgagtactgacacttagagctgtttaaaggccgagaactggaaacagcctttcctccattttctg

SEQ ID NO: 761327 - DNA, 120 bp, Artificial Sequence
  ENSG00000215252_21 (sequence is synthesized)
ctaaatctcgcagaagaggaaagtggcctgctctggcaggtatgtgcaggatacagtgtgtttcatctgttccggtgccaagaatgagcactgtactgtggcagttccctttggatttgt

SEQ ID NO: 761328 - DNA, 120 bp, Artificial Sequence
  ENSG00000215252_22 (sequence is synthesized)
gctctgggctcatgaagatattgcatcgtgagctgcagcagttgcactctttttcagtgacctaaaaatggcttatttccgaggaatgaaaggctgccatcgttggctgtggatgtggaa

SEQ ID NO: 761329 - DNA, 88 bp, Artificial Sequence
  ENSG00000215252_23 (sequence is synthesized)
ctacaatacattttaaagtcagagttcgtgttccctgttttaatcacatgactacctgtcccagtacacgaaagggcaagatcataag

SEQ ID NO: 761330 - DNA, 88 bp, Artificial Sequence
  ENSG00000215252_24 (sequence is synthesized)
tgtcccagtacacgaaagggcaagatcataagacatcctttaagagtttaaatgtctctgaaacaggcatacaggctctagtcaagaa

SEQ ID NO: 761331 - DNA, 120 bp, Artificial Sequence
  ENSG00000215252_25 (sequence is synthesized)
tggcattcctctctgttcatggagcttctttgaggcttgaagtttgattttactatctagacctctctggctaatacctattcttcaaccacctcggttactctgacataggaatttact

SEQ ID NO: 761332 - DNA, 82 bp, Artificial Sequence
  ENSG00000215252_26 (sequence is synthesized)
ttcttcaaccacctcggttactctgacataggaatttacttcttttccttgagtggaaaacactttagaaaataataacaaa

SEQ ID NO: 761333 - DNA, 120 bp, Artificial Sequence
  ENSG00000215252_27 (sequence is synthesized)
tgaaaatcaaggagaagtttatgcaactgaaaatgtttacacactgtgctgcaatctactgtttgtgaatgtcaatgtattatcaggaaacatgtctatacgatcgcagagttgtatttc

SEQ ID NO: 761334 - DNA, 120 bp, Artificial Sequence
  ENSG00000215252_28 (sequence is synthesized)
ctcacaaacttctttacgaagagtgaaatatgtttttgtacctctcagtttcagtcagggacatattttgtgcaatatttctgtgattgtgcctatgcgtgatgagtgaatgcatttcaa

SEQ ID NO: 761335 - DNA, 83 bp, Artificial Sequence
  ENSG00000215252_29 (sequence is synthesized)
ctgtgattgtgcctatgcgtgatgagtgaatgcatttcaatcatacattgcctaaatcataacttgatgatgcttgggaaaga

SEQ ID NO: 761336 - DNA, 120 bp, Artificial Sequence
  ENSG00000215252_30 (sequence is synthesized)
agttactagaccatctccatttttagcacttggcagcctcatgatccttttataaataggagattaacaggagagcagcaatacgattttgccaatggaataacagatttgccggcattc

SEQ ID NO: 761337 - DNA, 120 bp, Artificial Sequence
  ENSG00000215252_31 (sequence is synthesized)
ttgccaatggaataacagatttgccggcattcactgaaagagggcagatattgggtccttgtgacttcaactgactcttccgaattgtatgaatttatcaatgtattagataaacccagt

SEQ ID NO: 761338 - DNA, 120 bp, Artificial Sequence
  ENSG00000215252_32 (sequence is synthesized)
ttcagaataataaagaaaaaatattagaccaaataatgtggctaatagtggtatgatttctagcccgtgggtttaaaactgtatcctaaagagtcattttaaaataatataaatatttaa

SEQ ID NO: 761339 - DNA, 120 bp, Artificial Sequence
  ENSG00000215252_33 (sequence is synthesized)
atatttaaaagtgtaactgctatctttatgttctgaaataagttaaaacattttaaaatatgaatactgtagtttaaaagaaagaaatggtgggaaggaaaagtagagaaagaaatgcca

SEQ ID NO: 761340 - DNA, 120 bp, Artificial Sequence
  ENSG00000215252_34 (sequence is synthesized)
ccaaagctttgtttgccaagttttcttagaatgaattttaccaatgtatgggttcttgttaacagaatgtgtaacagaaatactgaaagacttttgcctaaagtggcattattgactgct

SEQ ID NO: 761341 - DNA, 120 bp, Artificial Sequence
  ENSG00000215252_35 (sequence is synthesized)
ggtgtgatgctactgtaatgtgataaattattaaattgttgcaaagtgctgtttttgccttaaaattttattttgcgcatcttgaaaattatagtattaaaggtattgatactgtgcaaa

SEQ ID NO: 761342 - DNA, 79 bp, Artificial Sequence
  ENSG00000215252_36 (sequence is synthesized)
atgttgccagttgatggggaagaaaggaagtcggagggctcagacactgagggggacagaacatctccatgtgggaggc

SEQ ID NO: 761343 - DNA, 90 bp, Artificial Sequence
  ENSG00000215252_37 (sequence is synthesized)
ggaggctctgggtggaggtgcagtgaccccgcaggccagccctccaacctcctcccgcagcggggactgggtgcccctctgccagctgag

SEQ ID NO: 761344 - DNA, 120 bp, Artificial Sequence
  ENSG00000215252_38 (sequence is synthesized)
attcagcttccgggctaattagcagtcgcggtgtgccgctacgtgcgggctctcaaggagctcagcctcccggacggagccggcggctgcggggcgaggacggcggcggaccggggcagc

SEQ ID NO: 761345 - DNA, 120 bp, Artificial Sequence
  ENSG00000215252_39 (sequence is synthesized)
cccgcgccctggccagctctactgagatgaagaaagaaaaagaatacctgctcagctccagagacacgtaaagggacagagattgggggacagaaggaagtgcattaattccttccacga

SEQ ID NO: 761346 - DNA, 120 bp, Artificial Sequence
  ENSG00000215252_40 (sequence is synthesized)
caggcaagccagctgccacctcgtcctgtgcaaagcacaggcaccgtccccaaaagatttccaaagatgatgttaaacccagccacggttctgatctccaggaaagcaattgctgtggta

SEQ ID NO: 761347 - DNA, 120 bp, Artificial Sequence
  ENSG00000215252_41 (sequence is synthesized)
caaaaggacaagggttaaaagagaacagtgggagctctctttcccaactaactcacgcagtgtgacgcagaggctttcagcacagcccagggtgcccgggactgaaaactccttcaccag

SEQ ID NO: 761348 - DNA, 120 bp, Artificial Sequence
  ENSG00000215252_42 (sequence is synthesized)
tgagcacttttcatttcctgccgctggtgctgttggataccttacggcaagctgccgtccctgcccacccacctgaggacaggaacctccaactctgccttgccagaactgaccagtgtg

SEQ ID NO: 761349 - DNA, 120 bp, Artificial Sequence
  ENSG00000215252_43 (sequence is synthesized)
aatattagagaaattaggaagactgaaagacaagagcatttaactgcaaactgttgtcgttgtcaactgggttgtcttcctgaagtatgaatccggtatgtattgtgtggaggagcatta

SEQ ID NO: 761350 - DNA, 120 bp, Artificial Sequence
  ENSG00000215252_44 (sequence is synthesized)
cgtactgaacttctcacaaaacagggctgaagcagtgcctactcgacagaaccggtcatcgtacaaagaaatgccacgtgactcaaaggcaaagccagagtgcagcttggagcaaagaag

SEQ ID NO: 761351 - DNA, 120 bp, Artificial Sequence
  ENSG00000215252_45 (sequence is synthesized)
aggcactgcctggcaaggctgctggagggagatctggccgcagatggtgaaggagaacatcgaggcccccagtccccaagcagggctccatgggtcgggcggcgggcattgctctactga

SEQ ID NO: 761352 - DNA, 66 bp, Artificial Sequence
  ENSG00000215252_46 (sequence is synthesized)
aggttcaagcaattatcctgcctcagccacccgagtagctgagattacaggcctctgccaccatgc

SEQ ID NO: 761353 - DNA, 120 bp, Artificial Sequence
  ENSG00000215252_47 (sequence is synthesized)
acaggcttttggggacagggggcccaaggagcagtagagggcaatcgttaagattgtggatggactgttgggtactggtgaaggattctggatttggccgggcacagtggctcacgcctg

SEQ ID NO: 761354 - DNA, 120 bp, Artificial Sequence
  ENSG00000215252_48 (sequence is synthesized)
cacaaggtcaggagatcgagaccatccaggcaaacacggtgaaatactaaaaaatacaaaaaaaaaagccgggcgtggtggcgggcgcctgcagtcccagctgctccggagtctgaggga

SEQ ID NO: 761355 - DNA, 77 bp, Artificial Sequence
  ENSG00000215252_49 (sequence is synthesized)
aggcagagagagactccgtttcaaaaaagaaaagaattctgggtttgaatcctgcctctccgtctgctagggatatg

SEQ ID NO: 761356 - DNA, 120 bp, Artificial Sequence
  ENSG00000215252_50 (sequence is synthesized)
tctgggtttgaatcctgcctctccgtctgctagggatatgatttagggcaagttgcttgagctctttgggcctctgttttcacgtctgtatgatagaggtggtattgtttgacttgtatt

SEQ ID NO: 761357 - DNA, 87 bp, Artificial Sequence
  ENSG00000215252_51 (sequence is synthesized)
cacgtctgtatgatagaggtggtattgtttgacttgtatttgtgaagtttcaatgagattgataattgtcgacaacacccaggacac

SEQ ID NO: 761358 - DNA, 60 bp, Artificial Sequence
  ENSG00000215252_52 (sequence is synthesized)
tggtccacttcccatcaggagtcactgcaaggcccccagggtgggatggtggggagataa

SEQ ID NO: 761359 - DNA, 120 bp, Artificial Sequence
  ENSG00000215252_53 (sequence is synthesized)
agggtccaagataggcagaaaagaaaatgttgccagttgatggggaagaaaggaagtcggagggctcagacactgagggggacagaacatctccatgtgcagtctcatctcttatagtca

SEQ ID NO: 761360 - DNA, 120 bp, Artificial Sequence
  ENSG00000215252_54 (sequence is synthesized)
aggcactgcctggcaaggctgctggagggagatctggccgcagatggtgaaggagaacatcgaggcccccagtccccaagcagggctccatgggtcgggcggcgggcattggctcgtggt

SEQ ID NO: 761361 - DNA, 120 bp, Artificial Sequence
  ENSG00000215252_55 (sequence is synthesized)
tacccgatggaggaaaacttctgggagaatcggctggtgagatgcctgacaccgctctcctggcgtctgacatcaaggatatcttaattttcttagtttttaaaaattatggtaaataca

SEQ ID NO: 761362 - DNA, 120 bp, Artificial Sequence
  ENSG00000215252_56 (sequence is synthesized)
tctccagaactttcttcatcttgcaatctgaaactctgtgtccactaactcccctttccgcctcccccagcccctggcagccaccattctactttctgtctctgaatttgacgactccag

SEQ ID NO: 761363 - DNA, 120 bp, Artificial Sequence
  ENSG00000215252_57 (sequence is synthesized)
gtgccacatgtgagtgaaatcatacaatcatttgtctttttccaactggcttctttgacttagcgtgacgttctcaaggcccacctgtgttgtagcgtgcgtcagaacttccttccttct

SEQ ID NO: 761364 - DNA, 120 bp, Artificial Sequence
  ENSG00000215252_58 (sequence is synthesized)
tagggctaactactgtccccattgtatgggtaggccacactttgtttgccgttcatccctcagacatcaagaatatctcacatagtagaaagagtcaaagaatccaatgagggcttcatc

SEQ ID NO: 761365 - DNA, 120 bp, Artificial Sequence
  ENSG00000215252_59 (sequence is synthesized)
agttctcatgggatctgatggttttataagtagcggtctcccccgctcttccctctcattcctgacgccatgcgaagaaggtccttgcttcccttttgccttctgccatgattctctact

SEQ ID NO: 761366 - DNA, 120 bp, Artificial Sequence
  ENSG00000215252_60 (sequence is synthesized)
attagcagtcgcggtgtgccgctacgtgcgggctctcaaggagctcagcctcccggacggagccggcggctgcggggcgaggacggcggcggaccggggcagccccgcgccctggccagg

SEQ ID NO: 761367 - DNA, 120 bp, Artificial Sequence
  ENSG00000215262_0 (sequence is synthesized)
aaatgacctggcaattccgtctactgatgtctcgaacatgtttcagactaagctacgaaatgaaacttgggaagacttgccaaaaatgtcctgcacaactgagatccaagcagcattcat

SEQ ID NO: 761368 - DNA, 120 bp, Artificial Sequence
  ENSG00000215262_1 (sequence is synthesized)
tctctcttcctttgtgaccttcttcagtggactcatcatcctgttgatcttcaggctgatctggagatctgttaaaaaatggcaaatcatcaagggaacaggaattatcttggaactgtt

SEQ ID NO: 761369 - DNA, 120 bp, Artificial Sequence
  ENSG00000215262_2 (sequence is synthesized)
cacatcaggtaccatcgctaggagccatgtaagaagcctccacttccagggacaatttcgtgatcatatagaaatgttgctttcagcccagacctttgtggggcaagtgttggtgatcct

SEQ ID NO: 761370 - DNA, 120 bp, Artificial Sequence
  ENSG00000215262_3 (sequence is synthesized)
tgtctttgtactaagcattgggtctcttataatctatttcatcaattctgctgaccctgttggaagctgttcatcatatgaagacaaaaccattcctattgatttggttttcaatgcttt

SEQ ID NO: 761371 - DNA, 120 bp, Artificial Sequence
  ENSG00000215262_4 (sequence is synthesized)
ctttagtttctattttggattgaggtttatggcagctgatgacaagatcaagttctggctggagatgaattcaatcgtagacatctttaccatcccaccaacctttatttcttattattt

SEQ ID NO: 761372 - DNA, 120 bp, Artificial Sequence
  ENSG00000215262_5 (sequence is synthesized)
gaagagcaattggctaggtttaaggttcctaagagccttgcgcctgctagaactccctcaaatcttgcaaattctacgagccatcaagaccagtaactcagtgaagttttccaaactgct

SEQ ID NO: 761373 - DNA, 120 bp, Artificial Sequence
  ENSG00000215262_6 (sequence is synthesized)
gtcaataattctcagtacctggttcacagctgcgggattcattcacctggtggaaaattctggtgatccctggctcaaaggtagaaattcacagaatatatcatattttgagtcaattta

SEQ ID NO: 761374 - DNA, 120 bp, Artificial Sequence
  ENSG00000215262_7 (sequence is synthesized)
cctggtcatggcaacaacgtcaaccgttggatttggagatgtggtagccaagacatccttaggacggaccttcatcatgttcttcacactggggagtttgatattatttgcgaactatat

SEQ ID NO: 761375 - DNA, 120 bp, Artificial Sequence
  ENSG00000215262_8 (sequence is synthesized)
acctgaaatggtggaactgtttgctaacaagaggaaatacaccagttcctatgaagcactcaaaggaaagaagtttattgtggtctgtggaaacatcactgtggacagtgtgaccgcttt

SEQ ID NO: 761376 - DNA, 120 bp, Artificial Sequence
  ENSG00000215262_9 (sequence is synthesized)
cctgaggaatttcctccgcgacaagtcaggagagatcaacactgaaattgttttcctgggagaaacccctccttctttggaacttgaaaccatatttaaatgctacttggcctacacaac

SEQ ID NO: 761377 - DNA, 120 bp, Artificial Sequence
  ENSG00000215262_10 (sequence is synthesized)
gttcatttctggatctgcaatgaagtgggaggatctgaggcgagttgcggtggaatctgcagaggcatgcctgattatagccaatcctttgtgcagtgattcccatgctgaagatatttc

SEQ ID NO: 761378 - DNA, 120 bp, Artificial Sequence
  ENSG00000215262_11 (sequence is synthesized)
caacattatgagggtgctctctatcaagaactatgattctaccaccagaatcatcatacagatactgcaatcccataacaaggtttatctgccaaagattcccagctggaactgggacac

SEQ ID NO: 761379 - DNA, 120 bp, Artificial Sequence
  ENSG00000215262_12 (sequence is synthesized)
cggagacaacatcatctgctttgctgaattaaaacttggatttatcgcccaaggctgtttggtgccaggcttgtgtaccttcctaacatctctatttgtggagcaaaacaaaaaggttat

SEQ ID NO: 761380 - DNA, 120 bp, Artificial Sequence
  ENSG00000215262_13 (sequence is synthesized)
gcctaaacagacctggaagaaacacttcttgaatagcatgaaaaacaaaattctgacccaacgtctctctgatgactttgctggaatgagctttcctgaagttgcccggctctgctttct

SEQ ID NO: 761381 - DNA, 120 bp, Artificial Sequence
  ENSG00000215262_14 (sequence is synthesized)
gaagatgcacctcctgttgatagccatcgaatacaagtccctctttacggatggtttctgtggtctgatactaaatccacctccacaagtgaggatacgtaagaacacattagggttctt

SEQ ID NO: 761382 - DNA, 120 bp, Artificial Sequence
  ENSG00000215262_15 (sequence is synthesized)
gtggctgcaaaagcagaagccggcagcacatcacagtgccatcggtaaagagaatgaaaaaatgtctgaagggaatctcctctcgtatatcagggcaggattctccgccaagggtatctg

SEQ ID NO: 761383 - DNA, 120 bp, Artificial Sequence
  ENSG00000215262_16 (sequence is synthesized)
caagcacttcgagcatatcaaacttcaccaccaggactcttcaacatgatgtagaacaagattctgaccagcttgatagcagtgggatgtttcactggtgcaaaccaacctctttggaca

SEQ ID NO: 761384 - DNA, 120 bp, Artificial Sequence
  ENSG00000215262_17 (sequence is synthesized)
aggtgactctgaaacgaactggcaagtcaaagtataagtttcggaaccatattgtagcatgtgtatttggagatgcccactcagccccgatggggcttcggaactttgtaatgcccttga

SEQ ID NO: 761385 - DNA, 120 bp, Artificial Sequence
  ENSG00000215262_18 (sequence is synthesized)
gagccagcaactataccaggaaggagctgaaggacatagtgttcattgggtctctggactatctacagagagaatggcgatttctctggaattttccccagatatacattctgcctggat

SEQ ID NO: 761386 - DNA, 120 bp, Artificial Sequence
  ENSG00000215262_19 (sequence is synthesized)
gtgcactttattctggagacctccatgcggccaacatagagcaatgctccatgtgtgctgtcttgtcccccccaccccagccatcaagcaaccagactttggtagacacagaagccatca

SEQ ID NO: 761387 - DNA, 120 bp, Artificial Sequence
  ENSG00000215262_20 (sequence is synthesized)
tggcaaccctcaccatcggatccttgcaaattgactcctcctctgacccgtcaccctcagtgtcagaggagactccaggttacacaaatggacataatgagaaatcaaactgccgaaaag

SEQ ID NO: 761388 - DNA, 120 bp, Artificial Sequence
  ENSG00000215262_21 (sequence is synthesized)
tccctatccttactgaactgaaaaatccttccaacattcactttattgaacagcttggtggactggaagggtccctccaagaaacaaatctgcatctcagcactgccttttctacgggca

SEQ ID NO: 761389 - DNA, 120 bp, Artificial Sequence
  ENSG00000215262_22 (sequence is synthesized)
ctgttttttccggcagcttcttggattctctgctggccacggccttctacaattatcatgtcctggaattgcttcagatgctggtgacaggaggagtaagttctcagctggaacaacatt

SEQ ID NO: 761390 - DNA, 120 bp, Artificial Sequence
  ENSG00000215262_23 (sequence is synthesized)
tagataaggataaagtctatggtgtggcagatagctgcacgtcgctcttgtctggaagaaaccggtgtaagctggggcttctgtccttacacgaaaccattttatcagacgttaatccaa

SEQ ID NO: 761391 - DNA, 120 bp, Artificial Sequence
  ENSG00000215262_24 (sequence is synthesized)
gaaacacctttggacaactgttctgtggctcattagatctttttggaatcctgtgtgttggcttataccgaataattgatgaagaggagctcaacccagaaaacaaaaggtttgtgatca

SEQ ID NO: 761392 - DNA, 120 bp, Artificial Sequence
  ENSG00000215262_25 (sequence is synthesized)
cccggccagccaatgagttcaagctgctgccttcagatcttgtgttttgtgccatacccttcagcactgcttgttataaaaggaatgaagagttctcattgcaaaagtcatatgaaattg

SEQ ID NO: 761393 - DNA, 120 bp, Artificial Sequence
  ENSG00000215262_26 (sequence is synthesized)
taaataaagcatcacagacaacagagacacattcagacacaaattgtcctcccaccattgattcagttactgagacattgtattcaccagtctattcttaccagccgagaactaactccc

SEQ ID NO: 761394 - DNA, 120 bp, Artificial Sequence
  ENSG00000215262_27 (sequence is synthesized)
tctcttttcctaagcaaatagcatggaatcagagtagaacaaacagtattatatcatctcagatacctttaggtgacaatgcaaaagaaaatgaaaggaaaacttcagatgaggtttatg

SEQ ID NO: 761395 - DNA, 120 bp, Artificial Sequence
  ENSG00000215262_28 (sequence is synthesized)
atgaggatccctttgcatattcagagccactatagacctgcccatattcttcacgtgctcttaacttgctgcttacaaatcatctcctgagatgctaactttgaacaaagaaaataagaa

SEQ ID NO: 761396 - DNA, 120 bp, Artificial Sequence
  ENSG00000215262_29 (sequence is synthesized)
tggaagcatgccatttttctgcccattgcttagtggttcatgaaggccacactgttttgggtgagacaaaagtctaatgccactggatcttgtgtgataaataaagaaatatatgatcaa

SEQ ID NO: 761397 - DNA, 120 bp, Artificial Sequence
  ENSG00000215262_30 (sequence is synthesized)
ggagatctgggatcccagaaatctacactcattaatatcacttcagatgatccagatacatgagaagcaatgataaagaaaacagaatttagcaatgtgtgcagtatattttacttaatc

SEQ ID NO: 761398 - DNA, 120 bp, Artificial Sequence
  ENSG00000215271_0 (sequence is synthesized)
atccgccccgcctccaacttgctcgagcagggctgggtagaccggcgcgctcccggggacggtggggggggcagtcccggtttcggccatcgctggggtgggctcggagcggccgcaccg

SEQ ID NO: 761399 - DNA, 120 bp, Artificial Sequence
  ENSG00000215271_1 (sequence is synthesized)
ggcagcaaccccactcccactcggaggccccctgccctctcccccacttccccccggcccatggtgcgaggctgggagccgccgcccgggctggactgcgctatctctgaagggcacaaa

SEQ ID NO: 761400 - DNA, 120 bp, Artificial Sequence
  ENSG00000215271_2 (sequence is synthesized)
tcagaaggcaccatgcctcctaataaagaggccagcggtctcagtagttcaccagcggggctcatctgcctccctccaatctctgaggagctacagcttgtgtggacgcaagcagcccag

SEQ ID NO: 761401 - DNA, 120 bp, Artificial Sequence
  ENSG00000215271_3 (sequence is synthesized)
accagtgagctagacagcaatgaacacctgctcaaaaccttcagctactttccctatcccagcctagcagacattgcccttctctgcctacgttatgggttgcagatggagaaagtcaag

SEQ ID NO: 761402 - DNA, 120 bp, Artificial Sequence
  ENSG00000215271_4 (sequence is synthesized)
acttggtttatggcccagcgcctccgctgtggtattagctggtcatctgaagaaatagaagagactcgagcccgagtagtctaccgtcgggaccaactccatttcaaatcccttctctct

SEQ ID NO: 761403 - DNA, 120 bp, Artificial Sequence
  ENSG00000215271_5 (sequence is synthesized)
tttactcatcatgcgggacggcccccagaggaggtgcctcctcctccagtgccagctccagagcaagttggtattggaataggtcctccaactcttagcaagcctacccagacgaaagga

SEQ ID NO: 761404 - DNA, 120 bp, Artificial Sequence
  ENSG00000215271_6 (sequence is synthesized)
ttgaaggtagagcctgaggagccctctcagatgccaccactgccacagagtcaccagaaattaaaggagtccctgatgacacctggcagtggagcattcccctaccaatcagatttttgg

SEQ ID NO: 761405 - DNA, 120 bp, Artificial Sequence
  ENSG00000215271_7 (sequence is synthesized)
caacatcttcaaagcagtggcctctcaaaggagcaggcaggcaggggtcccaaccagtcacatggcataggtactgcttcctggaaccactccacaaccgtcccccagccacaagctcgg

SEQ ID NO: 761406 - DNA, 120 bp, Artificial Sequence
  ENSG00000215271_8 (sequence is synthesized)
gataaacccccaccaattgcattaattgccagtagttgtaaggaggagtcagcatctagtgttactccctcttcttcctctacctcttcttctttccaggtactggctaatggagctact

SEQ ID NO: 761407 - DNA, 120 bp, Artificial Sequence
  ENSG00000215271_9 (sequence is synthesized)
gccgcctctaaacccctccagccactaggctgtgtcccacagtcagtgtcacccagtgaacaggcattacccccacatctggaaccagcctggccccaagggctacggcataactcagta

SEQ ID NO: 761408 - DNA, 120 bp, Artificial Sequence
  ENSG00000215271_10 (sequence is synthesized)
ccaggtagagttggccccacagagtacctttccccagatatgcaacgccagcgaaagaccaagcgcaaaaccaaagagcagctggctatccttaaatccttttttttacagtgccagtgg

SEQ ID NO: 761409 - DNA, 120 bp, Artificial Sequence
  ENSG00000215271_11 (sequence is synthesized)
gcacggcgtgaggattaccaaaagttagaacagatcactggtttacctcggcctgagatcattcagtggtttggtgacacacgctatgccttgaagcatgggcaactaaagtggtttcgg

SEQ ID NO: 761410 - DNA, 120 bp, Artificial Sequence
  ENSG00000215271_12 (sequence is synthesized)
gacaacgcagtacctggtgcccctagtttccaagacccagcaattcctacaccaccaccatcaacccgctccttgaacgaaagggctgagacaccacctctgccgatccctccaccccca

SEQ ID NO: 761411 - DNA, 120 bp, Artificial Sequence
  ENSG00000215271_13 (sequence is synthesized)
ccggatatacaacccttggagaggtactgggcagcccaccaacagctacgggaaactgatatccctcaattgagtcaggcatcaaggcttagcacccagcaggtgctggattggtttgac

SEQ ID NO: 761412 - DNA, 120 bp, Artificial Sequence
  ENSG00000215271_14 (sequence is synthesized)
tctcgattacctcagccagctgaggtggtagtttgtctagatgaagaagaggaagaggaggaggaagaactgccagaagatgatgaggaagaggaggaggaggaggaggaagatgatgat

SEQ ID NO: 761413 - DNA, 120 bp, Artificial Sequence
  ENSG00000215271_15 (sequence is synthesized)
gatgatgatgatgatgtgatcatacaagactgagtggggagctgggggaggggaggtctgttactgaaagatgaaccaacttagtaactgtttaaacaaagaaaccacatttttaaaatt

SEQ ID NO: 761414 - DNA, 120 bp, Artificial Sequence
  ENSG00000215271_16 (sequence is synthesized)
accttgtggcagagaactaaaaagctttgtgttcttcagggtgggtggcagggggatatagtgagggtggaccagggagaatgaccatagggcactaagtaaggctgggattggatcagc

SEQ ID NO: 761415 - DNA, 120 bp, Artificial Sequence
  ENSG00000215271_17 (sequence is synthesized)
agaaatccaaccctctaaccttagggtagggagtgctaaggatctggggaaaccatgggctgggaagctgctcttgctctcctcgtgtctgctgtttttttcccttggtgtactatacag

SEQ ID NO: 761416 - DNA, 120 bp, Artificial Sequence
  ENSG00000215271_18 (sequence is synthesized)
aggccagatgttggcaccacctctccaggaggattggaaaggaggagtaaaggattctgatttgattgatgattccagtgcatccccaatcccaccatcttacctggaatataaggctgc

SEQ ID NO: 761417 - DNA, 120 bp, Artificial Sequence
  ENSG00000215271_19 (sequence is synthesized)
cttgtaccccttttctgagcacaagtctgtgcgtaatgcaactgactctcttacttttttcttagtaactgatcatttcctagacaaccaagattctcaataagtcccagtctcatcaca

SEQ ID NO: 761418 - DNA, 67 bp, Artificial Sequence
  ENSG00000215271_20 (sequence is synthesized)
ccaacttgactatgtttcacccgcttcatgactaaatcacaggtggcagaatttttcagttatggcg

SEQ ID NO: 761419 - DNA, 84 bp, Artificial Sequence
  ENSG00000215271_21 (sequence is synthesized)
attttcagttcttatgctgtgaccactttgccttgtagctttttctatctttccaaaatcctcactctgttcattgtttgtctc

SEQ ID NO: 761420 - DNA, 120 bp, Artificial Sequence
  ENSG00000215271_22 (sequence is synthesized)
ctatctttccaaaatcctcactctgttcattgtttgtctcagggaaaatcttcccccaccgagcttgtaaaaaactttaataattgggtggagaataatttagaatggatatttattgga

SEQ ID NO: 761421 - DNA, 120 bp, Artificial Sequence
  ENSG00000215271_23 (sequence is synthesized)
ggtggtaattagggaagatgtccttttaaacagtagaattgtgttacaaaggggtgaaagagagggaatagtttctccttgttgaagggcagtgaaggtaggtttcaggtttggttttac

SEQ ID NO: 761422 - DNA, 120 bp, Artificial Sequence
  ENSG00000215271_24 (sequence is synthesized)
aaacctgttaactacctcctgtccagcttgacagagactaatttttcatctttttgctgtcaatttgtttccagaaaagagacttttccctctcttgataggatctgtcttagggacaga

SEQ ID NO: 761423 - DNA, 120 bp, Artificial Sequence
  ENSG00000215271_25 (sequence is synthesized)
gggaccatcgtctttaagtgaattaattattgatgttttagaatggttttcatcagttgggatcagctatatggcaaataggtatcatcaatgagttaaccatctaaaaataaaagagtg

SEQ ID NO: 761424 - DNA, 120 bp, Artificial Sequence
  ENSG00000215271_26 (sequence is synthesized)
gaagccctaaaatgctagaataataataaaaaggccaaaaataaaattgtttctctctcaaccactttgccactcctatggtttagggattaatggaaccaaatccattaacattctaac

SEQ ID NO: 761425 - DNA, 120 bp, Artificial Sequence
  ENSG00000215271_27 (sequence is synthesized)
tcagcatacttttaacttattgtttggaggggcaggacttattgaggtaaattaaaagaacaaaaactgtaaaaaggaagtagttcagcatctatcgccagccaggttgtttctcagcca

SEQ ID NO: 761426 - DNA, 120 bp, Artificial Sequence
  ENSG00000215271_28 (sequence is synthesized)
tcaaatgataatgactaaaatttctgaggcttcaggagtaacagagatacaacagtcttggaggtaactccatttgctacaggacaggcccttgcctaaaagagaaggtatctagaaatg

SEQ ID NO: 761427 - DNA, 120 bp, Artificial Sequence
  ENSG00000215271_29 (sequence is synthesized)
cctttaaaataaattcagagtaccagaaagggtatggggatcctagttcagatacaagatcattcccaagacctaatttatttctggcagatgcctgctattttctgtttttccagtatt

SEQ ID NO: 761428 - DNA, 120 bp, Artificial Sequence
  ENSG00000215271_30 (sequence is synthesized)
tttgcttaaggccagcttgtgagtggctaacctatttaattcgtcatttctgccttttaaaacccaaagtagaatacatgtttgatctcagtgatagtgttgttcgcccattccaccatt

SEQ ID NO: 761429 - DNA, 120 bp, Artificial Sequence
  ENSG00000215271_31 (sequence is synthesized)
ctagagcttgtaaaagtgatagaattgtagcaataaaagggcatcgtctttattttactatctatatactaagctgaaaatcagtgtctccaacagttgttttcaatagaaaggaaaatt

SEQ ID NO: 761430 - DNA, 120 bp, Artificial Sequence
  ENSG00000215271_32 (sequence is synthesized)
aacatttaatagtaactaagcatagaggaaataatagacaaataaaaaagtataataaggaaaagaacagagatattgctcgttaacattggcaatgggacagtatatccaaagctaaaa

SEQ ID NO: 761431 - DNA, 120 bp, Artificial Sequence
  ENSG00000215271_33 (sequence is synthesized)
atgaaatccagaaatgaaacagtgatgagtatatgatccatcacaatccccattcccaactcccaaccaagcatgatgccaagaattatttttttgacctttgttccaaattgtaggaaa

SEQ ID NO: 761432 - DNA, 120 bp, Artificial Sequence
  ENSG00000215271_34 (sequence is synthesized)
tgaggggagctaccagtgtcttctggaagagatataaacatcttcctgaagcactagccttttgtaagacctgaccactgtcctgggaggtgataagggtgaatagggtaaagatggggg

SEQ ID NO: 761433 - DNA, 120 bp, Artificial Sequence
  ENSG00000215271_35 (sequence is synthesized)
gagcataaggtacagagtgaaactaggaaacaatgcagggatacattttccagggccatcacccctaatgcgtactggaagctacagtccatccttcagcagcatgtatagatcagatct

SEQ ID NO: 761434 - DNA, 120 bp, Artificial Sequence
  ENSG00000215271_36 (sequence is synthesized)
tgaagatgatctatctagaagtggtccatgcttctctcccactgggtaatcccatatgcctccgttgttggtagagagtctgcagcagaggacaagaaggtagatgtgggtgtttataac

SEQ ID NO: 761435 - DNA, 120 bp, Artificial Sequence
  ENSG00000215271_37 (sequence is synthesized)
agcaaaaagggcaagcaagtctctctgacctgttgtatgaagcttatcgagacagacaccactgcttttgcttccccatagttttcttcattgcatgataactaacttttccaaactagg

SEQ ID NO: 761436 - DNA, 120 bp, Artificial Sequence
  ENSG00000215271_38 (sequence is synthesized)
atttgctacatctagtgtgacaatctctggaacatttcagtagcttatggtgataataataaggatgaatatttgaaaattaaactattttggaaaatctgggacatatgactaccacac

SEQ ID NO: 761437 - DNA, 120 bp, Artificial Sequence
  ENSG00000215271_39 (sequence is synthesized)
ccagagatgactaccagggaggcagagttcttaggcctctgaggaggtggcatttccttcaataactttaaaattttttcacattttcggttgtttgtttgtttgtttgtttgttgtttt

SEQ ID NO: 761438 - DNA, 120 bp, Artificial Sequence
  ENSG00000215271_40 (sequence is synthesized)
ggaaaagaagcagttcctgatgttacaaatgaacaaggatctcccagggaagccctaccctgagaataacagatgcctcctcattacatcataatggccaagttgtgatgtcggcacaga

SEQ ID NO: 761439 - DNA, 120 bp, Artificial Sequence
  ENSG00000215271_41 (sequence is synthesized)
tgcagaacctggccttgcttctggggatcagtggcctttgggaatgaaaggtttagaagaaactgcccctctgactcccgtacccagccatactaagagaaccaaccaggaaactgagaa

SEQ ID NO: 761440 - DNA, 120 bp, Artificial Sequence
  ENSG00000215271_42 (sequence is synthesized)
cctgagtcctctggggttcctagtgttgcgtcctattctgagactcctaaactgaaagaagactcaagctgagacctgtttgtattaactacacagggagtctcaaacctggctgtaccc

SEQ ID NO: 761441 - DNA, 80 bp, Artificial Sequence
  ENSG00000215274_0 (sequence is synthesized)
tatgagttggcgaggaagatcgacctatcggcctagaccaagacgctacgtagagccccctgaaatgattgggcctatgc

SEQ ID NO: 761442 - DNA, 120 bp, Artificial Sequence
  ENSG00000215274_1 (sequence is synthesized)
cgaagcctgaagctgatagccaggaacaggttcacccaaagactgggtgtgagtgtggagatggtcctgatggccaggagatgggcctgccaaatccagaggaggtgaaaaggcctgaag

SEQ ID NO: 761443 - DNA, 120 bp, Artificial Sequence
  ENSG00000215277_0 (sequence is synthesized)
ggaatgagtcatgggaaatgaaaaaatgtcgaatttgcctctagcctttcctgacaaccttagaaagcactgaggaaaaatttgatagattcatttgtatacattcagatttgaagactt

SEQ ID NO: 761444 - DNA, 120 bp, Artificial Sequence
  ENSG00000215277_1 (sequence is synthesized)
ctgctccgatttcaacatcaccatataaaacaaataatgtttctgcttcttaaacaaagctgttggagaatgtgcaccaccaaaataagggaataagtaaaggaggaagaagaccctgag

SEQ ID NO: 761445 - DNA, 120 bp, Artificial Sequence
  ENSG00000215277_2 (sequence is synthesized)
ttcaggaataagaatggattggtttcattgcaaccagtgcttccgaaaagatggggcccatttctttgtcaccagctgtggccatattttctgtaaaaagtgtgtgactctggaaaaatg

SEQ ID NO: 761446 - DNA, 120 bp, Artificial Sequence
  ENSG00000215277_3 (sequence is synthesized)
tgctgtttgtggaactgcctgcaagcatctggctctttctgataatctgaagcctcaggagaagatgtttttcaaaagtcctgtggagacagctttgcagtattttagtcacatctctca

SEQ ID NO: 761447 - DNA, 120 bp, Artificial Sequence
  ENSG00000215277_4 (sequence is synthesized)
ggtgtggagtttccagaagaaacaaacagatctcctcatcgccttttataagcatagaattacaaagttagaaacagccatgcaggaggcacagcaagcactggtgagccaggacaaaga

SEQ ID NO: 761448 - DNA, 120 bp, Artificial Sequence
  ENSG00000215277_5 (sequence is synthesized)
attgtcagtcttaaggaaggagaatggagaactgaagaaatttctagccattctaaaggaatctccaagtcggtaccaaggaagcaggtcaatcacacctcgaccagtgggcattacttc

SEQ ID NO: 761449 - DNA, 120 bp, Artificial Sequence
  ENSG00000215277_6 (sequence is synthesized)
tgggacaaggaggcagaggtctgcagggaaggagaactcccagagactcttataatgaaaccccttcaccggcttcaactcatagcctatcttatagaacttcatctgcctcctctggac

SEQ ID NO: 761450 - DNA, 120 bp, Artificial Sequence
  ENSG00000215277_7 (sequence is synthesized)
aggggattttttctttcagaccatccccaaatgggcattcaggccacacaagagtcctcacccccaacaattttgctcagagggagagcacaactacactagagagtcttcctagtttcc

SEQ ID NO: 761451 - DNA, 120 bp, Artificial Sequence
  ENSG00000215277_8 (sequence is synthesized)
agctaccagtcctgcagactctctaccaacaacggaggcatatgggattacccagtgggagagaagcatggaccacttctagatagatcatcttcaagatctgatctatacatgctgctg

SEQ ID NO: 761452 - DNA, 120 bp, Artificial Sequence
  ENSG00000215277_9 (sequence is synthesized)
aaggatggactgtagcttccagtacgcattaggggtgatggccctggaaaatgtatccctgcattgtttcctagtttcactctgtaccttatgctccccccatctttaccctattcaccc

SEQ ID NO: 761453 - DNA, 120 bp, Artificial Sequence
  ENSG00000215277_10 (sequence is synthesized)
ttatcacctcccaggacagtggtcaggtcttacaaaaggctagtgcttcaggaagatgtttatatctcttccagaagacactggtagctcccctcatttcctacaatttggaacaaaggt

SEQ ID NO: 761454 - DNA, 120 bp, Artificial Sequence
  ENSG00000215277_11 (sequence is synthesized)
caaaaaaataattcttggcatcatgcttggttgggagttgggaatggggattgtgatggatcatatactcatcactgtttcatttctggatttcatttttagctttggatatactgtccc

SEQ ID NO: 761455 - DNA, 120 bp, Artificial Sequence
  ENSG00000215277_12 (sequence is synthesized)
attgccaatgttaacgagcaatatctctgttcttttccttattatacttttttatttgtctattatttcctctatgcttagttactattaaatgttaattttcctttctattgaaaacaa

SEQ ID NO: 761456 - DNA, 120 bp, Artificial Sequence
  ENSG00000215277_13 (sequence is synthesized)
gccaggacaatcggtcctcctcagcggaatctattccttatagagaggctggctttggtagcttgggacaaggaggcagaggtctgcagggaaggagaactcccagagactcttataatg

SEQ ID NO: 761457 - DNA, 120 bp, Artificial Sequence
  ENSG00000215277_14 (sequence is synthesized)
acaaaaattccaacagattactcctctgtctgctgcacttggtgggattccatggagccagcccagcactagtgggaaagaaataaagaggcactgcctgtggcaggccagatctccgca

SEQ ID NO: 761458 - DNA, 120 bp, Artificial Sequence
  ENSG00000215277_15 (sequence is synthesized)
ttgccagaagtgaagggaaaggagttatgggagagtatgtcaaaggcttgtttttccctagtaggtgtggagtttccagaagaaacaaacagatctcctcatcgccttttataagcatag

SEQ ID NO: 761459 - DNA, 120 bp, Artificial Sequence
  ENSG00000215277_16 (sequence is synthesized)
accagtgggcattacttccccatcacagtcagtcggtcctcctcagcggaatctattccttatagagaggctggctttggtagcttgggacaaggaggcagaggtctgcagggaaggaga

SEQ ID NO: 761460 - DNA, 120 bp, Artificial Sequence
  ENSG00000215301_0 (sequence is synthesized)
atttccccccgactcccgccccggtcaccatcctaccctcctccctcctcctttccccttactccgctcccctcttttccctccctctcctccccttccctctgttctctcctcctcttc

SEQ ID NO: 761461 - DNA, 120 bp, Artificial Sequence
  ENSG00000215301_1 (sequence is synthesized)
ccctcccctcccccgtccggagcactctatattcaagccaccgtttcctgcttcacaaaatggccaccgcacgcgacacctacggtcacgtggcctgccgccctctcagtttcgggaatc

SEQ ID NO: 761462 - DNA, 120 bp, Artificial Sequence
  ENSG00000215301_2 (sequence is synthesized)
tgcctagctcccactaaggggaggctacccgcggaagagcgagggcagattagaccggagaaatcccaccacatctccaagcccgggaactgagagaggaagaagagtgaagcgggtata

SEQ ID NO: 761463 - DNA, 120 bp, Artificial Sequence
  ENSG00000215301_3 (sequence is synthesized)
ttagatccgtggccgcgcggtgcgctccagagccgcagttctcccgtgagagggccttcgcggtggaacaaacactcgcttagcagcggaagactccgagttctcggtactcttcaggga

SEQ ID NO: 761464 - DNA, 120 bp, Artificial Sequence
  ENSG00000215301_4 (sequence is synthesized)
tgagtcatgtggcagtggaaaatgcgctcgggctggaccagcagtttgctggcctagacctgaactcttcagataatcagagtggaggaagtacagccagcaaagggcgctatattcctc

SEQ ID NO: 761465 - DNA, 120 bp, Artificial Sequence
  ENSG00000215301_5 (sequence is synthesized)
ctcatttaaggaaccgagaagctactaaaggtttctacgataaagacagttcagggtggagttctagcaaagataaggatgcgtatagcagttttggatctcgtagtgattcaagaggga

SEQ ID NO: 761466 - DNA, 120 bp, Artificial Sequence
  ENSG00000215301_6 (sequence is synthesized)
agtctagcttcttcagtgatcgtggaagtggatcaaggggaaggtttgatgatcgtggacggagtgattacgatggcattggcagccgtggtgacagaagtggctttggcaaatttgaac

SEQ ID NO: 761467 - DNA, 120 bp, Artificial Sequence
  ENSG00000215301_7 (sequence is synthesized)
gtggtggaaacagtcgctggtgtgacaaatcagatgaagatgattggtcaaaaccactcccaccaagtgaacgcttggaacaggaactcttttctggaggcaacactgggattaattttg

SEQ ID NO: 761468 - DNA, 120 bp, Artificial Sequence
  ENSG00000215301_8 (sequence is synthesized)
agaaatacgatgacattccagttgaggcaacaggcaacaactgtcctccacatattgaaagtttcagtgatgttgagatgggagaaattatcatgggaaacattgagcttactcgttata

SEQ ID NO: 761469 - DNA, 120 bp, Artificial Sequence
  ENSG00000215301_9 (sequence is synthesized)
ctcgcccaactccagtgcaaaagcatgctattcctattatcaaagagaaaagagacttgatggcttgtgcccaaacagggtctggaaaaactgcagcatttctgttgcccatcttgagtc

SEQ ID NO: 761470 - DNA, 120 bp, Artificial Sequence
  ENSG00000215301_10 (sequence is synthesized)
agatttattcagatggtccaggcgaggctttgagggccatgaaggaaaatggaaggtatgggcgccgcaaacaatacccaatctccttggtattagcaccaacgagagagttggcagtac

SEQ ID NO: 761471 - DNA, 120 bp, Artificial Sequence
  ENSG00000215301_11 (sequence is synthesized)
agatctacgaggaagccagaaaattttcataccgatctagagttcgtccttgcgtggtttatggtggtgccgatattggtcagcagattcgagacttggaacgtggatgccatttgttag

SEQ ID NO: 761472 - DNA, 120 bp, Artificial Sequence
  ENSG00000215301_12 (sequence is synthesized)
tagccactccaggacgtctagtggatatgatggaaagaggaaagattggattagacttttgcaaatacttggtgttagatgaagctgatcggatgttggatatggggtttgagcctcaga

SEQ ID NO: 761473 - DNA, 120 bp, Artificial Sequence
  ENSG00000215301_13 (sequence is synthesized)
ttcgtagaatagtcgaacaagatactatgcctccaaagggtgtccgccacactatgatgtttagtgctacttttcctaaggaaatacagatgctggctcgtgatttcttagatgaatata

SEQ ID NO: 761474 - DNA, 120 bp, Artificial Sequence
  ENSG00000215301_14 (sequence is synthesized)
tcttcttggctgtaggaagagttggctctacctctgaaaacatcacacagaaagtagtttgggtggaagaatcagacaaacggtcatttctgcttgacctcctaaatgcaacaggcaagg

SEQ ID NO: 761475 - DNA, 120 bp, Artificial Sequence
  ENSG00000215301_15 (sequence is synthesized)
attcactgaccttagtgtttgtggagaccaaaaagggtgcagattctctggaggatttcttataccatgaaggatacgcatgtaccagcatccatggagaccgttctcagagggatagag

SEQ ID NO: 761476 - DNA, 120 bp, Artificial Sequence
  ENSG00000215301_16 (sequence is synthesized)
aagaggcccttcaccagttccgctcaggaaaaagcccaattttagtggctacagcagtagcagcaagaggactggacatttcaaatgtgaaacatgttatcaattttgacttgccaagtg

SEQ ID NO: 761477 - DNA, 120 bp, Artificial Sequence
  ENSG00000215301_17 (sequence is synthesized)
atattgaagaatatgtacatcgtattggtcgtacgggacgtgtaggaaaccttggcctggcaacctcattctttaacgagaggaacataaatattactaaggatttgttggatcttcttg

SEQ ID NO: 761478 - DNA, 120 bp, Artificial Sequence
  ENSG00000215301_18 (sequence is synthesized)
ttgaagctaaacaagaagtgccgtcttggttagaaaacatggcttatgaacaccactacaagggtagcagtcgtggacgttctaagagtagcagatttagtggagggtttggtgccagag

SEQ ID NO: 761479 - DNA, 120 bp, Artificial Sequence
  ENSG00000215301_19 (sequence is synthesized)
actaccgacaaagtagcggtgccagcagttccagcttcagcagcagccgcgcaagcagcagccgcagtggcggaggtggccacggtagcagcagaggatttggtggaggtggctatggag

SEQ ID NO: 761480 - DNA, 120 bp, Artificial Sequence
  ENSG00000215301_20 (sequence is synthesized)
acatgtaacttagccagactataccttgtgtagcttcaagaactcgcagtacattaccagctgtgattctccactgaaattttttttttaagggagctcaaggtcacaagaagaaatgaa

SEQ ID NO: 761481 - DNA, 120 bp, Artificial Sequence
  ENSG00000215301_21 (sequence is synthesized)
aggaacaatcagcagccctgttcagaaggtggtttgaagacttcattgctgtagtttggattaactcccctcccgcctacccccatcccaaactgcatttataattttgtgactgaggat

SEQ ID NO: 761482 - DNA, 120 bp, Artificial Sequence
  ENSG00000215301_22 (sequence is synthesized)
catttgtttgttaatgtactgtgcctttaactttagacaactttttattttgatgtcctgttggctcagtaatgctcaagatatcaattgttttgacaaaataaatttactgaacttggg

SEQ ID NO: 761483 - DNA, 120 bp, Artificial Sequence
  ENSG00000215301_23 (sequence is synthesized)
ctaaaatcaaaccttggcacacaggtgtgatacaacttaacaggaatcatcgattcatccataaataatataaggaaaaacttatgcggtagcctgcattagggctttttgatacttgca

SEQ ID NO: 761484 - DNA, 120 bp, Artificial Sequence
  ENSG00000215301_24 (sequence is synthesized)
gattgggggaaaacaacaaatgtcttgaagcatattaatggaattagtttctaatgtggcaaactgtattaagttaaagttctgatttgctcactctatcctggataggtatttagaacc

SEQ ID NO: 761485 - DNA, 120 bp, Artificial Sequence
  ENSG00000215301_25 (sequence is synthesized)
tgatagtctttaagccattccagtcatgatgaggtgatgtatgaatacatgcatacattcaaagcactgttttcaaagttaatgcaagtaaatacagcaattcctctttcaacgtttagg

SEQ ID NO: 761486 - DNA, 120 bp, Artificial Sequence
  ENSG00000215301_26 (sequence is synthesized)
cagatcattaattatgagctagccaaatgtgggcatactattacagggaaagtttaaaggtctgataacttgaaataggtttttaggagaattcatctacttagactttttaaatgcctg

SEQ ID NO: 761487 - DNA, 120 bp, Artificial Sequence
  ENSG00000215301_27 (sequence is synthesized)
ccataaatgaaattgaaatggtagaatggctgaccacagcaatgaccagccctcattagggccctggatgatttttggtctaataacgcatgctagtgttgatgttttttggtcaagagg

SEQ ID NO: 761488 - DNA, 120 bp, Artificial Sequence
  ENSG00000215301_28 (sequence is synthesized)
gtatgaacaggaagaattaaatgcagcaggctttattttaaatgccgattcacattactctgttcaagctgcgttgagatgttaaactggcttactatagacttcgtaaaaatggctcca

SEQ ID NO: 761489 - DNA, 120 bp, Artificial Sequence
  ENSG00000215301_29 (sequence is synthesized)
gaagagtaacaaactgaaatctttgagatcacacaggttggaaatatgtacataactgcacaaggtgtcaattctgctctacagtgcagttttagtcagttttagttgcataggtttcca

SEQ ID NO: 761490 - DNA, 120 bp, Artificial Sequence
  ENSG00000215301_30 (sequence is synthesized)
ttgtatttatagtctgtttatgctaaatctggccaaagatgagcattgtccaccactaaaatgcctctgccactttgaattctgtgctaattttgtggccagaatgcggtgatcaaaacg

SEQ ID NO: 761491 - DNA, 120 bp, Artificial Sequence
  ENSG00000215301_31 (sequence is synthesized)
ctccatctttttacagtggcataggaagacggcaaaaatttcctaaagtgcaatagattttcaagtgtattgtgccttgttctaaaacttttattaagtaggtgcacttgacagtattga

SEQ ID NO: 761492 - DNA, 120 bp, Artificial Sequence
  ENSG00000215301_32 (sequence is synthesized)
ggtcatttgttatggtgctatttcaattagtctaggtttaggcccttgtacattttgcccataactttttacaaagtacttcttttattgcacattcagagaattttatatatatgtctt

SEQ ID NO: 761493 - DNA, 120 bp, Artificial Sequence
  ENSG00000215301_33 (sequence is synthesized)
gtgtgcgtgtccttaaacttccaatcttactttgtctcttggagattgttgaacgcagcttgtctaggaaggggatgggactagattctaaaatttatttgggaccatgggaatgatagt

SEQ ID NO: 761494 - DNA, 120 bp, Artificial Sequence
  ENSG00000215301_34 (sequence is synthesized)
tgggaagaaaactatttgcacacgacagatttctagatactttttgctgctagttttatgtaatatttattgaacattttgacaaatatttatttttgtaagcctaaaagtgattctttg

SEQ ID NO: 761495 - DNA, 120 bp, Artificial Sequence
  ENSG00000215301_35 (sequence is synthesized)
aaagtttaaagaaacttgaccaaaagacagtacaaaaacactggcacttgaatgttgaatgtcaccgtatgcgtgaaattatatatttcggggtagtgtgagcttttaatgtttaagtca

SEQ ID NO: 761496 - DNA, 120 bp, Artificial Sequence
  ENSG00000215301_36 (sequence is synthesized)
tattaaactcttaagtcaaattaagcagacccggcgttggcagtgtagccataactttctgatgttagtaaaaacaaaattggcgacttgaaattaaatcatgccaaggttttgatacac

SEQ ID NO: 761497 - DNA, 120 bp, Artificial Sequence
  ENSG00000215301_37 (sequence is synthesized)
ttgtcttaagatattaatgaaacacttcaaaacactgatgtgaagtgtccagattctcagatgtttgttgtgtggattttgtttagttgtgtgtttttttttttttttcagtgaatgtct

SEQ ID NO: 761498 - DNA, 120 bp, Artificial Sequence
  ENSG00000215301_38 (sequence is synthesized)
ggcacattgcaatcctcaaacatgtggttatctttgttgtattggcataatcagtgacttgtacattcagcaatagcatttgagcaagttttatcagcaagcaatattttcagttaataa

SEQ ID NO: 761499 - DNA, 120 bp, Artificial Sequence
  ENSG00000215301_39 (sequence is synthesized)
ggtttcaaaaatcatgtaaggatttaaacttgctgaatgtaaagattgaacctcaagtcactgtagctttagtaattgcttattgtattagtttagatgctagcactgcatgtgctgtgc

SEQ ID NO: 761500 - DNA, 120 bp, Artificial Sequence
  ENSG00000215301_40 (sequence is synthesized)
atattctgattttattaaaataaaaagttgaactgcacagtctcctttgttgttgtcaattgtggtttattttcagaggtgtaaataaagtgctcttgcctgaaaaattgtaaaatgtta

SEQ ID NO: 761501 - DNA, 120 bp, Artificial Sequence
  ENSG00000215301_41 (sequence is synthesized)
ttggaaaggggagcgaatgcgtaaggttggaaaggggggcgaagaggcctaggttaacattttcaggcgtcttagccggtggaaagcgggagacgcaagttctcgcgagatctcgagaac

SEQ ID NO: 761502 - DNA, 120 bp, Artificial Sequence
  ENSG00000215301_42 (sequence is synthesized)
tccgaggctgagactagggttttagcggagagcacgggaagtgtagctcgagagaactgggacagcatttcgcaccctaagctccaaggcaggactgctaggggcgacaggactaagtag

SEQ ID NO: 761503 - DNA, 120 bp, Artificial Sequence
  ENSG00000215301_43 (sequence is synthesized)
gaaatcccttgagcttagacctgagggagcgcgcagtagccgggcagaagtcgccgcgacagggaattgcggtgtgagagggagggcacacgttgtacgtgctgacgtagccggctttcc

SEQ ID NO: 761504 - DNA, 120 bp, Artificial Sequence
  ENSG00000215301_44 (sequence is synthesized)
ccataagtatttgcaatgaaagatgaagatagtattagtttgaaatacagtgaaacaggatttttgtaatagacggaaatctaaaaggcccttactgataatacagcatgtattagaaat

SEQ ID NO: 761505 - DNA, 120 bp, Artificial Sequence
  ENSG00000215301_45 (sequence is synthesized)
tggcttatactttgaacaatttgacatgggtgggagtctctttgttctttgaagtatctattatgaaggatggttgaacagtggaagaatgagcaggataaaagtcaagtgtgtcagtag

SEQ ID NO: 761506 - DNA, 120 bp, Artificial Sequence
  ENSG00000215301_46 (sequence is synthesized)
tccaacaagtgatggtaagtatatacttagggaaggaatcaagactatttgggccaggtgtgatgattacatagtcctatagtgctagtttacttggaagctgaggggcaggaagattgc

SEQ ID NO: 761507 - DNA, 120 bp, Artificial Sequence
  ENSG00000215301_47 (sequence is synthesized)
ttgagcccacgagttcaagtccagcctgggcaacgtatagcaagaccttatctctgaaaacaggtaataagacatctatgcttactgtacacactgctgcaataggctgctaccacaagt

SEQ ID NO: 761508 - DNA, 120 bp, Artificial Sequence
  ENSG00000215301_48 (sequence is synthesized)
gtataggtgcttggttagattgagccatactagcggtttgatacgtttcaatctaacaaatacgtattcagcttttgtttcagtaagttgaaggtttgcagtatgattaagaattttttg

SEQ ID NO: 761509 - DNA, 120 bp, Artificial Sequence
  ENSG00000215301_49 (sequence is synthesized)
cattgtaaggaagtatggttctggataatctttccagtcatgaactcaaaataagcataagtttttagggcagaattttgacacatggccatatgtattttgaagatagaaaagatgatg

SEQ ID NO: 761510 - DNA, 120 bp, Artificial Sequence
  ENSG00000215301_50 (sequence is synthesized)
gtacttgagtctcgatttagtcaaaataagcatggaaaggtttgggattgctagattggatagtcaatggctgaaagtgactcatggagtgaaacgatgctaaggagagttcagtttcca

SEQ ID NO: 761511 - DNA, 120 bp, Artificial Sequence
  ENSG00000215301_51 (sequence is synthesized)
ctttatgtgaatgatgagtgaacatgacaatctgctctggaggaactgccaaaatttgaggttatttctagtctagcatggttaggattatggtgacataaatttagtatgtttacatac

SEQ ID NO: 761512 - DNA, 120 bp, Artificial Sequence
  ENSG00000215301_52 (sequence is synthesized)
tacattaatgtggtttaattttaattacacttaaatgcagttgtcactcttgggcactgttgatgtgtttcctggattcttggctgaatttcaagatttttaaaatggctttataggagc

SEQ ID NO: 761513 - DNA, 120 bp, Artificial Sequence
  ENSG00000215301_53 (sequence is synthesized)
tgtgtctaaccttcatgcttaaaatgtttcctttgctcctatgctctacgtgacctgcttgagtggccacaggcttgctctttagagcacagtgactttgttgatagggcctcactactc

SEQ ID NO: 761514 - DNA, 120 bp, Artificial Sequence
  ENSG00000215301_54 (sequence is synthesized)
ccacaatgcagagatacctacttattgtaggtacagggcattgaaagttataagactatctttgggttttgctttcttgtgttccattctatttttaatacaattctgagtatatttaaa

SEQ ID NO: 761515 - DNA, 120 bp, Artificial Sequence
  ENSG00000215301_55 (sequence is synthesized)
aaccactcccaccaagtgaacgcttggaacagtaagtttttgaagtgtatgttacttgtgatgaagccttactagctagtataacaaatgaacttatccattttttgatttgagggaact

SEQ ID NO: 761516 - DNA, 120 bp, Artificial Sequence
  ENSG00000215301_56 (sequence is synthesized)
aagttgagttcagtgtcaccattatgaataatttattacctaaaatagaaaatgggtcaaacataggaacaacccaaagtcttctccaatgtgcagtaagcctgggggttggtttttctc

SEQ ID NO: 761517 - DNA, 120 bp, Artificial Sequence
  ENSG00000215301_57 (sequence is synthesized)
aaagtataatgtgataattttacttaaactataaactgagttaccaatcagctgttggttggttgtttccattattagtataaaacagaaatagctctagatagcattcctaaccccatt

SEQ ID NO: 761518 - DNA, 120 bp, Artificial Sequence
  ENSG00000215301_58 (sequence is synthesized)
aaagagacttgatggcttgtgcccaaacaggtaagctcaactcataagagtaaaacatcatatttcttctgtaaaggactagacaataaaatattttattttttatgggtcatgcagttt

SEQ ID NO: 761519 - DNA, 120 bp, Artificial Sequence
  ENSG00000215301_59 (sequence is synthesized)
atggagacttcagtgagcctacatgcagatgacatggtgacacccgtgcccagcctgagctgttttcttctggccctcttattacatgagaaaaataaacacctatgcaccttggcctca

SEQ ID NO: 761520 - DNA, 120 bp, Artificial Sequence
  ENSG00000215301_60 (sequence is synthesized)
gactgattagtgacctgggggggtttgcgggagtgcgcagcgcggcgggacgcgactggaggcccttttggcttggagggcttcggccttcacggctggcgcagcctggattcccgtccg

SEQ ID NO: 761521 - DNA, 120 bp, Artificial Sequence
  ENSG00000215301_61 (sequence is synthesized)
gaggacctggcggcacccggtgtttgcgtgcctgcgagcaagggttttcagtgactccattgatgatgcatgcggtttggccgtatcatactgagctttaaacacaagatttataaacat

SEQ ID NO: 761522 - DNA, 120 bp, Artificial Sequence
  ENSG00000215301_62 (sequence is synthesized)
tcctgcctcagcctcccgaatagctgtgcctttctgataataaaacatcaatgactagctggctctcttgagtaaaagcagctaatcattggaaagaaccttattatatcaaattatctc

SEQ ID NO: 761523 - DNA, 120 bp, Artificial Sequence
  ENSG00000215301_63 (sequence is synthesized)
tatatcaaattatctctagaagagtttttgtccattataaatcctgagcccagtttagaggtgatgggaatgtgtccctgttaactgactatatttattaaattgaattaagggaatatg

SEQ ID NO: 761524 - DNA, 120 bp, Artificial Sequence
  ENSG00000215301_64 (sequence is synthesized)
catttcattggttatagctactcctttctcctgaagaacagaagactatactgaattttggattggtggttaggttaggttttcaaatgtgtcatttcttttaaaaaggcattagaaaag

SEQ ID NO: 761525 - DNA, 120 bp, Artificial Sequence
  ENSG00000215301_65 (sequence is synthesized)
ttgctttttttcttctaaggggggttatttagagacttgttagaggttagtgttaagataggggatcttggtggtttattataagggcaatagacccttatttttagctcagatctcttc

SEQ ID NO: 761526 - DNA, 120 bp, Artificial Sequence
  ENSG00000215301_66 (sequence is synthesized)
ctacttattaaaacaaaagtgagtatgggctatgatgtgtcctcatttttaggcaagaacagcttcactgggaacaaaacttggtgtttgctttaactttcaccttatttgtcatgctaa

SEQ ID NO: 761527 - DNA, 120 bp, Artificial Sequence
  ENSG00000215301_67 (sequence is synthesized)
gaatcttttaggaactgattgtcctagtagagatttttaaaaatatttaattcagtctagaagtgaaaaagaaaaatgacacgtttactagttataaagcaaatttatttggctttatgt

SEQ ID NO: 761528 - DNA, 120 bp, Artificial Sequence
  ENSG00000215301_68 (sequence is synthesized)
tgttttttttgcttatccatattctaggctgtactcctgctcgcatacagagcaactgtcaactttccttaaactcagcaagccccaaattaaaacctgcaattccttgaaattaactcc

SEQ ID NO: 761529 - DNA, 120 bp, Artificial Sequence
  ENSG00000215301_69 (sequence is synthesized)
cctttgcagcttttccttgtttatttattgtatgttttgcaacttactggcatagaaacaaaagattgtgagatatgttacatgagtaatcttaaattgttacagtaatacttaatgctt

SEQ ID NO: 761530 - DNA, 120 bp, Artificial Sequence
  ENSG00000215301_70 (sequence is synthesized)
ttgttgacagttttgatgacagttctcttaaatctagcaggcctttaaaaaaatcacattaaatgaccactggtggctaaatgtgctcaatttgtggatttcaactattaggttccaaat

SEQ ID NO: 761531 - DNA, 120 bp, Artificial Sequence
  ENSG00000215301_71 (sequence is synthesized)
cagcttttttttatcaaactcctttcagagttctccttatgaagcagtaacccatttaaaattagattcttatttttcccccctctcagtgtccaggtaagtaatcagattggaaggctg

SEQ ID NO: 761532 - DNA, 62 bp, Artificial Sequence
  ENSG00000215301_72 (sequence is synthesized)
ggacagtattttctagtggggagaattaaagaaaaactttgtccgggtgtaaaccagcttta

SEQ ID NO: 761533 - DNA, 120 bp, Artificial Sequence
  ENSG00000215301_73 (sequence is synthesized)
gaattaaagaaaaactttgtccgggtgtaaaccagctttaaatcttggttctcttacagtgccatggtagggatagtcagtggaggctttcaaattcagaaagattgataataccttaac

SEQ ID NO: 761534 - DNA, 120 bp, Artificial Sequence
  ENSG00000215301_74 (sequence is synthesized)
ctcctctgtggagcaagtgcctccatgaaatgccatattttgtgaagaaagtgcatgcaggaatattcaggagtccagcatgtagtcatggcagccttaggtatttgagaccgaccaacc

SEQ ID NO: 761535 - DNA, 120 bp, Artificial Sequence
  ENSG00000215301_75 (sequence is synthesized)
ctcctgatgaagacaaccataactcatgcaggcatgagtctaacttggagcgtgatgcccagaagtgtgtgaactggtctgtgaccacaaagatgagaaccgcatgctgagattggtgga

SEQ ID NO: 761536 - DNA, 120 bp, Artificial Sequence
  ENSG00000215301_76 (sequence is synthesized)
ggcggcacccggtgtttgcgtgcctgcgagcaaggggtagaacgcggcccaggaatgtgggagggggcggccttcgctcgggtttgctggcctagacctgaactcttcagataatcagag

SEQ ID NO: 761537 - DNA, 120 bp, Artificial Sequence
  ENSG00000215301_77 (sequence is synthesized)
taatcaccttacgtgtatgtataataacagtttaataagtcgttatcctgaccacctgtttggatgttaagcattatgtctgtttggtcattgtattttcttagccgtaagaggctttta

SEQ ID NO: 761538 - DNA, 120 bp, Artificial Sequence
  ENSG00000215301_78 (sequence is synthesized)
ctaaattgaacctgttacttagaaattagatgaaaataggaatatgctcattggcataatgaaatgagttattctatttctcgagttttatatgttctacttaaaagagtaagttcatct

SEQ ID NO: 761539 - DNA, 120 bp, Artificial Sequence
  ENSG00000215301_79 (sequence is synthesized)
cttaagatttcattgggcttatgtaaaatttaagaaatttgcctttcaattttttactgcttaaagaattatgtagtctttgtgttatagaattatgtagtacttagtgatcaatctaaa

SEQ ID NO: 761540 - DNA, 120 bp, Artificial Sequence
  ENSG00000215301_80 (sequence is synthesized)
attaattttatatatatatatatttttttagaagggcgctatattcctcctcatttaaggaaccgagaagctactaaaggtaggtcctcacaagtaacttcgtaggtctattttttgcct

SEQ ID NO: 761541 - DNA, 120 bp, Artificial Sequence
  ENSG00000215301_81 (sequence is synthesized)
cctttagaagttagtaaagcctaaggaaaaccaggcatttgggggaggtctaaacatggtgttgtttttctatgcttctgtcagccttggttcaaatactagagcttaataattttggaa

SEQ ID NO: 761542 - DNA, 120 bp, Artificial Sequence
  ENSG00000215301_82 (sequence is synthesized)
gaactcatctaatgttacgcagtgggaaattcggcattcctatgtcaaactgttctgacgccaagggcatggttttgtacagtttcactagtgttgtgctgaatctgtttgtaatcattc

SEQ ID NO: 761543 - DNA, 120 bp, Artificial Sequence
  ENSG00000215301_83 (sequence is synthesized)
acagcatggttttagtttggaagaggtgggtgccctactgtgtaaaccaagctgtataatgataacaacctggttatttctgtcttggcaaagttgctagaaatgaagatgggcttattg

SEQ ID NO: 761544 - DNA, 120 bp, Artificial Sequence
  ENSG00000215301_84 (sequence is synthesized)
tagaacagttaacaagttacagcgttggaagtgattctctggtttcatctccttgccttgctgcttttgaaaggttttgtccaaaatgtattacaatatctggtgtcttttcccattgta

SEQ ID NO: 761545 - DNA, 120 bp, Artificial Sequence
  ENSG00000215301_85 (sequence is synthesized)
tgctttgctggcctagacctgaactcttcagataatcagagtggaggaagtacagccagcaaagggcgctatattcctcctcatttaaggaaccgagaagctactaaaggtttctacgat

SEQ ID NO: 761546 - DNA, 120 bp, Artificial Sequence
  ENSG00000215301_86 (sequence is synthesized)
ttttccttttagtcatctttttcaaagcctaattaaacaatttaagttcagcactatagaaacttgatggcaaattacgtaagggaaggattgtatttaatgatggataacttcattaat

SEQ ID NO: 761547 - DNA, 120 bp, Artificial Sequence
  ENSG00000215301_87 (sequence is synthesized)
ccccacgtgcctaatagctgtggttagtcctgtgtcctgatttttcgcaaacaggcctaaaactcttaaaaacatcttagttcaggtaaggattattttctaccttttatccaaagtctg

SEQ ID NO: 761548 - DNA, 120 bp, Artificial Sequence
  ENSG00000215301_88 (sequence is synthesized)
tcacacaggtgaattgtcctttaagtgacatcctagtataactaggacgattgatatttggtgtgctattttcttgttttccctaccattaaatatatttggatgagcactttaaatgaa

SEQ ID NO: 761549 - DNA, 120 bp, Artificial Sequence
  ENSG00000215301_89 (sequence is synthesized)
ggttgtgagctgtgtgccgatttcaaataaaatccttattcttaattttggcatctgtgaggccttttaggctatacaactttatagaaatgtaaagattactgattttagaaaacgagg

SEQ ID NO: 761550 - DNA, 120 bp, Artificial Sequence
  ENSG00000215301_90 (sequence is synthesized)
ttatgtaaatgatgctggttagagagccttatttgtcaagtaactcagaattggattgttgacatccttatggttagccataacttaagtctccagatacagttctagagtagggataag

SEQ ID NO: 761551 - DNA, 120 bp, Artificial Sequence
  ENSG00000215301_91 (sequence is synthesized)
cggcgctgtggctcacctccgggagacggcgggtctcgggcgggcgaaggcctggaaaggaggatggaatgggtttcttgttttttcccgggttccttccgctggctttttcgcttcagc

SEQ ID NO: 761552 - DNA, 120 bp, Artificial Sequence
  ENSG00000215301_92 (sequence is synthesized)
ccaggttccgcagggtccgggggccctgcgccgcagccggggaggctgcgtttccggagtggaaagttttgtgacgcagaagattggggaggagtgggggaggggtgggggcggggaggg

SEQ ID NO: 761553 - DNA, 120 bp, Artificial Sequence
  ENSG00000215301_93 (sequence is synthesized)
gaggcaggaattggccgctgcgcgctgggccctggagatagaggttggacgtggcggggaggttagggagccagcgaggccctttctcctccttgcttgccccagattgtccctgtgtgg

SEQ ID NO: 761554 - DNA, 120 bp, Artificial Sequence
  ENSG00000215301_94 (sequence is synthesized)
tatgttagccgggagtcccgcgttgtttttctggggtggaggggtcatcgcgggttgtggtagtgtcttcgtgttagtgactgtgatccaggaatccgccattggaaaaacacccggctt

SEQ ID NO: 761555 - DNA, 120 bp, Artificial Sequence
  ENSG00000215301_95 (sequence is synthesized)
aggggggaagtaaacagttttgttgttgacttgttgctatctgtggagtagaatcttgcaatgggtcccaggcccccgggttttttctcttagccagaatcccctcttctaagggtttag

SEQ ID NO: 761556 - DNA, 120 bp, Artificial Sequence
  ENSG00000215301_96 (sequence is synthesized)
gggcagaggagagaaagatgtgtgatttgagaggagaaggttatggactttggtggcaggaagtctgcatcccaccgcaacagtggcaccaggcttcagataagctcttgtgtgggttat

SEQ ID NO: 761557 - DNA, 120 bp, Artificial Sequence
  ENSG00000215301_97 (sequence is synthesized)
gcacaaattaattgaatacatagtttaatgtagtcatatgtaatattttttaggaattgatctgttcctttggaagcattttctacccgttaatgaaccaattatattaaatcctctaat

SEQ ID NO: 761558 - DNA, 120 bp, Artificial Sequence
  ENSG00000215301_98 (sequence is synthesized)
tgctgacacatgttgaattgaacagacactttaacaacctaccagcagcacagagtattcccagttttaccattttccatttagctatagtgtccttttaaggattctaggcaacagtga

SEQ ID NO: 761559 - DNA, 120 bp, Artificial Sequence
  ENSG00000215301_99 (sequence is synthesized)
accttatttaaaaagcaaaattgtgctataacaagtgcaaaaggaaagtttgtgttcctaccgtgctttaaagtattgatggtagcaagagaaagcgcagtggtgtttttgctcatagaa

SEQ ID NO: 761560 - DNA, 120 bp, Artificial Sequence
  ENSG00000215301_100 (sequence is synthesized)
attctggaaattaggtgcctgaagtcttacactcattttttaaaagtatagcatctgcttccagttttcagtgactccattgatgatgcatgcggtttggccgtatcatactgagcttta

SEQ ID NO: 761561 - DNA, 120 bp, Artificial Sequence
  ENSG00000215301_101 (sequence is synthesized)
aacacaagatttataaacatggtatgtagtgcatcttttgcaaacaggttggcagcggtactgtgtgacttggtcttttgtggcttttttgagaaaaatgaaacactttgcatgtatagt

SEQ ID NO: 761562 - DNA, 120 bp, Artificial Sequence
  ENSG00000215301_102 (sequence is synthesized)
tttttctcccaactacttgtgagtagttcctggttataaaacgttatgaaggtagcacataacccttttctagaatgaagaggcttttgagctaccagtgtaaggggataggtagaaata

SEQ ID NO: 761563 - DNA, 120 bp, Artificial Sequence
  ENSG00000215301_103 (sequence is synthesized)
gagatgaaaggcactaagatgtcctactctttaagagcattgaacgccagttgtgccatttattcaaagtcatctttgaacttatgttaaaatggggtaaaaacaggtaactacttcagg

SEQ ID NO: 761564 - DNA, 75 bp, Artificial Sequence
  ENSG00000215301_104 (sequence is synthesized)
cttatgttaaaatggggtaaaaacaggtaactacttcaggccgggctcatgctcctgaggtcaggagaccagcct

SEQ ID NO: 761565 - DNA, 84 bp, Artificial Sequence
  ENSG00000215301_105 (sequence is synthesized)
ccccatctctactaaaagtacaaaaagtagcctagcgtggtggcgcacccctgtaatcccagctactgactgaattccagcctg

SEQ ID NO: 761566 - DNA, 72 bp, Artificial Sequence
  ENSG00000215301_106 (sequence is synthesized)
aaagattggattagacttttgcaagtagtttttggcagagttgcgctcttgttgcccaggctggagtgccat

SEQ ID NO: 761567 - DNA, 120 bp, Artificial Sequence
  ENSG00000215301_107 (sequence is synthesized)
aacaggcaacaactgtcctccacatattgaaagtgtgagtatttttgcttgactttttaagacacagagaggttaaatgttttcatgttacattagaatgtgagatgggcttcataaagt

SEQ ID NO: 761568 - DNA, 120 bp, Artificial Sequence
  ENSG00000215301_108 (sequence is synthesized)
agagctttatttataaaaataacaggctttatttacaaaatagtctcagtttgctgactcctcttagaggtggagcagagaagccactttttggaaaacttaagcataaactaaaagtac

SEQ ID NO: 761569 - DNA, 120 bp, Artificial Sequence
  ENSG00000215301_109 (sequence is synthesized)
taattattagtaatagggtagttaaaaaacactgtcatctaccaatgtctgtttaaaagtaatgagcaggatttgtttgtttgtttttgaacagggtctggaaaaactgcagcatttctg

SEQ ID NO: 761570 - DNA, 120 bp, Artificial Sequence
  ENSG00000215301_110 (sequence is synthesized)
tttctaaatgatgctaagacttaagtagaatgaaaaccagttttcaagtgtaatctgtaatctataaattacaaaagggaattatgttgtgatgaacttttcaaacagggtaggtagagt

SEQ ID NO: 761571 - DNA, 78 bp, Artificial Sequence
  ENSG00000215301_111 (sequence is synthesized)
cattatattctttttaggggaggttactttggaatttgtctttatcatcatggatgttctcaatattcctagtatact

SEQ ID NO: 761572 - DNA, 120 bp, Artificial Sequence
  ENSG00000215301_112 (sequence is synthesized)
tctttatcatcatggatgttctcaatattcctagtatactagctagaattgaccctcgtgtatatggcagtatcatagaggttttagagctggtagagatctggcaatctaacttaactc

SEQ ID NO: 761573 - DNA, 120 bp, Artificial Sequence
  ENSG00000215301_113 (sequence is synthesized)
tttcttgctagcaaaggctgttggtcacctgactggcctaacggtaggaggtagaaggcagaaggaaagtaactgaattgagaagctgtttctgtttaataaggtgttgctgaagctagt

SEQ ID NO: 761574 - DNA, 120 bp, Artificial Sequence
  ENSG00000215301_114 (sequence is synthesized)
taaaccctctacctgtctttaaaccctctacctgtctttgggttaatttacatgtttgtcatccccttacctggatatttatagctgtacccaggaaccttgtctatactgagaatatat

SEQ ID NO: 761575 - DNA, 120 bp, Artificial Sequence
  ENSG00000215301_115 (sequence is synthesized)
agtgatgagggtttttctttttcccaggtattcctgattgtcatcaagcttatagtagatgaaccactaaaataatactacaatttgacattagtgttcttgtactttatactattgaaa

SEQ ID NO: 761576 - DNA, 120 bp, Artificial Sequence
  ENSG00000215301_116 (sequence is synthesized)
ctgaaaaatactgtattaaaccaagtaatctgacagtctatgaatgttctaaatgaataccacctccaagaaacatggaaacaatggtaactgtttttcctagtaaactcattcacacct

SEQ ID NO: 761577 - DNA, 120 bp, Artificial Sequence
  ENSG00000215301_117 (sequence is synthesized)
ataaaatgaatggaaattaaattgttatggtcacacaacgtcataatgcgttacaggcaaagctgttgaccacttagaggtagtattcattgagaaacattcttagactgtcagattgct

SEQ ID NO: 761578 - DNA, 120 bp, Artificial Sequence
  ENSG00000215301_118 (sequence is synthesized)
attgagaaacattcttagactgtcagattgcttgatttagtgtaaagtaatttttttttttttgagacaagggtgtttcactcttgtttcccgtgctggagtgcagtggcgcaatcttgg

SEQ ID NO: 761579 - DNA, 120 bp, Artificial Sequence
  ENSG00000215301_119 (sequence is synthesized)
ctcagtgtccagaagggcgctatattcctcctcatttaaggaaccgagaagctactaaaggtttctacgataaagacagttcagggtggagttctagcaaagataaggatgcgtatagca

SEQ ID NO: 761580 - DNA, 120 bp, Artificial Sequence
  ENSG00000215301_120 (sequence is synthesized)
caaggggaagtgtggtgaactgaccccacgtgcctaatagctgtggttagtcctgtgtcctgatttttcgcaaacaggcctaaaactcttaaaaacatcttagttcaggtttgatgatcg

SEQ ID NO: 761581 - DNA, 120 bp, Artificial Sequence
  ENSG00000215301_121 (sequence is synthesized)
ggagatagaggttggacgtggcggggaggttagggagccagcgaggccctttctcctccttgcttgccccagattgtccctgtgtgtttgctggcctagacctgaactcttcagataatc

SEQ ID NO: 761582 - DNA, 120 bp, Artificial Sequence
  ENSG00000215301_122 (sequence is synthesized)
agggtagcagtcgtggacgttctaagaggtgaggtataaatagtatataatgaggggaatgggtgttcacttacagttcatagtgtttcctctgcatgcataacgtccaaggttaactgt

SEQ ID NO: 761583 - DNA, 120 bp, Artificial Sequence
  ENSG00000215301_123 (sequence is synthesized)
acagtatttaaaaagcttaatcatcttaggcttcctagattctttggtaaggggttgtattagaatgggtgacactctgttggggaaaatatggctggatggggaattgtttgaatggaa

SEQ ID NO: 761584 - DNA, 120 bp, Artificial Sequence
  ENSG00000215301_124 (sequence is synthesized)
cagttccgctcaggaaaaagcccaattttagtggctacagcagtatgtataaacatctttcttttattcaaattgagcatgttcaagtatttgttttcttttaagtgggccatatctcat

SEQ ID NO: 761585 - DNA, 120 bp, Artificial Sequence
  ENSG00000215305_0 (sequence is synthesized)
ggtgcttcccagctgccgtctgcaccagccatggactgctacacggcgaactggaacccactcggggactctgccttttaccggaaatatgagctgtacagcatggactgggacctgaag

SEQ ID NO: 761586 - DNA, 120 bp, Artificial Sequence
  ENSG00000215305_1 (sequence is synthesized)
gaggaactcagggattgcctggtggctgctgcaccctatgggggccccattgcactgctgaggaacccctggcggaaggagaaagctgctagtgtgaggccagtgctcgatatatactct

SEQ ID NO: 761587 - DNA, 120 bp, Artificial Sequence
  ENSG00000215305_2 (sequence is synthesized)
gcttccggcatgcctctggccagcctgctgtggaagagtggacccgtggtgtccctgggctggtcagctgaggaggagctgctctgtgtgcaggaagatggtgctgtactggtttatggg

SEQ ID NO: 761588 - DNA, 120 bp, Artificial Sequence
  ENSG00000215305_3 (sequence is synthesized)
cttcatggtgacttccggagacacttcagcatgggcaatgaagtgctccagaaccgggttctggatgcccggatctttcacactgagtttggttccggagtggccatcctcacaggggcc

SEQ ID NO: 761589 - DNA, 120 bp, Artificial Sequence
  ENSG00000215305_4 (sequence is synthesized)
caccgcttcaccctcagtgccaatgtgggtgacctcaaactccgccggatgccagaggtgccaggtctgcaaagtgcaccctcctgctggactgtgctgtgccaggaccgagtggcacac

SEQ ID NO: 761590 - DNA, 120 bp, Artificial Sequence
  ENSG00000215305_5 (sequence is synthesized)
attcttctggctgtggggcctgacctttacctcttggaccatgcagcctgctccgcagtgacgccccctggcctggccccaggagtaagcagcttcctacagatggctgtctccttcacc

SEQ ID NO: 761591 - DNA, 120 bp, Artificial Sequence
  ENSG00000215305_6 (sequence is synthesized)
taccgacacctggcactcttcacagacacaggctacatctggatggggacagcatcactcaaggagaagctatgtgagttcaactgcaacatccgggcacctccaaagcagatggtctgg

SEQ ID NO: 761592 - DNA, 120 bp, Artificial Sequence
  ENSG00000215305_7 (sequence is synthesized)
tgcagccgtcctcgtagcaaggagagggccgtggtggtggcctgggaaaggcggctgatggtggtgggcgatgcacccgagagcatccagtttgtgctggatgaggactcctacctggtg

SEQ ID NO: 761593 - DNA, 120 bp, Artificial Sequence
  ENSG00000215305_8 (sequence is synthesized)
cctgagctcgatggggtccgcatcttctcccgcagcacccacgagttcctgcatgaggttccagcggccagcgaggaaatcttcaaaattgcctcaatggcccccggggcgctgctcctg

SEQ ID NO: 761594 - DNA, 120 bp, Artificial Sequence
  ENSG00000215305_9 (sequence is synthesized)
gaggctcagaaggagtatgagaaagagagccagaaggcggacgagtacctgcgggagatccaggagctgggccagctgacccaggccgtgcagcagtgcattgaggctgcaggacatgag

SEQ ID NO: 761595 - DNA, 120 bp, Artificial Sequence
  ENSG00000215305_10 (sequence is synthesized)
caccagccagacatgcagaagagtctgctcagggccgcctccttcggaaagtgtttcctggacagatttccacccgacagcttcgtgcacatgtgtcaggacctgcgtgtgctcaatgct

SEQ ID NO: 761596 - DNA, 120 bp, Artificial Sequence
  ENSG00000215305_11 (sequence is synthesized)
gctggacaggctcgtgttgcggagactttaccccctggccatccagatatgcgagtacttgcgccttcctgaagtacagggcgtcagcaggatcctggcccactgggcctgctacaaggt

SEQ ID NO: 761597 - DNA, 120 bp, Artificial Sequence
  ENSG00000215305_12 (sequence is synthesized)
gcaacagaaggatgtctcagatgaggatgtggctcgagccattaaccagaagctgggggacacgcctggtgtctcttactccgacattgctgcacgagcctatggttgtggccgcacgga

SEQ ID NO: 761598 - DNA, 120 bp, Artificial Sequence
  ENSG00000215305_13 (sequence is synthesized)
gctggccatcaagctgctggagtatgagccacgctcaggggagcaggtaccccttctcctaaagatgaagaggagcaaactggcactaagcaaggccatcgagagcggggacactgacct

SEQ ID NO: 761599 - DNA, 120 bp, Artificial Sequence
  ENSG00000215305_14 (sequence is synthesized)
ggtgttcacggtgttgctgcacctgaagaacgagctgaaccgaggagattttttcatgacccttcggaatcagcccatggccctcagtttgtaccgacagttctgtaagcatcaggagct

SEQ ID NO: 761600 - DNA, 120 bp, Artificial Sequence
  ENSG00000215305_15 (sequence is synthesized)
agagacgctgaaggacctttacaatcaggatgacaatcaccaggaattgggcagcttccacatccgagccagctatgctgcagaagagcgtattgaggggcgagtagcagctctgcagac

SEQ ID NO: 761601 - DNA, 120 bp, Artificial Sequence
  ENSG00000215305_16 (sequence is synthesized)
agccgccgatgccttctacaaggccaagaatgagtttgcagccaaggctacagaggatcaaatgcggctcctacggctgcagcggcgcctagaagacgagctggggggccagttcctaga

SEQ ID NO: 761602 - DNA, 120 bp, Artificial Sequence
  ENSG00000215305_17 (sequence is synthesized)
cctgtctctacatgacacagttaccaccctcattcttggcggtcacaacaagcgtgcagagcagctggcacgtgacttccgcatccctgacaagaggctctggtggctgaagctgactgc

SEQ ID NO: 761603 - DNA, 120 bp, Artificial Sequence
  ENSG00000215305_18 (sequence is synthesized)
cctggcagatttggaagattgggaagagctagagaagttttccaagagcaagaaatcacccattggctacctgccttttgtggagatctgcatgaaacaacataacaaatacgaagccaa

SEQ ID NO: 761604 - DNA, 120 bp, Artificial Sequence
  ENSG00000215305_19 (sequence is synthesized)
gaagtatgcttcccgcgtgggtcccgagcagaaggtcaaggctttgcttcttgttggcgatgtggctcaggctgcagatgtggccatcgaacaccggaatgaggctgagctgagcctcgt

SEQ ID NO: 761605 - DNA, 120 bp, Artificial Sequence
  ENSG00000215305_20 (sequence is synthesized)
attgtcccactgcacgggagccacagatggggccacagctgacaagattcaacgggccagggcacaagcccagaagaagtgaggagtccatcctgtacatctcaagcaaggggttcctcc

SEQ ID NO: 761606 - DNA, 120 bp, Artificial Sequence
  ENSG00000215305_21 (sequence is synthesized)
cctagcacctgggcttggcagaagggccatagttcatccagctcctcccctagagcaatgctgaggagcgggggcatggtagcagggctgtctggttttaaataaagttggaacacttca

SEQ ID NO: 761607 - DNA, 120 bp, Artificial Sequence
  ENSG00000215305_22 (sequence is synthesized)
aggaaatgtgagggctggtggcaggaacgcctgttgcaaggggtaatggtgggtggtagagcagaagcgtggaaataattggtctcaagtctctgacagagctttggtttaggtgatttc

SEQ ID NO: 761608 - DNA, 120 bp, Artificial Sequence
  ENSG00000215305_23 (sequence is synthesized)
tgccctaagaatgttgagatcacaactgtctgtgcatgggggttgggggattatatgtactgacgggtgtatacatatagaatatatatggacgatgtatgcattgcgcctctgctcgta

SEQ ID NO: 761609 - DNA, 120 bp, Artificial Sequence
  ENSG00000215305_24 (sequence is synthesized)
gggctccagcctgtgcagctcctccaacccagcttatttgaaccacaacccagaatggttaggggccagatgtgggagtgttctctgtcatgatgccctggctctggactgctccccacc

SEQ ID NO: 761610 - DNA, 120 bp, Artificial Sequence
  ENSG00000215305_25 (sequence is synthesized)
agagtctgctcagggttggcctggatggccgggccggggagggtggggctgggagggggtgggatgggcagcagggaagctctctcctatcgccctctggctcttctcaggccgcctcct

SEQ ID NO: 761611 - DNA, 120 bp, Artificial Sequence
  ENSG00000215343_0 (sequence is synthesized)
gagagaaactgagttcctgacaatgcattcactagagaaagtgacttttgaagatgtagctattgacttcacccaggaagagtgggacatgatggacacatccaagagaaagctgtacag

SEQ ID NO: 761612 - DNA, 120 bp, Artificial Sequence
  ENSG00000215343_1 (sequence is synthesized)
agatgtgatgctggaaaatatcagtcacctggtgtccctcgggtaccagataagcaaatcctatataattttgcagctggagcaaggaaaagagctgtggcgggaaggaagagtatttct

SEQ ID NO: 761613 - DNA, 120 bp, Artificial Sequence
  ENSG00000215343_2 (sequence is synthesized)
tcaagaccagaatccagacagggaaagtgcccttaagaaaaaacacatgatatccatgcatcctatcatcagaaaagacgcatccaccagtatgacaatggagaactctctcattctgga

SEQ ID NO: 761614 - DNA, 120 bp, Artificial Sequence
  ENSG00000215343_3 (sequence is synthesized)
aaaccctgtgtcagcaaacagtgtggaaaatcccttcgtaatcttttgtcccctaaaccacgtaaacaaattcatactaaaggtaaatcatatcaatgtaatctatgtgaaaaggcctat

SEQ ID NO: 761615 - DNA, 120 bp, Artificial Sequence
  ENSG00000215343_4 (sequence is synthesized)
actaattgcttttaccttagacggcacaagatgactcacactggagagaggccatatgcatgtcatctatgtggaaaagccttcactcagtgttctcaccttagaagacatgagaaaact

SEQ ID NO: 761616 - DNA, 120 bp, Artificial Sequence
  ENSG00000215343_5 (sequence is synthesized)
cacacgggagagagaccatataagtgtcatcaatgtgggaaagcctttattcaatcctttaaccttcgaagacatgagagaactcaccttggacaaaagtgttatgaatgtgataaaagt

SEQ ID NO: 761617 - DNA, 120 bp, Artificial Sequence
  ENSG00000215343_6 (sequence is synthesized)
gggaaagcctttagtcaaagctctggctttagaggaaacaaaataattcacattggagagaaaccacatgcttgtcttctatgtgggaaggccttcagtctgtcctccgaccttagatga

SEQ ID NO: 761618 - DNA, 120 bp, Artificial Sequence
  ENSG00000215343_7 (sequence is synthesized)
gtcaatgtactaatcttaaaaagcatcagaaaattcaccctggagagaaaattataaacttcttcagaacatattctgactttagatgacacagtgttaggaatgacgaaggtaaggaat

SEQ ID NO: 761619 - DNA, 120 bp, Artificial Sequence
  ENSG00000215343_8 (sequence is synthesized)
gtggaagagacttcagctgtagttgtagcatctaaacatgccaaaggactcacattttgaagaaatactgtaatcaacatggaagatacttcagttgcctttattcttcagcccacatca

SEQ ID NO: 761620 - DNA, 120 bp, Artificial Sequence
  ENSG00000215343_9 (sequence is synthesized)
ataaattcatatggaagagaaattgtatgacatgtatgtaccaaagacttgttagtgatctgagcataaatgacatgagagagctgaaactgtcagcataatcaactaaaagtcttcagc

SEQ ID NO: 761621 - DNA, 120 bp, Artificial Sequence
  ENSG00000215343_10 (sequence is synthesized)
aacagctttaacttaaaacatgtgggactttcaggtagagaatctctaactctgcattcagtgtgaaaatgtttttatttgcaatttattgtcaaataacatgagaaaactttacttgga

SEQ ID NO: 761622 - DNA, 120 bp, Artificial Sequence
  ENSG00000215343_11 (sequence is synthesized)
tgaaccctttatttgtatttttctgtgaatgaacattcagccaagcaccaggcttgatgttcacaagagaagagtgacaaaatgctgctaaaatggaaaataagagaggaaagccttcat

SEQ ID NO: 761623 - DNA, 120 bp, Artificial Sequence
  ENSG00000215343_12 (sequence is synthesized)
aaagtctttccaagggcaatgaattctcttggaataccaaatacttcttactggagaagttatgcaatgaaaaatcatgagaaatcctttcttcatagagcaacacatgtggcacatgtg

SEQ ID NO: 761624 - DNA, 120 bp, Artificial Sequence
  ENSG00000215343_13 (sequence is synthesized)
agatttcacactggacaaaacagggttagcatcttgaaagaagaaaattctttagtggtaattcatttcttagttgacattaagtttctcacgttgaggagctatcaaacttgaaaatca

SEQ ID NO: 761625 - DNA, 120 bp, Artificial Sequence
  ENSG00000215343_14 (sequence is synthesized)
ctgtggagaaacctgatagatttctcatcagaaaagtgagtcaagaaggtggacctctagaaaaaactcttaacacatactttagcaaaataattcagaaatttgagaaaatatctattc

SEQ ID NO: 761626 - DNA, 120 bp, Artificial Sequence
  ENSG00000215343_15 (sequence is synthesized)
ataaaaatgtggcatgtaaatgcataatagcaaagtgaccaaggaataaattgaatgcagaattatataagaaatctcattaaacttttccaaaagaccaatacttacaaatattgaaag

SEQ ID NO: 761627 - DNA, 120 bp, Artificial Sequence
  ENSG00000215343_16 (sequence is synthesized)
aatacaatctgttgttgaaaaaacttagtatgttggtgaagcccttgtttcatttatgcagccctaacaaactgatttgcatctgaactccttgggtgagattcttggtggagattctac

SEQ ID NO: 761628 - DNA, 120 bp, Artificial Sequence
  ENSG00000215343_17 (sequence is synthesized)
cccaacttctgagtctccccagtcttcaacagctctttcctcacagctcacctccctttacttcaacgtccaccaaaaccacttgtttccatccaaccctcgagttgacacaccagggat

SEQ ID NO: 761629 - DNA, 120 bp, Artificial Sequence
  ENSG00000215343_18 (sequence is synthesized)
cttcagccccacttgctagatttctcagtttgtcattgcatagatttagcagggaaatggaggctgtatcaaagacccctagtatatgcatttgggtgtccccagctcttgcctctgtct

SEQ ID NO: 761630 - DNA, 120 bp, Artificial Sequence
  ENSG00000215343_19 (sequence is synthesized)
ctgagcagttacctgggatcagagaataaggcagctcttctcttctatccctcagaaggctcttgaaattttgtccctggagcctctctaactggaagtagcagttcatctcatgacacc

SEQ ID NO: 761631 - DNA, 120 bp, Artificial Sequence
  ENSG00000215343_20 (sequence is synthesized)
ccacattttattcaggtgagtcctgagttattacacagagacagacacagctgtgctccttttactgcagtccagaagataaaacaccagcatgataaaacagccgaacctgtcagccac

SEQ ID NO: 761632 - DNA, 120 bp, Artificial Sequence
  ENSG00000215343_21 (sequence is synthesized)
cttgcaagccttttctatatttgattcaatgtacttttcccgaagcaaaatgaaagttctcacagaggggccctcctctgccttgtcctcagaattggaaaatgtattgtccgtgaagga

SEQ ID NO: 761633 - DNA, 120 bp, Artificial Sequence
  ENSG00000215343_22 (sequence is synthesized)
gcctcaccactgaacctaaaactcaagagaaaatgtttcctgaatatcaagtgggatgacttgaaattttgtcaaacaggcagaatcttaatacgatcggccttactaaggctaaatggc

SEQ ID NO: 761634 - DNA, 120 bp, Artificial Sequence
  ENSG00000215343_23 (sequence is synthesized)
cttatccatggttgaaattgacacatcatcatattaaaaaatctccacgagtgattgattttactctgcagccagggtttatgtcaagtgtgaggataatgagcaagaaattcaagccct

SEQ ID NO: 761635 - DNA, 120 bp, Artificial Sequence
  ENSG00000215343_24 (sequence is synthesized)
tggcaaactggttggagaggcaaggactgtgtccaggcagagctcatatcattatttattgtttaatctatttaattaaatatgtaatttacccacaaactgtggctgacattatatgta

SEQ ID NO: 761636 - DNA, 120 bp, Artificial Sequence
  ENSG00000215343_25 (sequence is synthesized)
ctcctgagccacattaagatgtactatttgtgctgtgaaattctatgggatttgacaaatgcatggtggcagatctccagcgattattaaagcgtaacacagaatgcttctcttattcaa

SEQ ID NO: 761637 - DNA, 120 bp, Artificial Sequence
  ENSG00000215356_0 (sequence is synthesized)
gtccttgtcccaagggacatacagcacacagcctgtggagggtggaggaaccaactgcaagatcacttgtcctcctcaattgatgtacactgaagaaagagccaccttcaggctgtaagg

SEQ ID NO: 761638 - DNA, 120 bp, Artificial Sequence
  ENSG00000215356_1 (sequence is synthesized)
tcatcgtataatcctgaccactcatttcccatcatgacactgctgttccttctctttctccttcttggatgtctgatacaaacagcctcagcttttcttagtgcctaaagtgtctgcaag

SEQ ID NO: 761639 - DNA, 120 bp, Artificial Sequence
  ENSG00000215356_2 (sequence is synthesized)
tggaaatccagaggaagacagagagaaactgagttcctgacaatgcattcactagagaaagtgacttttgaagatgtagctattgacttcacccaggaagagtgggacatgatggacaca

SEQ ID NO: 761640 - DNA, 120 bp, Artificial Sequence
  ENSG00000215356_3 (sequence is synthesized)
tccaaaagaaagctgtacagagatgtgatgctggaaaatatcagtcacctggtgtccctcgggtaccagataagcaaatcctatataattttgcagctggagcaaggaaaagagctgtgg

SEQ ID NO: 761641 - DNA, 120 bp, Artificial Sequence
  ENSG00000215356_4 (sequence is synthesized)
tgggaaggaagagtatttcttcaagaccagaatccagacagggaaagtgcccttaagaaaaaacacatgatatccatgcatcctatcatcagaaaagacacatccaccagtatgacaatg

SEQ ID NO: 761642 - DNA, 120 bp, Artificial Sequence
  ENSG00000215356_5 (sequence is synthesized)
ctctcattctggaggatccttttgaatataatgattcgggagaagattgcactcacagttccacaataactcagtgtttgttaactcacagtggaaagaaaccctgtgtcagcaaacagt

SEQ ID NO: 761643 - DNA, 120 bp, Artificial Sequence
  ENSG00000215356_6 (sequence is synthesized)
gtggaaaatcccttcgtaatcttttgtcccctaaaccacgtaaacaaattcatactaaaggtaaatcatatcaatgtaatctatgtgaaaaggcctatactaattgcttttaccttagac

SEQ ID NO: 761644 - DNA, 120 bp, Artificial Sequence
  ENSG00000215356_7 (sequence is synthesized)
ggcacaagatgactcacactggagagaggccatatgcatgtcatctatgtggaaaagccttcactcagtgttctcaccttagaagacatgagaaaactcacacgggagagagaccatata

SEQ ID NO: 761645 - DNA, 120 bp, Artificial Sequence
  ENSG00000215356_8 (sequence is synthesized)
agtgtcatcaatgtgggaaagcctttattcaatcctttaaccttcgaagacatgagagaactcaccttggacaaaagtgttatgaatgtgataaaagtgggaaagcctttagtcaaagct

SEQ ID NO: 761646 - DNA, 120 bp, Artificial Sequence
  ENSG00000215356_9 (sequence is synthesized)
ctggctttagaggaaacaaaataattcacattggagagaaaccacctgcttgtcttctatgtgggaaggccttcagtctgtcctccgaccttagatgacatgagagaacacgcactggag

SEQ ID NO: 761647 - DNA, 120 bp, Artificial Sequence; identical to SEQ ID NO: 761637
  ENSG00000215372_0 (sequence is synthesized)

SEQ ID NO: 761648 - DNA, 120 bp, Artificial Sequence; identical to SEQ ID NO: 761638
  ENSG00000215372_1 (sequence is synthesized)

SEQ ID NO: 761649 - DNA, 120 bp, Artificial Sequence
  ENSG00000215372_2 (sequence is synthesized)
tggaaatccagaggaagacagagagaaactgagttcctgacaatgcattcactaaagaaactgacttttgaagatgtagctattgacttcacccaggaagagtgggccatgatggacaca

SEQ ID NO: 761650 - DNA, 120 bp, Artificial Sequence
  ENSG00000215372_3 (sequence is synthesized)
tccaagagaaagctgtacagagatgtgatgctggaaaatatcagtcacctggtgtccctcgggtaccagataagcaaatcctatataattttgcagctggagcaaggaaaagagctgtgg

SEQ ID NO: 761651 - DNA, 120 bp, Artificial Sequence
  ENSG00000215372_4 (sequence is synthesized)
agggaaggaagagtatttcttcaagaccagaatccaaacagggaaagtgcccttaagaaaacacacatgatatccatgcatcctatcaccagaaaagacgcatccaccagtatgacaatg

SEQ ID NO: 761652 - DNA, 120 bp, Artificial Sequence
  ENSG00000215372_5 (sequence is synthesized)
gagaactctctcattctggaggatccttttgaatgtaatgattcgggagaagattgcactcgcagttccacaataactcagtgtttgttaactcatagtggaaagaaaccctatgtcagc

SEQ ID NO: 761653 - DNA, 120 bp, Artificial Sequence
  ENSG00000215372_6 (sequence is synthesized)
aaacagtgtggaaaatcccttcgtaatcttttgtccactgaaccacataaacaaattcatactaaaggtaaatcatatcagtgtaatctatgtgaaaaggcctatactaattgctttcac

SEQ ID NO: 761654 - DNA, 120 bp, Artificial Sequence
  ENSG00000215372_7 (sequence is synthesized)
cttagacggcacaagatgactcacactggagagaggccatatgcatgtcatctatgtagaaaagccttcactcagtgttctcaccttagaagacacgagaaaactcacacgggacagaga

SEQ ID NO: 761655 - DNA, 120 bp, Artificial Sequence
  ENSG00000215372_8 (sequence is synthesized)
ccatataagtgtcatcaatatgggaaagtctttattcaatcctttaaccttcaaagacatgagagaactcaccttggaaaaaagtgttatgaatgtgataaaagtgggaaagcctttagt

SEQ ID NO: 761656 - DNA, 120 bp, Artificial Sequence
  ENSG00000215372_9 (sequence is synthesized)
caaagctctggctttagaggaaacaaaataattcacactggagagaaaccacatgcttgtcttctatgtgggaaggccttcagtctgtcttccaaccttagatgacatgagagaacacgc

SEQ ID NO: 761657 - DNA, 120 bp, Artificial Sequence
  ENSG00000215372_10 (sequence is synthesized)
actggagaaaagccatatgaatgccatttatgtgggaaagccttcagacaatgtactaatcttaaagagcatcagaaaattcaccctggagagaaaattataaacttcttcagaacatat

SEQ ID NO: 761658 - DNA, 120 bp, Artificial Sequence
  ENSG00000215372_11 (sequence is synthesized)
tctgactttagatgacacggtgttaggaatgacaaaggtaaggaatgtggaagagacttcagctgtagttgtagcatctaaacatgccaaaggactcacattttgaagaaatactgtaat

SEQ ID NO: 761659 - DNA, 120 bp, Artificial Sequence
  ENSG00000215372_12 (sequence is synthesized)
caacatggaagatacttcagttacctttattcttcagtccacatcaataaattcatatggaagagaaattgtatgacatgtatgtaccaaagacttgttagtgatctgagcataagtgac

SEQ ID NO: 761660 - DNA, 120 bp, Artificial Sequence
  ENSG00000215372_13 (sequence is synthesized)
atgagagagctgaaactgtcaatataatcaactaaaagtcttcagcaacagctataacttaaaacatgtgggactttcaggtagagaatctctaactctgcattcagtgtgaaaatgttt

SEQ ID NO: 761661 - DNA, 120 bp, Artificial Sequence
  ENSG00000215372_14 (sequence is synthesized)
ttatttgcaatttattgtcaaataacatgagaaaactttacttggatgaaccctttatttgtattttctgtgaatgaacattcagccaagcaccaggcttgatgttcacaagagaagagt

SEQ ID NO: 761662 - DNA, 120 bp, Artificial Sequence
  ENSG00000215372_15 (sequence is synthesized)
tgagctaaataagaagggaaaatctttccaagggcaatgaattctcttggaataccaaatacttcttactggagaagttatgcaatgaaaaatcatgagaaatcctttcttcatagagca

SEQ ID NO: 761663 - DNA, 120 bp, Artificial Sequence
  ENSG00000215372_16 (sequence is synthesized)
acacatgtggcacatgtgagatttctcactggacaaaacatggttagcatcttgaaaggagaaaattctttagtggtaattcatttcttagttgacattgagtttctcacattgaggagc

SEQ ID NO: 761664 - DNA, 120 bp, Artificial Sequence
  ENSG00000215372_17 (sequence is synthesized)
tatcaaacttgaaaatcactgtggagaaacctgatagatttctcatcagaaaagtgagtcaagaagttggacccctagaaaaaactcttaacacatactttagcaaaataattcagaaat

SEQ ID NO: 761665 - DNA, 120 bp, Artificial Sequence
  ENSG00000215372_18 (sequence is synthesized)
ttgagaaaatatctattcataaaaatgtggcatgtaaatgcataatagcaaagtgaccagggaataaattgcgtgcagaattatataagaaatctcattaaacttttccaaaagatcaat

SEQ ID NO: 761666 - DNA, 120 bp, Artificial Sequence
  ENSG00000215372_19 (sequence is synthesized)
acttacaaatattgaaagaatacaatctgttgttgaaaaaacttagtatgttggcaaagcccttgtttcatttatgcggccctaacaaatggatttgcacctgcactccttgggtgagat

SEQ ID NO: 761667 - DNA, 120 bp, Artificial Sequence
  ENSG00000215372_20 (sequence is synthesized)
tcttggtcgagattctaccccaacttctgagtctccccagtcttcaacagctctttcctcacagctcacctccctttacttcaacgtccactaaaaccacttgtttccatccaaccctcg

SEQ ID NO: 761668 - DNA, 120 bp, Artificial Sequence
  ENSG00000215372_21 (sequence is synthesized)
agttgacacaccagggatcttcagccccacttgctagatttctcagtgtgtcattgcatagatttagcagggaaatggaggctgtatcaaagacaccttgtatatgcatttgggtgtccg

SEQ ID NO: 761669 - DNA, 120 bp, Artificial Sequence
  ENSG00000215372_22 (sequence is synthesized)
cagccctttcctctgtctctaggcagttaactgggatcagagaataaggcagctcttctcttctatccctcagaagactcttgaaattttgtccctggagcctctctaactggaagtagc

SEQ ID NO: 761670 - DNA, 120 bp, Artificial Sequence
  ENSG00000215372_23 (sequence is synthesized)
agttcatctcataacaccccacattttattctggtaagtcctgagttattacacagagacagacacagctgtgctccttttactgcagtccagaagataaaacaccagcatgataaaaca

SEQ ID NO: 761671 - DNA, 120 bp, Artificial Sequence
  ENSG00000215372_24 (sequence is synthesized)
gccgaacctgtcagccaccttgcaagcctttcctatatttgattcaatgtacttttcctgaagcaaaatgaaagttctcacagaggggccctcctctgccttgtcctcagaattgaaaaa

SEQ ID NO: 761672 - DNA, 120 bp, Artificial Sequence
  ENSG00000215372_25 (sequence is synthesized)
tgtattgtccgtgaaggagcctcaccactgaacctaaaactgaagagaaaatgtttcctgaatattaagtgggatgacttgaaattttgccaaacaggcacaatcttaatacgatcggcc

SEQ ID NO: 761673 - DNA, 120 bp, Artificial Sequence
  ENSG00000215372_26 (sequence is synthesized)
ttactaaggctaaatggccttatccatggttgaagttgacacatcattatattttaaaatctctacaagtgattgattttactctgcagccagggtttatgtcaagtgtgaggataatga

SEQ ID NO: 761674 - DNA, 120 bp, Artificial Sequence
  ENSG00000215372_27 (sequence is synthesized)
gcaagaaattcaagcccttggcaaactggttggagaggcaaggactgtgtccaggcagagctcatatcattatttattgtttaatctatttaattaaatatgtaatttacccacaaactg

SEQ ID NO: 761675 - DNA, 120 bp, Artificial Sequence
  ENSG00000215372_28 (sequence is synthesized)
tgactgacattatatgtactcctgaaccacattaagatgtactatttgtgctgtgaaattctatgggatttgacaaatgcatggtggcagatctccagccattattaaagcgtaacacag

SEQ ID NO: 761676 - DNA, 120 bp, Artificial Sequence
  ENSG00000215372_29 (sequence is synthesized)
aatgcttctcttattcaagctcgtcttccctccacatagagggaatcaatcggcttttgtatactgatttttgaatttgcttctttatttccatcttctttaattaaagcacaaggtatc

SEQ ID NO: 761677 - DNA, 120 bp, Artificial Sequence
  ENSG00000215375_0 (sequence is synthesized)
ggagtggcagccggagtctgaactgtcctgggggaccaagcaggagcttaagatgggcaagacctggggccctgggcagacgcatcaaagcaggcagaagcaggcatggccagcaggaag

SEQ ID NO: 761678 - DNA, 120 bp, Artificial Sequence
  ENSG00000215375_1 (sequence is synthesized)
accaagaagaaggaagggggtgccctccgggcccagagagcctcatccaatgtcttctccaactttgagcagactcagatccaggagttcaaggaggcattcacactcatggatcagaac

SEQ ID NO: 761679 - DNA, 120 bp, Artificial Sequence
  ENSG00000215375_2 (sequence is synthesized)
aaggacgacgagctggacgccatgctcaaagaggcctcggggcccatcaacttcaccatgtttctgaacctgtttggggagaagctgagcggtaccgacgccgaggagaccattcttaac

SEQ ID NO: 761680 - DNA, 120 bp, Artificial Sequence
  ENSG00000215375_3 (sequence is synthesized)
gccttcaagatgctggacccggacgggaaagggaaaatcaacaaggagtacatcaagcgtctgctgatgtcccaggctgacaagatgacggcggaagaggtggaccagatgttccagttc

SEQ ID NO: 761681 - DNA, 120 bp, Artificial Sequence
  ENSG00000215375_4 (sequence is synthesized)
gcctccatcgatgtggcgggcaacctggactacaaggcgctcagctacgtgatcacccacggggaggagaaggaggagtgagacccagccgggtcaataaacctggacgcttggaccctg

SEQ ID NO: 761682 - DNA, 120 bp, Artificial Sequence
  ENSG00000215375_5 (sequence is synthesized)
gggaggccagccctgctcacacagggaccagcgcctgtgcccggtgggggtggggcggcttcccctcagcccactcctccatcttcagctcctgctaggcgccggggaaagtaccaggcg

SEQ ID NO: 761683 - DNA, 120 bp, Artificial Sequence
  ENSG00000215375_6 (sequence is synthesized)
ctggcctgtaacctccttccggctctgtccccatcagcggctcccccagaagtgatggcccctgagtgtgtgttgggaagggacctgccccagggccacactccagcgggaagggcggga

SEQ ID NO: 761684 - DNA, 120 bp, Artificial Sequence
  ENSG00000215375_7 (sequence is synthesized)
tatgtgcgtgtgtgtgaccttgcgggtgtgggctgtgctgtgttgtgggaagtacgtgcctcacgttgctctcctggtgagagtccggagcaggatgagggggttcctggctttcacaaa

SEQ ID NO: 761685 - DNA, 120 bp, Artificial Sequence
  ENSG00000215375_8 (sequence is synthesized)
atcccggtacccagaacaagcccacccagagtccacttgcccctcaagccttcagaggccaagctggctcctgctggacggcgatccctgaccactgtgctctgtgggccttctggaagc

SEQ ID NO: 761686 - DNA, 120 bp, Artificial Sequence
  ENSG00000215375_9 (sequence is synthesized)
cactgtccctcccccagtccctgtgctgaagccagacacctgcagccgtcctgcccccaaccccagctacccaggcctgaggctggcatgctcctcagctgtctggccccctccagcccg

SEQ ID NO: 761687 - DNA, 120 bp, Artificial Sequence
  ENSG00000215375_10 (sequence is synthesized)
ggacacctatgcctccctgggtaggtacccaggcagaacgcctcagagcccttggaggaggcgaacacagaggtcctccagctccagacgccgcggcccctcctcgaatggagccagggc

SEQ ID NO: 761688 - DNA, 120 bp, Artificial Sequence
  ENSG00000215375_11 (sequence is synthesized)
ctttccccgcagggctgggggtccgctgtttccccgcgctgctgccgaggccccgccgtccgcgtcctggccgtgtgtccacaccccagactgcgggccggggcgcactctgtcttcttg

SEQ ID NO: 761689 - DNA, 120 bp, Artificial Sequence
  ENSG00000215375_12 (sequence is synthesized)
cgcggagcgtcggaggcctgagggggccagaagcaaactccagccctccccgtgtctactgctcgctgaggaagccgcaggtgcacactggatccacaaggcacagaaccatcttggccc

SEQ ID NO: 761690 - DNA, 120 bp, Artificial Sequence
  ENSG00000215375_13 (sequence is synthesized)
aaataatccagactcctcagcaactcctgcttccagaatcaaaaataagtgtctctggggcccaaggtagggggtgagggggacataccagcagcttccaccagaggtggggcggggcag

SEQ ID NO: 761691 - DNA, 120 bp, Artificial Sequence
  ENSG00000215375_14 (sequence is synthesized)
ggcaccagcagagaaaacatgcgggcaaacacacacggcctggggaaaaccccctgaagccaatggagacttgcctttgctcaaggcctttcctgagagcttagtggtgggacgggtccc

SEQ ID NO: 761692 - DNA, 120 bp, Artificial Sequence
  ENSG00000215375_15 (sequence is synthesized)
acagggcccctgctgcccacccgctcacgcactggctcactcgtcctctgcgaacagggactgcctcccatcaagacctcagcactcgaacagccatttagcacccgttttcaccaagaa

SEQ ID NO: 761693 - DNA, 120 bp, Artificial Sequence
  ENSG00000215375_16 (sequence is synthesized)
gcagccgttttcgagtcccccgcccgggcctcagaagcctgagctttgggtgagctgattccactatcggggtcacgctcggtggaggacacggtcctgcagcctcgcatgcgtcccaag

SEQ ID NO: 761694 - DNA, 120 bp, Artificial Sequence
  ENSG00000215375_17 (sequence is synthesized)
cccccttccagagctggagttctccaaatagcacaggagctccacaggaaagccgagcagaccccgccccggccccgcccgcggtcactcactgtagcgcgtggctccgtaggccacacc

SEQ ID NO: 761695 - DNA, 120 bp, Artificial Sequence
  ENSG00000215375_18 (sequence is synthesized)
gaggaacagggcggagtagcggccgagctgcgaaagaggttggtcagaggcggcgcgaaacggggctcgcgggacgggggtcgcgggaggagggggggcggggtcgctgggcagaggtcg

SEQ ID NO: 761696 - DNA, 120 bp, Artificial Sequence
  ENSG00000215375_19 (sequence is synthesized)
ggcgaggatcatgggggcgggggccgggggtcgcagcccgcggggtcggagctgcggggcgggacacgggggggcccagagcactgggcggcggctgcaaagcctggatcaccttgatga

SEQ ID NO: 761697 - DNA, 120 bp, Artificial Sequence
  ENSG00000215375_20 (sequence is synthesized)
gcactgggcggcggctgcaaagcctggatcaccttgatgagcggagagacctgcaccggtggcaccatcttgtccctgacctccgcaccggaagcacaacctgcagacggagcaggatgc

SEQ ID NO: 761698 - DNA, 120 bp, Artificial Sequence
  ENSG00000215375_21 (sequence is synthesized)
cgcacaagccagcaaagccttggaggcaaaggcggagctgggcgcacgcatgcgccgtcagcggcgagagagcggggggccgcgccccctggcgaccgaagggtgactgcgcgcccccgc

SEQ ID NO: 761699 - DNA, 120 bp, Artificial Sequence
  ENSG00000215375_22 (sequence is synthesized)
gcggcggtgacgtcacgtgaggcgcacgcgcacaaaggctggggagtgcgcggaggatcatcggctgcgcctgcgcagttgctgcgtgaggcgggatctgcgccgagtgggcggggggtt

SEQ ID NO: 761700 - DNA, 120 bp, Artificial Sequence
  ENSG00000215375_23 (sequence is synthesized)
gagtgcaggtggctccccgggcaggtccttctcctacaaggcagtagtgtctgtcgccggccgggccgcgttggattccgcggcccgcgggagcatggcctccaggcccctcttcctgcg

SEQ ID NO: 761701 - DNA, 120 bp, Artificial Sequence
  ENSG00000215375_24 (sequence is synthesized)
gctgctctgcccgggagcacggggcgcccttcatcccggagctggagcttcctcaccccaggatgccccatcacttctgtcccgaagaggggctgggatcttcttgggaagaccagcccc

SEQ ID NO: 761702 - DNA, 120 bp, Artificial Sequence
  ENSG00000215375_25 (sequence is synthesized)
gcctggggaccactgagccccacactggtctttgctggcctctgtccacctcccggtagctgtgtgtctcccacagctgcccagagatggggcctgcggtgcctatgcagcctccccgct

SEQ ID NO: 761703 - DNA, 120 bp, Artificial Sequence
  ENSG00000215375_26 (sequence is synthesized)
gtgcccgaagtgctgacccgccagccccatggacaccaggcttggagtctaggcaggagcctggcaccccctccacgttctgggtcttcctggcggcagccatgctgcccgtgctgggcc

SEQ ID NO: 761704 - DNA, 120 bp, Artificial Sequence
  ENSG00000215375_27 (sequence is synthesized)
accctcgggccccctttggccccatgcagtagtgacgcaaggcctcctgtgtcccctcctggccctgcactgctacaggcagaagcaactggagaactatggctcgggtctcgctaaggt

SEQ ID NO: 761705 - DNA, 120 bp, Artificial Sequence
  ENSG00000215375_28 (sequence is synthesized)
gcagcatcacaaactccaggactcttgaagcaagcatggggaggacccgtgatcctggcggcctgggctacctgtccgggcctaagtcgcctctgccccctctcctggcttgctctgggg

SEQ ID NO: 761706 - DNA, 120 bp, Artificial Sequence
  ENSG00000215375_29 (sequence is synthesized)
tccagggcctgggcctctctggctgagaaactaggaagtcactgggctctgtttcctgagctgggtataccaaggccagtcctatagggcaggggtccccaacccccaggtgcagaccag

SEQ ID NO: 761707 - DNA, 120 bp, Artificial Sequence
  ENSG00000215375_30 (sequence is synthesized)
taccagcttgtggcccgttaggaaccgggcagcacaggacgaggtgagggagcatgattgcccgagctccacccactttcagatcagcctgggcatcagattcccataggagcgtgaacc

SEQ ID NO: 761708 - DNA, 120 bp, Artificial Sequence
  ENSG00000215375_31 (sequence is synthesized)
tgaggtcagggcggctcgggcgggtccagccccgcggaccgcgcccacccgagggtggcctgggcagggacctgggggtcctgggagcggagtgtgagccgagtgcaggccagcaggaag

SEQ ID NO: 761709 - DNA, 120 bp, Artificial Sequence
  ENSG00000215397_0 (sequence is synthesized)
gccaagcccgagcccgagccggggccgccgccaccggtgccggctccgagcggcctcccgcgctccagcccgctgggagctgtccagtgctgaaaacccgcgcggacacagccgatcgcg

SEQ ID NO: 761710 - DNA, 120 bp, Artificial Sequence
  ENSG00000215397_1 (sequence is synthesized)
cagtgctgaaaacccgcgcggacacagccgatcgcgcccggccggccgcctccccgcaccgagccccgcgccggccgcgccatgccgcgctccttcctggtaaagaagatcaaaggggac

SEQ ID NO: 761711 - DNA, 120 bp, Artificial Sequence
  ENSG00000215397_2 (sequence is synthesized)
ggcttccagtgcagcggggtgccggcccccacctaccaccccttggagacagcctacgtgctgcctggcgcccgggggcctcccggggacaacgggtacgccccgcaccgcctgcccccg

SEQ ID NO: 761712 - DNA, 120 bp, Artificial Sequence
  ENSG00000215397_3 (sequence is synthesized)
agcagctacgatgcggaccagaagccgggcctggagctggccccggccgagcccgcgtacccgccggcggcgccggaggagtacagcgaccccgaaagcccgcagtcgagcctgtcggcg

SEQ ID NO: 761713 - DNA, 120 bp, Artificial Sequence
  ENSG00000215397_4 (sequence is synthesized)
cgctacttccgaggggaggcggcagtgaccgacagctactccatggacgccttcttcatctcggacgggcgctcgcggcggcggcggggcgggggcggcggggacgcggggggctcggga

SEQ ID NO: 761714 - DNA, 120 bp, Artificial Sequence
  ENSG00000215397_5 (sequence is synthesized)
gcggggcgcgcgggggcgcaggcgggcggcgggcaccggcacgcgtgcgccgagtgcggcaagacctacgccacgtcgtcgaacctgagccgccacaagcagacgcaccgcagcctggac

SEQ ID NO: 761715 - DNA, 120 bp, Artificial Sequence
  ENSG00000215397_6 (sequence is synthesized)
aagcagacgcaccgcagcctggacagccagctggcgcgcaaatgcccgacgtgcggcaaggcctacgtgtccatgcccgcgctcgccatgcacctgctcacgcacaacctgcgccacaag

SEQ ID NO: 761716 - DNA, 120 bp, Artificial Sequence
  ENSG00000215397_7 (sequence is synthesized)
tgcggcgtctgcggcaaggccttctcgcggccctggctgctgcagggtcacatgcgctcgcacaccggcgaaaagccgttcggctgcgcgcactgcggcaaggccttcgccgaccgctcc

SEQ ID NO: 761717 - DNA, 120 bp, Artificial Sequence
  ENSG00000215397_8 (sequence is synthesized)
aacctgcgcgcgcacatgcagacgcactcggccttcaagcactaccgctgccgccagtgcgacaagagcttcgcgctcaagtcctacctccacaagcactgcgaggcggcctgcgccaag

SEQ ID NO: 761718 - DNA, 120 bp, Artificial Sequence
  ENSG00000215397_9 (sequence is synthesized)
tacctccacaagcactgcgaggcggcctgcgccaaggcggccgagccacccccgccgacccccgccggcccggccagctgagccttccgcctcgccctcgcgcccggaactcgctctcca

SEQ ID NO: 761719 - DNA, 120 bp, Artificial Sequence
  ENSG00000215397_10 (sequence is synthesized)
tcgcccagccccggctgcgtttccctgcccatgaccctctcgtggggacccccggcccggcccggaacttttctccccaacccccaaacccacgactcacttccacaccgtcttccccag

SEQ ID NO: 761720 - DNA, 120 bp, Artificial Sequence
  ENSG00000215397_11 (sequence is synthesized)
cgtcccccgacccacttcatcctttccggccatccctcggaccttgacccccctgtccgcgccttcaaggctcccaactcaggcaccaggtccgcacctctcccgcgccccagagccgga

SEQ ID NO: 761721 - DNA, 120 bp, Artificial Sequence
  ENSG00000215397_12 (sequence is synthesized)
aatttctccctcccagaccccgcgctgctcttctaacttctagatcttttctctcgcttctcagctgaatctctctgaccattcctctactggagcccccaatgaaagccgcaaacctat

SEQ ID NO: 761722 - DNA, 120 bp, Artificial Sequence
  ENSG00000215397_13 (sequence is synthesized)
cccagaccatccctctggcctctgctgaatctcccagagtgtgtccatctggggatctaatcttcacccttcttgaagtctccgatctgtccctgatcccatccatgctcaggccttagg

SEQ ID NO: 761723 - DNA, 120 bp, Artificial Sequence
  ENSG00000215397_14 (sequence is synthesized)
tctggccattcacacacacacacacccccacaccccactcccacacacagttcctactgtcttcagtccatggggatctcatcacccactcccagccccagctccagctgccctcacctc

SEQ ID NO: 761724 - DNA, 120 bp, Artificial Sequence
  ENSG00000215397_15 (sequence is synthesized)
tctagcagctctcacccctctgagtctacctaacctggagggggcttgaggggcacttcagggccctgccccctaatgtaacccctctctcaccccggcacaacctgggcttccacagtc

SEQ ID NO: 761725 - DNA, 120 bp, Artificial Sequence
  ENSG00000215397_16 (sequence is synthesized)
tggagctgccctacccccagattctctgagcactttcccccatccccagggccacagatccccttccttacttgttggggggaggtctggagcacctcgccaatgcccttcccccatccg

SEQ ID NO: 761726 - DNA, 120 bp, Artificial Sequence
  ENSG00000215397_17 (sequence is synthesized)
gctgggtccttccagttatttatttgtgtatttatttatttatctatttattattctatttaatctcttggcctcacccagggaccgtctggcttccccagctggactgggaggtcagga

SEQ ID NO: 761727 - DNA, 120 bp, Artificial Sequence
  ENSG00000215397_18 (sequence is synthesized)
agccaggcaaggagagggacagcacaggccacagagggctgcccccaccacacacacccccgcgtctcgggagaaacccaccctcttcagagcctgcactcgctaaggaaggggactcga

SEQ ID NO: 761728 - DNA, 120 bp, Artificial Sequence
  ENSG00000215397_19 (sequence is synthesized)
gaatgggggggcagcttgctgaccctcaactgggggggtgagggagcatcaggaggtccaggcgtggggcaggtccccaccttcctgaaccttcccctgccactccaggcggcccggaga

SEQ ID NO: 761729 - DNA, 120 bp, Artificial Sequence
  ENSG00000215397_20 (sequence is synthesized)
gaggagcctcttcgatttgtttcctgtttattcttcttcccgagggaccccaggttccagggaccgactgagccccggacccgctggggcctctggcctgctccccgggaggggcgctct

SEQ ID NO: 761730 - DNA, 120 bp, Artificial Sequence
  ENSG00000215397_21 (sequence is synthesized)
ctcccggccatgtctatgcaactctcccggacagaggggccgggctgccagccacccgcccgttggccgccactacctcctccgctgcgcttttgcatgcccgggcgaggaccgaagcac

SEQ ID NO: 761731 - DNA, 120 bp, Artificial Sequence
  ENSG00000215397_22 (sequence is synthesized)
acacctccacgcgcacgggccctggccccctccgctttaagcacacgcctctgccccattgctctgcagccagcttgggggcaggagtcctggactctcagatcctcctctcccctcctc

SEQ ID NO: 761732 - DNA, 120 bp, Artificial Sequence
  ENSG00000215397_23 (sequence is synthesized)
ttagccacaaaagaggggggagactggaggcacccctgcagcaggggcacttccctagggctccagaggggtgaatgggcctttgctcagctccaggcccagcgggaagggaggctgcag

SEQ ID NO: 761733 - DNA, 120 bp, Artificial Sequence
  ENSG00000215397_24 (sequence is synthesized)
ggatggtgggagggagaggggtagcagaagcaattatggaggcgttgaccctgtaaatagcaacttctgacagcaataattttccatgcatgctaagccttttggccatattttgtatga

SEQ ID NO: 761734 - DNA, 120 bp, Artificial Sequence
  ENSG00000215397_25 (sequence is synthesized)
gcgcttggcgctcctcctccgtcctatcccaactcacccccaaacccccatcccttccccacctccagcagtattacttgtaacgcaattcagggatattaaagggactttggccactca

SEQ ID NO: 761735 - DNA, 120 bp, Artificial Sequence
  ENSG00000215421_0 (sequence is synthesized)
atgatggatagtgagaataaacccgaaaatgatgaggatgaaaagataaacaaagaagcacaagacttgacaaagctttcatcccataatgaagacggtgggcctgtatctgatgtgata

SEQ ID NO: 761736 - DNA, 120 bp, Artificial Sequence
  ENSG00000215421_1 (sequence is synthesized)
gcaagtttccctgagaattctatgggcaaaagaggtttttcagaatcatcgaactctgatagtgttgttataggagaagacagaaataaacatgcttccaaacgcaggaaattagatgag

SEQ ID NO: 761737 - DNA, 120 bp, Artificial Sequence
  ENSG00000215421_2 (sequence is synthesized)
gcagagccccttaaatctggaaagcaaggtatttgtagattagaaacttctgagagctcagtcacagaagggggtattgcattagatgaaacagggaaggagacctttctgagtgactgc

SEQ ID NO: 761738 - DNA, 120 bp, Artificial Sequence
  ENSG00000215421_3 (sequence is synthesized)
acagttggaggcacatgtctcccaaatgccctctccccttcttgcaattttagcactattgatgttgtttctctgaaaacagacactgaaaaaacatctgctcaggaaatggtttccctt

SEQ ID NO: 761739 - DNA, 120 bp, Artificial Sequence
  ENSG00000215421_4 (sequence is synthesized)
gatctggaaagagaatctcctttccccccgaaagaaattagtgttagttgtaccattgggaatgtagatacagttctcaaatgcagcatctgtgggcatttgttttcttcttgctctgac

SEQ ID NO: 761740 - DNA, 120 bp, Artificial Sequence
  ENSG00000215421_5 (sequence is synthesized)
ttggaaaaacatgctgagtctcacatgcagcagcctaaggaacatacctgttgtcactgcagccacaaagcagagagcagctcagcactacatatgcatatcaaacaagcacatgggcca

SEQ ID NO: 761741 - DNA, 120 bp, Artificial Sequence
  ENSG00000215421_6 (sequence is synthesized)
cagaaggtcttttcctgtgatctttgtggttttcagtgttcagaagaaaacttgttgaatgcacattatcttggcaaaacacatctccgtcgtcagaatctggctgctcgtggaggattt

SEQ ID NO: 761742 - DNA, 120 bp, Artificial Sequence
  ENSG00000215421_7 (sequence is synthesized)
gtacagatcttaacaaaacaaccttttcctaaaaaatcacgtacaatggcaacaaaaaatgttcactcaaaaccaagaacttctaaatcaatagcaaagaatagtgattcaaaaggatta

SEQ ID NO: 761743 - DNA, 120 bp, Artificial Sequence
  ENSG00000215421_8 (sequence is synthesized)
cgaaatgtgggaagcacgtttaaagatttcagaggaagtatttctaaacaaagtggtagtagcagtgagcttcttgttgaaatgatgccttccagaaatactttgtcacaggaagtagag

SEQ ID NO: 761744 - DNA, 120 bp, Artificial Sequence
  ENSG00000215421_9 (sequence is synthesized)
attgttgaagaacatgttacttcccttggtctagctcagaatcctgaaaaccagagtagaaagctagacaccttagtaacctcagagggtctcttagagaaattggaatctacaaaaaat

SEQ ID NO: 761745 - DNA, 120 bp, Artificial Sequence
  ENSG00000215421_10 (sequence is synthesized)
acccttcaggcagcacacggtaacagtgtaacctcgaggccaagacctgagcgaaatattctcgtgttgggtaatagctttcgtcgacgaagcagcactttcaccttgaagggccaggca

SEQ ID NO: 761746 - DNA, 120 bp, Artificial Sequence
  ENSG00000215421_11 (sequence is synthesized)
aagaaaaggtttaatcttttaggaattaaaagaggtacaagtgaaactcagaggatgtatatgaaacacttgagaacacagatgaaaacacacgatgcagaatcagtgctgaaacacctg

SEQ ID NO: 761747 - DNA, 120 bp, Artificial Sequence
  ENSG00000215421_12 (sequence is synthesized)
gaagcgtgcagcagtgtgcagagagtgtgtgtgactacctcagaaacccaggaggcagagcagggccaggggagtgcccgtcctccggactccgggctgcattccctgacagtgaagcca

SEQ ID NO: 761748 - DNA, 120 bp, Artificial Sequence
  ENSG00000215421_13 (sequence is synthesized)
gcttctggctctcagacgttgtgtgcttgtacagactgtgggcaagtagctacaaataggacagatttggaaatccatgtgaaaaggtgccatgccagagagatgaaattttactgccgt

SEQ ID NO: 761749 - DNA, 120 bp, Artificial Sequence
  ENSG00000215421_14 (sequence is synthesized)
acttgtgacttctctagtatgtcaagaagggacttagatgaacatttgcacagtaaccagcatcagcaaactgcttctgtcctgagttgtcagtgttgttcatttatatccttggatgaa

SEQ ID NO: 761750 - DNA, 120 bp, Artificial Sequence
  ENSG00000215421_15 (sequence is synthesized)
ataaatcttagagaccacatgaaggaaaagcacaatatgcattttctttgcaccccttgtaatctgttctttttgtctgaaaaagatgtggaagaacacaaagccaccgagaagcatatt

SEQ ID NO: 761751 - DNA, 120 bp, Artificial Sequence
  ENSG00000215421_16 (sequence is synthesized)
aattcattggttcaaccaaagactttgcaatcatctaacagtgatttggttttacagactttacctttgagtactttagaatcagaaaacgcaaaagagtctatggatgactcaggaaaa

SEQ ID NO: 761752 - DNA, 120 bp, Artificial Sequence
  ENSG00000215421_17 (sequence is synthesized)
gcatctcaggaagaacctctgaagtccagggtaagccatggtaatgaagtgaggcattccagtaagcctcagtttcagtgtaagaagtgtttttataaaacaagatcttctactgttctc

SEQ ID NO: 761753 - DNA, 120 bp, Artificial Sequence
  ENSG00000215421_18 (sequence is synthesized)
acgagacatataaagcttcggcatggtcaagactatcattttctttgtaaagcttgtaatctttattcattgagcaaagaaggaatggagaaacacattaaaagaagcaagcatcttgaa

SEQ ID NO: 761754 - DNA, 120 bp, Artificial Sequence
  ENSG00000215421_19 (sequence is synthesized)
aatgctaagaaaaataatattggcttaagctttgaagaatgtattgaaagggtatgtataggtgcaaatgataaaaaagaagagtttgatgtttccggaaatggaaggattgaaggccat

SEQ ID NO: 761755 - DNA, 120 bp, Artificial Sequence
  ENSG00000215421_20 (sequence is synthesized)
ataggtgtgcaattacaagagcattcctatcttgagaagggcatgctggcgtctgaggaactgtcacagtctggtggtagcaccaaagatgatgaattagcttcaaccactactccaaag

SEQ ID NO: 761756 - DNA, 120 bp, Artificial Sequence
  ENSG00000215421_21 (sequence is synthesized)
agagggagacctaaaggtaacatctcacggacgtgttcacactgtggccttttggcctctagtattacaaacttgactgttcacattagacgaaaacacagtcaccagtatagttattta

SEQ ID NO: 761757 - DNA, 120 bp, Artificial Sequence
  ENSG00000215421_22 (sequence is synthesized)
tgcaaagtgtgtaagtattacactgtaactaagggagatatggaacgtcattgtgccaccaagaaacataaaggacgggtagaaatagaagcaagtggaaaacacagttcagatatcatt

SEQ ID NO: 761758 - DNA, 120 bp, Artificial Sequence
  ENSG00000215421_23 (sequence is synthesized)
gttggccctgaagggggtagccttgaagctggtaaaaagaatgctggctcagcagtgaccatgtcagatgaacatgctaacaaaccagctgagtcacccacctccgttttagagaagcca

SEQ ID NO: 761759 - DNA, 120 bp, Artificial Sequence
  ENSG00000215421_24 (sequence is synthesized)
gatcgtggaaactcaattgaagctgaagttgaaaatgtatttcattctctagatggagaagttaacagccatcttcttgataaaaaggagcaaatatcttcagagccagaggacttcgcc

SEQ ID NO: 761760 - DNA, 120 bp, Artificial Sequence
  ENSG00000215421_25 (sequence is synthesized)
cagccgggggatgtgtactcccagagagatgttacaggcacaggtgagaataagtgtttgcactgtgagtttagtgctcactcctctgcttctctagagctgcatgtaaaacggaaacat

SEQ ID NO: 761761 - DNA, 120 bp, Artificial Sequence
  ENSG00000215421_26 (sequence is synthesized)
acaaaagagtttgagttttattgcatggcatgcgattactacgcggtgactcgtcgcgagatgaccaggcatgcagcaacagagaagcacaaaatgaaaaggcagtcttatctcaactct

SEQ ID NO: 761762 - DNA, 120 bp, Artificial Sequence
  ENSG00000215421_27 (sequence is synthesized)
gctaatgtagaagctggttctgcagacatgtccaaaaacatcattatgcctgaagaagagcatcaacaaaattctgaggaatttcaaataatttcaggtcaaccatctgatactcttaaa

SEQ ID NO: 761763 - DNA, 120 bp, Artificial Sequence
  ENSG00000215421_28 (sequence is synthesized)
tctagaaatgctgcagattgctctattttaaatgagaatactaatttagatatgtctaaagtgctctgcgctgctgactctgtagaagttgagactgaagaagaatctaatttcaatgaa

SEQ ID NO: 761764 - DNA, 120 bp, Artificial Sequence
  ENSG00000215421_29 (sequence is synthesized)
gaccattccttttgtgagactttccaacaggctcctgtcaaggataaagttaggaaacctgaggagatgatgtcacttactatgtcctcaaactatggctccccaagcagatttcaaaat

SEQ ID NO: 761765 - DNA, 120 bp, Artificial Sequence
  ENSG00000215421_30 (sequence is synthesized)
gaaaattcaggaagctctgccttaaattgtgagacagcaaagaaaaaccatgagatatcgaatgatgcaggtgagctgcgtgtccattgtgagggtgaaggaggaaacgcaggagacggt

SEQ ID NO: 761766 - DNA, 120 bp, Artificial Sequence
  ENSG00000215421_31 (sequence is synthesized)
ggaggtgttgtcccccacagacacctgtgccctgtgacgctcgatggggagcgctcggctgaaagccctgtgctcgttgtgacaagaataaccagagaacagggaaatctggagagcggg

SEQ ID NO: 761767 - DNA, 120 bp, Artificial Sequence
  ENSG00000215421_32 (sequence is synthesized)
ggtcagaacagagttgcacgtgggcatggtttggaagacttgaaaggtgtccaagaagatcccgttctggggaataaggaaattctgatgaattcacaacatgaaacagaatttattttg

SEQ ID NO: 761768 - DNA, 120 bp, Artificial Sequence
  ENSG00000215421_33 (sequence is synthesized)
cagttgaaagtagtgatgtctatgaaactataattagtattgatgataaagggcaggccatgtacagttttggtcgatttgactcctccataataagaataaagaaccctgaagatggtg

SEQ ID NO: 761769 - DNA, 120 bp, Artificial Sequence
  ENSG00000215421_34 (sequence is synthesized)
agttgatagaccagtctgaagagggcttgatagcaacgggagtgagaattagtgagctgcccttgaaagactgtgctcaaggtgtgaaaaagaagaaatctgagggcagttccattggtg

SEQ ID NO: 761770 - DNA, 120 bp, Artificial Sequence
  ENSG00000215421_35 (sequence is synthesized)
agtctacacgaattcgctgtgatgattgtggcttcttagcagatggactgagtggactgaatgttcacatagccatgaagcatcctacaaaagagaagcacttccattgtttactctgtg

SEQ ID NO: 761771 - DNA, 120 bp, Artificial Sequence
  ENSG00000215421_36 (sequence is synthesized)
gaaagtcgttctataccgaaagcaaccttcaccagcatctggctagtgccggccacatgagaaatgagcaggccagtgtggaggagcttccggagggaggggccacctttaaatgtgtca

SEQ ID NO: 761772 - DNA, 120 bp, Artificial Sequence
  ENSG00000215421_37 (sequence is synthesized)
agtgcacagagccctttgattctgaacagaatttatttttacatattaaaggacagcatgaggaattgctgcgggaggtgaataagtatatagtggaagacactgagcaaatcaaccgcg

SEQ ID NO: 761773 - DNA, 120 bp, Artificial Sequence
  ENSG00000215421_38 (sequence is synthesized)
agagggaggaaaaccagggaaacgtctgcaagtattgtgggaagatgtgtcgaagcagcaactcgatggccttcctggcacacattcgcactcacacaggatcaaaaccattcaagtgca

SEQ ID NO: 761774 - DNA, 120 bp, Artificial Sequence
  ENSG00000215421_39 (sequence is synthesized)
agatatgccattttgcaacagctcagcttggagatgccagaaaccatgtgaaaaggcaccttgggatgagggaatacaagtgtcatgtctgtggggttgcttttgtaatgaagaagcact

SEQ ID NO: 761775 - DNA, 120 bp, Artificial Sequence
  ENSG00000215421_40 (sequence is synthesized)
taaatactcatctactaggcaagcatggagttggcaccccaaaagaaaggaaatttacatgccacttatgtgatagaagtttcacagagaagtgggccctgaacaaccacatgaaactcc

SEQ ID NO: 761776 - DNA, 120 bp, Artificial Sequence
  ENSG00000215421_41 (sequence is synthesized)
acacgggagaaaagccgtttaaatgtacctggcccacgtgccattactcattcctcacagcctccgcaatgaaagaccactacaggacgcacacaggcgagaagtcgtttctgtgtgacc

SEQ ID NO: 761777 - DNA, 120 bp, Artificial Sequence
  ENSG00000215421_42 (sequence is synthesized)
tctgcggctttgccggcgggacccgccacgccctcaccaagcatcgcagacagcacacaggagaaaaacctttcaagtgcgatgagtgtaactttgcctccacaactcagtcccatttga

SEQ ID NO: 761778 - DNA, 120 bp, Artificial Sequence
  ENSG00000215421_43 (sequence is synthesized)
ctcggcataaacgtgtccacactggagaaaagccctacagatgcccctggtgtgactacaggtcaaactgtgctgaaaatatccgcaaacacattctgcatactggcaaacatgaaggag

SEQ ID NO: 761779 - DNA, 120 bp, Artificial Sequence
  ENSG00000215421_44 (sequence is synthesized)
tcaagatgtacaactgtcccaagtgtgactacgggaccaacgtcccggtggagttccggaaccatttgaaggaacagcatcctgacatcgaaaacccggacctcgcttacctgcatgctg

SEQ ID NO: 761780 - DNA, 120 bp, Artificial Sequence
  ENSG00000215421_45 (sequence is synthesized)
gcattgtttccaagtcgtacgagtgccgtctaaagggacaaggagccaccttcgtggagacagacagccccttcaccgcggcggccttggcagaagagcccctcgtcaaggagaagcccc

SEQ ID NO: 761781 - DNA, 120 bp, Artificial Sequence
  ENSG00000215421_46 (sequence is synthesized)
tcagaagcagcaggaggccagcgccgccccctgagcaggtgcagcaggtcatcatcttccagggctacgacggggagtttgccctggacccctcggtggaggagacggccgccgccacgc

SEQ ID NO: 761782 - DNA, 120 bp, Artificial Sequence
  ENSG00000215421_47 (sequence is synthesized)
tgcagacgctggccatggccggccaggtggcccgggtggtgcatatcacggaggatggccaggtcatcgccacgagtcagagcggggcacatgtaggcagcgtggtgcccggacccatcc

SEQ ID NO: 761783 - DNA, 120 bp, Artificial Sequence
  ENSG00000215421_48 (sequence is synthesized)
tccccgagcagctggctgatggagccacccaggtggtcgtcgtggggggctccatggaaggccacggcatggatgagtccctcagtccaggtggcgctgtgatacaacaggtgaccaagc

SEQ ID NO: 761784 - DNA, 120 bp, Artificial Sequence
  ENSG00000215421_49 (sequence is synthesized)
aggagattttaaacctctcggaggctggagtcgctccccccgaggcatcctcagccctggatgcattgctctgtgcggtcactgaattaggggaggtggagggcagggctgggctcgagg

SEQ ID NO: 761785 - DNA, 120 bp, Artificial Sequence
  ENSG00000215421_50 (sequence is synthesized)
agcaaggcaggcccggcgccaaagacgtgctgatccagctgcccgggcaggaggtctcccatgtggctgccgaccccgaggcccccgagatccagatgttcccacaggcccaggagagcc

SEQ ID NO: 761786 - DNA, 120 bp, Artificial Sequence
  ENSG00000215421_51 (sequence is synthesized)
cggccgccgtggaggtgctcacccaggtggtccatccctcagcagccatggcctctcaggagcgggcacaggtggccttcaagaagatggtccagggcgtcctccagtttgctgtgtgtg

SEQ ID NO: 761787 - DNA, 120 bp, Artificial Sequence
  ENSG00000215421_52 (sequence is synthesized)
acacggccgcggccggccagttggtcaaggacggtgtcacccaggtggtggtgagcgaagagggtgccgtccacatggtcgccggggagggtgcccagatcatcatgcaggaggcgcagg

SEQ ID NO: 761788 - DNA, 120 bp, Artificial Sequence
  ENSG00000215421_53 (sequence is synthesized)
gcgagcacatggatctggtggagtccgacggggagatctcgcagatcatcgtgacggaggagctggtccaggccatggtgcaggagtccagtggcggcttctccgagggcaccacgcact

SEQ ID NO: 761789 - DNA, 120 bp, Artificial Sequence
  ENSG00000215421_54 (sequence is synthesized)
acatcctgacagagctgcccccaggggtgcaggacgagccgggcctgtactcccacaccgtgctggagactgcggactcgcaggaactcctgcaggccggggccacgctaggcacagagg

SEQ ID NO: 761790 - DNA, 120 bp, Artificial Sequence
  ENSG00000215421_55 (sequence is synthesized)
ccggggccccaagcagggcagagcagctggccagcgtggtcatctacacccaggagggctcctcggccgcggcggcaattcagagccaaagagaaagcagcgaactccaggaagcatgag

SEQ ID NO: 761791 - DNA, 120 bp, Artificial Sequence
  ENSG00000215421_56 (sequence is synthesized)
acgcgcggcacctttactcagcacagggcaggtgtgggaaggtccagcttcggtgggggaccgtgttccctgagcttcatctgaaaccttcaaaaccatgaggacaaggctcccgtgagc

SEQ ID NO: 761792 - DNA, 120 bp, Artificial Sequence
  ENSG00000215421_57 (sequence is synthesized)
tctgagcatgccctcccagcgagagtcacactggccaccagccaggcgcccacagagggtaccgtgggctgggcctcggggagcaggctgccaagtgcaggggagggccgggcgcaggcc

SEQ ID NO: 761793 - DNA, 120 bp, Artificial Sequence
  ENSG00000215421_58 (sequence is synthesized)
gcacagggagctccggtccactgggggcccttcgatcagtggcctcccgcttcgtcctggccgctgtgctgaagagaagccaagtgttgttggtgtttttctctcccaagtgttttccca

SEQ ID NO: 761794 - DNA, 120 bp, Artificial Sequence
  ENSG00000215421_59 (sequence is synthesized)
tttcagttatcagaaggtcatggccgtggggaaagtggtgaagatacccctcctggcttggggtgcacctgcttgtgcagtcagcatgtagctgcctttccatttcattctctactgggc

SEQ ID NO: 761795 - DNA, 120 bp, Artificial Sequence
  ENSG00000215421_60 (sequence is synthesized)
taaaaattgcagctacaagtgttaccatcttgaagcagtccacttccattcaattttttttttttaattttagaataacagtgtccccataccaaaggaagcctgctagctcatttcatg

SEQ ID NO: 761796 - DNA, 120 bp, Artificial Sequence
  ENSG00000215421_61 (sequence is synthesized)
tataaatttcccatcttcaaacagtttaggtgtatttgttgctctggtcacattctgcataaaagaaatcctcttaagcctatggttaagaaaagccttgaagtttatattcagttaaaa

SEQ ID NO: 761797 - DNA, 120 bp, Artificial Sequence
  ENSG00000215421_62 (sequence is synthesized)
tatatgtcggtggagatagccagtgcttctaattttgacttagtttcatacagtaaagcctaaatgtgaaacgcacacgctggaagatattgttcctatcaatattttgctttttataac

SEQ ID NO: 761798 - DNA, 120 bp, Artificial Sequence
  ENSG00000215421_63 (sequence is synthesized)
aagggtttgttcatattgatgccatttttgcaggatttcttcgtgatttctgtccatatgaaaatgctgacattaaacattaacacatggagaccgtgccctgtggccctgccgtggctg

SEQ ID NO: 761799 - DNA, 120 bp, Artificial Sequence
  ENSG00000215421_64 (sequence is synthesized)
ccagcatggtctgtgtttccttgtggattcacctgtggccctgctgtggccaccagcatggtctgtgtcctcgtggattcactgcagctgtcggatgcgagtttctgtcataatcatttg

SEQ ID NO: 761800 - DNA, 120 bp, Artificial Sequence
  ENSG00000215421_65 (sequence is synthesized)
tttcctgatacaattgttcttattcttttccaaaactgtaaaataatctcctccctcaaatgcaaaggttgtttttgttctgtttctgttttctttgaaataaaattataacgttaaaag

SEQ ID NO: 761801 - DNA, 120 bp, Artificial Sequence
  ENSG00000215421_66 (sequence is synthesized)
gacagaaactgtgaaaacttgtttctaacaggatttcatgtgatcacagcagttataatgctatttgtacattaccatgatttattgtaatggagtagagtatgtgatagtatctgcttc

SEQ ID NO: 761802 - DNA, 120 bp, Artificial Sequence
  ENSG00000215421_67 (sequence is synthesized)
aagacctatagaaaagtacattccagtttgatcccactcaactatgaaaacaggacttttcaactgtattttatcaaaaaaggaaatctgacagagtaattatttgatgactgtaaagtt

SEQ ID NO: 761803 - DNA, 120 bp, Artificial Sequence
  ENSG00000215421_68 (sequence is synthesized)
aataatagtaaatatttaaagcatagttgacctgaaatgagagtagttgttaaatcttcatatgttgactaattgctaaaattttaattttttttcttaaaaaatgcttgtgatttgaaa

SEQ ID NO: 761804 - DNA, 120 bp, Artificial Sequence
  ENSG00000215421_69 (sequence is synthesized)
tgctgtgggtcacctatcgatcattctcttatttaggagggatggagtcgattagaaaaccgatggaaaattgggatttaaagaagaaaacaggaagtctgtttaaagagcccatttctt

SEQ ID NO: 761805 - DNA, 120 bp, Artificial Sequence
  ENSG00000215421_70 (sequence is synthesized)
ttttatgaaaataaagtttatcatttccagccctgttttatccagcaaggcagggagcagcaggcgttgccctgagtcgccagtgacattgaggagggtgtgatgtgcgcctggccgtgt

SEQ ID NO: 761806 - DNA, 120 bp, Artificial Sequence
  ENSG00000215421_71 (sequence is synthesized)
gccctcgtgcagcgcctcccatccccgccgtacttgtgccccgccagagttttctttgtacaggatagatgacagccgaagcccctggcccgagagctctgcgatgggctcagcgctcct

SEQ ID NO: 761807 - DNA, 120 bp, Artificial Sequence
  ENSG00000215421_72 (sequence is synthesized)
gcagcagcccaggcctttcagaatcccactgcccacccaagccctgtgctctgcctgcctgtcctgggtatcccgttgacaaagggcagacagtgaagggcacaagatggctccagacca

SEQ ID NO: 761808 - DNA, 120 bp, Artificial Sequence
  ENSG00000215421_73 (sequence is synthesized)
ggggatgcacccagctccggctctcccctcctcactctcgtcctgctcaccccctcttttctctcctggtctccccttattgcctctgcccgggcaccacggggcttatggtatcttcta

SEQ ID NO: 761809 - DNA, 120 bp, Artificial Sequence
  ENSG00000215421_74 (sequence is synthesized)
cacacgttgttttcactaaggcatttggggctggcacttcagatcgtaaatttcttaccctctgttacagtcctgtagttttcctgctaaaaacattcagcacgctcctcctctctgcag

SEQ ID NO: 761810 - DNA, 120 bp, Artificial Sequence
  ENSG00000215421_75 (sequence is synthesized)
cccatagcccaggtaccttagtgcagggtggaggaagccttgggcaacctgctctgtgatgagcaacctattctcctaacagcccgagccttccaccgccctgaggccttgaagcacctt

SEQ ID NO: 761811 - DNA, 120 bp, Artificial Sequence
  ENSG00000215421_76 (sequence is synthesized)
ggggatggccttcctgcctctgcctgggccctcgctgcttctgtctggaacttctcctcccagtccacgagagatggcttgaatcttgtcctgaagacagggctacaatgttgtttcgtt

SEQ ID NO: 761812 - DNA, 120 bp, Artificial Sequence
  ENSG00000215421_77 (sequence is synthesized)
tttacatctttccctgaatattctttcctgaatgtatggcttctttgtctctgtgtcttgtcaccttatgttgtatccaagacgttcggcaaacacatctttgttgattacttattcaat

SEQ ID NO: 761813 - DNA, 120 bp, Artificial Sequence
  ENSG00000215421_78 (sequence is synthesized)
ccaaggcactgtccggaagatgggacagagaagaggaaggctgagtctgtcccctcgaagcccgctgcccagttctgcagtatagactcccctctcagcccctgagtggccaggaccctg

SEQ ID NO: 761814 - DNA, 120 bp, Artificial Sequence
  ENSG00000215421_79 (sequence is synthesized)
tgtctgcatgtgcccagcaccctgcagagtgccctgcatgctgccaggacacggcgactcacatggccgcacaggctgcctgcccaggttcagcacctgaaacgtcgatgttcaataaat

SEQ ID NO: 761815 - DNA, 120 bp, Artificial Sequence
  ENSG00000215421_80 (sequence is synthesized)
atttgttgcattaaacttttacagcggtgtttattgatgacattttttaaaatttaatatgcaaggctttcattctttttgctgaataaacaaatataccatatataatatttggtcatt

SEQ ID NO: 761816 - DNA, 120 bp, Artificial Sequence
  ENSG00000215421_81 (sequence is synthesized)
aaaaaaagattttccgttgggttaggagatactactgctggctgtttgctgaactttacttagcacccgtgacggaacgcattgttacaaaagacatgatggtggttggggggaggtatc

SEQ ID NO: 761817 - DNA, 120 bp, Artificial Sequence
  ENSG00000215421_82 (sequence is synthesized)
cagcctccttccctgggcattggagaggcgcacacccctgcaaagagttgtattggacagctcacagggctgtggggaaatgcacacccagtattaactgtgtgtgcccttgagcctaga

SEQ ID NO: 761818 - DNA, 120 bp, Artificial Sequence
  ENSG00000215421_83 (sequence is synthesized)
gcctgcctgcagatgcccacggaggcctctggccctgctgaagcttgcactgtagagagctcttcagggtttggaatagggggtcgtggtgactctgctgaggcctgagcgcttctgcag

SEQ ID NO: 761819 - DNA, 120 bp, Artificial Sequence
  ENSG00000215421_84 (sequence is synthesized)
aaagggaagacggtgagccggaggagtcagtcagaggggcgagcaggagcgattccgtcgccaaacaggttatgagtgccagtgagccgccttagatagaagcatcgtcagcactttatt

SEQ ID NO: 761820 - DNA, 120 bp, Artificial Sequence
  ENSG00000215421_85 (sequence is synthesized)
agtgcctctgaagcccaaagtctttgtgagcacttttcataactgatgggacctgcagtgggaggattggctgaggacttattttggttgaagttagacatatttcattgtctttttttt

SEQ ID NO: 761821 - DNA, 120 bp, Artificial Sequence
  ENSG00000215421_86 (sequence is synthesized)
tttccttttatctgtgtacttctttgcatacttgaattcatttgtgtgatgtaaatcatcacacaaatgtaggctagtctagtgattttctggaaggaactgttattttaaaaattgagt

SEQ ID NO: 761822 - DNA, 120 bp, Artificial Sequence
  ENSG00000215421_87 (sequence is synthesized)
actcagttttataaaattgtcatcatcaatgagttaaaaaaaaaaaaacccttaatgattcagggtttatttaaagctgactgtccaatcaaagtttttgtaagcatgccatgtgacaaa

SEQ ID NO: 761823 - DNA, 120 bp, Artificial Sequence
  ENSG00000215421_88 (sequence is synthesized)
tgcctggcatattcagtaaggaacatattaattattctaattaacacatgacttcagagaagtctttcgttaatcagcacatggatcttggttatttgtacccttttgggaaaatttcac

SEQ ID NO: 761824 - DNA, 120 bp, Artificial Sequence
  ENSG00000215421_89 (sequence is synthesized)
actcagatgcaaaaataccaggctaaatacattgctttgtttgtatgtggagaggatattcatcacaatggtactatacatctaagaaaacagaaagtaattaaaatgctgattactata

SEQ ID NO: 761825 - DNA, 120 bp, Artificial Sequence
  ENSG00000215421_90 (sequence is synthesized)
tgtgactacagtgcctatgattgggtctgaaaggctggccttgctcccagacgtttagaaaagcagctagatgtgcacaggtttcctgcgggtgacagagaggccagcgcagcgcctgct

SEQ ID NO: 761826 - DNA, 120 bp, Artificial Sequence
  ENSG00000215421_91 (sequence is synthesized)
gcgcatgtggacacctggacagccgcgtgacttggaagcatgggagtttatcctctcaagggtggtggatgagaccaagaatgcgtcagtgttcatccacttctgtgctaacttacaagt

SEQ ID NO: 761827 - DNA, 120 bp, Artificial Sequence
  ENSG00000215421_92 (sequence is synthesized)
ttctttctcttatgaggcactgtgctgttttagaatcactttttatcgcataataaacatgaacagaaatataactgagaaatggagagaaaaattcaatgtgcatcaatttgtcctaag

SEQ ID NO: 761828 - DNA, 120 bp, Artificial Sequence
  ENSG00000215421_93 (sequence is synthesized)
aactagtttcaaagaatttagatttatgaaaagcaaaaagtaatgagtaaatgatctaatggaaattatcccattcaataaatagctaccagttataataaaggaaaataaaattcataa

SEQ ID NO: 761829 - DNA, 120 bp, Artificial Sequence
  ENSG00000215421_94 (sequence is synthesized)
gatttagagcaaggtgatccagaaactctccaactaaaatttcctcttgctgaaaatgtccaaaggattgtattttgtgattacctcagattgctgtaaactctttttatctgaataaaa

SEQ ID NO: 761830 - DNA, 120 bp, Artificial Sequence
  ENSG00000215421_95 (sequence is synthesized)
agacaaactttgaacatttggaaaatggtgatgccgtcgtttttatgaagcagaggaagacagagcagcttatgtatcagcgtgtctgactcattccactccctctaggcataagatgct

SEQ ID NO: 761831 - DNA, 120 bp, Artificial Sequence
  ENSG00000215421_96 (sequence is synthesized)
gccttctgtgtggtagcatttattgtgtatattttggctcatccctaagaatttctttaagacaatattatatcttttataaattttacatctttgtcttcttaattagggaatgtagca

SEQ ID NO: 761832 - DNA, 120 bp, Artificial Sequence
  ENSG00000215421_97 (sequence is synthesized)
caaattttttgttggattttttttcctattcatattattttcgtacttaactacatttattagaagttctagaaaaagaactacttctgaggttttgttttgttttggtaaaacaatgtt

SEQ ID NO: 761833 - DNA, 120 bp, Artificial Sequence
  ENSG00000215421_98 (sequence is synthesized)
gttggggccagccggcagccccgtttaatgctacccagttgttctctgtccttggtcgggtgtaaccatgagaaaacagggtgcgctataattagggaatttgttaagctagacttacga

SEQ ID NO: 761834 - DNA, 80 bp, Artificial Sequence
  ENSG00000215440_0 (sequence is synthesized)
gagcggcgggccgggccgggccgggcagggccggggcgtgggccggcaggaagatggcgaacgtggggctgcagttccag

SEQ ID NO: 761835 - DNA, 120 bp, Artificial Sequence
  ENSG00000215440_1 (sequence is synthesized)
agttccaggcgagcgcgggggactcggacccacagagccggcccctgctgctgctcgggcagctgcaccacctgcaccgcgtgccctggagccacgtccgcgggaagctgcagccccggg

SEQ ID NO: 761836 - DNA, 120 bp, Artificial Sequence
  ENSG00000215440_2 (sequence is synthesized)
tcaccgaggagctctggcaggctgccctgagcacgctcaaccccaaccccacggacagctgtcccctctacctgaactacgccaccgtggctgccctgccctgcagggtgagccggcaca

SEQ ID NO: 761837 - DNA, 120 bp, Artificial Sequence
  ENSG00000215440_3 (sequence is synthesized)
acagcccctcggccgcccacttcatcacgcggctggtgcggacctgcctgccgcccggagcgcatcgctgcattgtgatggtctgcgagcagccggaggtctttgcttccgcctgtgccc

SEQ ID NO: 761838 - DNA, 120 bp, Artificial Sequence
  ENSG00000215440_4 (sequence is synthesized)
tggcccgggccttcccgctgttcacccaccgctcaggtgcctctcggcgcttggagaagaagacggtcaccgtggagtttttcctggtgggacaagacaacgggccggtggaggtgtcca

SEQ ID NO: 761839 - DNA, 120 bp, Artificial Sequence
  ENSG00000215440_5 (sequence is synthesized)
cattgcagtgcttagcgaatgccacagacggcgtgcggctagcagcccgcatcgtggacacaccctgcaatgagatgaacaccgacaccttcctcgaggagattaacaaagttggaaagg

SEQ ID NO: 761840 - DNA, 120 bp, Artificial Sequence
  ENSG00000215440_6 (sequence is synthesized)
agctggggatcatcccaaccatcatccgggatgaggaactgaagacgagaggatttggaggaatctatggggttggcaaagccgccctgcatcccccagccctggccgtcctcagccaca

SEQ ID NO: 761841 - DNA, 120 bp, Artificial Sequence
  ENSG00000215440_7 (sequence is synthesized)
ccccagatggagccacgcagaccatcgcctgggtgggcaaaggcatcgtctatgacactggaggcctcagcatcaaagggaagactaccatgccggggatgaagcgagactgcgggggtg

SEQ ID NO: 761842 - DNA, 120 bp, Artificial Sequence
  ENSG00000215440_8 (sequence is synthesized)
ctgcggccgtcctgggggccttcagagccgcaatcaagcagggtttcaaagacaacctccacgctgtgttctgcttggctgagaactcggtggggcccaatgcgacaaggccagatgaca

SEQ ID NO: 761843 - DNA, 120 bp, Artificial Sequence
  ENSG00000215440_9 (sequence is synthesized)
aatcaacaacacggatgccgagggcaggctggtgctggcagatggcgtgtcctatgcttgcaaggacctgggggccgacatcatcctggacatggccaccctgaccggggctcagggcat

SEQ ID NO: 761844 - DNA, 120 bp, Artificial Sequence
  ENSG00000215440_10 (sequence is synthesized)
tgccacagggaagtaccacgccgcggtgctcaccaacagcgctgagtgggaggccgcctgtgtgaaggcgggcaggaagtgtggggacctggtgcacccgctggtctactgccccgagct

SEQ ID NO: 761845 - DNA, 120 bp, Artificial Sequence
  ENSG00000215440_11 (sequence is synthesized)
gcacttcagcgagttcacctcagctgtggcggacatgaagaactcagtggcggaccgagacaacagccccagctcctgtgctggcctcttcatcgcctcacacatcggcttcgactggcc

SEQ ID NO: 761846 - DNA, 120 bp, Artificial Sequence
  ENSG00000215440_12 (sequence is synthesized)
cggagtctgggtccacctggacattgctgcaccggtgcatgctggtgagcgagccacaggcttcggtgtggccctcctgctggcgctcttcggccgtgcctctgaggaccctctgctgaa

SEQ ID NO: 761847 - DNA, 120 bp, Artificial Sequence
  ENSG00000215440_13 (sequence is synthesized)
cctggtgtccccactgggctgtgaggtggatgtcgaggagggggacctggggagggactccaagagacgcaggcttgtgtgagcctcctgcctcggccctgacaaacggggatcttttac

SEQ ID NO: 761848 - DNA, 120 bp, Artificial Sequence
  ENSG00000215440_14 (sequence is synthesized)
ctcactttgcactgattaattttaagcaattgaaagattgcccttcatatgggttttggtttgtctttctggtcgtcagcgtggtggtggaaacagctgaagttttaggagacagcttag

SEQ ID NO: 761849 - DNA, 120 bp, Artificial Sequence
  ENSG00000215440_15 (sequence is synthesized)
ggtttggtgcgggccacggggaggggaccgggaagcgctggggcttgtttctgtttgttacttacaggactgagacatcttctgtaaactgctacccctggggccttctgcaccccgggg

SEQ ID NO: 761850 - DNA, 120 bp, Artificial Sequence
  ENSG00000215440_16 (sequence is synthesized)
tgaggcctcctgcctgcctggtgccctgtcccagccccaggtcctgtgcagggcacctgcgtggctgacagccaggctcttactccagccggggctgccagcgcatccagccagcccagc

SEQ ID NO: 761851 - DNA, 120 bp, Artificial Sequence
  ENSG00000215440_17 (sequence is synthesized)
cctgtgaaagatggagctgacttgctgcaggggacctgatttatagggcaagagaagtcacactccggcctctcagaattcacttgaggttcaattaaatacagtcacaccgccccctca

SEQ ID NO: 761852 - DNA, 120 bp, Artificial Sequence
  ENSG00000215440_18 (sequence is synthesized)
gaagtgctcccagatgaacttggccgagagcatcaccatggccacgccaagtaggcggggctaggaccccacccacaccccctccctggaatcccagggcccacctgggtgatgttatcc

SEQ ID NO: 761853 - DNA, 120 bp, Artificial Sequence
  ENSG00000215440_19 (sequence is synthesized)
cagagacagggacaagagatgagaggatggaaatgtctctgggaaaaaggctgcaggagctggaggtgatgagcagagcaggcgaaggaaagggaggcccctcctccctccatgttagag

SEQ ID NO: 761854 - DNA, 120 bp, Artificial Sequence
  ENSG00000215440_20 (sequence is synthesized)
aagggagccctagatctggccaccagcggcctgtgcacacctggggctgagggcacacagggctgcacatacacactcaaggccactgtgagaacaggtgagcagggccagagggctatg

SEQ ID NO: 761855 - DNA, 120 bp, Artificial Sequence
  ENSG00000215440_21 (sequence is synthesized)
gaaagcccggctgaaggctgcacctccaggctgaagagagctttaccggcatccgccaggaagcctgggctctggggctgtgtcattgtagatgaccatttccaggtcgtggccacagcc

SEQ ID NO: 761856 - DNA, 120 bp, Artificial Sequence
  ENSG00000215440_22 (sequence is synthesized)
ccggttctggtcacagctgggccaccaatcctcctgcgccacccaccacttagccatcgggccgtcttcagggcatcggccggcctcagctgctgcagccagaccctggcgttgcggaag

SEQ ID NO: 761857 - DNA, 120 bp, Artificial Sequence
  ENSG00000215440_23 (sequence is synthesized)
gctggccagtccacatcctgcagcctacgaggaggtcaggtctttgtcagcaaaggtgggaaaccaggggagcggcggcaccaggctccagagacatttgaaatgacttcagaagaccca

SEQ ID NO: 761858 - DNA, 120 bp, Artificial Sequence
  ENSG00000215440_24 (sequence is synthesized)
gggccactcagggtgaccacatcggacagctgcctcccacaggctgtgacggatgtttaagcaagggatcgatggtcacctgactctcaggagtgcaggagaggccactgagacccattc

SEQ ID NO: 761859 - DNA, 120 bp, Artificial Sequence
  ENSG00000215440_25 (sequence is synthesized)
actcctgtgagctgggttccgggaagtccgtctccagcaggaactccaggccaagcgcgcatctctgtgatcgtgtgtcaccatggcggtgcgtgcgtgagtgcatgcgtgtgcactggt

SEQ ID NO: 761860 - DNA, 120 bp, Artificial Sequence
  ENSG00000215440_26 (sequence is synthesized)
ctgtggcctgtggtgcgtgagttccactaggacccatgtgaggtggagggtcttccacctcccctcccattcgggccctccctgtgccacacagacacccatctgtgccttccccttctg

SEQ ID NO: 761861 - DNA, 120 bp, Artificial Sequence
  ENSG00000215440_27 (sequence is synthesized)
tgccaccaaaaatggaagagatagacacttaaaagaagcaactcaaatggaatgaaatcgtttctgttggggaatgctcaagacgttcaatcatcttagaaaatcccaccccacctcccg

SEQ ID NO: 761862 - DNA, 120 bp, Artificial Sequence
  ENSG00000215440_28 (sequence is synthesized)
ctgcagattaattactgtaagtgcaactccaatcgggctggtgaccccccaggaaacctctgaagctgtcccaggctgttcccaacatgggacctccactctggcacaccaggacccgag

SEQ ID NO: 761863 - DNA, 120 bp, Artificial Sequence
  ENSG00000215440_29 (sequence is synthesized)
gcccctgacaggctcctcgttcctgcctcgctcaaggctcaggtcccccacctgaaataccccctcccaccagcatctcctgcctcgctcctgctgccaggtccccaaaagctcttgttc

SEQ ID NO: 761864 - DNA, 120 bp, Artificial Sequence
  ENSG00000215440_30 (sequence is synthesized)
atgagctcgcctgccatccacagcccccaccagaacccaagtggctgtggaattcgctgccctgattctctgcccagagcctcggtccagactgtgttccctggcgaattagtgttcagc

SEQ ID NO: 761865 - DNA, 120 bp, Artificial Sequence
  ENSG00000215440_31 (sequence is synthesized)
atttttgtttatttgtttgttctttaacaaaagttgttttggtttgagattcagcaaaaatacacactgcattcagcttcctctccattcaggattcagtaaattggttgttttcctgtc

SEQ ID NO: 761866 - DNA, 80 bp, Artificial Sequence
  ENSG00000215440_32 (sequence is synthesized)
tccctgaagggctcagccgccaggccagtcctcgcccgcggaggcccagccccaggccccgtcgccggtgcggcgcggtg

SEQ ID NO: 761867 - DNA, 120 bp, Artificial Sequence
  ENSG00000215440_33 (sequence is synthesized)
acacctgcggacggcggggggggagacgtggccgctcccagggccgcgcgtcggccccgcctggcgacaggccctggcttccagaagttcccatggcagtgtccccagctgcctttcctt

SEQ ID NO: 761868 - DNA, 120 bp, Artificial Sequence
  ENSG00000215440_34 (sequence is synthesized)
ggggacacctggcccctgccccctctctggtggaagccgcctaagccctatccgagtgttggaagcaaagcagcccccagcctggcccttccaggcttggtggcttcatcccaccagggg

SEQ ID NO: 761869 - DNA, 120 bp, Artificial Sequence
  ENSG00000215440_35 (sequence is synthesized)
gatgcgagccagcctagagacagttagctctgcagagaggcgacacatctccctaaggatgggaaaacggtggccgggagctgcgcagtgcccttccaggactgcaggagtggttgtggc

SEQ ID NO: 761870 - DNA, 120 bp, Artificial Sequence
  ENSG00000215440_36 (sequence is synthesized)
gctgtagtcccagggaaccccaccccactcttgacctcaaggtggggaaggcagcgcgtgggggctgccgtcaggaagttttcataactgggcacgaggaggcaggaggagctgcccgtc

SEQ ID NO: 761871 - DNA, 120 bp, Artificial Sequence
  ENSG00000215440_37 (sequence is synthesized)
aagcttggtgtgggcagtaccgaggcccaggctggatgcagagccgggaaccgcctcctgtgtgcttcatggccatggtcctttctgcctgtgttttttctttttttctcaaccgtctct

SEQ ID NO: 761872 - DNA, 120 bp, Artificial Sequence
  ENSG00000215440_38 (sequence is synthesized)
cctgcttctcccagaccggctctggctttgagccccagctggtcaacccagtgttgatgacaggagcccaggacctggggaggacagggggccgctgggcctaggcctggccttcctgac

SEQ ID NO: 761873 - DNA, 120 bp, Artificial Sequence
  ENSG00000215440_39 (sequence is synthesized)
cattttgattttctgggtgcacacagcacagactccaggtggaagtgctgtgggctcctgaactctctacagcccggcagcctgcacggaggccgttctgtctctcgagggtcctggagc

SEQ ID NO: 761874 - DNA, 120 bp, Artificial Sequence
  ENSG00000215440_40 (sequence is synthesized)
ctgcgctgtgtgaggtcgactgtgcttccgtgcccctgggcactgtcctaggtgataaagggcagggccccgaagccaattcggatctcccgggagccccgccaggattcagggaacccc

SEQ ID NO: 761875 - DNA, 120 bp, Artificial Sequence
  ENSG00000215440_41 (sequence is synthesized)
agcgcccctctggctctggagctgctggcagagctcatcagaaacttctgtctgtgacccagcttccagcccgctgtccccaccacccccaggtctcatcctccctgggaacagagtggc

SEQ ID NO: 761876 - DNA, 120 bp, Artificial Sequence
  ENSG00000215440_42 (sequence is synthesized)
tgctgtgtgcgacccttccccagccagcctgtcctccataggggatcctgggccctgtctcacccatccccaccctgaggagctcccggggtgaaggcagagcacacagggccttgcccc

SEQ ID NO: 761877 - DNA, 120 bp, Artificial Sequence
  ENSG00000215440_43 (sequence is synthesized)
cttgcttccacttcaggcctgcctgaggcacttccactggtctccagttacttgcaaggtcaagtacaacctgcaaggctggttatgaagaagaaactcaaaataacaggagtggcttat

SEQ ID NO: 761878 - DNA, 120 bp, Artificial Sequence
  ENSG00000215440_44 (sequence is synthesized)
gtggtctaccctgcattaccaggacaggtctttccaaaatttaggcctgaaatctttgggtgtgtgaagctctgacccccagattccctgctcggggacacctcctgcatctcccccttg

SEQ ID NO: 761879 - DNA, 120 bp, Artificial Sequence
  ENSG00000215440_45 (sequence is synthesized)
agattgaccctggaaagtcaaagctgagctggcagctgaggagcaagtggctccagaattcaaaagagaagagccctctccccagccccatgagctggtgcctgagtgggcgcctccccg

SEQ ID NO: 761880 - DNA, 120 bp, Artificial Sequence
  ENSG00000215440_46 (sequence is synthesized)
catctcctgctcttcctccccatctgccgggtgccaggcacagtgtgctgaaggccagcccagccggttcatgccacccactttacagaagaagaaactgaggcatgggagagccaaatg

SEQ ID NO: 761881 - DNA, 120 bp, Artificial Sequence
  ENSG00000215440_47 (sequence is synthesized)
gctggtctctggctctccagagcagcggggcagggatgtcacctggaagccctttgctccaggcactgcattgctgtagggactgggggcatcccggccttcccattcagggaacgtgtt

SEQ ID NO: 761882 - DNA, 120 bp, Artificial Sequence
  ENSG00000215440_48 (sequence is synthesized)
ggggttcggggagccacagggatgggcagctccaaatggggtctccccagtttcaaaggggctcatgccagtgtcccaggaaatcccgtccctgagcggggatctctaccatgccccagg

SEQ ID NO: 761883 - DNA, 120 bp, Artificial Sequence
  ENSG00000215440_49 (sequence is synthesized)
cttcctgcccactgttggaactcgcgacccttcccggcctgcaatgccagctcactccaggcatatcgggagggcactcagcgttggggtcccctgggcagcaggctccttgcttcccgg

SEQ ID NO: 761884 - DNA, 120 bp, Artificial Sequence
  ENSG00000215440_50 (sequence is synthesized)
cttcagcgagttcacctcagctgtggcggacatgaagaactcagtggcggtaggtttggagcctcgaacctggagcctgccacatgggtggagccgggcaggcggagccctgccttcagg

SEQ ID NO: 761885 - DNA, 120 bp, Artificial Sequence
  ENSG00000215440_51 (sequence is synthesized)
gtgctggtgcacccagggagctggggccccccagaagcagccacagtgcagacgagggcttgagaggcaggcgtcagggcacaggagtcatcccagacagcgtgggccactcactggctt

SEQ ID NO: 761886 - DNA, 120 bp, Artificial Sequence
  ENSG00000215440_52 (sequence is synthesized)
ccctgccacacagccaagggtttctcccccagtcttgggtctggctcagttgccccatcaggccctttgctggcttcccccttggcctatggtgggggcagactccttagctcatggtca

SEQ ID NO: 761887 - DNA, 120 bp, Artificial Sequence
  ENSG00000215440_53 (sequence is synthesized)
aggccctcccagcccagcttctgctgcctccccacacgctccctcccagccaccccgagctccttgcagacagcaatagtgacaggcgatggggcagggtggagagggcccggccggagc

SEQ ID NO: 761888 - DNA, 120 bp, Artificial Sequence
  ENSG00000215440_54 (sequence is synthesized)
agcagcatggaaggctctgggctccggctggtgctcaggatctccttcctgagaaggggactgtggggcacgtggaggggacccaggaggtgaggggtccccaggaacccctcctgtgct

SEQ ID NO: 761889 - DNA, 120 bp, Artificial Sequence
  ENSG00000215454_0 (sequence is synthesized)
agctcaacccccagcacagcagcatccaccatgtccgtctgctccagcgacctgagctacagcagccgcgtctgccttcctggttcctgtgactcttgctccgactcctggcaggtggac

SEQ ID NO: 761890 - DNA, 120 bp, Artificial Sequence
  ENSG00000215454_1 (sequence is synthesized)
gactgcccagagagctgctgcgagcccccctgctgcgcccccagctgctgcgccccggccccctgcctgagcctggtctgcaccccagtgagccgtgtgtccagcccctgctgcccagtg

SEQ ID NO: 761891 - DNA, 120 bp, Artificial Sequence
  ENSG00000215454_2 (sequence is synthesized)
acctgtgagcccagcccctgccaatcaggctgcaccagctcctgcacgccctcgtgctgccagcagtctagctgccagctggcttgctgtgcctcctccccctgccagcaggcctgctgc

SEQ ID NO: 761892 - DNA, 120 bp, Artificial Sequence
  ENSG00000215454_3 (sequence is synthesized)
gtgcccgtctgctgcaagactgtctgctgcaagcctgtgtgctgtgtgcccgtctgctgtggggattcttcatgctgccagcagtctagctgccagtcagcttgctgcacctcctccccc

SEQ ID NO: 761893 - DNA, 120 bp, Artificial Sequence
  ENSG00000215454_4 (sequence is synthesized)
tgccagcaggcctgctgtgtgcccatctgctgcaagcctgtctgctctgggatttcctcttcgtgctgccagcagtctagctgtgtgagctgtgtgtccagcccctgctgccaggcggtc

SEQ ID NO: 761894 - DNA, 120 bp, Artificial Sequence
  ENSG00000215454_5 (sequence is synthesized)
ctgtgtgagctgtgtgtccagcccctgctgccaggcggtctgtgagcccagcccctgccaatcaggctgcatcagctcctgcacgccctcgtgctgccagcagtctagctgccagccggc

SEQ ID NO: 761895 - DNA, 120 bp, Artificial Sequence
  ENSG00000215454_6 (sequence is synthesized)
ggcttgctgcacctcctctccctgccagcaggcttgctgtgtgcctgtctgctgcaagcctgtgtgctgcaagcctgtctgctctgtgcccatctgctctggggcttcctctctgtgctg

SEQ ID NO: 761896 - DNA, 120 bp, Artificial Sequence
  ENSG00000215454_7 (sequence is synthesized)
ccagcagtctagctgccagccagcttgctgcacctcctcccaaagccagcagggctgctgcgtgcccgtctgctgcaagcctgtgagctgtgtgcctgtttgctctggggcttcctcttc

SEQ ID NO: 761897 - DNA, 120 bp, Artificial Sequence
  ENSG00000215454_8 (sequence is synthesized)
atgctgccagcaatctagctgccagccagcttgctgcaccacctcctgctgcagaccctcctcctccgtgtccctcctctgccgccccgtgtgcaggcccgcctgctgcgtgcccgtccc

SEQ ID NO: 761898 - DNA, 120 bp, Artificial Sequence
  ENSG00000215454_9 (sequence is synthesized)
ttcctgctgtgctcccacctcctcctgccaacccagctgctgccgcccagcctcctgcgtgtccctcctctgacgccccgtgtgctcccgcccagcctgctgaggcctccgctcaggtca

SEQ ID NO: 761899 - DNA, 120 bp, Artificial Sequence
  ENSG00000215454_10 (sequence is synthesized)
gaagcccagctgctgatggacacgccccccagtgccagccaggctcaggtcccacctgaaagctgatagtcgcgtcctgaattgctcctgcactttgaccatttcctggtgtctgctgtt

SEQ ID NO: 761900 - DNA, 120 bp, Artificial Sequence
  ENSG00000215454_11 (sequence is synthesized)
gagctggacaatggaagaactgaaagtctatactcaatgctgcagccctcttgcggggggaggggggcgcttctagaaagttcccatggcagtggcctcccctccatatctcccacctct

SEQ ID NO: 761901 - DNA, 120 bp, Artificial Sequence
  ENSG00000215454_12 (sequence is synthesized)
catgagggtcagttcagccttgacccgtgaggtctctgtcctcctggctcagagccgcagagccttctttggacgccctcaagctgaccaataaaggccctgagactgcaatggcgctga

SEQ ID NO: 761902 - DNA, 120 bp, Artificial Sequence
  ENSG00000215454_13 (sequence is synthesized)
tctgaggattcctattcatgctgccaacagtctagctgccagccagcttgctgcacctcctccccctgccagcaggcctgctgtgtgcctgtctgctctggggcttccacttcatgctgc

SEQ ID NO: 761903 - DNA, 120 bp, Artificial Sequence
  ENSG00000215454_14 (sequence is synthesized)
cagcagtctagctgccagcctgcttgctgcaccgcctcctgctgcagaccctcctcctccgtgtccctcctctgccaccctgtgtgcaagtccacctgctgcgtgcccgtcccctcctgc

SEQ ID NO: 761904 - DNA, 120 bp, Artificial Sequence
  ENSG00000215454_15 (sequence is synthesized)
ggtgcctctgcctcctcctgccagcccagctgctgccgcacggcctcctgtgtttccctcctctgccgccccgtgtgctcccgccctgcctgctacagcctctgctctggccagaagtcc

SEQ ID NO: 761905 - DNA, 120 bp, Artificial Sequence
  ENSG00000215454_16 (sequence is synthesized)
agctgctgacagccctggatgtgatccggagtcccttcccaccaggggctgacctcccagctgccccagcaagctctgccctctctggctttgacaccctcagaaggtggggcaggctct

SEQ ID NO: 761906 - DNA, 120 bp, Artificial Sequence
  ENSG00000215455_0 (sequence is synthesized)
tcactcactcacacctcccgcagctcacctcctccccaccccagcatggccgcgtccaccatgtccgtctgctccagcgcttgctccgactcctggcaggtggatgcctgcccagagagc

SEQ ID NO: 761907 - DNA, 120 bp, Artificial Sequence
  ENSG00000215455_1 (sequence is synthesized)
tgctgtgagccccactgctgcgccctcagctgctgcgccccggccccctgcctgaccctggtctgcaccccagtgagccgtgtgtccagcccctgctgccaggcagcctgtgagcccagc

SEQ ID NO: 761908 - DNA, 81 bp, Artificial Sequence
  ENSG00000215455_2 (sequence is synthesized)
cctccccctgccagcaggcctgctgcgtgcccgtctgctgcaagcctgtgtgctgcctgcccacctgctctaaggattcct

SEQ ID NO: 761909 - DNA, 120 bp, Artificial Sequence
  ENSG00000215455_3 (sequence is synthesized)
aagcctgtgtgctgcctgcccacctgctctaaggattcctcttcatgctgccagcagtctagctgccagccaacttgctgtgcctcttcctccagccagcagtcctgctgtgtgcctgtt

SEQ ID NO: 761910 - DNA, 120 bp, Artificial Sequence
  ENSG00000215455_4 (sequence is synthesized)
tgctgcaagcctgtgtgctatgtgcccacctgctctgaggattcctcttcatgctgccagcagtctagctgccatccagcttgctgcacctcctccccctgccagcaggcctgctgcgtg

SEQ ID NO: 761911 - DNA, 120 bp, Artificial Sequence
  ENSG00000215455_5 (sequence is synthesized)
tgccagcaggcctgctgcgtgcccgtccgttgcaagcctgtctgctgcaagcccatctgctgtgtgcccgtctgctctggggcttccacttcatgctgccagcagtctagctgccagccg

SEQ ID NO: 761912 - DNA, 120 bp, Artificial Sequence
  ENSG00000215455_6 (sequence is synthesized)
tccgtgtccctcctctgccgccctgtatgccggcccgcctgctgtatgcctgtctcctcctgctgtgcccctgcctcctcctgccaggccagctgctgccgcccggcctcctgcgtgtcc

SEQ ID NO: 761913 - DNA, 120 bp, Artificial Sequence
  ENSG00000215455_7 (sequence is synthesized)
ctcctctgccgccccgcgtgctcccgcccggcctgctgaggcctctgctcaggccaggagtccagctgctgatgggcacccgccctgggccagctgggctcagttcctgacctgggttag

SEQ ID NO: 761914 - DNA, 120 bp, Artificial Sequence
  ENSG00000215455_8 (sequence is synthesized)
gtggcttcccccacctaggacgggtccccgtgtctcccctgtgctgaggtgaccccccctccttgctcccaggagcctccatccttgcagctccccagctcttgccttccagcaggtgcc

SEQ ID NO: 761915 - DNA, 120 bp, Artificial Sequence
  ENSG00000215455_9 (sequence is synthesized)
cacctgcctgctaggtcccctgtcctccctcccagcttctctgctctgggtcacttggcctcgacttgaacctctcagcacctcctcctgctccccaataaactctccttggtcacctga

SEQ ID NO: 761916 - DNA, 120 bp, Artificial Sequence
  ENSG00000215474_0 (sequence is synthesized)
atggcttccagtccgctgccagggcccaacgacatcctgctggcgtcgccgtcgagcgccttccagcccgacacgctgagccagccgcggccagggcacgccaacctcaaacccaaccag

SEQ ID NO: 761917 - DNA, 120 bp, Artificial Sequence
  ENSG00000215474_1 (sequence is synthesized)
gtgggccaggtgatcctctacggcattcccatcgtgtcgttggtgatcgacgggcaagagcgcctgtgcctggcgcagatctccaacactctgctcaagaacttcagctacaacgagatc

SEQ ID NO: 761918 - DNA, 120 bp, Artificial Sequence
  ENSG00000215474_2 (sequence is synthesized)
cacaaccgtcgcgtggcactgggcatcacgtgtgtgcagtgcacgccggtgcaactggagatcctgcggcgtgccggggccatgcccatctcatcgcgccgctgcggcatgatcaccaaa

SEQ ID NO: 761919 - DNA, 120 bp, Artificial Sequence
  ENSG00000215474_3 (sequence is synthesized)
aagctgccagacaatttcgccttcgacgtgtcacacgagtgcgcctggggctgccgcggcagcttcattcccgcgcgctacaacagctcgcgcgccaagtgcatcaaatgcagctactgc

SEQ ID NO: 761920 - DNA, 120 bp, Artificial Sequence
  ENSG00000215474_4 (sequence is synthesized)
aacatgtacttctcgcccaacaagttcattttccactcccaccgcacgcccgacgccaagtacactcagccagacgcagccaacttcaactcgtggcgccgtcatctcaagctcaccgac

SEQ ID NO: 761921 - DNA, 120 bp, Artificial Sequence
  ENSG00000215474_5 (sequence is synthesized)
aagagtccccaggacgagctggtcttcgcctgggaggacgtcaaggccatgttcaacggcggcagccgcaagcgcgcactgccccagccgggcgcgcaccccgcctgccacccgctcagc

SEQ ID NO: 761922 - DNA, 120 bp, Artificial Sequence
  ENSG00000215474_6 (sequence is synthesized)
tctataagaacaaggagcatagctttttcatcacagactctgatgcttctggaggagatttttggagagaaagatcaggaggattatatgcgaataaatgaggacaacatttggttatga

SEQ ID NO: 761923 - DNA, 120 bp, Artificial Sequence
  ENSG00000215474_7 (sequence is synthesized)
cgtacccacactttctgcggtggaggggacgccccgccgcaattcaggccgtcattctccccaggccggggtttgagcgccattcgctcgggccagagcccggatcttcgcgcggagccc

SEQ ID NO: 761924 - DNA, 120 bp, Artificial Sequence
  ENSG00000215474_8 (sequence is synthesized)
gccagagtcccgcccgctggatacgaggacccgcttggatgcttcgcctccgagcgccctcggaagatgggccggcagccacacgcctaaagacacccagaggttaccagtgtccaaggc

SEQ ID NO: 761925 - DNA, 120 bp, Artificial Sequence
  ENSG00000215474_9 (sequence is synthesized)
cccacctgctgggtgcgcccccgccgccgccgccgccaccgccgcccttggcagagctggctggtgccccgcacgcccatcacaagcggccgcgcttcgacgacgacgacgactccttgc

SEQ ID NO: 761926 - DNA, 120 bp, Artificial Sequence
  ENSG00000215474_10 (sequence is synthesized)
gccgcgcttcgacgacgacgacgactccttgcaggaggccgccgtagtggccgccgccagcctctcggccgcagccgccagcctctctgtggctgctgcttcgggcggcgcggggactgg

SEQ ID NO: 761927 - DNA, 120 bp, Artificial Sequence
  ENSG00000215474_11 (sequence is synthesized)
gcgtgggcgtgggcgcgggcgcgggggcgggtgccggggcaggggccaaaggcccgcgcagctacccagtcatcccggtgcccagcaagggctcgttcgggggcgtcctgcagaagttcc

SEQ ID NO: 761928 - DNA, 120 bp, Artificial Sequence
  ENSG00000215474_12 (sequence is synthesized)
gggctcgttcgggggcgtcctgcagaagttcccgggctgcggcgggctcttcccgcacccctacaccttccctgccgcggccgccgccttcagcttgtgccataagaaagaggatgcggg

SEQ ID NO: 761929 - DNA, 120 bp, Artificial Sequence
  ENSG00000215474_13 (sequence is synthesized)
ctgaggccctggggggcgcgggcgcaggcggcgcgggcgcggcgcccaaggccggcttgtccggcctcttctggcccgcgggccgcaaggacgccttctatccgcccttctgcatgttct

SEQ ID NO: 761930 - DNA, 120 bp, Artificial Sequence
  ENSG00000215474_14 (sequence is synthesized)
catgttctggccgccgcggacccctggcgggctcccggtgcccacctacctgcagcccccgcctcagccgccctcggcgctaggctgcgcgctaggcgaaagcccggccctgctgcgcca

SEQ ID NO: 761931 - DNA, 80 bp, Artificial Sequence
  ENSG00000215474_15 (sequence is synthesized)
ttcctggacctggctgagccaggcggtgctgctgggagcgccgaggccgcgcccccgccggggcagcccccgcaggtagt

SEQ ID NO: 761932 - DNA, 80 bp, Artificial Sequence
  ENSG00000215474_16 (sequence is synthesized)
gccgcggccgccgggtctggccccgcgggctcccgggttccggcgccccaccatccgcaccttctggaggggcgcaaagc

SEQ ID NO: 761933 - DNA, 120 bp, Artificial Sequence
  ENSG00000215474_17 (sequence is synthesized)
tggaggggcgcaaagcgggcggtggcagctaccaccattccagcgccttccggccagtgggcggcaaggacgacgcggagagcctggccaagctgcacggggcgtcggcgggcgcgcccc

SEQ ID NO: 761934 - DNA, 120 bp, Artificial Sequence
  ENSG00000215474_18 (sequence is synthesized)
actcggcccagacgcatccccaccaccatcaccaccctcaccaccaccaccaccaccaccaccccccgcagccgccgtcgccgcttctgctgctgcccccgcagcccgacgagccgggtt

SEQ ID NO: 761935 - DNA, 120 bp, Artificial Sequence
  ENSG00000215474_19 (sequence is synthesized)
cgccgccgccgccgccgcccccgccgccccctctggcccagcacccgcaccaccgaggccttctgtctcccgggggaaccagctgctgctaccccagcgaggacagctccgaggacgagg

SEQ ID NO: 761936 - DNA, 120 bp, Artificial Sequence
  ENSG00000215474_20 (sequence is synthesized)
gcgaggacagctccgaggacgaggacgacgaggaagaagagcaggaggtggacgtggagggccacaagccccccgagggcgaggaagaggaggaaggtcgagaccctgacgacgacgagg

SEQ ID NO: 761937 - DNA, 120 bp, Artificial Sequence
  ENSG00000215474_21 (sequence is synthesized)
aagaggacgaggagacggaggtcctactcggcgaccccttagtcgggggcggccggttcctccagggccgagggccgtcggagaaggggagcagccgggaccgcgcgccggccgtcgcgg

SEQ ID NO: 761938 - DNA, 120 bp, Artificial Sequence
  ENSG00000215474_22 (sequence is synthesized)
gcgcgttcccgctcggcctgaactcctccaggctgctgcaggaagacgggaaactcggggaccccggctcggacctgcccccgcccccgccgccgcccctggccccccagaaggcgagtg

SEQ ID NO: 761939 - DNA, 120 bp, Artificial Sequence
  ENSG00000215474_23 (sequence is synthesized)
gcggcggcagcagcagcccgggcagcccagttcaccatccatcactggaggagcagccctcctacaaagatagtcagaaaactaaggaaaataaccaagtaattgtatctacaaaggatg

SEQ ID NO: 761940 - DNA, 120 bp, Artificial Sequence
  ENSG00000215474_24 (sequence is synthesized)
acaacagcttttcagataagaacaaggagcatagctttttcatcacagactctgatgcttctggaggagatttttggagagaaagatcaggtgaacatacacaagaaaccaactcacctc

SEQ ID NO: 761941 - DNA, 120 bp, Artificial Sequence
  ENSG00000215474_25 (sequence is synthesized)
attcactgaaaaaggatgtagaaaatatggggaaagaagaacttcagaaggttttatttgaacaaatagatttacggagacgactggaacaagaattccaggtgttaaaaggaaacacat

SEQ ID NO: 761942 - DNA, 120 bp, Artificial Sequence
  ENSG00000215474_26 (sequence is synthesized)
ctttcccagtattcaataattttcaggatcagatgaaaagggagctagcctaccgagaagaaatggtgcaacagttacaaattatcccctatgcagcaagtttgatcaggaaagaaaagc

SEQ ID NO: 761943 - DNA, 120 bp, Artificial Sequence
  ENSG00000215474_27 (sequence is synthesized)
ttggcgcccatctcagcaaaagctaaaaggtgcacagaactacttactcttgttctcttgtaagatacagcctgccatggagcacttctgacccgtgttaaagactgcagatcgaaaggg

SEQ ID NO: 761944 - DNA, 120 bp, Artificial Sequence
  ENSG00000215474_28 (sequence is synthesized)
cttgggaattaaatacaaaatcaggttcaggagaacctaaggacaagtgacctcaaaacagcatggacaaccatgtaaaatagactgtagcagccattcattagtggggggaggggggag

SEQ ID NO: 761945 - DNA, 120 bp, Artificial Sequence
  ENSG00000215474_29 (sequence is synthesized)
ccaaccagagcagtcaatgcttgttgcatcttttggtggaaccaaagttcgagtctttgtgtttttaaaggatagctgaacccagagcatgggaagtgctgttagccagttgggatggga

SEQ ID NO: 761946 - DNA, 120 bp, Artificial Sequence
  ENSG00000215474_30 (sequence is synthesized)
aatcagcggatggtcccaggcagtctcagtcctgcacacatggagaaagcaactctacaaaactgtcttctctttttgaagaagtgattcttggtggaagaaaacacaagacccatccta

SEQ ID NO: 761947 - DNA, 120 bp, Artificial Sequence
  ENSG00000215474_31 (sequence is synthesized)
ggagtggggatagcgtttcaatggatgggaaggcaccagccgtacaaacctgcttttcatagcaaactggacagacttacatgtggccccttcctctctgtactttgcctgctgtatgaa

SEQ ID NO: 761948 - DNA, 120 bp, Artificial Sequence
  ENSG00000215475_0 (sequence is synthesized)
gaatatgaaggcgcgctaagccgggctggagcggagtgtctcagaggctgcgctccttccagggcccaaggactcacagcttcctccgctgccttcccggaccaacaaccccccaaaagt

SEQ ID NO: 761949 - DNA, 120 bp, Artificial Sequence
  ENSG00000215475_1 (sequence is synthesized)
tgtgatgcttttctttacccagtgctttggggctgtattagatctcattcatctccggtttcagcactacaaggctaaacgggttttctccgctgccgggcaacttgtctgtgtcgtcaa

SEQ ID NO: 761950 - DNA, 120 bp, Artificial Sequence
  ENSG00000215475_2 (sequence is synthesized)
ccccacacacaacctaaagtatgtgtccagtcggcgcgccgtcactcagagcgctccagagcaaggcagcttccaccctcaccatctctcccaccaccactgccaccaccgccaccacca

SEQ ID NO: 761951 - DNA, 120 bp, Artificial Sequence
  ENSG00000215475_3 (sequence is synthesized)
ccacctccgccaccacgcccacccccaccaccttcaccaccaggaggcggggctgcacgccaacccggtgacgccctgcctgtgcatgtgtcccttgttctcctgccagtgggaaggccg

SEQ ID NO: 761952 - DNA, 120 bp, Artificial Sequence
  ENSG00000215475_4 (sequence is synthesized)
cctggaggtggtggtgccccacctgcggcagatccatagggttgacatcctccagggagccgagatcgtcttcctggccacggacatgcacctccccgcgccggctgattggatcatcat

SEQ ID NO: 761953 - DNA, 120 bp, Artificial Sequence
  ENSG00000215475_5 (sequence is synthesized)
gcactcctgccttggccaccactttctgttggtgctgaggaaacaggagaggcatgaagggcacccccagttctttgccaccatgatgctgattgggacccccacccaggccgactgctt

SEQ ID NO: 761954 - DNA, 120 bp, Artificial Sequence
  ENSG00000215475_6 (sequence is synthesized)
cacctatcgcctggagctcaacagaaaccatcggcgcctcaagtgggaggccacgccccggtctgttcttgagtgcgtggactcggtgattacggacggggactgcctcgtcctcaacac

SEQ ID NO: 761955 - DNA, 120 bp, Artificial Sequence
  ENSG00000215475_7 (sequence is synthesized)
ctcgctggcacagctcttctctgacaacggcagccttgccattgggattgccatcaccgcgacagaggtcctcccctcagaagctgaaatgtgaggccaggagccacggatgctccccac

SEQ ID NO: 761956 - DNA, 120 bp, Artificial Sequence
  ENSG00000215475_8 (sequence is synthesized)
acagcctccctaggaaacgcctgggacctcccaataccaggactccagactcctttttattcttctcctttcttttttttttttttaatttttaattattattatttttttgtctcaggt

SEQ ID NO: 761957 - DNA, 120 bp, Artificial Sequence
  ENSG00000215475_9 (sequence is synthesized)
actttgtgagatttagtttttgtctgccatgggcattatattatgtaaacatcctgtaatttaagatcttggtgtgatgtttgtcctgccttgttggtgttgttttatagaatgtttgta

SEQ ID NO: 761958 - DNA, 120 bp, Artificial Sequence
  ENSG00000215475_10 (sequence is synthesized)
agatttattcagaatagttttttcctgtcacctccaagtcctttctccgctagttttgaaaggatcaaaacaccatcaagcagactgttggggttgaaaggaggcttcgtgtgagaatca

SEQ ID NO: 761959 - DNA, 120 bp, Artificial Sequence
  ENSG00000215475_11 (sequence is synthesized)
tttcttgtttctcttttcagtctatttcagagcaagctaaatctgaacgtgtgcagtcggcaggttggggaaggggcccagctcagagatggatcacatttcagaccatccagacatgac

SEQ ID NO: 761960 - DNA, 120 bp, Artificial Sequence
  ENSG00000215475_12 (sequence is synthesized)
tctgacagcttcccaggaacctcaaggtcaaagctgagctagccgggcatgaggagatcgtgtctccaccgcagggctggggactgggctagaggtgtcattgtgtgctgagtgctcagg

SEQ ID NO: 761961 - DNA, 120 bp, Artificial Sequence
  ENSG00000215475_13 (sequence is synthesized)
ttgatgctggggctcaggagagtagtcagaggcccaccttcctgtgacgggctcttgtcaccttgttcccaggctgtgccgtcttctcctgctctggaatcaaagtcctcagatttttga

SEQ ID NO: 761962 - DNA, 120 bp, Artificial Sequence
  ENSG00000215475_14 (sequence is synthesized)
tgctttcttaaaaacccctttgccttctgttgagcaagtagtagaaaagaataggcaagatggggggtggggatgaaaagcaacaggaaaaagagaacataaaattaatctcccatctct

SEQ ID NO: 761963 - DNA, 120 bp, Artificial Sequence
  ENSG00000215475_15 (sequence is synthesized)
gagagggcactccctcctcagagagttttattatcaagttataaaatccatcagttcctccctagggtgcagttctttcatatcatgcaaaaagcagaaccaggactcatcatcaaatgc

SEQ ID NO: 761964 - DNA, 120 bp, Artificial Sequence
  ENSG00000215475_16 (sequence is synthesized)
aaagaactcagagggtggcacccaggatctctgacctggcgggctggtcatcacttacaaacctgggaggctctcttccctttcctcactttctaaaatgctcctaccgtcccattcagc

SEQ ID NO: 761965 - DNA, 120 bp, Artificial Sequence
  ENSG00000215475_17 (sequence is synthesized)
acgcagacgtgaccacggctcaagtatgtattcagcacctgttgcagtatgaatgacacagtgacggaaatccatatttcctctgcgcaggctgctttctcttatttggttgtcagaaca

SEQ ID NO: 761966 - DNA, 120 bp, Artificial Sequence
  ENSG00000215475_18 (sequence is synthesized)
attcatcaacatcttcttgtagaagtctctcgtgtatttgaagaaagtcagcatgtttagtcaactttgtcttttctgttctaagttggacacctataagccttcccagtaggacctctt

SEQ ID NO: 761967 - DNA, 120 bp, Artificial Sequence
  ENSG00000215475_19 (sequence is synthesized)
ctagctcctttttatcgcatttgtcccccccctctggctgctctccagacactgcagaagtcaggcaccccatccccagcacattcccatgacagccaaatgggcctttggccaaccaga

SEQ ID NO: 761968 - DNA, 120 bp, Artificial Sequence
  ENSG00000215475_20 (sequence is synthesized)
cattactctccgtgccctgttcctgcacctcaccccctcggcttggtcctggcaggcatccaagtgactacttagtctcaggcaggttgccctggctggccatctgcaattttttctcca

SEQ ID NO: 761969 - DNA, 120 bp, Artificial Sequence
  ENSG00000215475_21 (sequence is synthesized)
ccaaaaataactgatcctgaaacacaacacccttcccccaacaactgggttaattctccagccacttttggtgccaacttacacccccacgcaccagaagggaggtgccagtcgatacaa

SEQ ID NO: 761970 - DNA, 120 bp, Artificial Sequence
  ENSG00000215475_22 (sequence is synthesized)
gatttaataacagaggctgctctggtcacacagtaatcgctgggcccctggggctgagactgcattccgtcagagccctgagaggggcaaaaaacattgccacagatggaggcacatgtc

SEQ ID NO: 761971 - DNA, 120 bp, Artificial Sequence
  ENSG00000215475_23 (sequence is synthesized)
agatgctgcagtcgcaaaaaaggattggggcctgcgcattctttgagctctcagatgccctgccagggcaccagccaccctcctccaatcacacagatgcccaagaacacctgaggctgg

SEQ ID NO: 761972 - DNA, 120 bp, Artificial Sequence
  ENSG00000215475_24 (sequence is synthesized)
tccgtctgtgcgtggaaagactggctgtcttcctcctcactgcatccccaatccccttcccagaacctaagacccccttggctgtaagtcttatgcctttagaagccacaggtcctctcc

SEQ ID NO: 761973 - DNA, 120 bp, Artificial Sequence
  ENSG00000215475_25 (sequence is synthesized)
tggtttttgagactcaaccactttgaaagcatttgtgtagcatcacaggtgctccagatcaacaaacaaaaacctcactaagaatataactaacattcacagggccttagggctcctgca

SEQ ID NO: 761974 - DNA, 120 bp, Artificial Sequence
  ENSG00000215475_26 (sequence is synthesized)
gacatcacctttgccttctggttgtgccaagttacctgagccacactgggaatgacttcaggttattttcactgcacacaagactgtattatgaataagtgatcccagatgggagcttat

SEQ ID NO: 761975 - DNA, 120 bp, Artificial Sequence
  ENSG00000215475_27 (sequence is synthesized)
atttttgttcctagaaagctttaggacaaagcatgggaaatgtattattatcttccatctatggtgctccccaaaaggcctctccatatccatatgtgaagaactggagaagaaggagca

SEQ ID NO: 761976 - DNA, 120 bp, Artificial Sequence
  ENSG00000215475_28 (sequence is synthesized)
aactaacaaccaagaattgggaataggaaatggtaccagcagtttgtatttgagcttcacagttcctgaagggctctttgatttgagtctcaggttaatcctcattagtatcctcaatat

SEQ ID NO: 761977 - DNA, 120 bp, Artificial Sequence
  ENSG00000215475_29 (sequence is synthesized)
aagactgatccgaaatattcagcagtcttgccagcttaccagtggactgaggacctgagaatcaactgagtctttgtcctgggatagttgagggagcagggagagaaagactggagtaga

SEQ ID NO: 761978 - DNA, 120 bp, Artificial Sequence
  ENSG00000215475_30 (sequence is synthesized)
ggagtagatttgcttttagaagcatctctgctttaagaactaggccagggatggtggctcacgtccataatcccaggactttgggaggccaaggaaggaggattgcttgagctcaggagt

SEQ ID NO: 761979 - DNA, 120 bp, Artificial Sequence
  ENSG00000215475_31 (sequence is synthesized)
agcctgggcaatatagcgagacttcatttctacaaaaaaaaaaatcagctgggcatggtgacacaagcctatagtcttaactactcggaggccaagacagggggatggcttgagcccagg

SEQ ID NO: 761980 - DNA, 86 bp, Artificial Sequence
  ENSG00000215475_32 (sequence is synthesized)
tttagaaaaaaaaaaaaagcactagtccacctggaagcagggggcccaggaagtgggtgggctgcagatggaggcttcagtgcgcc

SEQ ID NO: 761981 - DNA, 120 bp, Artificial Sequence
  ENSG00000215475_33 (sequence is synthesized)
caggaagtgggtgggctgcagatggaggcttcagtgcgccaggccctttctgaatccctttgcccacacccaggtttctcaccttagagtcccaggagtccctgcacagaacgctgggat

SEQ ID NO: 761982 - DNA, 120 bp, Artificial Sequence
  ENSG00000215475_34 (sequence is synthesized)
ctggttgcctcattcacaccaaggtgcaagagttaatgactcactctctaaggagtaattgccttttaaaagaaggcctagagagacagcgcacttaacagtgaaaaatgagttaccagt

SEQ ID NO: 761983 - DNA, 120 bp, Artificial Sequence
  ENSG00000215475_35 (sequence is synthesized)
atctgaacttcaggcatctgccagaggtttttttcaggaggtgtggagagaggagcattcctccccttgaggctgagcctacatacatggttgacgccgaaatggaggtcaggccacacg

SEQ ID NO: 761984 - DNA, 120 bp, Artificial Sequence
  ENSG00000215475_36 (sequence is synthesized)
aagattgtctttaacaattggtatctgcatgaatctgtacctggtaaaccccatcactagctgtggctactctggacattttaggaatagatcagcatagtaaccataatagtactcatg

SEQ ID NO: 761985 - DNA, 120 bp, Artificial Sequence
  ENSG00000215475_37 (sequence is synthesized)
gctaccacttattgaggcttttctatatgatccagtaggctgcgtactttgaatatagtagatcatgtaatccccataacaaccttagcaagcaggtgctctttattgtattcatgttac

SEQ ID NO: 761986 - DNA, 120 bp, Artificial Sequence
  ENSG00000215475_38 (sequence is synthesized)
gggtgggaaacgtaagctaagagaatttagccaacttgcttaagatcacccagctagcaaatggcagagctgggcctgggaccgggtacgtatggcttctgaccaacagcaaccatgtca

SEQ ID NO: 761987 - DNA, 120 bp, Artificial Sequence
  ENSG00000215475_39 (sequence is synthesized)
tttctatgaacatatggacccaaggctcagaaggaccgagtcataaagtgtgaatggcatagaggccttttagtgctttcatactcaatatggccttttagctcccctttttctccctct

SEQ ID NO: 761988 - DNA, 120 bp, Artificial Sequence
  ENSG00000215475_40 (sequence is synthesized)
tttttcaacccaagacctagtggagtactagagctgcttgtattctggttgttaatctttcaggaattttgcaagctgattgttaattaagtacagtcagtattaaaaatgatatacatt

SEQ ID NO: 761989 - DNA, 120 bp, Artificial Sequence
  ENSG00000215475_41 (sequence is synthesized)
tacaattaaataaattatatttaaagcaaaggtcaaaagtacttaaaactcatcacttcctaattatttcactactctttttattctctatgctcctggggttatttacatctatcacat

SEQ ID NO: 761990 - DNA, 120 bp, Artificial Sequence
  ENSG00000215475_42 (sequence is synthesized)
ctgtatgatgaacatactatataataatgtgctgcaccgcatcttccagctccacatttagtgacgtcatggtgattgcttgaaattagccatggtggaagtattcataccatggaaatt

SEQ ID NO: 761991 - DNA, 120 bp, Artificial Sequence
  ENSG00000215475_43 (sequence is synthesized)
agcaaatgctactagacagggatttttctccctagaaagccagttgttaagcacttaacagtataatcatccctcagtatccttgggggattggttccaggaatctcgtggacactaaaa

SEQ ID NO: 761992 - DNA, 120 bp, Artificial Sequence
  ENSG00000215475_44 (sequence is synthesized)
tctgaagatgctcaagtcccttatataaaacggcatagtatttgtatataacctacgcaatcctcccatatactttaaataatctctagagtacttataatacctaatacaatgtaaatg

SEQ ID NO: 761993 - DNA, 120 bp, Artificial Sequence
  ENSG00000215475_45 (sequence is synthesized)
ctatgtcaatagtttttatactgcattatttcttattgttgtattatttcttttttttttcctgaatattcttgattcacagttggtggaatccacaggtgtggaacatgtggatacaga

SEQ ID NO: 761994 - DNA, 120 bp, Artificial Sequence
  ENSG00000215475_46 (sequence is synthesized)
gggttgacttaataccactgcctagacattgctgatgagcacagcagggtgggagaggggactttggaaggagaagcaaggccctggaaggccgtactgacaagggcataaatgacagcc

SEQ ID NO: 761995 - DNA, 120 bp, Artificial Sequence
  ENSG00000215475_47 (sequence is synthesized)
aagccagcggaacagcaaattgttggggaaacacgaactcttctggagaagagactctgaggcttaagcagcttcaagagcattttctgccacagagcaccctctgctttctccccggac

SEQ ID NO: 761996 - DNA, 120 bp, Artificial Sequence
  ENSG00000215475_48 (sequence is synthesized)
acttccctattgctgttagtgtggaaagttctatttggtggctttcatggaaaaattgggctccgcaaactcagcctattggctatcccaatccaaaaagcaaaaccagctctataaagc

SEQ ID NO: 761997 - DNA, 120 bp, Artificial Sequence
  ENSG00000215475_49 (sequence is synthesized)
tcaaatttcctgttacttgttcttacaggtcaccctccctacctctttcttacatgctggccaaaacctaaagaaatgttttactttgaaattagaaattggaaatatctaccattcaag

SEQ ID NO: 761998 - DNA, 120 bp, Artificial Sequence
  ENSG00000215475_50 (sequence is synthesized)
agacacagcaagcagtggtgtcaaacaccacataagatgcattatcacaaaagtgggacccccgtaaagcatgaagctgagggacagaaaacataatgagccaaggaatgtcacatgaag

SEQ ID NO: 761999 - DNA, 120 bp, Artificial Sequence
  ENSG00000215475_51 (sequence is synthesized)
aacagggccccgggccttactttcctacttggctacctcacttttttgcaacccagtaaggaccctgttcacaatccatagcctacccagaccaatactctttctaaatctggggcacag

SEQ ID NO: 762000 - DNA, 120 bp, Artificial Sequence
  ENSG00000215475_52 (sequence is synthesized)
tttccactaggacaagagtcactggaaacttccagctaagtccattgaagcaggcagaatcttcaaggtcaatagtgcatcagttactctgatcccagtggtttcagtggaagggatgga

SEQ ID NO: 762001 - DNA, 120 bp, Artificial Sequence
  ENSG00000215475_53 (sequence is synthesized)
agaagtgagggttgctgaagtttctacttggatgcatttctaagggaaaggggaagggatcatgggtgggaccccaaagagttaggctttgattgaggttcagctgcaaatagcatcatg

SEQ ID NO: 762002 - DNA, 120 bp, Artificial Sequence
  ENSG00000215475_54 (sequence is synthesized)
agtggcgtctcctagtcagattgttaaatttcagatttttttgttcataagattttcttcaggaattggtgagttccccattgtgttcacctggaaaatagccagctgaagaaaaacttc

SEQ ID NO: 762003 - DNA, 120 bp, Artificial Sequence
  ENSG00000215475_55 (sequence is synthesized)
actgaaaagaaatctgagagatctagtgtagataaacattaatttccccccaaatcaggtcatcacatgaactacctgggttagaatttgtcttttccaatattttctgaaagtatttca

SEQ ID NO: 762004 - DNA, 120 bp, Artificial Sequence
  ENSG00000215475_56 (sequence is synthesized)
ccttggctactatactataaatactcctcaacctttttcagtcttttttttagggtattgagataagaaagagaaaggaaattgagaagcattttacttgccctgaattaatgtatatat

SEQ ID NO: 762005 - DNA, 120 bp, Artificial Sequence
  ENSG00000215475_57 (sequence is synthesized)
aattttctatgctttcttataatgttaaagacaataacttggacaaactcaaactgctacttcatctctgccctctcatagaaaatgtcattaaattgcatttgatattgtttccttcga

SEQ ID NO: 762006 - DNA, 120 bp, Artificial Sequence
  ENSG00000215529_0 (sequence is synthesized)
tttgttgagatgggagttggaaagtgttagcactttgccagactttgccagcaagattaactgaggagatcaaattgagtcagggtcaaggctaatgtcttctgaagacttagcagagat

SEQ ID NO: 762007 - DNA, 120 bp, Artificial Sequence
  ENSG00000215529_1 (sequence is synthesized)
ccctcaactccaaaagctgtccatcccacatggcttccagaacaaggaggctgctagctccccaacaccatccatcacccttagccaggtgcctgacctccagcctgggtcccagctgtt

SEQ ID NO: 762008 - DNA, 120 bp, Artificial Sequence
  ENSG00000215529_2 (sequence is synthesized)
tactgagatacacctggccaagatagagaaaatgtttgaggaggacatcaactcgactggagccctgggcatggacgccttcatcaaggccatgaagaaggttctgagcagtgtgtcgga

SEQ ID NO: 762009 - DNA, 120 bp, Artificial Sequence
  ENSG00000215529_3 (sequence is synthesized)
cgagatgctaaaggagctgtttttgaaggtggactcggactgtgaaggctttgtcacctggcaaaagtatgtggattacatgatgcgtgagttccagggaaaagaggacatgcgaaagag

SEQ ID NO: 762010 - DNA, 120 bp, Artificial Sequence
  ENSG00000215529_4 (sequence is synthesized)
ccagtaccgcctgcacttctaccttcccatgacggtcgtccccctgaaccatggctgtgaggtggtgaaggtggtgtttttaatccaccggttcaagaagatcgggtgtttcctgactgt

SEQ ID NO: 762011 - DNA, 120 bp, Artificial Sequence
  ENSG00000215529_5 (sequence is synthesized)
caccaaagacgggatcctgcagttctggtctgagtccttctcgctgatgagctcctttaggcttaaccagacccagcagctctacaaccagccgatgtgggtcattgacatggtatgtct

SEQ ID NO: 762012 - DNA, 120 bp, Artificial Sequence
  ENSG00000215529_6 (sequence is synthesized)
gcacaatatgaacctcgttgcagttgcgtctaccaggcaaaagatagatttctttgatattagtgaccacaaatgtgtccgggccttcacctttgttgatctggacagctgtgctctggt

SEQ ID NO: 762013 - DNA, 120 bp, Artificial Sequence
  ENSG00000215529_7 (sequence is synthesized)
catggactactggtctgactatcacagaggtgtgttctgctatggagacgccaaaggcaacgtcattgtcttcacctccgaaaacatgaccagtgggctgttcaacccccgtatcctccc

SEQ ID NO: 762014 - DNA, 120 bp, Artificial Sequence
  ENSG00000215529_8 (sequence is synthesized)
cagggcctccaagtgggatcactggatcaaagtttccttgcagaaactcttaaatgagaagtctgctttgcatagaagctaccggctgaaggctctccatcccaactggtgtgagcaggt

SEQ ID NO: 762015 - DNA, 120 bp, Artificial Sequence
  ENSG00000215529_9 (sequence is synthesized)
caagttcatcccccagatgaatgtggtagtctcctgttcagccatcgagaagtcctctctggtgctgacaatattgccagccaaagcctctaagaaacccaggttgtcagtgctgcgttt

SEQ ID NO: 762016 - DNA, 120 bp, Artificial Sequence
  ENSG00000215529_10 (sequence is synthesized)
aaggaaagggattctttgctttgattactgcccagacaggaacttcctggtgactggtggctacgatgccttcatccgcctgtggaacccctttgtctcaaagaggcccgtgtggctgat

SEQ ID NO: 762017 - DNA, 120 bp, Artificial Sequence
  ENSG00000215529_11 (sequence is synthesized)
gaagggacaccagacctcagtgacgcacatccttgtggatagcaggaacaacagcatcctcatcagtgtctccaaggacaagaatattcgcgtgtgggacatgctggactacatatgcct

SEQ ID NO: 762018 - DNA, 120 bp, Artificial Sequence
  ENSG00000215529_12 (sequence is synthesized)
ccagtccttctgtgggaagttttttgctctgggaaactgccccatcaccagtgcctacttcttcgagaaggacaataccctcatctgcagcacctactcaatcgggatcctaaaagggta

SEQ ID NO: 762019 - DNA, 120 bp, Artificial Sequence
  ENSG00000215529_13 (sequence is synthesized)
cttagaggcccaggggcttatcaaagcaaggaagaggaccactcattgctcacccctgtgtgctgtcctctacagcaagatctttaagcaggtggtgagtggctgcctgcgcggcacagt

SEQ ID NO: 762020 - DNA, 120 bp, Artificial Sequence
  ENSG00000215529_14 (sequence is synthesized)
gagtgtgtgggaggtcgtgacgggcaggaagacgatggagtttgctgtgtctgggggccagcacgtggagatgaccgccatggccctggatgagtcagagcggtgcctgctcacaggttt

SEQ ID NO: 762021 - DNA, 120 bp, Artificial Sequence
  ENSG00000215529_15 (sequence is synthesized)
gcgggatggcacaatgaagatgtggaactacaacattggcaaatgcctgttgacctttcccagtccggaacagctggagattagtgggattatccatatgaacaaagtgttctatgtgac

SEQ ID NO: 762022 - DNA, 120 bp, Artificial Sequence
  ENSG00000215529_16 (sequence is synthesized)
ggatggagtaagagaatcactcatttcctgttccacaagaccaagccagtgctcttgtgctaccactggcagacctaccacacggaggacatcctgagcatggccaagtaccggaaccag

SEQ ID NO: 762023 - DNA, 120 bp, Artificial Sequence
  ENSG00000215529_17 (sequence is synthesized)
ttccttgggacctcctcctacagtggggacatcctcttctggaacaccggcacactcaagcccatcttcaacttcaatgcctctaggagcccctcgcccttgcagcccaagagggtgcaa

SEQ ID NO: 762024 - DNA, 120 bp, Artificial Sequence
  ENSG00000215529_18 (sequence is synthesized)
gatgtgaacaactgcctggctgagagccacaggcccagcagaccctatgtggagcgggagaagtggacatacaagacctccaggaagctctccagtctcagccccgagtctgtggccaat

SEQ ID NO: 762025 - DNA, 120 bp, Artificial Sequence
  ENSG00000215529_19 (sequence is synthesized)
accaacctgaggcggagcctggtgtcggctcccccagtgatgcggtgcccgagagacaaggagccagacaggcctgtgccccagcagaaaccttccagtgcttctggcacatccaggcag

SEQ ID NO: 762026 - DNA, 120 bp, Artificial Sequence
  ENSG00000215529_20 (sequence is synthesized)
tcaagcaagatccacagcaaacagtccatttacaaagaggatgaaacgagaaaaggagaatggcagaagaatatgttggttcaatccagtgcctcggtggagaagataatcttcctgcag

SEQ ID NO: 762027 - DNA, 120 bp, Artificial Sequence
  ENSG00000215529_21 (sequence is synthesized)
accaggcctcgcctgccgcacacggctgccctgctgagcagctgcatggacggctacatctacgcctggtccctccatgagaatggaggcctgctggggaagttccctgtggacctagac

SEQ ID NO: 762028 - DNA, 120 bp, Artificial Sequence
  ENSG00000215529_22 (sequence is synthesized)
aatggggatgttgtcgtgggtgccatggccactgataaaaatgactggatcctcatcacgggggattgtaaaggatacatcaagatctgggacatcaaggattactgcgcattgattgat

SEQ ID NO: 762029 - DNA, 120 bp, Artificial Sequence
  ENSG00000215529_23 (sequence is synthesized)
aaacagccattccaatccagtggggccaaggttgtctctgaagcacacaacaagttccggttgttaattcctcagcaacttgggaccaacttcccacactacattcccttggaggataaa

SEQ ID NO: 762030 - DNA, 120 bp, Artificial Sequence
  ENSG00000215529_24 (sequence is synthesized)
gaggttgtggctggccataccatttccctggttccccccacgctcctgatgacctggaaaggccatttgaatagtgtggcagacatcctgtatgtggacaacttccagctggttatcagc

SEQ ID NO: 762031 - DNA, 120 bp, Artificial Sequence
  ENSG00000215529_25 (sequence is synthesized)
gctggccaggaccgggacgtcaaggcttggaaactctccggtgatgccattggaacgtttggcctgagtgtgtggaaaagactacaggatgcctgtgatggtcctcgtgaaaacagagca

SEQ ID NO: 762032 - DNA, 120 bp, Artificial Sequence
  ENSG00000215529_26 (sequence is synthesized)
agcttagaggaagatggtgactccactggcaccacccagaaggtcttacatctggagctgcaggagcagcgggatctggctgaggccctgatataccagcggcgagagcaggcggcgctg

SEQ ID NO: 762033 - DNA, 120 bp, Artificial Sequence
  ENSG00000215529_27 (sequence is synthesized)
atggctctcctgcatgggaaggcagataaggaggcagacacttgggccaagctgcagaagatggccctgatgtccccgtgggccggagagcgccccctggaagacattgaggacagctgg

SEQ ID NO: 762034 - DNA, 120 bp, Artificial Sequence
  ENSG00000215529_28 (sequence is synthesized)
aacaagtgggagtccagggacaagcaggtgagcaaagtcttgggagcggcgtataagcccaaggaacgcttgcagaataccaggttcctgtccaccagggtgccatatggctggatgaag

SEQ ID NO: 762035 - DNA, 120 bp, Artificial Sequence
  ENSG00000215529_29 (sequence is synthesized)
catcagatctcgcctcaggtctaccaaagcctgcacttcagtgatctgatgccgactcagcagcctgacttcctgaccagcaggggcccagaccagcaagaccagcacatccgcctggtg

SEQ ID NO: 762036 - DNA, 120 bp, Artificial Sequence
  ENSG00000215529_30 (sequence is synthesized)
gcccaccatgtccagaaggacctggtgcccagcagggagcaggctgtgctggataccacggacagcacgcctgcggccgcctcctccccatcttccttgttatctgtcactgcctcagcc

SEQ ID NO: 762037 - DNA, 120 bp, Artificial Sequence
  ENSG00000215529_31 (sequence is synthesized)
tccaggctgctggactccagcttgcccaccttcctgacgccccagttctccttcttgctgcggccccagtcagcctccacagcccattccaccccctcggtcccatccccggtgtccaag

SEQ ID NO: 762038 - DNA, 120 bp, Artificial Sequence
  ENSG00000215529_32 (sequence is synthesized)
tccaccctgcaggggtcagtgacccccaagcacattgtctcctccttcgagcggcccccaaggcctctgaaggccaccttcatgtcctctgtgaaggggagctcccatgtcaggttctga

SEQ ID NO: 762039 - DNA, 120 bp, Artificial Sequence
  ENSG00000215529_33 (sequence is synthesized)
acacattgactatctgtaagattagtttatgtaaagcccctacaacagggcctttgtagaaagcatgtagtaagcgcttagtaaatgaggtcaatgggacatggcttcagcccagctccg

SEQ ID NO: 762040 - DNA, 120 bp, Artificial Sequence
  ENSG00000215529_34 (sequence is synthesized)
acacctgagagtatcctcctctgagtcggctcccagaatcctcaaggctccagtgcttccccaatggatggagcattacaggctgagctctcagccctcctgcctctggccatatgcaca

SEQ ID NO: 762041 - DNA, 120 bp, Artificial Sequence
  ENSG00000215529_35 (sequence is synthesized)
ccgtgatctctgggcacctccagtcccagcacctggtcatgttctgggggctgggcctagaaagttgtccttgggtggagtctcccaccattgctactgtcttcccaggctctccatccc

SEQ ID NO: 762042 - DNA, 120 bp, Artificial Sequence
  ENSG00000215529_36 (sequence is synthesized)
ggcctgaaataatttctactaacattttggtgaccattcttccagaacatttttcggcagcacatatacgtgtggagggaggaatatctggtttggcaataaatgaaatatgtgtactgc

SEQ ID NO: 762043 - DNA, 120 bp, Artificial Sequence
  ENSG00000215545_0 (sequence is synthesized)
atgtcagtcatgaagccctgtttaatgaccattgccatccttatgatcctggctcaaaagactccaggtggcctgttcagatcccacaatggcaagagccgagagccttggaatccatgt

SEQ ID NO: 762044 - DNA, 120 bp, Artificial Sequence
  ENSG00000215545_1 (sequence is synthesized)
gatcaaaagtgctgcctgaaactttctgtgaaaataaccagttctaaaaatgtgaaggaggattacgactctaactccaacttgtcagttacaaacagttcaagctactctcacatttga

SEQ ID NO: 762045 - DNA, 120 bp, Artificial Sequence
  ENSG00000215547_0 (sequence is synthesized)
atgctgccagatcatttctcacccctctcaggagacattaaactctctgtcctggccttagttgtccttgtggtcctggctcagactgccccagatggatggatcagaaggtgctattat

SEQ ID NO: 762046 - DNA, 120 bp, Artificial Sequence
  ENSG00000215547_1 (sequence is synthesized)
aaagaaattgagaggaagaaagaaaaatgtggggaaaaacatatttgctgtgtccctaaagaaaaggataaactatcacacattcacgaccaaaaagagacaagtgagctatatatctag

SEQ ID NO: 762047 - DNA, 120 bp, Artificial Sequence
  ENSG00000215568_0 (sequence is synthesized)
gctttctaccccgcagtcccagggtatcgcaagccgtccctcacaccccacctccagcaacgccctctcgccctgtctcccccaccttcactgtgagctgcagcccccatgtccctgccg

SEQ ID NO: 762048 - DNA, 120 bp, Artificial Sequence
  ENSG00000215568_1 (sequence is synthesized)
tccccctcaccctcccgggagctgtgcccacctgacccggcatttgcgcctttgtcttcgtggcccggaagtggccccgccggcggaagcacgagaagtggccacgtgctgtacagcggc

SEQ ID NO: 762049 - DNA, 120 bp, Artificial Sequence
  ENSG00000215568_2 (sequence is synthesized)
tggctgaggaagtcgccccccgagaagaagctgaggctctttgcctggaggaaacgctggtttatcctgcggaggggccagactagcagtgacccagatgttctggaatactacaagaat

SEQ ID NO: 762050 - DNA, 120 bp, Artificial Sequence
  ENSG00000215568_3 (sequence is synthesized)
gatggctccaagaagcccctgcgcaccatcaacctgaacctctgtgagcagctggatgttgatgtgactctgaacttcaacaagaaggagattcagaagggctatatgtttgacatcaag

SEQ ID NO: 762051 - DNA, 120 bp, Artificial Sequence
  ENSG00000215568_4 (sequence is synthesized)
accagtgagcgtaccttttacctggtggctgagaccagggaggacatgaatgagtgggtccagagcatctgtcagatctgtggcttcaggcaggaggaaagcacaggcttcctgggaaac

SEQ ID NO: 762052 - DNA, 120 bp, Artificial Sequence
  ENSG00000215568_5 (sequence is synthesized)
atttcctcagccagtcacggcctctgctcttctccagctgagcccagctgctcccatcagcacctcccccaagaacaagaacccacatctgagcccccggtgtctcactgtgtgccgccc

SEQ ID NO: 762053 - DNA, 120 bp, Artificial Sequence
  ENSG00000215568_6 (sequence is synthesized)
acctggcccatccctgcacctccggggtgtctccgctcgcaccagcacgccagccagagagcagaacatgcaaggagtgccagcttctcccagggttctgaggccccattcatcatgagg

SEQ ID NO: 762054 - DNA, 120 bp, Artificial Sequence
  ENSG00000215568_7 (sequence is synthesized)
agaaacacagccatgcaaaatcttgcccagcacagtggatacagtgttgatggggtcagcggtcacatccatggcttccatagcctttccaagcccagccagcacaatgcagaattcaga

SEQ ID NO: 762055 - DNA, 120 bp, Artificial Sequence
  ENSG00000215568_8 (sequence is synthesized)
ggcagcacccacagaatcccctggagcctggcctcccatggccacaccagaggcagcctcacaggctctgaggcggataatgaggcttcctccggcaagtacacccagcatggtggaggg

SEQ ID NO: 762056 - DNA, 120 bp, Artificial Sequence
  ENSG00000215568_9 (sequence is synthesized)
aatgccagccggcctgctgagtccatgcatgagggagtctgttctttcctgccaggaagaacgcttgtgggcctgtcagacagcattgcttctgagggcagctgtgtgcccatgaaccca

SEQ ID NO: 762057 - DNA, 120 bp, Artificial Sequence
  ENSG00000215568_10 (sequence is synthesized)
agagctttctatgcaccaagacctcagccagggacatgaggtccagctgccccctgtcaaccgcagcctcaagcctaaccagaaggccaacccaacaccgcccaacctgagaaacaacag

SEQ ID NO: 762058 - DNA, 120 bp, Artificial Sequence
  ENSG00000215568_11 (sequence is synthesized)
ggtcatcaatgagctctccttcaagccacctgtcacagagccctggtctgggaccagccacacctttgactccagctcctcccaacaccccatctccacgcagagcatcaccaacacaga

SEQ ID NO: 762059 - DNA, 120 bp, Artificial Sequence
  ENSG00000215568_12 (sequence is synthesized)
ctcagaagacagtggagagaggtatcttttcccgaacccggcatctgcatttcctgtttccggtggcaccagcagttcagccccgccgaggagcactggtaacatccactacgcggccct

SEQ ID NO: 762060 - DNA, 120 bp, Artificial Sequence
  ENSG00000215568_13 (sequence is synthesized)
ggacttccagccgagcaagccatccataggctctgtcacgtccggcaagaaggtggactatgtccaggtggatctggagaagacccaggccctgcagaagaccatgcatgaacagatgtg

SEQ ID NO: 762061 - DNA, 120 bp, Artificial Sequence
  ENSG00000215568_14 (sequence is synthesized)
cctgcggcagtcctcagagcctcccaggggcgccaagctgtgactcgggccaccaaaaccagagtggggccaggacagtgcctcagagctgctccgccacactctaaagctctgtaatat

SEQ ID NO: 762062 - DNA, 120 bp, Artificial Sequence
  ENSG00000215568_15 (sequence is synthesized)
cagggaccgcatcccttacatagagagcagaggcctgatcaatatacatcctttgcctgcttggggcccacctgtgcctttggctggccatggtccccaccttcacccccttgctaggag

SEQ ID NO: 762063 - DNA, 120 bp, Artificial Sequence
  ENSG00000215568_16 (sequence is synthesized)
cagttgccagcaagcatcctcagtctcttcctgcccctcagacccgggctcccaacagatttccactctcacacttactcatggtcctcagcctcttccttctagcctctgggctgtttc

SEQ ID NO: 762064 - DNA, 120 bp, Artificial Sequence
  ENSG00000215568_17 (sequence is synthesized)
cctcaatcctggaacatgaggagctaccttgctgacccggggacccaaggcccacaggccacagtggacatggaccttttcagccctggcattttttggtcaggggagaggcaaggccat

SEQ ID NO: 762065 - DNA, 120 bp, Artificial Sequence
  ENSG00000215568_18 (sequence is synthesized)
caaacgttggaatagttgagaaggaaggttaaaggtggtcttgagaagcaaaggaattagatccttagaccagcagggcagctgatacctgcaagggctcccactttcagactgaggcca

SEQ ID NO: 762066 - DNA, 120 bp, Artificial Sequence
  ENSG00000215568_19 (sequence is synthesized)
gagtatggcagctgctcccgggtgggagaggcagagagggaagggcaaaaggaagggaaaacatgaagacgaacagccgaaagccacaagaagcagggctggagctccagagactggggt

SEQ ID NO: 762067 - DNA, 120 bp, Artificial Sequence
  ENSG00000215568_20 (sequence is synthesized)
gacaaggaccagggtcagggccccagaaatccggagctgcaggctggctctgctgctctttgctgatgccccttggggggcccttgcctgcctaagaaggcttgatctgagctgggcaaa

SEQ ID NO: 762068 - DNA, 120 bp, Artificial Sequence
  ENSG00000215568_21 (sequence is synthesized)
caggagtttgggggccacctggtgaacaatagtggtgttccggccaccccactctcagtgcaccagattcctaggacagtcacgttagacaagaacctctatgccatggtggtggccact

SEQ ID NO: 762069 - DNA, 120 bp, Artificial Sequence
  ENSG00000215568_22 (sequence is synthesized)
cctgggcccatagcctcccttcccctgcccaaggcaagtcaggcagaagcatgtcagtggggcagccctcagcagagacctttagtcagtgaaagtagcaggtggtctgttgctgctgcc

SEQ ID NO: 762070 - DNA, 120 bp, Artificial Sequence
  ENSG00000215568_23 (sequence is synthesized)
gctgagtccatgcatgagggagtctgttctttcctgagctttctatgcaccaagacctcagccagggacatgaggtccagctgccccctgtcaaccgcagcctcaagcctaaccagaagg

SEQ ID NO: 762071 - DNA, 120 bp, Artificial Sequence
  ENSG00000215568_24 (sequence is synthesized)
ttcctgggccaagacatctgatgtgatccttgccttgatcagggcctgagatgctgacctgccagtgccgagtcaggacttgaggtggatgatgggtctcgaggccacatctgcatggtg

SEQ ID NO: 762072 - DNA, 120 bp, Artificial Sequence
  ENSG00000215568_25 (sequence is synthesized)
catggtctgtgctgccttctgcctgggtctggtatccagaaacctgagtggacattgggtgctgagccacatctgcatggtgcatggcctgtgctgccttctgcctggctccggcatccg

SEQ ID NO: 762073 - DNA, 120 bp, Artificial Sequence
  ENSG00000215568_26 (sequence is synthesized)
gaaacccacgtggacattgggtgctgagccacacctgcatggtgcacggcctgtgctgccttctgcctgggcccagcatccagaaacctgagtggacccagccactaaagatattttatc

SEQ ID NO: 762074 - DNA, 120 bp, Artificial Sequence
  ENSG00000215568_27 (sequence is synthesized)
ccatagatttgtcacaaattgtagttggaccccaaggggtcctgagagctagaagtgcccagacatctcatttttttcttgcctctactttgatttcagagtctttccaaggtcactctg

SEQ ID NO: 762075 - DNA, 120 bp, Artificial Sequence
  ENSG00000215568_28 (sequence is synthesized)
atagcttcaaagtgtagccctccccatgtagtgaactcttataattgtatgctgccttggcatccacatcgaatggagttttaactttctcagaccagaggcagaggacttagtctccct

SEQ ID NO: 762076 - DNA, 120 bp, Artificial Sequence
  ENSG00000215568_29 (sequence is synthesized)
gatggtttccagttctacaccacacccatgtggcttcagtcagtggccagagatgggaatttagacttacctcccccatgcagcagactgggctcgccactttcttgctgctccctttaa

SEQ ID NO: 762077 - DNA, 120 bp, Artificial Sequence
  ENSG00000215568_30 (sequence is synthesized)
aagatacacttccagttgccaccctctctcctcttactccctaacctcccaggacctgtaagaactgaaaactcttccacttttacatgttgactgtgtcatggaagctgctccaaagtc

SEQ ID NO: 762078 - DNA, 120 bp, Artificial Sequence
  ENSG00000215568_31 (sequence is synthesized)
tgacccctgaggctgcccagaggggccccatccatggggttcctggctggggcacttctatctgggccgcaggtggctgctgaagacagcagcccccagccaaggtgatcaaaagtttcg

SEQ ID NO: 762079 - DNA, 120 bp, Artificial Sequence
  ENSG00000215568_32 (sequence is synthesized)
ttcaaaacaccccgtcatgactctttttggccttgtctagaaattctcattcctatcttgttcttgctggtgatagctgtgtttctttcactgtcctcttcctagccaggaagaacgctt

SEQ ID NO: 762080 - DNA, 120 bp, Artificial Sequence
  ENSG00000215568_33 (sequence is synthesized)
aaagcacagcttcctccggcaagtacacccagcatggtggagggaatgccagccggcctgctgagtccatgcatgagggagtctgttctttcctgggcctgagatgctgacctgccagtg

SEQ ID NO: 762081 - DNA, 120 bp, Artificial Sequence
  ENSG00000215595_0 (sequence is synthesized)
ctcattaactccatcttcagtgatttggccagaacctgctgccagtctgaaagagttgggggaatgtacaagtcaaagatccctcgggcccagaaccaggtcagtgtcaaggtcactcct

SEQ ID NO: 762082 - DNA, 120 bp, Artificial Sequence
  ENSG00000215595_1 (sequence is synthesized)
aagaacactgagatgaaaatagcagaagagcccagcccgagtcttgggcagaccttggagtggctgagaaaggagctgtctgagatgcagattcaagatcagagtctcctgctcacactg

SEQ ID NO: 762083 - DNA, 120 bp, Artificial Sequence
  ENSG00000215595_2 (sequence is synthesized)
aggcatcttcacagtgtcctggaggagctgcgtgcggacagcgcccactgggaggacgccaggtccagcggagggacatcccccatcagagctcgagcgggctccgaaggcaggggctgc

SEQ ID NO: 762084 - DNA, 120 bp, Artificial Sequence
  ENSG00000215595_3 (sequence is synthesized)
cagccggtttgctcaaggggtctggcccagctcctccgaggggaagacagcagacgaagctctctcccttaactggacggagatgacactgggctttaacactctccccattagtctaac

SEQ ID NO: 762085 - DNA, 120 bp, Artificial Sequence
  ENSG00000215595_4 (sequence is synthesized)
ctttcactgtgatatttcaggggcagagtgttggaatgggagtcagaaagccagggctctgggttcatttctgccctcatctgctgtgcatccctggatctgtcactcagcttctctgtg

SEQ ID NO: 762086 - DNA, 120 bp, Artificial Sequence
  ENSG00000215595_5 (sequence is synthesized)
tctctggttccttttctgtcacttgggatttcttggtgaggcacacataaggtattggatgtgaacacacttttcgactgaaaacacaaatgtgctctagtgctctggcaagcaccatgg

SEQ ID NO: 762087 - DNA, 120 bp, Artificial Sequence
  ENSG00000215595_6 (sequence is synthesized)
gaactagatgtgcagtaatggttaccaagtgttgctatggtgaaaattccaacccctgtgtagtgacttagtggctgttttctgtcttcccaggaagccttcccattccccttcatctga

SEQ ID NO: 762088 - DNA, 120 bp, Artificial Sequence
  ENSG00000215595_7 (sequence is synthesized)
taacatattaggccctgtaaccaccctggccataggcatgggtatattaccaggcctggccaatgatataattcatggttgccctaaaaagatgattggcccaatggatggtcatgtgaa

SEQ ID NO: 762089 - DNA, 120 bp, Artificial Sequence
  ENSG00000215595_8 (sequence is synthesized)
ccaacagagccagtcaccgaccttccctgagattgctacctggaagctctttctattacactcaggctgaggctgctggtggccatgttcctaccaggtaaagaagacctgtctgcagta

SEQ ID NO: 762090 - DNA, 120 bp, Artificial Sequence
  ENSG00000215595_9 (sequence is synthesized)
ggaaggaaagaggctaatctccaaagagaagtagagagagggccacacaacagatggacagagaggaagagcgctggctctttttggtccctggttttaggtcctagttttgtgagttac

SEQ ID NO: 762091 - DNA, 120 bp, Artificial Sequence
  ENSG00000215595_10 (sequence is synthesized)
tcctgcattctttccagggaccgaagccagtcaatttcaccccccaacacagccacacacatcaatttgtttttggttaagctgatttgagcagtttccctcatttgcagctagaatggt

SEQ ID NO: 762092 - DNA, 120 bp, Artificial Sequence
  ENSG00000215595_11 (sequence is synthesized)
cttgaggaatatgatccagatgttcaaagaatcaaagaggagaaatcaatatgaaaatggcatttcattcaatgagggtttgtgacaacaacctccgtaacagcaggcaaccaggcttgt

SEQ ID NO: 762093 - DNA, 120 bp, Artificial Sequence
  ENSG00000215595_12 (sequence is synthesized)
gatacagcagagacactcagttgtgtggggtgctgcagtcataactgaaaaattgtatctgcctataagaaagactaaaacagaaaaggtgaaaataaaaaagtcatggtgttaagatgg

SEQ ID NO: 762094 - DNA, 80 bp, Artificial Sequence
  ENSG00000215612_0 (sequence is synthesized)
gaaaggcgagccaggcggctgcccgatcagctgtcggcgcgcactcgctcccggcccggcccagcccagcccggcgcgga

SEQ ID NO: 762095 - DNA, 80 bp, Artificial Sequence
  ENSG00000215612_1 (sequence is synthesized)
ccgcgcgccaccatccccagcggggaccgaggagcccggccgagcccgagaagcccgcggccgcgatgcctgacgagctg

SEQ ID NO: 762096 - DNA, 120 bp, Artificial Sequence
  ENSG00000215612_2 (sequence is synthesized)
cgggcgcgccacgccggcccgcgcctcctccttcctcatcgagaacctgctggcggccgaggccaagggcgcagggcgcgcgacccagggcgacggcagccgggaggacgaggaggagga

SEQ ID NO: 762097 - DNA, 120 bp, Artificial Sequence
  ENSG00000215612_3 (sequence is synthesized)
gaggaggacgacgacgaccccgaagacgaggacgccgagcaggcgcggcggcgacggctacagcggcggcgacagttgctcgcgggcaccgggcccggcggggaggcgcgggcccgtgcg

SEQ ID NO: 762098 - DNA, 120 bp, Artificial Sequence
  ENSG00000215612_4 (sequence is synthesized)
cgctgggcctcggtcctcggccgccccccggtcccgggccgcccttcgctctgggctgcggaggcgcagcgcgctggtacccacgggcgcacggtggctatggaggcggcctcagtcctg

SEQ ID NO: 762099 - DNA, 120 bp, Artificial Sequence
  ENSG00000215612_5 (sequence is synthesized)
ggcggcctcagtcctgacaccagcgaccgggactcaccggagacgggcgaggagatgggccgtgcggagggcgcctggccgcgaggccccgggccgggagcggtgcagcgggaggcagcg

SEQ ID NO: 762100 - DNA, 120 bp, Artificial Sequence
  ENSG00000215612_6 (sequence is synthesized)
ggcgcgtggcccggcggccggcacggaggaggcgtcggagctggccgaggtccctgcggcggctggggagacacgcggcggcgttggcgtgggcggcggccgaaagaagaagacgcgcac

SEQ ID NO: 762101 - DNA, 120 bp, Artificial Sequence
  ENSG00000215612_7 (sequence is synthesized)
acgcaggttaagatctggttccagaaccgccgcaacaagtggaagcggcagctggcagccgagctggaggcggccagcctgtccccgccgggagcgcagcgcctggtccgcgtgccggtg

SEQ ID NO: 762102 - DNA, 80 bp, Artificial Sequence
  ENSG00000215612_8 (sequence is synthesized)
cgcgtgccggtgctctaccacgaaagccccccggccgcagccgccgctgggcccccggccaccctgcccttcccgctggc

SEQ ID NO: 762103 - DNA, 120 bp, Artificial Sequence
  ENSG00000215612_9 (sequence is synthesized)
gcctacccgctggccgccttcccggccgccgcctccgtgccctttctgcgggcgcagatgcctggcctggtgtgagccccgcctgccgggccctctccccacgaccctgtggacctgtgt

SEQ ID NO: 762104 - DNA, 120 bp, Artificial Sequence
  ENSG00000215612_10 (sequence is synthesized)
ggacgcgcgattcagcggcaggcgcagggctcagggggcgttagggaagggatggtcgctcctgcggcctcctagatacctcgggagcgcaggccgcggccgggcgggcctcagcttctg

SEQ ID NO: 762105 - DNA, 120 bp, Artificial Sequence
  ENSG00000215612_11 (sequence is synthesized)
tggggagcgcctctagaatgtaatgggacgccccacccatttgccaggctggatccccactcgaacagggggccatgcagagactctgggctgcgcagcccccggcgccacggccacccc

SEQ ID NO: 762106 - DNA, 120 bp, Artificial Sequence
  ENSG00000215612_12 (sequence is synthesized)
ccggcctcagcgaggagcggtcggccatggccacccggggcagctgccctcaggccaagcccagcgcaacaaaggaaaactacgaaccggctgtccaaggctgagcggtgactgtcccca

SEQ ID NO: 762107 - DNA, 120 bp, Artificial Sequence
  ENSG00000215612_13 (sequence is synthesized)
cagactgcccccaacactaaacgtccctttcctgggacccagacagcaggccggcccggagggctgtgctacccctctcgcgggtgctggtggagaaaggaccctggacctgtgggtccc

SEQ ID NO: 762108 - DNA, 120 bp, Artificial Sequence
  ENSG00000215612_14 (sequence is synthesized)
atcgtccgttccaggagcaggcaggctggggctctctgcagacgtcgcagcctccgggttgttgtttttttaaatgaatctacttatttgcgtatggaataaaaagggacattttctgga

SEQ ID NO: 762109 - DNA, 120 bp, Artificial Sequence
  ENSG00000215612_15 (sequence is synthesized)
agattacacctcagcctgtgcagtgtggagaggggcaggtgaccagagctgataaatacaaagtgaacagaagtgacagtgggagcctctggatggcggaggaggccgcagggactggat

SEQ ID NO: 762110 - DNA, 120 bp, Artificial Sequence
  ENSG00000215612_16 (sequence is synthesized)
ggtgcagccacaacacggtggagcctttgtcagcctggacccccgagtgaccgcgtggagcagtgttcccacagggggcactcagtgtgagcaagaaataaaccttagtgtgtgcaccca

SEQ ID NO: 762111 - DNA, 120 bp, Artificial Sequence
  ENSG00000215644_0 (sequence is synthesized)
gatctggcagcgccgcgaagacgagcggtcaccggcgcccgacccgagcgcgcccagaggacggcggggagccaagccgacccccgagcagcgccgcgcggaccctgaggctcagagggg

SEQ ID NO: 762112 - DNA, 120 bp, Artificial Sequence
  ENSG00000215644_1 (sequence is synthesized)
cagcttcaggggaggacaccccactggccaggacgccccaggctctgctgctctgccactcagctgccctcggaggagcgtacacacccaccaggactgcattgccccagctgtgcagcc

SEQ ID NO: 762113 - DNA, 120 bp, Artificial Sequence
  ENSG00000215644_2 (sequence is synthesized)
cctgccagatgtgggaggcagctagctgcccagaggcatgcccccctgccagccacagcgacccctgctgctgttgctgctgctgctggcctgccagccacaggtcccctccgctcaggt

SEQ ID NO: 762114 - DNA, 120 bp, Artificial Sequence
  ENSG00000215644_3 (sequence is synthesized)
gatggacttcctgtttgagaagtggaagctctacggtgaccagtgtcaccacaacctgagcctgctgccccctcccacggagctggtgtgcaacagaaccttcgacaagtattcctgctg

SEQ ID NO: 762115 - DNA, 120 bp, Artificial Sequence
  ENSG00000215644_4 (sequence is synthesized)
gccggacacccccgccaataccacggccaacatctcctgcccctggtacctgccttggcaccacaaagtgcaacaccgcttcgtgttcaagagatgcgggcccgacggtcagtgggtgcg

SEQ ID NO: 762116 - DNA, 120 bp, Artificial Sequence
  ENSG00000215644_5 (sequence is synthesized)
tggaccccgggggcagccttggcgtgatgcctcccagtgccagatggatggcgaggagattgaggtccagaaggaggtggccaagatgtacagcagcttccaggtgatgtacacagtggg

SEQ ID NO: 762117 - DNA, 120 bp, Artificial Sequence
  ENSG00000215644_6 (sequence is synthesized)
ctacagcctgtccctgggggccctgctcctcgccttggccatcctggggggcctcagcaagctgcactgcacccgcaatgccatccacgcgaatctgtttgcgtccttcgtgctgaaagc

SEQ ID NO: 762118 - DNA, 120 bp, Artificial Sequence
  ENSG00000215644_7 (sequence is synthesized)
cagctccgtgctggtcattgatgggctgctcaggacccgctacagccagaaaattggcgacgacctcagtgtcagcacctggctcagtgatggagcggtggctggctgccgtgtggccgc

SEQ ID NO: 762119 - DNA, 120 bp, Artificial Sequence
  ENSG00000215644_8 (sequence is synthesized)
gcctctacctgggcatcggctggggtgcccccatgctgttcgtcgtcccctgggcagtggtcaagtgtctgttcgagaacgtccagtgctggaccagcaatgacaacatgggcttctggt

SEQ ID NO: 762120 - DNA, 120 bp, Artificial Sequence
  ENSG00000215644_9 (sequence is synthesized)
ggatcctgcggttccccgtcttcctggccatcctgatcaacttcttcatcttcgtccgcatcgttcagctgctcgtggccaagctgcgggcacggcagatgcaccacacagactacaagt

SEQ ID NO: 762121 - DNA, 120 bp, Artificial Sequence
  ENSG00000215644_10 (sequence is synthesized)
tccggctggccaagtccacgctgaccctcatccctctgctgggcgtccacgaagtggtcttcgccttcgtgacggacgagcacgcccagggcaccctgcgctccgccaagctcttcttcg

SEQ ID NO: 762122 - DNA, 120 bp, Artificial Sequence
  ENSG00000215644_11 (sequence is synthesized)
acctcttcctcagctccttccagggcctgctggtggctgtcctctactgcttcctcaacaaggaggtgcagtcggagctgcggcggcgttggcaccgctggcgcctgggcaaagtgctat

SEQ ID NO: 762123 - DNA, 120 bp, Artificial Sequence
  ENSG00000215644_12 (sequence is synthesized)
gggaggagcggaacaccagcaaccacagggcctcatcttcgcccggccacggccctcccagcaaggagctgcagtttgggaggggtggtggcagccaggattcatctgcggagaccccct

SEQ ID NO: 762124 - DNA, 120 bp, Artificial Sequence
  ENSG00000215644_13 (sequence is synthesized)
tggctggtggcctccctagattggctgagagccccttctgaaccctgctgggaccccagctagggctggactctggcacccagagggcgtcgctggacaacccagaactggacgcccagc

SEQ ID NO: 762125 - DNA, 120 bp, Artificial Sequence
  ENSG00000215644_14 (sequence is synthesized)
tgaggctgggggcgggggagccaacagcagcccccacctaccccccacccccagtgtggctgtctgcgagattgggcctcctctccctgcacctgccttgtccctggtgcagaggtgagc

SEQ ID NO: 762126 - DNA, 120 bp, Artificial Sequence
  ENSG00000215644_15 (sequence is synthesized)
agaggagtccagggcgggagtgggggctgtgccgtgaactgcgtgccagtgtccccacgtatgtcggcacgtcccatgtgcatggaaatgtcctccaacaataaagagctcaagtggtca

SEQ ID NO: 762127 - DNA, 120 bp, Artificial Sequence
  ENSG00000215644_16 (sequence is synthesized)
cctgtgcctggcctcagcacttcctgagttctcttcatgggaaggttcctgggtgcttatgcagcctttgaggaccccgccaaggggccctgtcattcctcaggcccccaccaccgtggg

SEQ ID NO: 762128 - DNA, 120 bp, Artificial Sequence
  ENSG00000215644_17 (sequence is synthesized)
caggtgaggtaacgaggtaactgagccacagagctggggacttgcctcaggccgcagagccaggaaataacagaacggtggcattgccccagaaccggctgctgctgctgcccccaggcc

SEQ ID NO: 762129 - DNA, 120 bp, Artificial Sequence
  ENSG00000215644_18 (sequence is synthesized)
cagatgggtaataccacctacagccccgtggagttttcagtgggcagacagtgccagggcgtggaagctgggacccaggggcctgggagggctcgggtggagagtgtatatcatggcctg

SEQ ID NO: 762130 - DNA, 120 bp, Artificial Sequence
  ENSG00000215644_19 (sequence is synthesized)
gacacttggggtgcagggagaggatagggctggaggactcacccgggaggcagtgcctgggttcggatgagggaggcagccaccactgggcagaggggggcaggtgtggcagcctccatt

SEQ ID NO: 762131 - DNA, 120 bp, Artificial Sequence
  ENSG00000215644_20 (sequence is synthesized)
cagatggatggcgaggagattgaggtccaggtcagtgggcggcaggcaggcgcggtggggctggatgggaacgggcatgggggcccctgcctggccctcacaggccactgtaactcgcag

SEQ ID NO: 762132 - DNA, 120 bp, Artificial Sequence
  ENSG00000215644_21 (sequence is synthesized)
aaggaggtggccaagatgtacagcagcttccaggtgatgtacacagtgggctacagcctgtccctgggggccctgctcctcgccttggccatcctggggggcctcaggtaggattccgcc

SEQ ID NO: 762133 - DNA, 120 bp, Artificial Sequence
  ENSG00000215644_22 (sequence is synthesized)
tcagcacctggctcagtgatggagtgagcccccctcggcggccccaggcaggtgggtgggtgggcagccaggcaggtggccacgtagccgcgctcacactgcacctgtaccaggcggtgg

SEQ ID NO: 762134 - DNA, 120 bp, Artificial Sequence
  ENSG00000215644_23 (sequence is synthesized)
agcatcctgtctgagagcgctgggagggagccggcacccagacaggacaccaggacactggccagcaccctggacactgagccaggctgttcctccctggctgtgtgcccaccagcccca

SEQ ID NO: 762135 - DNA, 120 bp, Artificial Sequence
  ENSG00000215644_24 (sequence is synthesized)
actaccttctctggtttcacaaaaacatcccggctcccatcccggagctcctcaaagcgtctgagaggccccttgcggacgccctgggagccccgctgccttcctggaccagtggccgct

SEQ ID NO: 762136 - DNA, 120 bp, Artificial Sequence
  ENSG00000215695_0 (sequence is synthesized)
atgtcatcattaccaacttcagatgggtttaaccatcccgcccgttcttcaggacagagtcctgatgttggtaatcctatgagtcttgctcgctctgtctctgcttcagtctgccctatc

SEQ ID NO: 762137 - DNA, 120 bp, Artificial Sequence
  ENSG00000215695_1 (sequence is synthesized)
aagcccagtgactcagatcgcattgaacctaaagctgtgaaggctttgaaggcttcagctgaattccagctaaactctgaaaagaaagaacatctttctttacaagatctttctgatcat

SEQ ID NO: 762138 - DNA, 120 bp, Artificial Sequence
  ENSG00000215695_2 (sequence is synthesized)
gcttcctcagcagaccatgctccaacagaccagagtccagctatgcctatgcagaattcatccgaagaaataactgttgcaggtaatctggagaaatctgctgaaagaagcacccagggc

SEQ ID NO: 762139 - DNA, 120 bp, Artificial Sequence
  ENSG00000215695_3 (sequence is synthesized)
ctcaaatttcatctccatacaagacaggaagctagtttatctgtcacatctactaggatgcatgaaccacagatgtttctaggtgaaaaggattggcatccagaaaatcagaacctgagt

SEQ ID NO: 762140 - DNA, 120 bp, Artificial Sequence
  ENSG00000215695_4 (sequence is synthesized)
caagtgagtgaccctcagcagcacgaagaaccagggaatgaacagtatgaggttgcacaacaaaaagcttcacatgaccaagaatatctttgtaacataggggaccttgagcttcctgaa

SEQ ID NO: 762141 - DNA, 120 bp, Artificial Sequence
  ENSG00000215695_5 (sequence is synthesized)
gaaaggcaacagaatcaacacaaaattgttgatttggaagctacgatgaaaggaaatgggctcccacagaatgtggatcctccaagtgcgaagaaaagtattccatcttcagaatgcagt

SEQ ID NO: 762142 - DNA, 120 bp, Artificial Sequence
  ENSG00000215695_6 (sequence is synthesized)
ggctgctcaaattcagaaacatttatggaaatcgatacagctcaacagtccctagttactttgcttaattcaacaggcaggcagaatgccaatgtcaagaacattggtgcattggatctc

SEQ ID NO: 762143 - DNA, 120 bp, Artificial Sequence
  ENSG00000215695_7 (sequence is synthesized)
gaaattttgaatgattccatttccactcaggatttacagcccccagaaactaatgttgaaatacctggaacaaataaagaatatggccattactcctctccaagtctctgtggcagttgt

SEQ ID NO: 762144 - DNA, 120 bp, Artificial Sequence
  ENSG00000215695_8 (sequence is synthesized)
cagccttctgtggagtcagcagaagaatcttgcccgtctataacggcagccttgaaagaacttcatgaacttttggttgttagcagtaaaccagcttcagaaaatacatctgaagaagta

SEQ ID NO: 762145 - DNA, 120 bp, Artificial Sequence
  ENSG00000215695_9 (sequence is synthesized)
atctgtcaatcagaaaccatagctgagggccaaaccagtattaaagacctttctgaaagatggacccaaaatgagcatcttacccagaatgaacagtgtccacaagtctcctttcatcag

SEQ ID NO: 762146 - DNA, 120 bp, Artificial Sequence
  ENSG00000215695_10 (sequence is synthesized)
gccatatctgtatcagtggagacagaaaaattaacaggtacttcatctgacactggaagagaagctgtagaaaatgtaaacttcaggagtctaggtgatggcctgtcaaccgataaggaa

SEQ ID NO: 762147 - DNA, 120 bp, Artificial Sequence
  ENSG00000215695_11 (sequence is synthesized)
ggtgtccccaaatctagggaatccataaataagaaccgttctgtcactgtaacctcagctaaaacatccaatcagttacactgcaccttaggtgtagaaatttcacccaaacttttagca

SEQ ID NO: 762148 - DNA, 120 bp, Artificial Sequence
  ENSG00000215695_12 (sequence is synthesized)
ggtgaggaggatgcactcaatcagacttctgagcaaactaagtctttgtcatccaatttcatattggttaaagacttaggtcagggcatacagaattcagtaacagacaggcctgaaacc

SEQ ID NO: 762149 - DNA, 120 bp, Artificial Sequence
  ENSG00000215695_13 (sequence is synthesized)
agagaaaatgtctgtcctgatgcttcgaggccattacttgaatatgaaccacctaccagccatccatcatcaagtcctgccattcttccaccattgatttttcctgccacagatattgac

SEQ ID NO: 762150 - DNA, 120 bp, Artificial Sequence
  ENSG00000215695_14 (sequence is synthesized)
cgcattctccgtgctggctttactttgcaggaagctcttggagctttgcatcgagttggtgggaatgcagaccttgcacttcttgttttgctcgcaaaaaacatcgtagttcctacatga

SEQ ID NO: 762151 - DNA, 120 bp, Artificial Sequence
  ENSG00000215704_0 (sequence is synthesized)
acagaactcccacggacacaccatgattaggaccctgctgctgtccactttggtggctggagccctcagttgtggggtctccacttacgcgcctgatatgtctaggatgcttggaggtga

SEQ ID NO: 762152 - DNA, 120 bp, Artificial Sequence
  ENSG00000215704_1 (sequence is synthesized)
agaagcgaggcccaacagctggccctggcaggtctccctgcagtacagctccaatggccagtggtaccacacctgcggagggtccctgatagccaacagctgggtcctgacggctgccca

SEQ ID NO: 762153 - DNA, 120 bp, Artificial Sequence
  ENSG00000215704_2 (sequence is synthesized)
ctgcatcagctcctccgggatctaccgcgtgatgctgggccagcataacctctacgttgcagagtccggctcgctggccgtcagtgtctctaagattgtggtgcacaaggactggaactc

SEQ ID NO: 762154 - DNA, 120 bp, Artificial Sequence
  ENSG00000215704_3 (sequence is synthesized)
gctggcctgcctccctcctgccggcaccattctacccaacaactacccctgctacgtcacgggctggggaaggctgcagaccaacggggctctccctgatgacctgaagcagggccagtt

SEQ ID NO: 762155 - DNA, 120 bp, Artificial Sequence
  ENSG00000215704_4 (sequence is synthesized)
gctggttgtggactatgccacctgctccagctctggctggtggggcagcaccgtgaagacgaatatgatctgtgctgggggtgatggcgtgatatgcacctgcaacggagactccggtgg

SEQ ID NO: 762156 - DNA, 120 bp, Artificial Sequence
  ENSG00000215704_5 (sequence is synthesized)
gccgctgaactgtcaggcatctgacggccggtgggaggtgcatggcatcggcagcctcacgtcggtccttggttgcaactactactacaagccctccatcttcacgcgggtctccaacta

SEQ ID NO: 762157 - DNA, 120 bp, Artificial Sequence
  ENSG00000215704_6 (sequence is synthesized)
caacgactggatcaattcggtgattgcaaataactaaccaaaagaagtccctgggactgtttcagacttggaaaggtcacagaaggaaaataatattatataaagtgacaactatgcaaa

SEQ ID NO: 762158 - DNA, 120 bp, Artificial Sequence
  ENSG00000215704_7 (sequence is synthesized)
caggaacaggggaaacctaagacgggtccatcacttcctttttctcaggagtccctgcatccctaatggcttctctctgatctcattcagccaacggggctgttcctgatgtcctgcagc

SEQ ID NO: 762159 - DNA, 120 bp, Artificial Sequence
  ENSG00000215704_8 (sequence is synthesized)
agggccggttgctggttgtggactatgccacctgctccagctctgcctggtggggcagcagcgtgaaaaccagtatgatctgtgctgggggtgatggcgtgatctccagctgcaacggag

SEQ ID NO: 762160 - DNA, 120 bp, Artificial Sequence
  ENSG00000215704_9 (sequence is synthesized)
actctggcgggccactgaactgtcaggcgtctgacggccggtggcaggtgcacggcatcgtcagcttcgggtctcgcctcggctgcaactactaccacaagccctccgtcttcacgcggg

SEQ ID NO: 762161 - DNA, 120 bp, Artificial Sequence
  ENSG00000215704_10 (sequence is synthesized)
gctggaactcaccggagtttctgccggctcctccgggatctaccgcgtgatgctgggccagcataacctctacgttgcagagtccggctcgctggccgtcagtgtctctaagattgtggt

SEQ ID NO: 762162 - DNA, 120 bp, Artificial Sequence
  ENSG00000215712_0 (sequence is synthesized)
agattgcacaggaggaggcggtagcggaacctttctcctccgcctggttctcgcttccacccgggcccagttggggacggacgcactagaggcgacctaaacatggagacagcgggcgct

SEQ ID NO: 762163 - DNA, 120 bp, Artificial Sequence
  ENSG00000215712_1 (sequence is synthesized)
gcaactgggcagccggcctctgggctggaggctccggggtccacgaatgaccggcttttcctggttaaaggtggaattttccttggtaccgttgctgcagcgggaatgctagctggattt

SEQ ID NO: 762164 - DNA, 120 bp, Artificial Sequence
  ENSG00000215712_2 (sequence is synthesized)
attacaacattatcattggctaaaaagaaaagccctgaatggttcaataagggaagtatggccacggctgcattaccggaaagcgggtcttcccttgccttgcgagctctgggctggggc

SEQ ID NO: 762165 - DNA, 120 bp, Artificial Sequence
  ENSG00000215712_3 (sequence is synthesized)
tccctgtatgcatggtgtggggttggtgtgattagcttcgcagtctggaaagctttaggagttcacagtatgaacgactttcgaagtaaaatgcaatcaatatttccaacaattcccaag

SEQ ID NO: 762166 - DNA, 120 bp, Artificial Sequence
  ENSG00000215712_4 (sequence is synthesized)
aactccgaatcggctgttgagtgggaggaaacattgaaatccaaatgagatgagcatggatgaatttcaaaatgcttgttacagaaaggggtggctctggagacaccatgacagcaaaag

SEQ ID NO: 762167 - DNA, 120 bp, Artificial Sequence
  ENSG00000215712_5 (sequence is synthesized)
gactgggactgatttctcccaggaacatgggcagattgctgactgaaccagtgcactggatagcattcagcctcatcacaggagagtatgtgtgtgcgtgctgggggagggtaaagtttt

SEQ ID NO: 762168 - DNA, 120 bp, Artificial Sequence
  ENSG00000215712_6 (sequence is synthesized)
cccacagttaagaagactatttaaaaatagtaattacaggaataacttccttatgtggaggggaccccataggaaatgattctgtttgtaacagttgaagcaaatttcatactaaaaaag

SEQ ID NO: 762169 - DNA, 120 bp, Artificial Sequence
  ENSG00000215712_7 (sequence is synthesized)
tttataataaaagtatgataagaaaatatttataaaacagaccccctaatagcaatagtactgcaatgtgtctaattaaaggagtttcaagagcctttcttgtcaatatatgacagaact

SEQ ID NO: 762170 - DNA, 120 bp, Artificial Sequence
  ENSG00000215712_8 (sequence is synthesized)
tggaagtcttattctgattagccagactacaaagtgacagtcacctggtaagtcctgtatggtaggaagtgggtgtggctctcgggtcctaaatgtggtctgtgctttacagccatcaca

SEQ ID NO: 762171 - DNA, 120 bp, Artificial Sequence
  ENSG00000215712_9 (sequence is synthesized)
cacatgctagttatttacctgatgcccttgcttgaaggccctataaattcttatacttaaaacaaaaagccagtaatgagttgtgatcaccccaaaaggcacagttgggctaaaataatg

SEQ ID NO: 762172 - DNA, 120 bp, Artificial Sequence
  ENSG00000215712_10 (sequence is synthesized)
atgatatcaggggtaaacatatttttttgagaagttggtctggatctctgaacactgacaatttgtcattttgtctcagttgtcaaagtaaaaaaagcccagttgtcatccgtcttcaat

SEQ ID NO: 762173 - DNA, 120 bp, Artificial Sequence
  ENSG00000215712_11 (sequence is synthesized)
atttttaaccagaaagtcacctgagtacggagtcccaatataaagtatttgggaccacctccctaacaaagctgttagggtaaattctgtgtgcacgcccaactccctcctgtcttccac

SEQ ID NO: 762174 - DNA, 120 bp, Artificial Sequence
  ENSG00000215712_12 (sequence is synthesized)
agtctcctacaaaaaaaacagatggagaataatgtctacatgcaattgtttttactgcaattgtattttaaaatattttcaagaagagaaatactttaatatgtcaatatgtccagagaa

SEQ ID NO: 762175 - DNA, 120 bp, Artificial Sequence
  ENSG00000215712_13 (sequence is synthesized)
aaaacctgtagttaaatatcagttgtgcaatttcttcctacttgcctaggctctaattagtcagcaatcaggtttaataaaggacatttgaaatttctgttatcatgaaaccttttattc

SEQ ID NO: 762176 - DNA, 120 bp, Artificial Sequence
  ENSG00000215712_14 (sequence is synthesized)
taagggagatttttaaatgaaatgacaagaacttaatgtaatacttttctctagaccatgttaccctgttaaaattgctgtattgttaatgaaacaggtgtaatcagcatctggaattca

SEQ ID NO: 762177 - DNA, 120 bp, Artificial Sequence
  ENSG00000215712_15 (sequence is synthesized)
tatgtaatctgttaaaaatccaagactgaaaggaaaggattgtgaaattggtcagtgaatgcgggtagcaaaaactcttcactgcctttcatttgtaactaaatctcctctgagaagaga

SEQ ID NO: 762178 - DNA, 120 bp, Artificial Sequence
  ENSG00000215712_16 (sequence is synthesized)
cctctgaatagaatgggcaccgcctgatccttttgtgcttcataaatgtgggtttccaacgtgcatgagatggccctcaaaccttgttacaacgatgcactttactcgtttgatgtgggg

SEQ ID NO: 762179 - DNA, 120 bp, Artificial Sequence
  ENSG00000215712_17 (sequence is synthesized)
ggaaaaagaatgggcactacctaaaactgtttacagctagaatctgggttttatttttcatagatggagaatgcctagtggtttctaaaggcctccactgggtggagaaaggagacttgc

SEQ ID NO: 762180 - DNA, 120 bp, Artificial Sequence
  ENSG00000215712_18 (sequence is synthesized)
ccacctgtctggagtgttaaaaggagaaatcattgttaactgattctgttaatggattcctgccttgtaacctcccgaagggcagggacccctctcagggccttgtaaactggtgtcagc

SEQ ID NO: 762181 - DNA, 120 bp, Artificial Sequence
  ENSG00000215712_19 (sequence is synthesized)
accgctgcagaggctgctgcacatcaggctgatggcagctaggccctaggaaggagccaggggccatggtgggggctctgctttcccacagggctggcacagaggaggcctagacatatg

SEQ ID NO: 762182 - DNA, 120 bp, Artificial Sequence
  ENSG00000215712_20 (sequence is synthesized)
ttgctgaaagagtgtcctaatactagagtggcatgcctcgtgtctacaaaacccttatatgtcacctctgctgtccttgaccgatggcaggggaactcccattagaatgatgatgaatcc

SEQ ID NO: 762183 - DNA, 120 bp, Artificial Sequence
  ENSG00000215712_21 (sequence is synthesized)
cctgcagaggggaggctggcagggacaaattccctaaaagagggaccaagcgtcagctccaattgcatcttaaaagcaaaggtgaagtaatgcacagatggaaatttaaaaagaaaacaa

SEQ ID NO: 762184 - DNA, 120 bp, Artificial Sequence
  ENSG00000215712_22 (sequence is synthesized)
gcagtatgactcaagtggtgtttttcacagtcagaacttgaatatcagtagatttcgtcatttgtctattccttttgtaccagaggcatattgttaaattggttaatggaaaggaaaaat

SEQ ID NO: 762185 - DNA, 120 bp, Artificial Sequence
  ENSG00000215712_23 (sequence is synthesized)
gttgaacagataatgttattctttatgagacgtaccatctgtgtattgagctctgaatgtccctggatatggaagagaggaaatgtgatggaatttcaagtttgccttctttgctgtctt

SEQ ID NO: 762186 - DNA, 120 bp, Artificial Sequence
  ENSG00000215712_24 (sequence is synthesized)
tatcttgggttgagtatgacaaacataatcacatttatctcctggagcataaagagttttaatcaccctattaaccaggatgacatttttcacagacttaaaaaggaatagaacagacat

SEQ ID NO: 762187 - DNA, 120 bp, Artificial Sequence
  ENSG00000215712_25 (sequence is synthesized)
tatctccctataagcaatccatttcatggaggctgagcactagaaatgctttaaaggatggataacgcaggccatttccatttcctgtctaagccaacattaaggaggctttcggtaagg

SEQ ID NO: 762188 - DNA, 120 bp, Artificial Sequence
  ENSG00000215712_26 (sequence is synthesized)
ctgttgcttccactgggtgagtgttaagctttacacttagagtctcagcgcccaaaagagctattagagaaagcacgggcagggaggagtggcttccgagaccccaggattcattcaagg

SEQ ID NO: 762189 - DNA, 120 bp, Artificial Sequence
  ENSG00000215712_27 (sequence is synthesized)
gaaaacatgtatcctggtaagttgctgctgccctgtgaaaaggagtccataggctgctgttatattcagagtcaagaaagtgtgggttcaggacaacctgagagtggaaagtgggggacg

SEQ ID NO: 762190 - DNA, 120 bp, Artificial Sequence
  ENSG00000215712_28 (sequence is synthesized)
ggagctgcctccgaagacgcccggcagcccatcaccaggaggaccatggcccaagggcatggaagcatgtggctgctgagagggtcgtgggccatctccaccaccaccctcgcgtcaggg

SEQ ID NO: 762191 - DNA, 120 bp, Artificial Sequence
  ENSG00000215712_29 (sequence is synthesized)
catgggcccaggctggcgttaagggcactttgcctgcttagtcaaaaggtggcatcgaatcacctgggctgtcacatgttttgtttagtttcatggatagtatgggaccaaacttgcaaa

SEQ ID NO: 762192 - DNA, 120 bp, Artificial Sequence
  ENSG00000215712_30 (sequence is synthesized)
ttaatcattgcaatctaaggggaaaatagaagaaattaaggtgggggtggggggacggggagcccatggggataaaagtaattaaaatccattgaatttagctatttcacttggggcaac

SEQ ID NO: 762193 - DNA, 120 bp, Artificial Sequence
  ENSG00000215712_31 (sequence is synthesized)
atttaatctccaagattaaatcttggtttatggggaaggttatatattttcatctcatttttatgtatcatctttaagacaaattgttaagtacaaatgaaaatcaggtaacatacaaag

SEQ ID NO: 762194 - DNA, 120 bp, Artificial Sequence
  ENSG00000215712_32 (sequence is synthesized)
gcatttcatcaaatagttaaatttcctatgaaagttagtaaaatacatatttttataataccatgttcaagtgaagtgtttttgctttctgccaagagtcattaaatgatatagcaagta

SEQ ID NO: 762195 - DNA, 120 bp, Artificial Sequence
  ENSG00000215712_33 (sequence is synthesized)
agagtacgtgactaaattcttacaaataactagacaacttcttattactaataaatacaatttttgaaggtggtaaaacttcaaatataattaagtaatgactaatttatagctaatgtt

SEQ ID NO: 762196 - DNA, 120 bp, Artificial Sequence
  ENSG00000215712_34 (sequence is synthesized)
ctatataaattgacattagggcgagtgcagtgggttatgcctgtaatcccagcaccttgggagcctgcggcaggcaaatcacttgagctctgaagtccaaaaccagcctgggcaatgtaa

SEQ ID NO: 762197 - DNA, 120 bp, Artificial Sequence
  ENSG00000215712_35 (sequence is synthesized)
ttagctgggtgtggtggcatgcgcctatagtcctagctactcagaaggctgagggaggaggatcacctgagcctcacaggctgaggctgcagtgtgccaagatcattgcgcttcagcctt

SEQ ID NO: 762198 - DNA, 120 bp, Artificial Sequence
  ENSG00000215712_36 (sequence is synthesized)
ccaagatcattgcgcttcagccttggcagcggggtaagaccctgtctcaaaaacaaagtagaataaataaacaaattgacattagcgatttgttcaataaaattattaatttggaacaac

SEQ ID NO: 762199 - DNA, 68 bp, Artificial Sequence
  ENSG00000215717_0 (sequence is synthesized)
acaggcatgagccaccgcgcccggctaattttgtatacctcaggtgatccgcctggctcggcctccca

SEQ ID NO: 762200 - DNA, 120 bp, Artificial Sequence
  ENSG00000215717_1 (sequence is synthesized)
ccaccgcgcccggccgcgacttgtttttgttacaaggttcctcatttcatttgcaacgttcagacgcagtctgactagatttccatccggagtaaggaagagcagctcaagggcagtcac

SEQ ID NO: 762201 - DNA, 120 bp, Artificial Sequence
  ENSG00000215717_2 (sequence is synthesized)
ggaggccgcaggtgcggcttcttcacccgcggtgctggagttctctcaagtggaagcccaggacgatgaaaacctcataggtaggctgctgcttacacacagcagccgccacggcgcaaa

SEQ ID NO: 762202 - DNA, 120 bp, Artificial Sequence
  ENSG00000215717_3 (sequence is synthesized)
ataaactacaaaactacaagcctttaccttttcaaacacactgacgcgggccagccccagccctacgcccgcaggggcacgcagaaaagacttagttaccacggccaagtacgaagcctt

SEQ ID NO: 762203 - DNA, 120 bp, Artificial Sequence
  ENSG00000215717_4 (sequence is synthesized)
cgagatagcgttcttcttaccctacgtaaacacgcagtttcccgagctcgacaatcggctagccactcctgatagcgttcggcgctcgcctctcggcccttgctcctgcgtactacggct

SEQ ID NO: 762204 - DNA, 120 bp, Artificial Sequence
  ENSG00000215717_5 (sequence is synthesized)
tcttccagtcacctcggcccggatcgggaagtgtcaagcgggcgctcccccatctccgccgctattaccactgaacccggaccccctacccaggtccagggccagccgccatgacgaacg

SEQ ID NO: 762205 - DNA, 120 bp, Artificial Sequence
  ENSG00000215717_6 (sequence is synthesized)
tgtactccttggatgggattctggtgtttggtttgctctttgtttgcacctgtgcctacttcaagaaagtacctcgtctcaaaacctggctgctatcagagaagaagggtgtttggggtg

SEQ ID NO: 762206 - DNA, 120 bp, Artificial Sequence
  ENSG00000215717_7 (sequence is synthesized)
tgttttacaaagccgctgtgattggaaccaggctgcatgctgctgtggcaattgcttgtgttgtaatggccttttacgtcctgtttataaaatgaattccaaagcacccaagtcatcaac

SEQ ID NO: 762207 - DNA, 120 bp, Artificial Sequence
  ENSG00000215717_8 (sequence is synthesized)
tgccaaccaaggggacggggatgaagaacctgttggagacctgaacccagtgtaggagagttcagctgaaatcatcggtccccaggatgacaccacagcatctgcccctgctatatgtgg

SEQ ID NO: 762208 - DNA, 120 bp, Artificial Sequence
  ENSG00000215717_9 (sequence is synthesized)
ggaaaactcatggtcacgaacattatttatgcttcaggggactacagaaagccagcttcctttgatctatgtgtaaatcagtccttggcagagtgcatataatgtccggataaattacac

SEQ ID NO: 762209 - DNA, 120 bp, Artificial Sequence
  ENSG00000215717_10 (sequence is synthesized)
ccctcggtgataagattacatacctccttcataaaaacctgtcatcctgttttgttcttcagctcctcatcaggatcttttcaaactgaggctcattagggaaggaactaggctgtgttc

SEQ ID NO: 762210 - DNA, 120 bp, Artificial Sequence
  ENSG00000215717_11 (sequence is synthesized)
agacttcttttgaagagagagaattttcaagacttcttttcactctttgatttggatctggcaaattggggaggggatgctgggtgggaaacagttatgaaatgccaagaaattctttgg

SEQ ID NO: 762211 - DNA, 120 bp, Artificial Sequence
  ENSG00000215717_12 (sequence is synthesized)
ttatctttcatgtacccatccgggaacataaaagagaggcatagtgctcattgcaaaaagagaacagatgaagtagctgtgttatgtgctggtatcttgagagttttgccaagaaaatct

SEQ ID NO: 762212 - DNA, 120 bp, Artificial Sequence
  ENSG00000215717_13 (sequence is synthesized)
gggcctacataaaatttgagaattatctgtgtgatgagaccagaaagcagtggcttagacaagaaaaaatctttctgttcaccagtatcctcaaatggagacttcacttgatcagatggt

SEQ ID NO: 762213 - DNA, 120 bp, Artificial Sequence
  ENSG00000215717_14 (sequence is synthesized)
atatgaaaaatgaatcaactattgctatttcgtaaaacctttttatattttctaaatttacttagtgctaaatactgttactcagttttaaatgccacgactaggggaaaaagaaactat

SEQ ID NO: 762214 - DNA, 120 bp, Artificial Sequence
  ENSG00000215717_15 (sequence is synthesized)
tgaagaaataattgtttagtatatttgcagttggggtagaagaaagaaatctagtatattgattcatatactagtaaattcatctagtataagaacttgtgatgttagattgaagttttg

SEQ ID NO: 762215 - DNA, 120 bp, Artificial Sequence
  ENSG00000215717_16 (sequence is synthesized)
tcatcttataaaagacaacaaacttattttctgtttaagtctgagtgttatggcaatttttagttgattacttatttttcttagccaaattttaattttcttcatattgcattgctcttt

SEQ ID NO: 762216 - DNA, 120 bp, Artificial Sequence
  ENSG00000215717_17 (sequence is synthesized)
agttgtctctggaaattctatttactttaaggacatgagaaattcaaatgagagaagttgctgatattcatcagtgtgtttggacagttcatagggtccacaaatcaaatgaggttgttt

SEQ ID NO: 762217 - DNA, 120 bp, Artificial Sequence
  ENSG00000215717_18 (sequence is synthesized)
cctgaagtagaagaaaacagaactttgcaattgatactgaagtactttgccatggagttagtaactcctgagcagaccattttagatggctcagcatttggcaggaagacttctccattc

SEQ ID NO: 762218 - DNA, 120 bp, Artificial Sequence
  ENSG00000215717_19 (sequence is synthesized)
cctgcttatatctatggaaggatcagctgttggatgtctagaacttctctatttaaaaaaaaagagtaggtctaaaattaaattattataagcaagcatagacatgggtcttccagttga

SEQ ID NO: 762219 - DNA, 120 bp, Artificial Sequence
  ENSG00000215717_20 (sequence is synthesized)
attgtccattaccgtaaaacttaatggtggacaagttagctgtggttgattcctgtgtggcagtaaattgtcttctgtctgcttactccaaataataaaagctgctaggaagtttagatt

SEQ ID NO: 762220 - DNA, 120 bp, Artificial Sequence
  ENSG00000215717_21 (sequence is synthesized)
ttgaaataggcagtttaatgctttgagggtttctagaaatacagaaagtcatcaagtaaacactgcatgtctaatcatctcagagttgtggctgttatctcttcaggaattggtccacag

SEQ ID NO: 762221 - DNA, 120 bp, Artificial Sequence
  ENSG00000215717_22 (sequence is synthesized)
ggtaaatttcaacaattcatacgttttccattgtcatttctgaggacctttgagatgagagaaaggaaatctagtggaacaggaaagagagttacaccttgtgggtgtgagtttgggacc

SEQ ID NO: 762222 - DNA, 120 bp, Artificial Sequence
  ENSG00000215717_23 (sequence is synthesized)
tgttggcagaagggaatgtcactccctggaaacaggttcagcatgtttgcacttgttattttgtagctttaatgatttttgttttctaatagggcaaatgtctctaagcttggtgtttag

SEQ ID NO: 762223 - DNA, 120 bp, Artificial Sequence
  ENSG00000215717_24 (sequence is synthesized)
agctgcttcatattttaaactagttccattccacagttctagttcaaaccagtttttacagcctcctgggtgggtcgtcttgacccaaactcttgtgttgttacattttgagaggttttc

SEQ ID NO: 762224 - DNA, 120 bp, Artificial Sequence
  ENSG00000215717_25 (sequence is synthesized)
ataccagaatgtaccaaaaagtgcacaaggtaaaggtaatttacagccagaaacaaatatacatttgtttcatttcttgactttccctaagcagataagcagaaacttgtttaactcatt

SEQ ID NO: 762225 - DNA, 120 bp, Artificial Sequence
  ENSG00000215717_26 (sequence is synthesized)
actttgtttgatgtgtcttacatatttttgactaaaagttatagaatgttattcctctgggggaatcttttacaggtggaggaatggggatagcagtattgcctcagattcaaactggca

SEQ ID NO: 762226 - DNA, 120 bp, Artificial Sequence
  ENSG00000215717_27 (sequence is synthesized)
tcaccataaaccctgtaggccagggtggaatgaagtcagctcctttttatagttgaaatacaattttttattcaccattgtctgcacaaatccttgaaaataaacctttttttccctaca

SEQ ID NO: 762227 - DNA, 120 bp, Artificial Sequence
  ENSG00000215717_28 (sequence is synthesized)
cccggatcgggaagtgtcaagcgggcgctcccccatctccgccgctattaccactgaacccggaccccctacccaggtccagggccagccgccatgacgaacgacctggcactgaagact

SEQ ID NO: 762228 - DNA, 120 bp, Artificial Sequence
  ENSG00000215717_29 (sequence is synthesized)
tgccatctctggacagtgtggagctacaaagtagggagtacagtgagctgggattatatttggtttcatttttagaaaaaaatccctccgattgggtctgagagtctggaaaattaatca

SEQ ID NO: 762229 - DNA, 89 bp, Artificial Sequence
  ENSG00000215717_30 (sequence is synthesized)
aatccctccgattgggtctgagagtctggaaaattaatcattctccaaagttgagggaagaggtaaaagttaaaatttgctgggtgtga

SEQ ID NO: 762230 - DNA, 77 bp, Artificial Sequence
  ENSG00000215717_31 (sequence is synthesized)
caaggcaggaggattgcttgtgtccaggagttgtagatcagcccgggcaacacagtgagaccccatttctacaaaat

SEQ ID NO: 762231 - DNA, 81 bp, Artificial Sequence
  ENSG00000215717_32 (sequence is synthesized)
actccagcccatatttaaaaacataattgtctattttagcatccagatgatttttgtattctccatggagtaaaagtatac

SEQ ID NO: 762232 - DNA, 120 bp, Artificial Sequence
  ENSG00000215717_33 (sequence is synthesized)
tccagatgatttttgtattctccatggagtaaaagtatacacatcaaatcattttaggctggggtggaattcctcccttcagtgggaaaaaaatttttctacggaaaatttttcttgatt

SEQ ID NO: 762233 - DNA, 120 bp, Artificial Sequence
  ENSG00000215717_34 (sequence is synthesized)
ttctgtaaatggtacattggagtctgttttaaggtttgagttaattaactcagatgcttttttgtactttttatttgaggcacattcatttggaatcctatctacctaaatttttttttg

SEQ ID NO: 762234 - DNA, 120 bp, Artificial Sequence
  ENSG00000215784_0 (sequence is synthesized)
aattcaaactgataccgggttggagaggcaggaaaagcggaagagggagcgaaaaccaacgtgttcggtgacagaccccagcgccgactgagcctctaaagcgacttcagctctgcccca

SEQ ID NO: 762235 - DNA, 120 bp, Artificial Sequence
  ENSG00000215784_1 (sequence is synthesized)
ccaacaccaccgcgcgcccgggaacagccgctccgggaagaaacctgaggggactgcggggggcacgagggacagctgagggaagggaggacgcgagagaaacagcgcgagcacgctgag

SEQ ID NO: 762236 - DNA, 120 bp, Artificial Sequence
  ENSG00000215784_2 (sequence is synthesized)
ggccgggggttgccaggagaggggcccgcggacccgcagagcggaggaaggtccgggagaaaaggggcgggacggaggagaatccgggatcgcctggcagaaaaagagaagggagtttct

SEQ ID NO: 762237 - DNA, 120 bp, Artificial Sequence
  ENSG00000215784_3 (sequence is synthesized)
gaatcctgggaagaggaggcgtgggtagggacgcttagcccgagatccgacagcagggaaccggagcgctccgggggaggggcttaatgctggggaagggatgtcttaaaagaggagaag

SEQ ID NO: 762238 - DNA, 120 bp, Artificial Sequence
  ENSG00000215784_4 (sequence is synthesized)
ctttaaattagacgatcggagaaggctgagggaattgctatgaaggggcgggagctgaagtgtagaggactcctttagacagcagaaagggaaagccgttgagaagttcccttcaaactc

SEQ ID NO: 762239 - DNA, 120 bp, Artificial Sequence
  ENSG00000215784_5 (sequence is synthesized)
cacctgcctcctctccaattcaaactccactcccttctccaaaagttaaaaggaaagccaagtttaccacgctcccctgttcctactcaataaatacttcttctactccgccaccgggaa

SEQ ID NO: 762240 - DNA, 120 bp, Artificial Sequence
  ENSG00000215784_6 (sequence is synthesized)
aacagaaaaaaaaactaatttccttcccaatattaggacttagaaaagctctaggtcccgcaatttgaattttagcctaggggaatcaaaatagtaggagcattactcttgtttcctttt

SEQ ID NO: 762241 - DNA, 120 bp, Artificial Sequence
  ENSG00000215784_7 (sequence is synthesized)
tcaaaatcccacacctcatccttcctgcgacgccatgtccaccaacatttgtagtttcaaggacaggtgcgtgtccatcctgtgttgcaaattctgtaaacaagtgctcagctctagggg

SEQ ID NO: 762242 - DNA, 120 bp, Artificial Sequence
  ENSG00000215784_8 (sequence is synthesized)
aatgaaggctgttttgctggctgatactgaaatagaccttttctctacagacatccctcctaccaacgcagtggacttcactggaagatgctatttcaccaaaatctgcaaatgtaaact

SEQ ID NO: 762243 - DNA, 120 bp, Artificial Sequence
  ENSG00000215784_9 (sequence is synthesized)
gaaggacatcgcatgtttaaaatgtgggaacattgtaggttatcatgtgattgttccatgtagttcctgtcttctttcctgcaacaacagacacttctggatgtttcacagccaggcagt

SEQ ID NO: 762244 - DNA, 120 bp, Artificial Sequence
  ENSG00000215784_10 (sequence is synthesized)
ccacaggtgtaaacgtcctacttcggggcaacttgccagagatagaagagagtacagatgaagatgtgttaaatatctcagcagaggagtgtattagataaatggaattatgatatatat

SEQ ID NO: 762245 - DNA, 120 bp, Artificial Sequence
  ENSG00000215784_11 (sequence is synthesized)
gatatacaaacttttttctatttaaaaatatattaatggatcaactttaaaattgttagttgccagtgatcttttttggaaaacaaaaatggggcatttgttgatttatttattttctgt

SEQ ID NO: 762246 - DNA, 120 bp, Artificial Sequence
  ENSG00000215784_12 (sequence is synthesized)
ctctaattagttacctcagtttgattgaagccagtggagttgtgcttttcctctacttctacttcctctcccccacctttttctgcccagtgtaggtgtattcttaaattcagacgggaa

SEQ ID NO: 762247 - DNA, 120 bp, Artificial Sequence
  ENSG00000215784_13 (sequence is synthesized)
gattctttcacatatcactcagttacctcccaatctgggggagtttttcttacaacttgataccagataccattaattttacattcctgaataaaggcctagtacccacgcatatttcaa

SEQ ID NO: 762248 - DNA, 120 bp, Artificial Sequence
  ENSG00000215784_14 (sequence is synthesized)
ccatgcatatatcaagttcaaccgagttttaataggggattaaaaaaacaagctgttaggtttccatgggcactggttctcataggttctattggtgataactgctttaacatggagcaa

SEQ ID NO: 762249 - DNA, 120 bp, Artificial Sequence
  ENSG00000215784_15 (sequence is synthesized)
gagtttgtgaatcaggaaatagaataaattaaaatttaaaatatatagaggaatcctcttgattgctcagcatgatgttagataaatgagtttgtcagaaaatatcagtatacgctgttt

SEQ ID NO: 762250 - DNA, 120 bp, Artificial Sequence
  ENSG00000215784_16 (sequence is synthesized)
accaatgttatttatttacattcttctaaagccattatggatattgtattatgagagctaaacctaaataagttatcctgttccctaggaccttctctgtaaatagtgaattttagacga

SEQ ID NO: 762251 - DNA, 120 bp, Artificial Sequence
  ENSG00000215784_17 (sequence is synthesized)
gtggtctgtcctaaatcttaaatagaaaaaaaaactaaagcgatttgcttaagccattgtacattataaagagctgttttgttttgctttgctttgctttgttttgtttttttaaagctg

SEQ ID NO: 762252 - DNA, 120 bp, Artificial Sequence
  ENSG00000215784_18 (sequence is synthesized)
cattcagagctacaaaggaataggaaagtagggtagtgttggattctggttttatgtaactctaaaataaatgtatctctttaatatctcagttgtagggattttgtcaataccaaagca

SEQ ID NO: 762253 - DNA, 120 bp, Artificial Sequence; identical to SEQ ID NO: 706489
  ENSG00000215784_19 (sequence is synthesized)

SEQ ID NO: 762254 - DNA, 120 bp, Artificial Sequence
  ENSG00000215788_0 (sequence is synthesized)
ctgaaggcggaaccacgacgggcagagagcacggagccgggaagcccctgggcgcccgtcggagggctatggagcagcggccgcggggctgcgcggcggtggcggcggcgctcctcctgg

SEQ ID NO: 762255 - DNA, 120 bp, Artificial Sequence
  ENSG00000215788_1 (sequence is synthesized)
tgctgctgggggcccgggcccagggcggcactcgtagccccaggtgtgactgtgccggtgacttccacaagaagattggtctgttttgttgcagaggctgcccagcggggcactacctga

SEQ ID NO: 762256 - DNA, 120 bp, Artificial Sequence
  ENSG00000215788_2 (sequence is synthesized)
aggccccttgcacggagccctgcggcaactccacctgccttgtgtgtccccaagacaccttcttggcctgggagaaccaccataattctgaatgtgcccgctgccaggcctgtgatgagc

SEQ ID NO: 762257 - DNA, 120 bp, Artificial Sequence
  ENSG00000215788_3 (sequence is synthesized)
aggcctcccaggtggcgctggagaactgttcagcagtggccgacacccgctgtggctgtaagccaggctggtttgtggagtgccaggtcagccaatgtgtcagcagttcacccttctact

SEQ ID NO: 762258 - DNA, 120 bp, Artificial Sequence
  ENSG00000215788_4 (sequence is synthesized)
gccaaccatgcctagactgcggggccctgcaccgccacacacggctactctgttcccgcagagatactgactgtgggacctgcctgcctggcttctatgaacatggcgatggctgcgtgt

SEQ ID NO: 762259 - DNA, 120 bp, Artificial Sequence
  ENSG00000215788_5 (sequence is synthesized)
cctgccccacgccacccccgtcccttgcaggagcaccctggggagctgtccagagcgctgtgccgctgtctgtggctggaggcagagtaggtgtgttctgggtccaggtgctcctggctg

SEQ ID NO: 762260 - DNA, 120 bp, Artificial Sequence
  ENSG00000215788_6 (sequence is synthesized)
tggttactgcagatgaagctgggatggaggctctgaccccaccaccggccacccatctgtcacccttggacagcgcccacacccttctagcacctcctgacagcagtgagaagatctgca

SEQ ID NO: 762261 - DNA, 120 bp, Artificial Sequence
  ENSG00000215788_7 (sequence is synthesized)
ccgtccagttggtgggtaacagctggacccctggctaccccgagacccaggaggcgctctgcccgcaggtgacatggtcctgggaccagttgcccagcagagctcttggccccgctgctg

SEQ ID NO: 762262 - DNA, 120 bp, Artificial Sequence
  ENSG00000215788_8 (sequence is synthesized)
cgcccacactctcgccagagtccccagccggctcgccagccatgatgctgcagccgggcccgcagctctacgacgtgatggacgcggtcccagcgcggcgctggaaggagttcgtgcgca

SEQ ID NO: 762263 - DNA, 120 bp, Artificial Sequence
  ENSG00000215788_9 (sequence is synthesized)
cgctggggctgcgcgaggcagagatcgaagccgtggaggtggagatcggccgcttccgagaccagcagtacgagatgctcaagcgctggcgccagcagcagcccgcgggcctcggagccg

SEQ ID NO: 762264 - DNA, 120 bp, Artificial Sequence
  ENSG00000215788_10 (sequence is synthesized)
tttacgcggccctggagcgcatggggctggacggctgcgtggaagacttgcgcagccgcctgcagcgcggcccgtgacacggcgcccacttgccacctaggcgctctggtggcccttgca

SEQ ID NO: 762265 - DNA, 120 bp, Artificial Sequence
  ENSG00000215788_11 (sequence is synthesized)
gaagccctaagtacggttacttatgcgtgtagacattttatgtcacttattaagccgctggcacggccctgcgtagcagcaccagccggccccacccctgctcgcccctatcgctccagc

SEQ ID NO: 762266 - DNA, 120 bp, Artificial Sequence
  ENSG00000215788_12 (sequence is synthesized)
caaggcgaagaagcacgaacgaatgtcgagagggggtgaagacatttctcaacttctcggccggagtttggctgagatcgcggtattaaatctgtgaaagaaaacaaaacaaaacaaaaa

SEQ ID NO: 762267 - DNA, 120 bp, Artificial Sequence
  ENSG00000215788_13 (sequence is synthesized)
cgggtgaggaggggggcaaccacccaacacccaccagctgctttcagtgttctgggtccaggtgctcctggctggccttgtggtccccctcctgcttggggccaccctgacctacacata

SEQ ID NO: 762268 - DNA, 120 bp, Artificial Sequence
  ENSG00000215788_14 (sequence is synthesized)
gcggccgcggggctgcgcggcggtggcggcggtgagttgagacgcaggaggctaggggcagctttgagccctgtcccaagagcctcggtgaaggaaggggccccgggcgcgtctccactc

SEQ ID NO: 762269 - DNA, 120 bp, Artificial Sequence
  ENSG00000215788_15 (sequence is synthesized)
caagcctcactgggggctgggttggccgccctttccgatctcgttaaaggctcctccagggcgtagcccttccactgagaggaaacccctcccaggagggtctgggggccccaggcagag

SEQ ID NO: 762270 - DNA, 120 bp, Artificial Sequence
  ENSG00000215788_16 (sequence is synthesized)
cattatcagtgtccctcccccaacagaaagcatgggtgggggtgggggcgctgctggattcctgctctggtggaggggaaacttgtgaggggctggtaagcgccccctccgaagcctggt

SEQ ID NO: 762271 - DNA, 120 bp, Artificial Sequence
  ENSG00000215788_17 (sequence is synthesized)
gtgtgcgcggggggaaggaagttagtttcctctccacccatgggcaccccttctgcccggggcctgggaagtgggctgctctgtgggcaaatgctggggcctctgaaatggaggagacgc

SEQ ID NO: 762272 - DNA, 120 bp, Artificial Sequence
  ENSG00000215788_18 (sequence is synthesized)
tctgtgagtacccccacccagggctctctactcccagacccccttctccctgcctgacccactcctgtcccatggtgacgcatgcctctcctggattgcaggttcccgcagagatactga

SEQ ID NO: 762273 - DNA, 120 bp, Artificial Sequence
  ENSG00000215788_19 (sequence is synthesized)
ggtggggcaggtgctgctggttcaggaataggaagaggggatagggaggagggagccttggccctgtgatgggtgggccccacttcaggcaaacttagatggcaaaagagcaatctggat

SEQ ID NO: 762274 - DNA, 120 bp, Artificial Sequence
  ENSG00000215788_20 (sequence is synthesized)
ccgccttagccagatacataagggtatttgccttcactttcagccagcattccccccagcgatcctagccagatattacagatgatttgtcacttacacagagagtcacattgatatagc

SEQ ID NO: 762275 - DNA, 120 bp, Artificial Sequence
  ENSG00000215788_21 (sequence is synthesized)
tattaaatattaaatctattaaataaataaatacaaagggctgagagtcaggactgtgctgctagttctctaggggatcttgggcaagtgcagagaattcgcgtctctgatgtgtggtgt

SEQ ID NO: 762276 - DNA, 120 bp, Artificial Sequence
  ENSG00000215788_22 (sequence is synthesized)
cgcgtctctgatgtgtggtgtccctttctcaacatgggatgttagcagctaattcacaggcctttgatcagaggtaagggactttctgtagctattcaagtctttttttttttttttttt

SEQ ID NO: 762277 - DNA, 120 bp, Artificial Sequence
  ENSG00000215788_23 (sequence is synthesized)
ggcatgagccaccgcgcccggcctccattcaagtctttattgaatatctgctatgttctacacactgttctaggtgctggggatgcaacaggggacaaaataggcaaaatccctgtcctt

SEQ ID NO: 762278 - DNA, 120 bp, Artificial Sequence
  ENSG00000215788_24 (sequence is synthesized)
ccttttggggttgacattctagtgactcttcatgtagtctagaagaagctcagtgaatagtgtctgtggttgttaccagggacacaatgacaggaacattcttgggtagagtgagaggcc

SEQ ID NO: 762279 - DNA, 120 bp, Artificial Sequence
  ENSG00000215788_25 (sequence is synthesized)
tggggagggaagggtctctaggatggagcagatgctgggcagtcttagggagcccctcctggcatgcaccccctcatccctcaggccacccccgtcccttgcaggagcaccctggggagc

SEQ ID NO: 762280 - DNA, 120 bp, Artificial Sequence
  ENSG00000215788_26 (sequence is synthesized)
tctgggctgccttctggagctggaagatcaagccttactatgatccctggagcttggcacgcggccagcaccgggtagccctagtggacagaggtgttgggagcagagtcatcagtggat

SEQ ID NO: 762281 - DNA, 120 bp, Artificial Sequence
  ENSG00000215788_27 (sequence is synthesized)
tcttggcgtttctgcggggctggggtgttaagtggactggacttttctcgagggattcgaaggggacgggaatcttgtcaccccgggatctggcacccatggtggagtccagtgtggcct

SEQ ID NO: 762282 - DNA, 120 bp, Artificial Sequence
  ENSG00000215788_28 (sequence is synthesized)
tagctcccaagcctgcccctcccgagtccactctggctcaattaccccgagaaggagagagcaagtcgcggccacagcgagtgagtgaaccggagcccagatgagagcgctttaatgggg

SEQ ID NO: 762283 - DNA, 120 bp, Artificial Sequence
  ENSG00000215788_29 (sequence is synthesized)
ctgcgaggtggcggagacagggtcgggatggggtgcagcagttggagacacagggtcagggcccctcatcctctattcactccaccggggcagtgaaagggtcccggcagcgagtgggtc

SEQ ID NO: 762284 - DNA, 120 bp, Artificial Sequence
  ENSG00000215790_0 (sequence is synthesized)
tggctctggggcactgaggagcggcgcccgcggggcagcgaggagcccgatgcagggttctgcgcgtcatttccggtcccgcgggcgccccgtgaagcccacctggatccgccagcgctg

SEQ ID NO: 762285 - DNA, 120 bp, Artificial Sequence
  ENSG00000215790_1 (sequence is synthesized)
tgccactccccagtgccgagctccgagctgtctccgcggcctcgcgcccggcccctccaccgcgcacctcttaggccccgcccgccagcgtccctttgttgtgaaggcgccggggcctag

SEQ ID NO: 762286 - DNA, 120 bp, Artificial Sequence
  ENSG00000215790_2 (sequence is synthesized)
cgctatgcctgcggcggagactgcatcaggctctcgcgtctgcttctacgctttgcctgggagaggccctggtggcctcgttcctggcgcccggagtccctgctgcggccccacccccgg

SEQ ID NO: 762287 - DNA, 120 bp, Artificial Sequence
  ENSG00000215790_3 (sequence is synthesized)
gcggtcacggtgacccatgctgcccagcctggaggtaaaatcgttcgtggctgtggcttcagcatgtcgtcctcggtgaaaaccccagcactggaagagctggttcctggctccgaagag

SEQ ID NO: 762288 - DNA, 120 bp, Artificial Sequence
  ENSG00000215790_4 (sequence is synthesized)
aagccgaaaggcaggtcgcctctcagctggggctctctgtttggtcaccgaagtgagaagattgtttttgccaagagcgacggcggcacagatgagaacgtactgaccgtcaccatcacg

SEQ ID NO: 762289 - DNA, 120 bp, Artificial Sequence
  ENSG00000215790_5 (sequence is synthesized)
gagaccacggtcatcgagtcagacttgggtgtgtggagctcgcgggcgctgctctacctcacgctgtggttcttcttcagcttctgcacgctcttcctcaacaagtacatcctgtccctg

SEQ ID NO: 762290 - DNA, 120 bp, Artificial Sequence
  ENSG00000215790_6 (sequence is synthesized)
ctgggaggcgagcccagcatgctaggtgcggtgcagatgctgtccaccacggttatcgggtgtgtgaaaaccctcgttccttgctgtttatatcagcacaaggcccggctttcctaccca

SEQ ID NO: 762291 - DNA, 120 bp, Artificial Sequence
  ENSG00000215790_7 (sequence is synthesized)
cccaacttccttatgacgatgctgtttgtgggtctgatgaggtttgcaactgtggttttgggtttggtcagcctgaaaaatgtggcggtttcgtttgctgagacggtgaagagctccgcc

SEQ ID NO: 762292 - DNA, 120 bp, Artificial Sequence
  ENSG00000215790_8 (sequence is synthesized)
cccatcttcacggtgatcatgtctcggatgattctgggggagtacacaggacgtcccagtgatcgggaggagcgggaagagcttcagctacaaccaggacgtggtgctgctgcttctgac

SEQ ID NO: 762293 - DNA, 120 bp, Artificial Sequence
  ENSG00000215790_9 (sequence is synthesized)
agacggagtcctgttccaccttcagagcgtcacggcgtacgccctcatggggaaaatctccccggtgactttcaggtcccgcaggccctgcaccgagtcgccttgtccatggcgctgccc

SEQ ID NO: 762294 - DNA, 120 bp, Artificial Sequence
  ENSG00000215790_10 (sequence is synthesized)
tgccccatgcttcctgcgtcctgagtaggaggtatctccgagacaggaaaagtggccgctctctctcactttttctggaactcatggtggtctcctgggcttggtcactgtctctcacca

SEQ ID NO: 762295 - DNA, 120 bp, Artificial Sequence
  ENSG00000215790_11 (sequence is synthesized)
gcatgtttctttgtgcggtcaggaattatttccaaatgctcctgaagcctagtgttttagtgaacattagtgattgttagcagtggttcaaaaaaaaaaaactttttttttttttttgag

SEQ ID NO: 762296 - DNA, 81 bp, Artificial Sequence
  ENSG00000215790_12 (sequence is synthesized)
tttttttttgagacagagtcttgctctgtgacccaggctggagtgtgctcaagtgatcctctcgcctcagcctcctgagta

SEQ ID NO: 762297 - DNA, 90 bp, Artificial Sequence
  ENSG00000215790_13 (sequence is synthesized)
tacaggtgtccaccaccacgctgggctaaactttttttgagagatgggattttgctgtgttgtccaggctgatcttgaactcctggcctc

SEQ ID NO: 762298 - DNA, 87 bp, Artificial Sequence
  ENSG00000215790_14 (sequence is synthesized)
gatccacccaccttggcctcccaaagcgctaggactgcaattatgagccaccacactcagcccagccagagtctcacgctgttgccc

SEQ ID NO: 762299 - DNA, 70 bp, Artificial Sequence
  ENSG00000215790_15 (sequence is synthesized)
acctcccaggttcaagacattttcctgcctcagtctcccgagaagctgggattacaggtgcctgccacca

SEQ ID NO: 762300 - DNA, 120 bp, Artificial Sequence
  ENSG00000215790_16 (sequence is synthesized)
gccaccgcatgttgcccaattatttttcagtagtatttttttgttttatttaatttcattttataagagcagtgaattaagtacacattatggaaagtttgcaaagggtacttcctgtca

SEQ ID NO: 762301 - DNA, 120 bp, Artificial Sequence
  ENSG00000215790_17 (sequence is synthesized)
ccctttttttgcacggtcctaacactgtgtacttggtacccttttcacccaacaaatgatcttaagggattgctttccctggggctacaaaggcactgtgagtgtgtgggagatgttctt

SEQ ID NO: 762302 - DNA, 90 bp, Artificial Sequence
  ENSG00000215790_18 (sequence is synthesized)
ttgagacagagtctcgctctgtcacccaaactggagtgcagtgctcctcccgcgttcaagctattgtcctgcctcagccttccaagtagc

SEQ ID NO: 762303 - DNA, 120 bp, Artificial Sequence
  ENSG00000215790_19 (sequence is synthesized)
tgatccgcctgcctcggccatccacagtgctgggattacaggcatgcgccacggcgcccggcctcctacagtgctgggattacaggctgagcccccacgcccagcttcccatagtgctgg

SEQ ID NO: 762304 - DNA, 120 bp, Artificial Sequence
  ENSG00000215790_20 (sequence is synthesized)
acaggcgtgagcccccgtgcctggcctcccacagtgctgggattctagcacccgacctcccacagtgctgggatgacaggccgagcccccgtgcccagcctcctacctgtggtggtttcc

SEQ ID NO: 762305 - DNA, 120 bp, Artificial Sequence
  ENSG00000215790_21 (sequence is synthesized)
ttccagccctgaggttgaggacaaacctctcgtgtttaacttgggaggagatgtgtacgttccttttcttttttggactctgagtatgaggcaggctgttctgaggtccccgtggggtga

SEQ ID NO: 762306 - DNA, 120 bp, Artificial Sequence
  ENSG00000215790_22 (sequence is synthesized)
gcctgtctgtcctccctcagagcccaccgttcctatcatcatctagcacctgtccggttccccacgtgagccttgggcaggacgctgcagtgttgatggtttgggttacgtggcgtttac

SEQ ID NO: 762307 - DNA, 120 bp, Artificial Sequence
  ENSG00000215790_23 (sequence is synthesized)
ctgggcgccgtccttgctgaaaaaggaaacgtccacactgaatgtttctggggcgcgtggtgtgtgtcaggcgcccaccctgtcccactctccccaagggacagtagtacggcacactgg

SEQ ID NO: 762308 - DNA, 120 bp, Artificial Sequence
  ENSG00000215790_24 (sequence is synthesized)
ggaggcctgaggagtggctactggagccgtgtgttaggcagaggcttctgaccatgtctgagctctttacccccaatctcgcagccggcggattcccatgcccggtgcagcctgttgcca

SEQ ID NO: 762309 - DNA, 120 bp, Artificial Sequence
  ENSG00000215790_25 (sequence is synthesized)
gccagcctttgagacccagagctccagggcttgtcagaggcagcatggggctccagtggtcccgagtctcatttccctgcctgctctttaggcctttggcacccatggtcacttcactgg

SEQ ID NO: 762310 - DNA, 120 bp, Artificial Sequence
  ENSG00000215790_26 (sequence is synthesized)
ttttccatttggcttctcacctgggaaatacaaaaatagcccctcctgaagataaaatcgttcagaaacagagcaataattctgactcattaacttctacctactcaaaaaagtctgcca

SEQ ID NO: 762311 - DNA, 90 bp, Artificial Sequence
  ENSG00000215790_27 (sequence is synthesized)
tctgactcattaacttctacctactcaaaaaagtctgccatgatgatggaccgaagtgaggctttttaacccacaagtaacctttgtcac

SEQ ID NO: 762312 - DNA, 120 bp, Artificial Sequence
  ENSG00000215790_28 (sequence is synthesized)
cctcgacttcctgggctcaagtgatccacctcagcctcccatgtggctggaaccacaggcacgtgccaccatgcctggctatttttttgttgagctgggctctcgctttgttgcccaggc

SEQ ID NO: 762313 - DNA, 120 bp, Artificial Sequence
  ENSG00000215790_29 (sequence is synthesized)
tggtcttgaactcctcggctcaagcaatccttcccactcagcctcctgtagtgtcgagaatataggcgtgggctactacacctgcttcagccgcttctataaaaccgctgacctgtgtgt

SEQ ID NO: 762314 - DNA, 120 bp, Artificial Sequence
  ENSG00000215790_30 (sequence is synthesized)
ggaggacaggccaggtgtgtgctcactgcgctgcgaagatgttttgtcacgtgactttccctgggtttccatttctttttttctgctttcctcaaaaactaatagaagaccggctgcggt

SEQ ID NO: 762315 - DNA, 83 bp, Artificial Sequence
  ENSG00000215790_31 (sequence is synthesized)
ttctgctttcctcaaaaactaatagaagaccggctgcggtagctcaggcctctaatcccagcactttgggaggctgcagatgg

SEQ ID NO: 762316 - DNA, 120 bp, Artificial Sequence
  ENSG00000215790_32 (sequence is synthesized)
ctgggcaacagggcaagattccgtctcaaaaacaaacactattagaaaatgctctggaggtggcggggagttgttgatttgtgaggacagattgaaagcaactcccagggtggccttgtc

SEQ ID NO: 762317 - DNA, 120 bp, Artificial Sequence
  ENSG00000215790_33 (sequence is synthesized)
cacctccccatcgagaatatggctgccggcctctttgaagattgtggtctggcataaggagaggtgcaggcgcctggttctgagcaccttggaatttccagccgcacagaatctggtgcc

SEQ ID NO: 762318 - DNA, 120 bp, Artificial Sequence
  ENSG00000215790_34 (sequence is synthesized)
ctcccctccaccctcacaaggagctgccatcctgtttggattttctgtttgtggaccagaaacaaacgtttttccaaaggattagcaaataggttgatttcctgtgtaacgctgctctgg

SEQ ID NO: 762319 - DNA, 120 bp, Artificial Sequence
  ENSG00000215790_35 (sequence is synthesized)
ggcctcttcctcatcctggcagaaggagcctggagcccatgaggcagccagcactgtgcccttgctcagtcgtgctgtcccctccctctccctcagtctcttctccatgcccaagtcagt

SEQ ID NO: 762320 - DNA, 120 bp, Artificial Sequence
  ENSG00000215790_36 (sequence is synthesized)
ttccagccgctggtcttcatggcattcccagcacagctggacaccaagaggcaaaacccaaggcctggcttggccgtgttaacgattgtacagacatttttttaaataactttgtgtaat

SEQ ID NO: 762321 - DNA, 120 bp, Artificial Sequence
  ENSG00000215790_37 (sequence is synthesized)
acttttctagaatagtaagttcttgttgaactgtcacagatgagcttctaggaacacaccgggtgtggttacttccactgggtgtgtccatggtcgtggtctgtgcctttgtaaacaaac

SEQ ID NO: 762322 - DNA, 120 bp, Artificial Sequence
  ENSG00000215790_38 (sequence is synthesized)
agaacacttgaaccaccttccgaattgggtcatcggcttctttacattgatacttagagatttgcagctctctaactttcaaggaaacttcccctactgaaaggcataaaaaggttaaaa

SEQ ID NO: 762323 - DNA, 120 bp, Artificial Sequence
  ENSG00000215790_39 (sequence is synthesized)
aagaaaatccgagagtcccaattccctgtataacagcattaaaataatctgcctgcctggaaagatgagaacactgttgcacaacccaaaatgtgtttttaatttgtgaaaaattaccat

SEQ ID NO: 762324 - DNA, 120 bp, Artificial Sequence; identical to SEQ ID NO: 698914
  ENSG00000215790_40 (sequence is synthesized)

SEQ ID NO: 762325 - DNA, 120 bp, Artificial Sequence
  ENSG00000215790_41 (sequence is synthesized)
cgcgctcctgggtgatcactcagacgggtcagtgggaataacgggccaacaagacagctttttacatgtgtccaaaggatggcctttcgaaggcctggaagtatttcactgttggaagaa

SEQ ID NO: 762326 - DNA, 120 bp, Artificial Sequence; identical to SEQ ID NO: 698916
  ENSG00000215790_42 (sequence is synthesized)

SEQ ID NO: 762327 - DNA, 120 bp, Artificial Sequence
  ENSG00000215790_43 (sequence is synthesized)
atagaatgagagcatctgagcttccctaatgaatctggctagttctgtgtctggctgaggatacaggagtgggacatccactctcggatccctcagagcacagaaaccttcagctttgct

SEQ ID NO: 762328 - DNA, 120 bp, Artificial Sequence; identical to SEQ ID NO: 698918
  ENSG00000215790_44 (sequence is synthesized)

SEQ ID NO: 762329 - DNA, 120 bp, Artificial Sequence; identical to SEQ ID NO: 698919
  ENSG00000215790_45 (sequence is synthesized)

SEQ ID NO: 762330 - DNA, 120 bp, Artificial Sequence; identical to SEQ ID NO: 698920
  ENSG00000215790_46 (sequence is synthesized)

SEQ ID NO: 762331 - DNA, 120 bp, Artificial Sequence; identical to SEQ ID NO: 698921
  ENSG00000215790_47 (sequence is synthesized)

SEQ ID NO: 762332 - DNA, 120 bp, Artificial Sequence
  ENSG00000215790_48 (sequence is synthesized)
gttgataccgtgtaactaatcccgtggatgcctcctggttatttttgtccaaacgaagcagccgtggtagtagctgtctatgattcttgctcagcaaagtaaaataaatgttaaatatgg

SEQ ID NO: 762333 - DNA, 120 bp, Artificial Sequence
  ENSG00000215790_49 (sequence is synthesized)
cgctatgcctgcggcggagactgcatcaggctctcgtcctcgggctccacccggggagctgtgcccagacagcagaagggaaggatgtcacttctgagatgaggttcagaaaggcctggg

SEQ ID NO: 762334 - DNA, 120 bp, Artificial Sequence
  ENSG00000215790_50 (sequence is synthesized)
ctcctgtcctggctgctctctcccactccctgatgagcttgctggatgaaagctcctgtcaggctgtggggcgtcctgtggagaagctggcaagaaactggtgggggccctttccaccta

SEQ ID NO: 762335 - DNA, 120 bp, Artificial Sequence
  ENSG00000215790_51 (sequence is synthesized)
tagccagcaaggaactgaacccagccagcgtccacctgagtgagctcagaggtgggcctcagccccagttgagccttcggatgaggtcacagccctggtccatggtgtgactgcagcttc

SEQ ID NO: 762336 - DNA, 120 bp, Artificial Sequence
  ENSG00000215790_52 (sequence is synthesized)
aggagggaccttaagccagaggtgcctggctaagcttcccgcagattgctgccccacaggagccaacatcaaaagcatttgttgttttgaggtgcgtctgcttctacgctttgcctggga

SEQ ID NO: 762337 - DNA, 120 bp, Artificial Sequence
  ENSG00000215790_53 (sequence is synthesized)
tccccggtgactttcaggcccagtaaatgcggatgtttatcttccattgtttgtttcctgagattcagatgtctaaagcatttttctgtgacttttcaaggcaagaggaaaacctgacat

SEQ ID NO: 762338 - DNA, 120 bp, Artificial Sequence; identical to SEQ ID NO: 698937
  ENSG00000215790_54 (sequence is synthesized)

SEQ ID NO: 762339 - DNA, 79 bp, Artificial Sequence
  ENSG00000215790_55 (sequence is synthesized)
agttgggggaagcaccatacccagtgagtctgcactttgaggacccactgccagtgtcagcttcaaaatcacattgtaa

SEQ ID NO: 762340 - DNA, 87 bp, Artificial Sequence; identical to SEQ ID NO: 698939
  ENSG00000215790_56 (sequence is synthesized)

SEQ ID NO: 762341 - DNA, 120 bp, Artificial Sequence
  ENSG00000215790_57 (sequence is synthesized)
aaaagcaatcctaaaaatcgtaaacaaaatgacacagaggaaccttattgctcatcgagccatgcaagaaaggaaccgtttatttccagcaagtttaaaacatcgatttgacctccagcc

SEQ ID NO: 762342 - DNA, 120 bp, Artificial Sequence
  ENSG00000215790_58 (sequence is synthesized)
atggtcgatgagatgttagaaaaccaactctcttgctgacaacaacgagaaaatcttgataccatttagcaaaaagaagtctgtgggggaggcgttggagagtgacggaactgccacggc

SEQ ID NO: 762343 - DNA, 120 bp, Artificial Sequence
  ENSG00000215790_59 (sequence is synthesized)
cggcctgaggcacccggcttccggagcctctggcagcccagagaagtctctgtcttgtcgcccaggctggggtacagtggtgccatctcagctgactgcaacctccgcctccgggttcaa

SEQ ID NO: 762344 - DNA, 120 bp, Artificial Sequence
  ENSG00000215817_0 (sequence is synthesized)
agagcgcagcctgtagccgggcgccatctttgacgctggcagtcttggttttctgctagtgctgctgctgctgggaggacgacggacggcagcggccaagcaagaagaaagacgtggcag

SEQ ID NO: 762345 - DNA, 120 bp, Artificial Sequence
  ENSG00000215817_1 (sequence is synthesized)
caagcgggagtcggggatagtgtcatcggttcgggtcccactactttggagcttgtctcaaactccacatacagaaagccaccaaccttattccgattatattgttcagctatggaagat

SEQ ID NO: 762346 - DNA, 120 bp, Artificial Sequence
  ENSG00000215817_2 (sequence is synthesized)
ggattttttttcatgatcctttgactctcaagttcatctttaaatgaactcttttttttgttttgtttttgaggagataactaacccttgctgtctccagtctgacaaaggttatttgaa

SEQ ID NO: 762347 - DNA, 120 bp, Artificial Sequence
  ENSG00000215817_3 (sequence is synthesized)
tggacttaatctcccagtagttgggagatgttttaaaaacacatgctgtgtttgaattgtggctgagaggttttcttggcaatgtgaggaggaaaattttttctgcctcattattattaa

SEQ ID NO: 762348 - DNA, 120 bp, Artificial Sequence
  ENSG00000215817_4 (sequence is synthesized)
ttcatggattgagtgttggttcgacctacaggcataatagattggaactcagtgaagacacagacgttcctgttgagagcaaccagctaatgattacagtttaaagacaatttctgtgat

SEQ ID NO: 762349 - DNA, 120 bp, Artificial Sequence
  ENSG00000215817_5 (sequence is synthesized)
caagttgtcatttggaagattaaacccatttcacgaggacttggagcctggtccttgctttgaggaagcagtggcttgtttcaagaagccacttctgatctaagaatctacccagcatgc

SEQ ID NO: 762350 - DNA, 120 bp, Artificial Sequence
  ENSG00000215817_6 (sequence is synthesized)
ctaatcaaggagaagactgctatttttttttctattctacatgtaccaaaggtgacagctgcccattccgtcactgtgaagctgcactaggcaatgaaactgtttgcacattatggcaag

SEQ ID NO: 762351 - DNA, 120 bp, Artificial Sequence
  ENSG00000215817_7 (sequence is synthesized)
aagggcgctgttttcgacgggtgtgcaggtttcggcacatggagattgataaaaaacgcagtgaaattccttgttattgggaaaatcagccaacaggatgtcaaaaattaaactgcgttt

SEQ ID NO: 762352 - DNA, 120 bp, Artificial Sequence
  ENSG00000215817_8 (sequence is synthesized)
tccatcacaatagaggacgatatgttgatggccttttcctacctccgagcaaaagtgtgttgcccactgtgcctgagtcaccagaagaggaagtgaaggctagccaactttcagttcagc

SEQ ID NO: 762353 - DNA, 120 bp, Artificial Sequence
  ENSG00000215817_9 (sequence is synthesized)
agaacaaattgtctgtccagtccaatacttcccctcagctgcggagcgttatgaaagtagaaagttccgaaaatgttcctagccccaagcatccaccagttgtaattaatgctgcagatg

SEQ ID NO: 762354 - DNA, 120 bp, Artificial Sequence
  ENSG00000215817_10 (sequence is synthesized)
atgatgaagatgatgatgatcagttttctgaggaaggtgatgaaaccaaaacacctaccctgcaaccaactcctgaagttcacaatggattacgagtgacttctgtccggaaacctgcag

SEQ ID NO: 762355 - DNA, 120 bp, Artificial Sequence
  ENSG00000215817_11 (sequence is synthesized)
tcaatataaagcaaggtgaatgtttgcattttggaataaaaactcttgaggaaattaagtcaaagaaaatgaaggaaaaatctgaggagcaaggtgagggttcttcaggagtttccagtc

SEQ ID NO: 762356 - DNA, 120 bp, Artificial Sequence
  ENSG00000215817_12 (sequence is synthesized)
ttttactccaccctgagcctgttccaggtcctgaaaaagaaaatgtcaggactgtggtgaggacagtaactctctccaccaaacaaggagaagaacccttggttagattgggccttactg

SEQ ID NO: 762357 - DNA, 120 bp, Artificial Sequence
  ENSG00000215817_13 (sequence is synthesized)
agacactggggaaacgaaaattttcgacaggcggtgacagtgatcctccattaaagcgtagcctggcacagaggctagggaagaaagttgaagctccagaaactaacactgacgaaacac

SEQ ID NO: 762358 - DNA, 120 bp, Artificial Sequence
  ENSG00000215817_14 (sequence is synthesized)
caaagaaagctcaagtttccaagtctcttaaggagcgattaggcatgtcagctgatccaaataatgaggacgcaacagataaagttaataaagttggtgagatccatgtgaagacattag

SEQ ID NO: 762359 - DNA, 120 bp, Artificial Sequence
  ENSG00000215817_15 (sequence is synthesized)
aagaaatgcttcttgaaagagccagtcagaaacatggggaatcgcaaactaaactcaagacagaaggaccttcaaaaactgatgattctacttcaggagcaagaagctcctccactatcc

SEQ ID NO: 762360 - DNA, 120 bp, Artificial Sequence
  ENSG00000215817_16 (sequence is synthesized)
gtatcaaaaccttctctgaggtcctggctgaagaagaacataggcagcaggaagcagagagacaaaaaagcaaaaaggatacaacttgcatcaagctaaagactgatagtgaaattaaaa

SEQ ID NO: 762361 - DNA, 120 bp, Artificial Sequence
  ENSG00000215817_17 (sequence is synthesized)
aaacagtagttttgccacccattgttgccagcaaaggacaatcagaggagcctgcaggtaaaacaaagtccatgcaggaggtgcacatgaagacggtggaagaaattaaactggagaagg

SEQ ID NO: 762362 - DNA, 120 bp, Artificial Sequence
  ENSG00000215817_18 (sequence is synthesized)
cactgagggtgcagcagagctctgagagcagcaccagctccccgtctcaacatgaggccactccaggggcaaggttgctgctgcgaatcaccaaaagaacatggaggaaagaagagaaga

SEQ ID NO: 762363 - DNA, 120 bp, Artificial Sequence
  ENSG00000215817_19 (sequence is synthesized)
actaaaattcaagtcaagagatgtgagatcatgagagagacgcgcatgcagaaacagcaggagagggaaaaatcagtcttgacacctcttcagggagatgtagcctcttgcaatacccaa

SEQ ID NO: 762364 - DNA, 120 bp, Artificial Sequence
  ENSG00000215817_20 (sequence is synthesized)
gtggcagagaaaccagtgctcactgctgtgccaggaatcacatggcacctgaccaagcagcttcccacaaagtcatcccagaaggtggaggtagaaacctcagggattgcagactcatta

SEQ ID NO: 762365 - DNA, 120 bp, Artificial Sequence
  ENSG00000215817_21 (sequence is synthesized)
ttgaatgtgaaatggtcagcacagaccttggaaaaaaggggtgaagctaaacccacagtgaacgtgaagcaatctgtggttaaagttgtgtcatcccccaaattggccccaaaacgtaag

SEQ ID NO: 762366 - DNA, 120 bp, Artificial Sequence
  ENSG00000215817_22 (sequence is synthesized)
gcagtggagatgcaccctgctgtcactgccgctgtgaagccactcagctccagcagcgtcctacaggaacccccagccaaaaaggcagctgtggatgctgttgtcctgcttgactctgag

SEQ ID NO: 762367 - DNA, 120 bp, Artificial Sequence
  ENSG00000215817_23 (sequence is synthesized)
gacaaatcagtcactgtgcctgaagcagaaaatcctagagacagtcttgtgctgcctccaacccagtcctcttcagattcctcacccccggaggtgtctggcccttcctcatcccaaatg

SEQ ID NO: 762368 - DNA, 120 bp, Artificial Sequence
  ENSG00000215817_24 (sequence is synthesized)
agcatgaaaactcgccgactcagctctgcctcaacaggaaagcccccactctctgtggaggatgattttgagaaactaacatgggagatttcaggaggcaaattggaagctgagattgac

SEQ ID NO: 762369 - DNA, 120 bp, Artificial Sequence
  ENSG00000215817_25 (sequence is synthesized)
ctggatcctgggaaagatgaagatgaccttccgcttgagctatgagaaatgattgatagctgaaggtggtagtgaggacactttaaaaaaaaatcgccaaaaaactggacttagtttcat

SEQ ID NO: 762370 - DNA, 120 bp, Artificial Sequence
  ENSG00000215817_26 (sequence is synthesized)
ctattgtaacatttacctgagatgatcatttctttagtctagaatttgccccaaatcagaagtatacctctgaattatctgtatgtgtcctggattccttggggtcagatttttaaagtt

SEQ ID NO: 762371 - DNA, 120 bp, Artificial Sequence
  ENSG00000215817_27 (sequence is synthesized)
actttataaccattttgtccatttgatgccattgtttatcatcttttgagaaaaaagttctgtcatacccttctctccacaaaaaagagactgagggggagatcaagtgaaagggtgcaa

SEQ ID NO: 762372 - DNA, 120 bp, Artificial Sequence
  ENSG00000215817_28 (sequence is synthesized)
gcaaacttagtgactccttgaggtgtttgtcagttttggcttttttctcctttgttgtattctttatgtattgtcttaatgtacttaatattacctgagtttgaaatggatgaagacagc

SEQ ID NO: 762373 - DNA, 120 bp, Artificial Sequence
  ENSG00000215817_29 (sequence is synthesized)
tgctaccattaagggccaaattttatgctaccactaaacaaaaatacccactcagtctgtgttaaattgtatgtctttttaaaggtatttagagattcaactaagctttaaagagggctg

SEQ ID NO: 762374 - DNA, 120 bp, Artificial Sequence
  ENSG00000215817_30 (sequence is synthesized)
agcaactcaggaagcctgtaatgtgggcataactctttggacctgatcttgatgcttctgctgctctgttggcctctgaagagcaatatctaatttattattactgtaattttttaaaag

SEQ ID NO: 762375 - DNA, 120 bp, Artificial Sequence
  ENSG00000215817_31 (sequence is synthesized)
gctttaaagtgcctcaggggtcccctgaaactaattttctatttctgggattccctggattcattatatgagatggtgacatgattagaggaattcttttttagtatgaaaattgttcct

SEQ ID NO: 762376 - DNA, 120 bp, Artificial Sequence
  ENSG00000215817_32 (sequence is synthesized)
tttcttcttcagtacttgcctccttgctggcattgaattaacacagggacaaaatttggttaattttttatttctaattctcccaacaaacccctgttgcccagtatttatgtggtggcc

SEQ ID NO: 762377 - DNA, 120 bp, Artificial Sequence
  ENSG00000215817_33 (sequence is synthesized)
tttaaccacctgagggaaaaaatgagcttattcaagctgccaatatttatctatgggctgtagcagtacactgaattgtactgtgccagggatattgagatgctctgggggtgtattgta

SEQ ID NO: 762378 - DNA, 120 bp, Artificial Sequence
  ENSG00000215817_34 (sequence is synthesized)
tacctgccagttttcttcatttctgaattgggttttctcttcttgatgttggtttccttcatatcacctcaaggtttagatttgtgaaggaataagcatgatggaaataatagtcttgaa

SEQ ID NO: 762379 - DNA, 120 bp, Artificial Sequence
  ENSG00000215817_35 (sequence is synthesized)
aggagatatgttgtatataatcaggaggaagaggaaggcaggacttactcattttgatattttgctgtaggtggccagttttgtttctcatagggaaatctgacccacctgtcatgttgg

SEQ ID NO: 762380 - DNA, 120 bp, Artificial Sequence
  ENSG00000215817_36 (sequence is synthesized)
ctcctaaggaactgctgttgtaagcggctcatcaagagttgaacttcaagtagccttgttgggaatatggaaaaggaagaaagccacaggactgcccattcagtcttgttaagattggga

SEQ ID NO: 762381 - DNA, 120 bp, Artificial Sequence
  ENSG00000215817_37 (sequence is synthesized)
tgattctgcacaagcaaaaatgactcgaaatttatgtatcgacacacctctaccaatccatcttcagctgactgaatgttgtatgatagcccttctccaaagcaggggtagaatgttcag

SEQ ID NO: 762382 - DNA, 120 bp, Artificial Sequence
  ENSG00000215817_38 (sequence is synthesized)
gtttcaccacggattttctacttatttcgcttttggaatcagcttacagattccaggtcccttttgtatatattctttattcttttgcttttttaaaaaataaacttgtattagtcaatg

SEQ ID NO: 762383 - DNA, 120 bp, Artificial Sequence
  ENSG00000215817_39 (sequence is synthesized)
agccaccaaccttattccggtatcctacacccattccccaccctcattacactcccacccctggccctcagcatgggagtcaagagcaacagggacacttccgtactccttgtaggattg

SEQ ID NO: 762384 - DNA, 120 bp, Artificial Sequence
  ENSG00000215817_40 (sequence is synthesized)
gtgaaaccgtaatgaagaacacccctaaactcccataattgatttggggatattccctgcccaaaaaattcctggaaaattgactagtattaagtgcataatagattggaactcagtgaa

SEQ ID NO: 762385 - DNA, 120 bp, Artificial Sequence
  ENSG00000215845_0 (sequence is synthesized)
gggcgggccagggccgcactccggagactcgcggttgctacgcgcaccatggctggagcgcccacggtctcgcttcctgaactccgttcactcctagcctccggacgggcccggctcttc

SEQ ID NO: 762386 - DNA, 120 bp, Artificial Sequence
  ENSG00000215845_1 (sequence is synthesized)
gacgtgcgctctcgcgaggaggcggcagctgggaccatcccaggggcgctcaacatcccggtgtccgagttggagagtgctctgcagatggagccagctgccttccaggctttatattct

SEQ ID NO: 762387 - DNA, 120 bp, Artificial Sequence
  ENSG00000215845_2 (sequence is synthesized)
gcatctcgttttcttctgtcagatgggcaagcggggcctccaggccacgcagctggcccggagtcttggatacactgggtacggggaggtgtggctgctagctgggaggtgatggggact

SEQ ID NO: 762388 - DNA, 120 bp, Artificial Sequence
  ENSG00000215845_3 (sequence is synthesized)
gcctgtcattcctgtcagtctctcacgcttctttgtctccacagggctcgcaactacgctggagcctatagagaatggttggagaaagagagttaggcaggaggcagcttactgattgcc

SEQ ID NO: 762389 - DNA, 120 bp, Artificial Sequence
  ENSG00000215845_4 (sequence is synthesized)
accccctggccccttaatggccaccttaactaagggtgtgaacgggctgacttggtgaattgggcaactccttatagtgttgtgcacacaaaagcatcaaataaagaacatttaatcaaa

SEQ ID NO: 762390 - DNA, 120 bp, Artificial Sequence
  ENSG00000215845_5 (sequence is synthesized)
gcaggcgccgagagggcgggccagggccgcactccggagactcgcggttgctacgcgcaccatggctggaggctgtcgcgccccttcctcagcgcccacggtctcgcttcctgaactccg

SEQ ID NO: 762391 - DNA, 120 bp, Artificial Sequence
  ENSG00000215845_6 (sequence is synthesized)
gcggcagctgggaccatcccaggggcgctcaacatcccgggtatagggtggagaggggacgcccaggtggtggaatagagaccgttcaggaggttctttgccaatgggacctcatttagg

SEQ ID NO: 762392 - DNA, 120 bp, Artificial Sequence
  ENSG00000215845_7 (sequence is synthesized)
atggaatggggaaggcactgattatgggggtcctgcattcccgggagccagccctcagcttccgtaggaaggactgatggggggcggatcttggcatcggaactggcccatccagtttga

SEQ ID NO: 762393 - DNA, 120 bp, Artificial Sequence
  ENSG00000215845_8 (sequence is synthesized)
cagcttagggagtggcttgcattcaaaagttgtcggtttctgttccttgaaattggggtgggggtaggggatggttatcatatgttgtttgggggcccccaggacccagcccttccaggc

SEQ ID NO: 762394 - DNA, 120 bp, Artificial Sequence
  ENSG00000215845_9 (sequence is synthesized)
ccagcttccgaacctgagtgccaaattgctggctttcccttctaccctctccactcctccagtgtccgagttggagagtgctctgcagatggagccagctgccttccaggctttatattc

SEQ ID NO: 762395 - DNA, 120 bp, Artificial Sequence
  ENSG00000215845_10 (sequence is synthesized)
cagctctgggagggaacgggagatgttgcaggcgccgagagggcgggccagggccgcactccggagactcgcggttgctacgcgcaccatggctggagtgtccgagttggagagtgctct

SEQ ID NO: 762396 - DNA, 120 bp, Artificial Sequence
  ENSG00000215853_0 (sequence is synthesized)
atcctctctgactcctgaatcttctgctccttcctcctcaagcaggttcacccgtacttgtcaaaatggctcaactcctgaatagcatactcagtgtgattgacgtattccacaaatatg

SEQ ID NO: 762397 - DNA, 120 bp, Artificial Sequence
  ENSG00000215853_1 (sequence is synthesized)
ccaaagggaatggggactgtgccttactatgcaaggaagagttgaaacaactgctcttggctgagtttggagacatcctccagagaccaaatgacccagagactgtggaaaccatcttga

SEQ ID NO: 762398 - DNA, 120 bp, Artificial Sequence
  ENSG00000215853_2 (sequence is synthesized)
acctcttagatcaagaccgagatggacatattgattttcatgagtacctcttgttggtgttccagttggtccaagcctgctatcataagctagacaataagtcacatggaggcaggacct

SEQ ID NO: 762399 - DNA, 120 bp, Artificial Sequence
  ENSG00000215853_3 (sequence is synthesized)
cacagcaagaaagggggcaggaaggagcacaagactgtaagttcccaggaaacacaggcagacaacacagacagaggcacgaggaagaaaggcagaactcccaccacagtcagcctgaga

SEQ ID NO: 762400 - DNA, 120 bp, Artificial Sequence
  ENSG00000215853_4 (sequence is synthesized)
gacaagacggagattcccaccatggtcagcctgagagacaagacagagattcccaccatggtcagtctgagaaacaagacagagattcccaccacagtcagcctgagagacaagacagag

SEQ ID NO: 762401 - DNA, 120 bp, Artificial Sequence
  ENSG00000215853_5 (sequence is synthesized)
attctcaccacaatcagtctgagagacaagacaaggatttcagctttgatcagtcagagagacaaagtcaagactccagctctggtaaaaaagtgagtcacaaatctaccagtggccagg

SEQ ID NO: 762402 - DNA, 120 bp, Artificial Sequence
  ENSG00000215853_6 (sequence is synthesized)
ctaaatggcagggacatatctttgccttaaatcggtgtgaaaaaccaattcaggattctcattatggtcagtctgaaagacatacacaacaatctgaaacacttggacaagcctctcact

SEQ ID NO: 762403 - DNA, 120 bp, Artificial Sequence
  ENSG00000215853_7 (sequence is synthesized)
ttaaccagacaaatcaacagaaatcaggctcttattgtggacagtctgagaggctaggtcaggaattaggctgtggtcagacagacagacaaggccagagttcccactacggtcagacgg

SEQ ID NO: 762404 - DNA, 120 bp, Artificial Sequence
  ENSG00000215853_8 (sequence is synthesized)
acagacaagaccagagttatcattatggtcagacagacagacaaggccagagttcccactacagtcagacggacagacaaggccagagttcccactacagtcagccagacagacaaggtc

SEQ ID NO: 762405 - DNA, 120 bp, Artificial Sequence
  ENSG00000215853_9 (sequence is synthesized)
agagttcccactatggtcaaatggacagaaaaggccagtgttatcattatgatcagacaaacagacaaggccagggttcccactacagtcaaccaaacagacaaggtcagagttcccact

SEQ ID NO: 762406 - DNA, 120 bp, Artificial Sequence
  ENSG00000215853_10 (sequence is synthesized)
atggtcagccagacacacaagatcagagttctcactatggtcagacagacagacaagaccaaagttctcactatggtcagacagagagacaaggccagagttcccactacagtcagatgg

SEQ ID NO: 762407 - DNA, 120 bp, Artificial Sequence
  ENSG00000215853_11 (sequence is synthesized)
accgacaaggccagggttctcactacggtcagacagacagacaaggccagagttcccactatggtcagccagacagacaaggccagaattcccactatggtcagacagacagacaaggcc

SEQ ID NO: 762408 - DNA, 120 bp, Artificial Sequence
  ENSG00000215853_12 (sequence is synthesized)
agagttcccactatggtcagacagacagacaaggccagagttcccactacagtcagccagacaaacaaggccagagttcccactatggtaagatagacagacaagaccagagttatcatt

SEQ ID NO: 762409 - DNA, 120 bp, Artificial Sequence
  ENSG00000215853_13 (sequence is synthesized)
atggtcagccagacggacaaggccaaagttcccactatggtcagacagacagacaaggccagagtttccactatggtcagccagacagacaaggccagagttcccactacagtcagatgg

SEQ ID NO: 762410 - DNA, 120 bp, Artificial Sequence
  ENSG00000215853_14 (sequence is synthesized)
tatcattatggtcagacagacagacaaggccagagttcccactatattcaatcacagactggggaaatacaagggcaaaataagtacttccaagggactgaaggaacaagaaaagcctct

SEQ ID NO: 762411 - DNA, 120 bp, Artificial Sequence
  ENSG00000215853_15 (sequence is synthesized)
tatgttgaacaatcaggaagatcagggaggctaagtcaacagactccaggacaggaagggtaccaaaaccagggacagggattccagtctagggactcacagcagaacggccaccaggta

SEQ ID NO: 762412 - DNA, 120 bp, Artificial Sequence
  ENSG00000215853_16 (sequence is synthesized)
tgggagcctgaagaggatagccaacatcaccaacacaaactcttagcacaaatccaacaagaaagaccactttgtcacaaagggagagactggcaatcatgcagtagtgagcagggccac

SEQ ID NO: 762413 - DNA, 120 bp, Artificial Sequence
  ENSG00000215853_17 (sequence is synthesized)
agacaggcccagaccaggcagagtcatggtgaggggctgagccactgggcagaggaagagcagggccatcaaacttgggatagacacagccatgagagtcaggaaggtccatgtgggaca

SEQ ID NO: 762414 - DNA, 120 bp, Artificial Sequence
  ENSG00000215853_18 (sequence is synthesized)
caggacaggcgaacccataaagatgagcagaaccatcagagacgagacagacaaacccatgaacatgagcagagccatcagagacgagacaggcaaacccatgaagacaagcagaaccgt

SEQ ID NO: 762415 - DNA, 120 bp, Artificial Sequence
  ENSG00000215853_19 (sequence is synthesized)
cagagacgagacaggcaaacccatgaagacgagcagaaccatcagagatgagacaggcaaactcatgaagaggatcaaaaccatcagcaacaacataatagacaaaactatgaggagaaa

SEQ ID NO: 762416 - DNA, 120 bp, Artificial Sequence
  ENSG00000215853_20 (sequence is synthesized)
gagaggtatcaaggatctcagaatcaaaaatcccaagtgacccacagaagctgtcctaacagagaaaaattccacatgaaagaggatgaccagagccaaggctcacagaaaagacacact

SEQ ID NO: 762417 - DNA, 120 bp, Artificial Sequence
  ENSG00000215853_21 (sequence is synthesized)
gaaccatccttctatccaacccagagcagtgggaggccccaaaccagagaacagcgtggtcaccctgccaagggagctactgttcccaaccccccctatgactatgtgcaagagcagaaa

SEQ ID NO: 762418 - DNA, 120 bp, Artificial Sequence
  ENSG00000215853_22 (sequence is synthesized)
tcctacccatactaggctatgtgagcaccagaggtaaagcaacacaaagccaaaaaagaaacctatatgtcgagttcacctttaattcgatttaagagattgagaatgtatttcttccct

SEQ ID NO: 762419 - DNA, 120 bp, Artificial Sequence
  ENSG00000215853_23 (sequence is synthesized)
ctatcctctgctgtatctccctgcaaggatgtttttgagtactagcattcacgtaagggcttttggttctttgagcagcaattctagggttttctgattcagtgaaatctaggtggtaaa

SEQ ID NO: 762420 - DNA, 120 bp, Artificial Sequence
  ENSG00000215853_24 (sequence is synthesized)
ttgggtgaaataatcatatcttaatgttgatcagtttgggtatttaaatcatttcctgctttgccctctgtgtagatgagacctggttgaatcattgaaaggtagaacacttctccctaa

SEQ ID NO: 762421 - DNA, 120 bp, Artificial Sequence
  ENSG00000215853_25 (sequence is synthesized)
agttcagaaacagaaaagatattctgaagatttacattacatccaaggattatactacatctccactcctcaaggaaccctagatttggtgagctttggctcctgtggataaaacatcag

SEQ ID NO: 762422 - DNA, 120 bp, Artificial Sequence
  ENSG00000215853_26 (sequence is synthesized)
gaatttcaagcctcatagtctagactagaatgaaactcagttcaaggctgctacaagagccgagaacatagagtgcatctctgatgtttactacatctcccatgccaggctcttattcca

SEQ ID NO: 762423 - DNA, 120 bp, Artificial Sequence
  ENSG00000215853_27 (sequence is synthesized)
caccagagggactgtccattagtgcctatcactagagctgaatggacccattccaattcaatacctttctagtttctgattatataaaataaagagaaagtatatgtcatatgtttgcaa

SEQ ID NO: 762424 - DNA, 120 bp, Artificial Sequence
  ENSG00000215853_28 (sequence is synthesized)
attccaggggatcaagactattgattcatagctcctaagacctgaaaactcttctcaagaaaatctatgtgcagattatgaattgtattaaaatatctaataaataattgatgagcaata

SEQ ID NO: 762425 - DNA, 120 bp, Artificial Sequence
  ENSG00000215883_0 (sequence is synthesized)
atgatggctgagagggaagaggacgacgacactgaggaagcctggatgcagctacggcccacagaacccttgccttcccagtgctgcggcagtggctgctcaccctgtgtgtttgacctc

SEQ ID NO: 762426 - DNA, 120 bp, Artificial Sequence
  ENSG00000215883_1 (sequence is synthesized)
tatcaccgagatctggcaaggtgggaggcagcccaagccagcaaggacaggagcctgctgcgtgggccagagtcacagagctgcccctccaagctgaacccagagaccttcgtggccttc

SEQ ID NO: 762427 - DNA, 120 bp, Artificial Sequence
  ENSG00000215883_2 (sequence is synthesized)
tgcatcattgccatggacaggctcactaaggacacctaccgtgtccggtttgctctacccgggaacagccagcttggcctgcggcccggccagcacctcatcctacgagggatagtagat

SEQ ID NO: 762428 - DNA, 120 bp, Artificial Sequence
  ENSG00000215883_3 (sequence is synthesized)
gacttagaaattcagagagcctatacgcccatcagccctgccaacgcagaaggatactttgaagtgttaattaagtgctaccagatggggctgatgtcccggtatgttgagtcctggaga

SEQ ID NO: 762429 - DNA, 120 bp, Artificial Sequence
  ENSG00000215883_4 (sequence is synthesized)
gctcctcttgctggctgcgggcacgggcctggcccccatggtgcctatcctgcagagcatcacagacaatgagaatgacgagacttttgtcactctggtcggttgcttcaagacctttga

SEQ ID NO: 762430 - DNA, 120 bp, Artificial Sequence
  ENSG00000215883_5 (sequence is synthesized)
gagcatctacctgaaaaccttcctccaagagcaggcccgtttctggaatgtccgtaccttctttgtactcagccaggagagctcctcagagcagcttccctggagttaccaagagaaaac

SEQ ID NO: 762431 - DNA, 120 bp, Artificial Sequence
  ENSG00000215883_6 (sequence is synthesized)
ccactttggccacctgggccaggacctaattaaagagctggtcagctgctgtcggagaaagccattcgcactggtctgtggctcggctgagttcaccaaagacatagccaggtgcttact

SEQ ID NO: 762432 - DNA, 120 bp, Artificial Sequence
  ENSG00000215883_7 (sequence is synthesized)
gtgcgcaggcctcactgaggactcctatttcctcttctagccctggcctctcttccaaagcctaggccatgagcctgctactgggacccaggaaggagcacagactggaatcagaagaca

SEQ ID NO: 762433 - DNA, 120 bp, Artificial Sequence
  ENSG00000215883_8 (sequence is synthesized)
cggagtccaggcctggtcctgctgctcatttgccaggtgaccttgggcaagtgtctttactgctcagaacctctacttctcatctgccccatgaggttaatcactcctcctggcctccta

SEQ ID NO: 762434 - DNA, 120 bp, Artificial Sequence
  ENSG00000215883_9 (sequence is synthesized)
gatactttgaagtgttaattaagatgaagaaactgaagctcaaaaagatgacatcatttgtctcaaggcctcttgggtaatatgatccaaatggaaggacaaaagttcagtgtcagttct

SEQ ID NO: 762435 - DNA, 120 bp, Artificial Sequence
  ENSG00000215883_10 (sequence is synthesized)
gtttaacaatgctaccagatggggctgatgtcccggtatgttgagtcctggagagtaggagacacagctttctggcgaggacctttcggagatttcttctataaaccaaaccagatggaa

SEQ ID NO: 762436 - DNA, 65 bp, Artificial Sequence
  ENSG00000215883_11 (sequence is synthesized)
acggagttttgccacgtaggtttataggttatggtgagctcctcttgctggctgcgggcacgggc

SEQ ID NO: 762437 - DNA, 120 bp, Artificial Sequence
  ENSG00000215883_12 (sequence is synthesized)
gagtaggagttgggcaggggaagagtcgggaggagcttccctggcccctccgattagaggatctaatgggggctccaactgtggcctcagcaccatctcggattaggggctcctgagtgt

SEQ ID NO: 762438 - DNA, 120 bp, Artificial Sequence
  ENSG00000215883_13 (sequence is synthesized)
gtagggaaggacacgggagaggcttagagctctttggaggaggattctgcctttcctccagtgccatgagcctgacacatgaaggtcttgggttctatgacttgaccacatcctgagagc

SEQ ID NO: 762439 - DNA, 120 bp, Artificial Sequence
  ENSG00000215883_14 (sequence is synthesized)
gcttcattctcagtcccctttcctggctcaaaaatcgagcctagcaaaagaagaggcacgggaaggaaacgcccctccctcctcctgcaggcagccactcagcctgtgccttcagcttgg

SEQ ID NO: 762440 - DNA, 120 bp, Artificial Sequence
  ENSG00000215883_15 (sequence is synthesized)
tgccctggtgatggttgctatggagatctaaagatagagcaggagtcaggagacctgggtccctctcccagcttgtcccactgagcggctgccgatcacggtccacccaccccaggaacc

SEQ ID NO: 762441 - DNA, 120 bp, Artificial Sequence
  ENSG00000215883_16 (sequence is synthesized)
tggcacccctatcccaggaacccagtgcccctgggcagcgcactgcagttaatgaattctgccttcaacagcctgggctctagcgtgctgcaccagcttgggctagctacaggcagtccc

SEQ ID NO: 762442 - DNA, 120 bp, Artificial Sequence
  ENSG00000215883_17 (sequence is synthesized)
agaattggaatattaagccatggaatcttagagttagacttttatagtcatagaaatgtactcttcaccatatcaaagctgaaagttcaggactctaagaaacatacagtgtgacagact

SEQ ID NO: 762443 - DNA, 120 bp, Artificial Sequence
  ENSG00000215883_18 (sequence is synthesized)
tatcgtatacacgggaaactgaagcccagtgagactaaatgacttgcccagggtaaaacagtccatggcagagccagcactagaagcctcctagcttcaacctcatgtgccaattctgca

SEQ ID NO: 762444 - DNA, 120 bp, Artificial Sequence
  ENSG00000215883_19 (sequence is synthesized)
tcagtgattttcgaactgcgctctacaggaagcaagggttctttgcatagcagcagtgaaaggacagctccagatggatccccagtacccccttcaaccagagcagctgcatttttatcc

SEQ ID NO: 762445 - DNA, 120 bp, Artificial Sequence
  ENSG00000215883_20 (sequence is synthesized)
cattcatatattggggttttgaattatttttatttgtacaaaaggattttcctagccactaaaaaaaatggcaacaaatctctctgctgtgtcacatttaataaataattgtgacacata

SEQ ID NO: 762446 - DNA, 120 bp, Artificial Sequence
  ENSG00000215883_21 (sequence is synthesized)
gctggggggtggtgctggaggtttcagaccgcctcacaggcagagttccagggtcagagagcatggagtactgtgtgtgaccttcttccagaagcacgggcacaggagcatgttaaaggc

SEQ ID NO: 762447 - DNA, 120 bp, Artificial Sequence
  ENSG00000215883_22 (sequence is synthesized)
cctgaaaagaccagtggcaaagaaactcctttcattttgtttaatccagagtttttcaagcttatttaactatagaacacttttctgtgggtttcgtagcctctttctagcacagtatag

SEQ ID NO: 762448 - DNA, 120 bp, Artificial Sequence
  ENSG00000215883_23 (sequence is synthesized)
tgagtgggaaaggccctgactgagagtcaaagattctgagcaggaaccatgatctcttcctgcctagtatgtgacttgagcaagacacttttcctctccccaggcctctgaggtctgcga

SEQ ID NO: 762449 - DNA, 120 bp, Artificial Sequence
  ENSG00000215883_24 (sequence is synthesized)
gttttcctccaccctttcctctccctcagtttgcacatcctattgactcagctccaaatagcgggggcctgtcaggagcctgactctgttcagacaccagggaaacaacagcacaccagg

SEQ ID NO: 762450 - DNA, 120 bp, Artificial Sequence
  ENSG00000215883_25 (sequence is synthesized)
cagatgcagttatgtccatcggggaacttacagcctagcaaggaaggcagcaattcaacctgtaagtctaaaagtgatgggtgtcatgaaaaggtaagtgcagggtgctgggagagtggt

SEQ ID NO: 762451 - DNA, 120 bp, Artificial Sequence
  ENSG00000215883_26 (sequence is synthesized)
tggcaggggctttagcctagtctagggagagcccaggggcacaccactgccagcggggatagaggcttcaaaagctttgaagtcactcatattaagagtgttgccggacacggtggctca

SEQ ID NO: 762452 - DNA, 68 bp, Artificial Sequence
  ENSG00000215883_27 (sequence is synthesized)
gaaaatcctcacgtgaggtgaagcgcaggcgagtaatgagaagatcacttgaggccaggagttcgaga

SEQ ID NO: 762453 - DNA, 120 bp, Artificial Sequence
  ENSG00000215883_28 (sequence is synthesized)
catagtgagaccctgtctctacaaaatgctggccaaggagcagggcctgcgcccgtggtctcatagagcctggcctgttctggaagagcacccagttgttccttctaggctgcccaagcc

SEQ ID NO: 762454 - DNA, 60 bp, Artificial Sequence
  ENSG00000215883_29 (sequence is synthesized)
gaacagccagcttggcctgcggcccggccagcacctcatcctacggtacatggggattac

SEQ ID NO: 762455 - DNA, 90 bp, Artificial Sequence
  ENSG00000215883_30 (sequence is synthesized)
gacaaaagttcagtgtcagttctgtttaacaagtatgtattaaacatttactctgtgccaggctctgtgtgggtaggacatacctgagaa

SEQ ID NO: 762456 - DNA, 74 bp, Artificial Sequence
  ENSG00000215883_31 (sequence is synthesized)
atctcacatggcggcagacaagaagagagcttgtgcggggaaactcttctttgtaaaaccatcagatctcatga

SEQ ID NO: 762457 - DNA, 120 bp, Artificial Sequence
  ENSG00000215883_32 (sequence is synthesized)
acagccaaaccatatcagggtactaaagacaacatggaagaatccttcccttcttcttgggtgctgtcaaggccacagctggggtcatgcctccccctagataggggccagaaaacaaag

SEQ ID NO: 762458 - DNA, 120 bp, Artificial Sequence
  ENSG00000215883_33 (sequence is synthesized)
cgtgcatggagacagcctccagcaaggcaggagaaaaacctcacctttcctactagaccccttccagttgagccagggacttccgttgccttgtgcaggtggtgcccaaggaagtcaggg

SEQ ID NO: 762459 - DNA, 120 bp, Artificial Sequence
  ENSG00000215883_34 (sequence is synthesized)
atgatatcagagatggccatgggtgcttaaaaacaggtctggggaccaaagccctttctctgtgttaagcctggctataatcttactccaaacacccttccagtcctgtctcccagtgct

SEQ ID NO: 762460 - DNA, 120 bp, Artificial Sequence
  ENSG00000215883_35 (sequence is synthesized)
tcgccctcaccctcaccctaccatgttcacttgctattcccaaaacatgacccagattgtcctacccctgaccatactacacctgatgtccagagtcctctctgcacccctgctcccatc

SEQ ID NO: 762461 - DNA, 120 bp, Artificial Sequence
  ENSG00000215883_36 (sequence is synthesized)
cccagtgaattccatcttgcccatctttcaaggtccaactcaaatgcttcctcccccaggaagccatcctcgatcccatccatggaagtggctgcagccttctcaggtttattcctagtt

SEQ ID NO: 762462 - DNA, 120 bp, Artificial Sequence
  ENSG00000215883_37 (sequence is synthesized)
tattcttctcatgggtattagatggtctctaccttgtatatgtctgagacttaggtcccttctagattgtaagctccttaaggggagagcctgaatctggattgattgattgattcattc

SEQ ID NO: 762463 - DNA, 120 bp, Artificial Sequence
  ENSG00000215883_38 (sequence is synthesized)
attcaggtatttattaagttacttccatggttcaggcactggctgccttcatggagcttaagatctagctgtcttgcctgcatcctcaacatggtgcctggcacagagtggacaggcacc

SEQ ID NO: 762464 - DNA, 120 bp, Artificial Sequence
  ENSG00000215883_39 (sequence is synthesized)
caggcaatatagactcccttctccatggaggaatcacttctgtaaccttcatttttcatccagccaggagatggtgtaggataatgcagagactgcagatgggtggcctgaatctagccc

SEQ ID NO: 762465 - DNA, 120 bp, Artificial Sequence
  ENSG00000215883_40 (sequence is synthesized)
atagatgtatttggtattggccagcatagagttttaaaattttgaattaattgcagacatttcaaaaatgggagattttaaataaaaatatggatttcgtgcctcttttggaaaatcaat

SEQ ID NO: 762466 - DNA, 120 bp, Artificial Sequence
  ENSG00000215883_41 (sequence is synthesized)
agatttggccaattaggccccacaaactatggactgaaacctgcaaactggcttccctccttagaaggagcactcgctcaccaatttatcatagtccccatcactccctattgtctccct

SEQ ID NO: 762467 - DNA, 120 bp, Artificial Sequence
  ENSG00000215883_42 (sequence is synthesized)
gatgctgagactgtgtgttaattgccattaatcatcacccagttcttcactcatttatggtacctgcatggtccctgtgggcatttgggtttgggacctctatgctgaaggctttaggtc

SEQ ID NO: 762468 - DNA, 120 bp, Artificial Sequence
  ENSG00000215883_43 (sequence is synthesized)
ctatggattctcatcccagcctcctgtctgccttctgtgtaagcttctgggcctcatctgaaaattgggaatggctgtaccaactttgtaggataaggaggacgattaaatgagataaca

SEQ ID NO: 762469 - DNA, 120 bp, Artificial Sequence
  ENSG00000215883_44 (sequence is synthesized)
gtgaagcacttagcatacagaacgggctccacattaatggttaatctggtttgtgttggcagcatgtacctgtcccgctgacgtctccctgtgtttgcttccagtgctaccagatggggc

SEQ ID NO: 762470 - DNA, 65 bp, Artificial Sequence
  ENSG00000215883_45 (sequence is synthesized)
agcactttgggaggctgcggcaggcagattgcctgagcccagaagttcgagggattaaccttatg

SEQ ID NO: 762471 - DNA, 89 bp, Artificial Sequence
  ENSG00000215883_46 (sequence is synthesized)
aggctaatctgtgtgacagagcaagaccctgtctcaaaataataataataaaatcaaaaagagtgttaagggggtctccacttaaggag

SEQ ID NO: 762472 - DNA, 120 bp, Artificial Sequence
  ENSG00000215883_47 (sequence is synthesized)
aaaatcaaaaagagtgttaagggggtctccacttaaggagtagagagtccggggcagttctcgtatctctgtccttgtctcattttagatgtttagatatttagatattatacaaggcca

SEQ ID NO: 762473 - DNA, 120 bp, Artificial Sequence
  ENSG00000215883_48 (sequence is synthesized)
cccagtggtaaccaacctagaatgtgttggcctcctcttcccctcactccgtgtaggttctgtgcagcctggctgctggtggcatctcttatcatgggacattggtggggacccagccgt

SEQ ID NO: 762474 - DNA, 120 bp, Artificial Sequence
  ENSG00000215883_49 (sequence is synthesized)
gcccttggtgccaagaagcctaaagggctcctgtcgcctggaaacttgagagtgcagggtcgggtgctgtgccccacaaggtgctgagcaagcccaagaagaagagtgtggggtgtggtg

SEQ ID NO: 762475 - DNA, 120 bp, Artificial Sequence
  ENSG00000215883_50 (sequence is synthesized)
tgtgagttcagacctcttggagctgtgggggcatggttcccatcagctgctgttcctctgatgatgcccactgcgtgttgtgggaggcgtggccaccgtgtgatgttgtagtaggagaag

SEQ ID NO: 762476 - DNA, 120 bp, Artificial Sequence
  ENSG00000215883_51 (sequence is synthesized)
ggagacttaggagctagacatgatacgcaggcatcaagaggtcaaccaggtgtccacaatctgtgagccacacagagctctctttgtgcatatgcatcccaagcttcaggaaggcaacag

SEQ ID NO: 762477 - DNA, 120 bp, Artificial Sequence
  ENSG00000215883_52 (sequence is synthesized)
ctactagagggcctgaggacagattcttggtcgcagaagcggcattggctttagttcagccctcaccatgtttaccaacgtcacttctgtgttcccctcatgggtctcccagctcccagt

SEQ ID NO: 762478 - DNA, 120 bp, Artificial Sequence
  ENSG00000215883_53 (sequence is synthesized)
ctccatgccacctccacgctgagaccagaccagttttccccacacacaaatccaagcctgtcactcccctgcttgaaatccttccctgtctccctgtggccttggggtagggcctctctg

SEQ ID NO: 762479 - DNA, 120 bp, Artificial Sequence
  ENSG00000215883_54 (sequence is synthesized)
ctctgccacctctccagactttttgtatgccaccgcccactcacacccacctctcaggctccaaacatgttctcttgcgtcagctcatcccttacactcgctgcttcctctgcctggcca

SEQ ID NO: 762480 - DNA, 120 bp, Artificial Sequence
  ENSG00000215883_55 (sequence is synthesized)
gcctcccaccttccgatctcccactcaccttttttgcctcctcatcttttgaggtctcagctcagtgtcacttcctcccgggagcctcgcctgtctcttccactccagcttggtcagtga

SEQ ID NO: 762481 - DNA, 120 bp, Artificial Sequence
  ENSG00000215883_56 (sequence is synthesized)
gcagagaggcttgtgtgcttttctgtcgctgtacccataagtgtcatctgcatgtgagcatgagggccggcccattgtacccctaacaggggaggatgctcagcacttcctggatgtcga

SEQ ID NO: 762482 - DNA, 120 bp, Artificial Sequence
  ENSG00000215883_57 (sequence is synthesized)
atacctgagcgataaacaactaatgttcaggaagtgctttccaggtggcaaaaggtgtttcctctactttgaagcaagaatcttcaccaatatacatgctattttattaccccaatttac

SEQ ID NO: 762483 - DNA, 120 bp, Artificial Sequence
  ENSG00000215883_58 (sequence is synthesized)
tgatgaggaaactaagcttctgagacttcaagcgattttccaaggtcatgtagggatacacaagttccagcatgtgattgtggtaaaggttgtgtgtgacacatgagtgcaaccagagat

SEQ ID NO: 762484 - DNA, 120 bp, Artificial Sequence
  ENSG00000215883_59 (sequence is synthesized)
actcagtgccccccaaaaaaagatttttattgctgcattctctgaaatagcaaggaattaaaaactgcctgtagatacagcaattaaagtgaactccatccgcatgtaccaatatagacg

SEQ ID NO: 762485 - DNA, 120 bp, Artificial Sequence
  ENSG00000215883_60 (sequence is synthesized)
aagtcctaaaaacataataactaagtgaaatgtacattgtgaaaggatagctacagtgagatacctgtacttggaaactgtaaaaacccaaaataatgctaaatgctcaggaagagacag

SEQ ID NO: 762486 - DNA, 120 bp, Artificial Sequence
  ENSG00000215883_61 (sequence is synthesized)
agacacaccagcttcaaggatagtggtggcctgtggtgataggtggaagggaatgggatggggtgatggggtttttagccatatctgtatttgtattttactataaaaatacttgacata

SEQ ID NO: 762487 - DNA, 120 bp, Artificial Sequence
  ENSG00000215883_62 (sequence is synthesized)
aacatgacaaaatatgaacccctggtaaatctgggcaatgagttccccaatgtctactatattattttctacctttttctgtttttcaaatagttccataattaaacatttaaaaaaaaa

SEQ ID NO: 762488 - DNA, 120 bp, Artificial Sequence
  ENSG00000215883_63 (sequence is synthesized)
ccagttggttgaatccacaaatgtggaacccatggatacagagggctaactgtatacttaatgatttgtatacttttctacacatatgttgtactccaataaaatgttcatttaaaaaaa

SEQ ID NO: 762489 - DNA, 120 bp, Artificial Sequence
  ENSG00000215883_64 (sequence is synthesized)
gcgtactctcccttaagcctccatttgtcatcttcaagatagacatagtgacacatgactcagagagttcttgggattgaactagataatgcattttcataataaataataacacaatca

SEQ ID NO: 762490 - DNA, 120 bp, Artificial Sequence
  ENSG00000215906_0 (sequence is synthesized)
atgactggctgcttcctgtggcagtatcacctccccaagctgaagaccggttccctgggaccagaggagacctctgcccctgtgaggatgtgtccccggcaccctgagcccgtgcccctg

SEQ ID NO: 762491 - DNA, 120 bp, Artificial Sequence
  ENSG00000215906_1 (sequence is synthesized)
gctcacccactccccgtgttgaaggaggccctggaaaaggtggaccagatcctgcgccaggcaatgtctgccccaggcgtggctgccatgtctgcagttgtcatccacaatgatactgtg

SEQ ID NO: 762492 - DNA, 120 bp, Artificial Sequence
  ENSG00000215906_2 (sequence is synthesized)
ctctggacagggaactttgggaagaagaatggctcagacccggcttctggggcccccaatgagtacaccatgtacaggatctccagcatctccaagatctttcctgtcctcatgctgtac

SEQ ID NO: 762493 - DNA, 120 bp, Artificial Sequence
  ENSG00000215906_3 (sequence is synthesized)
cgtctgtgggaggagggcatcgtggcctccctagatgaccctctggagcggtatgccagcaccttcaccattaacaacccgctgggcctggcatcagccgaacagcagggcctgatggac

SEQ ID NO: 762494 - DNA, 120 bp, Artificial Sequence
  ENSG00000215906_4 (sequence is synthesized)
gggctggagcaggtgggccccgccccaaggccttcacctgtcacccttcgaaggatggccagccagctctcagggctgcccagaaggctgcgctccacttcactgctgtggaagggcagc

SEQ ID NO: 762495 - DNA, 120 bp, Artificial Sequence
  ENSG00000215906_5 (sequence is synthesized)
acccaggaggccctgaacctgctcaaggacgatgtgctggtagtggacccgggaaccagatgccattacagcacgctggccttctcgctcctggcccacgtcctggcagctcacaccgcc

SEQ ID NO: 762496 - DNA, 120 bp, Artificial Sequence
  ENSG00000215906_6 (sequence is synthesized)
gacgtgcgcgcgcgcctggccgcgggcttctacggcagcgggcggccggcgccactctatgacctgggctggtaccggccgtcgggccagatgtactctaccgccgccgacctggccaag

SEQ ID NO: 762497 - DNA, 120 bp, Artificial Sequence
  ENSG00000215906_7 (sequence is synthesized)
gcggctcctgcggcccgacgcggccaagacgctgctggcgccgctgctggcctgcccgggcgcctacttcgccaacgagacgggcacgccgtgggagttccacgcgcagcggggctaccg

SEQ ID NO: 762498 - DNA, 120 bp, Artificial Sequence
  ENSG00000215906_8 (sequence is synthesized)
ccgtgggagttccacgcgcagcggggctaccgcgtggtgcgcaaggacggcgatctggacggctacgccgccaccttctcgctggtgcccccgctgcgtctgggcctggtgctgctgctg

SEQ ID NO: 762499 - DNA, 120 bp, Artificial Sequence
  ENSG00000215906_9 (sequence is synthesized)
gacctggtggcgcgggcctacgatgagctcctgcccgccctggagcgcgccctccgggaggccgagcccggcccggctccgccgcccaccgcgcaccccttcgccggctacttcaccttc

SEQ ID NO: 762500 - DNA, 120 bp, Artificial Sequence
  ENSG00000215906_10 (sequence is synthesized)
cccttcgccggctacttcaccttcgccaacctgaccttctacgaggtgcgcgccgggccggcgggcgagctgcgcctgcgccagttcgggccgcgcgtggaggcgctggtgcctccagcg

SEQ ID NO: 762501 - DNA, 120 bp, Artificial Sequence
  ENSG00000215906_11 (sequence is synthesized)
ttccgcaccctggcgctgcgccacctgcacggccgcgtcttccagctgcacgtggcccacgagttcccctgcgcactgccactcggcgacgcgtggctctcgctcgaggcccagcacggg

SEQ ID NO: 762502 - DNA, 120 bp, Artificial Sequence
  ENSG00000215906_12 (sequence is synthesized)
cagctggtcaacttctaccccttggatcaccacgggctgtcacccggcttcgacgtgcccggcctcaacacgtacagagtgctgcggctgcggggcaagccggtgttcaagacccagtga

SEQ ID NO: 762503 - DNA, 120 bp, Artificial Sequence
  ENSG00000215910_0 (sequence is synthesized)
atgacccggatgtcctgcccctggggttcctaccagtgggagccgggggcatgtcctgcagccccaagaggcataggtggtggggacatggctgggggtatcccagatgtgcgggggctc

SEQ ID NO: 762504 - DNA, 120 bp, Artificial Sequence
  ENSG00000215910_1 (sequence is synthesized)
caggaggcagctctaggtgcgggaaggagccaagaggaggcacgcctggtggaggaagcccagaccccagtgatgctgccacaggattcggggcagagggtggaggaggttcccggggac

SEQ ID NO: 762505 - DNA, 120 bp, Artificial Sequence
  ENSG00000215910_2 (sequence is synthesized)
ctgatggccaagagaatgtcgctcatcttgcacgtgcaaaagttgccctgggaccacgtgccttgcctgcggaggacccggcaaaacctgtaccaggacgtcggtggccacgcccacggc

SEQ ID NO: 762506 - DNA, 120 bp, Artificial Sequence
  ENSG00000215910_3 (sequence is synthesized)
tcagggctgggcggggccaagcgcggggcagcacgctctgctctccgacgtcccctcccgcccgcgacctgccgacctgcggggatcgttagcggtcccagcccccgtctagattcaaat

SEQ ID NO: 762507 - DNA, 120 bp, Artificial Sequence
  ENSG00000215910_4 (sequence is synthesized)
ccgactggggcccatctgattaaacagaccaggccactcactgtggagtggaccaaggatactcctgtccctgagcccatggagctaaggtctgatgccagccacaaggagaatgtgtcc

SEQ ID NO: 762508 - DNA, 120 bp, Artificial Sequence
  ENSG00000215910_5 (sequence is synthesized)
ccaaagcctgcagcgctcccgaagccaggcaagaggcttaagcaacgaagattccggaggagcctgggcatcggcctgagtggtagacatgaccagtgggtgcccgggtgccaggtggag

SEQ ID NO: 762509 - DNA, 120 bp, Artificial Sequence
  ENSG00000215910_6 (sequence is synthesized)
aggggagggcctgctgccacaccctccccaggggcagtgctagaccaggagccctgccgagtccagaccaacctggccagccctggtccccgcctgggcctagctctgaaggacacgact

SEQ ID NO: 762510 - DNA, 120 bp, Artificial Sequence
  ENSG00000215910_7 (sequence is synthesized)
ggccaactggtcaattcaagcttctggcaacagagcaacctgcagtccctggccaggaggcgccaagggaaggcccgagagtttgccatccagcagagcaacctgagcatcaacgagacc

SEQ ID NO: 762511 - DNA, 120 bp, Artificial Sequence
  ENSG00000215910_8 (sequence is synthesized)
agcagcccccacctctgcccagagcctgggggaagctctgggccccacaagcttccctggggtcctctcctatcccaagagccactggctcgcccatcttcctgcctgaggcagtccggg

SEQ ID NO: 762512 - DNA, 120 bp, Artificial Sequence
  ENSG00000215910_9 (sequence is synthesized)
ctgccggccccaggcacccctagcggggacttcaggcccactgaagcctttgcccctctcgatgggcatacacagccaggcctcagatcctggggtggtctggggagctggaggtccagg

SEQ ID NO: 762513 - DNA, 120 bp, Artificial Sequence
  ENSG00000215910_10 (sequence is synthesized)
ctggtgggggaacctctcaccctggaggacctggctgtccccagtcagaaccagactcaggccccatcccgtgctgccgtccaccagctgctggcttctgtacattgcctggcgcaggag

SEQ ID NO: 762514 - DNA, 120 bp, Artificial Sequence
  ENSG00000215910_11 (sequence is synthesized)
gcagcccgactcaggtgccaggctccccaggaaccccccgcctggggagtctcacccaagcagaaaggagaggagggggccccgagggagcgggtccacagggaggaggagaggacagct

SEQ ID NO: 762515 - DNA, 120 bp, Artificial Sequence
  ENSG00000215910_12 (sequence is synthesized)
ttccatctgtcagacacagtcccagcgagcagtgcgtcgaagaacaaggcacaaaacatcacagccccagagtctgaggcaatctgctggcagctgttgtccagatgttttcgatcctgg

SEQ ID NO: 762516 - DNA, 120 bp, Artificial Sequence
  ENSG00000215910_13 (sequence is synthesized)
aggcacttggtgaagaggcagcgggagccagcggcggcggcagtggcactgggccgctggcagctgttgcgaaagtgccttcaggccttgtggctccgggaggctcagctggaggcagca

SEQ ID NO: 762517 - DNA, 120 bp, Artificial Sequence
  ENSG00000215910_14 (sequence is synthesized)
tgggggcagtacacaaaggttctgctggtccggagcttccgagaggtcagcggtctccaggttgggccagggggccgtgtgaagcagtgtccaggaagtctgagggaggaggagattgct

SEQ ID NO: 762518 - DNA, 120 bp, Artificial Sequence
  ENSG00000215910_15 (sequence is synthesized)
cagcggcttctgtcacatcctaggcagagaacagacagcagacacgagagagtccagatcctgcaggccctgcaactggctgtgttcttcctgtggtgccaacagaagaaacgggccaga

SEQ ID NO: 762519 - DNA, 120 bp, Artificial Sequence
  ENSG00000215910_16 (sequence is synthesized)
caggagagggagactctgcggaaggccaccagggccacacagaggacagggagcttcccccaggcctggcactctactgctgcaggtgtagcctgggtggccccactgagcccccagcac

SEQ ID NO: 762520 - DNA, 120 bp, Artificial Sequence
  ENSG00000215910_17 (sequence is synthesized)
cagagagcttggctgtgcaggtgcttcggggcgtggcagcagttcgtgcaaagagggtcccggtaccgagaccacctggctgaccgccggacggggaccctgaggaaatgcctggaacag

SEQ ID NO: 762521 - DNA, 120 bp, Artificial Sequence
  ENSG00000215910_18 (sequence is synthesized)
ggagcctgtggcctgggtgcagtgggccaggcccaggggcagcaggagcaaggccggggctccctgcaggatgcctgctggacactggccctctgctgggcgctgctgctgtggaagatg

SEQ ID NO: 762522 - DNA, 120 bp, Artificial Sequence
  ENSG00000215910_19 (sequence is synthesized)
cggcttttccagcgccagtgggccaactccttcttccagggcctgcagcagcggatgctgcagcgcagcctgagatggtggcacttgagggcactgggcccagatgccacatcaagctgc

SEQ ID NO: 762523 - DNA, 120 bp, Artificial Sequence
  ENSG00000215910_20 (sequence is synthesized)
accaagaccccctcggctctggagccactgagcagcagcacactccaagactctctggagaaggttcccagggcccccaccctcccggacactctccaggggagccttctgtgggcagct

SEQ ID NO: 762524 - DNA, 120 bp, Artificial Sequence
  ENSG00000215910_21 (sequence is synthesized)
gggcagcggcagcaggggcagtgccttctgctctggcaggcacgggcccagcagttccagggcacagccaggtggtaccagcatacccgccagaggcgcatcttcctcagctggagccgc

SEQ ID NO: 762525 - DNA, 120 bp, Artificial Sequence
  ENSG00000215910_22 (sequence is synthesized)
tgggcaacagcccaatgggcctggagagagctggcttcccaccgggcctgggatcggacctgcagggctgtgctgggcctgtggcgtcagcggctgctgcagtcacggctggtggagtgg

SEQ ID NO: 762526 - DNA, 120 bp, Artificial Sequence
  ENSG00000215910_23 (sequence is synthesized)
tgggcccaggagcggggctggcggctggcacgagatgccctatgccactggcactcctgttggcaggggcagcagttcctgcatgaaaagtgccagacatgggtgcaggtccacctccag

SEQ ID NO: 762527 - DNA, 120 bp, Artificial Sequence
  ENSG00000215910_24 (sequence is synthesized)
ggcctgcagaaggtggtgttccggagctggcagcaggcagcagctcatcagagatgcacagtgacccggccagagcagctgctactgcagagctacttccaggcctggtgtgaggttgta

SEQ ID NO: 762528 - DNA, 120 bp, Artificial Sequence
  ENSG00000215910_25 (sequence is synthesized)
agagacacgggggtgctccgggcccagcatcaagcctttcaggatggcctgaggagaagagcactgggggccgtgtttgccacatggcgggaagcccaggaagtggcagccggggcacag

SEQ ID NO: 762529 - DNA, 120 bp, Artificial Sequence
  ENSG00000215910_26 (sequence is synthesized)
gagcagcgtgtggcccaggcctcccttgcccgctggagaagctgcgggcagcaaggccaggaagatgggcagcagaagaaggcccgggccccacaggccttcccagcatggccagtggcc

SEQ ID NO: 762530 - DNA, 120 bp, Artificial Sequence
  ENSG00000215910_27 (sequence is synthesized)
ccgggcatgcaccatgaggcccagcagcaggcaggagagagcgctggggcccaggcagcccagtgctggacttggtgctgggctctgtgggtgcatgagtcctgtcggggccaggtcagc

SEQ ID NO: 762531 - DNA, 120 bp, Artificial Sequence
  ENSG00000215910_28 (sequence is synthesized)
cgagcccatgcttcctggaagccgcgagcctgggtcctagaggcctcggtgcagtcggcggtgcgcggcggtgtccagcgagccatcctcacccagctccggccggctgagctcaggcgc

SEQ ID NO: 762532 - DNA, 120 bp, Artificial Sequence
  ENSG00000215910_29 (sequence is synthesized)
ttcctgcggacagtgcagctcagggtgcggctgggactgccaggggccggcaagacccgcagctgctggacacaggccacagagctggtgcctcccgcgccatcactgcagtgcagcctg

SEQ ID NO: 762533 - DNA, 120 bp, Artificial Sequence
  ENSG00000215910_30 (sequence is synthesized)
ggtggacggaggaagccaaggggaacggcctgggctcagaggtgcagggaacattccctctgccctgccttccagctctggccacagtggcctggacagagtagctgggtcccaggcctg

SEQ ID NO: 762534 - DNA, 120 bp, Artificial Sequence
  ENSG00000215910_31 (sequence is synthesized)
cccctgtggacgagggaccagggaccaagagcgcactccagccctgagcccagagcctgcaaagcccaaagcaaggcccataaacggaggctacggatcctggaaaagcaggcccaggcc

SEQ ID NO: 762535 - DNA, 120 bp, Artificial Sequence
  ENSG00000215910_32 (sequence is synthesized)
catggctctgccctccttctggccctgaagggtcacgatgctcttggccatcaggaggaagtacctgcagcgccggtgcctcgaggcactgcttcacgggctgcggggttcccagcaggc

SEQ ID NO: 762536 - DNA, 120 bp, Artificial Sequence
  ENSG00000215910_33 (sequence is synthesized)
caggtgcctggcagtggcatggcagcactgggtggatgcccaaggggcagagcagctggtgcggaccctgctcagggagtggcacctgagatgggcctggcagacgtggtggcagcggat

SEQ ID NO: 762537 - DNA, 120 bp, Artificial Sequence
  ENSG00000215910_34 (sequence is synthesized)
cctgcgactgcgagtggctcagcagttacagcagcaggaagatgggcctttaagaagtggcaccaacgcctggcagccaggagcccaaggagaggagctgccagtagcccaagaccctgg

SEQ ID NO: 762538 - DNA, 120 bp, Artificial Sequence
  ENSG00000215910_35 (sequence is synthesized)
agcaagccaggccccaagggccccgagagtggacaggaagccgccagagcaccgcggggttgggggcttggggcagagcatggggcccagctgcagctgtgacttgttctcatagaataa

SEQ ID NO: 762539 - DNA, 120 bp, Artificial Sequence
  ENSG00000215910_36 (sequence is synthesized)
aaaacagaactgaacttagccttcccagggaaggaaccatgccccacacatccagggagtgatgacagaggggacagcttgaagagctctgaaggacaataaaacccactcctcagtcct

SEQ ID NO: 762540 - DNA, 120 bp, Artificial Sequence
  ENSG00000215910_37 (sequence is synthesized)
ttatgtgtattgaccattctccccatccattccctcttcggaatgtttcagctgttctgagaaaacactttgcattcctgccccgcccctgtgatttctctttgggcggcaggcagccgg

SEQ ID NO: 762541 - DNA, 120 bp, Artificial Sequence
  ENSG00000215910_38 (sequence is synthesized)
gagaggctggaggcctggggagatgggggcagggcacaaggctaagctcagcaccttcctccaccctcctcactgtactcaactcctaggcgggcactaagagcagctgccttcctggac

SEQ ID NO: 762542 - DNA, 120 bp, Artificial Sequence
  ENSG00000215910_39 (sequence is synthesized)
gggcacaaagcaagctaatgtcacctgagaccactttggggacacggaccaaggattcccttaatcctgagcaggggctccctcctgcccaccccctagggtcaggggacagctgctccc

SEQ ID NO: 762543 - DNA, 120 bp, Artificial Sequence
  ENSG00000215910_40 (sequence is synthesized)
cctggtctcaagatggcagggcacagaggggtgaccccagtctccctcgaggggtgggaagcagggggaccgacccctgttcctcagccttctccaacacagcctggggagtctcaccca

SEQ ID NO: 762544 - DNA, 120 bp, Artificial Sequence
  ENSG00000215910_41 (sequence is synthesized)
ctttacagcagaaacaagtacagccccacatgcaggctgggccagggtccccgccctccaggagagcccagggcaaaggcctctccttgggaagaagcacagtggtggaccccgcccaga

SEQ ID NO: 762545 - DNA, 120 bp, Artificial Sequence
  ENSG00000215910_42 (sequence is synthesized)
ccagcgccagtgggccaaagaaactgaggctcagagggctggagcagcttgctgtaaatcccagtgggagtcaggagcaagaaggtcctgtgttgagacctgggtgctgcccccacacaa

SEQ ID NO: 762546 - DNA, 120 bp, Artificial Sequence
  ENSG00000215910_43 (sequence is synthesized)
gatggtcactgatggaattcggagcccagaagaaggctgtaggtgaggggagggtggcgatcaggagaagccagcttcccggaggggatgtcaggaggaatggaagcgagcagttgcagg

SEQ ID NO: 762547 - DNA, 63 bp, Artificial Sequence
  ENSG00000215910_44 (sequence is synthesized)
ggaggggatgtcaggaggaatggaagcgagcagttgcagggttaagaattctgtcagtggatc

SEQ ID NO: 762548 - DNA, 120 bp, Artificial Sequence
  ENSG00000215910_45 (sequence is synthesized)
gagccaagatcatgccactgcaccctggacaacagagcgagaatccatctcaaaaaaaaaaaaaaggaattctgtccttgaaagccacacacccacatggtccacatggaccctcagcct

SEQ ID NO: 762549 - DNA, 120 bp, Artificial Sequence
  ENSG00000215910_46 (sequence is synthesized)
gcctctttcagtgtacccctgcaacttcaggggaattcaattcaccgtgacctttcagaatgtgggggcactgctcacatgcctgccccacaacccccaggccctccctctccagcccat

SEQ ID NO: 762550 - DNA, 120 bp, Artificial Sequence
  ENSG00000215910_47 (sequence is synthesized)
cctctggcctttggacttcagggcacagttcatatctcctggcagctctcccggggcaccctcctgggcctagatgagtcccaggtctgctgctatttggagtttggggaaatgatcttc

SEQ ID NO: 762551 - DNA, 120 bp, Artificial Sequence
  ENSG00000215910_48 (sequence is synthesized)
ccctgggctcagctttcttatctttataagtgagtgcaggcagaagtactggtgtggttgtaggggtggcctctggagtctgggatccctgagcctggggaccagctccacctctgatca

SEQ ID NO: 762552 - DNA, 120 bp, Artificial Sequence
  ENSG00000215910_49 (sequence is synthesized)
gctgcttgggctcccagccaccccgggagcatgatgaggccagccagtgaagcaggtggagcactagctcggttagccagacgtggtggcacgcacctgtaatcccagctgctcgggagg

SEQ ID NO: 762553 - DNA, 120 bp, Artificial Sequence
  ENSG00000215912_0 (sequence is synthesized)
tggccgccaaggcctacgtgccctggaaccagcgggggctgctgctggtggtgctgcgggaggaggcccgtgggatgctgcagcgatctccacgcgccgggccgtccagagcgcagggcc

SEQ ID NO: 762554 - DNA, 120 bp, Artificial Sequence
  ENSG00000215912_1 (sequence is synthesized)
ggagggaggccgcagagacgggcggccccaccacgcaggagggggtcgcctgcggcgtgcaccagctggccacactgctgatggagctggattcagaggacgaggcctctcgcctcctgg

SEQ ID NO: 762555 - DNA, 120 bp, Artificial Sequence
  ENSG00000215912_2 (sequence is synthesized)
cggctgatgccctgtaccgcctgggccgcctggaggagacccacaaggccctgctggtggccctatcccggaggccccaggcagcccctgtgctggcacgactggccctgctgcagctga

SEQ ID NO: 762556 - DNA, 120 bp, Artificial Sequence
  ENSG00000215912_3 (sequence is synthesized)
ggaggggcttcttctatgacgccaaccagttggtgaagaagctggtccagtctggtgacaccgcctgcctccagcccaccctggacgtcttctgccacgaggaccggcagctgcttcaag

SEQ ID NO: 762557 - DNA, 120 bp, Artificial Sequence
  ENSG00000215912_4 (sequence is synthesized)
gccactgccacgccagggccctggccatcctgcgggcacggccaggcggggccgacggcagggttcacaccaaggaggccatcgcctacctgtctctggccatctttgccgcaggaagcc

SEQ ID NO: 762558 - DNA, 120 bp, Artificial Sequence
  ENSG00000215912_5 (sequence is synthesized)
aggcaagtgagtccctccttgcccgagcccgctgctatgggttcctgggccagaagaagacggccatgttcgacttcaacacagtgctgcgggctgagccggggaacgtgcaggcactgt

SEQ ID NO: 762559 - DNA, 120 bp, Artificial Sequence
  ENSG00000215912_6 (sequence is synthesized)
gtggacgggcgttggtgcacctggccctagaccagctgcaggaagccgtggacgacatcgtctctgctctgaagctcggccccgggactgtggtccctgagctccgctctctgaagccgg

SEQ ID NO: 762560 - DNA, 120 bp, Artificial Sequence
  ENSG00000215912_7 (sequence is synthesized)
acccagggcctccttgctgtgggggaggcgctgatcaaaatcgactcagggcaaccgcactggcacctcctcctggcagacattctcatggcacagggcagctacgaggaagctggcacc

SEQ ID NO: 762561 - DNA, 120 bp, Artificial Sequence
  ENSG00000215912_8 (sequence is synthesized)
cacctggaaaaagccctgcaccgtgccccaacgtcagaggcagcccgggcccggctgggcctgctccagctcaagaagggagacgtgccaggggctgcaagggacctgcagagcctggcc

SEQ ID NO: 762562 - DNA, 120 bp, Artificial Sequence
  ENSG00000215912_9 (sequence is synthesized)
gaggtggatgccccggatctcagctgcctgctgcatctcctggaggcctcggagcggcagagccttgcccaggcggcggcccaggaagccggcaccctcctggacgcagggcaacccagg

SEQ ID NO: 762563 - DNA, 120 bp, Artificial Sequence
  ENSG00000215912_10 (sequence is synthesized)
caggcgctgggctactgttcgctgtctgtcctggccagtggcagcagtgcctgtcacctgcgtctgcgggccacctgcctggccgagttgcaggagtttggccgggcccttagggacctg

SEQ ID NO: 762564 - DNA, 120 bp, Artificial Sequence
  ENSG00000215912_11 (sequence is synthesized)
gaccatgtgctccaggaggcgctgggggatggtgacctcccaaggcgggcagaggacttctgccgtcagggtcgcctgctgctgagcctgggggatgaggcggcggccgcaggggccttt

SEQ ID NO: 762565 - DNA, 120 bp, Artificial Sequence
  ENSG00000215912_12 (sequence is synthesized)
gcccaggccctgaagctggcgccctccttggcccagaacagcctgtgcaggcagccaggccgggcccccactgcacgcatgttccttctccgcgggcagtgctgcctggaggagcagcgt

SEQ ID NO: 762566 - DNA, 120 bp, Artificial Sequence
  ENSG00000215912_13 (sequence is synthesized)
cacgcagaggcctggacggcggtagagagcggcctcctggtggaccccgaccaccgtggcctgaagagactgaaggccagaatccggagggaggcatcctcaggctgctggctacagtga

SEQ ID NO: 762567 - DNA, 120 bp, Artificial Sequence
  ENSG00000215912_14 (sequence is synthesized)
cccaacccacacggggcggtcataggagccccacccaggcctgggccctccagccagccacatccctctgtcccccaccacccacgagggaatctgggtccccagggcacagccggctca

SEQ ID NO: 762568 - DNA, 120 bp, Artificial Sequence
  ENSG00000215912_15 (sequence is synthesized)
gcctccaagctgcagacgagtgtactctgaggaccagacatgggcccgtcggggtcccagacatgatgtcagcccaggagctcgtggcctgcctctgccgggagggggagcagcatctgg

SEQ ID NO: 762569 - DNA, 120 bp, Artificial Sequence
  ENSG00000215912_16 (sequence is synthesized)
cgctgggggagctgcccctggccaccgccttctacctggctgcattcagctgccacgccccctcagccctgcagagtgtgcgcactgccctggcccaggctcggggggcggcggtggtgg

SEQ ID NO: 762570 - DNA, 120 bp, Artificial Sequence
  ENSG00000215912_17 (sequence is synthesized)
ccaccctggagtcctggtgccgcggggacagccagatccccgccatccactgggacggcatggcagtggtctccctgacagggtcgctggcctctgccttcctcggcgccctctgcccgg

SEQ ID NO: 762571 - DNA, 120 bp, Artificial Sequence
  ENSG00000215912_18 (sequence is synthesized)
accaccccgccgccatcctgcacctgctggcaggtctgctggcccgcgggcgtcacgaagaagtggtgcaacgctgcagcgccctgctggactctcatgcacagcaagtcctggagctgc

SEQ ID NO: 762572 - DNA, 120 bp, Artificial Sequence
  ENSG00000215912_19 (sequence is synthesized)
ggctgacccgcgccctcgcctgggtcctgtccggggtgcaggcagcggatggtgtggccgcctatctccaggccttcgcctccagcgccgaccggacggtagctttcattcgcacccacc

SEQ ID NO: 762573 - DNA, 120 bp, Artificial Sequence
  ENSG00000215912_20 (sequence is synthesized)
agcggccccacctccccgcgctgctcagtgccctccaggactacctctcggggcacccggaggctgggcacagtgccggccagcaggagaccggtggccagcgactcctggcggctctgg

SEQ ID NO: 762574 - DNA, 120 bp, Artificial Sequence
  ENSG00000215912_21 (sequence is synthesized)
accccaggggcacccggagtgacaccctgtcacctgaagctctgctccacagcggcaggtttgaggactgcctggcagcatgcagccgggccctcgaggcccatcccaccggcagcgaac

SEQ ID NO: 762575 - DNA, 120 bp, Artificial Sequence
  ENSG00000215912_22 (sequence is synthesized)
cccaaggtgagcgccgagccgccctgctggtcacccgcgcggcctcggccttcttcctggacggccgggcccaggacgtgttttggaacctgcaggaggccttccgcgagagcccctctg

SEQ ID NO: 762576 - DNA, 120 bp, Artificial Sequence
  ENSG00000215912_23 (sequence is synthesized)
gggcgcggaggcagttccaggccgtgttctctgtccaggaccaggagcgcgtccgggctcaggcgcaggaggccgcggacgtgggcttcgcccgcttccaggaagccgtgcggaaccacc

SEQ ID NO: 762577 - DNA, 120 bp, Artificial Sequence
  ENSG00000215912_24 (sequence is synthesized)
ggaagccgtgcggaaccaccctgagctccgcgaggatgcgggccgcgagctgctggccccggtaacccgcgcgctccgcgtcctgcttcgcctggcgcctgccggggcgcgacccgcgct

SEQ ID NO: 762578 - DNA, 120 bp, Artificial Sequence
  ENSG00000215912_25 (sequence is synthesized)
cgggccatgtgcgagcgcctgctgcggcccgcacgccctgaggaccctgcgggggaccgtgcaggggaccgcgcacctctcctggctctgcgcggcttctgcgcgctgcacgccggggac

SEQ ID NO: 762579 - DNA, 120 bp, Artificial Sequence
  ENSG00000215912_26 (sequence is synthesized)
gctctgcgcggcttctgcgcgctgcacgccggggactcgcggcgcgccatggaggacttccagacggtagtggagcagggggcgccgcacccggggggctgtgtgcgcgcgctgtgcggc

SEQ ID NO: 762580 - DNA, 120 bp, Artificial Sequence
  ENSG00000215912_27 (sequence is synthesized)
gtccaggcccaggggtgtacccagctccctaaatcggggaggtacctgccctgccctctccacacccccttcccagccctccccacacaccccttcccaaccctccccacaacccccctt

SEQ ID NO: 762581 - DNA, 120 bp, Artificial Sequence
  ENSG00000215912_28 (sequence is synthesized)
cccaaccctccccacagccccccttcccaccctccccacacaccccttcccagccctcccccttcccagccctccccacaccaccttcccagccctccccatacctcccttcccagccct

SEQ ID NO: 762582 - DNA, 120 bp, Artificial Sequence
  ENSG00000215912_29 (sequence is synthesized)
ccccatacctcccttcccagccctccccacaccccccttccctgccctccccacaccccgcttccctgccccagcatgagtcagtgttggacagccagcctcacacctctgccttgggaa

SEQ ID NO: 762583 - DNA, 120 bp, Artificial Sequence
  ENSG00000215912_30 (sequence is synthesized)
ggacaggggacagcttcctacttgcatgaagggaccatcctagaagcttcacagtcccttctaccaccagcaacctggtccctgcagttggggccctcttggcccacacctggggctcag

SEQ ID NO: 762584 - DNA, 120 bp, Artificial Sequence
  ENSG00000215912_31 (sequence is synthesized)
accttgaagaagcagccccaggtctcgtccctggcctgggatcctacaggttggacaggtttgaggccagactcctggggcccttggggagatggtaccagccccagaagcccctccctg

SEQ ID NO: 762585 - DNA, 120 bp, Artificial Sequence
  ENSG00000215912_32 (sequence is synthesized)
ggtgtgaagctgcgttttgcttggaccctgagccttgggccagcctccagtagagcctgagccctctccagagacagagctcccaaatgggcccagccagcccataccccaagctgacct

SEQ ID NO: 762586 - DNA, 120 bp, Artificial Sequence
  ENSG00000215912_33 (sequence is synthesized)
ttcagggtgctttcatgggggcccttcatcgagaatccagtgtgctgggggtaaacttcctccctcctccacaggcccctcccttccaagcagagggaccaccgaggggccctgatgagc

SEQ ID NO: 762587 - DNA, 120 bp, Artificial Sequence
  ENSG00000215912_34 (sequence is synthesized)
tgcttccacagagcgagagaacagcttgttcttatacgtgcgttaaatgtccccaggccttgcagctgccagtgagcttggggacttctgggtggggcagaggcagccagcctttgccca

SEQ ID NO: 762588 - DNA, 120 bp, Artificial Sequence
  ENSG00000215912_35 (sequence is synthesized)
tcactgtgagtgtcacagactgaggcctcagcccggggctttctctcatggccatgggcgagagacatgctgggtgagctgactcggtgcaaaacgtgcccccaagccctgcctgacttc

SEQ ID NO: 762589 - DNA, 120 bp, Artificial Sequence
  ENSG00000215912_36 (sequence is synthesized)
accctggggagacagggccacgaccccccctcctggcttctctctcctcctgggcacttgcatttgtcccatttctgtccccttctctgccgcttccttccatggtcttgaacccacaga

SEQ ID NO: 762590 - DNA, 120 bp, Artificial Sequence
  ENSG00000215912_37 (sequence is synthesized)
tagaccccctgcctctccacccacttcgcttctgggatcatctgacgaaccccagtccagggggtcaggcagggaggggccctattcctcgccctgcatggaagtggggcccccaggcgg

SEQ ID NO: 762591 - DNA, 120 bp, Artificial Sequence
  ENSG00000215912_38 (sequence is synthesized)
caggtgcagggctgggtagcccccctcctcctcaggcctcacccactcctcaacccccatgcaccttcatcagctggcaccgcctatgtgtctctggccacaggggtctgggtaaagggt

SEQ ID NO: 762592 - DNA, 120 bp, Artificial Sequence
  ENSG00000215912_39 (sequence is synthesized)
cagtgcctcccaccttgagtacctcggggatgggcagcccacagtgggagagggccctgacagggaccttcagccccgctcctcgccttccccgctcggaatcttcacgcagtccccctc

SEQ ID NO: 762593 - DNA, 120 bp, Artificial Sequence
  ENSG00000215912_40 (sequence is synthesized)
ttccggggttccccagcgcaggcaccaatttgatccatcttccgcctgccagctccccatccacccttccctccctgtcttcacccgtgtgctcaaggactcaacaaacacctgtcagca

SEQ ID NO: 762594 - DNA, 120 bp, Artificial Sequence
  ENSG00000215912_41 (sequence is synthesized)
gcccaagagctaagttcagggacacgcaagttcctcgggtcaggtgggccagtcggcactgaggcagaggaggcaagggctggtccagagagcctggtcacagcagaagggcctgctcca

SEQ ID NO: 762595 - DNA, 120 bp, Artificial Sequence
  ENSG00000215912_42 (sequence is synthesized)
atgtcggggccaggtggaggcagtggggaggcgtcccctaggggtgcccttccccaccacgttccctgctcctaccgtcctcctcgcctgggatgtcctgccccatccatccgtgcaagg

SEQ ID NO: 762596 - DNA, 120 bp, Artificial Sequence
  ENSG00000215912_43 (sequence is synthesized)
ctgagtgtagatgccagccccgctgaggctcctcctggacctcaggatcgctgtgtttctcccccaccagggggctgccccctctaccaccagctcacccagcaggtatctctcatcagc

SEQ ID NO: 762597 - DNA, 120 bp, Artificial Sequence
  ENSG00000215912_44 (sequence is synthesized)
ctttggcctggctccttgctgggctctgaatgtctgcattcccccaaactttatgtgttgcgatcctaacccccaaggttatggtatcagaagtggggcttttgggagatgaccaggggt

SEQ ID NO: 762598 - DNA, 120 bp, Artificial Sequence
  ENSG00000215912_45 (sequence is synthesized)
ggaacctcatgagtgggattagtgtccttataaaagagaccccagagttctcccaagcccctccaccatgtggagacccagtgagaagctgtctgtgaaccaggaagggatcctcactag

SEQ ID NO: 762599 - DNA, 120 bp, Artificial Sequence
  ENSG00000215912_46 (sequence is synthesized)
agagcgagctggcaccttcatcttgggcttccagcctccagaactgtgagaaataagtatctgttgatgaaccacctgtctctgctattctgttggggcagtccagatagacaaagacat

SEQ ID NO: 762600 - DNA, 120 bp, Artificial Sequence
  ENSG00000215912_47 (sequence is synthesized)
gcccgttcccgcggcccaccacctctgccctgagcacagtgggtgagtctcggttccccttatcccatccctgctggggtccagccctggcttttcctgaggtagtttctccaggaccaa

SEQ ID NO: 762601 - DNA, 120 bp, Artificial Sequence
  ENSG00000215912_48 (sequence is synthesized)
gcagacacccacaaccagcagcccttaaggcatggacgcactcgtccctgaggcctgggtgtcccgcctggaggggcatgtccacagctgctctgggtcctgacgctccaggagctcacg

SEQ ID NO: 762602 - DNA, 120 bp, Artificial Sequence
  ENSG00000215912_49 (sequence is synthesized)
ctgtctgcagatccaccacttccctgggcagtccccggcctgcgtcttcctcagtgctcagctggaggtggagagaaatcaggctgggacggagggtggcccttgctttgcacgattcct

SEQ ID NO: 762603 - DNA, 120 bp, Artificial Sequence
  ENSG00000215912_50 (sequence is synthesized)
gcctcgacgttacaccagggacattccagcatctccccttcattaactgtagaccgccagcaaatccagatttcattcaaccaagtaaactggtagagtcatttccagcagctaatgtga

SEQ ID NO: 762604 - DNA, 120 bp, Artificial Sequence
  ENSG00000215912_51 (sequence is synthesized)
gctagcgcattaaattcagaatctctagtaagtgtacctgcatcaataaagccaagccggtccagctgcattaataccctaccctccattcccacacggttcccaggtctccgtgtgtga

SEQ ID NO: 762605 - DNA, 120 bp, Artificial Sequence
  ENSG00000215912_52 (sequence is synthesized)
atttgtaacatcttacgagcattttggtgtgaaagtggttccttcctgagtcaggctttgtacttgacccttcccctccctgggagtacactgaggttctagaggcaacagggtggctat

SEQ ID NO: 762606 - DNA, 120 bp, Artificial Sequence
  ENSG00000215912_53 (sequence is synthesized)
ggtggttaaataaaatgagcatcatttctaggcacctggccaggtaagcttatcacagcattttcaagcagaacaaaaaaaataaataaaggctactctcagatcttggaggacaagctg

SEQ ID NO: 762607 - DNA, 120 bp, Artificial Sequence
  ENSG00000215912_54 (sequence is synthesized)
cttcccctggaaggagaggctcagagaaccagggggttcacaattctcagcttcatctgagcccaaccagacatccccatgccaagcttcagcatccagttccttcccactcagtgccca

SEQ ID NO: 762608 - DNA, 120 bp, Artificial Sequence
  ENSG00000215912_55 (sequence is synthesized)
cgtttcagtagtgaggctgtgagtgtgagccacacagcagtcacacaactcagagttaaactgtgcatccgagttgtagcagcagcagccccgaggctctcaggaacaagggactcttcc

SEQ ID NO: 762609 - DNA, 120 bp, Artificial Sequence
  ENSG00000215912_56 (sequence is synthesized)
atggccatggcagtcctgattctctgtctatgacttaaactgagtttagagacctgaacgtgtggttccttcctgttagtgctgctggacactcaggggaccccccacagccctcgtggt

SEQ ID NO: 762610 - DNA, 120 bp, Artificial Sequence
  ENSG00000215912_57 (sequence is synthesized)
tgtggtcatcctcgtggccgtgacagcctcacacagcagcacgtgggttcccgaggccctcaattctgctggtgcctcacagccagcatgggggatggcttggttaactgtgaagctccc

SEQ ID NO: 762611 - DNA, 120 bp, Artificial Sequence
  ENSG00000215912_58 (sequence is synthesized)
ccaacaacactgtgggccaacagcctccccttcccactggccaggagatcggcctgcagcccagcccaagcaacaaccacactaacctaatccccggaccccaccttttgatagtgacag

SEQ ID NO: 762612 - DNA, 120 bp, Artificial Sequence
  ENSG00000215912_59 (sequence is synthesized)
acctaatccccggaccccaccttttgatagtgacaggaggcagacaaatcctaggcagacagggacaggttcccagtgaaaccccacctccgagccaaagacagtttaaagcctgaaagc

SEQ ID NO: 762613 - DNA, 120 bp, Artificial Sequence
  ENSG00000215912_60 (sequence is synthesized)
tgatccccacccttcacctattttacatgtacctatcttttcctaattcattttctacactggcatgcccacctttgagtggtacctttgtttaagccttttttgcataatcagaagcca

SEQ ID NO: 762614 - DNA, 120 bp, Artificial Sequence
  ENSG00000215912_61 (sequence is synthesized)
tgtttaagccttttttgcataatcagaagccaatcagcatgcactcccccattctgagcccataaatgccccggacccagccacactaggagagaaaccacctgacttcaggtcgggaac

SEQ ID NO: 762615 - DNA, 120 bp, Artificial Sequence
  ENSG00000215912_62 (sequence is synthesized)
cacccgtgcatcccctctctgctgagagctgttccgtctctcaataaaattcttctctgcccttctcacacttcgattggcagcatctcctcattcttcttggacacgggacaagaactt

SEQ ID NO: 762616 - DNA, 120 bp, Artificial Sequence
  ENSG00000215912_63 (sequence is synthesized)
gggaactgccatacatgggtacaagctataacacaagcaggctggaacatgcccagcccagccacaggctgagctggtgaacagccaggtgtggcccaggcaggctgagtgggtgggcca

SEQ ID NO: 762617 - DNA, 120 bp, Artificial Sequence
  ENSG00000215912_64 (sequence is synthesized)
cctcctgcggcaggtagcatggccaagagaggcctggggagggggggtgtcagcagccagaggtacctggctggcaaagtgaccaaagaggtacctgactgtgtcactttgagggcctgt

SEQ ID NO: 762618 - DNA, 120 bp, Artificial Sequence
  ENSG00000215912_65 (sequence is synthesized)
ctctggggaccccctcctagtatgaatttatgtatcagttggggtctacttgggagatggaaaccacaacagtgattctaatagcatgaatttaatgtgcagaatttttcattagttctg

SEQ ID NO: 762619 - DNA, 120 bp, Artificial Sequence
  ENSG00000215912_66 (sequence is synthesized)
ggtaaaaacagctctagggaatcatggaggttgcaaccacaaaattcagagaggtgacctggctggcgacactggtgataatggtcacctgccatgcagcctttcagctcaggtgggcac

SEQ ID NO: 762620 - DNA, 120 bp, Artificial Sequence
  ENSG00000215912_67 (sequence is synthesized)
actcctctgcccctgcccacttcctctcccaggtgaatcttgaccacacctgtgcctggcactgtgcacacattctctgttgttcaactctgcgatcaatctggaaaaaaaagaaaaaaa

SEQ ID NO: 762621 - DNA, 81 bp, Artificial Sequence
  ENSG00000215912_68 (sequence is synthesized)
tgttcaactctgcgatcaatctggaaaaaaaagaaaaaaaaaaaacctttttaggagagtaaaaggaaaataaatcttggg

SEQ ID NO: 762622 - DNA, 89 bp, Artificial Sequence
  ENSG00000215912_69 (sequence is synthesized)
gaactgcttagggcaagcctgcctccaattccattcaaagtcattcccccgctcgctgagatagatgcatatctgattgccttatgtaa

SEQ ID NO: 762623 - DNA, 120 bp, Artificial Sequence
  ENSG00000215912_70 (sequence is synthesized)
aaaatgtataaaaccaagctgtcctctgaccaccttgggcacatgtcaggacctcctgaggctgtgtcacaggtgtgcatccttaattttggcaaaataaacttcccaaattggctgaga

SEQ ID NO: 762624 - DNA, 120 bp, Artificial Sequence
  ENSG00000215915_0 (sequence is synthesized)
cttcatgattaactccccaaggtcctgcatattttctcaatgggccaccgcgcccggccagaagatttttatggtaaaattttgtgatgggaaaactcatcccggaaaatgttgagacct

SEQ ID NO: 762625 - DNA, 120 bp, Artificial Sequence
  ENSG00000215915_1 (sequence is synthesized)
gatgctgagtcctcagcagctcagagaatacgtacttctgtcccaggtcacccaaacattgacctgtgtcggttccccactaggaacaaaatgtaactgaggacgttgtcagatgcttgt

SEQ ID NO: 762626 - DNA, 120 bp, Artificial Sequence
  ENSG00000215915_2 (sequence is synthesized)
cctcgtcaccctgagcttgttggctgctatctaattcttattctttcattttcttgcccgcacgttcttgatagcagatcactgacaacagccattggaagcttaggaaaagggtatgtg

SEQ ID NO: 762627 - DNA, 65 bp, Artificial Sequence
  ENSG00000215915_3 (sequence is synthesized)
acaaaaattagccgggacgtgaacccgagaggtagagcttgcagtaagcagagatcatgccactg

SEQ ID NO: 762628 - DNA, 120 bp, Artificial Sequence
  ENSG00000215915_4 (sequence is synthesized)
cgtctcaaaaaaaaaaaaaaaaaaagcatgtgtaacgtgaaaaaatggacactttagccatcgcctgactttctgttgaattgggaaagagcctcctcccgtccacatgggatggccttc

SEQ ID NO: 762629 - DNA, 120 bp, Artificial Sequence
  ENSG00000215915_5 (sequence is synthesized)
ctcctcccgtccacatgggatggccttcctgatgtggctctccaagaccatccctggagggcataaaacctcacaaatgcatcaggccgtgtgctggggatggggcatcgtcacgccagg

SEQ ID NO: 762630 - DNA, 120 bp, Artificial Sequence
  ENSG00000215915_6 (sequence is synthesized)
tctgactaggaaggaggatggggaggcagggctgggggctttgaggtcgaggcgtggccgtggattccagaaagccccttggctggtgtgcgtgcctgcccagcggcatccgtgtatcct

SEQ ID NO: 762631 - DNA, 120 bp, Artificial Sequence
  ENSG00000215915_7 (sequence is synthesized)
aacacctgccctccgtgtccctgcatctgcaggccatgtcaaaggacgccctgaatctggcgcagatgcaggagcagacgctgcagttggagcaacagtccaagctcaaacaacttgtca

SEQ ID NO: 762632 - DNA, 120 bp, Artificial Sequence
  ENSG00000215915_8 (sequence is synthesized)
atgaggatttacggaagcaggaggagtccgtgcagaagcaccatcagaccttcttggagtccatcagggcggctggcaccttgtttggggaaggattccgtgcctttgtgacagaccggg

SEQ ID NO: 762633 - DNA, 120 bp, Artificial Sequence
  ENSG00000215915_9 (sequence is synthesized)
acaaagtgacagccacggtggctgggctgacgctgctggctgtcggggtctactcagccaagaatgcgacagccgtcactggccgctacatcgaggctcggctggggaagccgtccctag

SEQ ID NO: 762634 - DNA, 120 bp, Artificial Sequence
  ENSG00000215915_10 (sequence is synthesized)
tgagggagacgtcccgcatcacggtgcttgaggcgctgcggcaccccatccagcaggtcagccggcggctcctcagtcgaccccaggacgtgctggagggtgttgtgcttagtcccagcc

SEQ ID NO: 762635 - DNA, 120 bp, Artificial Sequence
  ENSG00000215915_11 (sequence is synthesized)
tggaagcacgggtgcgcgacatcgccataatgacaaggaacatcaagaagaaccggggcctgtacaggcacatcctgctgtacgggccaccaggcaccgggaagacgctgtttgccaaga

SEQ ID NO: 762636 - DNA, 120 bp, Artificial Sequence
  ENSG00000215915_12 (sequence is synthesized)
aactcgccctgcactcaggcatggactacgccatcatgacaggcggggacgtggcccccatggggcgggaaggcgtgaccgccatgcacaagctctttgactgggccaataccagccggc

SEQ ID NO: 762637 - DNA, 120 bp, Artificial Sequence
  ENSG00000215915_13 (sequence is synthesized)
gcggcctcctgctctttgtggatgaagcggacgccttccttcggaagcgagccactgagaagataagcgaggacctcagggccacactgaacgccttcctgtaccgcacgggccagcaca

SEQ ID NO: 762638 - DNA, 120 bp, Artificial Sequence
  ENSG00000215915_14 (sequence is synthesized)
gcaacaaattcatgctgatcctggccagctgccaccccgagcagttcgactgggccatcaatgcctgcatcgacgtgatggtccacttcgacctgccagggcaggaggagcgggcgcgcc

SEQ ID NO: 762639 - DNA, 120 bp, Artificial Sequence
  ENSG00000215915_15 (sequence is synthesized)
atgttcttaagccggccacagaaggaaagcggcgtctgaagctggcccagtttgactacgggaggaagtgcttagagatcgctcggctgacagagggcatgtcatgccggaagatcgcac

SEQ ID NO: 762640 - DNA, 120 bp, Artificial Sequence
  ENSG00000215915_16 (sequence is synthesized)
agctggccgtgtcctggcaggccacggcgtatgcctccaaggacggggtcctgaccgaggccatgatggacgcctgcgtgcaagactttgtccagcagcaccagcagatgatgcgctggc

SEQ ID NO: 762641 - DNA, 120 bp, Artificial Sequence
  ENSG00000215915_17 (sequence is synthesized)
tgaagggggagaggcctgggcccgaggacgagcaaccctcatcctgagtccatggggagaccacacctcacggagcctggccgcggacccctcccacccctgcctttgcggccccgcaca

SEQ ID NO: 762642 - DNA, 120 bp, Artificial Sequence
  ENSG00000215915_18 (sequence is synthesized)
tttaggaaatactccccgtaataaagtcccacgggggccgcaccgctgtgtctattggctgacacggggcggggtttggggccccctaacgtccccctggggtcaaaggtgacagaaaag

SEQ ID NO: 762643 - DNA, 120 bp, Artificial Sequence
  ENSG00000215915_19 (sequence is synthesized)
gcagaagctggggctttctggaggatttaaccacagaggggtgggcttcacaggaggtggctgccacggcggggccgggtgcccgtgccccatcctgaggccgtgcatacgcgggtgccc

SEQ ID NO: 762644 - DNA, 120 bp, Artificial Sequence
  ENSG00000215915_20 (sequence is synthesized)
cttcgcctccctcccctccgccagagctgcctgtggccagacacacggtggagggaagtgcacgcgaaacagacacagcggcttcaaatagatgccgcccctgcccgcgctttgcagcta

SEQ ID NO: 762645 - DNA, 120 bp, Artificial Sequence
  ENSG00000215915_21 (sequence is synthesized)
caaatagatgccgcccctgcccgcgctttgcagctagtccctgcaaaccttgatgatggggctgggcgcggtggctcacgcctggaatctcagcgaggccaaggagagtggatcacctga

SEQ ID NO: 762646 - DNA, 69 bp, Artificial Sequence
  ENSG00000215915_22 (sequence is synthesized)
aaaaaaaaaaaaaaaaaaaaattagccggccgtggtggcaagtgcctgagtggaggttgcactgagctg

SEQ ID NO: 762647 - DNA, 120 bp, Artificial Sequence
  ENSG00000215915_23 (sequence is synthesized)
tgagcccgggaagtggaggttgcactgagctgagaccatggaattgcactgcagcatgggcaacaagagtcaaactccctctaaaaaaaaaaaaaaaaaaagggccaggtggcacatgcc

SEQ ID NO: 762648 - DNA, 120 bp, Artificial Sequence
  ENSG00000215915_24 (sequence is synthesized)
ctaaaaaaaaaaaaaaaaaaagggccaggtggcacatgccggtggtcccagcttcttggcttggaggctgaggtaggaggatcgcctgagcatgggaggcagaggttgcagtgagccaag

SEQ ID NO: 762649 - DNA, 120 bp, Artificial Sequence
  ENSG00000215915_25 (sequence is synthesized)
tgtacctctaaataaccaaaaccttgattacagccatggggtgggggtgggggtcaggggcgtctgactatggctggggaactcatttggtttttctcctctcttatttttttgggtaga

SEQ ID NO: 762650 - DNA, 82 bp, Artificial Sequence
  ENSG00000215915_26 (sequence is synthesized)
gggctcaagcaatcctcctgcctcggcttccttctgttttttttttttttttggcaatagagtcttgctcgcccagggtgga

SEQ ID NO: 762651 - DNA, 67 bp, Artificial Sequence
  ENSG00000215915_27 (sequence is synthesized)
ttacaggcttgagccaccgtgcctggtctgttttttttttttttttggcaatagagtcttgctcagg

SEQ ID NO: 762652 - DNA, 68 bp, Artificial Sequence
  ENSG00000215915_28 (sequence is synthesized)
aactgaagatccacaaaataagtgaaaagctgatcaatgtactttgcaatctcccccacccttaagaa

SEQ ID NO: 762653 - DNA, 76 bp, Artificial Sequence
  ENSG00000215915_29 (sequence is synthesized)
ggttctttgttgcccgcaaaacattgtccctaactccaccgcctatcccaaaacctgtaagaactagtgataatcc

SEQ ID NO: 762654 - DNA, 84 bp, Artificial Sequence
  ENSG00000215915_30 (sequence is synthesized)
tgagatccatcccctgcccgcaaaacattgtccctaactccaccgcctatcccaaaacctgtaagaactagaactcagcccgcc

SEQ ID NO: 762655 - DNA, 120 bp, Artificial Sequence
  ENSG00000215915_31 (sequence is synthesized)
gtccctctcaagggggcatctggcatgggtgtccgcctggctgcctgtcttccggcctccacctcgtggtgtgggagctgctgccttggccggcccacttgggaactccttccccaggcg

SEQ ID NO: 762656 - DNA, 120 bp, Artificial Sequence
  ENSG00000216490_0 (sequence is synthesized)
gcagtcgccacacctttgcccctgctgcgatgaccctgtcgccacttctgctgttcctgccaccgctgctgctgctgctggacgtccccacggcggcggtgcaggcgtcccctctgcaag

SEQ ID NO: 762657 - DNA, 120 bp, Artificial Sequence
  ENSG00000216490_1 (sequence is synthesized)
cgttagacttctttgggaatgggccaccagttaactacaagacaggcaatctatacctgcgggggcccctgaagaagtccaatgcaccgcttgtcaatgtgaccctctactatgaagcac

SEQ ID NO: 762658 - DNA, 120 bp, Artificial Sequence
  ENSG00000216490_2 (sequence is synthesized)
tgtgcggtggctgccgagccttcctgatccgggagctcttcccaacatggctgttggtcatggagatcctcaatgtcacgctggtgccctacggaaacgcacaggaacaaaatgtcagtg

SEQ ID NO: 762659 - DNA, 120 bp, Artificial Sequence
  ENSG00000216490_3 (sequence is synthesized)
gcaggtgggagttcaagtgccagcatggagaagaggagtgcaaattcaacaaggtggaggcctgcgtgttggatgaacttgacatggagctagccttcctgaccattgtctgcatggaag

SEQ ID NO: 762660 - DNA, 120 bp, Artificial Sequence
  ENSG00000216490_4 (sequence is synthesized)
actatgcctgcagctctacgccccagggctgtcgccagacactatcatggagtgtgcaatgggggaccgcggcatgcagctcatgcacgccaacgcccagcggacagatgctctccagcc

SEQ ID NO: 762661 - DNA, 120 bp, Artificial Sequence
  ENSG00000216490_5 (sequence is synthesized)
accacacgagtatgtgccctgggtcaccgtcaatgggaaacccttggaagatcagacccagctccttacccttgtctgccagttgtaccagggcaagaagccggatgtctgcccttcctc

SEQ ID NO: 762662 - DNA, 120 bp, Artificial Sequence
  ENSG00000216490_6 (sequence is synthesized)
aaccagctccctcaggagtgtttgcttcaagtgatggccggtgagctgcggagagctcatggaaggcgagtgggaacccggctgcctgcctttttttctgatccagaccctcggcacctg

SEQ ID NO: 762663 - DNA, 120 bp, Artificial Sequence
  ENSG00000216490_7 (sequence is synthesized)
ctacttaccaactggaaaattttatgcatcccatgaagcccagatacacaaaattccaccccatgatcaagaatcctgctccactaagaatggtgctaaagtaaaactagtttaataagc

SEQ ID NO: 762664 - DNA, 120 bp, Artificial Sequence
  ENSG00000216490_8 (sequence is synthesized)
atcccgcatctgagaggcgcagctgcctccacccgcctagtcccgcccaagggttcaatgagcgcctactgtgtacttttggggcaggagctggggtctccttttgtggcccagggcaca

SEQ ID NO: 762665 - DNA, 120 bp, Artificial Sequence
  ENSG00000216490_9 (sequence is synthesized)
agttcagcagctggccaagggccgccggcatgcattcttgctgctacccttgatgcattcattccagccagggcagggctcgcgtgtctttgggacctattaggcagatgccctagaggc

SEQ ID NO: 762666 - DNA, 120 bp, Artificial Sequence
  ENSG00000216490_10 (sequence is synthesized)
tgagcgacttgctcaccgctccagcgacatgggccacccgccacccctcagctgaagccggaagtcagcacctattaggtgccgcctctattcagtcggacttggaaagggttcacgtgg

SEQ ID NO: 762667 - DNA, 120 bp, Artificial Sequence
  ENSG00000216490_11 (sequence is synthesized)
cggacttggaaagggttcacgtggatcccttgctcagctcagaggcaaggtctccaggtgaagtgacaagaaatgagcatgggccaaggccggaggcggtggctcatgcctgtaatccca

SEQ ID NO: 762668 - DNA, 83 bp, Artificial Sequence
  ENSG00000216490_12 (sequence is synthesized)
ggctgaggcaggacaattgcttgaaccagggagtcgggtgttgcagtgagccgagatcgtgccgcagcacaccagcctagcct

SEQ ID NO: 762669 - DNA, 120 bp, Artificial Sequence
  ENSG00000216490_13 (sequence is synthesized)
caaagtcaagattccacctggcaagttctggaaggcgtgcaagatgaattgcgtatcacagccccctttctacaagactaccaagtggggttgagagaagtggggaactgcccagggcta

SEQ ID NO: 762670 - DNA, 120 bp, Artificial Sequence
  ENSG00000216490_14 (sequence is synthesized)
ggggtaagaatctttttagccctcagcttgacactcatagtcccatggagtcagggatggacaagacagagggaccagagataaaggaacccaggcggaggttgcagtgagctgagatca

SEQ ID NO: 762671 - DNA, 120 bp, Artificial Sequence
  ENSG00000216490_15 (sequence is synthesized)
acaagagcaaaacttgatagctttgcatagggaaagagggcattgatgctggggttttgaaaggtgagtaggagtccatcaggcaaaaaaagtatgtattaattcgaagtattaaacatc

SEQ ID NO: 762672 - DNA, 120 bp, Artificial Sequence
  ENSG00000216490_16 (sequence is synthesized)
cctagccacccccattgggaaagatgtgccactgatttgcgaggcgggaggcgggggccagacttgggaatatgtgcagccctttctgggctggaaccagggtgcatgggttggggtagc

SEQ ID NO: 762673 - DNA, 120 bp, Artificial Sequence
  ENSG00000216588_0 (sequence is synthesized)
attccttgcctttgatgtgagtgataggagcgggcgattctgcttctccctccatctcccggcggggattgtacggtgagagaatgagagcaaaacctcagagcccccttcccaggaacc

SEQ ID NO: 762674 - DNA, 120 bp, Artificial Sequence
  ENSG00000216588_1 (sequence is synthesized)
ctgtcccagcctggtccccacccaccaccaccactgacccgatgctagagaaggatgcggctggaggtgacttcccagccaacttggtcctccaactaatgccactgaagacattcccag

SEQ ID NO: 762675 - DNA, 120 bp, Artificial Sequence
  ENSG00000216588_2 (sequence is synthesized)
ctgctatccggggagtcatccagagtgagctcaactattctgtgatcctgcagtgggtggtgacaatggaccctgagcctgtgctgagctggaccttcagtggggtgccctgtgggatgg

SEQ ID NO: 762676 - DNA, 120 bp, Artificial Sequence
  ENSG00000216588_3 (sequence is synthesized)
gagagaagctgttcatccgacggttgtcctgtgagcagctgggcacctacatgtgcatagccacaaacagcaagaaacagctggtctctgagcctgtaaccatctcgctgccaaaaccca

SEQ ID NO: 762677 - DNA, 120 bp, Artificial Sequence
  ENSG00000216588_4 (sequence is synthesized)
gagccggggcactgattgcaggcatgtgtttcatcatcatccagagcctaaggactgacaggcagagaataggaatatgcagctgaaatgtgggcaactctcctgtcagctgaagagatg

SEQ ID NO: 762678 - DNA, 120 bp, Artificial Sequence
  ENSG00000216588_5 (sequence is synthesized)
ggtgctttgtacctctctatccacgtggaaaaaaaaacccatcccatagcttccaagtctacaacatctctgttcaagggaacaacccaacgtaaccagactccctttgccctgtttctg

SEQ ID NO: 762679 - DNA, 120 bp, Artificial Sequence
  ENSG00000216588_6 (sequence is synthesized)
aaacacctgaagaaaacatctgatgggttgactcggtgccatccttggtcccatcgccgtgacacgttgtgcaagcaaagcatcagaggctcatccctgtctgtgggagctcagtgctca

SEQ ID NO: 762680 - DNA, 120 bp, Artificial Sequence
  ENSG00000216588_7 (sequence is synthesized)
gaaaacaggggggaggttttaccttggaaattggccagaccccaaaatatgtcttttacacatgctgctttttttttctctttttcaaaaagaaccaaaaaataaattaaaacaccacca

SEQ ID NO: 762681 - DNA, 120 bp, Artificial Sequence
  ENSG00000216588_8 (sequence is synthesized)
ggggaagtggccagggtagggcatggtcatcgtgagcagggtcctgcagggtgaggccggggctgcagacgcgactgtacaggtctatgaagaccccatgtgtgatgaggagaccttctc

SEQ ID NO: 762682 - DNA, 120 bp, Artificial Sequence
  ENSG00000216588_9 (sequence is synthesized)
tcagctccagccacacccctacctggaggaagctgcttttaacagacagcctccaactaatgccactgaagacattcccagctgctatccggggagtcatccagagtgagctcaactatt

SEQ ID NO: 762683 - DNA, 120 bp, Artificial Sequence
  ENSG00000216588_10 (sequence is synthesized)
gaggggtcctctggacgtcagctccagccacacccctacctggaggaagctgcttttaacaggcgccctgctcacatcctgcacctgctctgccttctcagagctgcccttctcggcaca

SEQ ID NO: 762684 - DNA, 120 bp, Artificial Sequence
  ENSG00000216921_0 (sequence is synthesized)
cgagatacaggcgtgcaccccggagaggacaggctgaggaccctcaacagagacaggaaaacctgcccgtcactgagaaatggttggaaaaaacatgagtaaaagcctcactcttaagaa

SEQ ID NO: 762685 - DNA, 120 bp, Artificial Sequence
  ENSG00000216921_1 (sequence is synthesized)
tcctggaagagtagcatacgattcaggcgggataaagatgttttgggagaaaaaaatcgagcatcacgcaagacacctgcagaacgaggacatcagggttcgcagaagcgctctgaacaa

SEQ ID NO: 762686 - DNA, 120 bp, Artificial Sequence
  ENSG00000216921_2 (sequence is synthesized)
aaggcggcctgagggcccacgagctccagactctgcatgagcttccggagggtcatggagaaggaacaccacgcgtggggtccaagcatccacgccagagttcacaggatcttcatcatg

SEQ ID NO: 762687 - DNA, 120 bp, Artificial Sequence
  ENSG00000216921_3 (sequence is synthesized)
gaaatggcccgcacctcgctgaccccgtaataatcccacctcggggtccacgctgcagcagagtcccagggttctctagcgcatctctggtgcccaataaaacctaagtcaattggattg

SEQ ID NO: 762688 - DNA, 120 bp, Artificial Sequence
  ENSG00000216937_0 (sequence is synthesized)
aacggccccatccggcgccggcggcgggtgcccggcggtctttgctgccgcccgggggcgcagaggccgggccttttctttcagcacaaacgtcagtttgtaaaagggaggtgctggagt

SEQ ID NO: 762689 - DNA, 120 bp, Artificial Sequence
  ENSG00000216937_1 (sequence is synthesized)
ctgaggagttttcaggcttccgtctcgaaggaagtctggcaggctcggaattgtcatcttcctcaggcaaatagtttttcaccttagagccagcaaggccaaaccgcccagtcacccgac

SEQ ID NO: 762690 - DNA, 120 bp, Artificial Sequence
  ENSG00000216937_2 (sequence is synthesized)
ttcccacagtctcagcagggaggaataagtttttttcatctgtaatttggaagccaagtcagtaacaaaatgaaaccagtaaagcatctgttgaccaccagtaacaaatcggcaaatgtt

SEQ ID NO: 762691 - DNA, 120 bp, Artificial Sequence
  ENSG00000216937_3 (sequence is synthesized)
ccagcattaactactaaaaaaggactacataatttaccattatcacctgagctaaaggaaaaacataatgcaaaattaattcatgataaaattgaaccaatggtcctaagatctccacca

SEQ ID NO: 762692 - DNA, 120 bp, Artificial Sequence
  ENSG00000216937_4 (sequence is synthesized)
acaggagaatccattttacggtatgctttgcccattccatcgagtaagacaaagaacttactaccagaagatgaaatgatcggaaaaattatcaaacatctgaagatggttgtttccact

SEQ ID NO: 762693 - DNA, 120 bp, Artificial Sequence
  ENSG00000216937_5 (sequence is synthesized)
ttggaagaaacctatggacattgcgatcagaatggagaagaaccatttgtaaagcatgaacatgaagaattatctttatctgttggggatgatatgaattcattcttgacatattgttcg

SEQ ID NO: 762694 - DNA, 120 bp, Artificial Sequence
  ENSG00000216937_6 (sequence is synthesized)
caatttgcagctcagctagaagaagcacttaaagaagaacaaaatattttggaatctctttttaagtggtttcagtggcaggtcaatcagatggaagaaataagtaaagatcaaactctt

SEQ ID NO: 762695 - DNA, 120 bp, Artificial Sequence
  ENSG00000216937_7 (sequence is synthesized)
aaacagaggtctaaatcctccgtgaaagtcatgttgtctaaaactatggataaagaaaatcgaccagaagcagtgaaaagttgtgaagctctggcacagaaaattgaagaattcttagaa

SEQ ID NO: 762696 - DNA, 120 bp, Artificial Sequence
  ENSG00000216937_8 (sequence is synthesized)
gcccactcaactgatgaatttaaagatgtttctgcaacagaaccacaaactgctcattcaatgactaatcgatttaatgccatgttgaaagtatttgaaaaccaggcaaatatgttggag

SEQ ID NO: 762697 - DNA, 120 bp, Artificial Sequence
  ENSG00000216937_9 (sequence is synthesized)
agagctgtaaatgatcaagttttgttagatgctgaatacaaacagatgcagtgtgattttcagttgttatcagaagagaagttggtgctggaaaatgaactacaaaagttgaaggacaaa

SEQ ID NO: 762698 - DNA, 120 bp, Artificial Sequence
  ENSG00000216937_10 (sequence is synthesized)
gagaaaactaagcctacaaataatcgaacaaagaaagctgtgaaaacagtgaagaaaaaagacaaaggaaaatctgaggattcagaaaagaagatgtctccagaaaaagagtttaaaata

SEQ ID NO: 762699 - DNA, 120 bp, Artificial Sequence
  ENSG00000216937_11 (sequence is synthesized)
aaagaagatttggatcaagtacagaaagtagcacgtctggaaattgagaacaaagtccttcaggagcaattgaaacaggctttacaggaagctgaaaaagctaagcatcaacttaactat

SEQ ID NO: 762700 - DNA, 120 bp, Artificial Sequence
  ENSG00000216937_12 (sequence is synthesized)
ttcctaaatcaagagaagttacttaaaagtgaggggaaaactgagacaacaatgcaagtgggtaatagtcaaacaaaagttaaaggtgaagattcaaaaaatataccattggagaaagaa

SEQ ID NO: 762701 - DNA, 120 bp, Artificial Sequence
  ENSG00000216937_13 (sequence is synthesized)
acaagaaaatcactggtttcagattcaggtggacaaaggacaagtgataaaatccaagaatatccacagatcactgcccaaagcggaagactgattgaaaagagatgctaatagagtttc

SEQ ID NO: 762702 - DNA, 120 bp, Artificial Sequence
  ENSG00000216937_14 (sequence is synthesized)
tgaaatactttggaaaagtctcccaaaccttcagagagtggatgggagcgaagtaaggagaccccacctgagcagatacatggtattgcttacaataaagtacatttttgctctttacaa

SEQ ID NO: 762703 - DNA, 120 bp, Artificial Sequence
  ENSG00000216937_15 (sequence is synthesized)
ttcccacagtctcagcaggtacacagggcggggagcctcgggagcggctcccttagcaggacctgagggtttcgggagagtcctggctttgcacttagttttcccgctgcctggctgcct

SEQ ID NO: 762704 - DNA, 120 bp, Artificial Sequence
  ENSG00000216937_16 (sequence is synthesized)
ccgtggcggttgtgctgctttttatgcaggatgtaggatcgaaggcaaatcatcctttccctacgtcccctgccaacccctgccgctctcctctattttgtacactttatcattaaagga

SEQ ID NO: 762705 - DNA, 120 bp, Artificial Sequence
  ENSG00000216937_17 (sequence is synthesized)
ctgattgaaaagagctcagagaagaaacgatctagccctgctatttcagatctttcacagatccttaagtctcaagatgaatcagcatttttagagagttcaaatgaagtttcagttgct

SEQ ID NO: 762706 - DNA, 120 bp, Artificial Sequence
  ENSG00000216937_18 (sequence is synthesized)
gaaaaccaatcctataaatctccatcagagacccatgataaatcacttacaacagtatcatccagcaaagaagttcaagattcactgtctgttggaacattggctcaaaaaaacgaaaca

SEQ ID NO: 762707 - DNA, 120 bp, Artificial Sequence
  ENSG00000216937_19 (sequence is synthesized)
gtgatatcaccattcattttacctcctgttcttacagaaagtaaaaaggctgatgtttcagaagaacaattacaaaagatgactgaagaacaaacttaccaagcagcagaaaaatctcaa

SEQ ID NO: 762708 - DNA, 120 bp, Artificial Sequence
  ENSG00000216937_20 (sequence is synthesized)
gctgacagtgaagttccagatgaaaatcttatggttgaaaataaagattcagtaacaaaagtccaaatagaacaaatgaaacaaagaacttctagtatggaaagacatgaggagactctt

SEQ ID NO: 762709 - DNA, 120 bp, Artificial Sequence
  ENSG00000216937_21 (sequence is synthesized)
acaaccccacaattgcctgaggacatggttttagtttcaagaatccaatctgaaactaaaaatcttaaagctaccagaaatgagagttttcattctcataatgatgtaccagaagaaaat

SEQ ID NO: 762710 - DNA, 120 bp, Artificial Sequence
  ENSG00000216937_22 (sequence is synthesized)
agtactcataatgaagtaccaaatgaaaggcttgtagttgagcatcaagaatcattgtcaaaaaccaaattacaaataaagaaacaagaaacttctacagagcaaccactcaccactcct

SEQ ID NO: 762711 - DNA, 120 bp, Artificial Sequence
  ENSG00000216937_23 (sequence is synthesized)
gataaagaaccaaatgaaaatcttatacttaggcatcaagactcaatgtcaaaatcagaaatgcaagtgaaggaacaaagaactctcaaagggcaaagaattattactcatgatgaagaa

SEQ ID NO: 762712 - DNA, 120 bp, Artificial Sequence
  ENSG00000216937_24 (sequence is synthesized)
ccaggcaaaaatcttgtgcttgaacatcaagattcagtgtcaaaactggaaatgcaaattgaaaaaaccaaaaaacttcctagagagaaaagacatagtactcatgatgaagaatcaggt

SEQ ID NO: 762713 - DNA, 120 bp, Artificial Sequence
  ENSG00000216937_25 (sequence is synthesized)
gaaaatcctatgcttaaacatcaagattcagtgtcaaaaatccaagtgcaattagagattcaagaaacttctgaaggagaaggacgtagcataccagataaaaattctatgtttgttcat

SEQ ID NO: 762714 - DNA, 120 bp, Artificial Sequence
  ENSG00000216937_26 (sequence is synthesized)
caagattcagtgtcaaaactccaaatgcaagaaaagaaaaaaataactcctggaagggaaaggcgtaatactcgtattgtagtaccaaatgaaaatgtgatttctgttcatcaagattca

SEQ ID NO: 762715 - DNA, 120 bp, Artificial Sequence
  ENSG00000216937_27 (sequence is synthesized)
aagtcaaaactccaaatgcaagaaaagaaacaaataaattctggagtggaaagacacaagacgtttcctttagaaatcaaaaaaaaggatatatcacttgaacatctgttgcctgaggag

SEQ ID NO: 762716 - DNA, 120 bp, Artificial Sequence
  ENSG00000216937_28 (sequence is synthesized)
aaagttttattatcaagaagcgaatctcaaacgaagaaacttcaagctaaagtaacttcaagaaaaattaaaaatgaagcagcctcagaacttccagatacagcagaaaatcttccagca

SEQ ID NO: 762717 - DNA, 120 bp, Artificial Sequence
  ENSG00000216937_29 (sequence is synthesized)
atgtacccgtcaattagcgacctaataattcaatttgatttaaacaaagtggtcgagactgatatagaaagcttgagaggtgctttgggaagacgcttattaaatgatgaattcaagaca

SEQ ID NO: 762718 - DNA, 120 bp, Artificial Sequence
  ENSG00000216937_30 (sequence is synthesized)
cagtcaaagagtttccctgggcctgatatagaacaattgacagatgcatttggaagagatatactaaaggatgaattcaagacacgatcaaagagtctccctgagactgatgaacgattg

SEQ ID NO: 762719 - DNA, 120 bp, Artificial Sequence
  ENSG00000216937_31 (sequence is synthesized)
catagtacaactgagagaggtacaataaatgatgcaattaagacgcagttaaagagaaagagttaccctgagactgtcttaaaacacttgaaaggtgttaatggaaaagatataataaag

SEQ ID NO: 762720 - DNA, 120 bp, Artificial Sequence
  ENSG00000216937_32 (sequence is synthesized)
catctaatcaacatacagtcaaagagtcatggagagactgataaggaacacttagcagatgatactggaagaggtataataaagggatcaatcaatgcacaactaaagggtcaccaaaag

SEQ ID NO: 762721 - DNA, 120 bp, Artificial Sequence
  ENSG00000216937_33 (sequence is synthesized)
actgataagaacttctttgcctatgctactggaagaggtctaatgaaggagtcaaccacgacacaattaaaaagtcacccagagactgataaggaattcttggcagatgctattggaaga

SEQ ID NO: 762722 - DNA, 120 bp, Artificial Sequence
  ENSG00000216937_34 (sequence is synthesized)
ggtataataatagggccaatcactacacaactgaagagtcaccgagagactgataaagaactcttaaaagatgctattggaagagatataataaagggaccaatcagtgcacaattaaag

SEQ ID NO: 762723 - DNA, 120 bp, Artificial Sequence
  ENSG00000216937_35 (sequence is synthesized)
agtcaccaggagactgatgtagaacccttgacaaatgccattggttcaagtaaaacaattggtgagataaagacacaactaaggactcactatgatgtgaacttatttaaaaacaaagat

SEQ ID NO: 762724 - DNA, 120 bp, Artificial Sequence
  ENSG00000216937_36 (sequence is synthesized)
atgtccgtacaacgtcaagaaggtatctttactaggagcattacaccaagtaaattcccaacaaaagtgatcaatttatcaccctttgaaaataaagaggaaacttatgagtactcttca

SEQ ID NO: 762725 - DNA, 120 bp, Artificial Sequence
  ENSG00000216937_37 (sequence is synthesized)
ccctatgtgactgcaccttcaaaagcaatttatagaacatatagggctggtccaagcttttctaaagacatccaccttcctttactgaatcaactcccttcagggcattcgaaagttgtt

SEQ ID NO: 762726 - DNA, 120 bp, Artificial Sequence
  ENSG00000216937_38 (sequence is synthesized)
accttaagccaaaaaactattgaatttactctgcctactgtgaccaatacagttggaaaacctacctataaagtgttacatgctgctgcccgaaaatctgtaccacacccatacttttga

SEQ ID NO: 762727 - DNA, 120 bp, Artificial Sequence
  ENSG00000216937_39 (sequence is synthesized)
aaattctgagcaagataagcaacatgacaaattcagaaatgcaggaaaggaaattgcaagtatagaagccttttgaaaataatactgactcgtgtggatggtgcttattgaaaaacagct

SEQ ID NO: 762728 - DNA, 120 bp, Artificial Sequence
  ENSG00000216937_40 (sequence is synthesized)
ggaaatacagtggatcaacagggtaggcccagatcacagaaggcctgaccaggcagtgaatgtgtctttaccatatggaacaattttgaacttctaagatcaagcctttttgttgctgag

SEQ ID NO: 762729 - DNA, 120 bp, Artificial Sequence
  ENSG00000216937_41 (sequence is synthesized)
ggtaagaaaggagctctgtgatgaggttccagcttacttctattcgccagtgtccctgtaatgctttctggtgtgatgtaaaatcaattaaacaaaacttgtgctctgcatgttttgaaa

SEQ ID NO: 762730 - DNA, 120 bp, Artificial Sequence
  ENSG00000216937_42 (sequence is synthesized)
aaagaaagctgtgaaaacagtgaagaaaaaagacaaaggaaaatctgaggattcagaaaagaagatgtctccagaaaaagagtttaaaataaaagaagatttggatcaagtacaggtaac

SEQ ID NO: 762731 - DNA, 120 bp, Artificial Sequence
  ENSG00000216937_43 (sequence is synthesized)
ctctatgcatcaatatttgattaatacttgctctgatagtcatatatagagaaacattattacgtatgtgattatagggtatatatgtctgtgtgtgtgtatgtgtctctgtgtgtgtgt

SEQ ID NO: 762732 - DNA, 120 bp, Artificial Sequence
  ENSG00000216937_44 (sequence is synthesized)
atgatgatgaactccctgagcttttgtcagagaaagtatcactccttcatttttgtagaccaacttttctggaaactgctcattcaatgactaatcgatttaatgccatgttgaaagtat

SEQ ID NO: 762733 - DNA, 120 bp, Artificial Sequence
  ENSG00000216937_45 (sequence is synthesized)
aatgaagacaaaagaaacataaaatgaacatatggccttttccatgatacatgctgttattttacctgtcttctattactcatgtgttattcatctttcttccagatttgcatatttctc

SEQ ID NO: 762734 - DNA, 120 bp, Artificial Sequence
  ENSG00000216937_46 (sequence is synthesized)
catttatacatagggaattgggaacttttagaagtttttccctgtctctgatggattggacaatgtttgcaattctaggagacatctgattattctttcaaaataaatttatcagaagga

SEQ ID NO: 762735 - DNA, 120 bp, Artificial Sequence
  ENSG00000216937_47 (sequence is synthesized)
acagggtaggcccagatcacagaaggcctgaccaggcagtggtgagtttgaaagtttcaaattactttattacttttcttttcaattttaaagaagttatgcaattatcttttaaatcac

SEQ ID NO: 762736 - DNA, 120 bp, Artificial Sequence
  ENSG00000216937_48 (sequence is synthesized)
aaataataaaaatattcaccctattcaaaatattaattttttgaacaatgcataaccaacttagaaaaaggaaaagatgtaaaaaatatatgacaataacctgatatgtgttaagcatac

SEQ ID NO: 762737 - DNA, 120 bp, Artificial Sequence
  ENSG00000216937_49 (sequence is synthesized)
tctgtagaatttgtaatggcacaaaatacaactgctaataattttaaagatgtgattcttaccaatcaaatgttttataacactgaaatagtatttgtaactgcgtttttactgtcccct

SEQ ID NO: 762738 - DNA, 120 bp, Artificial Sequence
  ENSG00000216937_50 (sequence is synthesized)
gaagagcataaatattattggctataaaattgtcctaaacccaatctgggttatcactgacataaatatttagacttgcagaatattcttttatgccttaaattttcctatttttcccca

SEQ ID NO: 762739 - DNA, 120 bp, Artificial Sequence
  ENSG00000216937_51 (sequence is synthesized)
gcaagaatcagaggaatgagcagtaatattaatctaaatattctggagttatgtttctgccaaaaaataataaagaaaattggatttctactcaaacaaaataaagtgaaataaaatgac

SEQ ID NO: 762740 - DNA, 120 bp, Artificial Sequence
  ENSG00000216937_52 (sequence is synthesized)
tggtttcagattcaggtggacaaaggacaagtgataaaatccaagaatatccacaggcagtacaagaaacatggtgccggcatctgcttctggcgagggcctcagggagcttctactcgt

SEQ ID NO: 762741 - DNA, 120 bp, Artificial Sequence
  ENSG00000216937_53 (sequence is synthesized)
attcgtgaatgaatttcagtgattagctagggcataggcaaggcaaaggcatccatgtggttaaaaagtaatgacagattctgaattcacatcatttaaaaaagtaacattgattacaga

SEQ ID NO: 762742 - DNA, 120 bp, Artificial Sequence
  ENSG00000216937_54 (sequence is synthesized)
attgaatttaatgtgtatgcagaaaccaaatccacttttgcttgttcaagtggatccaacttctgcaacaactcatttctagaaacagacatcgtggtcttcagcatctcatccacagca

SEQ ID NO: 762743 - DNA, 120 bp, Artificial Sequence
  ENSG00000216937_55 (sequence is synthesized)
ccaatggaattctcaaacgctgacaaatactcgtgaatttctactggatagtcttcattaatttcttcacctgccgttatggctgactcacggccttcgactccagcctcccggaaagcg

SEQ ID NO: 762744 - DNA, 120 bp, Artificial Sequence
  ENSG00000216937_56 (sequence is synthesized)
gtcgggcaacgatgacgacaatgacgcgccagctctgcccgcgccaccagcggcgctttccgatgatctcaccaatgtatagctttttatacacaaattacataccaataaagtgattta

SEQ ID NO: 762745 - DNA, 120 bp, Artificial Sequence
  ENSG00000216937_57 (sequence is synthesized)
aaagtataggataaaatatagaaactaggattttattaaattattatgcataaatttatatagtagcaggataggacaatcatgttggtctttgggggagctaatagacatattcttcag

SEQ ID NO: 762746 - DNA, 120 bp, Artificial Sequence
  ENSG00000216937_58 (sequence is synthesized)
gatcttgtcagtgcattgtctagctgttcacctgtgcatattgagaaataaataaataggcatagatctagagggccttgaaattcttttgtaattgtgggacaaattgagatctcaatt

SEQ ID NO: 762747 - DNA, 120 bp, Artificial Sequence
  ENSG00000216937_59 (sequence is synthesized)
agatattgatttgttggatggtttgtgaagatatgattcctttttggtgaacagaatgcttagaactagtgttcagtcttagagatgaagttgttaagttagataagaacaatgtacatt

SEQ ID NO: 762748 - DNA, 120 bp, Artificial Sequence
  ENSG00000216937_60 (sequence is synthesized)
acctgaatcatgtggtctggacaggaaagcagtcctgttaagaattccttcatgacatttttctagggaggcatagatgttacaagtgaaggtaataggctgttttgcctttcaaagcgt

SEQ ID NO: 762749 - DNA, 120 bp, Artificial Sequence
  ENSG00000216937_61 (sequence is synthesized)
caaagttacaaggtaagcagtagactgggagaaaagatttgtgctcatacagtagaaaaaaggagtactaataagaatctataactccctaaaaacacataagaaaaataggcaaagtat

SEQ ID NO: 762750 - DNA, 120 bp, Artificial Sequence
  ENSG00000216937_62 (sequence is synthesized)
ataaagaggaggtaactaagggaaagacaaaaaaattggccaataaacattttaagagatgctcaatctcaccgtgatcagggaagatataagacaaagccatgacttttttgtctacaa

SEQ ID NO: 762751 - DNA, 120 bp, Artificial Sequence
  ENSG00000216937_63 (sequence is synthesized)
aatttagaagttttctaatatcaactattggcagagaggtagtggaatgaatactcttaccatgctaatataatagaaatttccccctttcgaggacaatttagcacagtttagtaataa

SEQ ID NO: 762752 - DNA, 120 bp, Artificial Sequence
  ENSG00000216937_64 (sequence is synthesized)
caaaagtgtatgccatgttatatagcaaatctctttttatctaccctcgggaaaggagtacaatgtgctcaagaaagcatataaaaggaattttttttgcatcagtgcgatggtagcaga

SEQ ID NO: 762753 - DNA, 120 bp, Artificial Sequence
  ENSG00000216937_65 (sequence is synthesized)
actagaaagaacctgtttttgttagtaggagtatggctcaataatctatggtaaatggataataagggaatactatgaataactatgtgaccacaaattagataacttagatgatatata

SEQ ID NO: 762754 - DNA, 120 bp, Artificial Sequence
  ENSG00000216937_66 (sequence is synthesized)
tctctagaaaaacccaaactaaactgtatcaagaagaacaagaacatgtgactgaacttataagtagtaaaagatttaattagtaattaacatattcccaccaagaaatgcttaggccag

SEQ ID NO: 762755 - DNA, 120 bp, Artificial Sequence
  ENSG00000216937_67 (sequence is synthesized)
atgacttcactttttaatcctgtcaaatatttaaagaagagttaataccaggcctgtacaaactcttctaaaaaattaaagagttcacacttctcaattcattctatgagattagtgtta

SEQ ID NO: 762756 - DNA, 120 bp, Artificial Sequence
  ENSG00000216937_68 (sequence is synthesized)
ctctgataccaaaattagacaatcacaagaacataaatatgatatttattttaagaagataaatatatgttatgaatatgaacatgaaaatccttaccaaaatactagcaaactgaatcc

SEQ ID NO: 762757 - DNA, 120 bp, Artificial Sequence
  ENSG00000216937_69 (sequence is synthesized)
aacagcatataaaaaagattatctatgatgaacatgtgagatttattttaggaatgcaaggttgatttaaaatgcaggtatcaatttacataatgtgtaatattgattaaataaaggaga

SEQ ID NO: 762758 - DNA, 120 bp, Artificial Sequence
  ENSG00000216937_70 (sequence is synthesized)
aaaaattacatcagttcgctagattcagtaaatgcacttgacaaaattcaacatctttttatgatacaaagttccacaaaccaggaatagaaggaaacttccttaacctgatgaaggcca

SEQ ID NO: 762759 - DNA, 120 bp, Artificial Sequence
  ENSG00000216937_71 (sequence is synthesized)
tctacaaaccccatggtcaacatcatactcagtggtgagaatgaataatttctccctatgatcaggaacaagacaagacattcacttctattcatcattatagtggaggttctagcaagg

SEQ ID NO: 762760 - DNA, 120 bp, Artificial Sequence
  ENSG00000216937_72 (sequence is synthesized)
gcaattatggaagaaaaggaaataaaagtgtctgcattggtgaggaagaagtaaaactacctctatttgcaaatgacatgattttagatataaaaacatcctgagttctgctaaaaccta

SEQ ID NO: 762761 - DNA, 120 bp, Artificial Sequence
  ENSG00000216937_73 (sequence is synthesized)
ttggaagtaatgaatgaattcatcaaggctgcaatatacatgatcaataaacaaaaacaatttgtatttctatacactagctgttatgggttgaattgtatcccctcaaaagatatgttg

SEQ ID NO: 762762 - DNA, 120 bp, Artificial Sequence
  ENSG00000216937_74 (sequence is synthesized)
aagttctcaccccctgctacctcagggtgaccttatttggaaacagggttattcccgatattattagttgagatgaggtcatactggagtaggatgggcccttaatccaacgtgactaat

SEQ ID NO: 762763 - DNA, 120 bp, Artificial Sequence
  ENSG00000216937_75 (sequence is synthesized)
gtccttataggaattggaaaagacagataaacatggaggaaatactgctaatgtaaagatagagacagagactggatttattctgccacaatccaaagaatgccagggactaacagtggc

SEQ ID NO: 762764 - DNA, 120 bp, Artificial Sequence
  ENSG00000216937_76 (sequence is synthesized)
tagaataggcatggtggtttccttccccagatatttcagagggagcatggctgtgccaacactttaattttggatttcaagtcatcaggctgtgagaaaataaattcttgttgttttaaa

SEQ ID NO: 762765 - DNA, 120 bp, Artificial Sequence
  ENSG00000217128_0 (sequence is synthesized)
atatgactgaggcgcccatgggggtggcggggcggctgtaggagcaggggcctagcaagcgcccagcggagcgacccctgcctggccgtggctagcatggcccctacgctgttccagaag

SEQ ID NO: 762766 - DNA, 120 bp, Artificial Sequence
  ENSG00000217128_1 (sequence is synthesized)
ctcttcagcaagaggaccgggctgggcgcgcccggccgcgacgcccgggacccagattgcgggttcagttggcctttaccagagtttgatccaagccagattcgactgattgtatatcaa

SEQ ID NO: 762767 - DNA, 120 bp, Artificial Sequence
  ENSG00000217128_2 (sequence is synthesized)
gactgtgaaagacgagggagaaatgttttgtttgactccagtgttaagagaagaaatgaggacatatcagtatcgaaactcggcagtgatgctcaagttaaagtctttgggaaatgctgc

SEQ ID NO: 762768 - DNA, 120 bp, Artificial Sequence
  ENSG00000217128_3 (sequence is synthesized)
caactgaaacctggaggagacagttcttcctctttagatagttctgtgacttcatcttctgatataaaagaccagtgtcttaagtaccagggttctcggtgctcttctgatgccaatatg

SEQ ID NO: 762769 - DNA, 120 bp, Artificial Sequence
  ENSG00000217128_4 (sequence is synthesized)
cttggagagatgatgtttggctcagtagcaatgagctacaaaggatccaccttaaaaattcatcagattcgttcccctccacagctcatgctcagcaaagtgtttactgctcggactggc

SEQ ID NO: 762770 - DNA, 120 bp, Artificial Sequence
  ENSG00000217128_5 (sequence is synthesized)
agcagtatttgtgggagtctcaatacgctacaagatagtcttgaattcatcaatcaggacaacaatacattaaaggctgataataacacagttattaatggactgcttggaaatataggt

SEQ ID NO: 762771 - DNA, 120 bp, Artificial Sequence
  ENSG00000217128_6 (sequence is synthesized)
ctttcacagttctgcagccccaggcgggcattctctgagcagggtccgctccgcctgatcaggagcgcctctttctttgcagttcacagcaacccaatggacatgcctggaagagagctc

SEQ ID NO: 762772 - DNA, 120 bp, Artificial Sequence
  ENSG00000217128_7 (sequence is synthesized)
aatgaggacagagacagtggcatagcacggtctgcatctctcagcagcttgctgatcactccatttccttccccaaactcctcacttacccgaagttgtgccagcagctaccagcgacgt

SEQ ID NO: 762773 - DNA, 120 bp, Artificial Sequence
  ENSG00000217128_8 (sequence is synthesized)
tggcgacgcagccaaacaacaagtttggaaaatggggtatttcctagatggtctatagaagaaagctttaatctctcagatgaaagctgtggccctaacccaggaattgtgcggaaaaag

SEQ ID NO: 762774 - DNA, 120 bp, Artificial Sequence
  ENSG00000217128_9 (sequence is synthesized)
aagattgcaattggggtaatcttttcattgtccaaagatgaagatgaaaataacaaatttaatgaattctttttttcacattttcctctctttgaaagccacatgaacaaattaaagagt

SEQ ID NO: 762775 - DNA, 120 bp, Artificial Sequence
  ENSG00000217128_10 (sequence is synthesized)
gcaatagaacaggctatgaaaatgagccggagatcagctgatgccagtcagagaagtttggcatataatcgaatagttgatgccctaaatgaattcagaacaacaatttgtaatctttac

SEQ ID NO: 762776 - DNA, 120 bp, Artificial Sequence
  ENSG00000217128_11 (sequence is synthesized)
acgatgccacgaattggagaacctgtctggcttacaatgatgtcggggactccagaaaagaaccacctttgctatcgtttcatgaaggagttcacctttctaatggaaaatgcttccaaa

SEQ ID NO: 762777 - DNA, 120 bp, Artificial Sequence
  ENSG00000217128_12 (sequence is synthesized)
aatcaattcttgccagctctcattactgcagttctgaccaatcatcttgcctgggttccaacagtcatgccaaatggacaaccacctataaaaatatttttagaaaagcattcctctcag

SEQ ID NO: 762778 - DNA, 120 bp, Artificial Sequence
  ENSG00000217128_13 (sequence is synthesized)
agtgtggacatgttggcaaagactcatccatataacccactttgggcacaactgggagacttgtatggcgctattggctctcccgtacggttagcaaggactgtggtagttggcaaacga

SEQ ID NO: 762779 - DNA, 120 bp, Artificial Sequence
  ENSG00000217128_14 (sequence is synthesized)
caagacatggtccagaggctactttattttcttacttattttataagatgctctgaacttcaagaaacgcatcttttagaaaatggagaagatgaagccatcgttatgccaggcacagta

SEQ ID NO: 762780 - DNA, 120 bp, Artificial Sequence
  ENSG00000217128_15 (sequence is synthesized)
attactaccactttagagaaaggtgaaatagaagaatcagagtatgtccttgtcacaatgcatagaaacaaaagcagtttgctctttaaagagtcagaagaaattagaactcccaattgt

SEQ ID NO: 762781 - DNA, 120 bp, Artificial Sequence
  ENSG00000217128_16 (sequence is synthesized)
aactgtaaatattgcagtcatccactccttgggcaaaatgtagagaacatttcacaacaagagagagaagatattcaaaacagctctaaggagctgctaggaatttcagatgagtgccag

SEQ ID NO: 762782 - DNA, 120 bp, Artificial Sequence
  ENSG00000217128_17 (sequence is synthesized)
atgatttctccttctgactgccaagaagaaaatgctgttgatgttaaacagtacagagataaattaagaacttgctttgacgccaagttagagacagttgtttgcacaggatctgttcca

SEQ ID NO: 762783 - DNA, 120 bp, Artificial Sequence
  ENSG00000217128_18 (sequence is synthesized)
gtagacaaatgtgcattgtcagagtcaggcttagagtcaacagaggaaacatggcagagtgagaagttgctggattcagacagtcacacaggcaaagcaatgagatccacaggaatggtt

SEQ ID NO: 762784 - DNA, 120 bp, Artificial Sequence
  ENSG00000217128_19 (sequence is synthesized)
gtggaaaaaaaacctccagataagattgtgcctgcttcattttcttgtgaggctgcccagacaaaggttactttcctgattggggattctatgtcacctgattcagatactgagcttcga

SEQ ID NO: 762785 - DNA, 120 bp, Artificial Sequence
  ENSG00000217128_20 (sequence is synthesized)
agtcaggcagtggtggatcagattaccagacatcacaccaaaccattgaaggaagaaagaggggctattgatcagcatcaagaaactaaacaaacaaccaaggaccaatctggagagtct

SEQ ID NO: 762786 - DNA, 120 bp, Artificial Sequence
  ENSG00000217128_21 (sequence is synthesized)
gatacacagaacatggtttctgaagagccctgtgaacttccctgttggaatcattcagacccagaaagcatgagcttattcgacgaatattttaatgatgattcaatcgaaaccaggact

SEQ ID NO: 762787 - DNA, 120 bp, Artificial Sequence
  ENSG00000217128_22 (sequence is synthesized)
attgatgatgttccatttaaaacaagtacagatagtaaagaccattgctgtatgttagagttttcaaaaatattgtgtacaaaaaataacaagcagaacaatgaattttgtaaatgtata

SEQ ID NO: 762788 - DNA, 120 bp, Artificial Sequence
  ENSG00000217128_23 (sequence is synthesized)
gaaacagttccccaagattcatgtaaaacctgctttcctcagcaggaccaaagagatacactctccattcttgtcccccatggggataaagagagttcagataaaaaaattgctgtagga

SEQ ID NO: 762789 - DNA, 120 bp, Artificial Sequence
  ENSG00000217128_24 (sequence is synthesized)
actgaatgggacattccaagaaatgaaagttcagacagtgcccttggggatagtgaaagtgaagatacaggtcatgatatgactagacaagttagcagttattatggaggagagcaagaa

SEQ ID NO: 762790 - DNA, 120 bp, Artificial Sequence
  ENSG00000217128_25 (sequence is synthesized)
gattgggcagaagaggatgagataccttttcctgggtcaaagttaatcgaagtgagtgctgttcagcccaacattgccaacttcgggaggtccttgctgggtggctactgctcatcttat

SEQ ID NO: 762791 - DNA, 120 bp, Artificial Sequence
  ENSG00000217128_26 (sequence is synthesized)
gtgcctgactttgttcttcaaggaattgggagtgatgagaggttccgtcagtgtctgatgtcagatttatctcatgctgtgcagcatccagttttggatgaaccaatagcagaagctgtc

SEQ ID NO: 762792 - DNA, 120 bp, Artificial Sequence
  ENSG00000217128_27 (sequence is synthesized)
tggtttccagtcttgtttccaatctgcttcattccacacttcagctttataagcataacttgtctccaaatttttgtgtaatgcatcttgaagaccggttgcaggagctatacttcaaaa

SEQ ID NO: 762793 - DNA, 120 bp, Artificial Sequence
  ENSG00000217128_28 (sequence is synthesized)
gtaaaatgctgtctgaatacctgagggggcagatgcgtgttcatgtcaaggagctgggagtggttctggggattgaatccagtgatcttccacttctggctgctgtagcaagcactcact

SEQ ID NO: 762794 - DNA, 120 bp, Artificial Sequence
  ENSG00000217128_29 (sequence is synthesized)
ctccatatgttgcacaaatactcctttaatatacctaaaaattgttagaaattggtgggaaaataggtagaaaccaaggaagcagacacaacatgcatttatggagattctttttccctt

SEQ ID NO: 762795 - DNA, 120 bp, Artificial Sequence
  ENSG00000217128_30 (sequence is synthesized)
ttagacttccatctgaatgagtcagtcaccagggtattctgcatagcattgtatattctgtgtatgtcagatggctttttctttttgactggacttttgggtggtggtagatttttaaac

SEQ ID NO: 762796 - DNA, 120 bp, Artificial Sequence
  ENSG00000217128_31 (sequence is synthesized)
aaatgaaattaaagcaacaataattttgaagcatttgaaaaagccaaagtgtacggtagaaatttctacaaaatgaatattatcaagagtttcatgtgatcactgcagtgttgtcacagc

SEQ ID NO: 762797 - DNA, 120 bp, Artificial Sequence
  ENSG00000217128_32 (sequence is synthesized)
tcataaatagcaacagtgtctcatgatttaatggctcagaaatagttattcattagtttttaatttttaatttctaaggtacagagatctataaaaccttgattatttgttagttttgca

SEQ ID NO: 762798 - DNA, 120 bp, Artificial Sequence
  ENSG00000217128_33 (sequence is synthesized)
attcaaaacagctaatgtctggttatttctcaaagtaagtattttaaacagcctgttaattataagaaactcagaataatgagtgtaaatgtgttatgttatccacccaagtgtacatat

SEQ ID NO: 762799 - DNA, 120 bp, Artificial Sequence
  ENSG00000217128_34 (sequence is synthesized)
gtacctatttttttttaaaaagcagaaatagaaatacaagactggtaaacatgcctttaaaaatatatatattttcaactagtattgtctataatgctgaaatattacttattggtgatt

SEQ ID NO: 762800 - DNA, 120 bp, Artificial Sequence
  ENSG00000217128_35 (sequence is synthesized)
tttctgtttcacacactctaaaatataagtaaagccaaccttttttttaaggctgagattcccaaaatgagaatactactttataccatttgtttataagtatgaactgttcttataaat

SEQ ID NO: 762801 - DNA, 120 bp, Artificial Sequence
  ENSG00000217128_36 (sequence is synthesized)
attaatatttacatattcactaatttaacataaatgaaaattaggattaaaaattgcaccaaagcatcggcaaaaacaatactatattctttaaaagtgctcaggtagccaaggcccttg

SEQ ID NO: 762802 - DNA, 120 bp, Artificial Sequence
  ENSG00000217128_37 (sequence is synthesized)
cttttggtatcaaccctcatgaacccataggagctgaatatttgtttcactgcttaataatcctcaatttacactattcataactcttaaaattattctctttttttctaagagtccctc

SEQ ID NO: 762803 - DNA, 120 bp, Artificial Sequence
  ENSG00000217128_38 (sequence is synthesized)
ccttccaaaagtgtatttttttcaaagattttcacttctcaattgttgcctttgtacatactatagagtgttgcttgtaagaaaggctaatatggaaccaaactcttgtaagtaatgtaa

SEQ ID NO: 762804 - DNA, 120 bp, Artificial Sequence
  ENSG00000217128_39 (sequence is synthesized)
atagaaaggtgggtggataaagttttcaatactttctactacctcagtttacttgagtactacattatagtttattctttgcttatctggtctaagagacttttaatgctagtagtaaag

SEQ ID NO: 762805 - DNA, 120 bp, Artificial Sequence
  ENSG00000217128_40 (sequence is synthesized)
ttggtttctgctttcattgactattttcatcataatttcatcattgattaaaaaaagaaaaccacttgtttattcagttattaaatatatttactatataacacatccattcttgctgtt

SEQ ID NO: 762806 - DNA, 120 bp, Artificial Sequence
  ENSG00000217128_41 (sequence is synthesized)
taaattttcaatagttaatggaaagttgtctttgaccttgaatttacagcattgggtcacattttgccttgctgtgtatgtattcaagagacttccaactagacaaagaaaaaattgttg

SEQ ID NO: 762807 - DNA, 120 bp, Artificial Sequence
  ENSG00000217128_42 (sequence is synthesized)
ttttaatggaatgtaaacctgaaattggtgtgtctgcaatctgtttggcccatgaccttttacctagtcccagttattacctgagtctcccatggatgacttgctgccaaggagtgtttg

SEQ ID NO: 762808 - DNA, 120 bp, Artificial Sequence
  ENSG00000217128_43 (sequence is synthesized)
tggatatattttctttggcttaattttcttattctgtgcattaacaaaattatccagttgtctgattttggaattctatgagtcaatctttttggcagaattcagaatattaaaaagttc

SEQ ID NO: 762809 - DNA, 60 bp, Artificial Sequence
  ENSG00000217128_44 (sequence is synthesized)
caagtgattctcctgcctcagcccccaagtagctgggattacaagttggtcaggctggtc

SEQ ID NO: 762810 - DNA, 72 bp, Artificial Sequence
  ENSG00000217128_45 (sequence is synthesized)
gtacttttttttttttttattgtagctctgtatagcacttggataatgtctgggtgtctccttaaccatcaa

SEQ ID NO: 762811 - DNA, 120 bp, Artificial Sequence
  ENSG00000217128_46 (sequence is synthesized)
tagcacttggataatgtctgggtgtctccttaaccatcaaactgttctttatttaaaatgtttaattaccgtttagaaattctagtcctcaataagtgggtggctcatgctattgttgtt

SEQ ID NO: 762812 - DNA, 120 bp, Artificial Sequence
  ENSG00000217128_47 (sequence is synthesized)
cctaaagctaagctttgctgggaaggaaatgacctatagtttcttaaagaatcattaatccttataggattcctgagttactgttttgttcctccccactgcttcccattcctgagtttt

SEQ ID NO: 762813 - DNA, 120 bp, Artificial Sequence
  ENSG00000217128_48 (sequence is synthesized)
gtaattcctaatccttctataatttctattaccttcaccatagtcattctttccttacgcaaagcccaaggaatgagctgctgctactttaaagtgtggtcattatgatgaatgtgaaaa

SEQ ID NO: 762814 - DNA, 120 bp, Artificial Sequence
  ENSG00000217128_49 (sequence is synthesized)
gagttttggcttgttctaaataatttttacaagttatggtacagacagttgttacatatcaaaaaaaacctgtttattgaaacaggaaataaaaaagggatcttttacattatagaatta

SEQ ID NO: 762815 - DNA, 120 bp, Artificial Sequence
  ENSG00000217128_50 (sequence is synthesized)
tttttcttgtatataaactaattggtttgattttaaatatttctggcttttattaatatgtcttaattttgagtttgaaaatgttaagtgcaataaaaacatactagtacagattttgtt

SEQ ID NO: 762816 - DNA, 120 bp, Artificial Sequence
  ENSG00000217128_51 (sequence is synthesized)
attttgttttgttccaattggcatactctggggatgatcacttaaaaaaacagattttacataatgcctacttctggtagatgtcttatgagattgttctgctttttctaagttacttag

SEQ ID NO: 762817 - DNA, 120 bp, Artificial Sequence
  ENSG00000217128_52 (sequence is synthesized)
atgttggatatgtacatagctgtttcttgttctgtatacatttctcaaatgtacacttgtattataataacctcccagttctaggggatatttgtgcaataaatacacatgtcaacttga

SEQ ID NO: 762818 - DNA, 120 bp, Artificial Sequence
  ENSG00000217128_53 (sequence is synthesized)
gcgacgcccgggacccagattgcgggttcaggtagggcgctgtggggcgggggtcgcggagccgatggccttgtgggctccgggctccaggggtgttggggccttcggtgttccgacccg

SEQ ID NO: 762819 - DNA, 120 bp, Artificial Sequence
  ENSG00000217128_54 (sequence is synthesized)
agcggaagcgccgcgccgagagcagcatctggtcctcggtggggtggagccggctgcgggctagcgccgaagggttggagcgaggtcctaccttttattttaccccacccgcctcgccgt

SEQ ID NO: 762820 - DNA, 120 bp, Artificial Sequence
  ENSG00000217128_55 (sequence is synthesized)
tgccccttccccctcctcccgtcggtttgtttacgacctgcccccagccacgcgcgactctgctcctccggacctagcaccgcggcctgagactttgggtccacacgccttcctggcacc

SEQ ID NO: 762821 - DNA, 120 bp, Artificial Sequence
  ENSG00000217128_56 (sequence is synthesized)
gagtagagttgggcgcgggctggattggacctcagccgccgtactccgggccgcgaagttctcccctcctccccgtgaccagttgtcctccgggcgctgcgttccagctccgttggcgtt

SEQ ID NO: 762822 - DNA, 120 bp, Artificial Sequence
  ENSG00000217128_57 (sequence is synthesized)
agcgagtaggcaacgtgccgttctttcaggtttcttggacgctaaaattggaggtgtgcagtaaccggaccgagcgaccttaatgttatcgaaggagaaatgtgaaacttgagtttaggg

SEQ ID NO: 762823 - DNA, 120 bp, Artificial Sequence
  ENSG00000217128_58 (sequence is synthesized)
ttactgccgaaggaagaccaaattgaatgaaatctggccttggaattggctgtagattcttcctcctcgaattgttactgaaaaggagtcttaaaaattgaaaatgttagtagagcattt

SEQ ID NO: 762824 - DNA, 120 bp, Artificial Sequence
  ENSG00000217128_59 (sequence is synthesized)
tgtagtgttacaggctttgttaatttttcattgtagtacctgttgctggcagagtaacttttcagaattgtaagatttgatataaacctgaattcaaggtaaaatttagtcgttaaactg

SEQ ID NO: 762825 - DNA, 120 bp, Artificial Sequence
  ENSG00000217128_60 (sequence is synthesized)
cacctgaggagattatgtccaaacagcctttatacgtattgcagtgtggaaacttgcaaatataactaggctaaatgtcaaatgccacacgttttaaacttggtaggatagcaaagagcc

SEQ ID NO: 762826 - DNA, 120 bp, Artificial Sequence
  ENSG00000217128_61 (sequence is synthesized)
aaataaaataaaaataaaaaaagagaatctgtcaaattttggaacaggcgaagttgccacactggtttaagaaattttgctattcttaaaattattcactctctcttgctaatgcaggtc

SEQ ID NO: 762827 - DNA, 120 bp, Artificial Sequence
  ENSG00000217128_62 (sequence is synthesized)
tattcactctctcttgctaatgcaggtctcatcaggaaaaattcagtaaatgcatatggaattgaagaggtttttctacgtatctgtcttttcccctgaaaaataaatgtgtcatgctca

SEQ ID NO: 762828 - DNA, 120 bp, Artificial Sequence
  ENSG00000217128_63 (sequence is synthesized)
ttgggcacaactgggtatgtaatctgacaactgttacactatgtattagacttttttgtagctatctgtaattattttatagcaaaaccaaaaataaataaaatgcttttacctcctgca

SEQ ID NO: 762829 - DNA, 120 bp, Artificial Sequence
  ENSG00000217236_0 (sequence is synthesized)
gagtttagccggcgggagcctggagtccgctcggcacgagcgcggggacgcgggagccgcgcgggacccaagcagtttttccgagcagccgccaggctcagccccgctcccagcctcgct

SEQ ID NO: 762830 - DNA, 120 bp, Artificial Sequence
  ENSG00000217236_1 (sequence is synthesized)
gcgcagccagagacctgctatggccacgtctatactcggggaagagccgcgcttcggaacgaccccgttggccatgctggcggcgacctgcaacaagatcggcaacacgagcccgctgac

SEQ ID NO: 762831 - DNA, 120 bp, Artificial Sequence
  ENSG00000217236_2 (sequence is synthesized)
gacgctgccagagtcgagcgccttcgccaaaggcggctttcacccctggaagcgctcctcgtccagctgcaacctcggctccagcctctcgggcttcgcggtggccaccgggggccgtgg

SEQ ID NO: 762832 - DNA, 120 bp, Artificial Sequence
  ENSG00000217236_3 (sequence is synthesized)
ctcgggcggcctggcgggcggctcgggcgccgccaacagcgccttctgcctggcctccacgtcgcccacgtcgtccgccttcagcagcgactacggcggcctcttctccaactcggcggc

SEQ ID NO: 762833 - DNA, 120 bp, Artificial Sequence
  ENSG00000217236_4 (sequence is synthesized)
tgccgcggcggcagcggccggggtgtccccgcaggaggcgggtggccagtcggccttcatttccaaggtgcacacgacggcagccgacgggctgtacccgcgcgtgggcatggcgcaccc

SEQ ID NO: 762834 - DNA, 120 bp, Artificial Sequence
  ENSG00000217236_5 (sequence is synthesized)
gtacgagtcctggtacaagtcgggcttccattcgacgctggcggccggcgaggtgaccaacggcgcggcgtcgtcgtggtgggacgtgcacagcagcccgggctcgtggctggaagtgca

SEQ ID NO: 762835 - DNA, 120 bp, Artificial Sequence
  ENSG00000217236_6 (sequence is synthesized)
gaaccccgctggggggctccagagctcgctgcactcgggcgccccccaggcctcgctgcactcgcagctgggcacctacaaccccgacttcagctcgctcacgcactccgccttcagctc

SEQ ID NO: 762836 - DNA, 120 bp, Artificial Sequence
  ENSG00000217236_7 (sequence is synthesized)
cacgggcctcggctcctccgccgccgccgcctcccacctgctctccaccagccagcacctgctggcccaggacggcttcaagccggtgttgccctcctattcggactccagcgccgccgt

SEQ ID NO: 762837 - DNA, 120 bp, Artificial Sequence
  ENSG00000217236_8 (sequence is synthesized)
cctcctattcggactccagcgccgccgtggcagccgccgccgccagcgccatgatatcgggcgccgcggctgccgccgccggggggagctcggcacgctctgcccgccgctactcgggcc

SEQ ID NO: 762838 - DNA, 120 bp, Artificial Sequence
  ENSG00000217236_9 (sequence is synthesized)
ggaggcggagcggctgggcccggccggggcgagcctgcggcgcaagggcctgcacagctgccacattccgggctgcggcaaggtgtacgggaagacgtcgcacctgaaggcgcacctgcg

SEQ ID NO: 762839 - DNA, 120 bp, Artificial Sequence
  ENSG00000217236_10 (sequence is synthesized)
tggctcttctgcggcaagcgcttcacgcgctcggacgagctgcagcggcatctgcggactcacacgggcgagaagcgcttcgcctgtccggtgtgcaacaagcgcttcatgcgcagcgac

SEQ ID NO: 762840 - DNA, 120 bp, Artificial Sequence
  ENSG00000217236_11 (sequence is synthesized)
cacctgagcaaacacattaagacgcacaacgggggcggcgggggcaaaaagggcagcgacagtgacacggacgccagcaacctggagacgccccgttccgaatcccccgacctcatcctg

SEQ ID NO: 762841 - DNA, 120 bp, Artificial Sequence
  ENSG00000217236_12 (sequence is synthesized)
ggcagcggcggcggcggcagcggcggcggcggcggcggcggcctccgcgggaggcaaggaagcagcgtctggccccaacgactcttagaggccgggcgagaggcgcgagcacacaagcga

SEQ ID NO: 762842 - DNA, 120 bp, Artificial Sequence
  ENSG00000217236_13 (sequence is synthesized)
aggccgggcgagaggcgcgagcacacaagcgagtagagacaccgagaacgaacgagaggttcggagggcgagcgagcgggaggcgggagggcaggggcttcagtgacgcccccagggccc

SEQ ID NO: 762843 - DNA, 120 bp, Artificial Sequence
  ENSG00000217236_14 (sequence is synthesized)
gggctgggcgcgaggtggagccgctcagggctcccgggctgcggttcgcccgctgtgcgaggagctcccctctgccttccgcgcccggataagaatcgaacgcgtggtccggaaacaaaa

SEQ ID NO: 762844 - DNA, 120 bp, Artificial Sequence
  ENSG00000217236_15 (sequence is synthesized)
gcgaaccatcctccgacacaaacactttaaaaactgtactcccagacgtacacatacaccggagacctacaaccacaagcacgcacactcgcgcgcgcacacacataccactcgcccaaa

SEQ ID NO: 762845 - DNA, 120 bp, Artificial Sequence
  ENSG00000217236_16 (sequence is synthesized)
cttctcgagcgaagagcaatacatagaaaggctccctctttgcccactctccacctccctccaacacccgtctctttccttttctcaaaaacaagccaccacccagcaaaggactgtcag

SEQ ID NO: 762846 - DNA, 120 bp, Artificial Sequence
  ENSG00000217236_17 (sequence is synthesized)
aacatttgaaaacaaacgggaccgataaaaacaccctttgtttggattatattatatataaaatgctccaagtcctgcctgatatctacttacaatgagacttttttcctaaaaaaggaa

SEQ ID NO: 762847 - DNA, 120 bp, Artificial Sequence
  ENSG00000217236_18 (sequence is synthesized)
gcatcaaaaggcttaaggtgagaaattaaactggaagtctagcgacagtttctctgtatttcataacatctgtataaatagggttcaaaagattgtgttctcttttattttcttgtaaat

SEQ ID NO: 762848 - DNA, 120 bp, Artificial Sequence
  ENSG00000217236_19 (sequence is synthesized)
gttcattcgaatagagtttttttgggtgaatccctgaaattcagggagttttttttaattttctgatgcactttgtgaaagtcagtatatatgtaaaagatatttaaaatgttgagttat

SEQ ID NO: 762849 - DNA, 120 bp, Artificial Sequence
  ENSG00000217236_20 (sequence is synthesized)
catttcactcacaaacacgtaagttaaggtcatctaaagaaattaaatgcgtttatctgtatcaagaaaatcttgacatcatattttcattttggtattattaaaggactctgaacaata

SEQ ID NO: 762850 - DNA, 120 bp, Artificial Sequence
  ENSG00000217442_0 (sequence is synthesized)
tgcagcttctttctgtgcattgcctagatggatgatgctgaccctgaggaaagaaactatgacaacatgctgaaaatgctgtcagatctgaataaggacttggaaaagctattagaagag

SEQ ID NO: 762851 - DNA, 120 bp, Artificial Sequence
  ENSG00000217442_1 (sequence is synthesized)
ttcgtcaactgcaaggaggagatggagaagaactggcaagagctgctgcatgagaccaagcaaaggctgtaggccccactggcccaccacagctgccatgccaccctctgcccgtatgaa

SEQ ID NO: 762852 - DNA, 120 bp, Artificial Sequence
  ENSG00000217555_0 (sequence is synthesized)
gcgcaagagagcgggaagccgagctgggcgagaagtaggggagggcggtgctccgccgcggtggcggttgctatcgcttcgcagaacctactcaggcagccagctgagaagagttgaggg

SEQ ID NO: 762853 - DNA, 120 bp, Artificial Sequence
  ENSG00000217555_1 (sequence is synthesized)
aaagtgctgctgctgggtctgcagacgcgatggataacgtgcagccgaaaataaaacatcgccccttctgcttcagtgtgaaaggccacgtgaagatgctgcggctggcactaactgtga

SEQ ID NO: 762854 - DNA, 120 bp, Artificial Sequence
  ENSG00000217555_2 (sequence is synthesized)
ccgttatcttatttttcatacttttatatgtactcagacttgatcgattaatgaagtggttattttggcctttgcttgatattatcaactcactggtaacaacagtattcatgctcatcg

SEQ ID NO: 762855 - DNA, 120 bp, Artificial Sequence
  ENSG00000217555_3 (sequence is synthesized)
tatctgtgttggcactgataccagaaaccacaacattgacagttggtggaggggtgtttgcacttgtgacagcagtatgctgtcttgccgacggggcccttatttaccggaagcttctgt

SEQ ID NO: 762856 - DNA, 120 bp, Artificial Sequence
  ENSG00000217555_4 (sequence is synthesized)
tcaatcccagcggtccttaccagaaaaagcctgtgcatgaaaaaaaagaagttttgtaattttatattactttttagtttgatactaagtattaaacatatttctgtattcttccacata

SEQ ID NO: 762857 - DNA, 120 bp, Artificial Sequence
  ENSG00000217555_5 (sequence is synthesized)
aagtctgcaccccgcgcagagcactactgtaacttccaagggagcgctgggagcagcgggatcgggttttccggcacccgggcctgggtggcagggaagaatgtgccgggatccgcctca

SEQ ID NO: 762858 - DNA, 120 bp, Artificial Sequence
  ENSG00000217555_6 (sequence is synthesized)
acagcccagaaccaggacaaggagagaactgctcgtttccgggagcagacttcctaccgggagcactgcagtcacttctgaacaggatattatcaactcactggtaacaacagtattcat

SEQ ID NO: 762859 - DNA, 120 bp, Artificial Sequence
  ENSG00000217555_7 (sequence is synthesized)
tctgttttttgcttctcttaaacctttaaggtaatctctgttaggcttaggaaggaggagctctacccattgctaatgtgccctgtattgctttgggagagggtctcaaggatgcagggc

SEQ ID NO: 762860 - DNA, 120 bp, Artificial Sequence
  ENSG00000217930_0 (sequence is synthesized)
cttgacctctgacccgccgaccacgcttgatccccggccgcggggccaggaagtcggagtttgagccccggaggcagagcggctgccatggccaagtacctggcccagatcattgtgatg

SEQ ID NO: 762861 - DNA, 120 bp, Artificial Sequence
  ENSG00000217930_1 (sequence is synthesized)
ggcgtgcaggtggtgggcagggcctttgcacgggccttgcggcaggagtttgcagccagccgggccgcagctgatgcccgaggacgcgctggacaccggtctgcagccgcttccaacctc

SEQ ID NO: 762862 - DNA, 120 bp, Artificial Sequence
  ENSG00000217930_2 (sequence is synthesized)
ccctgaggaggtccagaagaactatgaacacttatttaaggtgaatgataaatccgtgggtggctccttctacctgcagtcaaaggtggtccgcgcaaaggagcgcctggatgaggaact

SEQ ID NO: 762863 - DNA, 120 bp, Artificial Sequence
  ENSG00000217930_3 (sequence is synthesized)
caaaatccaggcccaggaggacagagaaaaagggcagatgccccatacgtgactgctcggctccccccgcccaccccgccgcctctaatttatagcttggtaataaatttcttttctgca

SEQ ID NO: 762864 - DNA, 120 bp, Artificial Sequence
  ENSG00000217930_4 (sequence is synthesized)
gcagcctctaccccctaaaaaggaaaccactcctggagaagaggcagctcctagccacctgtccctgtgtctctcatcctgtgctggtggcaggggtgagccaccaactcggaaggccca

SEQ ID NO: 762865 - DNA, 120 bp, Artificial Sequence
  ENSG00000217930_5 (sequence is synthesized)
gctcccagaccacagtgtttcttcctgaagccggtggttgcagccactttgccttgctcctctacgcctttcctgaaggatgaggtggggccagtctgcctctgggagctcggtcaagtt

SEQ ID NO: 762866 - DNA, 120 bp, Artificial Sequence
  ENSG00000217930_6 (sequence is synthesized)
ttgacctctgacccgccgaccacgcttgatccccggccgcggggccaggaagtcggagtttgagccccggaggcagagcggctgccatgtcattggccttggcagaaaagtaaacaagtg

SEQ ID NO: 762867 - DNA, 120 bp, Artificial Sequence
  ENSG00000217930_7 (sequence is synthesized)
attgcaaggctgtacgatggcagcagagggaccgaaggctgttggtgtgaggggtagtctgagacctgagccgtgtttcaagccgaggggaccctctgactttcacctctgtccttcaga

SEQ ID NO: 762868 - DNA, 120 bp, Artificial Sequence
  ENSG00000217930_8 (sequence is synthesized)
cagcaccagcatcccatccctgagcctcctgttccactcgggaggggctttaggaaggaggcgaagtcaggtgagaccgcaggtgtcatcaggtgcatccctgaccctccctcatctgca

SEQ ID NO: 762869 - DNA, 120 bp, Artificial Sequence
  ENSG00000217930_9 (sequence is synthesized)
ttccacctacttttgaaatcttaacccacttgtttgttcattcccctaatggcccataatgacatcccacctgttaaggaaagagcaggtcctcggaggctgaacaaggccagctctgga

SEQ ID NO: 762870 - DNA, 120 bp, Artificial Sequence
  ENSG00000217930_10 (sequence is synthesized)
gtcgaatccactggaatctggagcaagcccctctggcctcggggttgggttcttgatacttgtcggcttgcccaggtgccctaccttcagaccccgggaccctgcgtagtgactgctgtg

SEQ ID NO: 762871 - DNA, 120 bp, Artificial Sequence
  ENSG00000217930_11 (sequence is synthesized)
acagatagcaccagccttgggtttccgatctgcctccgaggcacctgctgttacgtcctcgggccagtcagcagtcccccacccctgagttgtcagaattaaacggcacaatgaattgaa

SEQ ID NO: 762872 - DNA, 120 bp, Artificial Sequence
  ENSG00000217930_12 (sequence is synthesized)
gaaggatgaggtggggccagtctgcctctgggagctcggtcaagttcacccgcctgcctgcctgtccagtgagtaactaagccacccaccatggaagctttcattcagggtgctttggag

SEQ ID NO: 762873 - DNA, 120 bp, Artificial Sequence
  ENSG00000217930_13 (sequence is synthesized)
gggttggcctggggctgcagctctgtgcttcatgacctcgggtctccgggagccttgcccctcggcagccgtttccagggcccatctctgtgggcccacagggagtggcctgctaaccgg

SEQ ID NO: 762874 - DNA, 120 bp, Artificial Sequence
  ENSG00000217930_14 (sequence is synthesized)
cgtgtttcaagccgaggggaccctctgactttcacctctgtccttcagacagcaccagcatcccatccctgagcctcctgttccactcgggaggggctttaggaaggaggcgaagtcagc

SEQ ID NO: 762875 - DNA, 120 bp, Artificial Sequence
  ENSG00000217930_15 (sequence is synthesized)
agaattaggacagatctgtttccccgttggtaaagtaaaggttgggcctgatgatctcagaaactcaggaagagtgatggtcggccccagggtcgagagtgagttactgccaggtccagg

SEQ ID NO: 762876 - DNA, 120 bp, Artificial Sequence
  ENSG00000217930_16 (sequence is synthesized)
caggtggtgggcagggcctttgcacgggccttgcggcaggagtttgcaggggtgagccaccaactcggaaggcccagggtgaagtgtgggctgctgaggactgagcgatcacccacatgt

SEQ ID NO: 762877 - DNA, 85 bp, Artificial Sequence
  ENSG00000217930_17 (sequence is synthesized)
ttatttaaggtgaatgataaatccgtgggtggctccttctacctgcagtcaaagagatcgggtctctccatgttgcccaaactga

SEQ ID NO: 762878 - DNA, 120 bp, Artificial Sequence
  ENSG00000217930_18 (sequence is synthesized)
cgcttggcgaaactgcgtcttttacaggcatcgcctcagatcgcagagctcagaagtggaaaaactatcagatttgccaagaccagctcggtcgggagactaatccggcggcgctagagg

SEQ ID NO: 762879 - DNA, 120 bp, Artificial Sequence
  ENSG00000217930_19 (sequence is synthesized)
ggcggcctcagggccagggaaaaccgtctgcctggaagaggccgggcaaacgtggtcgcgctgtgcctagcccgcgtgtgagcgagcagccgtgggcagcggtggagcatgagtctggct

SEQ ID NO: 762880 - DNA, 120 bp, Artificial Sequence
  ENSG00000218305_0 (sequence is synthesized)
atgaatgaagtttcttctgaatgtggcaagaagtgtgaaccacttggctgctcaagcacaaatggggatttgcagggagaagctggtgctgtggtctccattttcctaagaatggtgcca

SEQ ID NO: 762881 - DNA, 120 bp, Artificial Sequence
  ENSG00000218305_1 (sequence is synthesized)
agaataaaaagcaatgaaggatacgggtattccaacagaaactggagaaaagaaaatacaatgcattcactggacagaaatattgtggacggggggcaagcattgggacagtggaagcgg

SEQ ID NO: 762882 - DNA, 120 bp, Artificial Sequence
  ENSG00000218305_2 (sequence is synthesized)
aaaagcaaggggcggtcgagctgggccgccgcgccccactgctcgccgcgctgctctttgacctcgcagggtgtgaagaagatgcgcagctccacgctgcaggacccgcgccgccgggac

SEQ ID NO: 762883 - DNA, 120 bp, Artificial Sequence
  ENSG00000218305_3 (sequence is synthesized)
ccccaggacgacgtgtacgtggacatcaccgatcgccttcgttttgccattctctacagcagaccaaagagtgcatcaaatgtacattatttcagcatagataatgaactcgaatatgag

SEQ ID NO: 762884 - DNA, 120 bp, Artificial Sequence
  ENSG00000218305_4 (sequence is synthesized)
aacttctccgaagactttggaccactcaatctggcaatggtttacagatattgttgcaagataaataagaaattaaagtccattacaatgttaaggaagaaaattgttcattttactggc

SEQ ID NO: 762885 - DNA, 120 bp, Artificial Sequence
  ENSG00000218305_5 (sequence is synthesized)
tctgatcagagaaaacaagcaaatgctgccttccttgttggatgctacatggttatatacttggggagaaccccagaagcagcatatagaatattaatctttggagatacaccctatatt

SEQ ID NO: 762886 - DNA, 120 bp, Artificial Sequence
  ENSG00000218305_6 (sequence is synthesized)
tcatttaaccttgatgaatatgaacactatgaaaaagcagaaaacggagatttaaattggataataccagaccgatttattgccttctgtggacctcattcaagagccagacttgaaagt

SEQ ID NO: 762887 - DNA, 120 bp, Artificial Sequence
  ENSG00000218305_7 (sequence is synthesized)
ggttaccaccaacattctcccgagacttatattcaatattttaagaatcacaatgttactaccattattcgtctgaataaaaggatgtatgatgccaaacgctttacggatgctggcttc

SEQ ID NO: 762888 - DNA, 120 bp, Artificial Sequence
  ENSG00000218305_8 (sequence is synthesized)
gatcaccatgatcttttctttgcggatggcagcacccctactgatgccattgtcaaaagatttctggatatctgtgaaaatgctgagggtgccattgcagtacattgtaaagctggcctt

SEQ ID NO: 762889 - DNA, 120 bp, Artificial Sequence
  ENSG00000218305_9 (sequence is synthesized)
ggtcgcacaggcactctgatagcctgctacatcatgaagcattacaggatgacagcagccgagaccattgcgtgggtaaggatctgcagacctggcttggtgatcgggcctcagcagcag

SEQ ID NO: 762890 - DNA, 120 bp, Artificial Sequence
  ENSG00000218305_10 (sequence is synthesized)
tttttggtgatgaagcaaacaagcctctggctggaaggggactattttcgtcagaggttaaaggggcaggagaatggacaacacagagcagccttctccaaacttctctctggtgttgat

SEQ ID NO: 762891 - DNA, 120 bp, Artificial Sequence
  ENSG00000218305_11 (sequence is synthesized)
gacatttccataaatggggtcgagaatcaagaccagcaagaacccaaaccttacagtgatgacgacgaaatcaatggagtgacacaaggtgatagaagtcgggccctgaaaaggcgaaga

SEQ ID NO: 762892 - DNA, 120 bp, Artificial Sequence
  ENSG00000218305_12 (sequence is synthesized)
caatcaaaaacaaacgatattcttctcccatctcccctggctgtgctgacctttacactgtgtagtgttgtcatctggtggattgtttgtgactacattcttcccatcctgctattctga

SEQ ID NO: 762893 - DNA, 120 bp, Artificial Sequence
  ENSG00000218305_13 (sequence is synthesized)
agactctaggaactgaaaactgcaacagaaattagcacaatttgaaaacaaaacaaaattgcaaaagacttagttgctttccacctaagaagctaatcaatggggaaaatgtccacgggg

SEQ ID NO: 762894 - DNA, 120 bp, Artificial Sequence
  ENSG00000218305_14 (sequence is synthesized)
tcaatggggaaaatgtccacggggtttcagtaatgaacttttgagtttgggtgcaagcaaatgtaccaagaccagctcagtcagggagaccctaccccagtggtgctagaggaattaaag

SEQ ID NO: 762895 - DNA, 90 bp, Artificial Sequence
  ENSG00000218305_15 (sequence is synthesized)
taattaaaggcataggttgggctagttaactgcggcaggagcacgtccttaaggcacagatggctcatgctattgtttgtggcttaagaa

SEQ ID NO: 762896 - DNA, 120 bp, Artificial Sequence
  ENSG00000218305_16 (sequence is synthesized)
ggccagttttggggccagtttatggctggattttggggggcttgctcccaaaaagaatgactcaaagaaaggcccagctctcaagctgaatgacaaaaatgctgttgtaaatttagtctc

SEQ ID NO: 762897 - DNA, 120 bp, Artificial Sequence
  ENSG00000218305_17 (sequence is synthesized)
aaatgctgttgtaaatttagtctcaggtgtaaatacccaagccctctggtactcagggagctggctggtctgtggtgcatgtgtgtccttgtgatggcaagcattgtagttgatggcctt

SEQ ID NO: 762898 - DNA, 120 bp, Artificial Sequence
  ENSG00000218305_18 (sequence is synthesized)
cagaagaattgaggatctgatggaggttttttaatgtatttattttctgttcagcttgtgaccctgtgtcaaaatttgtaaagatacaaaaggcattactgaaatggtactttctgtaat

SEQ ID NO: 762899 - DNA, 120 bp, Artificial Sequence
  ENSG00000218305_19 (sequence is synthesized)
ttgatactatttggctttaccatcttcacttgactgtttgtaatactgtagtaatattaactctgataagtacccaagctgcttgtcttctaccaaagagtgctttattaacaagaatct

SEQ ID NO: 762900 - DNA, 120 bp, Artificial Sequence
  ENSG00000218305_20 (sequence is synthesized)
gtgaaaaccacattttaaacactgttgcatgttgtaataccaggtgataccttggtaacctaaaacttgcaagagaatattagtggtagctttagaagactcaggaggagaaactgactt

SEQ ID NO: 762901 - DNA, 120 bp, Artificial Sequence
  ENSG00000218305_21 (sequence is synthesized)
cagagctggaagatgttgcaagtcattcctttttctgtcctttagggactgaagaactgggaggttgcccattgtttggttgccagtcatacaaattaaaatcatatttccttccatgca

SEQ ID NO: 762902 - DNA, 120 bp, Artificial Sequence
  ENSG00000218336_0 (sequence is synthesized)
atcgcacctggccatgaaggcttttagatgggtctggagcttggaggagaagtctgaactaaggataaactaaagagaggccaatgagacttgaaccctgagcctaagttgtcaccagca

SEQ ID NO: 762903 - DNA, 120 bp, Artificial Sequence
  ENSG00000218336_1 (sequence is synthesized)
ggactgatgtgcacacagaaggaatgaagtatggatgtgaaagaacgcaggccttactgctccctgaccaagagcagacgagagaaggaacggcgctacacaaattcctccgcagacaat

SEQ ID NO: 762904 - DNA, 120 bp, Artificial Sequence
  ENSG00000218336_2 (sequence is synthesized)
gaggagtgccgggtacccacacagaagtcctacagttccagcgagacattgaaagcttttgatcatgattcctcgcggctgctttacggcaacagagtgaaggatttggttcacagagaa

SEQ ID NO: 762905 - DNA, 120 bp, Artificial Sequence
  ENSG00000218336_3 (sequence is synthesized)
gcagacgagttcactagacaaggacagaattttaccctaaggcagttaggagtttgtgaaccagcaactcgaagaggactggcattttgtgcggaaatggggctccctcacagaggttac

SEQ ID NO: 762906 - DNA, 120 bp, Artificial Sequence
  ENSG00000218336_4 (sequence is synthesized)
tctatcagtgcagggtcagatgctgatactgaaaatgaagcagtgatgtccccagagcatgccatgagactttggggcaggggggtcaaatcaggccgcagctcctgcctgtcaagtcgg

SEQ ID NO: 762907 - DNA, 120 bp, Artificial Sequence
  ENSG00000218336_5 (sequence is synthesized)
tccaactcagccctcaccctgacagatacggagcacgaaaacaagtccgacagtgagaatgagcaacctgcaagcaatcaaggccagtctaccctgcagcccttgccgccttcccataag

SEQ ID NO: 762908 - DNA, 120 bp, Artificial Sequence
  ENSG00000218336_6 (sequence is synthesized)
cagcactctgcacagcatcatccatccatcacttctctcaacagaaactccctgaccaatagaaggaaccagagtccggccccgccggctgctttgcccgccgagctgcaaaccacaccc

SEQ ID NO: 762909 - DNA, 120 bp, Artificial Sequence
  ENSG00000218336_7 (sequence is synthesized)
gagtccgtccagctgcaggacagctgggtccttggcagtaatgtaccactggaaagcaggcatttcctattcaaaacaggaacaggtacaacgccactgttcagtactgcaaccccagga

SEQ ID NO: 762910 - DNA, 120 bp, Artificial Sequence
  ENSG00000218336_8 (sequence is synthesized)
tacacaatggcatctggctctgtttattcaccacctactcggccactacctagaaacaccctatcaagaagtgcttttaaattcaagaagtcttcaaagtactgtagctggaaatgcact

SEQ ID NO: 762911 - DNA, 120 bp, Artificial Sequence
  ENSG00000218336_9 (sequence is synthesized)
gcactgtgtgccgtaggggtctcggtgctcctggcaatactcctgtcttattttatagcaatgcatctctttggcctcaactggcagctacagcagactgaaaatgacacatttgagaat

SEQ ID NO: 762912 - DNA, 120 bp, Artificial Sequence
  ENSG00000218336_10 (sequence is synthesized)
ggaaaagtgaattctgataccatgccaacaaacactgtgtcattaccttctggagacaatggaaaattaggtggatttacgcaagaaaataacaccatagattccggagaacttgatatt

SEQ ID NO: 762913 - DNA, 120 bp, Artificial Sequence
  ENSG00000218336_11 (sequence is synthesized)
ggccgaagagcaattcaagagattcctcccgggatcttctggagatcacagctcttcattgatcagccacagtttcttaaattcaatatctctcttcagaaggatgcattgattggagta

SEQ ID NO: 762914 - DNA, 120 bp, Artificial Sequence
  ENSG00000218336_12 (sequence is synthesized)
tatggccggaaaggcttaccgccttcccatactcagtatgacttcgtggagctcctggatggcagcaggctgattgccagagagcagcggagcctgcttgagacggagagagccgggcgg

SEQ ID NO: 762915 - DNA, 120 bp, Artificial Sequence
  ENSG00000218336_13 (sequence is synthesized)
caggcgagatccgtcagccttcatgaggccggctttatccagtacttggattctggaatctggcatctggctttttataatgatgggaaaaatgcagagcaggtgtcttttaataccatt

SEQ ID NO: 762916 - DNA, 120 bp, Artificial Sequence
  ENSG00000218336_14 (sequence is synthesized)
gttatagagtctgtggtggaatgtccccgaaattgccatggaaatggagaatgcgtttctggaacttgccattgttttccaggatttctgggtccggattgttcaagagccgcctgtcca

SEQ ID NO: 762917 - DNA, 120 bp, Artificial Sequence
  ENSG00000218336_15 (sequence is synthesized)
gtgttatgtagtggcaacgggcagtactccaagggccgctgcctgtgtttcagcggctggaagggcaccgagtgtgatgtgccgactacccagtgtattgacccacagtgtgggggtcgt

SEQ ID NO: 762918 - DNA, 120 bp, Artificial Sequence
  ENSG00000218336_16 (sequence is synthesized)
gggatttgtatcatgggctcttgtgcttgcaactcaggatacaaaggagaaagttgtgaagaagctgactgtatagaccctgggtgttctaatcatggtgtgtgtatccacggggaatgt

SEQ ID NO: 762919 - DNA, 120 bp, Artificial Sequence
  ENSG00000218336_17 (sequence is synthesized)
cactgcagtccaggatggggaggtagcaattgtgaaatactgaagaccatgtgtccagaccagtgctccggccacggaacgtatcttcaagaaagtggctcctgcacgtgtgaccctaac

SEQ ID NO: 762920 - DNA, 120 bp, Artificial Sequence
  ENSG00000218336_18 (sequence is synthesized)
tggactggcccagactgctcaaacgaaatatgttctgtggactgtggctcacacggcgtttgcatgggggggacgtgtcgctgtgaagaaggctggacgggcccagcctgtaatcagaga

SEQ ID NO: 762921 - DNA, 120 bp, Artificial Sequence
  ENSG00000218336_19 (sequence is synthesized)
gcctgccacccccgctgtgccgagcacgggacctgcaaggatggcaagtgtgaatgcagccagggctggaatggagagcactgcactatcgagggttgtcctggtctgtgcaacagcaat

SEQ ID NO: 762922 - DNA, 120 bp, Artificial Sequence
  ENSG00000218336_20 (sequence is synthesized)
ggaagatgtaccctggaccaaaatggctggcattgtgtgtgccagcctggatggagaggagcaggctgtgacgtagccatggagactctttgcacagatagcaaggacaatgaaggagat

SEQ ID NO: 762923 - DNA, 120 bp, Artificial Sequence
  ENSG00000218336_21 (sequence is synthesized)
ggactcattgactgcatggatcccgattgctgcctacagagttcctgccagaatcagccctattgtcggggactgccggatcctcaggacatcattagccaaagccttcaatcgccttct

SEQ ID NO: 762924 - DNA, 120 bp, Artificial Sequence
  ENSG00000218336_22 (sequence is synthesized)
cagcaagctgccaaatccttttatgatcgaatcagtttccttataggatctgatagcacccatgttatacctggagaaagtcctttcaataagagccttgcatctgtcatcagaggccaa

SEQ ID NO: 762925 - DNA, 120 bp, Artificial Sequence
  ENSG00000218336_23 (sequence is synthesized)
gtactgactgctgatggaactccacttattggagtaaatgtctcgtttttccattacccagaatatggatatactattacccgccaggacggaatgtttgacttggtggcaaatggtggg

SEQ ID NO: 762926 - DNA, 120 bp, Artificial Sequence
  ENSG00000218336_24 (sequence is synthesized)
gcctctctaactttggtatttgaacgatccccattcctcactcagtatcatactgtgtggattccatggaatgtcttttatgtgatggataccctagtcatgaagaaagaagagaatgac

SEQ ID NO: 762927 - DNA, 120 bp, Artificial Sequence
  ENSG00000218336_25 (sequence is synthesized)
attcccagctgtgatctgagtggattcgtgaggccaaatcccatcattgtgtcatcacctttatccacctttttcagatcttctcctgaagacagtcccatcattcccgaaacacaggta

SEQ ID NO: 762928 - DNA, 120 bp, Artificial Sequence
  ENSG00000218336_26 (sequence is synthesized)
ctccacgaggaaactacaattccaggaacagatttgaaactctcctacttgagttccagagctgcagggtataagtcagttctcaagatcaccatgacccagtctattattccatttaat

SEQ ID NO: 762929 - DNA, 120 bp, Artificial Sequence
  ENSG00000218336_27 (sequence is synthesized)
ttaatgaaggttcatcttatggtagctgtagtaggaagactcttccaaaagtggtttcctgcctcaccaaacttggcctatactttcatatgggataaaacagatgcatataatcagaaa

SEQ ID NO: 762930 - DNA, 120 bp, Artificial Sequence
  ENSG00000218336_28 (sequence is synthesized)
gtctatggtctatctgaagctgttgtgtcagttggatatgagtatgagtcgtgtttggacctgactctgtgggaaaagaggactgccattctgcagggctatgaattggatgcgtccaac

SEQ ID NO: 762931 - DNA, 120 bp, Artificial Sequence
  ENSG00000218336_29 (sequence is synthesized)
atgggtggctggacattagataaacatcacgtgctggatgtacagaacggtatactgtacaagggaaacggggaaaaccagttcatctcccagcagcctccagtcgtgagtagcatcatg

SEQ ID NO: 762932 - DNA, 120 bp, Artificial Sequence
  ENSG00000218336_30 (sequence is synthesized)
ggcaatgggcgaaggcgcagcatttcctgccccagttgcaatggtcaagctgatggtaacaagttactggccccagtggcgctagcttgtgggatcgatggcagtctgtacgtaggcgat

SEQ ID NO: 762933 - DNA, 120 bp, Artificial Sequence
  ENSG00000218336_31 (sequence is synthesized)
ttcaactatgtgcggcggatattcccttctggaaatgtaacaagtgtcttagaactaagcagcaacccagctcatagatactaccttgcaacggatccagtcacgggagatctgtacgtt

SEQ ID NO: 762934 - DNA, 120 bp, Artificial Sequence
  ENSG00000218336_32 (sequence is synthesized)
tctgacacaaacacccgcagaatttatcgcccaaagtcacttacgggggcaaaagacttgactaaaaatgcagaagtcgtcgcagggacaggggagcaatgccttccgtttgacgaggcg

SEQ ID NO: 762935 - DNA, 120 bp, Artificial Sequence
  ENSG00000218336_33 (sequence is synthesized)
agatgtggggatggagggaaggccgtggaagccacactcatgagtcccaaaggaatggcagttgataagaatggattaatctactttgttgatggaaccatgattaggaaagttgaccaa

SEQ ID NO: 762936 - DNA, 120 bp, Artificial Sequence
  ENSG00000218336_34 (sequence is synthesized)
aatggaatcatatcaactcttctgggctctaacgatttgacttcagccagacctttaacttgtgacaccagcatgcacatcagccaggtacgtctggaatggcccactgacctagccatt

SEQ ID NO: 762937 - DNA, 120 bp, Artificial Sequence
  ENSG00000218336_35 (sequence is synthesized)
aaccctatggataactccatttatgtcctggataataatgtagttttacagatcactgaaaatcgtcaagttcgcattgctgctggacggcccatgcactgtcaggttcccggagtggaa

SEQ ID NO: 762938 - DNA, 120 bp, Artificial Sequence
  ENSG00000218336_36 (sequence is synthesized)
tatcctgtggggaagcacgcggtgcagacaacactggaatcagccactgccattgctgtgtcctacagtggggtcctgtacattactgaaactgatgagaagaaaattaaccggataagg

SEQ ID NO: 762939 - DNA, 120 bp, Artificial Sequence
  ENSG00000218336_37 (sequence is synthesized)
caggtcacaacagatggagaaatctccttagtggccggaataccttcagagtgtgactgcaaaaatgatgccaactgtgactgttaccagagtggagatggctacgccaaggatgccaaa

SEQ ID NO: 762940 - DNA, 120 bp, Artificial Sequence
  ENSG00000218336_38 (sequence is synthesized)
ctcagtgccccatcctccctggctgcttctccagatggtacactgtatattgcagatctagggaatatccggatccgggctgtgtcaaagaataagcctttacttaactctatgaacttc

SEQ ID NO: 762941 - DNA, 120 bp, Artificial Sequence
  ENSG00000218336_39 (sequence is synthesized)
tatgaagttgcgtctccaactgatcaagaactctacatctttgacatcaatggtactcaccaatatactgtaagtttagtcactggtgattacctttacaattttagctacagcaatgac

SEQ ID NO: 762942 - DNA, 120 bp, Artificial Sequence
  ENSG00000218336_40 (sequence is synthesized)
aatgatattactgctgtgacagacagcaatggcaacacccttagaattagacgggacccaaatcgcatgccagttcgagtggtgtctcctgataaccaagtgatatggttgacaatagga

SEQ ID NO: 762943 - DNA, 120 bp, Artificial Sequence
  ENSG00000218336_41 (sequence is synthesized)
acaaatggatgtttgaaaagcatgactgctcaaggactggaattagttttgtttacttaccatggcaatagtggccttttagccactaaaagtgatgaaactggatggacaacgtttttt

SEQ ID NO: 762944 - DNA, 120 bp, Artificial Sequence
  ENSG00000218336_42 (sequence is synthesized)
gactatgacagtgaaggtcgtctgacaaatgttacgtttccaactggagtggtcacaaacctgcatggggacatggacaaggctatcacagtggacattgagtcatctagccgagaagaa

SEQ ID NO: 762945 - DNA, 120 bp, Artificial Sequence
  ENSG00000218336_43 (sequence is synthesized)
gatgtcagcatcacttcaaatctgtcctcgatcgattctttctacaccatggttcaagatcagttaagaaacagctaccagattggttatgacggctccctcagaattatctacgccagt

SEQ ID NO: 762946 - DNA, 120 bp, Artificial Sequence
  ENSG00000218336_44 (sequence is synthesized)
ggcctggactcacactaccaaacagagccgcacgttctggctggcaccgctaatccgacggttgccaaaagaaacatgactttgcctggcgagaacggtcaaaacttggtggaatggaga

SEQ ID NO: 762947 - DNA, 120 bp, Artificial Sequence
  ENSG00000218336_45 (sequence is synthesized)
cgaaaagagcaagcccaagggaaagtcaatgtctttggccgcaagctcagggttaatggcagaaacctcctttcagttgactttgatcgaacaacaaagacagaaaagatctatgacgac

SEQ ID NO: 762948 - DNA, 120 bp, Artificial Sequence
  ENSG00000218336_46 (sequence is synthesized)
caccgtaaatttctactgaggatcgcctacgacacgtctgggcacccgactctctggctgccaagcagcaagctgatggccgtcaatgtcacctattcatccacaggtcaaattgccagc

SEQ ID NO: 762949 - DNA, 120 bp, Artificial Sequence
  ENSG00000218336_47 (sequence is synthesized)
atccagcgaggcaccactagcgagaaagtagattatgacggacaggggaggatcgtgtctcgggtctttgctgatggtaaaacatggagttacacatatttagaaaagtccatggttctt

SEQ ID NO: 762950 - DNA, 120 bp, Artificial Sequence
  ENSG00000218336_48 (sequence is synthesized)
ctgcttcatagccagcggcagtacatcttcgaatacgatatgtgggaccgcctgtctgccatcaccatgcccagtgtggctcgccacaccatgcagaccatccgatccattggctactac

SEQ ID NO: 762951 - DNA, 120 bp, Artificial Sequence
  ENSG00000218336_49 (sequence is synthesized)
cgcaacatatacaaccccccggaaagcaacgcctccatcatcacggactacaacgaggaagggctgcttctacaaacagctttcttgggtacaagtcggagggtcttattcaaatacaga

SEQ ID NO: 762952 - DNA, 120 bp, Artificial Sequence
  ENSG00000218336_50 (sequence is synthesized)
aggcagactaggctctcagaaattttatatgatagcacaagagtcagttttacctatgatgaaacagcaggagtcctaaagacagtaaacctccagagtgatggttttatttgcaccatt

SEQ ID NO: 762953 - DNA, 120 bp, Artificial Sequence
  ENSG00000218336_51 (sequence is synthesized)
agatacaggcaaattggtcccctgattgacaggcagattttccgctttagtgaagatgggatggtaaatgcaagatttgactatagctatgacaacagctttcgagtgaccagcatgcag

SEQ ID NO: 762954 - DNA, 120 bp, Artificial Sequence
  ENSG00000218336_52 (sequence is synthesized)
ggtgtgatcaatgaaacgccactgcctattgatctgtatcagtttgatgacatttctggcaaagttgagcagtttggaaagtttggagttatatattatgatattaaccagatcatttct

SEQ ID NO: 762955 - DNA, 120 bp, Artificial Sequence
  ENSG00000218336_53 (sequence is synthesized)
acagctgtaatgacctatacgaagcactttgatgctcatggccgtatcaaggagattcaatatgagatattcaggtcgctcatgtactggattacaattcagtatgataacatgggtcgg

SEQ ID NO: 762956 - DNA, 120 bp, Artificial Sequence
  ENSG00000218336_54 (sequence is synthesized)
gtaaccaagagagagattaaaatagggccctttgccaacaccaccaaatatgcttatgaatatgatgttgatggacagctccaaacagtttacctcaatgaaaagataatgtggcggtac

SEQ ID NO: 762957 - DNA, 120 bp, Artificial Sequence
  ENSG00000218336_55 (sequence is synthesized)
aactacgatctgaatggaaacctccatttactgaacccaagtaacagtgcgcgtctgacaccccttcgctatgacctgcgagacagaatcactcgactgggtgatgttcaatatcggttg

SEQ ID NO: 762958 - DNA, 120 bp, Artificial Sequence
  ENSG00000218336_56 (sequence is synthesized)
gatgaagatggtttcctacgtcaaaggggcacggaaatctttgaatatagctccaaggggcttctaactcgagtttacagtaaaggcagtggctggacagtgatctaccgttatgacggc

SEQ ID NO: 762959 - DNA, 120 bp, Artificial Sequence
  ENSG00000218336_57 (sequence is synthesized)
ctgggaaggcgtgtttctagcaaaaccagtctaggacagcacctgcagtttttttatgctgacttaacttatcccactaggattactcatgtctacaaccattcgagttcagaaattacc

SEQ ID NO: 762960 - DNA, 120 bp, Artificial Sequence
  ENSG00000218336_58 (sequence is synthesized)
tccctgtattatgatctccaaggacatctttttgccatggaaatcagcagtggggatgaattctatattgcatcggataacacagggacaccactggctgtgttcagtagcaatgggctt

SEQ ID NO: 762961 - DNA, 120 bp, Artificial Sequence
  ENSG00000218336_59 (sequence is synthesized)
atgctgaaacagattcagtacactgcatatggggaaatctattttgactctaatattgactttcaactggtaattggatttcatggtggcctgtatgacccactcaccaaattaatccac

SEQ ID NO: 762962 - DNA, 120 bp, Artificial Sequence
  ENSG00000218336_60 (sequence is synthesized)
tttggagaaagagattatgacattttggcaggacggtggacaacacctgacatagaaatctggaaaagaattgggaaggacccagctccttttaacttgtacatgtttaggaataacaac

SEQ ID NO: 762963 - DNA, 120 bp, Artificial Sequence
  ENSG00000218336_61 (sequence is synthesized)
cctgcaagcaaaatccatgacgtgaaagattacatcacagatgttaacagctggctggtgacatttggtttccatctgcacaatgctattcctggattccctgttcccaaatttgattta

SEQ ID NO: 762964 - DNA, 120 bp, Artificial Sequence
  ENSG00000218336_62 (sequence is synthesized)
acagaaccttcttacgaacttgtgaagagtcagcagtgggatgatataccgcccatcttcggagtccagcagcaagtggcgcggcaggccaaggccttcctgtcgctggggaagatggcc

SEQ ID NO: 762965 - DNA, 120 bp, Artificial Sequence
  ENSG00000218336_63 (sequence is synthesized)
gaggtgcaggtgagccggcgccgggccggcggcgcgcagtcctggctgtggttcgccacggtcaagtcgctgatcggcaagggcgtcatgctggccgtcagccagggccgcgtgcagacc

SEQ ID NO: 762966 - DNA, 120 bp, Artificial Sequence
  ENSG00000218336_64 (sequence is synthesized)
aacgtgctcaacatcgccaacgaggactgcatcaaggtggcggccgtgctcaacaacgccttctacctggagaacctgcacttcaccatcgagggcaaggacacgcactacttcatcaag

SEQ ID NO: 762967 - DNA, 120 bp, Artificial Sequence
  ENSG00000218336_65 (sequence is synthesized)
accaccacgcccgagagcgacctgggcacgctgcggttgaccagcggccgcaaggcgctggagaacggcatcaacgtgacggtgtcgcagtccaccacggtggtgaacggcaggacgcgc

SEQ ID NO: 762968 - DNA, 120 bp, Artificial Sequence
  ENSG00000218336_66 (sequence is synthesized)
aggttcgcggacgtggagatgcagttcggcgcgctggcgctgcacgtgcgctacggcatgaccctggacgaggagaaggcgcgcatcctggagcaggcgcggcagcgcgcgctcgcccgg

SEQ ID NO: 762969 - DNA, 120 bp, Artificial Sequence
  ENSG00000218336_67 (sequence is synthesized)
gcctgggcgcgcgagcagcagcgcgtgcgcgacggcgaggagggcgcgcgcctctggacggagggcgagaagcggcagctgctgagcgccggcaaggtgcagggctacgacgggtactac

SEQ ID NO: 762970 - DNA, 120 bp, Artificial Sequence
  ENSG00000218336_68 (sequence is synthesized)
gtactctcggtggagcagtaccccgagctggccgacagcgccaacaacatccagttcctgcggcagagcgagatcggcaggaggtaacgcccgggccgcgcccgccgagccgctcacgcc

SEQ ID NO: 762971 - DNA, 120 bp, Artificial Sequence
  ENSG00000218336_69 (sequence is synthesized)
ctgcccacattgtcctgtggcacaacccgagtgggactctccaacgcccaagagccttcctcccgggggaatgagactgctgttacgacccacacccacaccgcgaaaacaaggaccgct

SEQ ID NO: 762972 - DNA, 120 bp, Artificial Sequence
  ENSG00000218336_70 (sequence is synthesized)
tttttccgaatgaccttaaaggtgatcggctttaacgaatatgtttacatatgcatagcgctgcactcagtcggactgaacgtagccagaggaaaaaaaaatcatcaaggacaaaggcct

SEQ ID NO: 762973 - DNA, 120 bp, Artificial Sequence
  ENSG00000218336_71 (sequence is synthesized)
cgacctgttgcgctgggccgtctgttccttctaggcactgtatttaactaactttaaaaaagaaaaaaaaatgtgtacagtgtttccaaatagtcccgaattgtcgacctttgcttacaa

SEQ ID NO: 762974 - DNA, 120 bp, Artificial Sequence
  ENSG00000218336_72 (sequence is synthesized)
gaagtagtctgtctgcataggatgtgatagctatctctgttcattttacaatgtggggcaaagttactgtttctagacaacccaactgctttccctgtgcagctttgtagaaggacattg

SEQ ID NO: 762975 - DNA, 120 bp, Artificial Sequence
  ENSG00000218336_73 (sequence is synthesized)
gcacagtgacttctgcggcggggatttattaatggattttacaatgctaacgtggtttcccttcggggaaaaaactggcaactagaatccttgtcactgataagcaaaggaaatcctgat

SEQ ID NO: 762976 - DNA, 120 bp, Artificial Sequence
  ENSG00000218336_74 (sequence is synthesized)
ttttttgtaaattatgtgagacaagttgtttatggatttttatatgaattacaatttactgtacatcaaatcttagtctcagaggagttaatttatgtaaagtgtttaaaaatttatact

SEQ ID NO: 762977 - DNA, 120 bp, Artificial Sequence
  ENSG00000218336_75 (sequence is synthesized)
taaaaataaaatgataaaaacgtgaactgtgtgatttttttaaaaggattgcaccttttgttatctgttatagctgtacagtatgaattattatattgtagagatataacaacttatgcc

SEQ ID NO: 762978 - DNA, 120 bp, Artificial Sequence
  ENSG00000218336_76 (sequence is synthesized)
tataatgtccagaagtgttaatatttttgtattaggttgaaaaaatgtgcaagcttctatcactagatggataggaccgtgcaattctaggtgggtggcgaatcagagagctcctttctc

SEQ ID NO: 762979 - DNA, 120 bp, Artificial Sequence
  ENSG00000218336_77 (sequence is synthesized)
ttccctctctcacgcatcaggccagtgtcctcagcattgtcaactgagaggcacagtagacaactagggctggtggaatgtaagggaagaagattgaaaaaacgggaggaagggttctct

SEQ ID NO: 762980 - DNA, 120 bp, Artificial Sequence
  ENSG00000218336_78 (sequence is synthesized)
ggccctctctcaaccttgcaagtcaatggggagttgttgatataattaaccccgaggtttttactgttactgttccaaagctctgtctcttgatggaggagagaccacatcagatgctgg

SEQ ID NO: 762981 - DNA, 120 bp, Artificial Sequence
  ENSG00000218336_79 (sequence is synthesized)
ggaaataggaggaggaaaggttctgatgtagtcgtgatcctaaacacgtgtcttaagatctaggaaagacagcagaaaccgagcagtggtgggtgagccagatggagccggtcagggtta

SEQ ID NO: 762982 - DNA, 120 bp, Artificial Sequence
  ENSG00000218336_80 (sequence is synthesized)
ctctaagcccacatgaccaaaccatcttggggggctggtttgaatgacagcctctgctctgtctcggggaagccgggggtggcagatccagctggaagtgaactgacagccgcgccctcc

SEQ ID NO: 762983 - DNA, 120 bp, Artificial Sequence
  ENSG00000218336_81 (sequence is synthesized)
tgcacacatgcatgcacgcgtgtgggaacgagcccagccgccatctgcacttccgtgtcggctcagctctgacaaatctctttcctgagcactaaattcagccacgaaaatatttttaga

SEQ ID NO: 762984 - DNA, 120 bp, Artificial Sequence
  ENSG00000218336_82 (sequence is synthesized)
agatatttctcagttcatcgagctatagtacacactgttttcctctatgtataatggtgataaaatatagcaagtgaacatgtcgtaaatataaaggttcaagtgatgtattgaaaataa

SEQ ID NO: 762985 - DNA, 120 bp, Artificial Sequence
  ENSG00000218336_83 (sequence is synthesized)
ttttctaactgctttgtatgtatcacatactctaaattgcacagtaggcgtgtttattaaacagatgattggctgggaaagtttcaaaatagctactgaatttacagtatcagtgctatt

SEQ ID NO: 762986 - DNA, 120 bp, Artificial Sequence
  ENSG00000218336_84 (sequence is synthesized)
actgtctttgtgtatttggtagagcataccgaagtaattaatcttctaatgaatgctgatgatattttattagaatgaaagcacagattagcattaatattttttattctggaaatcctt

SEQ ID NO: 762987 - DNA, 120 bp, Artificial Sequence
  ENSG00000218336_85 (sequence is synthesized)
tggcaagtattatgaagcccaaatttagaaaactatgagatttcaaaccacataaacatgattctgttttccattttattttttaactgttaggtatttgcagttctgttccgtggaact

SEQ ID NO: 762988 - DNA, 120 bp, Artificial Sequence
  ENSG00000218336_86 (sequence is synthesized)
tctgcaggcctgtatttagcatgctgtaagtacttttgggtgaaataggctctgagtctaaattctcagacatgtttctgatgtattaccatgaaaagcttgtgccacatgacagaagtg

SEQ ID NO: 762989 - DNA, 120 bp, Artificial Sequence
  ENSG00000218336_87 (sequence is synthesized)
agatcatagtcttaacctcttcttgacgtggactggtcttcactcgggcaccgataaataacagatttggagtatctcctggtgcttattttagatgatgaagtcaaatcaacccaatta

SEQ ID NO: 762990 - DNA, 120 bp, Artificial Sequence
  ENSG00000218336_88 (sequence is synthesized)
gtgtcctgttagtaggtataatgagcctatttctttctaaaaagacttgtgatctggacatgcttttacaagaaatagtgaccttggggaatatgtaaacaaaagacctttttctaagag

SEQ ID NO: 762991 - DNA, 120 bp, Artificial Sequence
  ENSG00000218336_89 (sequence is synthesized)
ttgggagggggtgggggactgtataatgaaaagaattagcttacaaaaaagaaattgatattcaaagtattttaggcaaagccagtcaaaatgctttcatgatattttgagatgtaaatt

SEQ ID NO: 762992 - DNA, 120 bp, Artificial Sequence
  ENSG00000218336_90 (sequence is synthesized)
ttgtctgatttgtattgttcttttcatttgccttcttaactttatatgtgacctgaattttccataacttgatgactatagattgcacctaggcattccaataaaagccaacccaatgtg

SEQ ID NO: 762993 - DNA, 120 bp, Artificial Sequence
  ENSG00000218336_91 (sequence is synthesized)
aaaaaggcagtaaacggggaatctctttttttgaataaagaagaagaagaaataaagtacctgtcatcttgacaagtggcggagcggaggagtcaaggattataaatgatcacagccagg

SEQ ID NO: 762994 - DNA, 120 bp, Artificial Sequence
  ENSG00000218336_92 (sequence is synthesized)
aatgcttgagatgtgttcttggaagttctattgtatcactaaaggttgaaaagagaaggagatggatgaaataactcaccaaaaggaaacgaatttaagagccagatgctgatgtgtttt

SEQ ID NO: 762995 - DNA, 120 bp, Artificial Sequence
  ENSG00000218336_93 (sequence is synthesized)
catctggtttaacatgagagcttgccttgactgttttcttcatttgaaataactgtgaatgaggctgtttttcccagaaaaaaaaaaatgttattcaacattgtaaaattatgcaagcag

SEQ ID NO: 762996 - DNA, 120 bp, Artificial Sequence
  ENSG00000218336_94 (sequence is synthesized)
agtgcctgatgttctagctacaatttcaaagaagaatttagtcactaaaagggattagattccatttatttattgataaagaggccaacagttcaagttaagaaggtgctagaactgctg

SEQ ID NO: 762997 - DNA, 120 bp, Artificial Sequence
  ENSG00000218336_95 (sequence is synthesized)
tgaggctaatgaaattttgatggcccgagcctcccacaagagtaagagaacattcggaccgtgtcacacagctctctgttagctgagagtcaaaacaagtgataagatttattcttttgc

SEQ ID NO: 762998 - DNA, 120 bp, Artificial Sequence
  ENSG00000218336_96 (sequence is synthesized)
gtaacacgatacgctccagacccaggcaacttggcagcgctgggctcggttcctcacggccacagcgagggcgcgccgcggcaagagcaacctgcaagcaatcaaggccagtctaccctg

SEQ ID NO: 762999 - DNA, 120 bp, Artificial Sequence
  ENSG00000218336_97 (sequence is synthesized)
ttaagccgatataaataagctgtagaaacacaagtgattccaaaaactaccgagacaggaaagaaagggggggggagactggcatattgcttgttccagcgatgtgtcttttctttcgga

SEQ ID NO: 763000 - DNA, 120 bp, Artificial Sequence
  ENSG00000218739_0 (sequence is synthesized)
gaacgcacctcaggatggcccgtactttggaaccactagcaaagaagatctttaaaggagttttggtagccgaacttgtaggcgtttttggagcatattttttgtttagcaagatgcaca

SEQ ID NO: 763001 - DNA, 120 bp, Artificial Sequence
  ENSG00000218739_1 (sequence is synthesized)
caagccaagatttcaggcaaacaatgagcaagaaatatcccttcatcttggaagtttattacaaatccactgagaagtctggaatgtatggaatcagagagctagatcaaaaaacatggt

SEQ ID NO: 763002 - DNA, 80 bp, Artificial Sequence
  ENSG00000218739_2 (sequence is synthesized)
ttgattttttgtagagatggggtctcattgtgttgcccaggctgattaaagtttctataaggtatgtttattcttaagga

SEQ ID NO: 763003 - DNA, 120 bp, Artificial Sequence
  ENSG00000218739_3 (sequence is synthesized)
gctgattaaagtttctataaggtatgtttattcttaaggatatctactctaacacctgtaaatgtagggtgatcaattagtaaattaataaatctgaatcaattaataaatctgtttaaa

SEQ ID NO: 763004 - DNA, 87 bp, Artificial Sequence
  ENSG00000218739_4 (sequence is synthesized)
ctgtcacccaggctagagtgcagtgccgtaatcttggctcacggcaacctctgactcctggattcaagcgattctcgtgcctctgct

SEQ ID NO: 763005 - DNA, 120 bp, Artificial Sequence
  ENSG00000218739_5 (sequence is synthesized)
aagactctggcgagtggcttcccatgggcggtcggatttcggggtccctagtgcgacgagagtggggcggtcttctgcgtggggcctcgtcacagttctgggggcatgtggaggatagtc

SEQ ID NO: 763006 - DNA, 120 bp, Artificial Sequence
  ENSG00000218739_6 (sequence is synthesized)
aggtgtcactgccttaattcactggaggtgtatccctggtggtctgtagcaaaggaacttgaagttttatcagcctcctgaagccgagagcctcagtgcaaaacgtatatgtatttttaa

SEQ ID NO: 763007 - DNA, 120 bp, Artificial Sequence
  ENSG00000218739_7 (sequence is synthesized)
aaaggcattgaaaaggggtcggaagtgaatggagtaaacacctgacagcagcgagctgggattgagaacaaaagagcacacacaggacaatagaaaaatctgaaaaacaagtggttctcc

SEQ ID NO: 763008 - DNA, 120 bp, Artificial Sequence
  ENSG00000218739_8 (sequence is synthesized)
tgctgagtcacaggaacttctagcctgccttggcctgtggtttcccacccactatacaaacccactgcttgtttgttgcttttcttctcatatttattgtcaaagataaatgtttcaaaa

SEQ ID NO: 763009 - DNA, 120 bp, Artificial Sequence
  ENSG00000218739_9 (sequence is synthesized)
agaaatgactaaggaaggaaaagaaacaaatgctctaaagattttctctccccaagcacttttactggtgaaataaaaaccagtaacaatcaatatgtaaaaacggcccacttccctaaa

SEQ ID NO: 763010 - DNA, 120 bp, Artificial Sequence
  ENSG00000218739_10 (sequence is synthesized)
aaaaagtaatttttgtagtctgcaaggttttttttttttttgctttagtctaaatacttgttaatcttacatgttctcctgagagaagaaaaagccattcctttcaggttgtaaagtacc

SEQ ID NO: 763011 - DNA, 120 bp, Artificial Sequence
  ENSG00000218739_11 (sequence is synthesized)
gagagaagaaaaagccattcctttcaggttgtaaagtaccatgaaaaggtctttcaaaaatattcctatcagccaggcatggtggctcacaccagtaatctcagcactttgggaggccga

SEQ ID NO: 763012 - DNA, 72 bp, Artificial Sequence
  ENSG00000218739_12 (sequence is synthesized)
tacttgggaggctaaggtaggagaattacttgaacacctgggcaagggagtgagacgctgtctcaaaaaaaa

SEQ ID NO: 763013 - DNA, 120 bp, Artificial Sequence
  ENSG00000218739_13 (sequence is synthesized)
tctttgttagccatggcattcatgccaatgttatcaaacttggatcccatattttcatccaatagatggccaaacttttaaacaaaaacgataaatttattagaaaactaaaaataatgt

SEQ ID NO: 763014 - DNA, 120 bp, Artificial Sequence
  ENSG00000218739_14 (sequence is synthesized)
agaatagctagcttgttaaaacagtacattagccttacctcttcagcagatacaaataggctggaatcatttaagtttcttttcttttttcttggccctaaaaaaaattgtaagtctaca

SEQ ID NO: 763015 - DNA, 120 bp, Artificial Sequence
  ENSG00000218739_15 (sequence is synthesized)
ttattcaattataaatctaatgattttagaaaaatgcaatgcaacatgattttattttaaaaattatacttgggtaaaaacaattgcaataatcttctggcaccattgggtagctggcat

SEQ ID NO: 763016 - DNA, 120 bp, Artificial Sequence
  ENSG00000218739_16 (sequence is synthesized)
tttcaaaaagctaacaacatcctaatagaactgttcagatgacaagagtgtcttcttgcttttcagatttggccactgatcgaagttttacccataagggaaataacatagtatcaagca

SEQ ID NO: 763017 - DNA, 120 bp, Artificial Sequence
  ENSG00000218739_17 (sequence is synthesized)
atagtaaaattatcagtttgacatggatgggttttgaaatacttaagacacaacataaaatttagttcaggggtctttagattgtaaagaaattgactgaaagtatgtttattatgctat

SEQ ID NO: 763018 - DNA, 120 bp, Artificial Sequence
  ENSG00000218739_18 (sequence is synthesized)
aaatgaagttgtttataacagcgaaaaaggttctcctttaaaaaaaaaacttatctgtagtactgaatatataaacttttcctgaaacaattattcaaactctgcatctttgatatcaat

SEQ ID NO: 763019 - DNA, 120 bp, Artificial Sequence
  ENSG00000218739_19 (sequence is synthesized)
gtctctagcagtagtagagccatattttaaaaagagctttactaaatacagatcataacattcagctgttttaagtgtattaacgcattttggtaaatttacagacttgttcaaccacaa

SEQ ID NO: 763020 - DNA, 120 bp, Artificial Sequence
  ENSG00000218739_20 (sequence is synthesized)
ccacagtctgattttagaacatttccatcaacttcaaagatccctggtgccatttgtagtcctccaacccatctccgatctatcttgtttctatgacttgccttttctggctatttcata

SEQ ID NO: 763021 - DNA, 120 bp, Artificial Sequence
  ENSG00000218739_21 (sequence is synthesized)
taaatgggatcatatgacatgtggtttcctatatctgacttttttcatttagcataacgtttttgaggctcatccatgttgtagtactccatgccatgttgtgggctacataatattcca

SEQ ID NO: 763022 - DNA, 120 bp, Artificial Sequence
  ENSG00000218739_22 (sequence is synthesized)
ttgtatggatataccacattttgcttatcagttaatggacatttaggttttgtctactttttggcattaatagtgctgctgtgaacaatcatgtacaagtctttgtatcagagccacttt

SEQ ID NO: 763023 - DNA, 120 bp, Artificial Sequence
  ENSG00000218739_23 (sequence is synthesized)
tgataaaatagtttctaaaacatttcatcttgatttttattaaggtgatatgtatgttacttaacagctgtataatacacatttgcatgcattaggaagttttttttgggttttattcat

SEQ ID NO: 763024 - DNA, 120 bp, Artificial Sequence
  ENSG00000218739_24 (sequence is synthesized)
cctgtagtgatgtatctgtgacctcaacgagtaggcacttctgtactgtactggtttcttaaagtttcttttatcccgcccccacccccaacctcagcctcaagtatgtaacaccatgcc

SEQ ID NO: 763025 - DNA, 66 bp, Artificial Sequence
  ENSG00000218739_25 (sequence is synthesized)
caagtatgtaacaccatgcctggaggctggagtacaggggcgtgatctcggctcactgcaacctct

SEQ ID NO: 763026 - DNA, 120 bp, Artificial Sequence
  ENSG00000218739_26 (sequence is synthesized)
agtgccgtaatcttggctcacggcaacctctgactcctggattcaagcgattctcgtgcctctgcttctcgagtagctgggactacagctcaaaaaatgacaagcttgccattaatgcgt

SEQ ID NO: 763027 - DNA, 120 bp, Artificial Sequence
  ENSG00000218739_27 (sequence is synthesized)
tgggaataaacaggaagttaacagagttttcctttatactgaggaaaactaagaaataaggaactacaagaaatcagttttacctcttcagaataaaaattgctgactcatcctgagtaa

SEQ ID NO: 763028 - DNA, 120 bp, Artificial Sequence
  ENSG00000218739_28 (sequence is synthesized)
aaggagatttggcttttaattctaacttactaactgtggtttcaactgtctaaggtttatacttaccaggaagatgacgaatatccttaataaaatgttttcttttcggctgcatcacaa

SEQ ID NO: 763029 - DNA, 120 bp, Artificial Sequence
  ENSG00000218739_29 (sequence is synthesized)
tataaattatgtagtaatttctttacaaggaatttctaacaatactattcacatgtattttagttcttctgagactaaattctcatctattctagtgagaggagaattaggtaatgggct

SEQ ID NO: 763030 - DNA, 120 bp, Artificial Sequence
  ENSG00000218739_30 (sequence is synthesized)
taaacctttggttttaaaagatcagtttcatctcaggtttgctaacttcttggagctgtctctttctctgtcaagtagataaagactgaacaagatgacatcatgtagttagacgaaata

SEQ ID NO: 763031 - DNA, 120 bp, Artificial Sequence
  ENSG00000218739_31 (sequence is synthesized)
gtgctcattacaatgatcagagatgccaggacttatatgtgaagtctgtaatcctactgtcctctttttcattttgttatgtagcaatatggaaaaaagaagttgtttttttcaatacat

SEQ ID NO: 763032 - DNA, 120 bp, Artificial Sequence
  ENSG00000218739_32 (sequence is synthesized)
ttaattttaacaatgcttccacatgactttataaatgagagctatttttatttatagtttattacaaatccactgagaagtctggaatgtatggaatcagagagctagatcaaaaaacat

SEQ ID NO: 763033 - DNA, 120 bp, Artificial Sequence
  ENSG00000218819_0 (sequence is synthesized)
acatgctccctggggcccctgcgggattacgagggggtgggaacagggcccgagtctcccgccatcttgggccctagcggtatttttccagctctgggaagagcggcctgacccgcagca

SEQ ID NO: 763034 - DNA, 120 bp, Artificial Sequence
  ENSG00000218819_1 (sequence is synthesized)
gagattcttggtcttatttctgcattctgatctgttccagtgaattatatttccacaccagtactacaccagtaccacagtgtcttgagtgctgtaactttataattagtcttaaactca

SEQ ID NO: 763035 - DNA, 120 bp, Artificial Sequence
  ENSG00000218819_2 (sequence is synthesized)
gatttagagtctgattctaaggaaaaatagtttcccaaatttcacacaattaattgagtactgatatctgaatcctgtgtatacagtaaaatggattctacatctttcttaccaacattt

SEQ ID NO: 763036 - DNA, 120 bp, Artificial Sequence
  ENSG00000218819_3 (sequence is synthesized)
ttagatgtggatctgacaatatcacatattaaatgtcttcccaaggatattctggtgaaatttcaaggcataaagagtaatgaatgtgagtttgactaccatgtattgcagagagaaata

SEQ ID NO: 763037 - DNA, 120 bp, Artificial Sequence
  ENSG00000218819_4 (sequence is synthesized)
caacatactccaaaagtgaaaaataatgtggaaattgatgaattttgtttggtggaagaaagagtatctggagaatggcagagaggaagagtcatggaaaagaaaaatgaactctataca

SEQ ID NO: 763038 - DNA, 120 bp, Artificial Sequence
  ENSG00000218819_5 (sequence is synthesized)
gtgctcctcatagatcgcggagaagaactaagagttgctggtccacagattgcttcagcctgtggcaatttatttgagctaccgccacgggtagtatttggtatttttgcgaatatacta

SEQ ID NO: 763039 - DNA, 120 bp, Artificial Sequence
  ENSG00000218819_6 (sequence is synthesized)
ccagttggggaaaaatggtcccctaaagctttgaattatttcaagtcattagtaggaatacaagtgaaaggttatgtgcaagctattttacctctgcaaatgtttctttttgaagtgcca

SEQ ID NO: 763040 - DNA, 120 bp, Artificial Sequence
  ENSG00000218819_7 (sequence is synthesized)
aaaattatatctcaggctctcgagttacaattaggaagacttgttgatggagattcatttcgtcttattgtggaaatgttagaagaattccctcaacaaatgccagatttattacaacat

SEQ ID NO: 763041 - DNA, 120 bp, Artificial Sequence
  ENSG00000218819_8 (sequence is synthesized)
aaaaggcctgaattgtcattaggtaataaagatacttcacttgatattcagcatgttctggataagttgcagccatctttgtcagtaggaagtactgaaagtgtaaaggtatcatctgca

SEQ ID NO: 763042 - DNA, 120 bp, Artificial Sequence
  ENSG00000218819_9 (sequence is synthesized)
ttgagcccaagtaaattttattgtcagttaattaaatggactccagagctagaaaacttgacagcacatatgactttgcattatgataccgtctgtcaagaaactagtcccacgtgtgat

SEQ ID NO: 763043 - DNA, 120 bp, Artificial Sequence
  ENSG00000218819_10 (sequence is synthesized)
aattttggactgctttgtgttgccagaaggcgaaatggacagtggcatagaggaattcttcagcagctcttgcccccaaatcaagtaaaaatttggtttatggattatggcagtagcgag

SEQ ID NO: 763044 - DNA, 120 bp, Artificial Sequence
  ENSG00000218819_11 (sequence is synthesized)
gctataccctcaatttatgtaaagaaacttaaacaggattttattttagtaccattattttcatttccatgttctctgacatgtttgcacagtccagatagagatgcaagaatatttcaa

SEQ ID NO: 763045 - DNA, 120 bp, Artificial Sequence
  ENSG00000218819_12 (sequence is synthesized)
ctgagtatatttaaacaggccttattaggacaagtggtatatgcacacattgattggttcaataaggatgagtgtttgtattatgtgacattacaaactcaagagtctacagttaattct

SEQ ID NO: 763046 - DNA, 120 bp, Artificial Sequence
  ENSG00000218819_13 (sequence is synthesized)
aagtgtctactgaagactgtaggcacacaagtactttgtccgatgtctgattcaaaaatctccaatatcttgagtgagacaagtgtgtctgatgtaaacagctttgcagttgagagtttt

SEQ ID NO: 763047 - DNA, 120 bp, Artificial Sequence
  ENSG00000218819_14 (sequence is synthesized)
atgggaaatattgaatggtcaatagactctctaaataaaaaaggcattttaaaagtaggttttcccattaaaacagtacaaatggagatagaggctgcctacatagcttttatagcatat

SEQ ID NO: 763048 - DNA, 120 bp, Artificial Sequence
  ENSG00000218819_15 (sequence is synthesized)
gtattaaacccatcaaatttctgggtacgcactaatgaccatcggaatgaatttcaagaaataatgaaaaacataaacaaattttatgatttgtgtgaaaacgatgaaatgattctaaga

SEQ ID NO: 763049 - DNA, 120 bp, Artificial Sequence
  ENSG00000218819_16 (sequence is synthesized)
aaacctgaacctggattattttgttgtgctagatatagcaaggacagacgtttttacagagctgtcatcactgaaattaatggttataagattaatgtttattttttggattatggtaat

SEQ ID NO: 763050 - DNA, 120 bp, Artificial Sequence
  ENSG00000218819_17 (sequence is synthesized)
actgattccataccattttttgatgtaaaaattttgcttccagaattttgtgagttgcctgccttagcgatgtgctgttcacttgcacatatatttcctgttgaagatttatggactaag

SEQ ID NO: 763051 - DNA, 120 bp, Artificial Sequence
  ENSG00000218819_18 (sequence is synthesized)
gctgcaattgattattttaaaaaattagttttgaacaaagcaattttgcttcaggttatagcaaaaaaagatgacaagtacactgtaaatattcaaagtgttgaagcctcagaaaatatt

SEQ ID NO: 763052 - DNA, 120 bp, Artificial Sequence
  ENSG00000218819_19 (sequence is synthesized)
gatgttatctctcttatgttacaagctggatatgcagaatattttcaagtagaactagaatattttccaaaatctgtaagtgaatattcaatgctaaattcagaatctaaaaacaaagtt

SEQ ID NO: 763053 - DNA, 120 bp, Artificial Sequence
  ENSG00000218819_20 (sequence is synthesized)
aatattaaaaaagtcatatctgcccttcttgaaggacctaaatctaaaaagtaccattcaaataacctggtggaaaataacttgtctttgccaaagtccctagctgttaatatctcagaa

SEQ ID NO: 763054 - DNA, 120 bp, Artificial Sequence
  ENSG00000218819_21 (sequence is synthesized)
tttaaaaatcctttcaccttgtctgtgggacctgagtcatcctggccttataaagaatatatttttagaccaggaacagttcttgaagttaaatgttcctgttattatggcccaggtgac

SEQ ID NO: 763055 - DNA, 120 bp, Artificial Sequence
  ENSG00000218819_22 (sequence is synthesized)
ttttcatgccagctccaatgtaagtcagaagacctaaaattactaatggagcaaattcagaattactatagtattcattctgatccttatgagattgggcagactgcttgtgttgctaag

SEQ ID NO: 763056 - DNA, 120 bp, Artificial Sequence
  ENSG00000218819_23 (sequence is synthesized)
tattctgggaagtggtgtagagctgctgttttgactcaagtatcaaaagaagttgacatagtgtttgttgattatggttaccaaaaaagggttttaattgaagatctttgtgcaattaac

SEQ ID NO: 763057 - DNA, 120 bp, Artificial Sequence
  ENSG00000218819_24 (sequence is synthesized)
ccacgttttctcttgttagaaagccaagccttcagatgttgtcttaaccattttattgagcctgttagttgtaaattattcagttggacaagaaaagcattcagagacttgtggaatttt

SEQ ID NO: 763058 - DNA, 120 bp, Artificial Sequence
  ENSG00000218819_25 (sequence is synthesized)
gggttattgacttgtatcatctatgccttagttattatacatccaaaccatttatataacttagtggatttacagtcctcatttactagtgcaaaagaatttcttatgaatcgtggctct

SEQ ID NO: 763059 - DNA, 120 bp, Artificial Sequence
  ENSG00000218819_26 (sequence is synthesized)
gctcagtatatcacattatcagagacattcccatctttatttagtctttacagttactgttattcttcctttaatatacaaattggaagtgaagaagaagtatatatatctcacatatat

SEQ ID NO: 763060 - DNA, 120 bp, Artificial Sequence
  ENSG00000218819_27 (sequence is synthesized)
agtccccaaaagttttattgccagcttggcagaaataataaagatctagagatgatagaaacaaaaatcacagagagtgttaacctccaaaattttccaaaatatgattctaataaaatg

SEQ ID NO: 763061 - DNA, 120 bp, Artificial Sequence
  ENSG00000218819_28 (sequence is synthesized)
agagtgtgcatatctaagtatgtagaggatggtctctcatacagagctttagcaataccaacagattcatcatctgagtttcaagtctattttgtagactttggaaataagcaattagta

SEQ ID NO: 763062 - DNA, 120 bp, Artificial Sequence
  ENSG00000218819_29 (sequence is synthesized)
ggagaaaatatgttgagggccatttcagctcagtttccagagttgttgtttacacctatgcaagctattaagtgttttttgtcagatcttagggatgtagatattccagcagaaatcagt

SEQ ID NO: 763063 - DNA, 120 bp, Artificial Sequence
  ENSG00000218819_30 (sequence is synthesized)
agttggtttaaagacaatttcttgggaagatcattaaaggcgataatattgtcccaggagtcagatggacagcttggtatagaattgtatgatggatctcaatatataaatgagaaaatt

SEQ ID NO: 763064 - DNA, 120 bp, Artificial Sequence
  ENSG00000218819_31 (sequence is synthesized)
aaagtgttgcttcatgcttatggaaaaagacattgtgaccaagcatgctgcatggaaaagagtaataaaataaatgagaataagagatttactacttctttgaaaggcaaaacaggaaac

SEQ ID NO: 763065 - DNA, 120 bp, Artificial Sequence
  ENSG00000218819_32 (sequence is synthesized)
aactatcgccataatgtgataaataaacctagtccagtaacatattccgaaagaaaaatagaccaattgatgcatcccaaaaatatacatgccaggtttttgaagccatcagtttgttat

SEQ ID NO: 763066 - DNA, 120 bp, Artificial Sequence
  ENSG00000218819_33 (sequence is synthesized)
aaaatggaacctgtgtcaaaaaacaaaatgaagacttctttgaatgatgggcttaaaggtataaaaattgtccctggagctgcacatattcttgagaacaggcgtgtgggccaaaaatca

SEQ ID NO: 763067 - DNA, 120 bp, Artificial Sequence
  ENSG00000218819_34 (sequence is synthesized)
gtaaaggttgtatcacagtcttttatcagagcattaaatcaaacaacctcacaaaacccatatgaccttattaggccacagatcaaagaccttcctcaaccgcaaatttatttgaatgcc

SEQ ID NO: 763068 - DNA, 120 bp, Artificial Sequence
  ENSG00000218819_35 (sequence is synthesized)
aaagttaaagggtatgtatctaatatcagtaatccagcgaatttccatattcagcttgctgagaatgaaagtgtaattatcagacttgctgatgctctaaatgcaacagcaaggagattg

SEQ ID NO: 763069 - DNA, 120 bp, Artificial Sequence
  ENSG00000218819_36 (sequence is synthesized)
agagagagaaaatcagttaaacctctagtgggagatcttgtagttgcagaatattctggtgacaatgccatttacagggcagttattaagaaaattttgccaggaaattcttttgaagta

SEQ ID NO: 763070 - DNA, 120 bp, Artificial Sequence
  ENSG00000218819_37 (sequence is synthesized)
gaatttattgactatggtaactctgcaatagtaaacacatctaaaatttacgaacttcagagggaatttttaactgttcctcagctaggaatccatgcttttcttagtggagtaaaatgg

SEQ ID NO: 763071 - DNA, 120 bp, Artificial Sequence
  ENSG00000218819_38 (sequence is synthesized)
aatgagcctgatgaaatatgggatgacaaaactgtggattattttacttcgaaagtacataacaaaacagtttattgtgaatttttgaaaaagcatgatcagaaatgggaagtaaatatg

SEQ ID NO: 763072 - DNA, 120 bp, Artificial Sequence
  ENSG00000218819_39 (sequence is synthesized)
atttgtgatgaaaaatgtgtcattaatgaactactgaaatggaaagcatgttcaaaactgcagaagtcagcattgcagatgcctcaggttctctctcaaaaggtgaggccaggtgataat

SEQ ID NO: 763073 - DNA, 120 bp, Artificial Sequence
  ENSG00000218819_40 (sequence is synthesized)
gaaatgaagaaaggaaaatcaaatgagtctgaaggttctatgaattcaaaccaacagctgtttaaaattcctttggaagaattcaaacttggacaacttgaaaaagctgaaatgcttaat

SEQ ID NO: 763074 - DNA, 120 bp, Artificial Sequence
  ENSG00000218819_41 (sequence is synthesized)
gtttcaaaaagtggaagattttatgtgaagttatccaaaaataaaaaaattttatcagatttaatagtattaattacgaaagaagaaaaaaaatccccttttttatcaatggaaagtatt

SEQ ID NO: 763075 - DNA, 120 bp, Artificial Sequence
  ENSG00000218819_42 (sequence is synthesized)
gaaaaaggtttagaatgcttggcaaaatctaaaaataccttgaaatggcatcgatcaaaagtagaagaaaagtatgttgatgataaagtacttgtttttttagtagattgtggtatctat

SEQ ID NO: 763076 - DNA, 120 bp, Artificial Sequence
  ENSG00000218819_43 (sequence is synthesized)
gaaatagtacctgtatgtaataccaagctgcttagtaatgaaataagaaacattcctagacaagctgtaccttgtaaatggatttggtttgaaaattctaagaacatatcatttgagtgc

SEQ ID NO: 763077 - DNA, 120 bp, Artificial Sequence
  ENSG00000218819_44 (sequence is synthesized)
ttatttgctgatttggaaataaatattcttttcctgaaatatttagatgctgtttgggaagtagaaattttggtagatgacctgttacttttggaatacttaaatttgaatacagttcct

SEQ ID NO: 763078 - DNA, 120 bp, Artificial Sequence
  ENSG00000218819_45 (sequence is synthesized)
gttgaagaaaacaaacttagacttgcagaaattgtttacaacattgaatctaagactcctgtatcatcatgcacaataaaatcatttacttgggttcaattccaaaatgataggcagtat

SEQ ID NO: 763079 - DNA, 120 bp, Artificial Sequence
  ENSG00000218819_46 (sequence is synthesized)
tctggtattgcaactgctgtttctgatccatcagacttcagtattcagttagaagatttctttgacataatgaaatacctttttatgttgctttctgatctaccagagaccttacaaaca

SEQ ID NO: 763080 - DNA, 120 bp, Artificial Sequence
  ENSG00000218819_47 (sequence is synthesized)
ttgcctcaggagttcataattcccggttctagttgtttgttcaaatataaatcggaagatcagtggaatagagtagaaatttctgaagtctcacctcagtctttatgtcttgtgttggtt

SEQ ID NO: 763081 - DNA, 120 bp, Artificial Sequence
  ENSG00000218819_48 (sequence is synthesized)
gactatggattttctttttatatacgttattcagaaattataaatcttaaagttgttcctgaggaacttttgaatttgccaaggctgagttatccatgtattttatatggtatcttacct

SEQ ID NO: 763082 - DNA, 120 bp, Artificial Sequence
  ENSG00000218819_49 (sequence is synthesized)
gctaaaggaaaacattggagtgaagaagccaaaatcttttttcgagatttcctaagtaaaccagacttagtttttcagtttagggaatatcattctgaaacaaaactgaaagtagatgtc

SEQ ID NO: 763083 - DNA, 120 bp, Artificial Sequence
  ENSG00000218819_50 (sequence is synthesized)
attcatgagaaaaacaatttggcagatatattagttgcatctggtctcgcaacttattctaaagattcacctcatcttgatgcaattactgctactgaatctgctaaaaatccaatataa

SEQ ID NO: 763084 - DNA, 120 bp, Artificial Sequence
  ENSG00000218823_0 (sequence is synthesized)
aggttctggaacgcagccgctgaggggtctggcgccatgttggggctgaggggaaggaggagaagctcctgaagcggcgggcgcgcagcgggagtgggagtggggtcggaccagggcagc

SEQ ID NO: 763085 - DNA, 120 bp, Artificial Sequence
  ENSG00000218823_1 (sequence is synthesized)
tagaagccctgcccttccgcctcagcggatcatgacccgggcggcggccgcgaaggtcgcggtggtgggggacgtgccctggcggggcgggcgctgaaagatgatgccgtttccggtgac

SEQ ID NO: 763086 - DNA, 120 bp, Artificial Sequence
  ENSG00000218823_2 (sequence is synthesized)
aacccagggaccaccgcagccggcgccgccgccgaatcgctacggcgtctcctcgcctatcagtctagcggtccccaaggagacggactgcctcctcacccagaggctaatagaaaccct

SEQ ID NO: 763087 - DNA, 120 bp, Artificial Sequence
  ENSG00000218823_3 (sequence is synthesized)
caggcccttcggggtcttcgaagaggaagaggaactgcagcgcaggattttagttttggaaaaattaaataatctggtaaaggaatggatacgcgaaatcagtgaaagcaagagtcttcc

SEQ ID NO: 763088 - DNA, 120 bp, Artificial Sequence
  ENSG00000218823_4 (sequence is synthesized)
ccagtctgtaattgaaaacgttggaggaaagatttttacgtttggctcttacagattaggagtacatacgaaaggcgcagatattgacgccttgtgcgttgcaccaagtcatgtggatcg

SEQ ID NO: 763089 - DNA, 120 bp, Artificial Sequence
  ENSG00000218823_5 (sequence is synthesized)
aagcgactttttcacctcattctatgctaaactgaaactacaggaggaagtgaaagatttaagggctgtcgaggaggcatttgtgccagttatcaaactgtgttttgatgggatagagat

SEQ ID NO: 763090 - DNA, 120 bp, Artificial Sequence
  ENSG00000218823_6 (sequence is synthesized)
tgatattttatttgcaagattagcactacagactattccagaagatttggacttaagagatgacagtctacttaaaaatttagacattagatgcataagaagccttaatggttgccgggt

SEQ ID NO: 763091 - DNA, 120 bp, Artificial Sequence
  ENSG00000218823_7 (sequence is synthesized)
aaccgatgaaattttacatctagtgccaaacattgacaacttcaggctgactctgagagccatcaaactgtgggccaagtgccacaatatctattccaatatattaggtttcctcggagg

SEQ ID NO: 763092 - DNA, 120 bp, Artificial Sequence
  ENSG00000218823_8 (sequence is synthesized)
tgtttcctgggccatgctagtagcaagaacttgtcagctttatccaaatgcagtagcgtcaactcttgtacggaaattcttcttggtattttcagaatgggaatggccaaacccagtgtt

SEQ ID NO: 763093 - DNA, 120 bp, Artificial Sequence
  ENSG00000218823_9 (sequence is synthesized)
actgaaggagcctgaagaacggaatcttaatttgcctgtatgggacccaagagtaaatcccagtgataggtaccatcttatgcctatcatcacaccagcatacccacagcagaactccac

SEQ ID NO: 763094 - DNA, 120 bp, Artificial Sequence
  ENSG00000218823_10 (sequence is synthesized)
atacaacgtgtctatttcaaccaggatggtcatgattgaggagtttaaacaggggcttgctatcacacacgagattttgctaagtaaggcagagtggtccaaactctttgaagctccaag

SEQ ID NO: 763095 - DNA, 120 bp, Artificial Sequence
  ENSG00000218823_11 (sequence is synthesized)
cttctttcaaaagtacaagcattatattgtacttctggcaagtgcatcaacagaaaaacaacatttagaatgggtgggcttggtggaatcaaagatccgaatcctggttgggagcttgga

SEQ ID NO: 763096 - DNA, 120 bp, Artificial Sequence
  ENSG00000218823_12 (sequence is synthesized)
gaagaatgaatttattacactggcacatgtgaatccacagtcatttccagcacccaaagaaaatcctgatatggaagaatttcgtacaatgtgggtgattgggttagggctaaaaaagcc

SEQ ID NO: 763097 - DNA, 120 bp, Artificial Sequence
  ENSG00000218823_13 (sequence is synthesized)
agataattctgaaattctcagcattgatctcacctatgatatccagtctttcacagatactgtttataggcaagcagtgaatagtaagatgtttgagatgggtatgaaaattactgcaat

SEQ ID NO: 763098 - DNA, 120 bp, Artificial Sequence
  ENSG00000218823_14 (sequence is synthesized)
gcatttaagaagaaaggaacttcaccagctgctgcctcatcatgtgcttcaggacaagaaagcacactcaacagaaggtagaagattgacagatttgaacgacagcagctttgacttgtc

SEQ ID NO: 763099 - DNA, 120 bp, Artificial Sequence
  ENSG00000218823_15 (sequence is synthesized)
tgcaggctgtgaaaacagcatgtctgtgccttcatctactagcactatgaagacaggcccattgattagcagttctcagggtagaaacagtcctgccttggctgtaatgacagcatctgt

SEQ ID NO: 763100 - DNA, 120 bp, Artificial Sequence
  ENSG00000218823_16 (sequence is synthesized)
ggctaacatacaggctactgaattttccttgcaacaggtgaataccaatgaaagttcaggggttgcattaaacgaaagtattcctcacgctgtctctcagcctgccatttctccatcacc

SEQ ID NO: 763101 - DNA, 120 bp, Artificial Sequence
  ENSG00000218823_17 (sequence is synthesized)
gttggagtctagaggatattcttgcctcataaagaagaaaggaccaagaaaaccaaaacggaagaggagaaactcaatacaaagacaagtacaactccattagaaaaattcagacagcat

SEQ ID NO: 763102 - DNA, 120 bp, Artificial Sequence
  ENSG00000218823_18 (sequence is synthesized)
cttctctattggcctctcagggaacatcagtatagatctttccggtatccctgttctccctgcaaatccaattcctgttatcaagaattcagtaaaacaggttgaatggttaaaaacaac

SEQ ID NO: 763103 - DNA, 120 bp, Artificial Sequence
  ENSG00000218823_19 (sequence is synthesized)
ctcaagggtccatgaacaatatctgccaactgaacctgttgtcttcaaatactaaggaaggagaatgaggggtacgggactagatatgacttgaaatagattgaggctcatttggtaact

SEQ ID NO: 763104 - DNA, 120 bp, Artificial Sequence
  ENSG00000218823_20 (sequence is synthesized)
tcctttactgagccagtcttgatcagaagtccacattagtatgtgacagctagaggtactgttattaatgtatcagcaacagttacattaactatttcaaaggactactgcccttaaaat

SEQ ID NO: 763105 - DNA, 120 bp, Artificial Sequence
  ENSG00000218823_21 (sequence is synthesized)
gaaaaaacctttcagctatgtttgtacccgtgactgacatctggactggatttatgcttgatgcattgttgggaaaatatgcaatacaaactggtatcagaattccttatactgatgagg

SEQ ID NO: 763106 - DNA, 120 bp, Artificial Sequence
  ENSG00000218823_22 (sequence is synthesized)
cactttatattttttattagaaagtagaactaattttagatttttcaaattggtgaattttatttttccctgaagaggtttcttcactattaatcttaaaattggataccattgtgcagc

SEQ ID NO: 763107 - DNA, 120 bp, Artificial Sequence
  ENSG00000218823_23 (sequence is synthesized)
ggtgtactgtacttcagagaaagcataaaagtacatctagctcagtccctatgaggtagctgtaaccctttaaaatgaaatgtcaactttaaggtatgtttttgacatcaaccattagta

SEQ ID NO: 763108 - DNA, 120 bp, Artificial Sequence
  ENSG00000218823_24 (sequence is synthesized)
ggtctttggttttgatggcacactatggagaaaggacacactggttttaatctgtagaactgttttagagtaattagcaatcaaacattttctttgagctatcaaagctccatattctct

SEQ ID NO: 763109 - DNA, 120 bp, Artificial Sequence
  ENSG00000218823_25 (sequence is synthesized)
tgtcctcaatcattagtcctaaaacaaaaaagctttttgcctccctctcttctctttgcctgtatgcacacagtatgcttatgtgtcatttcacaagaaaaaaggaataatattctctaa

SEQ ID NO: 763110 - DNA, 120 bp, Artificial Sequence
  ENSG00000218823_26 (sequence is synthesized)
accatgatgtgaaactgacaatcctgtggccacatggcacaaaacaccaaatattggttatgatgaaacaccacattttagcaaaactttactaaatgtaatgtctatgagatatgtttc

SEQ ID NO: 763111 - DNA, 120 bp, Artificial Sequence
  ENSG00000218823_27 (sequence is synthesized)
tgatcttggatgaccatttgatcactgcatatgagaagttttgttcattccacagaatacctccttataggaaagttaatttccaattgcacacataagcaaaaaggcattttcttcaag

SEQ ID NO: 763112 - DNA, 120 bp, Artificial Sequence
  ENSG00000218823_28 (sequence is synthesized)
aattttaaacacttttatttttaaacgatttatcaaaattcatctctaaattttacatgtagaaacataaaaaagtaatttctagcaagcacttgacatcttactggctttctgctcttt

SEQ ID NO: 763113 - DNA, 120 bp, Artificial Sequence
  ENSG00000218823_29 (sequence is synthesized)
tagtctacaaaagatcagcaatactttaagttaaaaaaaatctcataattaagcagtagagcatctatgattaggaaatgtgaggggcaacagatgtgaatgaatgaaagttgagtcttt

SEQ ID NO: 763114 - DNA, 120 bp, Artificial Sequence
  ENSG00000218823_30 (sequence is synthesized)
cttaatctagacagcaaacttaacaggctttccaattagccttgctttaacccctcccgtccctcctctaactctgcacttttcatgttaaactgcaattacttaaactcttttcctgtc

SEQ ID NO: 763115 - DNA, 120 bp, Artificial Sequence
  ENSG00000218823_31 (sequence is synthesized)
ctgcattaattttccaaagttggaatatagtcatgtccttttatgctgtagagacttttctttcaccattactttctgatatctagtacacagtatttctttttctcacatctttgccgt

SEQ ID NO: 763116 - DNA, 120 bp, Artificial Sequence
  ENSG00000218823_32 (sequence is synthesized)
ttcaccacaataataaatcgggtgaagtgtgcacaatatctgtattttgaatggctatggcgttaggttgaaatggccaggcacaaatttagtctggtcattttgtttacacattgggaa

SEQ ID NO: 763117 - DNA, 120 bp, Artificial Sequence
  ENSG00000218823_33 (sequence is synthesized)
aaaaattagtttattaaacattacctgtaactgtgtctgttttaccaagctggaaccttgggactttttatttctaatttttattacctgaatgtcagaccattttttcatgtgatgtac

SEQ ID NO: 763118 - DNA, 120 bp, Artificial Sequence
  ENSG00000218823_34 (sequence is synthesized)
ctagtgagtggagtttgctttgttttatggtatctgtactcctggtatattcaagcactgttttgaaaacagatgacttatttctccattaaaaatgcaataaaaataaatggcaaacaa

SEQ ID NO: 763119 - DNA, 120 bp, Artificial Sequence
  ENSG00000218891_0 (sequence is synthesized)
accgtccgcgtttggccggccgtggggaaggaagaaaggagccaaggaggcgaggcatggatccgcagcctcctccacccgcccagggcagcccacctcaccgtggccgaggccggggcc

SEQ ID NO: 763120 - DNA, 120 bp, Artificial Sequence
  ENSG00000218891_1 (sequence is synthesized)
gtggccgaggccgtggtcggggccgtggccgtggcagggggggcgctggagcccctagggcgcccctgccctgccccacctgcggccgcctcttccgtttcccctactacctctcccggc

SEQ ID NO: 763121 - DNA, 120 bp, Artificial Sequence
  ENSG00000218891_2 (sequence is synthesized)
cccctactacctctcccggcaccggctgagccactcggggctccggccccacgcctgcccgctgtgccccaaggccttccgccggccggcccacctttcccgccacctgcgcggccacgg

SEQ ID NO: 763122 - DNA, 120 bp, Artificial Sequence
  ENSG00000218891_3 (sequence is synthesized)
gcgccgcctgcccccgcaccttcccagaaccggcccagctcaggcgccacctggctcaggagcacgcgggcggcgaggtcgagctggccatcgagagggtggccaaggagacggccgaac

SEQ ID NO: 763123 - DNA, 120 bp, Artificial Sequence
  ENSG00000218891_4 (sequence is synthesized)
ccagctggggcccgcaggacgagggctcggagccgcccaccaccgctgcagcaggggccacggaggaggaggcggtcgcagcgtggcctgagacgtggcctgcgggggagccttccacgc

SEQ ID NO: 763124 - DNA, 120 bp, Artificial Sequence
  ENSG00000218891_5 (sequence is synthesized)
tggctgcgcccaccagcgccgcggagccccgggagtcggagtcggaggaggccgaggccggggcagcagagctgagggccgagctggcgctggcggccgggcggcaggaggagaaacagg

SEQ ID NO: 763125 - DNA, 120 bp, Artificial Sequence
  ENSG00000218891_6 (sequence is synthesized)
tcctgctccaggcagactggacgctgctgtgtctgcgctgccgcgaagccttcgccaccaagggcgagctcaaggcgcacccgtgtctgcgccccgagggcgaacaggaaggggaagggg

SEQ ID NO: 763126 - DNA, 120 bp, Artificial Sequence
  ENSG00000218891_7 (sequence is synthesized)
ggcccccgccacgccccaagcgacaccagtgctccatctgcctcaaggccttcgccaggccctggtccctgtcgcgccaccggctggtccactccaccgaccgccctttcgtgtgcccag

SEQ ID NO: 763127 - DNA, 120 bp, Artificial Sequence
  ENSG00000218891_8 (sequence is synthesized)
actgcggcctggccttccgcctcgcctcctacctccgccagcaccgccgcgtccacggccccctcagcctgctggccccgctgcccgcggcgggcaagaaggacgacaaggcctcgggtg

SEQ ID NO: 763128 - DNA, 120 bp, Artificial Sequence
  ENSG00000218891_9 (sequence is synthesized)
gacaaggcctcgggtgcacggaactcagccaaggggccggaggggggcgagggggcggagtgcgggggtgcctcggaagggggagaagggcagaacggaggcgacgccgccccggctcgg

SEQ ID NO: 763129 - DNA, 120 bp, Artificial Sequence
  ENSG00000218891_10 (sequence is synthesized)
cccgcttctggtgcccagagtgcggcaaaggtttcaggcgccgggcgcacctgcggcagcacggggtgacccactcgggagcgcgccccttccagtgcgtgcgctgccagcgggagttca

SEQ ID NO: 763130 - DNA, 80 bp, Artificial Sequence
  ENSG00000218891_11 (sequence is synthesized)
ggcccagccccgcacccgtgcccccgctgcccgcgccgcttctcgcgcgcctacagcctcctgcgccaccagcgctgcca

SEQ ID NO: 763131 - DNA, 120 bp, Artificial Sequence
  ENSG00000218891_12 (sequence is synthesized)
tgcaggcccaggccccgacgtcgccgccaccgcccccgccgcccctgaaggccgagcaggaggaagaagggctcccgctgcccctcgcaaacattaaggaagagccgccctctccgggga

SEQ ID NO: 763132 - DNA, 120 bp, Artificial Sequence
  ENSG00000218891_13 (sequence is synthesized)
ccccaccccagtccccgccggctccccctgtcttcctcagcgcctcctgtttcgacagccaagaccactcagccttcgagatggaggaggaagaggtagacagcaaggctcacctgcgcg

SEQ ID NO: 763133 - DNA, 120 bp, Artificial Sequence
  ENSG00000218891_14 (sequence is synthesized)
ggctggggggcctggcctcctgaccttcgccgccctgccctccgccgctccgcctgagctccccggtttgcagaatggaggagggaagttgaaggagccacctcctctgtctacccaccc

SEQ ID NO: 763134 - DNA, 120 bp, Artificial Sequence
  ENSG00000218891_15 (sequence is synthesized)
gtccccttcacgcccttgacactaaggagtggggggccctggactgccccttcctcccccatcgcccgcccccagaacccctgatgctggttaggaaccgctcaccccaacatgtgtctt

SEQ ID NO: 763135 - DNA, 120 bp, Artificial Sequence
  ENSG00000218891_16 (sequence is synthesized)
aaggcaggacgacttggaaaaaaaggcggcggacagttggccagagggatggagactggtggggacgcccccgcctccctgtcccccgtttcacacactggacaccatcacctctttgga

SEQ ID NO: 763136 - DNA, 120 bp, Artificial Sequence
  ENSG00000218891_17 (sequence is synthesized)
actgccagaccctgggggtccccagtgagcaaaggtctgtccttgtccctttgtctgtctgtgaataaatgtgagttcgtgaaatccaagagagcgaggtgttctgtggaggtggggcag

SEQ ID NO: 763137 - DNA, 120 bp, Artificial Sequence
  ENSG00000218891_18 (sequence is synthesized)
gctgggggcgctggggcgagtcaggatttgtccagccaactctgaacttgggttcagagcaggaaggacacagatgcatcagaaaatatgtggccctcaaccaagcaagaagccggtgaa

SEQ ID NO: 763138 - DNA, 120 bp, Artificial Sequence
  ENSG00000218891_19 (sequence is synthesized)
ggctgggttgagaagaaacaggaatgtgagaagatagatcatcgtcaccgctgccctgtggaagctccgcgcgattatcctcaccactgccctgtggaagctccgcgccttactcagtca

SEQ ID NO: 763139 - DNA, 120 bp, Artificial Sequence
  ENSG00000218891_20 (sequence is synthesized)
atctctaccacacccttactctgtgtcagcggtggtactaggcactgaggaggagtccaataccttcctctgaaagagctggaattctagccctgcattgtccaacataacttttttttt

SEQ ID NO: 763140 - DNA, 120 bp, Artificial Sequence
  ENSG00000218891_21 (sequence is synthesized)
ttctcagaaaagtttccataatctttcttccctcactctgttgcccaagctgcagtgccgtggtgcagtcatagctcactgcagtctcaaactcccagacccaagcaatcctcttagcct

SEQ ID NO: 763141 - DNA, 120 bp, Artificial Sequence
  ENSG00000218891_22 (sequence is synthesized)
tacaggtgcatgccaccacacccagctgattgtttcatttcttgcagagacggagtcttgctatcttgcccagtctgggagaactttttgtgatgatgggatattctacatcttcactgt

SEQ ID NO: 763142 - DNA, 120 bp, Artificial Sequence
  ENSG00000218891_23 (sequence is synthesized)
tctacatcttcactgtccaatatgatatccagcagacacacgtggctatttccgtttaaatttagaatatggaaatgtaaagacattaagatgaaataaatgtaaaagttcggttcctca

SEQ ID NO: 763143 - DNA, 120 bp, Artificial Sequence
  ENSG00000218891_24 (sequence is synthesized)
gtccgcgtttggccggccgtggggaaggaagaaaggagccaaggaggcgagtctctttgtttcctcttctctgtgtctctgtctctctgctgggtgttcctcactctcctctgtctcttc

SEQ ID NO: 763144 - DNA, 120 bp, Artificial Sequence
  ENSG00000218891_25 (sequence is synthesized)
tctgctctgcctttcaccatcctgtctttctgcgactcctggtctctgtctgtccatccccacttctctgtgtctcccatctctgccttctcctgtctctattccctgctctgtcgctct

SEQ ID NO: 763145 - DNA, 120 bp, Artificial Sequence
  ENSG00000218891_26 (sequence is synthesized)
tcctgtctctccatctctggcctcccctcggtgtctctcatctttgtctctgtctcatatctctctcctggctaaatacctgaccctctctgcctctccatctctgactgtctctgcttc

SEQ ID NO: 763146 - DNA, 120 bp, Artificial Sequence
  ENSG00000218891_27 (sequence is synthesized)
tctttctgccacaccccacgcacctctttttatctctgccccgcttcccatctctcccctctctccccacaggcatggatccgcagcctcctccacccgcccagggcagcccacctcacc

SEQ ID NO: 763147 - DNA, 120 bp, Artificial Sequence
  ENSG00000219073_0 (sequence is synthesized)
cctatcatcgcaaaactcatgatgctccggctgctcagttccctcctccttgtggccgttgcctcaggctatggcccaccttcctctcgcccttccagccgcgttgtcaatggtgaggat

SEQ ID NO: 763148 - DNA, 120 bp, Artificial Sequence
  ENSG00000219073_1 (sequence is synthesized)
gcggtcccctacagctggccctggcaggtttccctgcagtatgagaaaagcggaagcttctaccacacctgtggcggtagcctcatcgcccccgactgggttgtgactgccggccactgc

SEQ ID NO: 763149 - DNA, 120 bp, Artificial Sequence
  ENSG00000219073_2 (sequence is synthesized)
atctcgagctcccggacctaccaggtggtgttgggcgagtacgaccgtgctgtgaaggagggccccgagcaggtgatccccatcaactctggggacctctttgtgcatccactctggaac

SEQ ID NO: 763150 - DNA, 120 bp, Artificial Sequence
  ENSG00000219073_3 (sequence is synthesized)
gacgccgtccagctcgcctcactccctccggctggtgacatccttcccaacgagacaccctgctacatcaccggctggggccgtctctataccaacgggccactcccagacaagctgcag

SEQ ID NO: 763151 - DNA, 120 bp, Artificial Sequence
  ENSG00000219073_4 (sequence is synthesized)
gaggccctgctgccggtggtggactatgaacactgctccaggtggaactggtggggttcctccgtgaagaagaccatggtgtgtgctggaggggacatccgctccggctgcaatggtgac

SEQ ID NO: 763152 - DNA, 120 bp, Artificial Sequence
  ENSG00000219073_5 (sequence is synthesized)
tctggaggacccctcaactgccccacagaggatggtggctggcaggtccatggcgtgaccagctttgtttctgcctttggctgcaacacccgcaggaagcccacggtgttcactcgagtc

SEQ ID NO: 763153 - DNA, 120 bp, Artificial Sequence
  ENSG00000219073_6 (sequence is synthesized)
tccgccttcattgactggattgaggagaccatagcaagccactagaaccaaggcccagctggcagtgctgatcgatcccacatcctgaataaagaataaagatctctcagaaaattccaa

SEQ ID NO: 763154 - DNA, 120 bp, Artificial Sequence
  ENSG00000219073_7 (sequence is synthesized)
ctggtctcaaactcccgggctcaagcgatcctcccgcctcggcctctcaaagcactaggattacagcctcaggctatggcccaccttcctctcgcccttccagccgcgttgtcaatggtg

SEQ ID NO: 763155 - DNA, 120 bp, Artificial Sequence
  ENSG00000219073_8 (sequence is synthesized)
aacaaggcaccagagtcccggacttaggaccactgtgtgtgattcaccgtgaacactggcatattaaaggctctgagaagtcctgtaggaaaggacaatttgaactttgtttgagctcat

SEQ ID NO: 763156 - DNA, 120 bp, Artificial Sequence
  ENSG00000219073_9 (sequence is synthesized)
attttccaatcccatctgacctttagttcttcactgagtgcccactgggttatattctgggagccgaggccacagcagtgaacaaagcacacaaaaccccccgccccatgggggctccgt

SEQ ID NO: 763157 - DNA, 120 bp, Artificial Sequence
  ENSG00000219073_10 (sequence is synthesized)
tctagtgggtccatttatcatcaaacatctattaatatctctagaatgtgcccatcaggacaccatccagatgctgctgcgcttttccaggccacacagaggggacaccctccaggtgca

SEQ ID NO: 763158 - DNA, 120 bp, Artificial Sequence
  ENSG00000219073_11 (sequence is synthesized)
tcctgcatgaatatcaggctcaaccgtgctttcagggtaggaagcggagggcatttgaagagtcctttcccttccttcattcatttgttgtctccttgaataaatgctgttgaaaaccta

SEQ ID NO: 763159 - DNA, 120 bp, Artificial Sequence
  ENSG00000219073_12 (sequence is synthesized)
gacaagaggctgcctggtgggggacagaccatagcaagccactagaaccaaggcccagctggcagtgctgatcgatcccacatcctgaataaagaataaagatctctcagaaaattccaa

SEQ ID NO: 763160 - DNA, 120 bp, Artificial Sequence
  ENSG00000219200_0 (sequence is synthesized)
gagggcatcctgggctttctcccaccgctttccgagcccgcttgcacctcggcgatccccgactcccttctttatggcgtcgctcctgtgctgtgggccgaagctggccgcctgcggcat

SEQ ID NO: 763161 - DNA, 120 bp, Artificial Sequence
  ENSG00000219200_1 (sequence is synthesized)
cgtcctcagcgcctggggagtgatcatgttgataatgctcggaatatttttcaatgtccattccgctgtgttgattgaggacgttcccttcacggagaaagattttgagaatggccccca

SEQ ID NO: 763162 - DNA, 120 bp, Artificial Sequence
  ENSG00000219200_2 (sequence is synthesized)
gccaagttcggctcaataagcgcaaggaatacatggtgcgctagggccccggcgcgtttccccgctccagcccctcctctatttaaagactccctgcaccgtgtcacccaggtcgcgtcc

SEQ ID NO: 763163 - DNA, 120 bp, Artificial Sequence
  ENSG00000219200_3 (sequence is synthesized)
cacccttgccggcgccctctgcgggactgggtttcccgggcgagagactgaatcccttctcccatctctggcatccggcccccgtggagagggctgaggctggggggctgttccgtttct

SEQ ID NO: 763164 - DNA, 120 bp, Artificial Sequence
  ENSG00000219200_4 (sequence is synthesized)
cctgagaggtgcttgagttgaatggaggacatgggaggaaaagagagtgcttgttccagaaatgtgtagctgggccttgttttcccagtaatccacccaccgccacttcaagaagaaatg

SEQ ID NO: 763165 - DNA, 120 bp, Artificial Sequence
  ENSG00000219200_5 (sequence is synthesized)
atatgaagaagtgccggttctccctcccctcttccgcactgtcccgtgatgatgacgcctccagagaggacgataatctgggttcctgggagagatggcttggtcactattcccaccctt

SEQ ID NO: 763166 - DNA, 120 bp, Artificial Sequence
  ENSG00000219200_6 (sequence is synthesized)
gcccgcttgcacctcggcgatccccgactcccttctttatggcgtcgctcctgtgctgtgggccgaagctggccgcctgcggcatcgtcctcagcgcctggggagtgatcatgttggtga

SEQ ID NO: 763167 - DNA, 120 bp, Artificial Sequence
  ENSG00000219200_7 (sequence is synthesized)
ggggactccccggcaaggatcggagagggcctgaggggctccgggctgggagggctgggaggcgaggaaactctgggccgcaggcaggccggaggggccggggatctacaggccccggag

SEQ ID NO: 763168 - DNA, 78 bp, Artificial Sequence
  ENSG00000219200_8 (sequence is synthesized)
caggcaggccggaggggccggggatctacaggccccggagaaggagacagactgaaattgaaaaatgggaactataaa

SEQ ID NO: 763169 - DNA, 120 bp, Artificial Sequence
  ENSG00000219200_9 (sequence is synthesized)
atccagtaaccaccacctcgttttggttaatctcaggctcgggtgttgtagcaacattggaaatgggaggggtttacgaagtgaacatgaggtcaggtgcctgaattcaacagtctaccc

SEQ ID NO: 763170 - DNA, 120 bp, Artificial Sequence
  ENSG00000219200_10 (sequence is synthesized)
aacaaaccggaggccctcgctcttccaatactcacgccctagctacagaggtcaaggaaggtttccccaggagcagttttggtttcagacggcgccgtctcccgcgaaagtcctgagagg

SEQ ID NO: 763171 - DNA, 120 bp, Artificial Sequence
  ENSG00000219200_11 (sequence is synthesized)
cgctgtgttgattgaggacgttcccttcacggagaaagattttgagtaagtattcgggtgggggaggcgggctgggagcaggtgggaggtggcgaggcctagggtcagaattacgtctgg

SEQ ID NO: 763172 - DNA, 120 bp, Artificial Sequence
  ENSG00000219435_0 (sequence is synthesized)
gactcccttctcgtctcgaggcctgtggcgtctgggtccgttggggcagaaccatggaggaaaagccttcgaaagtgtcgctcaagtcttccgaccgccaaggctcggacgaggagagcg

SEQ ID NO: 763173 - DNA, 120 bp, Artificial Sequence
  ENSG00000219435_1 (sequence is synthesized)
tgcatagcgacactcgggacctgtggaccacgaccacgctgtcccaggcacagctgaacatgccgctgtccgaggtctgcgagggcttcgacgaggagggccgcaacattagcaagaccc

SEQ ID NO: 763174 - DNA, 120 bp, Artificial Sequence
  ENSG00000219435_2 (sequence is synthesized)
gcgggtggcacagcccggggcggggctcgttggacgaggggtacaaggccagccacaagccggaggaactggacgagcacgcgctggtggagctggagttgcaccgcggcagctccatgg

SEQ ID NO: 763175 - DNA, 120 bp, Artificial Sequence
  ENSG00000219435_3 (sequence is synthesized)
tgtcatcactcaatattgcgaagcacatgccccatcgagcctactgggcagagcagcagagcaggctgccactgcccctgatggaactcatggagaatgaagctctggaaatcctcacca

SEQ ID NO: 763176 - DNA, 120 bp, Artificial Sequence
  ENSG00000219435_4 (sequence is synthesized)
aagccctccggagctaccagttagggatcggcagggaccacttcctgactaaggagctgcagcgatacatcgaagggctcaagaagcgccggagcaagaggctgtacgtgaattaaaaac

SEQ ID NO: 763177 - DNA, 120 bp, Artificial Sequence
  ENSG00000219435_5 (sequence is synthesized)
gccaccttgggctcgagcagcgacccgaaccagccccgtgccagcccggtccccagacccaagcctgaccccatccgagtggaatttgagtcctaaagaaataaaagagtcgatgcatgg

SEQ ID NO: 763178 - DNA, 120 bp, Artificial Sequence
  ENSG00000219435_6 (sequence is synthesized)
taggccccttaccctgtccgctccaacccacccttggtccgactcgggcccctggcgctatttcttactcagccttggctgcccgcagcccccacccaaccccacgttctacgggatccc

SEQ ID NO: 763179 - DNA, 120 bp, Artificial Sequence
  ENSG00000219435_7 (sequence is synthesized)
caacccggcccggctcagttccccagcccgctcttccttcccgctccagccatccgcgacccttggctccctccttgtatgtggcccacaggtgtcgctcaagtcttccgaccgccaagg

SEQ ID NO: 763180 - DNA, 120 bp, Artificial Sequence
  ENSG00000219435_8 (sequence is synthesized)
ggtggaggggcaggcaggctggttgggggtttgggggccacagggaggaggtgggggcatttcagctgtgggcagagatgaagtacctggacgcctaagcctcttgctgcttctccagct

SEQ ID NO: 763181 - DNA, 80 bp, Artificial Sequence
  ENSG00000219438_0 (sequence is synthesized)
gggcagggccggctgctgagacgcgctgctgccccccgcgcgggcgccgcggcttcaatggcgccatcgcccaggaccgg

SEQ ID NO: 763182 - DNA, 120 bp, Artificial Sequence
  ENSG00000219438_1 (sequence is synthesized)
cgccgcggcttcaatggcgccatcgcccaggaccggcagccggcaagatgcgaccgccctgcccagcatgtcctcaactttctgggcgttcatgatcctggccagcctgctcatcgccta

SEQ ID NO: 763183 - DNA, 120 bp, Artificial Sequence
  ENSG00000219438_2 (sequence is synthesized)
ctgcagtcagctggccgccggcacctgtgagattgtgaccttggaccgggacagcagccagcctcggaggacgatcgcccggcagaccgcccgctgtgcgtgtagaaaggggcagatcgc

SEQ ID NO: 763184 - DNA, 120 bp, Artificial Sequence
  ENSG00000219438_3 (sequence is synthesized)
cggcaccacgagagcccggcccgcctgtgtggacgcaagaatcatcaagaccaagcagtggtgtgacatgcttccgtgtctggagggggaaggctgcgacttgttaatcaaccggtcagg

SEQ ID NO: 763185 - DNA, 120 bp, Artificial Sequence
  ENSG00000219438_4 (sequence is synthesized)
ctggacgtgcacgcagcccggcgggaggataaagaccaccacggtctcctgacaaacacagcccctgaggggccccgggagtggccttggctccctggagagcccacgtctcagccacag

SEQ ID NO: 763186 - DNA, 120 bp, Artificial Sequence
  ENSG00000219438_5 (sequence is synthesized)
ttctccactcgcctcggacttcacccgttctctgccgcccgcccactccgtttccctgtggtccgtgaaggacggcctcaggccttggcatcctgagcttcggtctgtccagccgacccg

SEQ ID NO: 763187 - DNA, 120 bp, Artificial Sequence
  ENSG00000219438_6 (sequence is synthesized)
cccggccgcgcccagcccccgccgaccgtggcgttggccctgctgtcctcagaggaggaggaggaggaggcagctccggcagccacagaaggctgcagcccagcccgcctgagacacgac

SEQ ID NO: 763188 - DNA, 120 bp, Artificial Sequence
  ENSG00000219438_7 (sequence is synthesized)
gcctgccccaggggactgtcaggcacagaagcggcctcctcccgtgccccagactgtccgaattgcttttattttcttatactttcagtatactccatagaccaaagagcaaaatctatc

SEQ ID NO: 763189 - DNA, 120 bp, Artificial Sequence
  ENSG00000219438_8 (sequence is synthesized)
tgaacctggacgcaccctcactgtcagggtccctggggtcgcttgtgcgggcgggagggcaatggtggcagagacatgctggtggccccggcggagcggagagggcggccgtggtggagg

SEQ ID NO: 763190 - DNA, 120 bp, Artificial Sequence
  ENSG00000219438_9 (sequence is synthesized)
gaggcctccaccccaggagcaccccgcgcaccctcggaggacgggcttcggctgcgcggaggccgtggcacacctgcgggaggcagcgacggcccccacgcagacgccgggaacgcaggc

SEQ ID NO: 763191 - DNA, 120 bp, Artificial Sequence
  ENSG00000219438_10 (sequence is synthesized)
ttattcctctgtacttagatcaacttgaccgtactaaaatccctttctgttttaaccagttaaacatgcctcttctacagctccatttttgatagttggataatccagtatctgccaaga

SEQ ID NO: 763192 - DNA, 120 bp, Artificial Sequence
  ENSG00000219438_11 (sequence is synthesized)
gcatgttgggtctcccgtgactgctgcctcatcgataccccatttagctccagaaagcaaagaaaactcgagtaacacttgtttgaaagagatcattaaatgtattttgcaaagcctaaa

SEQ ID NO: 763193 - DNA, 120 bp, Artificial Sequence
  ENSG00000219438_12 (sequence is synthesized)
ggggcgtcggccgagttgggactccgcgatgcagctcctgaaggcgctctgggcactggcaggggccgcgctctgctgcttcctcgtcctagtgatccacgcgcagttcctcaaagaagc

SEQ ID NO: 763194 - DNA, 120 bp, Artificial Sequence
  ENSG00000219438_13 (sequence is synthesized)
aatccccagctgcagacagagggctggcggctccctgggctccagagatcttcgcacatccctgctctgccagggctcccaccttgcagacaggagaaggtggctgaggcccagccagag

SEQ ID NO: 763195 - DNA, 120 bp, Artificial Sequence
  ENSG00000219438_14 (sequence is synthesized)
gccatgaaaatgctcagaccttttcatcccataattctgctcccagaaatttgccctaagagagtaattgaaaggaagagggaaaaaccaggaaagcacaaacacccgaaatgtaccacc

SEQ ID NO: 763196 - DNA, 120 bp, Artificial Sequence
  ENSG00000219438_15 (sequence is synthesized)
aaagacacaaatcgcctcccggagtggcgcctccagtcgcggcggagcgcggcgttggcggcggatggagggcgcgagcgggcggccgcggaggctgcacccggcggggcgctgatgcgg

SEQ ID NO: 763197 - DNA, 120 bp, Artificial Sequence
  ENSG00000219438_16 (sequence is synthesized)
cgcctggaccttcgctgcgcgacttcgggggcgtcggccgagttgggactccgcgatgcagctcctgaaggcgctctgggcactggcaggggccgcgctctgctgcttcctcgtcctagt

SEQ ID NO: 763198 - DNA, 120 bp, Artificial Sequence
  ENSG00000219438_17 (sequence is synthesized)
tatatttgtagaaaatcctatttaacaattaacgtggcagtcccggccgtcctgagagtcgggccgagccccgtgtgtttctgaagactctgggggtgggacacggcggggaggtggtgc

SEQ ID NO: 763199 - DNA, 120 bp, Artificial Sequence
  ENSG00000219438_18 (sequence is synthesized)
cccgcggaccccggggtgccaggcacggaaggcgggactctgggagaagcgtgcggaggaccgtggcgtcggcgtcccggatgtgtcggtcgtgcccggggaggccgggttcccctcgct

SEQ ID NO: 763200 - DNA, 120 bp, Artificial Sequence
  ENSG00000219438_19 (sequence is synthesized)
gcgggccaggcttggctcctgattccctctctggtccctgtattggtcaacacttgagcgtacaatatcttgaacatgcttcttccaatgggttttgtttcccatttcctgcccctttcg

SEQ ID NO: 763201 - DNA, 120 bp, Artificial Sequence
  ENSG00000219438_20 (sequence is synthesized)
ccactcacggaccttgaggccagttgacggcccttctccccacgcctgtgtccccgcgttctgagaagtcctctgtcttcgtgtcactaggtccagaaagtcgcgccgggcagaggcgca

SEQ ID NO: 763202 - DNA, 120 bp, Artificial Sequence
  ENSG00000219438_21 (sequence is synthesized)
ggcggggccggcagggccgaggaataagcgacaattctggtttttctcccctggccgtcgttcgccagcctccttcattttcctgagttcccgctgaagtatatactacctatgagtcca

SEQ ID NO: 763203 - DNA, 120 bp, Artificial Sequence
  ENSG00000219438_22 (sequence is synthesized)
attaacatgagtattatgctagttctatcctactaaaaaaaacgtaaaaaaataactatatagaagctgttccagcaaccatagactgaagatacgaaagaaaatccatttatttaagac

SEQ ID NO: 763204 - DNA, 120 bp, Artificial Sequence
  ENSG00000219438_23 (sequence is synthesized)
ctgttccggtatccatgaggacataatttacctttcagtcaccacaaatttataggcatttgtatcctggactaaaagaaggggctgaggttgggtttgtcatcacagagggggtgggcc

SEQ ID NO: 763205 - DNA, 120 bp, Artificial Sequence
  ENSG00000219438_24 (sequence is synthesized)
tggaaagggtccttcccaagctgccccggctccggcggcccgggccggcagcctctgccagccagcgtcctcacggcctccccctcgcctgtttcttttgaaagcaagtgtagacacctt

SEQ ID NO: 763206 - DNA, 120 bp, Artificial Sequence
  ENSG00000219438_25 (sequence is synthesized)
cgagggcagagatcgggagatttaagatgttacagcatatttttttttcttgttttacagtattcaattttgtgttgattcagctaaattatgaaaaataaagaaaaactcctttgataa

SEQ ID NO: 763207 - DNA, 120 bp, Artificial Sequence
  ENSG00000219481_0 (sequence is synthesized)
aggctgcccgagcttctgagcgagcgcggtgcttttgggaacgcgggacgggcgatctgcggcgccaggagctgggccgaggcgcggcggcgcggctgccggctgccctgtgaatgggaa

SEQ ID NO: 763208 - DNA, 120 bp, Artificial Sequence
  ENSG00000219481_1 (sequence is synthesized)
gttacgcgaagtccacccagcgtttctgaggcaatctgaaggcaaatcctgtttagacccaggcgaaggttcccggtgacccgggctctcaccagccaattgtcccttgccgtcctcctg

SEQ ID NO: 763209 - DNA, 120 bp, Artificial Sequence
  ENSG00000219481_2 (sequence is synthesized)
agggtgcctggagcttaagcactgtgtgctcttggcctccacactggggatgccgctgactcccactgtccagggcttccagtggattctccgaggccctgatgtagaaacttccccatt

SEQ ID NO: 763210 - DNA, 120 bp, Artificial Sequence
  ENSG00000219481_3 (sequence is synthesized)
gggtgcaccaagagcagcctcacatggtgtgggctgacatcaagagctgccagatccaacagatggccaatctttcctaagctgctcaccttacaagaaaacgaatcgtactgctaagaa

SEQ ID NO: 763211 - DNA, 120 bp, Artificial Sequence
  ENSG00000219481_4 (sequence is synthesized)
ttcaaacttcagcagtcatggggagccttggaaggagcccgaatcactgatggaattggacagtgcatggagatggttcagcaggacaaggtgtcattggaggacagtgtggagtgcaga

SEQ ID NO: 763212 - DNA, 120 bp, Artificial Sequence
  ENSG00000219481_5 (sequence is synthesized)
gagacatgctttgaaatgggattgatccagtcctccttccttcactaccacatgaatgctgggcagcccagggtcaacccaccgcaccctcaactcagacggttacctggcacgctggcc

SEQ ID NO: 763213 - DNA, 120 bp, Artificial Sequence
  ENSG00000219481_6 (sequence is synthesized)
agacggttacctggcacgctggccacagtctacctcactcttatcagagtctgagctactggcagtgctttcagctctgagttcaggcacctcgaaccttgtttttgtggtgaaggatcc

SEQ ID NO: 763214 - DNA, 120 bp, Artificial Sequence
  ENSG00000219481_7 (sequence is synthesized)
acaaacgtcagcatggtggtatcagctggcccttggtccagcgagaaggcagagacgaacattttagaaatcaacgagaaattgcgcccccagctggcagagaacaaacagcagttcaga

SEQ ID NO: 763215 - DNA, 83 bp, Artificial Sequence
  ENSG00000219481_8 (sequence is synthesized)
gaaggcagagacgaacattttagaaatcaacgagaaattgcgcccccagctggcagagaactaactcaactggccggcttcct

SEQ ID NO: 763216 - DNA, 79 bp, Artificial Sequence
  ENSG00000219481_9 (sequence is synthesized)
ttttccagaagctcagcggaggctgagaaagtactggaatcatctgcccccagggaggtgcagaaggctgaagaaagca

SEQ ID NO: 763217 - DNA, 75 bp, Artificial Sequence
  ENSG00000219481_10 (sequence is synthesized)
tgaagatgttcaagttgaggaggctgagaaagtactggaatcatctgcccccagggaggtgcagaaggctgaaga

SEQ ID NO: 763218 - DNA, 120 bp, Artificial Sequence
  ENSG00000219481_11 (sequence is synthesized)
aagaacatcaacatcacctttgaggaagacaaagtcaactcaactctggttgtagacagagaatcctctcatgatgaatgtcaggatgctgtaaacattctcccagtccctggccccacc

SEQ ID NO: 763219 - DNA, 120 bp, Artificial Sequence
  ENSG00000219481_12 (sequence is synthesized)
tcagaaacctcaaagagaaatgttttgtaactcaactggcctgcttcctggccaaccagcagaacaaatacaaatatgaagagtgcaaagacctcataaaatctatgctgaggaatgagc

SEQ ID NO: 763220 - DNA, 85 bp, Artificial Sequence
  ENSG00000219481_13 (sequence is synthesized)
ggaggctgagaaagtactggaatcatctgcccccagggaggtgcagaaggctgaagaaagcaaagtccctgaggactcactggag

SEQ ID NO: 763221 - DNA, 80 bp, Artificial Sequence
  ENSG00000219481_14 (sequence is synthesized)
caaccagcctcacaagaacatcaacatcacctttgaggaagacaaagtcaactcagctctggttgtagacagagaatcct

SEQ ID NO: 763222 - DNA, 120 bp, Artificial Sequence
  ENSG00000219481_15 (sequence is synthesized)
tcaacatcacctttgaggaagacaaagtcaactcagctctggttgtagacagagaatcctctcatgatgaatgtcaggatgctgtaaacattctcccagtccctggccccacctcttctg

SEQ ID NO: 763223 - DNA, 65 bp, Artificial Sequence
  ENSG00000219481_16 (sequence is synthesized)
aggcagagatgaacattctagaaatcaacgagaaattgcattaactcaactggcctgcttcctgg

SEQ ID NO: 763224 - DNA, 120 bp, Artificial Sequence
  ENSG00000219481_17 (sequence is synthesized)
aaagagaaatgttttgtaactcaactggcctgcttcctggccaaccagcagaacaaatacaaaaatgaagagtgcaaagacctcataaaatctatgctgaggaatgagcgacagttcaag

SEQ ID NO: 763225 - DNA, 65 bp, Artificial Sequence
  ENSG00000219481_18 (sequence is synthesized)
tcgactctctcaattcctcctgaaatgttggcctcgtacaagtcttacagcgacatcggtgggat

SEQ ID NO: 763226 - DNA, 70 bp, Artificial Sequence
  ENSG00000219481_19 (sequence is synthesized)
caaaacccaccatgccccaggctcagcggcatgctgatggaagtggtcaatgtactttgaactacctgac

SEQ ID NO: 763227 - DNA, 85 bp, Artificial Sequence
  ENSG00000219481_20 (sequence is synthesized)
agcacatcagcttcgcccttgacgtggacaataggtttcttactttgatgggaacaagtctccacctggtcttccagatgggagt

SEQ ID NO: 763228 - DNA, 120 bp, Artificial Sequence
  ENSG00000219481_21 (sequence is synthesized)
tgatgggaacaagtctccacctggtcttccagatgggagtcatattcccacagtaagcagcccttactaagccgagagatgtcattcctgcaggcaggacctataggcacgtgaagattt

SEQ ID NO: 763229 - DNA, 73 bp, Artificial Sequence
  ENSG00000219481_22 (sequence is synthesized)
accatgccagtggcaccctgtgctcagtctgaagacaatggacccaagttaggtgtgacacgttcacataact

SEQ ID NO: 763230 - DNA, 120 bp, Artificial Sequence
  ENSG00000219481_23 (sequence is synthesized)
gtgcagcacatgccgggagtgatcagtcagacattttaatttgaaccacttatctctgggtagctacaaagttcctcagggatttcattttgcagtcatgtctctgagcttctatacctg

SEQ ID NO: 763231 - DNA, 78 bp, Artificial Sequence
  ENSG00000219481_24 (sequence is synthesized)
tctctgggtagctacaaagttcctcagggatttcattttgcagtcatgtctctgagcttctatacctgctcaaggtca

SEQ ID NO: 763232 - DNA, 63 bp, Artificial Sequence
  ENSG00000219481_25 (sequence is synthesized)
tttcaatgaacctaacctcattctttgtatcttcagtgttgaattgttttagctgatccatct

SEQ ID NO: 763233 - DNA, 70 bp, Artificial Sequence
  ENSG00000219481_26 (sequence is synthesized)
atttcctcatctttttgttgttgtcattgatggtggtgacatggacttgtttatagaggacaggtcagct

SEQ ID NO: 763234 - DNA, 120 bp, Artificial Sequence
  ENSG00000219481_27 (sequence is synthesized)
gggtggttttcaaaattagaaatgtcctgtattccaatgatcatcctgtaaacattttatcatttattaatcatccctgcctgtgtctattattatattcatatctctacgctggaaact

SEQ ID NO: 763235 - DNA, 120 bp, Artificial Sequence
  ENSG00000219481_28 (sequence is synthesized)
gtctattattatattcatatctctacgctggaaactttctgcctcaatgtttactgtgcctttgtttttgctagtgtgtgttgttgaaaaaaaaaacattctctgcctgagttttaattt

SEQ ID NO: 763236 - DNA, 120 bp, Artificial Sequence
  ENSG00000219481_29 (sequence is synthesized)
ttttgcctatcactctggactgttggattgttttttacattcagtgttataatcttttgttatgctgattggttttggtgggtactgatgtgaattaataaaaacatttccatttccctg

SEQ ID NO: 763237 - DNA, 120 bp, Artificial Sequence
  ENSG00000219481_30 (sequence is synthesized)
gtaggagccagtgcaaggagagaagtccattgagaaaggcaaatggatgacatcagacccaggggctgaggtccccaactgcagctgggtagcttctggagtggacaaggagcaacaggg

SEQ ID NO: 763238 - DNA, 120 bp, Artificial Sequence
  ENSG00000219481_31 (sequence is synthesized)
aagttcgtggcctggtgttctgggatccactgtctcatctcattcttgtgggcaccagaacgtatccaaagacaagactcagtgtctctggcaacagtgagccagagatagaatgtgttt

SEQ ID NO: 763239 - DNA, 120 bp, Artificial Sequence
  ENSG00000219481_32 (sequence is synthesized)
cagaggaggaggaaggggttgttgtaccccatggaaacagtatattgttttacagtagcgtgtctttctctaataactacttagcgtgttcctgttaatggaaaatattggtggtgtaag

SEQ ID NO: 763240 - DNA, 120 bp, Artificial Sequence
  ENSG00000219481_33 (sequence is synthesized)
tttccccactgttctcatcttcatgtaaatttgttcatttccttccttccttccttccttccctacttccctccaactctctttctctctctttttattctttccctccttcccacccgc

SEQ ID NO: 763241 - DNA, 120 bp, Artificial Sequence
  ENSG00000219481_34 (sequence is synthesized)
cctccatccctcccttccttcctccttccctccttccctcccttctttcctttcttcctttcttcttttcttcttctttctctctcatgctctctctttttctttccttttcattctctc

SEQ ID NO: 763242 - DNA, 120 bp, Artificial Sequence
  ENSG00000219481_35 (sequence is synthesized)
tacttttttgaagagatcacactgtactgaaacctacattattttccaaaatctctggatctgcttctgtcttgcaggcagagagctcatccagtagcccttagctcttcccagccccct

SEQ ID NO: 763243 - DNA, 120 bp, Artificial Sequence
  ENSG00000219481_36 (sequence is synthesized)
cctttgatttgtgggtgccactgcggcagctgctgagtctcagtggtttctggtcttcaccaagttctgcccacccagatggtttttacctgtcctcaccagaaacctgcactgtctaga

SEQ ID NO: 763244 - DNA, 120 bp, Artificial Sequence
  ENSG00000219481_37 (sequence is synthesized)
gcacttcaatgccaagtactaaccacacaattacaggatgccaccaaaaccttgatatggggctgctgcatcctaattaaaaaaacagttaatagacattattttttagaacagttctag

SEQ ID NO: 763245 - DNA, 120 bp, Artificial Sequence
  ENSG00000219481_38 (sequence is synthesized)
gtttacagaaaacttgagtggataatacagagagttctcctaggctcccctgtcctccagcacacaattttccctactagtatgttgtattagtgtggtccattcattacaattgatgaa

SEQ ID NO: 763246 - DNA, 120 bp, Artificial Sequence
  ENSG00000219481_39 (sequence is synthesized)
ccactgttgatacgtcattatcaactaaagtccatagtttacattagaggtcattctttgagtttcacagattatgggttttggcaattacataatgtcctaaatccccaatacagcatc

SEQ ID NO: 763247 - DNA, 120 bp, Artificial Sequence
  ENSG00000219481_40 (sequence is synthesized)
atgcgaaagagtttcactgctgaaaattccctgtgcttcaccatttcacgcgtcctcctctcctccacccctgacaaccactcaccattttactacttctatctttttgactttccaaga

SEQ ID NO: 763248 - DNA, 120 bp, Artificial Sequence
  ENSG00000219481_41 (sequence is synthesized)
atgtcctagagttggagtggtacagtatgtgggtttccagactggcttctttctagcattatgtactttaagttccttcatgtcttttcatggcttgataacttgttttttaaaatcagt

SEQ ID NO: 763249 - DNA, 120 bp, Artificial Sequence
  ENSG00000219481_42 (sequence is synthesized)
gaatcagatttccttgtatggctacaacagtttgtttattctttcgcttggtgaaagacatcttgggcacttccaagttttggcgatgatgaataaaattgctgtaagtacttctgtgca

SEQ ID NO: 763250 - DNA, 120 bp, Artificial Sequence
  ENSG00000219481_43 (sequence is synthesized)
ggattttgagtgaacttaagttttccaaagtgactgtacccttttgatttccactagcgatggaaagttctggttgctcctcatctttgacagcatttggtgtgttcacctttttgaatt

SEQ ID NO: 763251 - DNA, 120 bp, Artificial Sequence
  ENSG00000219481_44 (sequence is synthesized)
ttagccattctaaacagcttatctgcccctactgtggaatgatgtgacagacatagaataacacttacagtgattctagttcaaaatgaggcaacatggaagggataaagaagtcactga

SEQ ID NO: 763252 - DNA, 120 bp, Artificial Sequence
  ENSG00000219481_45 (sequence is synthesized)
cccaaaatagtttggaaatggagctgggcaaaatccagcagaagtttcttaattaggatcgacagcctgggaccggcccgccgtcctgtgggtctttgcctctgggctgtctgctgtgca

SEQ ID NO: 763253 - DNA, 120 bp, Artificial Sequence
  ENSG00000219481_46 (sequence is synthesized)
tttcttggaaccattattatttatctttttttctcacacttttttgggtatggcttctatcgcactccaaatgtttttgagattcatccatgttgttctgtgtgtcaccagtttgttcct

SEQ ID NO: 763254 - DNA, 120 bp, Artificial Sequence
  ENSG00000219481_47 (sequence is synthesized)
ttagccattccatggaatgagtgtatcacagtttattgatccattcttgtattgacagatacttgaatgtttccagttttttgtattatgaataaaactgctatgaacattcttgtataa

SEQ ID NO: 763255 - DNA, 120 bp, Artificial Sequence
  ENSG00000219481_48 (sequence is synthesized)
gctgccagatccaacagtgtccacagatcagaagttcaggcctggattctctgggtcttcttctcagggcctcacaggctgaaattaggctgggtttctttctggaggttctggggaaga

SEQ ID NO: 763256 - DNA, 120 bp, Artificial Sequence
  ENSG00000219481_49 (sequence is synthesized)
acttcctctcaagtttcctcaggttgtcagctgagttcagttccttgtgactgtaggactgagatctctgttttcttgctggctgtcagccaggggcctctcgctgctcctagaggcctc

SEQ ID NO: 763257 - DNA, 120 bp, Artificial Sequence
  ENSG00000219481_50 (sequence is synthesized)
ccatgttcccactgcatgcttcctccagccagcagaggaggatcgccctgcatggaaaccctcctgcacttcacatctctccaggaagtcctcagtccctccaaggaactcacgttcact

SEQ ID NO: 763258 - DNA, 120 bp, Artificial Sequence
  ENSG00000219481_51 (sequence is synthesized)
aggtcaagctcatcagataatctgtctatcttaaattggaccgatttgggatctcgattacatctgttaacttgtttttgccataaattgtaacacaatcacaggagtgacatctcctca

SEQ ID NO: 763259 - DNA, 120 bp, Artificial Sequence
  ENSG00000219481_52 (sequence is synthesized)
gtagctttgtctacactcaggaggaagtgattatataagagcaaagatcactgggggtcatcttaggattctgtctaccataatattataaagacacagtaattaaaagagtataacaga

SEQ ID NO: 763260 - DNA, 120 bp, Artificial Sequence
  ENSG00000219481_53 (sequence is synthesized)
tttctgcttctgtctgttagaataaatcatatcagactaaccctgcctccataaacaaacgtaaaattgttttcagcagtgtacaacaggcagtccaagagaaaacttaagggggaagcc

SEQ ID NO: 763261 - DNA, 120 bp, Artificial Sequence
  ENSG00000219481_54 (sequence is synthesized)
ccatgatttcctagttgtttggggagaatttctcagcagctgcatagtgagctagagtccactcagggcagggcagctcactgagctgagaaggcagagatcagagttcaagacggctga

SEQ ID NO: 763262 - DNA, 120 bp, Artificial Sequence
  ENSG00000219481_55 (sequence is synthesized)
cctgcacaaggaaaagactaacagatttaacagaggggtggctgctatgaaattgagtttggaccagaggtacttgaggtggaggagggttggggaatgtatgatggagtttctgccatc

SEQ ID NO: 763263 - DNA, 120 bp, Artificial Sequence
  ENSG00000219481_56 (sequence is synthesized)
catggtgggaagaactcatgcacacctcattagcacccaggtatccaactgagacactagaatggatgtgctttaggaataagtgtcacacttttcaataaggcctattgtagaccaacc

SEQ ID NO: 763264 - DNA, 120 bp, Artificial Sequence
  ENSG00000219481_57 (sequence is synthesized)
tgctaaagcctaaaagcaaaccctgacaaattcacaaaggggtggattggtgattgagtcctgccaaattagagggtcttgggaaatgctgtgggctttccatgaatccgttgtaataaa

SEQ ID NO: 763265 - DNA, 120 bp, Artificial Sequence
  ENSG00000219481_58 (sequence is synthesized)
acatgaaccagtccacataagtccaaagtgatcagacagtaattttactgcccactagaacaaaattaattcacacaatcaatgacacatgttagccaggtcgatatttaagcaaaatac

SEQ ID NO: 763266 - DNA, 120 bp, Artificial Sequence
  ENSG00000219481_59 (sequence is synthesized)
atctaagaacagctaacaaataactcttctcaaactcacatagagcattcagcaagatagaccacatgtgctgagccatcgttagtattttctgtcctttctctttgactcgtgtatagt

SEQ ID NO: 763267 - DNA, 120 bp, Artificial Sequence
  ENSG00000219481_60 (sequence is synthesized)
gtgctcaaactcttaaaattatacactttaatgattatacactttcatgcatctcaattgcatgtaagttatatttcaatatatttgttaaaagtttataattaaaaaaactgtcctagc

SEQ ID NO: 763268 - DNA, 120 bp, Artificial Sequence
  ENSG00000219481_61 (sequence is synthesized)
ttgattcaagaaatcttttttatatttaagaaaatgtaatgttatgtattatcagggcaaaagagaaaaaccatatgattaccttgtcatacacagtaaaagcatttggcacaattgaaa

SEQ ID NO: 763269 - DNA, 120 bp, Artificial Sequence
  ENSG00000219481_62 (sequence is synthesized)
acttttttcatgatttataaaaacaaaccccagaaaactctcagcatgataagaagagaaggcaacactttcaaccctattaagggtagatttgaaaaaaactcagaggtaacattatat

SEQ ID NO: 763270 - DNA, 120 bp, Artificial Sequence
  ENSG00000219481_63 (sequence is synthesized)
taaatggcataggattgaatgcttttctattaaatcagagaaaaaagtagaatatctgttgttattctttcaattcagcattatactagagatctaaatcaatgcaataaagtaagaaaa

SEQ ID NO: 763271 - DNA, 120 bp, Artificial Sequence
  ENSG00000219481_64 (sequence is synthesized)
ataaaagtattgaaaagattgaaaagaaagaattgaagctgtctttattcacagataatgactgtgtatgttaataatcctagaaatctataaaaatctgccaaaagtaattagtgagtt

SEQ ID NO: 763272 - DNA, 120 bp, Artificial Sequence
  ENSG00000219481_65 (sequence is synthesized)
tggtaatgttgcagaatataagctcaatagaagtagtcttttgtatttctgtgtattagcaatgagcatttggaaaatgaaataaaaatacaatttcatttcaagtaacatctaaataca

SEQ ID NO: 763273 - DNA, 120 bp, Artificial Sequence
  ENSG00000219481_66 (sequence is synthesized)
aaaataaagaaacatgacagattttcattatgacacagaatgtcaggtctcccagatgccagaaaatacatttacttaaagccgttgatacgtcttaaagcggtttccttacagtgtcat

SEQ ID NO: 763274 - DNA, 120 bp, Artificial Sequence
  ENSG00000219481_67 (sequence is synthesized)
aagataaggatggtcaaacaaaataatattatatctgcagaaagtcagatcttggtaagatttactagttgggaatccaatgttaatgccaagaagcagctgccagttgggatcaaatgt

SEQ ID NO: 763275 - DNA, 120 bp, Artificial Sequence
  ENSG00000219481_68 (sequence is synthesized)
tcaaatgtgagcctatggatcaaggaatgcctggacacagtagacaaaagttgttcaactggacgccttaggatacacgctaccaaaaacaaagtagccaaaaaggaaccagaataacag

SEQ ID NO: 763276 - DNA, 120 bp, Artificial Sequence
  ENSG00000219481_69 (sequence is synthesized)
cattcgaatcattgtgaggtgtctgggaatgtaatggatgggacatctactaagaaatcaacttacgttacacttagaaaagctctagttctgaggacagagacctgatggagtcaccat

SEQ ID NO: 763277 - DNA, 120 bp, Artificial Sequence
  ENSG00000219481_70 (sequence is synthesized)
agtgggaatttatgacctggcatccagttcagatacctggagcttcttgactgaggggagattggatcccttgaggaagagtgaagccttcaatgctgccacaagtgtatgctgtaaatc

SEQ ID NO: 763278 - DNA, 120 bp, Artificial Sequence
  ENSG00000219481_71 (sequence is synthesized)
ttccttcaggccttccccagaaggccctgaagccatttatgtgggtgactgaagaaagggaaatactcagagcttctgtggcttgttggatgctggctctgaagaatgctaaactgaggg

SEQ ID NO: 763279 - DNA, 120 bp, Artificial Sequence
  ENSG00000219481_72 (sequence is synthesized)
ccctgcggtggccatgaaaatgcactacttgcatctccagctgcaggaggcctaacgaatcagcagcctcagctgctaccctccgaatggaggacttgatgacatttcccctggatctgc

SEQ ID NO: 763280 - DNA, 120 bp, Artificial Sequence
  ENSG00000219481_73 (sequence is synthesized)
actagcccgtgaggaggaaagcctcctatcaagtcctcccaacagaacacccatgatgactcatgaggatgttgaaggtgttttcctgtggcaactgtgagtgtctttcttcaaagtctg

SEQ ID NO: 763281 - DNA, 120 bp, Artificial Sequence
  ENSG00000219481_74 (sequence is synthesized)
ttttgttcctgcacattaactgatttatataaaataagagaataaatgcctagactcccatgagtctatcttttactgataaactctagttctgaggacagaagcctgatggagtcagta

SEQ ID NO: 763282 - DNA, 120 bp, Artificial Sequence
  ENSG00000219481_75 (sequence is synthesized)
tagggggaatttataacctggcatccagttcagagacttggagcttctcgactgaggggagatcgggtccctttggggaaaaaagaagccttcaatgttgtcacaagtgtatcctggaaa

SEQ ID NO: 763283 - DNA, 120 bp, Artificial Sequence
  ENSG00000219481_76 (sequence is synthesized)
tcttcctctaagccttcctagagggacctgataacatgacttatgatacagtgaccccaaattcagggtgttcttgtctactgtcaagaatgcaatatcttattcctctgaattgaacgt

SEQ ID NO: 763284 - DNA, 120 bp, Artificial Sequence
  ENSG00000219481_77 (sequence is synthesized)
agtaccaatatttgtgtgtagctatgcaccttaatagaccatagctaattagatgaggaacggtagacccaattcaaccatacaggcatcaaccatatcagcatacaggcatccctctcc

SEQ ID NO: 763285 - DNA, 120 bp, Artificial Sequence
  ENSG00000219481_78 (sequence is synthesized)
caccgtttccttcttgtccccactccaaagccttctccattttatttgtattaattttctattgctgcatactaaattactgcaagcattagcggcgtaaaataagaatgatttattttc

SEQ ID NO: 763286 - DNA, 64 bp, Artificial Sequence
  ENSG00000219545_0 (sequence is synthesized)
ccgtttcacttcttcagaaagcctccggaatctaaaaagccctcagtaccagagacagaagcag

SEQ ID NO: 763287 - DNA, 120 bp, Artificial Sequence
  ENSG00000219545_1 (sequence is synthesized)
ccggaatctaaaaagccctcagtaccagagacagaagcagatggattcgtccttttaggagatacaacagatgagcaaagaatgacagcaagaggcaaaacttcggacatagaggccaac

SEQ ID NO: 763288 - DNA, 120 bp, Artificial Sequence
  ENSG00000219545_2 (sequence is synthesized)
caacctttggagaccaacaaagaaaattcatccagtgtgactgtatcagaccctgagatggaaaataaggcaggccagactctggagaacagctcattaatggccgagctcctgagcgat

SEQ ID NO: 763289 - DNA, 120 bp, Artificial Sequence
  ENSG00000219545_3 (sequence is synthesized)
gtgccgttcaccctggccccgcatgtgctggcagtacagggcaccatcactgaccttcccgaccacttactctcctatgatggcagcgaaaacttatcacggttttggtatgatttcact

SEQ ID NO: 763290 - DNA, 120 bp, Artificial Sequence
  ENSG00000219545_4 (sequence is synthesized)
cttgaaaattcagtgctctgtgattcataacctttatgtctgtttgcaccttaacagctttaaaatatgttcgcctattttatctaacctgtttgatgttctttgccgtttcactgttta

SEQ ID NO: 763291 - DNA, 120 bp, Artificial Sequence
  ENSG00000219545_5 (sequence is synthesized)
aggtcctcagcaaggatcataaagcaaagaaaatagcattatgttcactactctatttttaagaaaaaggtacatttgtatacaaattgaacttaagttctacttcctttctcccatata

SEQ ID NO: 763292 - DNA, 120 bp, Artificial Sequence
  ENSG00000219545_6 (sequence is synthesized)
ataaatatacaaattaggctatgaaggttttaggaaaggactcgattccttcagatggtctctcaaaatataacacctcaaatttatcttagaagaactgtgaaaaagaattgtggcatt

SEQ ID NO: 763293 - DNA, 120 bp, Artificial Sequence
  ENSG00000219545_7 (sequence is synthesized)
tttcagtcactacagctccgaagtctgagcaagaagtgggtgtgaagtctcctctctggtttgtaggaagttgaattggtgttattcctgcatttttttcttccacagtgtttatgaatg

SEQ ID NO: 763294 - DNA, 120 bp, Artificial Sequence
  ENSG00000219545_8 (sequence is synthesized)
tgcgtgctctttctggagtggcccatttcggttttctgaaacccatggcagccctttccatcgtgaataatcgttgtgttcccacctttgttctctgcctttttgctacttcagtgtgct

SEQ ID NO: 763295 - DNA, 120 bp, Artificial Sequence
  ENSG00000219545_9 (sequence is synthesized)
ctctgaccagctttccaaagaactttccctgcttctgcctcggttgccatttgctctccttaccacatatgttcccagtttatgaagagatccacatttcctttcaacccctctgcctcc

SEQ ID NO: 763296 - DNA, 120 bp, Artificial Sequence
  ENSG00000219545_10 (sequence is synthesized)
tgaagaaaaacatctcatgatgatacatattattgctgataacacccttatttagaaatttgttggccacaatagagatggaaatgttttactgctggaaaaactgaaatcaactcattt

SEQ ID NO: 763297 - DNA, 120 bp, Artificial Sequence
  ENSG00000219545_11 (sequence is synthesized)
ccaattagagtataggcagaacacctagatatgacttttagttcttgaatatccattacttactttaatgaaaacagaactgccattggtcaataaactgtaaagggaagaggtaaattg

SEQ ID NO: 763298 - DNA, 120 bp, Artificial Sequence
  ENSG00000219545_12 (sequence is synthesized)
tgatagagaattttctatgtcatgggaaattgaaatcacatttattttgattaccagcaatatgatttgttaactctgtgccaagttttaagtatattttttcacaaagatagagtgcca

SEQ ID NO: 763299 - DNA, 120 bp, Artificial Sequence
  ENSG00000219545_13 (sequence is synthesized)
tagtgaaactaaacactgtgcataaaggtacatgaattattccagttttaaagtattatgcatgtttgtttaataaatgtggcatggttttaatacaaatgctatgttatttaaaagtta

SEQ ID NO: 763300 - DNA, 120 bp, Artificial Sequence
  ENSG00000219545_14 (sequence is synthesized)
gaggaacatttctattgacaaaaatatgcttcatttacatataatgttaccatatggtgttaatgattaaattagatctttacatagttcttacaaagcatcagtctaggaaatatgact

SEQ ID NO: 763301 - DNA, 120 bp, Artificial Sequence
  ENSG00000219545_15 (sequence is synthesized)
tattactgatgcaaacgtgaacattttgtagtagttttgtaaaagaacatccttttcaaatatctgtgttaatgtacccttgaaattaaatgcaagcacatagtcagtttgtctaatttt

SEQ ID NO: 763302 - DNA, 120 bp, Artificial Sequence
  ENSG00000219545_16 (sequence is synthesized)
gtgtgaaattttgtcgaaaatacctaaacatttcatctatatttgtgcctaccatgttataaatgttcataagtaccttcatgtgtctataaaaaatgttatatttaaataaatgtgaat

SEQ ID NO: 763303 - DNA, 71 bp, Artificial Sequence
  ENSG00000219545_17 (sequence is synthesized)
gacttgaccccggaagtggggtgtgaagctccggtgctggtgcggcgggggactgcggggccagcctcagg

SEQ ID NO: 763304 - DNA, 120 bp, Artificial Sequence
  ENSG00000219545_18 (sequence is synthesized)
acctgagactacctttctgcgatcacaggattcccggcggtgacttgaccccggaagtggggtgtgaagctccggtgctggtgcggcgggggactgcggggccagcctcagtttaaaccc

SEQ ID NO: 763305 - DNA, 120 bp, Artificial Sequence
  ENSG00000219545_19 (sequence is synthesized)
cctcagcagtctttctgtcgttgccctccacactgcgagactctggagggcgatctggaggtctggaagataaccgattcctgggagatttgggggtagtctccaatctgtccctggctc

SEQ ID NO: 763306 - DNA, 120 bp, Artificial Sequence
  ENSG00000219545_20 (sequence is synthesized)
ccttttaggacagagttgccagctgtcatcctctctgggagggaaccgatgctcaaaaaatggcactacctttcctctcagcagtaaagtgccagtgtttcttttacagctgccatgtgc

SEQ ID NO: 763307 - DNA, 120 bp, Artificial Sequence
  ENSG00000219545_21 (sequence is synthesized)
gcagtcattctttagtcacaggcagtttaagctgttaaatagtatcttgctttgaaaggtaggcggatggcatttctatcttctggtacatctggagatacaacagatgagcaaagaatg

SEQ ID NO: 763308 - DNA, 120 bp, Artificial Sequence
  ENSG00000219545_22 (sequence is synthesized)
aaggaggaagcaaccatgatgacattgttgaactgacatattcactaatttgggagctgtttacctctggactttttagaccacgtggtagaaataggaggagaaagacattccaagaga

SEQ ID NO: 763309 - DNA, 120 bp, Artificial Sequence
  ENSG00000219545_23 (sequence is synthesized)
gaagaatgacactgaatgaaagcccagagaaaataggcaaatggattgaatgctatgggcacccacctgcctctaagctggtggaaatttatattcatacagtctttgtggaagacaaat

SEQ ID NO: 763310 - DNA, 120 bp, Artificial Sequence
  ENSG00000219545_24 (sequence is synthesized)
aatcagaggaagcttgtcagtgtgggcagacaccacgagcagaccaatttgacattgtgcttctcttttaacctcttgaaaattaatgaaagttatctgatgaagatccttacattaatt

SEQ ID NO: 763311 - DNA, 120 bp, Artificial Sequence
  ENSG00000219545_25 (sequence is synthesized)
gctcccgattaaggtttaaaaccttggtttactgtggggtaaatttatgtttttgatagtcatccaaaatctttgtacgctttcagtttcattacagaataaaaaacaaatttaccacaa

SEQ ID NO: 763312 - DNA, 80 bp, Artificial Sequence
  ENSG00000219607_0 (sequence is synthesized)
gcgtccccacacggtccccgccccagtctggccgcagcccaccccgcgccgccactgggcagatgggggcggcggctcct

SEQ ID NO: 763313 - DNA, 120 bp, Artificial Sequence
  ENSG00000219607_1 (sequence is synthesized)
tcctgcctcccggctttcggaagagcagagcggagcgcgcctgaccgagtcaggcttccgagtgggattggaacccggggcgccctgaagtttggggaaagcaggagcagaagggaaggg

SEQ ID NO: 763314 - DNA, 120 bp, Artificial Sequence
  ENSG00000219607_2 (sequence is synthesized)
atgcgctccccgctctccggcggcgcggaatgggcctccttccagcctctgcgtaggcaagatttccccagttgcgcgctgcaccggggactccccagcccgtgaggcagccaagaggag

SEQ ID NO: 763315 - DNA, 120 bp, Artificial Sequence
  ENSG00000219607_3 (sequence is synthesized)
agcgctcagtgaccctctgggggcagagccgtcaggccaagttcatgggcaggaagactttgtgcacgtgggggtctctgaaggttgagcgcgagctctgcacccccacttcgaggcact

SEQ ID NO: 763316 - DNA, 120 bp, Artificial Sequence
  ENSG00000219607_4 (sequence is synthesized)
caagaagcggaacagacgcgagccccgccgggggtgcgggtgagggctgcagggagcccgcgaacgacagaaagtcgccccccgcattccaccggagcactcgggaacacggcttccagg

SEQ ID NO: 763317 - DNA, 120 bp, Artificial Sequence
  ENSG00000219607_5 (sequence is synthesized)
cggccctcccccgtcgcgggcaggttcaaccgggaggcggcgtggccccggagccggccccaggcccgcatcctcctcccacttcgccctgggcagccgcagctaaaagccggaggctcc

SEQ ID NO: 763318 - DNA, 120 bp, Artificial Sequence
  ENSG00000219607_6 (sequence is synthesized)
gcagccgcagctaaaagccggaggctccaaagtggaactacgttgtcttgtcgagcctggggcgactcgcctcggggagggcgagcctgaactgcagccctgcgctccttccacggcccg

SEQ ID NO: 763319 - DNA, 120 bp, Artificial Sequence
  ENSG00000219607_7 (sequence is synthesized)
aggagttagttaagtctccagaggggcccggttcggcccgagcaagtccaggggcgaacggcgtcatggagcccataggggcgcggctaagtttggaggcgccgggaccagcgcccttcc

SEQ ID NO: 763320 - DNA, 120 bp, Artificial Sequence
  ENSG00000219607_8 (sequence is synthesized)
gagaggccccgccggccgaggagctgcccgccccggtggtcccctgtgtgcagggtggcggcgacggcggtggcgcttcggagaccccgagtcctgacgctcagctaggggataggcccc

SEQ ID NO: 763321 - DNA, 120 bp, Artificial Sequence
  ENSG00000219607_9 (sequence is synthesized)
tgtccccgaaggaagaggccgccccccaggagcaggaggagctgctggaatgccgccgccgctgccgcgcgcgctccttttccttgcccgccgaccccatcttgcaggcggccaagttcc

SEQ ID NO: 763322 - DNA, 120 bp, Artificial Sequence
  ENSG00000219607_10 (sequence is synthesized)
tgcagcagcagcagcaacaggcggtggcactgggcggcgagggggcggaggacgcacagctcggcccgggcggctgctgcgccaagtgcaagaagcgggtgcagttcgcggacacgctgg

SEQ ID NO: 763323 - DNA, 120 bp, Artificial Sequence
  ENSG00000219607_11 (sequence is synthesized)
ggctaagcctggccagcgtgaagcacttcagcgaggcggaggagccgcaggtgccgcccgccgtgctctcgcgcctccgaagcttccctatgcgtgccgaggacctggagcagctcgggg

SEQ ID NO: 763324 - DNA, 120 bp, Artificial Sequence
  ENSG00000219607_12 (sequence is synthesized)
ccgcgcccctttcagcgccgccttcccggctccggccgctcttccagctcccggggccgagcgccgcggccgagcgtctgcagcggcagcgcgtgtgcctggagcgcgtgcagtgctcga

SEQ ID NO: 763325 - DNA, 120 bp, Artificial Sequence
  ENSG00000219607_13 (sequence is synthesized)
gcctggagcgcgtgcagtgctcgacggcctcgggcgctgaggtgaagggctccggccgggtgctcagctgccctgggcccagggccgtgaccgtgcgctacacctttaccgagtggcgct

SEQ ID NO: 763326 - DNA, 120 bp, Artificial Sequence
  ENSG00000219607_14 (sequence is synthesized)
ccttcctggacgtgccggctgagctgcagcccgagccgctggagccacagcagccagaggcaccgtctggggcctccgagccagggtccggggatgccaagaaagagccaggcgccgagt

SEQ ID NO: 763327 - DNA, 120 bp, Artificial Sequence
  ENSG00000219607_15 (sequence is synthesized)
gcttccacttctcgctgtgcctgcccccgggcctgcagcctgaggacgaagaggacgccgacgagcgcggcgtcgcggtccacttcgctgtctgctaccgctgcgcgcagggcgagtact

SEQ ID NO: 763328 - DNA, 120 bp, Artificial Sequence
  ENSG00000219607_16 (sequence is synthesized)
gggacaacaacgcgggcgccaactacacgctgcgctacgcgcgccctgcggacgcgctctgagcctggagagtttcgaagagccgtggggcggggttgattagcacgtggagctcgggct

SEQ ID NO: 763329 - DNA, 120 bp, Artificial Sequence
  ENSG00000219607_17 (sequence is synthesized)
gccgcctcaaggaacttgctgggacgctttgctgagcgtggcgagtctggcgtgaggggcgcgtggagggaaaggagggagactttgaaccgtcgactcgcacccccgcagacaagtgag

SEQ ID NO: 763330 - DNA, 120 bp, Artificial Sequence
  ENSG00000219607_18 (sequence is synthesized)
cgagcttagagagcccgggcaatgctccgaaagcctctgacctcagtcttctcgtccgtttgaccttcctacaaggcctctagaattcccagcctgcgtcagaataggaagaaacttcca

SEQ ID NO: 763331 - DNA, 120 bp, Artificial Sequence
  ENSG00000219607_19 (sequence is synthesized)
aggcccggagcagctgcctccaagaaaaaggctcccaactcccgggcatggttctaaggccttgggattggtttttaactctaaatatcatattgtagcccttgcagtttgctggagacc

SEQ ID NO: 763332 - DNA, 120 bp, Artificial Sequence
  ENSG00000219607_20 (sequence is synthesized)
cccttcggggctgggccaggccacccttttcttttgactgagatgtgggtaatgtgtgcccagacttgacgttgtttattgtgcgacattgtgtacaaatgtcctttataaaagtaaagg

SEQ ID NO: 763333 - DNA, 120 bp, Artificial Sequence
  ENSG00000219607_21 (sequence is synthesized)
ccactcgcacccccttttacgctgtactctgaattttggctttcgtgagtttggggaggcattggcagtcggccgatctttgtcagctgatgatgtgcgcactttaacaatccttaaaca

SEQ ID NO: 763334 - DNA, 120 bp, Artificial Sequence
  ENSG00000219607_22 (sequence is synthesized)
acagcctacaaattcctccccttcgttccttcctctctactgcgaaagggcccaaacttcccatgtgctttaaaatgttctgtagaaagtgttccgtccccctccgaattaagacgtttg

SEQ ID NO: 763335 - DNA, 120 bp, Artificial Sequence
  ENSG00000219607_23 (sequence is synthesized)
gtgaattgaaatgccagtcctcgggcaggccctggctgtgatctgcgagagccgggcacgcacgccccggcgccctttgtgtaggcagagcacactgttaggagacttgccgggccatta

SEQ ID NO: 763336 - DNA, 120 bp, Artificial Sequence
  ENSG00000219607_24 (sequence is synthesized)
gcagtcagagaagctgggcccttttagtcgctggactgccagcgcaggggatgggggatgggaaagtggctttctgttcctctcagagccacagtggggagtggtgacttgatggaagag

SEQ ID NO: 763337 - DNA, 120 bp, Artificial Sequence
  ENSG00000219607_25 (sequence is synthesized)
gaggcatgcccagcgagtcagtgctgcgcagacgcagatggccacctctgcaggcccgttgggtggggtatggacggccttggtcgctgtgctggctgtggatgccaggatgatgtggcc

SEQ ID NO: 763338 - DNA, 120 bp, Artificial Sequence
  ENSG00000219607_26 (sequence is synthesized)
ctctgtgcatgggtgggcaggagggcatcccgagtaaggtctgtcgccccttgactctgcctcagtgatttccctttttttaagtcttcccattttccagcacatggcgagtacagtcag

SEQ ID NO: 763339 - DNA, 120 bp, Artificial Sequence
  ENSG00000219607_27 (sequence is synthesized)
tcgttttagggatggtagtctctaaggagggacagtttcactgttgcttgatagaacagggctgggcatacgtacatttggcccatgggccaaatttggcacacagcttattcttgtagg

SEQ ID NO: 763340 - DNA, 120 bp, Artificial Sequence
  ENSG00000219607_28 (sequence is synthesized)
aatttggcacacagcttattcttgtagggcctgtgacctaagaatagtttttacatttttatttttaatttaattttcttattattatttttcgagacggagtttcactcttgtcgccca

SEQ ID NO: 763341 - DNA, 61 bp, Artificial Sequence
  ENSG00000219607_29 (sequence is synthesized)
acctggccttacatttttaaattgttgaaaaaaattcaaaagaaagtactatttggtggca

SEQ ID NO: 763342 - DNA, 120 bp, Artificial Sequence
  ENSG00000219607_30 (sequence is synthesized)
ttgttgaaaaaaattcaaaagaaagtactatttggtggcacgtgagaattatataaaatatatatttcagtgttcacaaatcaggttttactggaacacagccgtgcacactcatttctg

SEQ ID NO: 763343 - DNA, 120 bp, Artificial Sequence
  ENSG00000219607_31 (sequence is synthesized)
tcttctctgtgctgcttccatgctaccgcagcagagtggagtagacacagcagagaccagatggcaaagtgtaaaatatttactatctggcccttttacaaaaggctggccaacccctgc

SEQ ID NO: 763344 - DNA, 120 bp, Artificial Sequence
  ENSG00000219607_32 (sequence is synthesized)
tctagggaagtagtgttttttaaacacaatatgctgacaattatagttaataaagcatttagactttagtgagcttttgccacttgaaataaaccccctttgggtaaaggtaaagcttta

SEQ ID NO: 763345 - DNA, 120 bp, Artificial Sequence
  ENSG00000219607_33 (sequence is synthesized)
tatgactctcagtaatcttgtttagaataaacacgaaaatgtgaaaagtgcggttatcattgtgtcaggcaggggaatctacctgttgccttctttcacctaaaaaaatagtaacacatc

SEQ ID NO: 763346 - DNA, 120 bp, Artificial Sequence
  ENSG00000219607_34 (sequence is synthesized)
agtgcaactgaaacatagcacccgtttgaattggcttcaaactacaaagctgccagatatttctctgtgcttcaaaatgtggcatcttacacaatggaagtatttagtttgaactttggg

SEQ ID NO: 763347 - DNA, 120 bp, Artificial Sequence
  ENSG00000219607_35 (sequence is synthesized)
ttggagatatccctttgactatggcagtgtttcccaaagtaaactgatcataggaaaaaaataatttattgacagcaagccatcaggagttaacatattacaatttagacttttaaaaat

SEQ ID NO: 763348 - DNA, 120 bp, Artificial Sequence
  ENSG00000219607_36 (sequence is synthesized)
ggtcaatggtcatatcaatgaactaatgaatacttaattcatatatgcttataaaaactttgacgaaaaataaatgataaaatgaaacaatttttctgttactaaatataaaagctatga

SEQ ID NO: 763349 - DNA, 120 bp, Artificial Sequence
  ENSG00000219607_37 (sequence is synthesized)
agccttctgatgcatcatcaggtaatcttggtctgatataccatttcttaaaagtacattattgcataaccatatttttccgatatatttataaatacattaatttttaagatattgaca

SEQ ID NO: 763350 - DNA, 120 bp, Artificial Sequence
  ENSG00000219607_38 (sequence is synthesized)
gtatacatatgctataacattgtttgaaaatgcttgtttgtggggcaataaagcaacattttgaattgttttgaattacttaaaattaaatgaggagcccaatataatgattcaaacaga

SEQ ID NO: 763351 - DNA, 120 bp, Artificial Sequence
  ENSG00000219626_0 (sequence is synthesized)
atgaaaaatgtagacagtgatgatctggtaactggcacacttcccaagctcaagagctcaaaagaatggttggagcccaagcccctttgttttatggaggttttagctaaagaagatact

SEQ ID NO: 763352 - DNA, 120 bp, Artificial Sequence
  ENSG00000219626_1 (sequence is synthesized)
gaggcagctattcaatcaatattatacaaagaaaattctgtaattaaggaactagataagtatttacaacatcatgccttcttaaatgcaagaagaaaggagatgttatataaaagatgg

SEQ ID NO: 763353 - DNA, 120 bp, Artificial Sequence
  ENSG00000219626_2 (sequence is synthesized)
gttgactgtgtggcagatcctcttcagaagaaaattatagaaaaagtttgctcacataagaagattaaaaaaaggaggcaaggggaattagatggctttttaaaacatgtaaataaaaag

SEQ ID NO: 763354 - DNA, 120 bp, Artificial Sequence
  ENSG00000219626_3 (sequence is synthesized)
ggaaatgcatttatagaacattatgatccaaaagagtatgatcccttttatatgagcaagaaggaccccaattttctgaaggttaccatcccaccatttcatgaccctttgaaaaaagca

SEQ ID NO: 763355 - DNA, 120 bp, Artificial Sequence
  ENSG00000219626_4 (sequence is synthesized)
aacgaaaaaagaactcttcttcagtgtgagactggcaaaatatattcaataaaggaattcaaagaagttgagaaggttcagctgcattccagattcccacaaatttctaattcaaggcac

SEQ ID NO: 763356 - DNA, 120 bp, Artificial Sequence
  ENSG00000219626_5 (sequence is synthesized)
tttataactccaaacgagtggctgaaactgcctacaagatacatagaaagtgaattttgtagaaggagaaggttaaaggtgaaagtgaattttaatgactgtagttttgatttgaaacct

SEQ ID NO: 763357 - DNA, 120 bp, Artificial Sequence
  ENSG00000219626_6 (sequence is synthesized)
ttggcaagagctccttatcttttggaatcccaggaagaagaaaaaacagttatttacaaaaacaaagggtcatcctttctagaaagagaaccgctgtgctatcaggagggaaataatcca

SEQ ID NO: 763358 - DNA, 120 bp, Artificial Sequence
  ENSG00000219626_7 (sequence is synthesized)
agtgccaaagaggccatctctgaagggtatttttcttccttgagcctcagccaggaacgggaggaagaccaggatgggtctccctccccgcgtttggggctgctgaagctggagctataa

SEQ ID NO: 763359 - DNA, 120 bp, Artificial Sequence
  ENSG00000219626_8 (sequence is synthesized)
aaaggatacacaaaatcaggctgcttcagaggaagtcatctgctcacaggaatcagggtgaaggccaaggacggcactcaagaattgtcctgtctctaaaaaaaaagcatctgcaacgaa

SEQ ID NO: 763360 - DNA, 120 bp, Artificial Sequence
  ENSG00000219626_9 (sequence is synthesized)
cttcctttaatttttgagttcagtgtctgtgataattaagaaatggcaataccatgtattttccccagaagttaagaaatattgctgaacgaaccaataaaaataattacagctccctca

SEQ ID NO: 763361 - DNA, 120 bp, Artificial Sequence
  ENSG00000219626_10 (sequence is synthesized)
gaggagggtggcgagaggtggggtggggcccaggtgagtagcgggcgaaggcggggcctgaggaggactgagctggggcgggacccagcagctgctccaagcttttctgccatttgaagc

SEQ ID NO: 763362 - DNA, 120 bp, Artificial Sequence
  ENSG00000219626_11 (sequence is synthesized)
ttcttctgggagccagctgtgaccagaggaatagctccagccatccggttaaaagtttaacaaccggaacagctccagtctgcagctcccagcgtgatcgacgcagaagacaggtgattt

SEQ ID NO: 763363 - DNA, 120 bp, Artificial Sequence
  ENSG00000219626_12 (sequence is synthesized)
ttgaattgtgagctgaactggctgcttttttttcttccatgaaacaccatttttacttgaaagaatgacttacaaactatagttattaagtcttgggtatttggcggatattttctggaa

SEQ ID NO: 763364 - DNA, 120 bp, Artificial Sequence
  ENSG00000219626_13 (sequence is synthesized)
aatgaatgaagtcagcttgtcactttgagaaaaactactgacaatatttgttgccaatgataaaaggttaccatcccaccatttcatgaccctttgaaaaaagcacaatatgacaaggat

SEQ ID NO: 763365 - DNA, 120 bp, Artificial Sequence
  ENSG00000219626_14 (sequence is synthesized)
ctctgaagccgtcatctggagtctgtagtgaaggcctcttgttagggaaactggatggttagtgttcaaaatccattttgcgtgtgtgcaaggacacaggtggtattaaacagaagagaa

SEQ ID NO: 763366 - DNA, 120 bp, Artificial Sequence
  ENSG00000219626_15 (sequence is synthesized)
ccaagtgccaaagaggccatctctgaagggtatttttcttccttgagcctcagccaggaacgggaggaagaccaggatgggtttcagcaaccaaggagcacacaccctgatccttgattg

SEQ ID NO: 763367 - DNA, 86 bp, Artificial Sequence
  ENSG00000219626_16 (sequence is synthesized)
tgcaatcatagctcactgcagccttgaaactcctggactcaagcaatcctcaagtgccactgtgcccggcatggaacctataatct

SEQ ID NO: 763368 - DNA, 120 bp, Artificial Sequence
  ENSG00000219626_17 (sequence is synthesized)
aaacaaagtcttggaactactcgaaatacttcctaatatacagctgctccaagcttttctgccatttgaagcttcttctgggagccagctgtgaccagaggaatagctccagccatccgg

SEQ ID NO: 763369 - DNA, 120 bp, Artificial Sequence
  ENSG00000219626_18 (sequence is synthesized)
caagcaattctcccacctcagcctgtaaagtactggaattataggcatgagccactctgcctggccaataatttaacaaccggaacagctccagtctgcagctcccagcgtgatcgacgc

SEQ ID NO: 763370 - DNA, 89 bp, Artificial Sequence
  ENSG00000219626_19 (sequence is synthesized)
tgggacactcctgcccaaatactgcacttttcccaagatcttagccaccggcagacaaggagattctctcccatgcctggctcggcggg

SEQ ID NO: 763371 - DNA, 86 bp, Artificial Sequence
  ENSG00000219626_20 (sequence is synthesized)
cctgcccaaatactgcacttttcccaagatcttagccaccggcagacaaggagattctctcccatgcctggctcggcgggttccac

SEQ ID NO: 763372 - DNA, 120 bp, Artificial Sequence
  ENSG00000219626_21 (sequence is synthesized)
gagtaggtaaacaaagcagccgggaagttcgaactgggcagagcccactgcagctcagtaaggcctactgcctctagactccatctctgtggccagggcatagctgaacaaaaggcagca

SEQ ID NO: 763373 - DNA, 120 bp, Artificial Sequence
  ENSG00000219626_22 (sequence is synthesized)
tagctgaacaaaaggcagcagacaacttttgcagacttaaaggtccctgtctgacagctctgaagagagcattggttctctcagcacggtgtttgagctctgagaacggacagactgcct

SEQ ID NO: 763374 - DNA, 120 bp, Artificial Sequence
  ENSG00000219626_23 (sequence is synthesized)
gcctccttaagtgggtccctcacccccatgtagcctaactaggagatacctcccaggaggggccgacagacacctcatataggcacctgcctctctgggacgaagcttccagaggaagga

SEQ ID NO: 763375 - DNA, 80 bp, Artificial Sequence
  ENSG00000219626_24 (sequence is synthesized)
ggtggacctccagcaaactccaaccgacctgcagctgagggacctgacagttagaaggaaaactgaaaaacagaaaggaa

SEQ ID NO: 763376 - DNA, 120 bp, Artificial Sequence
  ENSG00000219626_25 (sequence is synthesized)
caaagagacaaagctggatggagaatgactttgacaagtcgacagaagtaggcttcagaaggttggtaaaaacaaacttctccgagctaaaggaggacgtttgaacccatcgcaaggaag

SEQ ID NO: 763377 - DNA, 89 bp, Artificial Sequence
  ENSG00000219626_26 (sequence is synthesized)
agctaaaggaggacgtttgaacccatcgcaaggaagtaaaacggaataaacagtgtagagaataccttaaatgacctgatggagctgaa

SEQ ID NO: 763378 - DNA, 83 bp, Artificial Sequence
  ENSG00000219626_27 (sequence is synthesized)
ataagacaaggttacaggaaaaagagtaaaaagacatgaacaaagcctccaagacaaatgggactatgtgaaaagaccaaatc

SEQ ID NO: 763379 - DNA, 72 bp, Artificial Sequence
  ENSG00000219626_28 (sequence is synthesized)
aaggttacaggaaaaagagtaaaaagacatgaacaaagcctccaagacagaagtgatggggagaatggaacc

SEQ ID NO: 763380 - DNA, 75 bp, Artificial Sequence
  ENSG00000219626_29 (sequence is synthesized)
tgaaggaaaaagtgttaagggcagccaaagagaaaggttgagttacccacaaagggaaagagagtgggggccaat

SEQ ID NO: 763381 - DNA, 77 bp, Artificial Sequence
  ENSG00000219626_30 (sequence is synthesized)
ctccaaccgacctgcagctgagggacctgacagttagaaggaaaactgaaaaacagaaaggaatagcatcaacatca

SEQ ID NO: 763382 - DNA, 120 bp, Artificial Sequence
  ENSG00000220008_0 (sequence is synthesized)
gtagagatgggagtcttgctatgttgtgcaggctggtctcgaactcttgaactcaagcaattcttccatctcagcctcccaaaatgctgggtttacaggagcgagccgccgtgctgggac

SEQ ID NO: 763383 - DNA, 120 bp, Artificial Sequence
  ENSG00000220008_1 (sequence is synthesized)
gggttaggggcgggctggcggcagaggcgccgcggaggggtgctaacggtgctaacgctgcccgctccccgcccgcccgcaggtgcgcaggaggatggtggcgcggccctaggcccacgc

SEQ ID NO: 763384 - DNA, 120 bp, Artificial Sequence
  ENSG00000220008_2 (sequence is synthesized)
acgctccgcaccatgacctgctggctgtgcgtcctgagcctgcccctgctcctgctgcccgcggcgccgcccccggctggaggctgcccggcccgctgcgagtgcaccgtgcagacccgc

SEQ ID NO: 763385 - DNA, 120 bp, Artificial Sequence
  ENSG00000220008_3 (sequence is synthesized)
gtgcagacccgcgcggtggcctgcacgcgccgccgcctgaccgccgtgcccgacggcatcccggccgagacccgcctgctggagctcagccgcaaccgcatccgctgcctgaacccgggc

SEQ ID NO: 763386 - DNA, 120 bp, Artificial Sequence
  ENSG00000220008_4 (sequence is synthesized)
ccgcgctggaggagctggacctgagcgagaacgccatcgcgcacgtggagcccggcgccttcgccaacctgccgcgcctgcgcgtcctgcgtctccgtggcaaccagctgaagctcatcc

SEQ ID NO: 763387 - DNA, 120 bp, Artificial Sequence
  ENSG00000220008_5 (sequence is synthesized)
cgcccggggtcttcacgcgcctggacaacctcacgctgctggacctgagcgagaacaagctggtaatcctgctggactacactttccaggacctgcacagcctgcgccggctggaagtgg

SEQ ID NO: 763388 - DNA, 120 bp, Artificial Sequence
  ENSG00000220008_6 (sequence is synthesized)
gcgacaacgacctggtattcgtctcgcgccgcgccttcgcggggctgctggccctggaggagctgaccctggagcgctgcaacctcacggctctgtccggggagtcgctgggccatctgc

SEQ ID NO: 763389 - DNA, 120 bp, Artificial Sequence
  ENSG00000220008_7 (sequence is synthesized)
gcagcctgggcgccctgcggctgcgccacctggccatcgcctccctggaggaccagaacttccgcaggctgcccgggctgctgcacctggagattgacaactggccgctgctggaggagg

SEQ ID NO: 763390 - DNA, 120 bp, Artificial Sequence
  ENSG00000220008_8 (sequence is synthesized)
tggcggcgggcagcctgcggggcctgaacctgacctcgctgtcggtcacccacaccaacatcaccgccgtgccggccgccgcgctgcggcaccaggcgcacctcacctgcctcaatctgt

SEQ ID NO: 763391 - DNA, 120 bp, Artificial Sequence
  ENSG00000220008_9 (sequence is synthesized)
tgctggctgtggtggagccgcaggccttcctgggcctgcgccagatccgcctgctcaacctctccaacaacctgctctccacgttggaggagagcaccttccactcggtgaacacgctag

SEQ ID NO: 763392 - DNA, 120 bp, Artificial Sequence
  ENSG00000220008_10 (sequence is synthesized)
agacgctgcgcgtggacgggaacccgctggcctgcgactgtcgcctgctgtggatcgtgcagcgtcgcaagaccctcaacttcgacgggcggctgccggcctgcgccaccccggccgagg

SEQ ID NO: 763393 - DNA, 120 bp, Artificial Sequence
  ENSG00000220008_11 (sequence is synthesized)
tgcgcggcgacgcgctgcgaaacctgccggactccgtgctgttcgagtacttcgtgtgccgcaaacccaagatccgggagcggcggctgcagcgcgtcacggccaccgcgggcgaagacg

SEQ ID NO: 763394 - DNA, 80 bp, Artificial Sequence
  ENSG00000220008_12 (sequence is synthesized)
tccgcttcctctgccgcgccgagggcgagccggcgcccaccgtggcctgggtgaccccccagcaccggccggtgacggcc

SEQ ID NO: 763395 - DNA, 120 bp, Artificial Sequence
  ENSG00000220008_13 (sequence is synthesized)
tggagatccaggacgcgcggccgcaggacagcggcacctacacgtgcgtggccagcaacgcgggcggcaacgacacctacttcgccacgctgaccgtgcgccccgagccggccgccaacc

SEQ ID NO: 763396 - DNA, 120 bp, Artificial Sequence
  ENSG00000220008_14 (sequence is synthesized)
ggaccccgggcgaggcccacaacgagacgctggcggccctgcgcgcgccgctcgacctcaccaccatcctggtgtccaccgccatgggctgcatcaccttcctgggcgtggtcctcttct

SEQ ID NO: 763397 - DNA, 120 bp, Artificial Sequence
  ENSG00000220008_15 (sequence is synthesized)
gcttcgtgctgctgttcgtgtggagccgcggccgcgggcagcacaaaaacaacttctcggtggagtactccttccgcaaggtggatgggccggccgccgcggcgggccagggaggcgcgc

SEQ ID NO: 763398 - DNA, 120 bp, Artificial Sequence
  ENSG00000220008_16 (sequence is synthesized)
gcaagttcaacatgaagatgatctgaggggtccccagggcggaccctcccctcccctcccccgcgggccggccgctcgcgtgtccacctatgcatttcccggaggggaaggggacggctg

SEQ ID NO: 763399 - DNA, 120 bp, Artificial Sequence
  ENSG00000220008_17 (sequence is synthesized)
cacggcgctccccaggcagaacttcccctttttttgtagacgcccaaccgcaggactgtttttcatcagcatgcgtcttttttgcagtttctcaagcgttttctaaagatttcaacccgt

SEQ ID NO: 763400 - DNA, 120 bp, Artificial Sequence
  ENSG00000220201_0 (sequence is synthesized)
aaacaaaaacaaaccacacctgcatctgctgtgctgggcccccggttctcttttccctctgggatctaagatgccgctggggatccaaggcagaggcctgggagcccccatttccgaggg

SEQ ID NO: 763401 - DNA, 120 bp, Artificial Sequence
  ENSG00000220201_1 (sequence is synthesized)
ggagggctagcgtggaaggccccgccccggcagctgcggagggatttggtggggtccaggccgcccttgccacgcaggggtgcgcggatgacctgaaaaaagccagaaagaggaaaggtg

SEQ ID NO: 763402 - DNA, 120 bp, Artificial Sequence
  ENSG00000220201_2 (sequence is synthesized)
ccgccgaggctggtcgctctcagctggggctcatcgcatcctctaccaagagcgctcccaccacacaggtcccgcccctcccaggtgggtttcatcgggtgggcccagcgggacagggcc

SEQ ID NO: 763403 - DNA, 120 bp, Artificial Sequence
  ENSG00000220201_3 (sequence is synthesized)
gggtgaaattagggagggggctgggctggggcgcaatggaggccgagccaatcccggactcctcaatgccagcaaagcttctggcgccgccctgtctgaacctggagcggctgggaggat

SEQ ID NO: 763404 - DNA, 120 bp, Artificial Sequence
  ENSG00000220201_4 (sequence is synthesized)
ccccctcccaggagaagccgaggaccccaggatgctgcagaatcagtgagaggtgcgtaaggccaaaccccattccccggaccccgctagcacttcaccacctggctcagtgatcaaggg

SEQ ID NO: 763405 - DNA, 120 bp, Artificial Sequence
  ENSG00000220201_5 (sequence is synthesized)
gtcatgacctctctttgctggggttatcgagaagtggcaattttataatagttactgaaacttacaaagaggttctggtgcccagagacacttggggtcatctagggatcagaggccatg

SEQ ID NO: 763406 - DNA, 120 bp, Artificial Sequence
  ENSG00000220201_6 (sequence is synthesized)
caattccatgtctctggggctgatgtaggcactccccagggatcatccaggggttatggagggcaactcaataataatgaaaatgataaaaatcgtaatcatattatggcaagccagcgg

SEQ ID NO: 763407 - DNA, 120 bp, Artificial Sequence
  ENSG00000220201_7 (sequence is synthesized)
ccagctactcgggaggctgaggcggaaggatcggtcgagcccaggagttctaggctgcactgagtcctgatcacgcccctgcactccaggcgggggtacagagtgaggctcggtctctaa

SEQ ID NO: 763408 - DNA, 120 bp, Artificial Sequence
  ENSG00000220201_8 (sequence is synthesized)
tacagagtgaggctcggtctctaaaagaaacacaaagaaaaaaagtaacctttttctcgatcctgcagccagaggcttgatatcctgcctcggtcacctagggcggtccctgcctgggtg

SEQ ID NO: 763409 - DNA, 120 bp, Artificial Sequence
  ENSG00000220201_9 (sequence is synthesized)
gattgatgtggagggctgggcgtgcctgggaggcccacagtgggcgaggtgagttgcaattactgcaactcttaaaccttccacccagagttagaaatgactgaacctcaggtggggtgt

SEQ ID NO: 763410 - DNA, 120 bp, Artificial Sequence
  ENSG00000220201_10 (sequence is synthesized)
gtagcctgtccaagggtacacaaagagccggcccaagttggaaccccctggccggctaaacccaggagtcacccaagaaaacgtgaccccactgcccttctccccaggtccctctggcct

SEQ ID NO: 763411 - DNA, 120 bp, Artificial Sequence
  ENSG00000220201_11 (sequence is synthesized)
gcatgccaggagtcggtcaccgccctgtgcttcctccaagagacagtggagaggctgggtcagtcccctgcccaggacaccccggtcctggggccttgctgggacccgatggctctgggg

SEQ ID NO: 763412 - DNA, 120 bp, Artificial Sequence
  ENSG00000220201_12 (sequence is synthesized)
actcagggccgcctgctgctggacagggattccaaggacacacagaccaggatcagccaaaagggccgccgtctgcagcccccggggactccctcggccccaccccagagaaggccccgg

SEQ ID NO: 763413 - DNA, 120 bp, Artificial Sequence
  ENSG00000220201_13 (sequence is synthesized)
aaacagctgaacccctgccggggcaccgagagagtggaccctgggttcgagggggtgactctgaagtttcagataaagccggactccagcctgcagatcatccccacgtacagcctgccc

SEQ ID NO: 763414 - DNA, 120 bp, Artificial Sequence
  ENSG00000220201_14 (sequence is synthesized)
tgcagtagccgttctcaggaatcccctgcagatgctgttgggggccctgcagcccacccaggaggcaccgaggcccactcagcaggcagcgaggccctggagccccggcgctgtgcttcc

SEQ ID NO: 763415 - DNA, 120 bp, Artificial Sequence
  ENSG00000220201_15 (sequence is synthesized)
tgtcggacccagaggaccccgctctggagagacgctgaagatgggacccctctctgcaacgcctgtgggatcaggtacaagaaatacggcactcgctgctccagctgctggctggtgccc

SEQ ID NO: 763416 - DNA, 120 bp, Artificial Sequence
  ENSG00000220201_16 (sequence is synthesized)
aggaaaaatgtccagcccaagaggctatgtggcagatgtggagtgtccctggaccccattcaggaaggttaaacccagcttcaccctgctgagctgctgcttctgcctccgtttcaccag

SEQ ID NO: 763417 - DNA, 120 bp, Artificial Sequence
  ENSG00000220201_17 (sequence is synthesized)
tgggagaatgggcagaagcagctctcctaggaggattggggaaagagccggcctgcctcctctctgccatctccagattcaaggatcccgggggaagacccaggcctcaggtggcagagc

SEQ ID NO: 763418 - DNA, 120 bp, Artificial Sequence
  ENSG00000220201_18 (sequence is synthesized)
ctgctaggggtcaccagccccttctccagtcagccttggccgaggccccctcaggagacgctctcaggaaggatgagcattgttacagcagggacaataaagtacagagatatgccgaga

SEQ ID NO: 763419 - DNA, 120 bp, Artificial Sequence
  ENSG00000220201_19 (sequence is synthesized)
tcccagggctgatccagagctaggtggggcctttactgagacccccacaaaatgcccgactccgcacaggcatcccgagctcacatgcttggcctctgacccctgccctttgacctctga

SEQ ID NO: 763420 - DNA, 120 bp, Artificial Sequence
  ENSG00000220205_0 (sequence is synthesized)
agtcggagccagcgcgagccgccgccgccatcactgccgctgccaagtcctccacccgctgcccccgccatgtctgctaccgctgccacggccccccctgctgccccggctggggagggt

SEQ ID NO: 763421 - DNA, 120 bp, Artificial Sequence
  ENSG00000220205_1 (sequence is synthesized)
ggtccccctgcaccccctccaaacctcaccagtaacaggagactgcagcagacccaggcccaggtggatgaggtggtggacatcatgagggtgaacgtggacaaggtcctggagcgagac

SEQ ID NO: 763422 - DNA, 120 bp, Artificial Sequence
  ENSG00000220205_2 (sequence is synthesized)
cagaagctgtcggagctggacgaccgtgcagatgcactccaggcgggggcctcccagtttgaaacaagcgcagccaagctcaagcgcaaatactggtggaaaaacctcaagatgatgatc

SEQ ID NO: 763423 - DNA, 120 bp, Artificial Sequence
  ENSG00000220205_3 (sequence is synthesized)
atcttgggagtgatttgcgccatcatcctcatcatcatcatagtttacttcagcacttaaatccccgaggagtctgccctgcctagagaagggcctctcccccaaccctcagccgttcct

SEQ ID NO: 763424 - DNA, 120 bp, Artificial Sequence
  ENSG00000220205_4 (sequence is synthesized)
ccacctctcagccatatctttcagcccccactcccctggatccgtgtgtgtgtgtgtccgtgtgtgtgtccccctgtaaatagccagctgttatttatacatatataatattatatatat

SEQ ID NO: 763425 - DNA, 120 bp, Artificial Sequence
  ENSG00000220205_5 (sequence is synthesized)
ttggtctgtttgtagttttattactagatgatttttccggttgtccttaacaccccttcctgaggttcccttcacccctctctcttgccttccttccctttccctttcttcctgactagc

SEQ ID NO: 763426 - DNA, 120 bp, Artificial Sequence
  ENSG00000220205_6 (sequence is synthesized)
cccaagtcccttcatttgcatctgctatgcaatagtccctctcctttccttcttcttccctcagatttagctgatccttcctcccaccctggccttcctttcctctttcctcctcactct

SEQ ID NO: 763427 - DNA, 120 bp, Artificial Sequence
  ENSG00000220205_7 (sequence is synthesized)
aaaaaaaaaaaaaaaaaacaacagcacctgtccaggcttccttaggtacatcttctttgtatccattgggaggctctgagactggccccacttggtcctaagaatcccaaggtctttggg

SEQ ID NO: 763428 - DNA, 120 bp, Artificial Sequence
  ENSG00000220205_8 (sequence is synthesized)
atttctttttgttccatcactcttctctcaacctgtgtttctttttttactgaggagttagtccccattagttcttgtatcacattttcatttgcacgacattactcgcaggtggtgggg

SEQ ID NO: 763429 - DNA, 120 bp, Artificial Sequence
  ENSG00000220205_9 (sequence is synthesized)
agcctgggcttttggggaaccaggctgctctggtccccagcattgcctcctcctagcccctctagtccagtttgcctcccttaccctcattttccaaacctcttgtaccctcctctccct

SEQ ID NO: 763430 - DNA, 120 bp, Artificial Sequence
  ENSG00000220205_10 (sequence is synthesized)
cccccagctggtatgtaagtgtcttgaagttcagtatgttatgatggaccaataattctgccacttcgggtttctccctacattcctgctccccagttttcatgtggggtactcaactga

SEQ ID NO: 763431 - DNA, 120 bp, Artificial Sequence
  ENSG00000220205_11 (sequence is synthesized)
cattcccatggggtttccctcccatctgcctgatccacctcctcctcccaccaggagagttgggggttggccacaattgatctcttgtgagaggggtggctaccagtgtgtgtgtggggg

SEQ ID NO: 763432 - DNA, 120 bp, Artificial Sequence
  ENSG00000220205_12 (sequence is synthesized)
tcatcactgccttggggaggagtggggcagggcagagaatccccccaattcctgcctgaaatctctggcctcacccctgctgggggttggactgaaaaccctcctccccaatttgggggg

SEQ ID NO: 763433 - DNA, 120 bp, Artificial Sequence
  ENSG00000220205_13 (sequence is synthesized)
tgttgccccatcactgcccagctcctctgactgccccccctgaatttagggtgggggtactagtcactgccaatgtgtgtatgggacttgctggaaaacggggatgcttgcccctctcca

SEQ ID NO: 763434 - DNA, 120 bp, Artificial Sequence
  ENSG00000220205_14 (sequence is synthesized)
ggactattgagcccagagagagctgtcctctcattgggtgaactgattgaggaagggtctattgtctttttaaatggcacaattttaagggtttgagggtacagtcccttaacctgccac

SEQ ID NO: 763435 - DNA, 120 bp, Artificial Sequence
  ENSG00000220205_15 (sequence is synthesized)
gggagggggcccccaaactttcttccccccacacttctggttttctgtgtggagggggagcagggatatctaagctgtggtgtgaaagggtaggagagatgctggaggtgggggtgctgt

SEQ ID NO: 763436 - DNA, 120 bp, Artificial Sequence
  ENSG00000220205_16 (sequence is synthesized)
gttttagaccccccatattatcccagtgtcccctgcccccctcttcccccaccccatgcccccaattctgtggcgcatccagattgtgaaaatgtacaataaatgtgtaatgagtaacca

SEQ ID NO: 763437 - DNA, 120 bp, Artificial Sequence
  ENSG00000220205_17 (sequence is synthesized)
catcactgccgctgccaagtcctccacccgctgcccccgccatgtgagtcggccgcccgccaccctcaccgcgcttccctgcgccggccgccgcccttggcaaccggccgtcgggagtgc

SEQ ID NO: 763438 - DNA, 80 bp, Artificial Sequence
  ENSG00000220205_18 (sequence is synthesized)
cgtcgggagtgcccggggtctctcctgcgttccccgcgccccggggccaggcccaagccggtgactgcgcgcgggcggcc

SEQ ID NO: 763439 - DNA, 120 bp, Artificial Sequence
  ENSG00000220205_19 (sequence is synthesized)
ccgcgggaaggagcggacccagtgtcctcctgcccctccccgcccctgtcaccgcggccgcctgtcttttcgggtcgacccggatcgcatctgtgaggtcgccctcagttgacaggcggg

SEQ ID NO: 763440 - DNA, 120 bp, Artificial Sequence
  ENSG00000220205_20 (sequence is synthesized)
cgcagctcatcggcggcagggctggaccgagaccagggcttacatcgggtggccttcctcccgaaaaggaggactggagggacgaggatggacaggtctgctaccgctgccacggccccc

SEQ ID NO: 763441 - DNA, 120 bp, Artificial Sequence
  ENSG00000220205_21 (sequence is synthesized)
tggagaggtttccccagtggattctaggttttgaaggtcattaatctagtttttactcttcagccaaaaacacatatagctgctaatggcaattctgattcatctagagccaaaaacttt

SEQ ID NO: 763442 - DNA, 120 bp, Artificial Sequence
  ENSG00000220205_22 (sequence is synthesized)
gggaccccaggcttcctctgagacatccaccagcggtgatgggttgggaccaatctcccccactcctctccaccctagcagtctgctaccgctgccacggccccccctgctgccccggct

SEQ ID NO: 763443 - DNA, 120 bp, Artificial Sequence
  ENSG00000220205_23 (sequence is synthesized)
gcagtcttgttaacatttggaaataggaaagctggtgtatccattgaggaccctttaggcctaagagcccagtctgagaaccctggaattgaggagtgggagaaaggaaaggaccagggg

SEQ ID NO: 763444 - DNA, 120 bp, Artificial Sequence
  ENSG00000220205_24 (sequence is synthesized)
agagcttgcggtctcagaggctcagaggattagggtctgtggcttcaaggccataccatggagcggaagggacctcagaacctacctgtctagccccttgctttgtagatggaaaaactg

SEQ ID NO: 763445 - DNA, 120 bp, Artificial Sequence
  ENSG00000220205_25 (sequence is synthesized)
agtccaagagagggtgtcagccagctggggagtggggaggattggagcagggccaggcctgacacactgctttcttgttctctctctttctctcccctctccctcttcctcatcttcttc

SEQ ID NO: 763446 - DNA, 120 bp, Artificial Sequence
  ENSG00000220948_0 (sequence is synthesized)
atgaattctggaatcttgcaagtcttccagagggaactcatctgtcccatctgcatgaactacttcatagacccagtcaccatagactgtgggcacagcttttgccggccctgtttctac

SEQ ID NO: 763447 - DNA, 120 bp, Artificial Sequence
  ENSG00000220948_1 (sequence is synthesized)
ctcaactggcaagacatggcagttcttgctcagtgctctaaatgcaagaagacaacacggcagagaaacctcaaaactaacatttgtttgaagaacatggcttccattgccagaaaagcc

SEQ ID NO: 763448 - DNA, 120 bp, Artificial Sequence
  ENSG00000220948_2 (sequence is synthesized)
agcctccggcaattccttagctctgaggagcaaatatgtgggacgcacagagagacaaaggagatgttctgtgaagtggacaagagcctgctctgtttgctgtgctccaactctcaggag

SEQ ID NO: 763449 - DNA, 120 bp, Artificial Sequence
  ENSG00000220948_3 (sequence is synthesized)
caccggaatcacagacactgtcccactgagtgggctgctgaggaacgccgggaggagctcctaagaaaaatgcagtctttatggagaaaaatgtgtgaaaatcacagaaacctgaatatg

SEQ ID NO: 763450 - DNA, 120 bp, Artificial Sequence
  ENSG00000220948_4 (sequence is synthesized)
gcaaccaacagaatcagatgctggaaggattatgtgagtttaaggatagaagcaatcagagctgaatatcataagatggttgcatttttccatgaagaagagcaacgtcacttggagagg

SEQ ID NO: 763451 - DNA, 120 bp, Artificial Sequence
  ENSG00000220948_5 (sequence is synthesized)
gaaagcaaagccagaatggaacattccagggagcttttaagaggaatgtatgaggatctgaggcaaatgtgccataaagcagttgtggagctattccagtcttttggagacatattacaa

SEQ ID NO: 763452 - DNA, 120 bp, Artificial Sequence
  ENSG00000220948_6 (sequence is synthesized)
aggtatgagtccctgctgctgcaagtgtctgagcctgtgaatccagagttcagtgcagggcccatcattggactgatggacaggctcaagggattcagagtttatcttactctgcagcat

SEQ ID NO: 763453 - DNA, 120 bp, Artificial Sequence
  ENSG00000220948_7 (sequence is synthesized)
gcaagagccagtagtcatatcttcctgcatggagatttgagaagcatgaaggttggatgtgaccctcaacatgatcccaatatcactgataaatctgaatgttttcttcaatggggggct

SEQ ID NO: 763454 - DNA, 120 bp, Artificial Sequence
  ENSG00000220948_8 (sequence is synthesized)
gattttttcatatctggcaaattttattgggagtttaacatggggcactcttggaattgggcttttggtgtctgtaacaattattggaaagagaagagacagaatgacatgatagatgga

SEQ ID NO: 763455 - DNA, 120 bp, Artificial Sequence
  ENSG00000220948_9 (sequence is synthesized)
gaggtgggactctttcttcttggatgtgttaaggaggacactcactgcagtctctttaccacctccccacttgtaatgcaatatgttccaagacctacagacacagtaggattattcctg

SEQ ID NO: 763456 - DNA, 120 bp, Artificial Sequence
  ENSG00000220948_10 (sequence is synthesized)
gttccaagacctacagacacagtaggattattcctggattgtgaaggtaggaccgtgagctttgttgatgtggatagaagttccctgatatacaccatccctaattgctccttctcacct

SEQ ID NO: 763457 - DNA, 120 bp, Artificial Sequence
  ENSG00000220948_11 (sequence is synthesized)
aagccctcttttttgcacctcatcaaatgggacaaataagttatatttaatgtctttatttgcattctaatgtcatcaaaactcatttatagtgtttctattaaatatggtggaaacact

SEQ ID NO: 763458 - DNA, 120 bp, Artificial Sequence
  ENSG00000221813_0 (sequence is synthesized)
tagctgggccatggagtctgatcaaatgatttttcctccccaggagagctaagccctgtgtctccaatatggagttggagaaccagacacgagtcaccaagttcattctggtgggattcc

SEQ ID NO: 763459 - DNA, 120 bp, Artificial Sequence
  ENSG00000221813_1 (sequence is synthesized)
ctgggagcttgagtatgcgggcagccatgtttctgatattccttgtggcctatattctgacagtggctgaaaacgtgatcatcatcctattggtgctgcaaaatcggccactgcacaagc

SEQ ID NO: 763460 - DNA, 120 bp, Artificial Sequence
  ENSG00000221813_2 (sequence is synthesized)
ctatgtacttcttcctggccaacctgtccttcttggagacctggtacatctctgtgactgtgcccaagttactgtttagtttttggtctgtgaacaacagcatctctttcacactctgta

SEQ ID NO: 763461 - DNA, 120 bp, Artificial Sequence
  ENSG00000221813_3 (sequence is synthesized)
tgatacaactgtacttcttcattgctctcatgtgcacagaatgtgtgcttctggccgccatggcctatgaccggtatgtggccatctgtcgcccactccactacccaaccataatgagcc

SEQ ID NO: 763462 - DNA, 120 bp, Artificial Sequence
  ENSG00000221813_4 (sequence is synthesized)
ggtcccaatgtcatcaaccacttcttctgtgacatctctccagtacttaatctctcctgcacagacatgtccataactgagttggtagactttatcctggcactggtcatcttcctattc

SEQ ID NO: 763463 - DNA, 120 bp, Artificial Sequence
  ENSG00000221813_5 (sequence is synthesized)
ccactctttattactgtcctgtcctacggatgcattctggccaccatattatgcatgcccacaggaaagcagaaagcgttctccacttgtgcctcccatcttgtggtggtcaccattttc

SEQ ID NO: 763464 - DNA, 120 bp, Artificial Sequence
  ENSG00000221813_6 (sequence is synthesized)
tattcagccattattttcatgtatgctcgacctcgagttatccatgccttcaacatgaacaaaattatttccatcttctatgccattgtcactccttctctcaaccctttcatttattgc

SEQ ID NO: 763465 - DNA, 120 bp, Artificial Sequence
  ENSG00000221813_7 (sequence is synthesized)
ctaagaaaccgagaggtcaaggaagctctgaagaaactggcatattgccaggccagcagatctgactagtcaattacagctgattagaaagaaaggtctgagtgggtgcctgtatgtctt

SEQ ID NO: 763466 - DNA, 120 bp, Artificial Sequence
  ENSG00000221813_8 (sequence is synthesized)
aaaggtcttcacagctcagtgtgcctaaaatcactgccatgttcaccaggaaggtgatgggcaccctagtcccagggtgctggacgaagcagcctcgtgccacatcagatgcagatgtgg

SEQ ID NO: 763467 - DNA, 120 bp, Artificial Sequence
  ENSG00000221813_9 (sequence is synthesized)
tcctagtgcctagggctctcctgtcatcttatcctggctttcagcttgaaagcagtggggcaatctgtacccagtcactctttctaggtttagaaagtgggttcctcacatctattcaat

SEQ ID NO: 763468 - DNA, 120 bp, Artificial Sequence
  ENSG00000221813_10 (sequence is synthesized)
acctgaatctttttcttctgcatcttcctattttagaattggtgaaggctttgttttcacatttcatcctatcagaggctgctgtgccaaggagagctaagccctgtgtctccaatatgg

SEQ ID NO: 763469 - DNA, 120 bp, Artificial Sequence
  ENSG00000221813_11 (sequence is synthesized)
atctgtgcatatggtcagtgctctaaggccatacaccttctagagagctagagaaaacagttctcaatggttgtgaccccaaatggggtttctaagactgtgagtaaatttataactgag

SEQ ID NO: 763470 - DNA, 120 bp, Artificial Sequence
  ENSG00000221813_12 (sequence is synthesized)
ttaagtaggaagagagatggtgatgggtgagttagctgtttttggatctgccatacactaatagctctggggccaacaaaataggtggtagcttcctgatttcccatctttctaagacag

SEQ ID NO: 763471 - DNA, 120 bp, Artificial Sequence
  ENSG00000221813_13 (sequence is synthesized)
aggtagcaactccctcaacagtctcattcttgatgttctgggagtgaattttggtggcagagactgcttcctgagtttttgcaacactttttgcaagcacttactaacctgtattaaatc

SEQ ID NO: 763472 - DNA, 120 bp, Artificial Sequence
  ENSG00000221813_14 (sequence is synthesized)
cctttctgcttaaactagttagagtgctttcttttatctgtaagtgaattgtaccttacacaattgtgttttgtcttctgatataactcacacagttgccttttattgaattttatattt

SEQ ID NO: 763473 - DNA, 120 bp, Artificial Sequence
  ENSG00000221813_15 (sequence is synthesized)
cccttctaggtgccacaatgtatcctttagtggatgaacataaaatagatgataaataaatatcatcaaatatatgaattgccaaacaataattgccctcattacttctcttttcttttg

SEQ ID NO: 763474 - DNA, 120 bp, Artificial Sequence
  ENSG00000221813_16 (sequence is synthesized)
atcttgatatcctcttgttcccgccccgcaccccccttcccgccctctcttttatcttctcttggttttccactttctccacactcaactcagagataagtaacaggtttcaggaattga

SEQ ID NO: 763475 - DNA, 120 bp, Artificial Sequence
  ENSG00000221813_17 (sequence is synthesized)
cagagattttcattccatgccatagtgattctcaactttccttacctatatatctaacaccctctacacacacgctagaacctcattgatcaaatgtgctttacacccatagaaggtaca

SEQ ID NO: 763476 - DNA, 120 bp, Artificial Sequence
  ENSG00000221813_18 (sequence is synthesized)
tagatatgcttgctcttggttcatagttttgccattggcaaagggagatatatttttaagctgtattcaacatagtgggccaacatcagtgggaatttaattcttttattgtaacagttt

SEQ ID NO: 763477 - DNA, 120 bp, Artificial Sequence
  ENSG00000221813_19 (sequence is synthesized)
taaacaggagagtttcttgcattaataacatcttttagctaagaacaaaccacactttcaagaatgctttctctttcttcttaattaagaaacgtgaggcagaattatttgttccatttt

SEQ ID NO: 763478 - DNA, 120 bp, Artificial Sequence
  ENSG00000221813_20 (sequence is synthesized)
tgaatgggctctccctagagagaaaacatacttctttagaagccaagtatgaaagctagttgtaaaggaatatagttggaattatgaattactatacctgcagaacagtaataaaataaa

SEQ ID NO: 763479 - DNA, 120 bp, Artificial Sequence
  ENSG00000221813_21 (sequence is synthesized)
aatgaaaacatgtgaattataggtcccagaggaaaaaagaaacaaaaataaaatgcaagcacaacttgctttagggaataaatgtgcaaaagagaacaatgcttaaaatggaaaggattt

SEQ ID NO: 763480 - DNA, 120 bp, Artificial Sequence
  ENSG00000221813_22 (sequence is synthesized)
aatgtttgcttctggaatgtagtttggtcccttgatgcaacaagtaagttgtgatgaatatatttctatttaaaatctagacacacaaaaaagagattattttctgaaaacttcaaatga

SEQ ID NO: 763481 - DNA, 120 bp, Artificial Sequence
  ENSG00000221813_23 (sequence is synthesized)
atcaaaatataattgcatagtcatatagggatattaaatgtgtgcattaagaaaggaaaagacatgttcagtagggattaggaaatgaaagataaaaaaactctggcaataacttgaatt

SEQ ID NO: 763482 - DNA, 120 bp, Artificial Sequence
  ENSG00000221813_24 (sequence is synthesized)
ttagccctggatatatattcaccatgtgaccttggccaaaccatctatacttttggaaacactgagtctttatgtgtaaaacaggagtaataatagttgcttggtgtttcttacgcaatg

SEQ ID NO: 763483 - DNA, 120 bp, Artificial Sequence
  ENSG00000221813_25 (sequence is synthesized)
gttatgaggatcaactaccatgatggaaaagacattgattgttaaatatcttgggcagtgcatgatctaagcaagctgccactagattagggtttgcatgggaaaactgtttgggaaggc

SEQ ID NO: 763484 - DNA, 120 bp, Artificial Sequence
  ENSG00000221813_26 (sequence is synthesized)
tatgctctctggacctgtctaaaacaattccacacctagttgactccacatactatagttatagttaacctgggaggctacaactatcagaggcagtttatttctttattatttctcatg

SEQ ID NO: 763485 - DNA, 120 bp, Artificial Sequence
  ENSG00000221813_27 (sequence is synthesized)
aatatcttggaaagggagaatgtagaagtagggtttcttggggaattctattaaatttttttttcaaataacagatggaacattgagctccttcccctttgtggaaggaatacctaagtg

SEQ ID NO: 763486 - DNA, 120 bp, Artificial Sequence
  ENSG00000221813_28 (sequence is synthesized)
cacaggctcagcaaagtaaggacacagaccaatgtagaaatctgcctcaacagagaaaataatgtatagtggattactggttaaattcacatagaaacaagctatttctaaggtgacaca

SEQ ID NO: 763487 - DNA, 120 bp, Artificial Sequence
  ENSG00000221813_29 (sequence is synthesized)
caaagcaagccggaagtttcagggcatttggtgatcttgttggggtaaccatcataaaaggctggtagtcagtttcagtagtttatccagagaacatgccctgaagatttgattatcacc

SEQ ID NO: 763488 - DNA, 120 bp, Artificial Sequence
  ENSG00000221813_30 (sequence is synthesized)
ctgaagatttgattatcaccatccaaactcataaggaaccccacaaaataaaatataaatatatattaattacacatgcagtatatattttaaatcactatatttattcattcatttaac

SEQ ID NO: 763489 - DNA, 120 bp, Artificial Sequence
  ENSG00000221813_31 (sequence is synthesized)
attaaagatctattatgtacgtgtagggatacaatagcaaaatattaaaacttgttacctttgtgagcagaaacagatagcagataatacctttgtgtgtgtgtgtgtgtgtgtgtatac

SEQ ID NO: 763490 - DNA, 120 bp, Artificial Sequence
  ENSG00000221813_32 (sequence is synthesized)
aacatacatacatattgtaatgggttgaatggtggctcccaaaaatatattttcacactttcaacctggaacttgtgattgggaacttatttgaaaaaaaaagagtctttgaaatataat

SEQ ID NO: 763491 - DNA, 120 bp, Artificial Sequence
  ENSG00000221813_33 (sequence is synthesized)
aaagttaaggacctcaaactgagaccattctggattatccgagtggactcaatgtccaatgacaagttccttatatgagagagaagagaaaacagagaaggtgatgtgaaggtagagata

SEQ ID NO: 763492 - DNA, 120 bp, Artificial Sequence
  ENSG00000221813_34 (sequence is synthesized)
gagattggagttctgcatccacaagccaagaaataccttgggccaccagaagctggaagatataagtaatgattctccccccctagagctgtcaaaggaagagagccctgatgacagctt

SEQ ID NO: 763493 - DNA, 120 bp, Artificial Sequence
  ENSG00000221813_35 (sequence is synthesized)
gattttggactcctggcctccagaactataagacaatatatttctgttgttttaagctaccaagtttgtggtaatttgttataaaaaccctgggaaataaatacacatcccaatttgggt

SEQ ID NO: 763494 - DNA, 120 bp, Artificial Sequence
  ENSG00000221813_36 (sequence is synthesized)
ggcaataagtgctatggatggggaggaagaaagcatgaaagtataataggaagtgctgctggagatgagaaattttaaataagatggtcacagaatcaccaagtgaggaagaaatgtttg

SEQ ID NO: 763495 - DNA, 120 bp, Artificial Sequence
  ENSG00000221813_37 (sequence is synthesized)
agcaaaaacctggagaagctgtgagagtaagatatatggctactttggcaaagaacattccaggtagagaaacagcaagggaagatatggagtcttgtgtagtatgtttgagggacattg

SEQ ID NO: 763496 - DNA, 120 bp, Artificial Sequence
  ENSG00000221813_38 (sequence is synthesized)
aagagactgagcagccagagcagtgagaaaagggtaagcaggtgatatggtctggctctgtttccctacccaaatctcatcttgattgtaatccccacatatcaaaaggggaacctggtg

SEQ ID NO: 763497 - DNA, 89 bp, Artificial Sequence
  ENSG00000221813_39 (sequence is synthesized)
cgatggttttaaaagtgtttggcagttcccctcccactttctctctctctctcttgccgccatgttagatgtgccttccttccccttcg

SEQ ID NO: 763498 - DNA, 83 bp, Artificial Sequence
  ENSG00000221813_40 (sequence is synthesized)
taaaagtgtttggcagttcccctcccactttctctctctctctcttgccgccatgttagatgtgccttccttccccttcgcct

SEQ ID NO: 763499 - DNA, 120 bp, Artificial Sequence
  ENSG00000221818_0 (sequence is synthesized)
agggccgtagtaacccattcatggggcccgcgcgcggctgcagccgggctccgtggcgctcgcagccaccgcctcctctcggctccaggtcttccccttctttttacaactgatcctgtt

SEQ ID NO: 763500 - DNA, 120 bp, Artificial Sequence
  ENSG00000221818_1 (sequence is synthesized)
ggggattttttttttttctaaattggaacggtggggaggagcagggaggggggacctggaggaaggggagagattaggcagccatcaatttcctccagtttctcccagaacaggtgatgc

SEQ ID NO: 763501 - DNA, 120 bp, Artificial Sequence
  ENSG00000221818_2 (sequence is synthesized)
ttctaaattgtgatcactttcaggaggcagcactgcagctggaaggatgcgagcgacctagggtggagtggctgaggcggcagatctgaacttgcggaggataagaacccaaactttgac

SEQ ID NO: 763502 - DNA, 120 bp, Artificial Sequence
  ENSG00000221818_3 (sequence is synthesized)
tacatcagtccgcacctcgccagtgaagcaaaggacgggttatcttttttttttttctaagactcaaacttgggcacttgatcccttttcttggattgctttggaggagacgatttgctg

SEQ ID NO: 763503 - DNA, 120 bp, Artificial Sequence
  ENSG00000221818_4 (sequence is synthesized)
gcaacgttgggaacagtcaggactgtgttgtaactcttacttttaaagcgacagtagaggatcagactttttaaatgtttggaattcaagatactttaggaagaggaccaactctgaaag

SEQ ID NO: 763504 - DNA, 120 bp, Artificial Sequence
  ENSG00000221818_5 (sequence is synthesized)
agaaatcgctgggcgcggagatggattcggtcaggtcctgggtccggaatgtcggagtggtggacgctaatgtcgccgcgcagagcggggtcgccctgtcccgggcccactttgagaaac

SEQ ID NO: 763505 - DNA, 120 bp, Artificial Sequence
  ENSG00000221818_6 (sequence is synthesized)
agcctccttccaacttgaggaaatccaacttctttcacttcgtcctggcgctctatgacaggcagggccagccggtggagatcgagcggacggccttcgtggactttgtggagaatgaca

SEQ ID NO: 763506 - DNA, 120 bp, Artificial Sequence
  ENSG00000221818_7 (sequence is synthesized)
aagaacaaggcaacgagaagaccaacaacggcactcactacaagttacagctcctctacagcaacggtgtccgcacggaacaggacctctatgtcaggctcatcgactcggtcaccaagc

SEQ ID NO: 763507 - DNA, 120 bp, Artificial Sequence
  ENSG00000221818_8 (sequence is synthesized)
agcccatcgcttacgagggacagaataagaatccggaaatgtgccgagttctcctgacgcacgaagtgatgtgtagtcgatgctgcgaaaagaaaagctgtggaaaccgaaatgagactc

SEQ ID NO: 763508 - DNA, 120 bp, Artificial Sequence
  ENSG00000221818_9 (sequence is synthesized)
catcggacccagtcataattgacagattctttttaaaatttttcctcaagtgcaatcagaattgtttgaaaacagcaggaaacccaagggacatgagacggtttcaggttgtgttgtcaa

SEQ ID NO: 763509 - DNA, 120 bp, Artificial Sequence
  ENSG00000221818_10 (sequence is synthesized)
caacggtgaatgtggatggacacgtcctggctgtttctgacaacatgtttgttcataacaactccaagcatggacggagagcaagaagactcgatccatcggaagctaccccctgcatca

SEQ ID NO: 763510 - DNA, 120 bp, Artificial Sequence
  ENSG00000221818_11 (sequence is synthesized)
aagccattagcccgagtgaaggctggaccacaggaggagccatggtcatcatcatcggggacaacttctttgatggtctccaagtggtgtttgggactatgcttgtatggagcgagctaa

SEQ ID NO: 763511 - DNA, 120 bp, Artificial Sequence
  ENSG00000221818_12 (sequence is synthesized)
taacccctcatgccatcagagtacagactcctccccggcacatcccaggcgtggtagaggtgacattatcttataaatctaaacagttctgcaaaggagccccaggaaggttcatttaca

SEQ ID NO: 763512 - DNA, 120 bp, Artificial Sequence
  ENSG00000221818_13 (sequence is synthesized)
cagcattaaatgaacccaccatagactatggcttccagagactgcagaaggtcatccctaggcatcctggagatcctgagagattagctaaggagatgctgttgaaaagagctgcagatc

SEQ ID NO: 763513 - DNA, 120 bp, Artificial Sequence
  ENSG00000221818_14 (sequence is synthesized)
tagtggaagctctttatggcacaccacacaataaccaggacatcattttgaagcgagccgcagacattgctgaagctctctacagcgtccccaggaatcccagccagcttccagccctct

SEQ ID NO: 763514 - DNA, 120 bp, Artificial Sequence
  ENSG00000221818_15 (sequence is synthesized)
ctagctccccagcgcacagtggcatgatgggaatcaactcctatggcagccagcttggggtcagcatctcagagtcaacacaaggaaataatcaagggtacatccgcaacacaagcagca

SEQ ID NO: 763515 - DNA, 120 bp, Artificial Sequence
  ENSG00000221818_16 (sequence is synthesized)
tctctccgcggggatactcttccagctccacgcctcaacagtctaattacagtacctccagcaacagtatgaatggctacagcaatgtccccatggccaacttgggtgttccaggttcac

SEQ ID NO: 763516 - DNA, 120 bp, Artificial Sequence
  ENSG00000221818_17 (sequence is synthesized)
caggatttctaaatggctcacccaccggctctccttatggaatcatgtcatcaagtcccaccgttgggtcttccagcacatcctccatcctcccattttcctcttcagtttttcctgctg

SEQ ID NO: 763517 - DNA, 120 bp, Artificial Sequence
  ENSG00000221818_18 (sequence is synthesized)
tcaaacagaagagtgcctttgcccctgtcatcaggccccaaggctccccttcacctgcctgctccagcggcaatggaaatggattcagagccatgaccggacttgttgtacccccgatgt

SEQ ID NO: 763518 - DNA, 120 bp, Artificial Sequence
  ENSG00000221818_19 (sequence is synthesized)
aaagaagaactgctttcttatagcacaaaactacttactctgatggaccaataatgaagaaagcactaggagctcttttgggggtgtagtggtgcccccacatgaacatgatggacaccc

SEQ ID NO: 763519 - DNA, 120 bp, Artificial Sequence
  ENSG00000221818_20 (sequence is synthesized)
ttgggtctgcaaggagccagcatcttacttggtcccacgtcctcctatagctctgatggtggctacacaaactgaccctcttgggacaaggacaaaagatgtcattgacgtagtcagtgc

SEQ ID NO: 763520 - DNA, 120 bp, Artificial Sequence
  ENSG00000221818_21 (sequence is synthesized)
cagaaatgcaattctttgttatgaacattatgaaaaccaccttcctatgtttgtaaaatatttaagaaaaaattggcaaacaattaatgcttaatattttggatactatttgtttttctt

SEQ ID NO: 763521 - DNA, 120 bp, Artificial Sequence
  ENSG00000221818_22 (sequence is synthesized)
tgtaggaaaaaaaagttgaaagtttctattttctatgaagcctttcagataccaatttagtttatgcagaaaaaaattgaacaaaacagggtaccagcacggaagactttcttaaaacgc

SEQ ID NO: 763522 - DNA, 120 bp, Artificial Sequence
  ENSG00000221818_23 (sequence is synthesized)
aacctgaattgaatgatgaaatgttgtatgtgtgtttgcttatagcttaatctctttaaaaaatgaacaaaaaaagggaaaaattttaaaatgttttacaattatttaaataaataaatg

SEQ ID NO: 763523 - DNA, 120 bp, Artificial Sequence
  ENSG00000221818_24 (sequence is synthesized)
tgtaacttattgtaagtagaggtagaaattaagacctttttttggaagagagagggatttctcttcctgatgtaaaatgaaaatgatgcaaacatgtagtaacaagttttaaaggtgtgt

SEQ ID NO: 763524 - DNA, 120 bp, Artificial Sequence
  ENSG00000221818_25 (sequence is synthesized)
gattattactgcagttacttactagattcttatcccctgtcctgcaccccctccttttccatcactttattgacccaagggcaagaacatgtagattcccacagaacaccctaatgcaga

SEQ ID NO: 763525 - DNA, 120 bp, Artificial Sequence
  ENSG00000221818_26 (sequence is synthesized)
aacagacactctagcacatgcacaaatactccaacccatcaattcattcccagctccgtctgatttctaaatagtccacactcttgtgaatactttttaaaattcctattattagctttc

SEQ ID NO: 763526 - DNA, 120 bp, Artificial Sequence
  ENSG00000221818_27 (sequence is synthesized)
aacgttctcccctgagcagtccagagaattcccatgtttgagtctgtctcaggctttcagcatcccaaggaaagaagcacctcaccttctagcagagccaaaaccacagactttcttaac

SEQ ID NO: 763527 - DNA, 120 bp, Artificial Sequence
  ENSG00000221818_28 (sequence is synthesized)
caagggaccccttgggaattcctcctcaccagaaccccaccactccctccgctttgggtgcctggttcagtacagaggtacacagccccatagaacttcagcaacacggtttggagaaga

SEQ ID NO: 763528 - DNA, 120 bp, Artificial Sequence
  ENSG00000221818_29 (sequence is synthesized)
taactctgtttgatggactctttagagtcagtcttagaacatccaagtcctttcctctccctgtcaatttccccttttatggcattaaactctcttgaaaaacatagctatgccactcga

SEQ ID NO: 763529 - DNA, 120 bp, Artificial Sequence
  ENSG00000221818_30 (sequence is synthesized)
cagtttctagtcaagaatgagacggaatgtgggagagggatattaaaagccctaatcccctcttctgatgttcgaagaaaggcaagaccagattcttgggagatccagagattaggggca

SEQ ID NO: 763530 - DNA, 120 bp, Artificial Sequence
  ENSG00000221818_31 (sequence is synthesized)
tctgcgttctatgcagcacagttacccagccctttgatgggctcttcatcgttttgtgactagctcttagaggggaagaaccttgccttagctgctaacagtggttgattcttgaaagct

SEQ ID NO: 763531 - DNA, 120 bp, Artificial Sequence
  ENSG00000221818_32 (sequence is synthesized)
tatgtaatcctagagacatatccaggcatattgggattgccaataaagatgtcacttgtttccacgttggggttctccttattgactcatgagcaccacaatagagtctatacacagact

SEQ ID NO: 763532 - DNA, 120 bp, Artificial Sequence
  ENSG00000221818_33 (sequence is synthesized)
tagtttggggttcttggttgggatttcagcattagaaatagatgcagcactcatggaaaaacatcatgagtgcatctgagccaattttagatgatttcattaattctgcataccttctct

SEQ ID NO: 763533 - DNA, 120 bp, Artificial Sequence
  ENSG00000221818_34 (sequence is synthesized)
ttgacccattgatgcaggcccacatctatccagccccaactgtcttatttgcctttaacccattctggaattacccagtatgacttatattatttctatgcacatgagaatccaaggttt

SEQ ID NO: 763534 - DNA, 120 bp, Artificial Sequence
  ENSG00000221818_35 (sequence is synthesized)
tagaaacctggcatgcttataactactgctgacagtccctcatagtcagggcttaaagcgccaaaatacacggaaacataagagaaaaagtcccccagtgagaaacctgattgatggaag

SEQ ID NO: 763535 - DNA, 120 bp, Artificial Sequence
  ENSG00000221818_36 (sequence is synthesized)
gggaagaatgtgtggaatatgaatgttaccttccaaaagtgaaggcagagcaaaattaagcatgtttagccctggatttgagccaatccaacataaggaaattttgttttttttaagtag

SEQ ID NO: 763536 - DNA, 120 bp, Artificial Sequence
  ENSG00000221818_37 (sequence is synthesized)
cattgcttttagaacctgtgaattttccttttgcatgaagatgagtgcagtactgtcttcaaaatgattgtagaatttcttggtagctttacaccgaaaaatgcgtgtaactaaatacca

SEQ ID NO: 763537 - DNA, 120 bp, Artificial Sequence
  ENSG00000221818_38 (sequence is synthesized)
gacatcttgaccattcagctagaaccctggcagcaacagagctatttaattgtacaaatgtgtgtaaggattatttttagtgtactaataaattaaaaacaaagctaccctgtcctcgtt

SEQ ID NO: 763538 - DNA, 120 bp, Artificial Sequence
  ENSG00000221818_39 (sequence is synthesized)
agtcattgctattcaatcattccagtcccaagttatttttgtgccacttggaatatgagtatttctattggtaactacaaactctatcctgtgtttgtaagaggagctgtgtaagatttt

SEQ ID NO: 763539 - DNA, 120 bp, Artificial Sequence
  ENSG00000221818_40 (sequence is synthesized)
tttcatttaaagggacaatttacttcattatttatctttcttttgttatagcgttgtaattcttctcagtttttctttgcacatttcaatatgcatggtttaaaaaccattaacttctct

SEQ ID NO: 763540 - DNA, 120 bp, Artificial Sequence
  ENSG00000221818_41 (sequence is synthesized)
accttttgtacagtaaggtttcattttcacactgtatagtttcattttattgttttgctttgtcagttatatacagtataaagttgctatgcacagagctttttgtaaagacagcttttt

SEQ ID NO: 763541 - DNA, 120 bp, Artificial Sequence
  ENSG00000221818_42 (sequence is synthesized)
agcttttttgtttactgtttttaatggtcttacttaaagaatatcttgtttgtaaaatgaatatgtctacttcagttttaaactttaaattatcctaacaaaaaaataaaatttttgtac

SEQ ID NO: 763542 - DNA, 120 bp, Artificial Sequence
  ENSG00000221818_43 (sequence is synthesized)
aagttggtttcatgttatttcaagtcactaagctcatccaacaaaggcctcctcatgctggcctttcttggaagaagccagaatcttcctttggaacacgtgtctctaaatctgtggtgg

SEQ ID NO: 763543 - DNA, 120 bp, Artificial Sequence
  ENSG00000221818_44 (sequence is synthesized)
agtcttttccaggtgcaccagcttcagcctaataagtagtatgtgtggtgcaggatataagcgatggcacctctcctttcgggcagggtatggtctcaatcagttttctagaagaagcaa

SEQ ID NO: 763544 - DNA, 120 bp, Artificial Sequence
  ENSG00000221818_45 (sequence is synthesized)
tgctgtgttcagggagattcctttctaccatggaggattgcattctgtgttctatgttatattcagaatgggaaagattctttgggacaagacactaattcactgaaatgtgatttaggc

SEQ ID NO: 763545 - DNA, 120 bp, Artificial Sequence
  ENSG00000221818_46 (sequence is synthesized)
atcctcagctgtctgttttttgtgattggaaacagaacttacaaaccaatgaagaaataccaaattaacttccagaaatcatgtaatttttaagaaaccccatattcccatccctaattt

SEQ ID NO: 763546 - DNA, 120 bp, Artificial Sequence
  ENSG00000221818_47 (sequence is synthesized)
ttttctctttcgttaaaaaacggaataattccctattgcttctttctttgggttttcacatttctagccaggtcctgaaatggattggagagaccacagtctccaaagttgttattccaa

SEQ ID NO: 763547 - DNA, 120 bp, Artificial Sequence
  ENSG00000221818_48 (sequence is synthesized)
tattccaacgaattctcagttgggagaatggaacctctggcattcttcccagaaagccagcttggtttcttcgtggaaagtatagcatagcctaggaactgaggaggctggaattctgat

SEQ ID NO: 763548 - DNA, 120 bp, Artificial Sequence
  ENSG00000221818_49 (sequence is synthesized)
cttgtcctagcttctgaccttggacaaagcactcagcatctttgttcttcaataatataatgatgggttaggaggtgcagtcacttctgtaggcttcaagaggctactgaaatatcaatg

SEQ ID NO: 763549 - DNA, 120 bp, Artificial Sequence
  ENSG00000221818_50 (sequence is synthesized)
gcagctttgcagtgttctctgagatgcttgaagaggatgatgggcaaatataaaatgtttgttggatgtgtatagtgtctttgccattttagaaggttccagtgagctgcgttttaggga

SEQ ID NO: 763550 - DNA, 120 bp, Artificial Sequence
  ENSG00000221818_51 (sequence is synthesized)
gctattggggttgctctggtcttttttgaaagtacagagaagcttaaatatatagagttgcaaggactctttggagtcagtcattttcctcatctagctgaaaaatctgaacgctgagcg

SEQ ID NO: 763551 - DNA, 120 bp, Artificial Sequence
  ENSG00000221818_52 (sequence is synthesized)
gtggcatgacttgcccgtggttgtgcagctggttgggcagagctggcattagaacacagctgtccttacttccaggctgggtgccgtaactcacgcctgtaatcccagcacttaggaaga

SEQ ID NO: 763552 - DNA, 120 bp, Artificial Sequence
  ENSG00000221818_53 (sequence is synthesized)
ctgtaatcccagcacttaggaagaccgaggtgggcagatcacttgaggtcgggggtttgcgaccagcctggtcaacatagtggaccccagactttactaaaaatacaaaaattagtcagg

SEQ ID NO: 763553 - DNA, 120 bp, Artificial Sequence
  ENSG00000221818_54 (sequence is synthesized)
gcacttcccaaagtccctcctgaacctggaactcagtccctgagctcgtggccctgcgtgcgcagtcctcgcgggataggcccgaatgctgcctttccaaatgacaagtcccttcacttt

SEQ ID NO: 763554 - DNA, 120 bp, Artificial Sequence
  ENSG00000221821_0 (sequence is synthesized)
gcattacacgccggtcaggattcgcgacccgacatggagcgtccccgcagtccccaatgctcggccccggcctctgcctcagcttcggttaccctggcgcagctcctgcagctggtccag

SEQ ID NO: 763555 - DNA, 120 bp, Artificial Sequence
  ENSG00000221821_1 (sequence is synthesized)
cagggccaggaactcccgggcctggagaaacgccacatcgcggcgatccacggcgaacccacagcgtcccggctgccgcggaggcccaagccctgggaggccgcggctttggctgagtcc

SEQ ID NO: 763556 - DNA, 120 bp, Artificial Sequence
  ENSG00000221821_2 (sequence is synthesized)
atggcatacagtgggcccctgaggttccaggtcctttgcggcggcgatctggagggcgtggctacaggacccgggatgccattcagttactcatcttttatgctttcgtcctgacctgtc

SEQ ID NO: 763557 - DNA, 120 bp, Artificial Sequence
  ENSG00000221821_3 (sequence is synthesized)
tcaactagacttgctcctgcaaccaccatgggggttttgcatttacatttgtggaccatgttacagttaagaaaaatcctgtttcagtccttatatgtaataaaatgttttatgatgtaa

SEQ ID NO: 763558 - DNA, 120 bp, Artificial Sequence
  ENSG00000221823_0 (sequence is synthesized)
gtgccttgaggttgcgggtcagcgcgagccgctgcagtgagtccgtcacggctccggcgcgagcgcgaggctgcagcccccgagtttcccggccgtcttcgccccctctccccctccttt

SEQ ID NO: 763559 - DNA, 120 bp, Artificial Sequence
  ENSG00000221823_1 (sequence is synthesized)
cttcttctctgcctctcctgcctctcgccgctgctcctcccgcgctctccggctctgaatctcgaccttaatttatttccccctaccctgcccgctccctcgcgtgcccaatcgcccggc

SEQ ID NO: 763560 - DNA, 80 bp, Artificial Sequence
  ENSG00000221823_2 (sequence is synthesized)
cgccccctccccgccggcgacccgagggccgcagctgggccgccgccgccgtttcctgcgagccagcctgagcgcaacac

SEQ ID NO: 763561 - DNA, 120 bp, Artificial Sequence
  ENSG00000221823_3 (sequence is synthesized)
ttctccgagccagcgagccagcgagccgccgacccgccgagcaaaatgggaaatgaggcaagttatcctttggaaatgtgctcacactttgatgcggatgaaattaaaaggctaggaaag

SEQ ID NO: 763562 - DNA, 120 bp, Artificial Sequence
  ENSG00000221823_4 (sequence is synthesized)
agatttaagaagcttgatttggacaattctggttctttgagtgtggaagagttcatgtctctgcctgagttacaacagaatcctttagtacagcgagtaatagatatattcgacacagat

SEQ ID NO: 763563 - DNA, 120 bp, Artificial Sequence
  ENSG00000221823_5 (sequence is synthesized)
gggaatggagaagtagactttaaagaattcattgagggcgtctctcagttcagtgtcaaaggagataaggagcagaaattgaggtttgctttccgtatctatgacatggataaagatggc

SEQ ID NO: 763564 - DNA, 120 bp, Artificial Sequence
  ENSG00000221823_6 (sequence is synthesized)
tatatttccaatggggaactcttccaggtattgaagatgatggtggggaacaatctgaaagatacacagttacagcaaattgtagacaaaaccataataaatgcagataaggatggagat

SEQ ID NO: 763565 - DNA, 120 bp, Artificial Sequence
  ENSG00000221823_7 (sequence is synthesized)
ggaagaatatcctttgaagaattctgtgctgttgtaggtggcctagatatccacaaaaagatggtggtagatgtgtgactcttatcagagagtaccacccaacacttttgctttcttctc

SEQ ID NO: 763566 - DNA, 120 bp, Artificial Sequence
  ENSG00000221823_8 (sequence is synthesized)
catctctgaagatctgctcaagacgtccagcaatgctctctgtgtatttaaatggaagtatttttctctgtgaagccacattttccaacatgagcctcatgaagccaactaagtgttatt

SEQ ID NO: 763567 - DNA, 120 bp, Artificial Sequence
  ENSG00000221823_9 (sequence is synthesized)
gaactgtaattctctcaataactcagtgtagcactttaaagtctgaaggacagcaacatgaaaagagcatatcaatgtggtggagaaagggaaggggttggctttttaatttatttttct

SEQ ID NO: 763568 - DNA, 120 bp, Artificial Sequence
  ENSG00000221823_10 (sequence is synthesized)
atatacatatgtaaatatttatatatagatatatgtagctttctatatatgtagtaggttggctttaatttaatatacttgattcagaaacaaaacaatagagtacaaaagtgccaagca

SEQ ID NO: 763569 - DNA, 120 bp, Artificial Sequence
  ENSG00000221823_11 (sequence is synthesized)
aaacaatagagtacaaaagtgccaagcagaacataaaacatccttacttttatttcacacagttttatatatagatagaagactgtacaatttgagccgggtgttaggccagctattttc

SEQ ID NO: 763570 - DNA, 120 bp, Artificial Sequence
  ENSG00000221823_12 (sequence is synthesized)
gagattgacaaagcatttgttaacgtcctattatttaccttaattacatttttgtaacaaaggagtctgtaactttatttatacttatgaatatatccagggactacttctcattgctga

SEQ ID NO: 763571 - DNA, 120 bp, Artificial Sequence
  ENSG00000221823_13 (sequence is synthesized)
gcagcttttaatacacctctgcttgaggagaaagtctagttcattgctactgccaagagctagttcttgtgttcatatagtaactgcacagggcttatagctgcttcattctgctacttt

SEQ ID NO: 763572 - DNA, 120 bp, Artificial Sequence
  ENSG00000221823_14 (sequence is synthesized)
gtaactaggagccattgcatttattaaatgtccctcagtaacgttaagtgctagttgtgattttatacataaaggccagaagctgtctgaggcaatcatgattgattgtatgtatcactt

SEQ ID NO: 763573 - DNA, 120 bp, Artificial Sequence
  ENSG00000221823_15 (sequence is synthesized)
actgaagaatacctgaagtgatcatgtaactacttataagggatatccatttgtttgattacatgggtaaataatttgtcattaaacttgtgtttgaatcatgaattcccttgtttcaaa

SEQ ID NO: 763574 - DNA, 120 bp, Artificial Sequence
  ENSG00000221823_16 (sequence is synthesized)
agacttgcagctaatctaaaaaactggtgatatttaatatgcatgtatgtatctaaacacccacatatatttgtggtttaagtgtgagaaatcttgctaatctatatgccacagaagagc

SEQ ID NO: 763575 - DNA, 120 bp, Artificial Sequence
  ENSG00000221823_17 (sequence is synthesized)
aaaattgtatccaaatttatgccacttaaatttctttaccacgagggatagagcatgcatactggtttttttttcttgatttgcccatataattggtaatggataacttaataaatttgt

SEQ ID NO: 763576 - DNA, 120 bp, Artificial Sequence
  ENSG00000221823_18 (sequence is synthesized)
gtgatataaaagtagtgtatcatgttctactgtttgatcttatcccttcccatttctgcaaaggtactgttagctggaagaaaaacattttggttagctttgtatgacagtagtctttcc

SEQ ID NO: 763577 - DNA, 120 bp, Artificial Sequence
  ENSG00000221823_19 (sequence is synthesized)
ctttatagtttctctataaaaactggttttaaaatcagtggaaaagggcaggttgaatcaaggtgaatcaatctgaaattgagcacacctgcctgccatcgctgttccttcaactgagtg

SEQ ID NO: 763578 - DNA, 120 bp, Artificial Sequence
  ENSG00000221823_20 (sequence is synthesized)
ctgcacatcatgggctctgtctgtgagagaaaaatcccggtgcttggtgtccttgcatgacatggagttttgcatgtagatcaatttaaaatgtacctcttgtttacataatttgcataa

SEQ ID NO: 763579 - DNA, 120 bp, Artificial Sequence
  ENSG00000221823_21 (sequence is synthesized)
ttttaaaagataatgttgccaaactttggaaatgttaatgttcagactgaaaatctccactacatgtaactttcttcctctggatcagtggcatggcttataatcccagccagtggtttg

SEQ ID NO: 763580 - DNA, 120 bp, Artificial Sequence
  ENSG00000221823_22 (sequence is synthesized)
aactgttccagtgtcaactgccatgtgctctgcttcaagggggaactagccttttgtgaattttttgtacataagtatttgttacaaatattttagcaaatgctttctatttctcttgct

SEQ ID NO: 763581 - DNA, 120 bp, Artificial Sequence
  ENSG00000221823_23 (sequence is synthesized)
ttagcaaatgctttctatttctcttgcttgtgcatatcttggctggcgttacagaaaaatagtgtaaacattatttccttaccggggaatgagggttttttctttttctttttttttttt

SEQ ID NO: 763582 - DNA, 120 bp, Artificial Sequence
  ENSG00000221823_24 (sequence is synthesized)
gtaagggaggggatggtttatgttgaatgtttagtttttcttctgcatgatacgtcatgttgtgggatctttagaaaacttcatactgtatgaataagaaaataaaatatttgaaacttg

SEQ ID NO: 763583 - DNA, 120 bp, Artificial Sequence
  ENSG00000221823_25 (sequence is synthesized)
ttggcatctcaggtgcctgggagccctttctcaaccacaccctggagtagggggctagcttgcatccctgcgttctcctcattacaaaaaagaattctgagaaggaaggtgatctattcc

SEQ ID NO: 763584 - DNA, 120 bp, Artificial Sequence
  ENSG00000221823_26 (sequence is synthesized)
agtcgttagtttcctctttgtaatcaagagttgtatacacagtagagaaagttcagagtgctattccgcgtatatcagatactccatcatgcgattcagttattaggctttctctaaaag

SEQ ID NO: 763585 - DNA, 120 bp, Artificial Sequence
  ENSG00000221826_0 (sequence is synthesized)
agaaggaggaaggacagcacagctgagagccatgctcaggaagtttctggatcctaggctcagctccacagaggagaacacgcaggcagcagagaccatggggcccctctcagcccctcc

SEQ ID NO: 763586 - DNA, 120 bp, Artificial Sequence
  ENSG00000221826_1 (sequence is synthesized)
ctgcacacagcgcatcacctggaaggggctcctgctcacagcattacttttaaacttctggaacttgcctaccactgcccaagtcacgattgaagccgagccaaccaaagtttccaaggg

SEQ ID NO: 763587 - DNA, 120 bp, Artificial Sequence
  ENSG00000221826_2 (sequence is synthesized)
gaaggacgttcttctacttgtccacaatttgccccagaatcttgctggctacatctggtacaaagggcaaatgaaggacctctaccattacattacatcatacgtagtagatggtcaaat

SEQ ID NO: 763588 - DNA, 120 bp, Artificial Sequence
  ENSG00000221826_3 (sequence is synthesized)
aattatatatgggcctgcatacagtggacgagaaacagtatattccaatgcatccctgctgatccagaatgtcacccgggaggacgcaggatcctacaccttacacatcgtaaagcgagg

SEQ ID NO: 763589 - DNA, 120 bp, Artificial Sequence
  ENSG00000221826_4 (sequence is synthesized)
tgatgggactagaggagaaactggacatttcaccttcaccttatacctggagactcccaagccctccatctccagcagcaacttataccccagggaggacatggaggctgtgagcttaac

SEQ ID NO: 763590 - DNA, 120 bp, Artificial Sequence
  ENSG00000221826_5 (sequence is synthesized)
ctgtgatcctgagactccggacgcaagctacctgtggtggatgaatggtcagagcctccctatgactcacagcttgcagttgtccaaaaacaaaaggaccctctttctatttggtgtcac

SEQ ID NO: 763591 - DNA, 120 bp, Artificial Sequence
  ENSG00000221826_6 (sequence is synthesized)
aaagtacactgcaggaccctatgaatgtgaaatacggaacccagtgagtgccagccgcagtgacccagtcaccctgaatctcctcccgaagctgcccaagccctacatcaccatcaacaa

SEQ ID NO: 763592 - DNA, 120 bp, Artificial Sequence
  ENSG00000221826_7 (sequence is synthesized)
tggtggctaaatggtcagagcctcccggtcagtcccagggtaaagcgacccattgaaaacaggatcctcattctacccagtgtcacgagaaatgaaacaggaccctatcaatgtgaaata

SEQ ID NO: 763593 - DNA, 120 bp, Artificial Sequence
  ENSG00000221826_8 (sequence is synthesized)
caggaccgatatggtggcatccgcagttacccagtcaccctgaatgtcctctatggtccagacctccccagaatttacccttcattcacctattaccattcaggagaaaacctctacttg

SEQ ID NO: 763594 - DNA, 120 bp, Artificial Sequence
  ENSG00000221826_9 (sequence is synthesized)
tcctgcttcgcggactctaacccaccagcagaatattcttggacaattaatgggaagtttcagctatcaggacaaaagctctttatcccccagattactacaaagcatagcgggctctat

SEQ ID NO: 763595 - DNA, 120 bp, Artificial Sequence
  ENSG00000221826_10 (sequence is synthesized)
gcttgctctgttcgtaactcagccactggcatggaaagctccaaatccatgacagtcaaagtctctgctccttcaggaacaggacatcttcctggccttaatccattatagcagccgtga

SEQ ID NO: 763596 - DNA, 120 bp, Artificial Sequence
  ENSG00000221826_11 (sequence is synthesized)
tgtcatttctgtatttcaggaagactggcagacagttgctttcattcttcctcaaagtatttaccatcagctacagtccaaaattgctttttgttcaaggagatttatgaaaagactctg

SEQ ID NO: 763597 - DNA, 120 bp, Artificial Sequence
  ENSG00000221826_12 (sequence is synthesized)
acaaggactcttgaatacaagttcctgataacttcaagatcataccactggactaagaactttcaaaattttaatgaacaggctgatacttcatgaaattcaagacaaagaaaaaaaccc

SEQ ID NO: 763598 - DNA, 120 bp, Artificial Sequence
  ENSG00000221826_13 (sequence is synthesized)
aattttattggactaaatagtcaaaacaatgttttcataattttctatttgaaaatgtgctgattctttgaatgttttattctccagatttatgcactttttttcttcagcaattggtaa

SEQ ID NO: 763599 - DNA, 120 bp, Artificial Sequence
  ENSG00000221826_14 (sequence is synthesized)
agtatacttttgtaaacaaaaattgaaacatttgcttttgctccctaagtgccccagaattgggaaactattcaggagtattcatatgtttatggtaataaagttatctgcacaagttca

SEQ ID NO: 763600 - DNA, 120 bp, Artificial Sequence
  ENSG00000221826_15 (sequence is synthesized)
agcagggaaaggtcagaaagggaagacccagggtctctgaaggaggcgtcaggaaagaagtctaaggatgccctgatgtgagcaggacctgagggcagtgtggagggggccgtgcggacc

SEQ ID NO: 763601 - DNA, 120 bp, Artificial Sequence
  ENSG00000221826_16 (sequence is synthesized)
ctgaaaccgcacacccacagaacaacgccctattcccctgatcccagctcctggaaactactattctacactctgattcactctggaatccactgatatcaggtcattccttggactctg

SEQ ID NO: 763602 - DNA, 120 bp, Artificial Sequence
  ENSG00000221826_17 (sequence is synthesized)
ctctatctttagaggtcactggctcaagtcagccactatgagacacctgggaaaactgccccaccttgtggctccactgcctgatgactgaactgaactccggacttgactctgttctcc

SEQ ID NO: 763603 - DNA, 120 bp, Artificial Sequence
  ENSG00000221826_18 (sequence is synthesized)
ccagtatccaaagggtttaaagacaattggaagttccatcacccatctctaggatgtccttggcaagggaagctgcagagaaaacatacctcgggcggcaaagtaagactgaaactaaga

SEQ ID NO: 763604 - DNA, 120 bp, Artificial Sequence
  ENSG00000221826_19 (sequence is synthesized)
atcccaaatacacgtggccagaggccaggcctctcagtccctctcaggtccaagtacagagacctttacccctggacatcaaacctggccatgactttctgccccaggcaaaccagagta

SEQ ID NO: 763605 - DNA, 120 bp, Artificial Sequence
  ENSG00000221826_20 (sequence is synthesized)
ggcctaggcttgatcaacaataggagaaaagaggctgctcctgtcatgggagactcagcgtccacagcttgtgatgggcaaaacaggtgactgtctcaggctccagatcagtgaacacag

SEQ ID NO: 763606 - DNA, 120 bp, Artificial Sequence
  ENSG00000221826_21 (sequence is synthesized)
cagggatttggctgggacttcagtgttgcaacttggctcacagggtcactgtggcccttccacagaccaggattttcccttccctctgacaataccacctatgacattattctctttgct

SEQ ID NO: 763607 - DNA, 120 bp, Artificial Sequence
  ENSG00000221826_22 (sequence is synthesized)
ccacatggcctggatgcccccaccatttcctcctcatacacctattaccatacaggggaagcccccaagctctcctgcctcacagactctcacccactggcagagcattcttggctgatt

SEQ ID NO: 763608 - DNA, 120 bp, Artificial Sequence
  ENSG00000221826_23 (sequence is synthesized)
gatgggaagttccagcaatcagcacaagtgttctttatcccccaaatcactaaaacatatagaggggtctatgtctgtttcatccataactcagccactgctggaacaaatctcataatc

SEQ ID NO: 763609 - DNA, 120 bp, Artificial Sequence
  ENSG00000221826_24 (sequence is synthesized)
aagaggatcatagtccctggtaagtggatccctggagcattggcactatgttttccagtgaagtctatctagctatcagggaagagccacctgccctctgcaaagggagagggaaaatca

SEQ ID NO: 763610 - DNA, 120 bp, Artificial Sequence
  ENSG00000221826_25 (sequence is synthesized)
aaaacccaggacagggaatatgtttctgctccaaaaccaccagcttttgcctgtccccttcactctttctagatcattctttagactatacactaacaatgaacaatctgaaaggaaatt

SEQ ID NO: 763611 - DNA, 120 bp, Artificial Sequence
  ENSG00000221829_0 (sequence is synthesized)
aggaggacctgggggtgtggcagcgaggaagggccgagccacggactgtggggccgaaactcgctcccgcccaccctttctcgaggctgtggcctccgcgagagccgagcgggccgcacc

SEQ ID NO: 763612 - DNA, 120 bp, Artificial Sequence
  ENSG00000221829_1 (sequence is synthesized)
gccggccgtgcgactgccccagtcagacacgaccccggcttctagcccgcctaagcctgtttggggttgctgactcgtttcctccccgagtttcccgcgggaactaactcttcaagagga

SEQ ID NO: 763613 - DNA, 120 bp, Artificial Sequence
  ENSG00000221829_2 (sequence is synthesized)
ccaaccgcagcccagagcttcgcagacccggccaaccagaggcgaggttgagagcccggcgggccgcggggagagagcgtcccatctgtcctggaaagcctgggcgggtggattgggacc

SEQ ID NO: 763614 - DNA, 120 bp, Artificial Sequence
  ENSG00000221829_3 (sequence is synthesized)
ccgagagaagcaggggagctcggcggggtgcagaagtgcccaggcccctccccgctggggttgggagcttgggcaggccagcttcacccttcctaagtccgcttctggtctccgggccca

SEQ ID NO: 763615 - DNA, 120 bp, Artificial Sequence
  ENSG00000221829_4 (sequence is synthesized)
gcctcggccaccatgtcccgccagaccacctctgtgggctccagctgcctggacctgtggagggaaaagaatgaccggctcgttcgacaggccaaggtggctcagaactccggtctgact

SEQ ID NO: 763616 - DNA, 120 bp, Artificial Sequence
  ENSG00000221829_5 (sequence is synthesized)
ctgaggcgacagcagttggctcaggatgcactggaagggctcagagggctcctccatagtctgcaagggctccctgcagctgttcctgttcttcccttggagctgactgtcacctgcaac

SEQ ID NO: 763617 - DNA, 120 bp, Artificial Sequence
  ENSG00000221829_6 (sequence is synthesized)
ttcattatcctgagggcaagcttggcccagggtttcacagaggatcaggcccaggatatccagcggagcctagagagagtgctggagacacaggagcagcaggggcccaggttggaacag

SEQ ID NO: 763618 - DNA, 120 bp, Artificial Sequence
  ENSG00000221829_7 (sequence is synthesized)
gggctcagggagctgtgggactctgtccttcgtgcttcctgccttctgccggagctgctgtctgccctgcaccgcctggttggcctgcaggctgccctctggttgagtgctgaccgtctt

SEQ ID NO: 763619 - DNA, 120 bp, Artificial Sequence
  ENSG00000221829_8 (sequence is synthesized)
ggggacctggccttgttactagagaccctgaatggcagccagagtggagcctctaaggatctgctgttacttctgaaaacttggagtcccccagctgaggaattagatgctccattgacc

SEQ ID NO: 763620 - DNA, 120 bp, Artificial Sequence
  ENSG00000221829_9 (sequence is synthesized)
ctgcaggatgcccagggattgaaggatgtcctcctgacagcatttgcctaccgccaaggtctccaggagctgatcacagggaacccagacaaggcactaagcagccttcatgaagcggcc

SEQ ID NO: 763621 - DNA, 120 bp, Artificial Sequence
  ENSG00000221829_10 (sequence is synthesized)
aaagagggatcagcctggggtcctccacttctggaggcctctaggctctatcagcaactgggggacacaacagcagagctggagagtctggagctgctagttgaggccttgaatgtccca

SEQ ID NO: 763622 - DNA, 120 bp, Artificial Sequence
  ENSG00000221829_11 (sequence is synthesized)
tgcagttccaaagccccgcagtttctcattgaggtagaattactactgccaccacctgacctagcctcaccccttcattgtggcactcagagccagaccaagcacatactagcaagcagg

SEQ ID NO: 763623 - DNA, 120 bp, Artificial Sequence
  ENSG00000221829_12 (sequence is synthesized)
tgcctacagacggggagggcaggagacgctgcagagcattacttggacctgctggccctgttgctggatagctcggagccaaggttctccccacccccctcccctccagggccctgtatg

SEQ ID NO: 763624 - DNA, 120 bp, Artificial Sequence
  ENSG00000221829_13 (sequence is synthesized)
cctgaggtgtttttggaggcagcggtagcactgatccaggcaggcagagcccaagatgccttgactctatgtgaggagttgctcagccgcacatcatctctgctacccaagatgtcccgg

SEQ ID NO: 763625 - DNA, 120 bp, Artificial Sequence
  ENSG00000221829_14 (sequence is synthesized)
ctgtgggaagatgccagaaaaggaaccaaggaactgccatactgcccactctgggtctctgccacccacctgcttcagggccaggcctgggttcaactgggtgcccaaaaagtggcaatt

SEQ ID NO: 763626 - DNA, 120 bp, Artificial Sequence
  ENSG00000221829_15 (sequence is synthesized)
agtgaatttagcaggtgcctcgagctgctcttccgggccacacctgaggaaaaagaacaaggggcagctttcaactgtgagcagggatgtaagtcagatgcggcactgcagcagcttcgg

SEQ ID NO: 763627 - DNA, 120 bp, Artificial Sequence
  ENSG00000221829_16 (sequence is synthesized)
gcagccgccctaattagtcgtggactggaatgggtagccagcggccaggataccaaagccttacaggacttcctcctcagtgtgcagatgtgcccaggtaatcgagacacttactttcac

SEQ ID NO: 763628 - DNA, 120 bp, Artificial Sequence
  ENSG00000221829_17 (sequence is synthesized)
ctgcttcagactctgaagaggctagatcggagggatgaggccactgcactctggtggaggctggaggcccaaactaaggggtcacatgaagatgctctgtggtctctccccctgtaccta

SEQ ID NO: 763629 - DNA, 120 bp, Artificial Sequence
  ENSG00000221829_18 (sequence is synthesized)
gaaagctatttgagctggatccgtccctctgatcgtgacgccttccttgaagaatttcggacatctctgccaaagtcttgtgacctgtagctgccacgttttgaagagcttgagctgggt

SEQ ID NO: 763630 - DNA, 120 bp, Artificial Sequence
  ENSG00000221829_19 (sequence is synthesized)
ccccagtgggctgtctctctgtggggagggctttctgcttcaccatcattaggaatgtgaccattcctatataattcctggactggtgagattggtggtaggcctgtgaaatttgcccta

SEQ ID NO: 763631 - DNA, 120 bp, Artificial Sequence
  ENSG00000221829_20 (sequence is synthesized)
gttactaccattctcgttttggaggaaacaatctctgccaccaccaagtcattgactttgctcgaggcaccttttttcctgtttctccttttctgttgtcgagtaaaatttcatatttat

SEQ ID NO: 763632 - DNA, 120 bp, Artificial Sequence
  ENSG00000221829_21 (sequence is synthesized)
ggttcaactgggtgcccaaaaagtggcaattagtgaatttagcaggtgcctcgagctgctcttccgggccacacctgaggaaaaagaacaaggtgatctaaactttcagttttcctctta

SEQ ID NO: 763633 - DNA, 120 bp, Artificial Sequence
  ENSG00000221829_22 (sequence is synthesized)
cctcctggaagtggtagtggtggaagtgggttccctttaatgtgtcccagcccaccaggagacttaagagaaagggactgtggacacaagaagaaatagaggaggatttggggttttggt

SEQ ID NO: 763634 - DNA, 120 bp, Artificial Sequence
  ENSG00000221829_23 (sequence is synthesized)
gcatagatgtgcaaggacagagaggcccatgggaaatacttgggcgtaagtgtaagagtggtgttctcagacaggaggggtgattggggttgtgctatatatacctagggatatatccag

SEQ ID NO: 763635 - DNA, 120 bp, Artificial Sequence
  ENSG00000221829_24 (sequence is synthesized)
tttaccccaaccgatggggagggactgagcttgaccaaagagccagaaatgactggagaatgcatcccttgccactgctgcaaggggagaaaaaaggattgatcctcagtgacaacccct

SEQ ID NO: 763636 - DNA, 120 bp, Artificial Sequence
  ENSG00000221829_25 (sequence is synthesized)
ctgagggtctcctccttccttcctcctcctttctctccagctgcagtagcatcatcatgtactggacaggcggctgggttggtggtcggaaaacctggattctctctgggactcttgggt

SEQ ID NO: 763637 - DNA, 120 bp, Artificial Sequence
  ENSG00000221829_26 (sequence is synthesized)
cctggggtgtgactctgcttttgttcttgtgacttgggggatgaatgaggcagtggcaggacataggtcgccactcctcagcctcttaccttgcttctagacctgaactgaggactcttc

SEQ ID NO: 763638 - DNA, 120 bp, Artificial Sequence
  ENSG00000221829_27 (sequence is synthesized)
tctaagacattaaccttctctatctttgacactctgaagtctcttccccagtccattctgtaactggggtagatccatactgagccaaaattggagccctaagaccttccctccctttct

SEQ ID NO: 763639 - DNA, 120 bp, Artificial Sequence
  ENSG00000221836_0 (sequence is synthesized)
cagcagagtccaacgcaggtactgtcacaagggcatgacaaaaaatcagacatgggtcacagaattcattctcctgggatttccactcagcctaaggattcagatgctcctctctgggct

SEQ ID NO: 763640 - DNA, 120 bp, Artificial Sequence
  ENSG00000221836_1 (sequence is synthesized)
tttctccctgttatacgtcttcaccctgctgggaaatggggccatcctggggctcatctggctggactccagactgcacacccccatgtacttctttctctcacacctggccatcattga

SEQ ID NO: 763641 - DNA, 120 bp, Artificial Sequence
  ENSG00000221836_2 (sequence is synthesized)
tatttcgtatgcttccaacaatgtccccaagatgctgacaaaccttggcttgaacaagagaaaaacaatctcctttgtcccatgcacaatgcagacctttttatacatggcttttgctca

SEQ ID NO: 763642 - DNA, 120 bp, Artificial Sequence
  ENSG00000221836_3 (sequence is synthesized)
cactgagtgtctcatcttggtaatgatgtcctacgatcggtacatggctatctgccaccctctgcaatattctgtcatcatgagatggggagtgtgcacagtcctggctgtcacttcttg

SEQ ID NO: 763643 - DNA, 120 bp, Artificial Sequence
  ENSG00000221836_4 (sequence is synthesized)
ccttctgtgggccccatgaaatcaaccacttcttctgtgaaatcctgtctgtcctcaagttggcctgtgctgacacctggctcaaccaggtggtcatctttgctgcttcagtgttcatcc

SEQ ID NO: 763644 - DNA, 120 bp, Artificial Sequence
  ENSG00000221836_5 (sequence is synthesized)
tggtggggccgctctgcctggtgctggtctcctactcgcgcatcctggcggccatcttgaggatccagtctggggagggccgcagaaaggccttctccacctgctcctcccacctttgca

SEQ ID NO: 763645 - DNA, 120 bp, Artificial Sequence
  ENSG00000221836_6 (sequence is synthesized)
tggtgggactcttctttggcagcgccattgtcatgtacatggcccccaagtcccgccaccctgaggagcagcagaaggtcctttccctgttttacagccttttcaacccgatgctgaacc

SEQ ID NO: 763646 - DNA, 120 bp, Artificial Sequence
  ENSG00000221836_7 (sequence is synthesized)
ccttgatctatagcctgaggaacgcagaggtcaagggtgccctgaaaagagtgttgtggaaacagagatcaaagtgagggatgccagggaaagtctagagggttgaagatttgctcccaa

SEQ ID NO: 763647 - DNA, 120 bp, Artificial Sequence
  ENSG00000221836_8 (sequence is synthesized)
ggctgcagtctgcatcagcctatgctaagaaaagagagacaactcctgcatctggaaattccttctctcaggggctgctggtgggagcaagatcctcagctctggccttcaaaagctcct

SEQ ID NO: 763648 - DNA, 120 bp, Artificial Sequence
  ENSG00000221836_9 (sequence is synthesized)
ccatgcagatcacaaagcacatgcagacaggcgctgagccgtgtggtgcagcagaggtgcaaagtgccatgaactcctactcccaggtcccacccctacccaggatctgctttctgttct

SEQ ID NO: 763649 - DNA, 120 bp, Artificial Sequence
  ENSG00000221836_10 (sequence is synthesized)
tttgaggcttagttctctcaagcttcctcttaaattcctctattatttccatctctttttgccataagtatatgctggtaatcccataccatatgctactataagagagtacttgtaatc

SEQ ID NO: 763650 - DNA, 120 bp, Artificial Sequence
  ENSG00000221836_11 (sequence is synthesized)
acacagaataaatactgaccttggttaagcagccctctactgggaatgtaacaacaactaagagtatagaaaatgcctggtttggaacctaaagcctaaggatgatgatattagtactgg

SEQ ID NO: 763651 - DNA, 120 bp, Artificial Sequence
  ENSG00000221836_12 (sequence is synthesized)
aagttcatctaaatcaccctaacaaatctaattctgtaaaaagcaaagtttaattgtatagatttttttatataaaaggcagagaaatatcaggatctttgtttcatttcacttaattct

SEQ ID NO: 763652 - DNA, 120 bp, Artificial Sequence
  ENSG00000221836_13 (sequence is synthesized)
gcaccatttaattagaaagagtttggaaagattttgcatttaaaataaatatgagagaatgttattagggatagttacctttttcataattcagatcgcaaagccgggtgtaggtgacaa

SEQ ID NO: 763653 - DNA, 120 bp, Artificial Sequence
  ENSG00000221836_14 (sequence is synthesized)
tttatcattacggtgattacataaaatattgtagtagtaagaaaatactgcaaaggaagaaagcatcaagggaaactgacagcttgatgtaacatcatagaccaccgcttagaaccaaga

SEQ ID NO: 763654 - DNA, 120 bp, Artificial Sequence
  ENSG00000221836_15 (sequence is synthesized)
acatgtcaagtcttgataaagactttcaggaacctcaacaaaattccaaagagaagctattccaggtgacataaatcacttttcctggacccaagtggtcagaatgacatggacaggtaa

SEQ ID NO: 763655 - DNA, 120 bp, Artificial Sequence
  ENSG00000221836_16 (sequence is synthesized)
tttgttttattttaacacaagtctgagtcctaaatgatcagcataatatgataatatgatttctttaacacattgagtatggtaccttttggaattctctcttttttctctcaacccttg

SEQ ID NO: 763656 - DNA, 120 bp, Artificial Sequence
  ENSG00000221836_17 (sequence is synthesized)
tagtattgtgtgaattcaactgtatgacccatgatgttattacattatctgctgcctgtaccttttctatttttacaattttaaaatatattcttatcacttcatatatttcttcttcca

SEQ ID NO: 763657 - DNA, 120 bp, Artificial Sequence
  ENSG00000221836_18 (sequence is synthesized)
tgaaagaaagaagcaaagggggaactctttcctcccaccccctctccaaatgcactgttttcttttcagttctcaaaaagcctagttgctgactattctgctcatccattcatctcggtt

SEQ ID NO: 763658 - DNA, 120 bp, Artificial Sequence
  ENSG00000221836_19 (sequence is synthesized)
aaacattctgcctctggtgatggtctttgttttcatatctccatactgtgaggacattttttggcctgcagaaattcacaaaccttgctctgcccctcccaaagagagcaatttgaattt

SEQ ID NO: 763659 - DNA, 120 bp, Artificial Sequence
  ENSG00000221836_20 (sequence is synthesized)
aaaaaaaaatactggatctaaatttaactatcaaccactatggaattattgtgtgcactactctgaagctagaaagagaaaacaggcagtattttcatatagaaaggactttctaactat

SEQ ID NO: 763660 - DNA, 120 bp, Artificial Sequence
  ENSG00000221836_21 (sequence is synthesized)
atctgaaaaaaattattacattccctaaaatatgtatacttcatgttctgcttaaaacctttaaaagaaaagggaaagaggaaacatatagaatagttcatctcatataaaacataagca

SEQ ID NO: 763661 - DNA, 120 bp, Artificial Sequence
  ENSG00000221836_22 (sequence is synthesized)
atagatttggattcagaatttttttacctagggtacagtggaaaaatcagggggtataattcatcctatgtcagttctaagtgattgggaaagaatagaccaaaaagactacatttctac

SEQ ID NO: 763662 - DNA, 120 bp, Artificial Sequence
  ENSG00000221836_23 (sequence is synthesized)
agaccaaaaagactacatttctacagaaagtgacaaatatagataaattataaagaaatgttctctagcaggtcttaatagtggctctaattttatatatatatatatattgaatacatt

SEQ ID NO: 763663 - DNA, 120 bp, Artificial Sequence
  ENSG00000221836_24 (sequence is synthesized)
aaatttctattaattgtttccatatttgagttgtaggattttaacaaactaattaaatgttggtgttatgaccgctttatatatacatattttcaacattaatcagtttttaaaggtctg

SEQ ID NO: 763664 - DNA, 120 bp, Artificial Sequence
  ENSG00000221836_25 (sequence is synthesized)
ggggaaagtgaaagaaacaattgcattgttttaggctgcaagttctactgactgcttcacaaatgttaccccgtttatcttgcataaacatcacaatggagtcgctattattttctccac

SEQ ID NO: 763665 - DNA, 120 bp, Artificial Sequence
  ENSG00000221836_26 (sequence is synthesized)
ttaatagataagtaaacaaagttcagaatgatttaataacttatcctatactatgcaaccagtaatagaactgagtgttatggatcgtactgattgcaaacccaagctgcttcttagcag

SEQ ID NO: 763666 - DNA, 120 bp, Artificial Sequence
  ENSG00000221836_27 (sequence is synthesized)
ctttctgcccaaaacattacaaattttagctcaacaggggttagactcaacatccacatgatggggcagagtctggaacaaaacggagtttacagtattatagccaaagtcttaacacca

SEQ ID NO: 763667 - DNA, 120 bp, Artificial Sequence
  ENSG00000221836_28 (sequence is synthesized)
gaaagaatacatcctgtagccaacccatctttggaggattcattaccacctttgggaagagtagaaacactcacattagcagcatcatcattttccaatagtaactccctcctaatgcct

SEQ ID NO: 763668 - DNA, 120 bp, Artificial Sequence
  ENSG00000221836_29 (sequence is synthesized)
gtctgcaaaatcacatggcctcataaggcattgccccaaagggacaatctgaacgagagacaccctgctgttctcagtgatcatcttacctatgattctggtcttctttctatcattagg

SEQ ID NO: 763669 - DNA, 120 bp, Artificial Sequence
  ENSG00000221836_30 (sequence is synthesized)
tgtacccacctgtgttctttacctttatgatgtgattaatgcttttccaggaagtgtccccatctctcctgtgtacagatccgtgatggacctaccttaccagtgctctaggctgctagg

SEQ ID NO: 763670 - DNA, 120 bp, Artificial Sequence
  ENSG00000221836_31 (sequence is synthesized)
actgagaaagggggaacccagcacaggtgcaagctgagatgcttgctatgttagattcacatctcaattgtgctacaacttgctaaataggtctgcttctaggaataatatagcctcctc

SEQ ID NO: 763671 - DNA, 120 bp, Artificial Sequence
  ENSG00000221836_32 (sequence is synthesized)
aatcctgagttttattttaggtcagatgtggctaacaaggtttcagctaggtgccttatataacttttatgaatgctaaatgaaagactttatgtgactctgatttgaagtgatgtattt

SEQ ID NO: 763672 - DNA, 120 bp, Artificial Sequence
  ENSG00000221836_33 (sequence is synthesized)
ttgtgagaaggatataaggacaatgaaaatgaaaaatgattacatagtaagactaagagctggtaaaattcatgactaaacaactataaaactacaaaatccaattttattttaatgatt

SEQ ID NO: 763673 - DNA, 120 bp, Artificial Sequence
  ENSG00000221836_34 (sequence is synthesized)
aaaaaatctcagctctttgtgtttgcaactttctgtgcctgtctttgtttttatttggttggtgatattggggaaggtctccaccaaaggaggttgaaggttagtacacaggaggttggg

SEQ ID NO: 763674 - DNA, 120 bp, Artificial Sequence
  ENSG00000221836_35 (sequence is synthesized)
tatgaaatggtgttcattgttcctgctagtagacaaaactgtaagaagaatcctacataaaattttacattctctatatagcttcaattcgaaaaggattcttgagatagcatccagata

SEQ ID NO: 763675 - DNA, 120 bp, Artificial Sequence
  ENSG00000221836_36 (sequence is synthesized)
ggaaatatatacaaaaataattagtccatagctttgttacgttcattctcctacccacacactaagaattctcatcaactgtgtatctagaatagctcctctaggaaatctcagtctctg

SEQ ID NO: 763676 - DNA, 120 bp, Artificial Sequence
  ENSG00000221836_37 (sequence is synthesized)
tatgtagagatagaaactcaccctggtgacaccttgttagttggctgaaattttggcactcatagtagccaactccttatattggtctccctggccttactattgccctggatactaatc

SEQ ID NO: 763677 - DNA, 120 bp, Artificial Sequence
  ENSG00000221836_38 (sequence is synthesized)
atattaggaaagaaatatatagatgagcaaataaatgagtgcatagccataaataatttttgaaatgactgtgtttccatagcccggaaaaaaggaggaataaagcaaacaggataattg

SEQ ID NO: 763678 - DNA, 120 bp, Artificial Sequence
  ENSG00000221836_39 (sequence is synthesized)
tcttcatatgtcccatcgagaatcttgcaggaggcaaacatagttgtttattgccttccacaaagtggggaaaaataccctagaatcaaaaagtaggtttacataaaagtggaattaaca

SEQ ID NO: 763679 - DNA, 120 bp, Artificial Sequence
  ENSG00000221836_40 (sequence is synthesized)
tcaatatgagaaaatatttttgaacattataagttatgcaacaatgaggtcttgtgaattattgtgcagccttactataaatagaaacataaaggttgagtaaaatataaatacgttgaa

SEQ ID NO: 763680 - DNA, 120 bp, Artificial Sequence
  ENSG00000221836_41 (sequence is synthesized)
caggcatttgcaatagagtctttccaatgtctcttcaatcttgaaaatttaagatttcataataaactttttcatctttttaatgaggggcggagtttaacctgattttaaacaaactta

SEQ ID NO: 763681 - DNA, 120 bp, Artificial Sequence
  ENSG00000221836_42 (sequence is synthesized)
cagtcatttaaagatttttaaatggtaattctaagataatcttttttctgtcaaaatcccgtcttgttcttccgaggattcagcagagtcatcaaaagaaaatattcaagtaggaaaaaa

SEQ ID NO: 763682 - DNA, 120 bp, Artificial Sequence
  ENSG00000221836_43 (sequence is synthesized)
ttgttgtataagcttcatacttgtggttctcatacttttattcccacaatgccatcacaactttatttctagatatacatggtttcacattttaaaatattagcctgatattcagtgata

SEQ ID NO: 763683 - DNA, 120 bp, Artificial Sequence
  ENSG00000221836_44 (sequence is synthesized)
gtggctcaatgacttttgccttaaacacaggcacaggggcttgcacatgtaatcccaaaaactgaagagattgaggtgggaggatcgcttgagccccgtagtttgaggctgcagtgagct

SEQ ID NO: 763684 - DNA, 120 bp, Artificial Sequence
  ENSG00000221836_45 (sequence is synthesized)
aggatcgcttgagccccgtagtttgaggctgcagtgagctatgaccatgctactgcattccagcctgggcaacagagtgggaccccatctttgaaaaaacaaacaaacaaacaaacaaaa

SEQ ID NO: 763685 - DNA, 120 bp, Artificial Sequence
  ENSG00000221836_46 (sequence is synthesized)
aaatgaaaaagacaaaattagcccccaaggcaagataaacatctctgtggatcagaaacaaaacataaaatcagatgtgtgagtgatgcagaagccacgggttagccgactgtttgtaag

SEQ ID NO: 763686 - DNA, 120 bp, Artificial Sequence
  ENSG00000221836_47 (sequence is synthesized)
ctggcctgagtggagatagctttgctcttaggaactaaatatattaaagttcttcatgcaataatggggaactgaggcttagcaccttccttgaaaataaggtatggaggagggtgggag

SEQ ID NO: 763687 - DNA, 120 bp, Artificial Sequence
  ENSG00000221836_48 (sequence is synthesized)
ggactgacttcctttgcttactaatgaagaccaaaaaatgtactgtgctgtactgcttccctatgtagctagctgaagacttgtgagaacccaggccctgcgctgcaaccaaatgtggaa

SEQ ID NO: 763688 - DNA, 120 bp, Artificial Sequence
  ENSG00000221836_49 (sequence is synthesized)
tccagacacccactctgggtgctgggattcccaatatactcagtctcactataggtacataattctaaaccatttacgtaagatccaggtctggataggaagcccaaagagctgggccaa

SEQ ID NO: 763689 - DNA, 120 bp, Artificial Sequence
  ENSG00000221836_50 (sequence is synthesized)
gacaacccctgagcttctagatgagagaagagggagggagagagacagacagagagaaatggagagagaactgggtttttaaatctattttcagaagctgccaagagaagcagcccaaaa

SEQ ID NO: 763690 - DNA, 120 bp, Artificial Sequence
  ENSG00000221836_51 (sequence is synthesized)
tatcaacaactggaaaataaattcacttctgatgatgtcccttgtgcatgttcaggaatgaacaattgataaatatttatgtttatgtttaaatgcataaaagatttcttaaagatatgc

SEQ ID NO: 763691 - DNA, 120 bp, Artificial Sequence
  ENSG00000221836_52 (sequence is synthesized)
taactattttagatggccagggattaagacggaaaataattagaaaataacagatggatcccaaaagataacaattacagagcttagaaataaaacacgcattccctgaaataaggacta

SEQ ID NO: 763692 - DNA, 86 bp, Artificial Sequence
  ENSG00000221836_53 (sequence is synthesized)
tcttaaatatgaaaaaaattcaactaacaggataaattctagatggagtacattatgggaaaaaatgtgaaatagaacatggaatg

SEQ ID NO: 763693 - DNA, 120 bp, Artificial Sequence
  ENSG00000221836_54 (sequence is synthesized)
agtacattatgggaaaaaatgtgaaatagaacatggaatgcataattttcccaaaatgcaacagagactattttttaagaaaatggaataaaaagcacatagaatctagactcagatata

SEQ ID NO: 763694 - DNA, 120 bp, Artificial Sequence
  ENSG00000221836_55 (sequence is synthesized)
atatctatttattttataaggacgtaaaaataatgatgaaaataggataggacattattgctgaaatttttttcctgatggctaaacacatgaattctcagaacaaaagatactctgagt

SEQ ID NO: 763695 - DNA, 120 bp, Artificial Sequence
  ENSG00000221836_56 (sequence is synthesized)
atcaagctacatgaataaaaataaattaatatctagacatatcataatgaaagcacagaacattaaggaggaaaagaaaataataaaaccttcagagaataaaagaatagctacaaaaga

SEQ ID NO: 763696 - DNA, 120 bp, Artificial Sequence
  ENSG00000221836_57 (sequence is synthesized)
ataacaaataatagtggacttcccctcagcaaaacagatgccaaaagagaatattcaaaaggattaggaaaactgttactctacaatttcacacacagttaaactgtaattcaagaaaaa

SEQ ID NO: 763697 - DNA, 120 bp, Artificial Sequence
  ENSG00000221836_58 (sequence is synthesized)
gagaaaaatgaaaatgttttcaaacaaagtctaaggaaaattacctcccttaggtcttcaacagaattattaataaatatattggatagaaaaaaagatgaaaacagaataaaagtatat

SEQ ID NO: 763698 - DNA, 120 bp, Artificial Sequence
  ENSG00000221836_59 (sequence is synthesized)
agggtacatgcgaagcatacgagttgataaagaataatagtaaatataattgttgaatgtaaacaaaatagctttttatatgaaataataaaagctcttagcagctgtaacaggttgatg

SEQ ID NO: 763699 - DNA, 120 bp, Artificial Sequence
  ENSG00000221836_60 (sequence is synthesized)
taaataataccaatgaataattaaatcacggtaaagctcttgacttgactagaaaggtgaaaatgctgaataattgtagattgcattagaaaaatttataatttagtgtgtgttaaaaat

SEQ ID NO: 763700 - DNA, 120 bp, Artificial Sequence
  ENSG00000221836_61 (sequence is synthesized)
tcaaaagtagatcacatttgccatctttgagccccccacctctgctgcagttgtagcaggcaatacgtctgtcatccactcctcagtggcttcaccagcctttcagccagatacaaggct

SEQ ID NO: 763701 - DNA, 120 bp, Artificial Sequence
  ENSG00000221836_62 (sequence is synthesized)
ggctgttgtcctagtgattacagccacatgagtcactggtcagctcagcggctatcccgacctgctgcctgactcccataatcttcacccatttatgagtgagaacatgcaatatttgtc

SEQ ID NO: 763702 - DNA, 120 bp, Artificial Sequence
  ENSG00000221836_63 (sequence is synthesized)
tgtgcctggcttgtttcacttaagataatgatctctagtttcatccatcttgttgtaaaatacataatttcatagttttttaatggctgaatagtattccattacatatgtataatactt

SEQ ID NO: 763703 - DNA, 60 bp, Artificial Sequence
  ENSG00000221836_64 (sequence is synthesized)
ttattgatggacacattttaaaacagggtttagttgactcacagttcagcatggctgagg

SEQ ID NO: 763704 - DNA, 120 bp, Artificial Sequence
  ENSG00000221836_65 (sequence is synthesized)
ctcaggaaacttacaatcatggcggaagtggaagcaaacacatccttcttcacacggtggccagaagaactgccaagcaaagcagggaaagccttttaaaaaaccatcagatcagcctgg

SEQ ID NO: 763705 - DNA, 67 bp, Artificial Sequence
  ENSG00000221836_66 (sequence is synthesized)
ctggccaatatggtgaaaccccatctcttctaaaatacaaaaattaccgggcatggtggcacgtgct

SEQ ID NO: 763706 - DNA, 120 bp, Artificial Sequence
  ENSG00000221837_0 (sequence is synthesized)
acacactcacaaactcactcactgacacactcacacactcacttacacctcccccagctcacctcctccccaccccagcatggccgcgtccaccatgtccatccgctccagcgcttactc

SEQ ID NO: 763707 - DNA, 120 bp, Artificial Sequence
  ENSG00000221837_1 (sequence is synthesized)
cgactcctggcaggtggacgactgcccagagagctgctgtgagcccccctgctgcgccaccagctgctgcgccccggccccctgcctgaccctggtctgcaccccagtgagccgtgtatc

SEQ ID NO: 763708 - DNA, 120 bp, Artificial Sequence
  ENSG00000221837_2 (sequence is synthesized)
accccagtgagccgtgtatccagcccctgctgccaggtgacctgtgagcccagcccctgccaatcaggctgcaccagctcctgcacgccctcgtgctgccagcagtctagctgccagccg

SEQ ID NO: 763709 - DNA, 120 bp, Artificial Sequence
  ENSG00000221837_3 (sequence is synthesized)
ctgccagcaggcctgctgcgtgcccgtctgctgcaagcctgtgtgctgcgtgcccgtctgctgtggggcttcttcgtgctgccaacagtctagctaccagccagcttgctgtgcctcttc

SEQ ID NO: 763710 - DNA, 120 bp, Artificial Sequence
  ENSG00000221837_4 (sequence is synthesized)
ctcctgccagccggcctgctgtgtgcccgtctgctgcaaacctgtgtgctgtgcgcccacctgctctgaggattcctattcatgctgccaacagtctagctgccagccagcttgctgcac

SEQ ID NO: 763711 - DNA, 120 bp, Artificial Sequence
  ENSG00000221837_5 (sequence is synthesized)
ctggggcttcctctttgtgctgccagcagtctggctgccagccggcttgctgcaccacctcctgctgcagaccctcctcctctgtgtccctcctctgccgccctgtgtgcaggcccgcct

SEQ ID NO: 763712 - DNA, 120 bp, Artificial Sequence
  ENSG00000221837_6 (sequence is synthesized)
gctgcgtgcccgtctcctcctgctgtgcccccacctcctcccgccagcccagctattgccgccaggcctcctgtgtgtcccttctctgccgccctgtgtgctcccgcccggcctgctaca

SEQ ID NO: 763713 - DNA, 120 bp, Artificial Sequence
  ENSG00000221837_7 (sequence is synthesized)
gcttctcctcaggccagaagtccagctgctgacggtcatgtcccccagggccagccgggctcaggccccacctccctgccagtccttggacctcccagcccacccagcctcagcacagct

SEQ ID NO: 763714 - DNA, 120 bp, Artificial Sequence
  ENSG00000221837_8 (sequence is synthesized)
caacacagaaggagcagccccagccacagccgcccagccccggggtctcagatgctcactggctcctccctgacctcccccccgggcaggcgagccctggcttctcctcacggtgcttcc

SEQ ID NO: 763715 - DNA, 120 bp, Artificial Sequence
  ENSG00000221837_9 (sequence is synthesized)
tggctgcagaccacaaccctccgctggtcgctggttggggacgggccctcctgacccgggtctcacccccagcagcgtcaccctctgcccctgagcaccaataaagcgtctgcggcccca

SEQ ID NO: 763716 - DNA, 120 bp, Artificial Sequence
  ENSG00000221838_0 (sequence is synthesized)
cttttgttccggggccgcagggcggggcaggcccgactttcgccgtcttcttgtctactctccagaacggccatgatttcccaattcttcattctgtcctccaagggggacccgctcatc

SEQ ID NO: 763717 - DNA, 120 bp, Artificial Sequence
  ENSG00000221838_1 (sequence is synthesized)
tacaaagacttccgcggggacagtggcggccgggatgtggccgagctcttctaccggaagctgacgggactgccaggagacgagtccccggttgtcatgcatcaccatggccgtcatttc

SEQ ID NO: 763718 - DNA, 120 bp, Artificial Sequence
  ENSG00000221838_2 (sequence is synthesized)
attcacatcagacacagcggcctctatttggtggtcacaacttcagaaaacgtttctcccttcagcctcctagaactgctctccaggttggccacccttctgggcgattactgtggctcc

SEQ ID NO: 763719 - DNA, 120 bp, Artificial Sequence
  ENSG00000221838_3 (sequence is synthesized)
ctgggcgaggggaccatctcccgcaatgtggctctggtatacgaactcctggatgaagtgctggactatggctatgtacagaccacatccacggagatgctgaggaatttcatccagacg

SEQ ID NO: 763720 - DNA, 120 bp, Artificial Sequence
  ENSG00000221838_4 (sequence is synthesized)
gaagctgtggtcagcaagcccttcagcctctttgacctcagcagcgttggcttgtttggggctgagacacaacagagcaaagtggcccccagcagtgcagccagccgccccgtcctgtcc

SEQ ID NO: 763721 - DNA, 120 bp, Artificial Sequence
  ENSG00000221838_5 (sequence is synthesized)
agtcgctctgaccagagccaaaagaatgaagtttttttggatgtggtcgagagattgtctgtactgatagcatctaatggatccctgctgaaggtggatgtgcagggagagattcggctc

SEQ ID NO: 763722 - DNA, 120 bp, Artificial Sequence
  ENSG00000221838_6 (sequence is synthesized)
aagagcttccttcctagcggctctgagatgcgcattggcttgacggaagagttttgtgtggggaagtcagagctgagaggttatgggccaggaatccgggtcgatgaagtctcgtttcac

SEQ ID NO: 763723 - DNA, 120 bp, Artificial Sequence
  ENSG00000221838_7 (sequence is synthesized)
agctctgtgaatctggacgaatttgagtctcatcgaatcctccgcttgcaaccacctcagggcgagctgactgtgatgcggtaccaactctccgatgacctcccctcaccgctccccttc

SEQ ID NO: 763724 - DNA, 120 bp, Artificial Sequence
  ENSG00000221838_8 (sequence is synthesized)
cggctcttcccctctgtgcagtgggaccgaggctcaggccggctccaggtttatctaaagttgcgatgtgacctgctctcaaagagccaagccctcaatgtcaggctgcacctccccctg

SEQ ID NO: 763725 - DNA, 120 bp, Artificial Sequence
  ENSG00000221838_9 (sequence is synthesized)
cctcgaggggtggtcagcctgtctcaggagctgagcagcccagagcagaaggctgagctggcagagggagcccttcgctgggacctgcctcgggtgcaaggaggctctcaactctcaggc

SEQ ID NO: 763726 - DNA, 120 bp, Artificial Sequence
  ENSG00000221838_10 (sequence is synthesized)
cttttccagatggacgtcccagggcccccaggacctcccagccatgggctctccacctcggcctctcctctggggctgggccctgccagtctctccttcgagcttccccggcacacgtgc

SEQ ID NO: 763727 - DNA, 120 bp, Artificial Sequence
  ENSG00000221838_11 (sequence is synthesized)
tctggcctccaggtccgattcctcaggctggccttcaggccatgcggcaatgccaacccccacaagtgggtgcgacacctaagccacagcgacgcctatgtcattcggatctgaggctcc

SEQ ID NO: 763728 - DNA, 120 bp, Artificial Sequence
  ENSG00000221838_12 (sequence is synthesized)
ccaaacgaggacacgacggccaaggtggcagtttgtcccacgggaggacagtcgtttcttttccagcctcctggccttcggactctgaatctgggcaggaagagtcctcagtcccaagac

SEQ ID NO: 763729 - DNA, 120 bp, Artificial Sequence
  ENSG00000221838_13 (sequence is synthesized)
caggagggggcaatgggcccagcctttctgtggtatctgatgcaggaaggactgcagtggatcagaacttacaaaccaaacttttattctgagaaactggctgtacaatatctaaaaaga

SEQ ID NO: 763730 - DNA, 120 bp, Artificial Sequence
  ENSG00000221838_14 (sequence is synthesized)
ggagcatcacggagcaggctgaggggagccggagttgggctgggagccattggcttttggagtccctggagctggagggggactgtccccagcctcctgcttccccccacaaagggcact

SEQ ID NO: 763731 - DNA, 120 bp, Artificial Sequence
  ENSG00000221838_15 (sequence is synthesized)
gccgctgagtggggacggggacgatgccgggggaggaactggagaaggatgggaggtggggcctcctttgccctcccctgttgggggaagtgagaccacgatgtacttctggacactccc

SEQ ID NO: 763732 - DNA, 120 bp, Artificial Sequence
  ENSG00000221838_16 (sequence is synthesized)
aggaccagagggagcagtgctggggggtgcggtggtggcggtggagaccaacttgacgatgggctgcacgctggggacggtggtggtgacgggcgaagtggtggtggaacctgagccggg

SEQ ID NO: 763733 - DNA, 120 bp, Artificial Sequence
  ENSG00000221838_17 (sequence is synthesized)
ggccgaggtgctgagggacaggacctggatagaaaggaaaggcaggccgcttgccctgtgccctccctgccccccagaggcctggcgaggacgcttcactcgctccctgcctgaacaagt

SEQ ID NO: 763734 - DNA, 120 bp, Artificial Sequence
  ENSG00000221838_18 (sequence is synthesized)
tgttcctgtagttcaccctgtagacagctatggctggagaccttgttcatgcagggcagctacagccctgcaggaccctggtgggcgcctcttccagctcttgacttggggcccagaggg

SEQ ID NO: 763735 - DNA, 120 bp, Artificial Sequence
  ENSG00000221838_19 (sequence is synthesized)
gactgtgctctactcctgggcctccccagggtgctctgaggtaacccaggccctccagatgctccctgtcccacagctctgcatacctgctgggtggatggggcgctggaggacgatgac

SEQ ID NO: 763736 - DNA, 120 bp, Artificial Sequence
  ENSG00000221838_20 (sequence is synthesized)
attacaataaacttggttggaggaggggaaggctgtggtggggcagccgctcgtgcagacaccagtgtctggacaggaagtgcgatggagccaggaaccttcagcaagccaggggtgcga

SEQ ID NO: 763737 - DNA, 120 bp, Artificial Sequence
  ENSG00000221838_21 (sequence is synthesized)
gggccaggctgtggggcctgcgagagggtcagcgtgggccggggctgcggggagaagaggaaagggggaagtggcaccatctactaagaagaggagtctgaagggagaggcctgggctcc

SEQ ID NO: 763738 - DNA, 120 bp, Artificial Sequence
  ENSG00000221838_22 (sequence is synthesized)
cctcgctcttcctcagtggctctcactagggctggggcatcctcactcagggcctggttgccctgagactactgactgagggcacatgtggctgtgtgcaagtgcctgtcccacacaggg

SEQ ID NO: 763739 - DNA, 120 bp, Artificial Sequence
  ENSG00000221838_23 (sequence is synthesized)
gttctcctctgcttcctcctattcctcctccccacccggccacggacctgcgtgatggtcagagtggtcctgttgacctgctgagcctgcagagcagcctgggcccgagccttgaccacc

SEQ ID NO: 763740 - DNA, 120 bp, Artificial Sequence
  ENSG00000221838_24 (sequence is synthesized)
tgggagcagaggaggggcccaagggacccgaattctgcccgataggcgtcctgattgtcaggcggtgggcgcagctttgccagaacaggagcacagtgtttctgcagaacagaaaaaaag

SEQ ID NO: 763741 - DNA, 120 bp, Artificial Sequence
  ENSG00000221838_25 (sequence is synthesized)
ccaggtagagggagggctggggaaaaaagccaggtagagggagggctggtgacactcttgagaagaaccttggggatggggtaaaaaaggacattccttatcatctcagtgcccctgttg

SEQ ID NO: 763742 - DNA, 120 bp, Artificial Sequence
  ENSG00000221838_26 (sequence is synthesized)
aaggccaaattatgctgaactattagtgtgtgtacagaacactgtgggctttctcataagaaaagatgggcacggggccaggtgcagcatcttaggcctgtatcccagcacttgggaggc

SEQ ID NO: 763743 - DNA, 120 bp, Artificial Sequence
  ENSG00000221838_27 (sequence is synthesized)
aggttgaggtactagaatgcttgaacccaggtggtggaggctgcagtgagcagaggttgcatcagtgcactcccgcttgggtgacagagtgagactgtctcagaaaaaaaaaaaaaagaa

SEQ ID NO: 763744 - DNA, 120 bp, Artificial Sequence
  ENSG00000221838_28 (sequence is synthesized)
atcgtgtcccagctcagccaagcctgcgatggagccataacgagtcgtccagggcgtcttctcgtccacccagctctgtaaggggaaggaaataaactaagatgaaggggtctgaaagga

SEQ ID NO: 763745 - DNA, 120 bp, Artificial Sequence
  ENSG00000221838_29 (sequence is synthesized)
gactgtatcctagacccttggggctgggaaggggcggaggggccgggcgggaggggcgcccagggccagcctgtgtcgcaggatccttcactgagtccttccacccgccagtccgcgggg

SEQ ID NO: 763746 - DNA, 120 bp, Artificial Sequence
  ENSG00000221838_30 (sequence is synthesized)
cttctgggcgattactgtggctccctgggcgaggggaccatctcccgcaatgtggctctggtatacgaactcctggatgaagtgctgagactagagtctcactgtgttgcccaggctggt

SEQ ID NO: 763747 - DNA, 120 bp, Artificial Sequence
  ENSG00000221838_31 (sequence is synthesized)
gttgcgatgtgacctgctctcaaagaggtaagagtgaggctggcctggctgagttcagctctatgggacggaagacagggccagggcacctgctgcttctcccttcagatgcagctgcca

SEQ ID NO: 763748 - DNA, 120 bp, Artificial Sequence
  ENSG00000221838_32 (sequence is synthesized)
gcctcagaagccagttaaggtagaggctgtagaatttgggaaggtggggggcacctgtgctgaaatcctgttatgacattgaagaggaacaggacaagggactgtgccttcctggggctg

SEQ ID NO: 763749 - DNA, 120 bp, Artificial Sequence
  ENSG00000221838_33 (sequence is synthesized)
gaggcgggtgaggagcggggtcccgtcgggccgggtgggcgccagctccctcccaggactggttcattggtagattccacttggggggtgcattccgccaaataaagctaacgtgaggcc

SEQ ID NO: 763750 - DNA, 71 bp, Artificial Sequence
  ENSG00000221838_34 (sequence is synthesized)
cgtggtggcgggcgcctgtaatcccatctactcgggaagctgaggcttgacaccgcactccagcctgggag

SEQ ID NO: 763751 - DNA, 120 bp, Artificial Sequence
  ENSG00000221840_0 (sequence is synthesized)
aggccctgtttccctgagctctcacctctgatacaagccttaaagaagagtaaatgagacagaataacaatattacagaatttgtcctcctgggcttttctcaggatcctggtgtgcaaa

SEQ ID NO: 763752 - DNA, 120 bp, Artificial Sequence
  ENSG00000221840_1 (sequence is synthesized)
aagcattatttgtcatgtttttactcacatacttggtgacagtggtggggaacctgctcattgtggtggatattattgccagcccttccttgggttccccaatgtatttcttccttgcct

SEQ ID NO: 763753 - DNA, 120 bp, Artificial Sequence
  ENSG00000221840_2 (sequence is synthesized)
gcctgtcatttatagatgctgcatattccactaccatttctcccaagttaattgtaggcttattctgtgataaaaagactatttccttccaaggttgcatgggccagctatttatagacc

SEQ ID NO: 763754 - DNA, 120 bp, Artificial Sequence
  ENSG00000221840_3 (sequence is synthesized)
atttctttggtggggctgaggtcttccttctggtggtgatggcctgtgatcgctatgtggccatctgtaagccactgcactatttgaccatcatgaatcgacaggtttgcttccttctgt

SEQ ID NO: 763755 - DNA, 120 bp, Artificial Sequence
  ENSG00000221840_4 (sequence is synthesized)
cattactggaactggcatgcactgacacctactttataggcctcactgttgttgtcaatagtggagcaatctgtatggtcattttcaaccttctgttaatctcctatggagtcatcctaa

SEQ ID NO: 763756 - DNA, 120 bp, Artificial Sequence
  ENSG00000221840_5 (sequence is synthesized)
gctcccttaaaacttacagtcaggaaaagaggggtaaagccttgtctacctgcagctccggcagtaccgttgttgtcctcttttttgtaccctgtattttcatatatgttagacctgttt

SEQ ID NO: 763757 - DNA, 120 bp, Artificial Sequence
  ENSG00000221840_6 (sequence is synthesized)
caaactttcctactgataagttcatgactgtgttttataccattatcacacacatgctgagtcctttaatatatacgttgagaaattcagagatgagaaatgctatagaaaaactcttgg

SEQ ID NO: 763758 - DNA, 120 bp, Artificial Sequence
  ENSG00000221840_7 (sequence is synthesized)
gtaaaaagttaactatatttattataggaggagtgtccgtcctcatgtaggtaaggaggtatgtagtcaaggtcttcccagtgaagttttcaggtttctaagggcaagtcaaggatccca

SEQ ID NO: 763759 - DNA, 120 bp, Artificial Sequence
  ENSG00000221843_0 (sequence is synthesized)
gttaaatctgtggcctttgcatcgaagccatgctttcaagatgtaaaacctatggagctgacaccaggggcccaacagcaaggtataaattatcaagagttgacttcaggatggcaagat

SEQ ID NO: 763760 - DNA, 120 bp, Artificial Sequence
  ENSG00000221843_1 (sequence is synthesized)
gtgaaatcaatgatgttggtaccagagccaactaggaagttcccatcaggaccactgttgactagtgtcagattttcaaatttgtctccagaatcacagcaacaggatgtgaaatctttg

SEQ ID NO: 763761 - DNA, 120 bp, Artificial Sequence
  ENSG00000221843_2 (sequence is synthesized)
gagtttactgtagagccaaagttgcaaagcgtaaaacatgtgaaattatcttcagtgtctctgcagcaaactataaaatctgtggaattagcaccagggtcactgcctcaaagagtgaaa

SEQ ID NO: 763762 - DNA, 120 bp, Artificial Sequence
  ENSG00000221843_3 (sequence is synthesized)
tatggggagcaaactccaagaacaaattatcaaatcatggaatcctctgaactaatccctagaccagggcatcagtttgcaaaatatgcagagatgatcccacagccaaagtatcaaatc

SEQ ID NO: 763763 - DNA, 120 bp, Artificial Sequence
  ENSG00000221843_4 (sequence is synthesized)
cctaaatctgcaaatttgatttcaataccaatttatcacgccacagaatcttcagaaatggcacaaggattggcatataaaggcatagatactgtagagaaatctgtggggttgacccca

SEQ ID NO: 763764 - DNA, 120 bp, Artificial Sequence
  ENSG00000221843_5 (sequence is synthesized)
aagctaacaggtagagctaaggaatccttagggatgctgctgcagccagatcttcaggtaccaaaatttgttgatctgactccaatggtaagggatcaaggctcaaaattcttaggatta

SEQ ID NO: 763765 - DNA, 120 bp, Artificial Sequence
  ENSG00000221843_6 (sequence is synthesized)
actccagagaaaagctaccaaatcctagaaactatggaattgctctctcagtcacggccccgagttaaggatgtgggggagttatatatgaagccactgcagcaaactgtggaatatgaa

SEQ ID NO: 763766 - DNA, 120 bp, Artificial Sequence
  ENSG00000221843_7 (sequence is synthesized)
gggattactccggaactcaagcattactttacagaagctatggggttgaccgctgaggcaaggatacaagcaaatgaattctttggaatgaccccaaagccaacaagtcaagccactgga

SEQ ID NO: 763767 - DNA, 120 bp, Artificial Sequence
  ENSG00000221843_8 (sequence is synthesized)
tttgcagagagatccccaaggctctgtcctcaaaacttagaatgtgtggaggtgatctctgagaaaagactgcaaggggaagaatctgtggtattgattccaaagtcattacatcacgtc

SEQ ID NO: 763768 - DNA, 120 bp, Artificial Sequence
  ENSG00000221843_9 (sequence is synthesized)
ccagattctgcttcagggatgacacctgggttaggacatcgagttcctgaatctgtggagttgacttctaagtcaggagtgcaggtagagaaaactttgcaattaacccccaaaccacag

SEQ ID NO: 763769 - DNA, 120 bp, Artificial Sequence
  ENSG00000221843_10 (sequence is synthesized)
catcatgtgggatctccagggataatatcagggttaggacatcaagtcccagaatctgtaaatctgacctgtaagcaatggctacaaatggaggaatctttagaggtgcccctgaagcaa

SEQ ID NO: 763770 - DNA, 120 bp, Artificial Sequence
  ENSG00000221843_11 (sequence is synthesized)
acaagtcaagttataggacatgaagaatctgtagagctcacctctgaggcacggcagcacagggaggtatcaatggggctaacaaagtcaaagaatcaaagtatgaaatctccagggaca

SEQ ID NO: 763771 - DNA, 120 bp, Artificial Sequence
  ENSG00000221843_12 (sequence is synthesized)
accccaggaccactgggtcgaattgtagaatttatgaggattagtccagagccactagatcaagtcacagaatctgcaaggacacagcttcaagttgctcaatctgaagaggtaatcctc

SEQ ID NO: 763772 - DNA, 120 bp, Artificial Sequence
  ENSG00000221843_13 (sequence is synthesized)
atagatgtcccaaaagttgttcaatctgtgaaagtgacccctggaccaccatttcaaattgtaaagtctgtgacgataccaaggccaacccctcaaatggtagaatatattgagttgact

SEQ ID NO: 763773 - DNA, 120 bp, Artificial Sequence
  ENSG00000221843_14 (sequence is synthesized)
ccaaaactgcaatatgtgagaccttcagagcaccacacagggccatgtttgcaagatgtgaaatctacaaaattaatcacaaagccaaaacaccagattttggaaacagtggagttgaca

SEQ ID NO: 763774 - DNA, 120 bp, Artificial Sequence
  ENSG00000221843_15 (sequence is synthesized)
gggtttcaaattgtaaaaactatgttaatcccagggccatcccttcaaatcgtaaaatctgaggagttagcaccaggaccaattcctcaggttgtagaaccaataggagtagccctagaa

SEQ ID NO: 763775 - DNA, 120 bp, Artificial Sequence
  ENSG00000221843_16 (sequence is synthesized)
tcaggaattgaagcaataaattgtgtggatttacttccaaggccacatcttcaagaactgatagtacctgcagaattaactccaagtccatgtactcaagtgaagtctgcagaattaacc

SEQ ID NO: 763776 - DNA, 120 bp, Artificial Sequence
  ENSG00000221843_17 (sequence is synthesized)
tcaccgcaaacatctccatttgaggaacatacaatattgactcataaacaagggcttcaggctgtgaaatctacagtgataaaaacagagcctcctaaagttatggaaactgaggatttg

SEQ ID NO: 763777 - DNA, 120 bp, Artificial Sequence
  ENSG00000221843_18 (sequence is synthesized)
aatctaggacacgtgtgtcagaatagggactgtcagaagttaacatcagaagagttacaagtagggactgacttctctaggttcctacaaagctcttcaaccacactcatttcaagctct

SEQ ID NO: 763778 - DNA, 120 bp, Artificial Sequence
  ENSG00000221843_19 (sequence is synthesized)
gtcagaacagcatctgaattaggaggactttgggattctgggatacaggaagtatccagagctttggatataaaaaaccctgggacagatattttgcagcctgaagagacctatatagac

SEQ ID NO: 763779 - DNA, 120 bp, Artificial Sequence
  ENSG00000221843_20 (sequence is synthesized)
cctactatgatacaatctttaacttttcctttggcccttcataatcaaagctccgataagacagctaacattgtggaaaacccatgtcctgagattctaggagtggatgtaatatctaaa

SEQ ID NO: 763780 - DNA, 120 bp, Artificial Sequence
  ENSG00000221843_21 (sequence is synthesized)
gagacaactaagaggaagcaaatggaggagctagagaactcacttcagagacatctaccacaaagctggagatcacgatctaggacattccaggcagaatcaggggttcagaaaggtctc

SEQ ID NO: 763781 - DNA, 120 bp, Artificial Sequence
  ENSG00000221843_22 (sequence is synthesized)
atcaagtctttcccgggcagacaacacaatgtctgggagagtcatgcctggaggcagcgactaccaagaaaatatctctccactatgctaatgctggggaatattttagggaccactatg

SEQ ID NO: 763782 - DNA, 120 bp, Artificial Sequence
  ENSG00000221843_23 (sequence is synthesized)
gaaaggaagctttgttctcaaacatctttagcagaaagagccactgcagatacctgtcaatctattcagaatttatttgggattccagctgaactgatggaaccttcccagagcctgcca

SEQ ID NO: 763783 - DNA, 120 bp, Artificial Sequence
  ENSG00000221843_24 (sequence is synthesized)
gagaagggtccagttactatttctcagccttctgtggtcaaaaactatattcagagacatactttttatcatggtcataagaaaagaatggccttaaggatatggacacgtggctccaca

SEQ ID NO: 763784 - DNA, 120 bp, Artificial Sequence
  ENSG00000221843_25 (sequence is synthesized)
agtcattcaacatatgcctgtctcatgtgcagggggccagcttcctgtcctggtaaagtcagagtcttccctcagcatattttacgatagagaagatcttgttccaatggaagaaagtga

SEQ ID NO: 763785 - DNA, 120 bp, Artificial Sequence
  ENSG00000221843_26 (sequence is synthesized)
ggactcacagagtgattcccagacaaggatttctgagtcccaacactccctcaagccaaattatctttcccaggccaagactgacttctcagaacagttccagttgctagaagatctgca

SEQ ID NO: 763786 - DNA, 120 bp, Artificial Sequence
  ENSG00000221843_27 (sequence is synthesized)
gctaaaaatagcagcaaaactcttaaggagtcaaataccccccgatgtgcctccacctctagcttcaggtctagtcctaaaataccctatctgcctacagtgtggccgatgttcaggact

SEQ ID NO: 763787 - DNA, 120 bp, Artificial Sequence
  ENSG00000221843_28 (sequence is synthesized)
taattgccatcataaattacagaccacttcggggccttatcttcttatctatccacagctccaccttgtacgcactcctgaaggccatggtgaggttcggttgcatcttggctttaggct

SEQ ID NO: 763788 - DNA, 120 bp, Artificial Sequence
  ENSG00000221843_29 (sequence is synthesized)
gagaattgggaaaagatcccaaatctcaaagtatcgtgaaagagatagacccgtcatacggagaagccctatatcaccatcacaaaggaaagctaaaatctatactcaagcttccaagag

SEQ ID NO: 763789 - DNA, 120 bp, Artificial Sequence
  ENSG00000221843_30 (sequence is synthesized)
tcctacttccacaatagatttgcagtctgggccttcccagtcccctgctcctgtacaagtctacatcaggcgaggacaacgcagcaggcctgacttagtagaaaagacaaaaactagagc

SEQ ID NO: 763790 - DNA, 120 bp, Artificial Sequence
  ENSG00000221843_31 (sequence is synthesized)
acctgggcactatgaattcactcaagttcacaacctaccagagagtgactctgaaagcactcagaatgaaaaacgggctaaagtgagaaccaaaaagacctctgattcaaaatatccaat

SEQ ID NO: 763791 - DNA, 120 bp, Artificial Sequence
  ENSG00000221843_32 (sequence is synthesized)
gaagagaatcaccaagcgacttagaaaacacagaaagttctacacaaacagtagaaccacaatagagagtccttctagggaattagcagcccatttaagaaggaagaggattggagcaac

SEQ ID NO: 763792 - DNA, 120 bp, Artificial Sequence
  ENSG00000221843_33 (sequence is synthesized)
tcagacaagtactgcctctttaaaaagacaacctaagaaaccttcccaacccaagttcatgcaactgctttttcagagcctaaagcgggcattccaaacagcacacagagttatagcttc

SEQ ID NO: 763793 - DNA, 120 bp, Artificial Sequence
  ENSG00000221843_34 (sequence is synthesized)
tgttgggcggaagcctgtggacgggacaaggccagacaatttgtgggcaagcaaaaactattatccaaaacaaaatgccagggactattgcttaccaagcagtatcaaaagagacaagag

SEQ ID NO: 763794 - DNA, 120 bp, Artificial Sequence
  ENSG00000221843_35 (sequence is synthesized)
gtcagctgacaagctaacgccagcaggctcaaccattaagcaggaggacatattgtggggaggaacggtccagtgcagatcagctcaacagccaagaagagcttactctttccaacccag

SEQ ID NO: 763795 - DNA, 120 bp, Artificial Sequence
  ENSG00000221843_36 (sequence is synthesized)
acctcttcgactgcccaagcccacagattcccaaagtggtattgctttccaaactgcctcagtggggcagcctctgagaactgttcaaaaggacagtagtagcagatcaaagaaaaactt

SEQ ID NO: 763796 - DNA, 120 bp, Artificial Sequence
  ENSG00000221843_37 (sequence is synthesized)
ctatagaaatgaaacctccagccaggagtctaagaacttgtccacaccaggaaccagagttcaggcccgaggaagaatcctacctggttcccctgtgaagagaacctggcaccgacatct

SEQ ID NO: 763797 - DNA, 120 bp, Artificial Sequence
  ENSG00000221843_38 (sequence is synthesized)
taaagacaaactcacacacaaggagcataaccaccccagcttctatagggagagaaccccacgcggtccttctgagagaacccgtcataacccctcttggagaaaccatcgcagtccctc

SEQ ID NO: 763798 - DNA, 120 bp, Artificial Sequence
  ENSG00000221843_39 (sequence is synthesized)
tgagagaagccaacgcagttccttggagagaagacatcacagtccctctcagaggagccactgcagtccctctaggaaaaaccattccagtccttctgagagaagctggcgcagtccgtc

SEQ ID NO: 763799 - DNA, 120 bp, Artificial Sequence
  ENSG00000221843_40 (sequence is synthesized)
tcagagaaatcactgcagtccccccgagaggagctgtcacagtctctctgaaaggggccttcacagtccctctcagaggagccatcgcggtccctctcagagaagacatcacagtccctc

SEQ ID NO: 763800 - DNA, 120 bp, Artificial Sequence
  ENSG00000221843_41 (sequence is synthesized)
agagagaagccatcgcagtccctcagagagaagccatcgcagttcctctgagagaagacatcgcagtccctcccagaggagccatcgcggtccctcagagagaagccattgcagtccctc

SEQ ID NO: 763801 - DNA, 120 bp, Artificial Sequence
  ENSG00000221843_42 (sequence is synthesized)
tgagagaagacatcgcagtccctctcagaggagccatcgtggtccctctgagagaagacatcacagtccctctaagagaagccatcgcagtcccgctcggaggagccatcgcagtccctc

SEQ ID NO: 763802 - DNA, 120 bp, Artificial Sequence
  ENSG00000221843_43 (sequence is synthesized)
agagagaagccatcacagtccctctgagagaagccatcacagtccctctgagagaagacatcacagtccctctgagagaagccattgcagtccctctgagagaagccattgcagtccctc

SEQ ID NO: 763803 - DNA, 120 bp, Artificial Sequence
  ENSG00000221843_44 (sequence is synthesized)
tgagagaagacatcgcagtccctctgagagaagacatcacagtccctcagagaaaagccatcacagtccctctgagagaagccatcacagtccctctgagagaagacgtcacagtccctt

SEQ ID NO: 763804 - DNA, 120 bp, Artificial Sequence
  ENSG00000221843_45 (sequence is synthesized)
ggagaggagccgtcacagtctcttggagaggagccatcgcagtccctctgagaggagatctcacaggtcctttgagaggagccatcgtaggatttctgagagaagtcacagtccctcaga

SEQ ID NO: 763805 - DNA, 120 bp, Artificial Sequence
  ENSG00000221843_46 (sequence is synthesized)
gaagagccacctcagtcccttggaaagaagccgttgcagtccctctgagaggagaggacacagttcctctgggaaaacctgtcacagtccctctgagagaagccatcgcagtccctccgg

SEQ ID NO: 763806 - DNA, 120 bp, Artificial Sequence
  ENSG00000221843_47 (sequence is synthesized)
gatgaggcaagggaggacctctgagaggagccatcgcagttcctgtgagagaacccgtcacagtccctctgagatgaggccagggaggccctctgggaggaaccattgcagtccctctga

SEQ ID NO: 763807 - DNA, 120 bp, Artificial Sequence
  ENSG00000221843_48 (sequence is synthesized)
gaggagccgacgcagtccccttaaggagggactcaagtacagtttccctggagagaggcccagccatagtttgtctagagatttcaagaatcaaacaactctcctcgggaccacacataa

SEQ ID NO: 763808 - DNA, 120 bp, Artificial Sequence
  ENSG00000221843_49 (sequence is synthesized)
aaatcccaaagcagggcaagtgtggaggcctgaagctactcgatgaggcgaggtccgcccctattattcattgtcctaagtcttcatcgtgctgccctttccaggcttctttcctgctca

SEQ ID NO: 763809 - DNA, 120 bp, Artificial Sequence
  ENSG00000221843_50 (sequence is synthesized)
gccactgcctccaattcctgcgcccccagcgtggaaaggcttccatttctctctaccgggggggaggcgggtgagaatgggtctgtaatttctctaagatgaataaaggggcagtaaatg

SEQ ID NO: 763810 - DNA, 120 bp, Artificial Sequence
  ENSG00000221843_51 (sequence is synthesized)
gaggcagaaaactctggctgagaagagcatggggttgagaaatggcaccaatttgggggatggacgtcccactgccatcagatatcagccttctattattgtttgttttttttatttggc

SEQ ID NO: 763811 - DNA, 120 bp, Artificial Sequence
  ENSG00000221843_52 (sequence is synthesized)
ggctttggacactgttttccaggaatcggagctggaagcaggtggcagccaagataaactcagagacttcaaagcagcatagattgaaaaagatccagaaattaacaggtcagagagatc

SEQ ID NO: 763812 - DNA, 120 bp, Artificial Sequence
  ENSG00000221843_53 (sequence is synthesized)
ctatcctttactcttcagctcaagatccacagtgggaagaaaacctcaggatggcttgcactgaagctaacctgacatgtgtttcagaactccctgtgggctggacccaggaatatatac

SEQ ID NO: 763813 - DNA, 120 bp, Artificial Sequence
  ENSG00000221843_54 (sequence is synthesized)
tctggtcaatggagcggagccttcaacagatcttccgatacctagaaagcgcaagatcaaggcttgtggaacaggatttgcctgaatcacaggatatgatttcttcctctaccacctctg

SEQ ID NO: 763814 - DNA, 120 bp, Artificial Sequence
  ENSG00000221843_55 (sequence is synthesized)
ttcttgtggctcagaagactgttctatgctgttgtgactataagaaagcaaaacattctactgaccacagcatctcctttagttcatcatgcaatgactccagtctgtctcatcttcctg

SEQ ID NO: 763815 - DNA, 120 bp, Artificial Sequence
  ENSG00000221843_56 (sequence is synthesized)
tcttttctgaaggaacaacttgggaattccggagccatagtttacctatttcccacaaaaagcaatcctctgtgttcaggaaccaaggcagaaccctgcctctttttcagctctcagagc

SEQ ID NO: 763816 - DNA, 120 bp, Artificial Sequence
  ENSG00000221843_57 (sequence is synthesized)
cccagaaatcaaaaatttttcagaatttggcagatctttcacccttacaacctcagagctcttttatcaactctatttctgaacccctaaatatctgcaaacaaaaaaggaaaaaaaatg

SEQ ID NO: 763817 - DNA, 120 bp, Artificial Sequence
  ENSG00000221843_58 (sequence is synthesized)
atgagagaatgagcaagagtcatttgacatcagatcatgagccaaattctgtttccaaggagagaccacgacttccaaggtgggctacattcaagctctctccttcagttagaagggagc

SEQ ID NO: 763818 - DNA, 120 bp, Artificial Sequence
  ENSG00000221843_59 (sequence is synthesized)
tagaaggacatatgtctcagaaggtttttgctttgcggcaacaaacagcacctttacctttgaggaaatcatgggcaatgctgaattatataactgaagtacaaggaggagttgctgaat

SEQ ID NO: 763819 - DNA, 120 bp, Artificial Sequence
  ENSG00000221843_60 (sequence is synthesized)
cagagaaaccccaaactcagttatctatgcccattcatcaaaacactgagcaaaatatcaacaacaaatcctcagaccttccatcatttcagctccatgtgaatgctggagtgggatctg

SEQ ID NO: 763820 - DNA, 120 bp, Artificial Sequence
  ENSG00000221843_61 (sequence is synthesized)
gatcaaatagcacagaaacaaaactttcacagtcacttatctcagataagcagttacaacctggggatggccctcaaatccttggattcaagcctttagttacatcaatgggcagtctac

SEQ ID NO: 763821 - DNA, 120 bp, Artificial Sequence
  ENSG00000221843_62 (sequence is synthesized)
ctccaagaagtttagaacttaatgtaattcaagaggaaactcctttactgaagaatgatccaaaacatgtgctagagcttagtatagaggagagggtcataggttttccagaaaaaagga

SEQ ID NO: 763822 - DNA, 120 bp, Artificial Sequence
  ENSG00000221843_63 (sequence is synthesized)
tacagcagcacaagacacaagtgactaatgtggagttgaccccaaggctatcatatcaagtcaaagatagcctaaaggtaactccattggcactacttcgggtcatggattcaatgggga

SEQ ID NO: 763823 - DNA, 120 bp, Artificial Sequence
  ENSG00000221843_64 (sequence is synthesized)
tgatcccagaatcacattcagaatttgcgggtttgttctcacagctgccaagtcaagttgtgaaaccaatggaaaccatggaaacagtgagcataacccccaaaccaccaaatcaagtca

SEQ ID NO: 763824 - DNA, 120 bp, Artificial Sequence
  ENSG00000221843_65 (sequence is synthesized)
ttcaatcaatggaggcagccccaaggtctcagcaccaagttatggaatcagagagggtggccacaagattactgaatcaagtcacagataataagaaagtaactcctgtagcactgcttc

SEQ ID NO: 763825 - DNA, 120 bp, Artificial Sequence
  ENSG00000221843_66 (sequence is synthesized)
aagttatggattctatggggatgattaacaaatcacatccatgtatagaatcagtgggaatgactccaacaccacgatatcaagtcatagagtcagtgaaaatgaacacattgttgaacc

SEQ ID NO: 763826 - DNA, 120 bp, Artificial Sequence
  ENSG00000221843_67 (sequence is synthesized)
atcaagacacaaaaccagaaaagatgaatctaaggccacaacatgcagttacggaaactgtggaaatgatgccagggccacagcataaagtcatggaatctgcgggcatgacctcagggt

SEQ ID NO: 763827 - DNA, 120 bp, Artificial Sequence
  ENSG00000221843_68 (sequence is synthesized)
cacaaagtcaagtcatggaacaaggaaaggctactccagggctaatatgtcaagacacaaaatcactggaaatgatctcagcaccattacatcaagtcatgggttatgtgaaaggaattc

SEQ ID NO: 763828 - DNA, 120 bp, Artificial Sequence
  ENSG00000221843_69 (sequence is synthesized)
cagtggcactattacaagccatggatttcagggagataattccaccagcacagccacatgttatagaatctgggggcttgaccccaagttcacagttgcaaggtaggagatctgttcatc

SEQ ID NO: 763829 - DNA, 120 bp, Artificial Sequence
  ENSG00000221843_70 (sequence is synthesized)
tggtcctaccaccagagtttcaagatataaacactgtggagctgaccctaagaccaccaacggaagatacaaaatctgcggagttggccccaaagccatggttacacgatgtcagatctg

SEQ ID NO: 763830 - DNA, 120 bp, Artificial Sequence
  ENSG00000221843_71 (sequence is synthesized)
agaaggtagccccagtactattgcttgaagatgtgaaaactcctcaaatggtagaatgtaggaggtcaattcctgagacacaggtgcaaggtatgaaatatggggaactgaacaaaggga

SEQ ID NO: 763831 - DNA, 120 bp, Artificial Sequence
  ENSG00000221843_72 (sequence is synthesized)
cacaatttaaggaagtaaaagctgcagagatgagccccaaacaaaatcatgaagccacagagcctgaaagattgaccccatggcatcaagcctcagaatctttagagatgatctccggac

SEQ ID NO: 763832 - DNA, 120 bp, Artificial Sequence
  ENSG00000221843_73 (sequence is synthesized)
caggatatcaaggaaaagaagcaaagttgacctctgacaactgtcaccaagtggaaaaatctattgggttgacacaaccatctttaggaactagcccagggccactgagccaaacttcag

SEQ ID NO: 763833 - DNA, 120 bp, Artificial Sequence
  ENSG00000221843_74 (sequence is synthesized)
aatctgtggagatgagctcagtgtcattccaagacattctcaagacaatgcaccaacttggaaaagcaatgggggaaactccagtatcacaacacacaacaaaagaatctctggatttga

SEQ ID NO: 763834 - DNA, 120 bp, Artificial Sequence
  ENSG00000221843_75 (sequence is synthesized)
taccaggatcagaaatgcaaagtgtgaaatcagagggggtgaccacagagccacagccccatgatatgaagtttgtttactgcaatctagggccatgttcagaagttactgagttgtcag

SEQ ID NO: 763835 - DNA, 120 bp, Artificial Sequence
  ENSG00000221843_76 (sequence is synthesized)
agataccccccatgtcagaatataaagaaactgtggggttggcattgcctcaagttgctaagacccagggggtcatcccagtaccaccacattcagaaacaggatttttggagttgactc

SEQ ID NO: 763836 - DNA, 120 bp, Artificial Sequence
  ENSG00000221843_77 (sequence is synthesized)
taggaccaggcactcaatatgagaaatcagagccactactgcaaaatttgaaatctatggagttaaccagtgagtcatctccattattgataggatctaaaaagttaattacagaacaaa

SEQ ID NO: 763837 - DNA, 120 bp, Artificial Sequence
  ENSG00000221843_78 (sequence is synthesized)
aaccacatgttatggacctgaccccagggccacagctccagggagaaaagtctaagcagctgggtctagagtcacagttgcaagatatgaaacacatgaatttaatccaacagtcaacta

SEQ ID NO: 763838 - DNA, 120 bp, Artificial Sequence
  ENSG00000221843_79 (sequence is synthesized)
caggagtggtagaatctgaggagatgatgccagagctaccgctacaaagtatgccattggaggatttgactaagagggaagagctccaacgtgtaaaatctgtggatttaaatctaggcc

SEQ ID NO: 763839 - DNA, 120 bp, Artificial Sequence
  ENSG00000221843_80 (sequence is synthesized)
catctcagccaagtgtcaaatcttctgaattgacctcagggccacagttgccaagtgtcagattttcaaagatatttccaggaccacttcttcaaggcgaaaaacctgtagaattaatct

SEQ ID NO: 763840 - DNA, 120 bp, Artificial Sequence
  ENSG00000221843_81 (sequence is synthesized)
cacaacccccacattatggtgtgaaatctgatgaattgacctcagattccccagttcaggacatcaaattgtcagattttatcccagagccaacacatcaaagtgtcaaatttgtacagc

SEQ ID NO: 763841 - DNA, 120 bp, Artificial Sequence
  ENSG00000221843_82 (sequence is synthesized)
tgactccagaatcacaacctcaagatgtgaaatttgtggaactaagcccaggactattcttgcaagatgtcaaattttctgatttgatcccagagccaaagcatcaaggtttcaaacata

SEQ ID NO: 763842 - DNA, 120 bp, Artificial Sequence
  ENSG00000221843_83 (sequence is synthesized)
tgcagttgacaccaggagctcagctcgaagatataaagtctctagattttgtaccagagtcatctttgcagtcaagccaagggacacatattgaagatatgaaatctgttctgtctactg

SEQ ID NO: 763843 - DNA, 120 bp, Artificial Sequence
  ENSG00000221843_84 (sequence is synthesized)
aaggatcacagtttcacagcatgaaatctgcgaaattgacctcagaactaccatttcaaagtgtaaaatctgaggaagtaaacctagggccatggcagcaagatatcaaattttctgaat

SEQ ID NO: 763844 - DNA, 120 bp, Artificial Sequence
  ENSG00000221843_85 (sequence is synthesized)
tgacttcaaggccaaagctgcaaggtgtcaattctgcggatcaaactccaggatcaatgtttcatagtgtgaattttgtagaggtggttccaaagttagggctgcaagattccaaattag

SEQ ID NO: 763845 - DNA, 120 bp, Artificial Sequence
  ENSG00000221843_86 (sequence is synthesized)
caaagatatttccaggaactcaaagtatgaaacaggtagggcttaacccagagctgcagctacaagatgtcaaatgttttgatttagtaccaggaactcaacctcaaggtgtgaaatctt

SEQ ID NO: 763846 - DNA, 120 bp, Artificial Sequence
  ENSG00000221843_87 (sequence is synthesized)
tagagttaaactcagggccacagctacaatgtgtaaaagttttagagatgaccccagggccaaagatgcaaggggtaccacctgtgacaatggctccagggccagagggggaaggggtta

SEQ ID NO: 763847 - DNA, 120 bp, Artificial Sequence
  ENSG00000221843_88 (sequence is synthesized)
agcctgagttgttagtaccagagccactgtttcaaggtgtaaaatatgtagcaggcaaccaagaaccaagccttgaagctgaagtttcctataaattagtctcagagccacaaatgccag

SEQ ID NO: 763848 - DNA, 120 bp, Artificial Sequence
  ENSG00000221843_89 (sequence is synthesized)
atgcagaatccatggagttgactcctgggccacagttgcccagtgtaaatcattctgagttgaccagacaaccacagttacaaggtattaaatcttctgaattgatacaaagaccacagt

SEQ ID NO: 763849 - DNA, 120 bp, Artificial Sequence
  ENSG00000221843_90 (sequence is synthesized)
tacaaaacgtaaatcctgtggagtggagcccagtcttgaaacttaaaggtttcagatctgaaaagctaacctcagagccacagctagaagatatgacatctgcggaattaatctcagggc

SEQ ID NO: 763850 - DNA, 120 bp, Artificial Sequence
  ENSG00000221843_91 (sequence is synthesized)
cacatttgggagatgtgaaaactatgcagttaacaccagagccagaattggaagatgtcaaatctatgacgttaaccccagagccacaggcaggaggtgtaaaacttgaggaggtaaccc

SEQ ID NO: 763851 - DNA, 120 bp, Artificial Sequence
  ENSG00000221843_92 (sequence is synthesized)
cgggctcaaagcttcaatctgagttgctgacttcaggatcacacttggaagatatgaaatctgtgaccttaactccaggaccatgcctggaaagcataaaatctatggagataaccttcc

SEQ ID NO: 763852 - DNA, 120 bp, Artificial Sequence
  ENSG00000221843_93 (sequence is synthesized)
cacagccggaaggtgggaaatctgtggcgataaccttagggtcacagacagaagatgtcaaatctgtggaattcacccctgattctgagcttcaaggtgtaaaatctgtggagttgactc

SEQ ID NO: 763853 - DNA, 120 bp, Artificial Sequence
  ENSG00000221843_94 (sequence is synthesized)
catgttcaagaattcaagatttaaaaactgaggagttggtcctaggtacacagctgcaagatatgaaaactgctaaattaaaacttgggctaaagatgcaaggtgagtctatggcttttg

SEQ ID NO: 763854 - DNA, 120 bp, Artificial Sequence
  ENSG00000221843_95 (sequence is synthesized)
caccagggccattgcttcaaggggttaaatctatggagacgcttcaaaggcctcagctacaaagtgtgaaacctgaagaactgacctcagtcccacaaatgcaagatatgaaatttgtgg

SEQ ID NO: 763855 - DNA, 120 bp, Artificial Sequence
  ENSG00000221843_96 (sequence is synthesized)
agattactccatgtttaaagcttcgaagtttaaaatctataaaggagactcaagatccacatctgcaatgtgtaaaacctgtaaagttgaccccatggcaaaagaggcaggcagtaaaat

SEQ ID NO: 763856 - DNA, 120 bp, Artificial Sequence
  ENSG00000221843_97 (sequence is synthesized)
ttgtgaatataaccagaggagaagagtttgaagaagtaaaatctgtggatttagccctaaagcaacagtttcaagggatggcacctgtggatttaacccttgagcctgaacaggatggtc

SEQ ID NO: 763857 - DNA, 120 bp, Artificial Sequence
  ENSG00000221843_98 (sequence is synthesized)
agatatctgtaaactcacaagagcagcaatgtgtgaattttgagcaagtaaagaaagggtctgagtcagaaggtgtaatgtctttggagttaattccagagccaaaatctgaaggtataa

SEQ ID NO: 763858 - DNA, 120 bp, Artificial Sequence
  ENSG00000221843_99 (sequence is synthesized)
aatcggtagacctcaagtctgacctacagtcgaaaggtataaaatcatctgaattgactccagaatcaaatatgcaagatgtaaaagctaaagagttcaaacatgaaccacagttgcaaa

SEQ ID NO: 763859 - DNA, 120 bp, Artificial Sequence
  ENSG00000221843_100 (sequence is synthesized)
gtatgaaatctcccaagttgaccccaggaccacagttgcaccaagtgaaacccttgggctcgactgtagagccacagattcaaagtgtgaaaattgtggagttaaacaaagagctagagc

SEQ ID NO: 763860 - DNA, 120 bp, Artificial Sequence
  ENSG00000221843_101 (sequence is synthesized)
ttggaagaatgaaatctgttcagtggataacaagacctgagttccaaggtctaaaatctgtagggttaaatcttgggtcacaatctcgaagtgtcaaacctgcagaattgaaactttcca

SEQ ID NO: 763861 - DNA, 120 bp, Artificial Sequence
  ENSG00000221843_102 (sequence is synthesized)
tacagttgggagatatgatagcatctaaattggttctagagccaaaacttcaaggtgcaaaacctatggagtttaaccgtgggccacagttgcagtgtgtaaaaacctctgagttgtctt

SEQ ID NO: 763862 - DNA, 120 bp, Artificial Sequence
  ENSG00000221843_103 (sequence is synthesized)
caggaccacagctgcaaaaagggaaaatgctagcatccacctcagagccacaacttcaaggtgtgaaaactgtggagttaaaccaagactcacagcttacaagtgtgaaatctgtgcagt

SEQ ID NO: 763863 - DNA, 120 bp, Artificial Sequence
  ENSG00000221843_104 (sequence is synthesized)
ggataccaggacctgagttccaaggtgtaaaaactatagggttaaatcttggttcacaatctcaaggtgtcaaacctggagagtcgaaatcttccatagagtcaggaggtgtaaagtcat

SEQ ID NO: 763864 - DNA, 120 bp, Artificial Sequence
  ENSG00000221843_105 (sequence is synthesized)
ctcaactgactctagggccaaaacttcaaagtgtaacatctatggagtttaaccttgggtcacagttgcactttgtgaaagctcctgagttgtcccaaggaccacagctgcaaaaaggga

SEQ ID NO: 763865 - DNA, 120 bp, Artificial Sequence
  ENSG00000221843_106 (sequence is synthesized)
aaattccagcatcgacctcagagccatattttcaaggtgtgaaaactgtagagctaaaccaagactcacagcttggaaatgcgaaatctgtgcagtggatatcaggacctgagttccaag

SEQ ID NO: 763866 - DNA, 120 bp, Artificial Sequence
  ENSG00000221843_107 (sequence is synthesized)
gtgtaaaaactgtagggttgaatcttggttcacaatctcgaggtgtcaagcctgcagagttgaaatcctccacagagtcgggaggtgtaaaatcatctgaattgactctagggccaaaac

SEQ ID NO: 763867 - DNA, 120 bp, Artificial Sequence
  ENSG00000221843_108 (sequence is synthesized)
ttcaaggtgcaaaacctgtggagtttaactttgggccacagttgcaatgtgtgaaaactcctaagatgtcccgaggaccacagttgcagaaagggaaaattctggcgtcaacctcagagc

SEQ ID NO: 763868 - DNA, 120 bp, Artificial Sequence
  ENSG00000221843_109 (sequence is synthesized)
cacagcttcaaggtgtaaaagatgtggagtcaaacaaagactcacagcttggaagtgtgaactctgtgcagtggataccaggacctgagttccaaggtgtgaaatctgtgctaaaatgtg

SEQ ID NO: 763869 - DNA, 120 bp, Artificial Sequence
  ENSG00000221843_110 (sequence is synthesized)
gttcacaatctcgagttgtcacaactgtagaattgaaaccttcagtacaattaagaaatgtgaagtcatctgagttgactccaaggccaaagctccaaagtatacaacctttgacatcac

SEQ ID NO: 763870 - DNA, 120 bp, Artificial Sequence
  ENSG00000221843_111 (sequence is synthesized)
tccaggaacatcagttgccagggctcaaacctattgctttgaaatctgggctacagttgagaactgtgaaatcatgtggcccaatttcaacatcaaagctctgtgatataaaatctatgg

SEQ ID NO: 763871 - DNA, 120 bp, Artificial Sequence
  ENSG00000221843_112 (sequence is synthesized)
cattcaaacctgggcttcactcgcaagatgtgaaatcttctgagttgaccccaagaccacagctgcacaaagtgaaacccttggaggcatgcccaggaacacagctgcaagatgtgaagt

SEQ ID NO: 763872 - DNA, 120 bp, Artificial Sequence
  ENSG00000221843_113 (sequence is synthesized)
ctccagcgtttacacaagtgccacagttttcaggggtgaaatctggagtattaagccaagagctaccattacaaagtgataaaactgtagcgctgaactccttactacacttgaaaagca

SEQ ID NO: 763873 - DNA, 120 bp, Artificial Sequence
  ENSG00000221843_114 (sequence is synthesized)
agaaatcatctgaattggctcatcagacagaacttccaggtatgaaatctgaggagttcaactctgggccacaatggcaatgtgtcaaatcttctaagttgaaccctaagacaaagtccc

SEQ ID NO: 763874 - DNA, 120 bp, Artificial Sequence
  ENSG00000221843_115 (sequence is synthesized)
aagacatgaagtttagagagttaaaccccagttcacaattgaaagatatcccatattatgatttgaccacaaggaccaagattcaaggtgtcaaatctacagacttcaaacctgggccac

SEQ ID NO: 763875 - DNA, 120 bp, Artificial Sequence
  ENSG00000221843_116 (sequence is synthesized)
agttgcaaggagtgaaatcttctgagtcgataccgaagacaaagcttcaagaagtgaaattaatggaatgcaactcaggcccacggttgcaagatttgaaatcttctaggttgatcattg

SEQ ID NO: 763876 - DNA, 120 bp, Artificial Sequence
  ENSG00000221843_117 (sequence is synthesized)
gtataaagtgtcaagacattaaatctatggatttcagttctggaccacacttacagactgtgaaatcttctgaagtgattccagggggaaagcttcagggtgtgaaatcggtagaattca

SEQ ID NO: 763877 - DNA, 120 bp, Artificial Sequence
  ENSG00000221843_118 (sequence is synthesized)
aacctagtccaaagttacaaagtgagaaatctgatttgaccctggggaggaagtttccaggtgtgaaatctgtagagctggaatcaggcccacagttacaagatataaaatcttctgatc

SEQ ID NO: 763878 - DNA, 120 bp, Artificial Sequence
  ENSG00000221843_119 (sequence is synthesized)
aggtaacctcagggacaaggcttcaaagtatgaaatcaatggatttcaattctggacaacagacacaaagcgaaaaatcttctgagttgattcagggaacaaaccatcaagatgttaaat

SEQ ID NO: 763879 - DNA, 120 bp, Artificial Sequence
  ENSG00000221843_120 (sequence is synthesized)
ctgtagaattccaccatggtctaaagttacaaggtgtgacatcttctgagttaacaccagagacaaagcttcaaggtggggaatctgtggagttcaactcgggcccacagtggcaagata

SEQ ID NO: 763880 - DNA, 120 bp, Artificial Sequence
  ENSG00000221843_121 (sequence is synthesized)
caaaatattctaactcaataatggggacagagcttcaagatgtaaaatctatggagttcagttctggatcacacttgcaaggtatgaaatcttctgaagtgatcccagcgacaaagcttc

SEQ ID NO: 763881 - DNA, 120 bp, Artificial Sequence
  ENSG00000221843_122 (sequence is synthesized)
aaaaagtgaaatctgtgctcatgcctaggccaatgcggcaagatgtgaaatcttctgaattgactgtaggtacaaaggtacaggataggacatctttggagttaagctcaacttcacagt

SEQ ID NO: 763882 - DNA, 120 bp, Artificial Sequence
  ENSG00000221843_123 (sequence is synthesized)
tacaagatagaaaattatctatgttgacaccagggatacaccttcagggtgtgaaatctgtagaatataatcctggggcaaagttggaagatatgaaatctgggttgataaagcttcaga

SEQ ID NO: 763883 - DNA, 120 bp, Artificial Sequence
  ENSG00000221843_124 (sequence is synthesized)
cggtgaactctacagaaggcaaccatgacccagaattgcaggttgcaaaactctctaagttggccttggaatcaaagattcatagtgtggcaccttctgagttcaatgctgaaaagcagc

SEQ ID NO: 763884 - DNA, 120 bp, Artificial Sequence
  ENSG00000221843_125 (sequence is synthesized)
agcaagatgagaaatctcataaattgaatccatggccagaccttcaaagtgtaaaatttatggtgttcaatcctgagccacatctgcaacatagaaaatcttcagaattatgcacaggga

SEQ ID NO: 763885 - DNA, 120 bp, Artificial Sequence
  ENSG00000221843_126 (sequence is synthesized)
caaagcttcaagatgtaaaatctatgaaattcaatcttcagcaacagttgcaaggtgtgaaatcttctgagttgtgcctaggaacaaggcttcaaggtatacaatctttagatttcaacc

SEQ ID NO: 763886 - DNA, 120 bp, Artificial Sequence
  ENSG00000221843_127 (sequence is synthesized)
ctggaccacagttgcaaggaacaaaatctgccaagttgaatcctgggcctgagcttcaaggtataaaatctaaggtgttctgccttggaccacatttgcaagatgtgaattcttctgtat

SEQ ID NO: 763887 - DNA, 120 bp, Artificial Sequence
  ENSG00000221843_128 (sequence is synthesized)
ccattccagagccaccacatcagtgtgtaaattctactgggagcaactgtgggctacctttgcaaggtgtaaattctgcatccattccagcacctaaacttcagtgtataagttctaatg

SEQ ID NO: 763888 - DNA, 120 bp, Artificial Sequence
  ENSG00000221843_129 (sequence is synthesized)
ggtgcatccctgggccacatttgcaaggtgtgaattctgcattcattccacagccaaaagctcactgtgtaaattctattgggtgcaacccagggccgtatttacaaggtatgaaatcgc

SEQ ID NO: 763889 - DNA, 120 bp, Artificial Sequence
  ENSG00000221843_130 (sequence is synthesized)
ctgaattaactccagtttcaaaacttcaaggtatgaagtgttctgaattgaacccagggacagaaattcaaagtgagacacctatgatgttcaaccctataccacatttgcaaggtttaa

SEQ ID NO: 763890 - DNA, 120 bp, Artificial Sequence
  ENSG00000221843_131 (sequence is synthesized)
aatctgaattgactccagggtcaaagcttctacgtgcagcacctatggaatgcaaccctgggccacaggtgcagtatgtgaattcttctgagttgaatccagggctaaaattgcaatgta

SEQ ID NO: 763891 - DNA, 120 bp, Artificial Sequence
  ENSG00000221843_132 (sequence is synthesized)
tagattctatggagtgcaaacttgcgccacacttgcaaggtgtagaatcagggacaaaatttcaagttatgaaattttctgagttgcatccagggccagagcttcaaggtataaaatctg

SEQ ID NO: 763892 - DNA, 120 bp, Artificial Sequence
  ENSG00000221843_133 (sequence is synthesized)
ttgtgttcaactctgtgcaacatttacaagatgtaaaatgtgaactgactccagggacaaaatttcaagatataacaccaaaggagttcaactctggcccgcagctgcaaggtatgaatt

SEQ ID NO: 763893 - DNA, 120 bp, Artificial Sequence
  ENSG00000221843_134 (sequence is synthesized)
ctgaggagttccattcacacctcaggcagcataatgtgagatctgtggtatttgtaccagagccatgttctcaagatgtgaaatctgtgaagtcaactctatggccacaacctcaaagtg

SEQ ID NO: 763894 - DNA, 120 bp, Artificial Sequence
  ENSG00000221852_0 (sequence is synthesized)
aaacctcagaaactcctccaagcaacctaactcttaacccaacttctgacaccatgacctgctgccagaccagcttctgtggatatcccagcttctccatcagtgggacctgtggctcca

SEQ ID NO: 763895 - DNA, 120 bp, Artificial Sequence
  ENSG00000221852_1 (sequence is synthesized)
gctgctgccagccaagctgctgtgagaccagctgctgccagccacgcagctgccagactagcttctgcggatttcccagcttctcaaccagtgggacctgcagctccagttgctgccagc

SEQ ID NO: 763896 - DNA, 120 bp, Artificial Sequence
  ENSG00000221852_2 (sequence is synthesized)
caagctgctgtgagaccagctgctgccagccaagctgctgtgagaccagctgctgccagccaagctgctgccagatcagctcctgcggaactggctgtggcattggtggtggcatcagct

SEQ ID NO: 763897 - DNA, 120 bp, Artificial Sequence
  ENSG00000221852_3 (sequence is synthesized)
atggccaggagggcagcagtggagctgtgagcacccgtatcaggtggtgccgcccagacagtcgtgtggagggcacctacctacccccctgctgtgtggtgagctgcacgcccccatcct

SEQ ID NO: 763898 - DNA, 120 bp, Artificial Sequence
  ENSG00000221852_4 (sequence is synthesized)
agtttgcttattttcaattgcctaggtcacagtgtctctgaactgttcatcccttgaccacctctggaccactaacaagttctcagactttgcattgcttgtgatggagactactaagta

SEQ ID NO: 763899 - DNA, 120 bp, Artificial Sequence
  ENSG00000221852_5 (sequence is synthesized)
tatgagctcacaattctatctgattccattctacaatgaataccttgacccttcactggggacacagaaatgctacaaagccacctgctgatcatcaatttgcttgggatatactatttc

SEQ ID NO: 763900 - DNA, 120 bp, Artificial Sequence
  ENSG00000221852_6 (sequence is synthesized)
tgatatttctgcaggattaaaaattactgacatgttgtggaatttatccatgagaactatccacaagtctaatgtttccatgctttataatctattttatcttgtttacctaaaattttt

SEQ ID NO: 763901 - DNA, 120 bp, Artificial Sequence
  ENSG00000221852_7 (sequence is synthesized)
tgcaacatcaaagacaccaaattatagccaagtgacattcctcaagtcaccagagagaatggaagctcatcacccaacattcagcttctaagaagtaggctggactttccacattttaac

SEQ ID NO: 763902 - DNA, 120 bp, Artificial Sequence
  ENSG00000221852_8 (sequence is synthesized)
atctgatccatcccttggtttttggatcataatgatcttgcctgctggatatttcagttatatctgtgatacaatgtcttctgtcatttcttaataaatattatatactaggcaaagaaa

SEQ ID NO: 763903 - DNA, 120 bp, Artificial Sequence
  ENSG00000221855_0 (sequence is synthesized)
atgcaagcagcactgacggccttcttcgtgttgctctttagcctgctgagtcttctggggattgcagcgaatggcttcattgtgctggtgctgggcagggagtggctgcgatatggcagg

SEQ ID NO: 763904 - DNA, 120 bp, Artificial Sequence
  ENSG00000221855_1 (sequence is synthesized)
ttgctgcccttggatatgatcctcattagcttgggtgcctcccgcttctgcctgcagttggttgggacggtgcacaacttctactactctgcccagaaggtcgagtactctgggggtctc

SEQ ID NO: 763905 - DNA, 120 bp, Artificial Sequence
  ENSG00000221855_2 (sequence is synthesized)
ggccgacagttcttccatctacactggcacttcctgaactcagccaccttctggttttgcagctggctcagtgtcctgttctgtgtgaagattgctaacatcacacactccaccttcctg

SEQ ID NO: 763906 - DNA, 120 bp, Artificial Sequence
  ENSG00000221855_3 (sequence is synthesized)
ttttgggtgaactaccctgtatatcaagaatttttaattagaaaattttctgggaacatgacctacaagtggaatacaaggatagaaacatactatttcccatccctgaaactggtcatc

SEQ ID NO: 763907 - DNA, 120 bp, Artificial Sequence
  ENSG00000221855_4 (sequence is synthesized)
tggtcaattcctttttctgtttttctggtctcaattatgctgttaattaattctctgaggaggcatactcagagaatgcagcacaacgggcacagcctgcaggaccccagcacccaggct

SEQ ID NO: 763908 - DNA, 120 bp, Artificial Sequence
  ENSG00000221855_5 (sequence is synthesized)
cacaccagagctctgaagtccctcatctccttcctcattctttatgctctgtcctttctgtccctgatcattgatgccgcaaaatttatctccatgcagaacgacttttactggccatgg

SEQ ID NO: 763909 - DNA, 120 bp, Artificial Sequence
  ENSG00000221855_6 (sequence is synthesized)
caaattgcagtctacctgtgcatatctgtccatcccttcatcctcatcttcagcaacctcaagcttcgaagcgtgttctcgcagctcctgttgttggcaaggggcttctgggtggcctag

SEQ ID NO: 763910 - DNA, 120 bp, Artificial Sequence
  ENSG00000221858_0 (sequence is synthesized)
tcccattagctgtgaaatttctgtcttaagtacatcacaagatttttctgtcacgagaacatggaaagcaatcagacctggatcacagaagtcatcctgttgggattccaggtggaccca

SEQ ID NO: 763911 - DNA, 120 bp, Artificial Sequence
  ENSG00000221858_1 (sequence is synthesized)
gctctggagttgttcctctttgggtttttcttgctattctacagcttaaccctgatgggaaatgggattatcctggggctcatctacttggactctagactgcacacacccatgtatgtc

SEQ ID NO: 763912 - DNA, 120 bp, Artificial Sequence
  ENSG00000221858_2 (sequence is synthesized)
ttcctgtcacacctggccattgtggacatgtcctatgcctcgagtactgtccctaagatgctagcaaatcttgtgatgcacaaaaaagtcatctcctttgctccttgcatacttcagact

SEQ ID NO: 763913 - DNA, 120 bp, Artificial Sequence
  ENSG00000221858_3 (sequence is synthesized)
tttttgtatttggcgtttgctattacagagtgtctgattttggtgatgatgtgctatgatcggtatgtggcaatctgtcaccccttgcaatacaccctcattatgaactggagagtgtgc

SEQ ID NO: 763914 - DNA, 120 bp, Artificial Sequence
  ENSG00000221858_4 (sequence is synthesized)
cccacaaaagatcaaccactttttctgtcaaatcatgtccgtattcaaattggcctgtgctgacactaggctcaaccaggtggtcctatttgcgggttctgcgttcatcttagtggggcc

SEQ ID NO: 763915 - DNA, 120 bp, Artificial Sequence
  ENSG00000221858_5 (sequence is synthesized)
gctctgcctggtgctggtctcctacttgcacatcctggtggccatcttgaggatccagtctggggagggccgcagaaaggccttctctacctgctcctcccacctctgcgtggtggggct

SEQ ID NO: 763916 - DNA, 120 bp, Artificial Sequence
  ENSG00000221858_6 (sequence is synthesized)
tttctttggcagcgccattgtcatgtacatggcccccaagtcaagccattctcaagaacggaggaagatcctttccctgttttacagccttttcaacccgatcctgaaccccctcatcta

SEQ ID NO: 763917 - DNA, 120 bp, Artificial Sequence
  ENSG00000221858_7 (sequence is synthesized)
cagccttaggaatgcagaggtgaaaggggctctaaagagagtcctttggaaacagagatcaatgtgaagaatcatttgagatatcctgagtgtgtaagcatggttctcatgaccctgggt

SEQ ID NO: 763918 - DNA, 120 bp, Artificial Sequence
  ENSG00000221858_8 (sequence is synthesized)
gcatgccaagattctcctgggtaggaacaaccttgccattcttcctgagttctcacttctttgcataagcaggaacacaagtgcacatgcgtgcacacacacacaaacagaggcatacac

SEQ ID NO: 763919 - DNA, 120 bp, Artificial Sequence
  ENSG00000221858_9 (sequence is synthesized)
acctgccccacacctacacacgctgacactcatacgaataacaaagctggaggatagagaggagaggggaaggtgttacactgctcagtagggaagacataggatggtgggaagacgctt

SEQ ID NO: 763920 - DNA, 120 bp, Artificial Sequence
  ENSG00000221858_10 (sequence is synthesized)
aatttcctttttaattctttaatttaccacacccaatactgtttatctttagacttcttataaaaagagaaactggcctggcgtggtggctgaagcctgtaatcccaacactttgggagg

SEQ ID NO: 763921 - DNA, 78 bp, Artificial Sequence
  ENSG00000221858_11 (sequence is synthesized)
tcgagaccagcctaaccaacatggcgaaacagggcgcctgtaatcccagctctacttgggaggctgaggcaggagaat

SEQ ID NO: 763922 - DNA, 120 bp, Artificial Sequence
  ENSG00000221858_12 (sequence is synthesized)
aaataaataaagagagagaaactaattacttttactatttaaggcattgataccaaacctgagataaacttatgaaacagaaaatcacaatctaatcctactcatgaacatagatgcaaa

SEQ ID NO: 763923 - DNA, 120 bp, Artificial Sequence
  ENSG00000221858_13 (sequence is synthesized)
cctcttaaagaaaatattaatgaaacaagtccatcagaatgaagtaaggatgtattataatgaaactatgtatacccttaaaatgcagcaataatttaacattaaaacaaacaacaaaaa

SEQ ID NO: 763924 - DNA, 120 bp, Artificial Sequence
  ENSG00000221858_14 (sequence is synthesized)
taacttccccacattaacaaattaaagaatacatttcatatgaacatctcagtagatccaagaaagtgtttgacaagatttaagatcaattctttataagctaatatcgcagtaagactt

SEQ ID NO: 763925 - DNA, 120 bp, Artificial Sequence
  ENSG00000221858_15 (sequence is synthesized)
ttttcgggtaaagaatcagacacaaaaaaaatcacttgtttttcttgatttcactttttactagagatcctaaccaatacagttagacaaaaagaacaaatacacccatgcatgcgcaca

SEQ ID NO: 763926 - DNA, 120 bp, Artificial Sequence
  ENSG00000221858_16 (sequence is synthesized)
cacgcacacacgcacacacacacacactcacacgtgcacacacatttgagaaagaagaaacaaactgtaattacatacaaatgacattactgtatatgtaggaaattcaaaagaattata

SEQ ID NO: 763927 - DNA, 120 bp, Artificial Sequence
  ENSG00000221858_17 (sequence is synthesized)
agaaattttaaagtagcttgatacaaaatcaatataaaaatatattatatttttaaagcagtaacaaacaattaaaatgaaacttgaaaaaacgctaccatacacaacaggatttaattc

SEQ ID NO: 763928 - DNA, 120 bp, Artificial Sequence
  ENSG00000221858_18 (sequence is synthesized)
tcaaatgcttaggaataattataacaaagattatacaaaagctctaaagagacaattaaaaatttattgagagactatggtaaataaatagatacacaatgtgtggtatgccaagttctt

SEQ ID NO: 763929 - DNA, 120 bp, Artificial Sequence
  ENSG00000221858_19 (sequence is synthesized)
ggactgaaaaacataatattacaaagattcaatctccttaaattgattattagatttaatacaatcccaatcaatatcgcagcagggtgtgtggatgtgtgcagaactcaacaaactaat

SEQ ID NO: 763930 - DNA, 120 bp, Artificial Sequence
  ENSG00000221858_20 (sequence is synthesized)
cttaaaattcaagggaccaaggctagctcaaactctattaaaagagaaagagtacaacgtgggaggatttgatccttcagatatcaaaacacactatatagtgctaataaacagaacagt

SEQ ID NO: 763931 - DNA, 120 bp, Artificial Sequence
  ENSG00000221858_21 (sequence is synthesized)
gtggtatttatacacagatagaccaaaaaacaaacagaatagaaagaaaattagtgtatatttgcttttattagcacttgctatattagaggtgtggcatggcatatcactggggaatga

SEQ ID NO: 763932 - DNA, 120 bp, Artificial Sequence
  ENSG00000221858_22 (sequence is synthesized)
aaaagctttgaagtaaatggtgttgggacaaccaagtctttataaagatattcaaatcatgcagaaaattcaacttctggtgtattcaagatttaagtgtcaaaggcagaactctaaagc

SEQ ID NO: 763933 - DNA, 120 bp, Artificial Sequence
  ENSG00000221858_23 (sequence is synthesized)
agaagatatacaagagaaggattttttaaacaatacacataattgctattgtgaaataatatctgatattataaaatctttaagctgcattaaataaaaatattagtgtatgtgactggg

SEQ ID NO: 763934 - DNA, 120 bp, Artificial Sequence
  ENSG00000221858_24 (sequence is synthesized)
tgggttgaaattaagaacttatgttaatcaaaacagggcataaaaagtgaaaggacaagccacaaaatcttctggaagactttctgatttatcagctctcaagcagtacatccccaaaga

SEQ ID NO: 763935 - DNA, 120 bp, Artificial Sequence
  ENSG00000221858_25 (sequence is synthesized)
ccagcatatttcagagtctcatgcattgtcttgactaggtgactttcaatcatatctcttcagtctgtctttttatggcattattaagtacttgaagtttttccctttatatattttttt

SEQ ID NO: 763936 - DNA, 120 bp, Artificial Sequence
  ENSG00000221858_26 (sequence is synthesized)
cacatgtgtgttgtcagtttacaatcagtaatatacaagatcgtcgtacacatcaattttgtcttgtcatagctgtgtctctagtatctagagcagagctaggtacagagaagattctca

SEQ ID NO: 763937 - DNA, 120 bp, Artificial Sequence
  ENSG00000221858_27 (sequence is synthesized)
acaattatctgttgacagacgaccaataggtatccccaggaaagtgtaagcctatccacattcttcctgaaaccaagaagcaaccaagttagggggagagagatgcatttttatgttcta

SEQ ID NO: 763938 - DNA, 120 bp, Artificial Sequence
  ENSG00000221858_28 (sequence is synthesized)
tttattaataatttctattttgcacatgagaagatcgaggaacacagaggttgagtaacttaccctgagtcattgagttagcataatcaatggaaaatatagagtttaaaaaaataggtt

SEQ ID NO: 763939 - DNA, 120 bp, Artificial Sequence
  ENSG00000221858_29 (sequence is synthesized)
ctctggctccagagctggtattcttttattgttaaacaatagaaatttatgtccaagatcaggtgccaagcatcgtcgagctctagtggggactttcttctggctttcagagagtgtctt

SEQ ID NO: 763940 - DNA, 120 bp, Artificial Sequence
  ENSG00000221858_30 (sequence is synthesized)
cccactgtgtctacacatggcagagagagagagagcccatattctcaatacaatactaactctatgtacaactgtagcttacaccaatgacccattgattcaagacaaaagataaacata

SEQ ID NO: 763941 - DNA, 120 bp, Artificial Sequence
  ENSG00000221858_31 (sequence is synthesized)
tctcccttctaccaccaggaaggaaagttatcaggatcattgaaggaggactttctttctctctttcttcctttctttcttctttctttccttccttccttcctttctctttctcttcct

SEQ ID NO: 763942 - DNA, 120 bp, Artificial Sequence
  ENSG00000221859_0 (sequence is synthesized)
cactcactcacacactcactcactcacacacctcccccagctcaccgcctccccactccagcatggccgcctccaccatgtccatctgctccagcgcctgcactgactcttggcgggtag

SEQ ID NO: 763943 - DNA, 120 bp, Artificial Sequence
  ENSG00000221859_1 (sequence is synthesized)
tcgactgcccagagagctgctgcgagccctgctgctgtgccccagcccccagcttgaccctggtctgcaccccagtgagctgtgtgtccagcccctgctgccagacggcctgtgagccca

SEQ ID NO: 763944 - DNA, 120 bp, Artificial Sequence
  ENSG00000221859_2 (sequence is synthesized)
gcgcctgccaatcaggctacaccagctcctgcacaaccccatgctaccagcagtctagctgccagccggattgctgcacctcctccccctgccagcaggcctgctgtgtgcctgtctgct

SEQ ID NO: 763945 - DNA, 120 bp, Artificial Sequence
  ENSG00000221859_3 (sequence is synthesized)
gtgtgcccgtctgctgcgtgcccgtctgtaacaagcctgtgtgcttcgtgcctacctgctccgagtcttccccttcatgctgccagcagtctagctgccagccaacttgctgcacctcct

SEQ ID NO: 763946 - DNA, 120 bp, Artificial Sequence
  ENSG00000221859_4 (sequence is synthesized)
tgtgtgcctgtctgctctaagtccgtctgctatgtgcctgtgtgctctggggcttccacttcatgctgccagcagtctagctgccagcctgcttgctgcaccgcctcctgctgcagaccc

SEQ ID NO: 763947 - DNA, 120 bp, Artificial Sequence
  ENSG00000221859_5 (sequence is synthesized)
tcctcctccgtgtccctcctctgccaccctgtgtgcaagtccacctgctgcgtgcccgtcccctcctgcggtgcctctgcctcctcctgccagcccagctgctgccgcacggcctcctgt

SEQ ID NO: 763948 - DNA, 120 bp, Artificial Sequence
  ENSG00000221859_6 (sequence is synthesized)
gtttccctcctctgccgccccgtgtgctcccgccctgcctgctacagcctctgctctggccagaagtccagctgctgacagccctggatgtgatccggagtcccttcccaccaggggctg

SEQ ID NO: 763949 - DNA, 120 bp, Artificial Sequence
  ENSG00000221859_7 (sequence is synthesized)
acctcccagctgccccagcaagctctgccctctctggctttgacaccctcagaaggtggggcaggctctttgtcttggggaccaggatgctcccccagtccttcccagatgatggctgcc

SEQ ID NO: 763950 - DNA, 120 bp, Artificial Sequence
  ENSG00000221859_8 (sequence is synthesized)
tgtgggaccccagctactcccccagacccaagttctgcagaactaacccccagcaggcctggttccaccctgggcagcaccccctctagttctaataaagccgcctctgtctcacaccaa

SEQ ID NO: 763951 - DNA, 120 bp, Artificial Sequence
  ENSG00000221864_0 (sequence is synthesized)
tcactgccctctgcctcgaccttatccagccacacgccaccatgtgtcataccagctgctcctcgggctgccagccagcctgctgcgcgcccagcccctgccagccagcctgttgtgtgc

SEQ ID NO: 763952 - DNA, 120 bp, Artificial Sequence
  ENSG00000221864_1 (sequence is synthesized)
ccagctcctgccaggcatcctgctgtgtgcctgtgggctgccagtcctccgtgtgtgtgcccgtgagcttcaagccagccgtgtgcctgcccgtgagctgccagtcttctgtgtgtgtgc

SEQ ID NO: 763953 - DNA, 120 bp, Artificial Sequence
  ENSG00000221864_2 (sequence is synthesized)
ccatgagcttcaagtcagctgtgtgcgtgcccgtgagctgccagtcttctgtgtgtgtgcctgtgagctgcaggcccattgtgtgtgcagccccctcctgccagtcctccctgtgcgtgc

SEQ ID NO: 763954 - DNA, 120 bp, Artificial Sequence
  ENSG00000221864_3 (sequence is synthesized)
cgtgtatgcggctccgtcctgccagtcctctgggtgctgccagccctcctgcaccagcgtcctctgcagacccatctcctacagtatctcttcctgctgctgagcatgaatctccagacc

SEQ ID NO: 763955 - DNA, 120 bp, Artificial Sequence
  ENSG00000221864_4 (sequence is synthesized)
cgctgctcccagtgcagatgaggccacacctgtacactccctggatgagtcctcagttggtcttctgcacatggtgcaggtgaaaagcatgctcagttgaaccctctgaattctggattg

SEQ ID NO: 763956 - DNA, 120 bp, Artificial Sequence
  ENSG00000221864_5 (sequence is synthesized)
agaatgtgacagaatgatctggagcccttgctgaccttgcccatccccccagggaagtctggggtcccagagtcattctctgaccccatgagagccaaataaaccagctttccccatgca

SEQ ID NO: 763957 - DNA, 120 bp, Artificial Sequence
  ENSG00000221866_0 (sequence is synthesized)
tgcgttcggggctggggctggaggaggcagccacacgcgcgcacacgcacacgttcagaggagggcgagaggcagcggcataggctccatctgcagtgtcaatgcggcgctcccgctgaa

SEQ ID NO: 763958 - DNA, 120 bp, Artificial Sequence
  ENSG00000221866_1 (sequence is synthesized)
ggagggaaacgcggcgcgtccagtaggggagactgcattgctgagtcctggccctctgaggggacgactgtgcctgagtgctgctgtgccactgggacccgcctctgccatgaaagccat

SEQ ID NO: 763959 - DNA, 120 bp, Artificial Sequence
  ENSG00000221866_2 (sequence is synthesized)
gccctggaactggacctgccttctctcccacctcctcatggtgggcatgggctcctccactttgctcacccggcagccagccccgctgtcccagaagcagcggtcatttgtcacattccg

SEQ ID NO: 763960 - DNA, 120 bp, Artificial Sequence
  ENSG00000221866_3 (sequence is synthesized)
aggagagcccgccgagggtttcaatcacctggtggtggatgagaggacaggacacatttacttgggggccgtcaatcggatttacaagctctccagcgacctgaaggtcttggtgacgca

SEQ ID NO: 763961 - DNA, 120 bp, Artificial Sequence
  ENSG00000221866_4 (sequence is synthesized)
tgagacagggccggacgaggacaaccccaagtgttacccaccccgcatcgtccagacctgcaatgagcccctgaccaccaccaacaatgtcaacaagatgctcctcatagactacaagga

SEQ ID NO: 763962 - DNA, 120 bp, Artificial Sequence
  ENSG00000221866_5 (sequence is synthesized)
gaacaggctgattgcctgtgggagcctgtaccaaggcatctgcaagctgctgaggctggaggacctcttcaagctgggggagccttatcataagaaggagcactatctgtcaggtgtcaa

SEQ ID NO: 763963 - DNA, 120 bp, Artificial Sequence
  ENSG00000221866_6 (sequence is synthesized)
cgagagcggctcagtctttggagtgatcgtctcctacagcaacctggatgacaagctgttcattgccacggcagtggatgggaagcccgagtattttcccaccatctccagccggaaact

SEQ ID NO: 763964 - DNA, 120 bp, Artificial Sequence
  ENSG00000221866_7 (sequence is synthesized)
gaccaagaactctgaggcggatggcatgttcgcgtacgtcttccatgatgagttcgtggcctcgatgattaagatcccttcggacaccttcaccatcatccctgactttgatatctacta

SEQ ID NO: 763965 - DNA, 120 bp, Artificial Sequence
  ENSG00000221866_8 (sequence is synthesized)
tgtctatggttttagcagtggcaactttgtctactttttgaccctccaacctgagatggtgtctccaccaggctccaccaccaaggagcaggtgtatacatccaagctcgtgaggctttg

SEQ ID NO: 763966 - DNA, 120 bp, Artificial Sequence
  ENSG00000221866_9 (sequence is synthesized)
caaggaggacacagccttcaactcctatgtagaggtgcccattggctgtgagcgcagtggggtggagtaccgcctgctgcaggctgcctacctgtccaaagcgggggccgtgcttggcag

SEQ ID NO: 763967 - DNA, 120 bp, Artificial Sequence
  ENSG00000221866_10 (sequence is synthesized)
gacccttggagtccatccagatgatgacctgctcttcaccgtcttctccaagggccagaagcggaaaatgaaatccctggatgagtcggccctgtgcatcttcatcttgaagcagataaa

SEQ ID NO: 763968 - DNA, 120 bp, Artificial Sequence
  ENSG00000221866_11 (sequence is synthesized)
tgaccgcattaaggagcggctgcagtcttgttaccggggcgagggcacgctggacctggcctggctcaaggtgaaggacatcccctgcagcagtgcgctcttaaccattgacgataactt

SEQ ID NO: 763969 - DNA, 120 bp, Artificial Sequence
  ENSG00000221866_12 (sequence is synthesized)
ctgtggcctggacatgaatgctcccctgggagtgtccgacatggtgcgtggaattcccgtcttcacggaggacagggaccgcatgacgtctgtcatcgcatatgtctacaagaaccactc

SEQ ID NO: 763970 - DNA, 120 bp, Artificial Sequence
  ENSG00000221866_13 (sequence is synthesized)
tctggcctttgtgggcaccaaaagtggcaagctgaagaagatccgggtggatggacccaggggcaacgccctccagtatgagacggtgcaggtggtggaccccggcccagtcctccggga

SEQ ID NO: 763971 - DNA, 120 bp, Artificial Sequence
  ENSG00000221866_14 (sequence is synthesized)
tatggccttctccaaggaccacgagcaactctacatcatgtcagagaggcagctcaccagagtccctgtggagtcctgtggtcagtatcagagctgcggcgagtgccttggctcaggcga

SEQ ID NO: 763972 - DNA, 120 bp, Artificial Sequence
  ENSG00000221866_15 (sequence is synthesized)
cccccactgtggctggtgtgtgctgcacaacacttgcacccggaaggagcggtgtgagcggtccaaggagccccgcaggtttgcctcggagatgaagcagtgtgtccggctgacggtcca

SEQ ID NO: 763973 - DNA, 120 bp, Artificial Sequence
  ENSG00000221866_16 (sequence is synthesized)
tcccaacaatatctccgtctctcagtacaacgtgctgctggtcctggagacgtacaatgtcccggagctgtcagctggcgtcaactgcacctttgaggacctgtcagagatggatgggct

SEQ ID NO: 763974 - DNA, 120 bp, Artificial Sequence
  ENSG00000221866_17 (sequence is synthesized)
ggtcgtgggcaatcagatccagtgctactcccctgcagccaaggaggtgccccggatcatcacagagaatggggaccaccatgtcgtacagcttcagctcaaatcaaaggagaccggcat

SEQ ID NO: 763975 - DNA, 120 bp, Artificial Sequence
  ENSG00000221866_18 (sequence is synthesized)
gaccttcgccagcaccagctttgtcttctacaattgcagcgtccacaattcgtgcctgtcctgcgtggagagtccataccgctgccactggtgtaaataccggcatgtctgcacccatga

SEQ ID NO: 763976 - DNA, 120 bp, Artificial Sequence
  ENSG00000221866_19 (sequence is synthesized)
ccccaagacctgctccttccaggaaggccgagtgaagctgcccgaggactgcccccagctgctgcgagtggacaagatcctggtgcccgtggaggtgatcaagcctatcacgctgaaggc

SEQ ID NO: 763977 - DNA, 120 bp, Artificial Sequence
  ENSG00000221866_20 (sequence is synthesized)
caagaacctcccccagccccagtctgggcagcgtggctacgaatgcatcctcaacattcagggcagcgagcagcgagtgcccgccctgcgcttcaacagctccagcgtacagtgccagaa

SEQ ID NO: 763978 - DNA, 120 bp, Artificial Sequence
  ENSG00000221866_21 (sequence is synthesized)
cacctcttattcctatgaagggatggagatcaacaacctgcccgtggagttgacagtcgtgtggaatgggcacttcaacattgacaacccagctcagaataaagttcacctctacaagtg

SEQ ID NO: 763979 - DNA, 120 bp, Artificial Sequence
  ENSG00000221866_22 (sequence is synthesized)
tggagccatgcgtgagagctgcgggctgtgcctcaaggctgacccagacttcgcatgtggctggtgccagggcccaggccagtgcaccctgcgccagcactgccctgcccaggagagcca

SEQ ID NO: 763980 - DNA, 120 bp, Artificial Sequence
  ENSG00000221866_23 (sequence is synthesized)
gtggctggagctgtctggtgccaaaagcaagtgcacaaacccccgcatcacagagataatcccggtgacaggcccccgggaagggggcaccaaggtcactatccgaggggagaacctggg

SEQ ID NO: 763981 - DNA, 120 bp, Artificial Sequence
  ENSG00000221866_24 (sequence is synthesized)
cctggaatttcgcgacatcgcctcccatgtcaaggttgctggcgtggagtgcagccctttagtggatggttacatccctgcagaacagatcgtgtgtgagatgggggaggccaagcccag

SEQ ID NO: 763982 - DNA, 120 bp, Artificial Sequence
  ENSG00000221866_25 (sequence is synthesized)
ccagcatgcaggcttcgtggagatctgcgtggctgtgtgtcggcctgaattcatggcccggtcctcacagctctattacttcatgacactgactctctcagatctgaagcccagccgggg

SEQ ID NO: 763983 - DNA, 120 bp, Artificial Sequence
  ENSG00000221866_26 (sequence is synthesized)
gcccatgtccggagggacccaagtgaccatcacaggcaccaacctgaatgccggaagcaacgtggtggtgatgtttggaaagcagccctgtctcttccacaggcgatctccatcctacat

SEQ ID NO: 763984 - DNA, 120 bp, Artificial Sequence
  ENSG00000221866_27 (sequence is synthesized)
tgtctgcaacaccacatcctcagatgaggtgctagagatgaaggtgtcggtgcaggtggacagggccaagatccaccaggacctggtctttcagtatgtggaagaccccaccatcgtgcg

SEQ ID NO: 763985 - DNA, 120 bp, Artificial Sequence
  ENSG00000221866_28 (sequence is synthesized)
gattgagccagaatggagcattgtcagtggaaacacacccatcgccgtatgggggacccacctggacctcatacagaacccccagatccgtgccaagcatggagggaaggagcacatcaa

SEQ ID NO: 763986 - DNA, 120 bp, Artificial Sequence
  ENSG00000221866_29 (sequence is synthesized)
tatctgtgaggttctgaacgctactgagatgacctgtcaggcgcccgccctcgctctgggtcctgaccaccagtcagacctgaccgagaggcccgaggagtttggcttcatcctggacaa

SEQ ID NO: 763987 - DNA, 120 bp, Artificial Sequence
  ENSG00000221866_30 (sequence is synthesized)
cgtccagtccctgctcatcctcaacaagaccaacttcacctactatcccaacccggtgtttgaggcctttggtccctcaggaatcctggagctcaagcctggcacgcccatcatcctaaa

SEQ ID NO: 763988 - DNA, 120 bp, Artificial Sequence
  ENSG00000221866_31 (sequence is synthesized)
gggcaagaacctgatcccgcctgtggctgggggcaacgtgaagctgaactacactgtgctggttggggagaagccgtgcaccgtgaccgtgtcagatgtccagctgctctgcgagtcccc

SEQ ID NO: 763989 - DNA, 120 bp, Artificial Sequence
  ENSG00000221866_32 (sequence is synthesized)
caacctcatcggcaggcacaaagtgatggcccgtgtcggtggcatggagtactccccggggatggtgtacattgccccggacagcccgctcagcctgcccgccatcgtcagcatcgcagt

SEQ ID NO: 763990 - DNA, 120 bp, Artificial Sequence
  ENSG00000221866_33 (sequence is synthesized)
ggctggcggcctcctcatcattttcatcgtggccgtgctcattgcctataaacgcaagtcccgcgaaagtgacctcacgctgaagcggctgcagatgcagatggacaacctggagtcccg

SEQ ID NO: 763991 - DNA, 120 bp, Artificial Sequence
  ENSG00000221866_34 (sequence is synthesized)
tgtggccctggagtgcaaggaagcctttgccgagctgcagacggacatccatgagctgaccagtgacctggatggagccgggattccgttcctggactatagaacttacaccatgcgggt

SEQ ID NO: 763992 - DNA, 120 bp, Artificial Sequence
  ENSG00000221866_35 (sequence is synthesized)
gctgttcccaggaattgaagaccaccctgtcctccgggaccttgaggtcccgggctaccggcaggagcgtgtggagaaaggcctgaagctcttcgcccagctcatcaacaacaaggtgtt

SEQ ID NO: 763993 - DNA, 120 bp, Artificial Sequence
  ENSG00000221866_36 (sequence is synthesized)
cctgctgtccttcatccgcacgcttgagtcccagcgtagcttctccatgcgcgaccgtggcaacgtggcctcactcatcatgaccgtgctgcagagcaagctggagtacgccactgatgt

SEQ ID NO: 763994 - DNA, 120 bp, Artificial Sequence
  ENSG00000221866_37 (sequence is synthesized)
gctgaagcagctgctggccgacctcattgacaagaacctggagagcaagaaccaccctaagctgctgctcaggaggactgagtcagtggctgagaagatgctgaccaattggtttacttt

SEQ ID NO: 763995 - DNA, 120 bp, Artificial Sequence
  ENSG00000221866_38 (sequence is synthesized)
cctcctctacaagttcctcaaggagtgtgctggggagcccctcttctccctgttctgtgccatcaagcagcagatggagaagggccccattgacgccatcacgggcgaggcccgctactc

SEQ ID NO: 763996 - DNA, 120 bp, Artificial Sequence
  ENSG00000221866_39 (sequence is synthesized)
cttgagcgaggacaagctcatccgccagcagattgactacaaaaccctggtcctgagctgtgtcagcccagacaatgccaacagccccgaggtcccagtaaagatcctcaactgtgacac

SEQ ID NO: 763997 - DNA, 120 bp, Artificial Sequence
  ENSG00000221866_40 (sequence is synthesized)
catcactcaggtcaaggagaagattctggatgccatcttcaagaatgtgccttgctcccaccggcccaaagctgcagatatggatctggagtggcgacaaggaagtggggcaaggatgat

SEQ ID NO: 763998 - DNA, 120 bp, Artificial Sequence
  ENSG00000221866_41 (sequence is synthesized)
cttgcaggatgaagacatcaccaccaagattgagaatgattggaagcgactgaacacactggcccactaccaggtgccagatggttccgtggtggcattagtgtccaagcaggtgacagc

SEQ ID NO: 763999 - DNA, 120 bp, Artificial Sequence
  ENSG00000221866_42 (sequence is synthesized)
ctataacgcagtgaacaactccaccgtctccaggacctcagcaagtaaatatgaaaacatgatccggtacacgggcagccccgacagcctccgctcacggacacctatgatcactcctga

SEQ ID NO: 764000 - DNA, 120 bp, Artificial Sequence
  ENSG00000221866_43 (sequence is synthesized)
cctggagagtggagtcaagatgtggcacctagtgaagaaccacgagcacggagaccagaaggagggggaccgggggagcaagatggtgtctgaaatctacctgacccgactcctggccac

SEQ ID NO: 764001 - DNA, 120 bp, Artificial Sequence
  ENSG00000221866_44 (sequence is synthesized)
taagggcacactgcagaagtttgtggatgacctctttgagaccatcttcagcacggcacaccgtggctctgccctgcccctggccatcaagtacatgtttgacttcctggatgagcaggc

SEQ ID NO: 764002 - DNA, 120 bp, Artificial Sequence
  ENSG00000221866_45 (sequence is synthesized)
tgataaacatggcattcatgacccgcacgtccgccatacctggaagagcaattgcctgcccctgaggttttgggtcaacatgatcaagaacccgcagtttgtgtttgacatccataagaa

SEQ ID NO: 764003 - DNA, 120 bp, Artificial Sequence
  ENSG00000221866_46 (sequence is synthesized)
cagcatcacagacgcctgcctctctgtggtggctcagaccttcatggactcttgctccacgtcagagcaccggctgggcaaggactcgccctccaacaagctgctgtatgccaaggacat

SEQ ID NO: 764004 - DNA, 120 bp, Artificial Sequence
  ENSG00000221866_47 (sequence is synthesized)
ccccagctacaagaattgggtggagaggtattactcagacatagggaagatgccagccatcagcgaccaagacatgaacgcatacctggctgagcagtcccggatgcacatgaatgagtt

SEQ ID NO: 764005 - DNA, 120 bp, Artificial Sequence
  ENSG00000221866_48 (sequence is synthesized)
caacaccatgagtgcactctcagagatcttctcctatgtgggcaaatacagcgaggagatccttggacctctggaccacgatgaccagtgtgggaagcagaaactggcctacaaactaga

SEQ ID NO: 764006 - DNA, 120 bp, Artificial Sequence
  ENSG00000221866_49 (sequence is synthesized)
acaagtcataaccctcatgagcttagacagctgagaaccgtccttccagggccgccctggagggggacacaccaagccgtgcctcagtctagattatcatctttaccaagtgcaagttcc

SEQ ID NO: 764007 - DNA, 120 bp, Artificial Sequence
  ENSG00000221866_50 (sequence is synthesized)
gactggcatcagcagcatcccctgagcagcgctgtttctctctctttctctctgcctctttccgtttctccctccttcctggatctcttctcttccagttgctctgccaacacgattgga

SEQ ID NO: 764008 - DNA, 120 bp, Artificial Sequence
  ENSG00000221866_51 (sequence is synthesized)
ccaagccactgaccctcagttagtccaagaatggccaggcccatggcaagggagctgaccagaagatgtcagagaggcctctgtctcccaggtgctcctgaccctgtgcatgtcagcagc

SEQ ID NO: 764009 - DNA, 120 bp, Artificial Sequence
  ENSG00000221866_52 (sequence is synthesized)
agggtgcaaataacgaatgaggagccagggacaggggacatttctgtgctgctacttcaccttccactttggcagcccctgctttggtctgagccttggcctagggaagaggcaaggaag

SEQ ID NO: 764010 - DNA, 120 bp, Artificial Sequence
  ENSG00000221866_53 (sequence is synthesized)
gacttcagtattatctttactgggaagacatcacctggctctcccttcccacagttccatctccagtggttcagccagtggtctgatcgctttgcagctgtgagaagaaaggctacacct

SEQ ID NO: 764011 - DNA, 120 bp, Artificial Sequence
  ENSG00000221866_54 (sequence is synthesized)
tccaggtctccagagggacctgcctgccctgcctgctcccccgccagtagaaagccaggcaggagaaagaatagcaattacattccaccatggagatgctcctgaccttttcatctgaat

SEQ ID NO: 764012 - DNA, 120 bp, Artificial Sequence
  ENSG00000221866_55 (sequence is synthesized)
cctagtagcagaaatgtaacacagggggagaaaaggaaagagagttgcatctaccctggaagcagaatttgttttccatttaccctcaaattcaaatgagtcacaatcatagtcataggt

SEQ ID NO: 764013 - DNA, 120 bp, Artificial Sequence
  ENSG00000221866_56 (sequence is synthesized)
ctagtccactaccagagccctgagtgctgtcaagagaaagcatctatctccaccctcctttgtcaaccttcatcaagggtcaacgtgaaatgcagagtgcatctaggagattctacctcc

SEQ ID NO: 764014 - DNA, 120 bp, Artificial Sequence
  ENSG00000221866_57 (sequence is synthesized)
agccatctccatggctccatccccatcatccttcctgagaactccatagacggctggggccaacagcctagtccctgttccctctgcagaatccggtgccattgctatgcagatgacttt

SEQ ID NO: 764015 - DNA, 120 bp, Artificial Sequence
  ENSG00000221866_58 (sequence is synthesized)
gtcactgggctgtccagacctctttgggaatgatttcatcaacatctcagctgtctctcatcattctccttcctcatctcttcagcagtcatccttgaaagaaacagacttaagcaaagc

SEQ ID NO: 764016 - DNA, 120 bp, Artificial Sequence
  ENSG00000221866_59 (sequence is synthesized)
ctcacggagacagcccaaaatgccagccaacctcagcctccagcttgtcagatctgggagggacaaagagtcgagctgatgggcctggctggaattaagaagagggacatacaaatgacc

SEQ ID NO: 764017 - DNA, 120 bp, Artificial Sequence
  ENSG00000221866_60 (sequence is synthesized)
ttggccttggcatccatctccccatctgttcttacatctacagatgcacgattttagccaggcaggcaaatgtgtgcctagaaattgatactaggtaagcagaggctatggggagagatg

SEQ ID NO: 764018 - DNA, 120 bp, Artificial Sequence
  ENSG00000221866_61 (sequence is synthesized)
gtctaatggagggttctaggaacctttcatcctaaggagaccttaggtgctgtctggtgcagtctcccatcctaagcaggagtctctgttggcacctctgctctggagttgttcaccact

SEQ ID NO: 764019 - DNA, 120 bp, Artificial Sequence
  ENSG00000221866_62 (sequence is synthesized)
atgggagacaaggagaaacatcttaggtgaggttgaggagaaggattcacagtcttgccttcactccccaaacatcagacatcattccttgtcacccactcagaatgagccccccttggg

SEQ ID NO: 764020 - DNA, 120 bp, Artificial Sequence
  ENSG00000221866_63 (sequence is synthesized)
gaagaaaccacaccatttccagcaaagtccatggagcatccggtacttttaagaacacttgcccctttggatatgaatatgtgcacatgtgtgtgagcacatgtatgtgtgtgtgtgtgt

SEQ ID NO: 764021 - DNA, 120 bp, Artificial Sequence
  ENSG00000221866_64 (sequence is synthesized)
ctgccccaggtgtaggcggaaagctcaaaaggatttcttgtcctttgtaggaggatttttgaagtgttccccttctctttccccttgctcatccattcatcctgcagcttcaggacattt

SEQ ID NO: 764022 - DNA, 120 bp, Artificial Sequence
  ENSG00000221866_65 (sequence is synthesized)
caacacttacttgctttctatgctgagagctggtgggtggaaggagagggcgcttgtccataggaaatcagggtggtcgcctgccgaggcctggaccttggaacagggcatcatgtgaca

SEQ ID NO: 764023 - DNA, 120 bp, Artificial Sequence
  ENSG00000221866_66 (sequence is synthesized)
tcgcagaggacagatggtggaaaagacatgagcaacctaatgggaagaggaaaatgggaaacaatgcattggaagaggaagaaaaaaaataaataaccaaaggttttggcaagtgcagta

SEQ ID NO: 764024 - DNA, 120 bp, Artificial Sequence
  ENSG00000221866_67 (sequence is synthesized)
ccaggtggagaagcttgacttttctatccttgatcattttattccctcccaagaagtcagtcacaggacctggaaggccagaaagggtacatgtgggagacggtctgaggaagtacctcg

SEQ ID NO: 764025 - DNA, 120 bp, Artificial Sequence
  ENSG00000221866_68 (sequence is synthesized)
gtcactacaatatttttgcacatataaagggttggggaggaaagagacacaaacgtatttaacacagatttgctggatggaagctgcgtgtgtgaacgtgtgtatgagtgagtgcatttt

SEQ ID NO: 764026 - DNA, 120 bp, Artificial Sequence
  ENSG00000221866_69 (sequence is synthesized)
gattttttttttttttttttgcacagttaagagaaaaaatcaaacaagcagaaaaaaaaaagaaaaaagacttatcacggttctgctgaagcttttattttttactggatgatgattatt

SEQ ID NO: 764027 - DNA, 120 bp, Artificial Sequence
  ENSG00000221866_70 (sequence is synthesized)
gttattgttactttggcggtacaggactttattttattccatgtttttgttataagaaaaatttcaaacacctcagagaaatagaaaggttaggaagaaagaggagacaaggacagacaa

SEQ ID NO: 764028 - DNA, 120 bp, Artificial Sequence
  ENSG00000221866_71 (sequence is synthesized)
attttctggctgtccccatttctcctgggggaggggtttggggctggtttgactttaattggtgggtgggttgtttctgccgctctgtttgctgcagtccccgtggcctgcttggggact

SEQ ID NO: 764029 - DNA, 120 bp, Artificial Sequence
  ENSG00000221866_72 (sequence is synthesized)
gagaaatttgagccaggtatccagagccacagcccatcttgcttataaaaattatcttctgctgtttgttttccatttcttccgtttggattcttggtgcacgtgtgatatggtatttaa

SEQ ID NO: 764030 - DNA, 120 bp, Artificial Sequence
  ENSG00000221866_73 (sequence is synthesized)
aagcaaagacaagcaacattgtcaaaaagctgtccttgccccccatcccccacccaaatcttttttccaaactcccccagggatcttccttaccccactggcagagcaaacatccagggg

SEQ ID NO: 764031 - DNA, 120 bp, Artificial Sequence
  ENSG00000221866_74 (sequence is synthesized)
ctgtccatgtggcttgcgggctcccagagaaaggaattgggccaactttgtcctgtgggatggaggccccttcacggcctccctcgaggcaaagttaatttgtagggtcaccattatgtt

SEQ ID NO: 764032 - DNA, 120 bp, Artificial Sequence
  ENSG00000221866_75 (sequence is synthesized)
gagtcatgagcagacagaaggagagaaaaggccatcttccttaccttcccctccaacttatcccgtaccctcccagggaaaatggtaccagactgagccatcaaaatcactgacaaagtt

SEQ ID NO: 764033 - DNA, 120 bp, Artificial Sequence
  ENSG00000221866_76 (sequence is synthesized)
taggtgggaattttttttgcatgttggagagagaagggcttaaggtagcagggaagaagggggctttgtggggtcctaaattttaaggaataagtagaggaagacaagaaacagagtggt

SEQ ID NO: 764034 - DNA, 120 bp, Artificial Sequence
  ENSG00000221866_77 (sequence is synthesized)
aggctggtcatttctcctggccacaagtccccccagatgcagcttttacccattctttgtccttccccataaggagagaccctgacatttcttggtagctgcaaatagtgccactaagtg

SEQ ID NO: 764035 - DNA, 120 bp, Artificial Sequence
  ENSG00000221866_78 (sequence is synthesized)
aaggtggccatcatgccagttacttcctcaggaaaatattttcttgccttcttctttcagtatggttttaaatttgggaacagtggataacccaagtgtcccacaggccaaggtacattc

SEQ ID NO: 764036 - DNA, 120 bp, Artificial Sequence
  ENSG00000221866_79 (sequence is synthesized)
caatggcagcatgatccctgcacccaaagccagcccctaaagcctaccccttgtgcacccgcagcctggtaagtgagcttggctgcttgtgaggagctacaagtgaaagagaagttattt

SEQ ID NO: 764037 - DNA, 120 bp, Artificial Sequence
  ENSG00000221866_80 (sequence is synthesized)
taaataaatcccaaagtttgaggcagactgtccaggactgttcccaggaagaagcaggagttacccacaggaaaagtctctgacctggtcccctcaggcccagctacctgcgcccaccag

SEQ ID NO: 764038 - DNA, 120 bp, Artificial Sequence
  ENSG00000221866_81 (sequence is synthesized)
cagtgaaggttgatgtactggcccagcatctccacctcccccatgcaaccaggtccctggtaccgtgtctcccgttgcatgtctggcttctgcctgtgctcctcctgccacgagcatcct

SEQ ID NO: 764039 - DNA, 120 bp, Artificial Sequence
  ENSG00000221866_82 (sequence is synthesized)
ccctgtccctcctcattccaccgtgtctctcctgcacacatagcctctgtcccagggcgatttatccacttgagtacaggagctgctcagacctctcagcccagccctctgtgactgccc

SEQ ID NO: 764040 - DNA, 120 bp, Artificial Sequence
  ENSG00000221866_83 (sequence is synthesized)
cagccccatcctaccccacccaaagctgccttcctggctgtaggagctccctcgtctagccaaggccctatgggtccccatccgaggatccacaagcaatgacttcccaaatgacctcca

SEQ ID NO: 764041 - DNA, 120 bp, Artificial Sequence
  ENSG00000221866_84 (sequence is synthesized)
ctgcaagaagaatccttaccactgtttccagagccgtgaacgatgctgtgatgggcccaggtctcagcaccaccctctgtgacctaaaaagaaaagctcaatttccatctgtcttctttc

SEQ ID NO: 764042 - DNA, 120 bp, Artificial Sequence
  ENSG00000221866_85 (sequence is synthesized)
ccaggaccaaggggacacagtaatgtgaagtcaaatacttaaccgagcaaagggccagtattgttatcagtcaaggacaaacctcccacctcacagacagccaagcagtgagggaaagac

SEQ ID NO: 764043 - DNA, 120 bp, Artificial Sequence
  ENSG00000221866_86 (sequence is synthesized)
agacagacataggtaggaaggtgctctgcaggcacaaggcccagagaagcccctctccgggaacttcccctgctccttccaggaacagtgagcccagtgagcagccccagccagctcttc

SEQ ID NO: 764044 - DNA, 120 bp, Artificial Sequence
  ENSG00000221866_87 (sequence is synthesized)
aaggccttcaaggggtctttccatgactgagtcacctccaggagctcacctgacccccagagaagacctaccccaggcagctccgtgccctggcttctccccatgccccaaatccccccc

SEQ ID NO: 764045 - DNA, 120 bp, Artificial Sequence
  ENSG00000221866_88 (sequence is synthesized)
cgccatccctcctggtcctcgtctacatcaagggcctcttcccctcttcctgccagctctcaggacaggtgactgggaggccttgaaccctcagcctcttcctttaaaaaaaacaaaaca

SEQ ID NO: 764046 - DNA, 120 bp, Artificial Sequence
  ENSG00000221866_89 (sequence is synthesized)
aaacaaaactgtgggccatttatttgggattttggagttgtttggtttttgtttgtatatcttaatagttcgaaagtaagaagggagccctgctatggatgttaagtccaaattactcgg

SEQ ID NO: 764047 - DNA, 120 bp, Artificial Sequence
  ENSG00000221866_90 (sequence is synthesized)
ttagtgggagcaaaacctatgacttccaaggggatgaggagaggttcagaggacaggaggagcctcccccattgaaaaaaaaaaatgggtcaggacattccctggatgaggacaatgcta

SEQ ID NO: 764048 - DNA, 120 bp, Artificial Sequence
  ENSG00000221866_91 (sequence is synthesized)
ggggtggcatctcacatggctgctgctattcctggtgcttccccacacttttgacagatggagtccttctcctaccgcctcctgccacctcaccctacaggcattctctatgtaggaaac

SEQ ID NO: 764049 - DNA, 120 bp, Artificial Sequence
  ENSG00000221866_92 (sequence is synthesized)
aagagccttattttatagagtggggagctgagacacagcctcaggtaacactgacacagctcccgaatgaggctgggacactctgcaaacctctcctcatggtgctaagggtggcatgct

SEQ ID NO: 764050 - DNA, 120 bp, Artificial Sequence
  ENSG00000221866_93 (sequence is synthesized)
cttgacaggaaacctaaatgaccactcctctcatttggaaagtaatccactgcagtaaaagtttcagacatgcaagagagagtttttttttttttactacaaatttttgctcccccataa

SEQ ID NO: 764051 - DNA, 120 bp, Artificial Sequence
  ENSG00000221866_94 (sequence is synthesized)
aattattttattagagggagtatccaagttttaaaagtatatagaattttttggttgtaagagaaatacatactcattaggatcccgattaaattccttgagtagactggtgcctaccag

SEQ ID NO: 764052 - DNA, 120 bp, Artificial Sequence
  ENSG00000221866_95 (sequence is synthesized)
aaagcaaagcaaagttaaacaaaacgaaacaaaatccttcatatacaaaaagaactttctgtttgtattggcagaggtagtgaggtgattcaggtaggctgaaaatcctgggttgcggga

SEQ ID NO: 764053 - DNA, 120 bp, Artificial Sequence
  ENSG00000221866_96 (sequence is synthesized)
gcctcactttattccattcccacccgctttgatgtctatgcttggctctctgggctgcccctggtactgccgaatcctacacatctcttatcagctttcctcaaactttaaggaggctct

SEQ ID NO: 764054 - DNA, 120 bp, Artificial Sequence
  ENSG00000221866_97 (sequence is synthesized)
gtgagggatgggtcatgggaagacccaagctttccctccgccaggattgcaaaagcaagtagacttggtctatgcagctcttcttccagcaatttctttatttggaattagaacttcctt

SEQ ID NO: 764055 - DNA, 120 bp, Artificial Sequence
  ENSG00000221866_98 (sequence is synthesized)
tgttagtatctttgatcttttgactcaagcacattttggaagggctcccttacaaaagtagaatttaaaacagaggatacagttaaagagcaacccaaaggacgcttaagaaaccgagac

SEQ ID NO: 764056 - DNA, 120 bp, Artificial Sequence
  ENSG00000221866_99 (sequence is synthesized)
cacttcaccaaacaggactaaggaacactttcgtgcacagaagtcagccgcaatccaggcacaggacgaagatgggatacacgtgctcatctgtctgtcctcctttcctctccctccccg

SEQ ID NO: 764057 - DNA, 120 bp, Artificial Sequence
  ENSG00000221866_100 (sequence is synthesized)
acgttctagttagcttgttgacttgttaaaccttctgttcttaaaatgaaaagctagcttacctcaaagaatcttgtttccattcggaaaccaacgattttgtgttttagaatggacagc

SEQ ID NO: 764058 - DNA, 120 bp, Artificial Sequence
  ENSG00000221866_101 (sequence is synthesized)
cctcccctcaccactccctaccttggcctggtgtccttgagacatacggtctttgcttagtcgtgtgttggctgctttgagcaggaacaaggcctccaggccctgaggtgggaaggaagg

SEQ ID NO: 764059 - DNA, 120 bp, Artificial Sequence
  ENSG00000221866_102 (sequence is synthesized)
attggatgccactgccctcctccccactttagcatgtaggggccagcccatctcttccagcagggtcctgctgagttaccatagcaaccagcaactccagggtaccacaacagacaatgg

SEQ ID NO: 764060 - DNA, 120 bp, Artificial Sequence
  ENSG00000221866_103 (sequence is synthesized)
ctcagcgagccgacgtgtggggatgatgcaggggttttggcccagccagaggacccagagttgagcttcaaatgctagagaaggggagaaacaggatggaagggtggtttaaggaaccgg

SEQ ID NO: 764061 - DNA, 120 bp, Artificial Sequence
  ENSG00000221866_104 (sequence is synthesized)
caggggtctttgagtcacatagagaagccgttgaaggaggtagggcaggttatctctgttccagtcacccccttccagccccatcccacttctgtttcaaactaaagctcccacctcgaa

SEQ ID NO: 764062 - DNA, 120 bp, Artificial Sequence
  ENSG00000221866_105 (sequence is synthesized)
cattgaccctttgttagaacaaagcaaagcatatctttagacaacagtgttaaaatgagcctcaaatgtatgtggatgagatctctaagaagagggtcttctggttttgatttttaaaga

SEQ ID NO: 764063 - DNA, 120 bp, Artificial Sequence
  ENSG00000221866_106 (sequence is synthesized)
agagtatcctagtaaaatattaaaaaaaaattaaaaagtttttaaaaaggaaacctgtgctatttaaattggagcccagttgtaacttggtaaaggcaagcttctgtacctttgttataa

SEQ ID NO: 764064 - DNA, 120 bp, Artificial Sequence
  ENSG00000221866_107 (sequence is synthesized)
ttaattgtatacctgtgtatgtaaatataaggcattcctattttgcagttcagaacaaaaaaaacttatttgtaatatagaataaagtttattaaaaaataataaaaatgcagtttggga

SEQ ID NO: 764065 - DNA, 80 bp, Artificial Sequence
  ENSG00000221866_108 (sequence is synthesized)
cggcggcagcaggcagcccgggagctccggcggcggccgagccagcggcggccccgctccctgccccctgcaaactttgc

SEQ ID NO: 764066 - DNA, 120 bp, Artificial Sequence
  ENSG00000221866_109 (sequence is synthesized)
cccgcgcactcgccgcgcccgggcagcggcccgaccgggcgagcatgggcggcgcggagtgacgccgctgtgcccgcttggcatcaaggacattcagcccgcgggggtggggacgaaggg

SEQ ID NO: 764067 - DNA, 120 bp, Artificial Sequence
  ENSG00000221866_110 (sequence is synthesized)
gcccgcgggggtggggacgaaggggggcagcccggcgtcgccaccgcagcccccgagagccgccgccgctgctcgggctccggggctgggtggaggaaaggggtgttcggaatcgatccc

SEQ ID NO: 764068 - DNA, 120 bp, Artificial Sequence
  ENSG00000221866_111 (sequence is synthesized)
cattttccgacctttttgttggacattacgcccaccttggacgccgcaagagaagctgtcaagccccgcaggctctgattcggcgccctccgcgttcctcggctgctcccggcttccctg

SEQ ID NO: 764069 - DNA, 120 bp, Artificial Sequence
  ENSG00000221866_112 (sequence is synthesized)
aggcttatttagtgtgttgtcagccttggatattggaaaatggaaacagatgagacacatctacctccctgtgaccccagccatacatcatagctcatgtcctgccaccccaagtcctta

SEQ ID NO: 764070 - DNA, 120 bp, Artificial Sequence
  ENSG00000221866_113 (sequence is synthesized)
gggaaaaaagactttggagaatgtgtctctgcttagcttggctaggtagttggtctcttttctctgccccaagcgtcccatgggtaattttggacaatggagtgtaggcatgtttgactc

SEQ ID NO: 764071 - DNA, 120 bp, Artificial Sequence
  ENSG00000221866_114 (sequence is synthesized)
ttgtggtgttatcacttgtatatgtcagtgaaactaactgattctcccatcggaatatagttatctcttgggcctgatatatggtaggataaccttatgctcatctgtccacttctgcag

SEQ ID NO: 764072 - DNA, 120 bp, Artificial Sequence
  ENSG00000221866_115 (sequence is synthesized)
gtgtgtgtgtgtgtgtgtgtgtatgcttatctgtgtttaaaggtgtgtgtgcatacacagggcagagaggatggagcccaccgtactgcagcatcatgtaattaactcagtgctcagaac

SEQ ID NO: 764073 - DNA, 120 bp, Artificial Sequence
  ENSG00000221866_116 (sequence is synthesized)
ccgtactgcagcatcatgtaattaactcagtgctcagaaccatcccagcctctgcgggaaagagaaaaggaagccaacagtgcctgatgagctgatcatatgtgcaaaagctctgttggc

SEQ ID NO: 764074 - DNA, 120 bp, Artificial Sequence
  ENSG00000221866_117 (sequence is synthesized)
atctggtccaggagagcacccaaaaaaagttaattggtgttgtccagtctcctttccttaagactatggttacaacaaagcgtgagcagtgtctcctgcatggccactatccagcacaat

SEQ ID NO: 764075 - DNA, 120 bp, Artificial Sequence
  ENSG00000221866_118 (sequence is synthesized)
tccataattcccccatagagccggtggggaggaggaggtgagtggcgaaggaagtggaaacacttggtgtcatgtgctcctatcatttctactagcttactgggaaataaagtgtagtca

SEQ ID NO: 764076 - DNA, 120 bp, Artificial Sequence
  ENSG00000221866_119 (sequence is synthesized)
agagtgtatgaaggcaagatgtaaaattagcgactggtgctaatctggttacttgaaaacaagtgaaagtgctgtagatttgttctgttgctaagaaccaccacactaaacctcgtatag

SEQ ID NO: 764077 - DNA, 120 bp, Artificial Sequence
  ENSG00000221866_120 (sequence is synthesized)
ttcctggaggatacacaacagtgtaattctctttagggtgtgccacaggttcctggcctgtgggagggaatgaatcaggagggctcttgagaaccttcatctgtgtgcttgcactgaaag

SEQ ID NO: 764078 - DNA, 120 bp, Artificial Sequence
  ENSG00000221866_121 (sequence is synthesized)
tgagtcccaaagctggagatttagtgagagcaggcaacccctctgtgtctcactgtccatattctggaggcagaggtttgtaacaggccatgtgcacctgcatagggatgggtaaagcaa

SEQ ID NO: 764079 - DNA, 120 bp, Artificial Sequence
  ENSG00000221866_122 (sequence is synthesized)
ggactttgaaagagttgaaaagcattataaacagttgttcagaaatacgtcccaggagttccatgtgaaactggctctgtgtgcattgaagcatggctgttgggaattctaactggtcca

SEQ ID NO: 764080 - DNA, 120 bp, Artificial Sequence
  ENSG00000221866_123 (sequence is synthesized)
acactcctgcaaaacaatgtgtaaatatttaggaagaaacttgaaaatagtcaaatcctttgaactggtgacaattttttaaagaatcaattctaatttgtttcaagggtaataatcacc

SEQ ID NO: 764081 - DNA, 120 bp, Artificial Sequence
  ENSG00000221866_124 (sequence is synthesized)
aagatacacatttcagcatttatttagtctatcaaaaattggaattgatatatacactcatttataggagaatggttaggtagatttggtatatttatgtagtcattgaaaacttagttt

SEQ ID NO: 764082 - DNA, 120 bp, Artificial Sequence
  ENSG00000221866_125 (sequence is synthesized)
ataaaggccaatcttgtaactgattcttgtgtgataacattcagtgaaaaagcatgagacaattagaaagcatgatacaatgaataaaataaaaactggaaagagaaccatcaaaatgct

SEQ ID NO: 764083 - DNA, 120 bp, Artificial Sequence
  ENSG00000221866_126 (sequence is synthesized)
atgagatgcagaccacatggagaccttaatgcatggagatcttgcccactagtagcgtggcccagcgttttgggacacagcccaatcagaccagtatttcccctctggagctggattgag

SEQ ID NO: 764084 - DNA, 120 bp, Artificial Sequence
  ENSG00000221866_127 (sequence is synthesized)
gagggaacatggggactgaaaccttgaatgcttctgctttaattaccccgaaaagcaagtgccactgttagaaatggaaatcaggccagctgctggggcggcaagcagcaggaatgcaaa

SEQ ID NO: 764085 - DNA, 120 bp, Artificial Sequence
  ENSG00000221866_128 (sequence is synthesized)
cacaagggggaatcacccaggagtggattggagtggagggagacccacctggggcgaacattgcttctcaggaacagatgctgtgtgtgtatcttcagtgctcaagtcacaaagcaatat

SEQ ID NO: 764086 - DNA, 120 bp, Artificial Sequence
  ENSG00000221866_129 (sequence is synthesized)
cagatcagagagtccagcctctgctttgttgcttcctaaatgtacctgggaattcttcctaaaattactctggaaatttgaatccactttaactaaaaataaatattcatagcacagaaa

SEQ ID NO: 764087 - DNA, 120 bp, Artificial Sequence
  ENSG00000221866_130 (sequence is synthesized)
tcagtgttatatctcttttccatgtgcaggggaaatttaaagctgttagagacagatgaaatgggaaaaaatgatttaatgcatggacttacccaattttacccaagtagggtgggctgt

SEQ ID NO: 764088 - DNA, 120 bp, Artificial Sequence
  ENSG00000221867_0 (sequence is synthesized)
ggagggaagccggcccaggctcggtgaggaggcaaggttctgaggggacaggctgacctggaggaccagaggcccccggaggagcactgaaggagaagatctgccagtgggtctccattg

SEQ ID NO: 764089 - DNA, 120 bp, Artificial Sequence
  ENSG00000221867_1 (sequence is synthesized)
cccagctcctgcccacactcccgcctgttgccctgaccagagtcatcatgcctcttgagcagaggagtcagcactgcaagcctgaagaaggccttgaggcccgaggagaggccctgggcc

SEQ ID NO: 764090 - DNA, 120 bp, Artificial Sequence
  ENSG00000221867_2 (sequence is synthesized)
tggtgggtgcgcaggctcctgctactgaggagcaggaggctgcctcctcctcttctactctagttgaagtcaccctgggggaggtgcctgctgccgagtcaccagatcctccccagagtc

SEQ ID NO: 764091 - DNA, 120 bp, Artificial Sequence
  ENSG00000221867_3 (sequence is synthesized)
ctcagggagcctccagcctccccactaccatgaactaccctctctggagccaatcctatgaggactccagcaaccaagaagaggaggggccaagcaccttccctgacctggagtccgagt

SEQ ID NO: 764092 - DNA, 120 bp, Artificial Sequence
  ENSG00000221867_4 (sequence is synthesized)
tccaagcagcactcagtaggaaggtggccgagttggttcattttctgctcctcaagtatcgagccagggagccggtcacaaaggcagaaatgctggggagtgtcgtcggaaattggcagt

SEQ ID NO: 764093 - DNA, 120 bp, Artificial Sequence
  ENSG00000221867_5 (sequence is synthesized)
atttctttcctgtgatcttcagcaaagcttccagttccttgcagctggtctttggcatcgagctgatggaagtggaccccatcggccacttgtacatctttgccacctgcctgggcctct

SEQ ID NO: 764094 - DNA, 120 bp, Artificial Sequence
  ENSG00000221867_6 (sequence is synthesized)
cctacgatggcctgctgggtgacaatcagatcatgcccaaggcaggcctcctgataatcgtcctggccataatcgcaagagagggcgactgtgcccctgaggagaaaatctgggaggagc

SEQ ID NO: 764095 - DNA, 120 bp, Artificial Sequence
  ENSG00000221867_7 (sequence is synthesized)
agtgtgttagaggtgtttgaggggagggaagacagtatcttgggggatcccaagaagctgctcacccaacatttcgtgcaggaaaactacctggagtaccggcaggtccccggcagtgat

SEQ ID NO: 764096 - DNA, 120 bp, Artificial Sequence
  ENSG00000221867_8 (sequence is synthesized)
cctgcatgttatgaattcctgtggggtccaagggccctcgttgaaaccagctatgtgaaagtcctgcaccatatggtaaagatcagtggaggacctcacatttcctacccacccctgcat

SEQ ID NO: 764097 - DNA, 120 bp, Artificial Sequence
  ENSG00000221867_9 (sequence is synthesized)
gagtgggttttgagagagggggaagagtgagtctgagcacgagttgcagccagggccagtgggagggggtctgggccagtgcaccttccggggccgcatcccttagtttccactgcctcc

SEQ ID NO: 764098 - DNA, 120 bp, Artificial Sequence; identical to SEQ ID NO: 714341
  ENSG00000221867_10 (sequence is synthesized)

SEQ ID NO: 764099 - DNA, 120 bp, Artificial Sequence
  ENSG00000221867_11 (sequence is synthesized)
gttccttttaacggatggttgaatgagcgtcagcatccaggtttatgaatgacagtagtcacacatagtgctgtttatatagtttaggagtaagagtcttgttttttactcaaattggga

SEQ ID NO: 764100 - DNA, 120 bp, Artificial Sequence; identical to SEQ ID NO: 714343
  ENSG00000221867_12 (sequence is synthesized)

SEQ ID NO: 764101 - DNA, 120 bp, Artificial Sequence; identical to SEQ ID NO: 714344
  ENSG00000221867_13 (sequence is synthesized)

SEQ ID NO: 764102 - DNA, 120 bp, Artificial Sequence
  ENSG00000221867_14 (sequence is synthesized)
agcaacgagcgacggcctgacgtcggcggagggaagccggcccaggctcggtgaggaggcaagtcctgcagcctcagcatgcgctggccggatgtaccctgaggtgccctctcacttcct

SEQ ID NO: 764103 - DNA, 120 bp, Artificial Sequence
  ENSG00000221869_0 (sequence is synthesized)
aggtgacagcctcgcttggacgcagagcccggcccgacgccgccatgagcgccgcgctcttcagcctggacggcccggcgcgcggcgcgccctggcctgcggagcctgcgcccttctacg

SEQ ID NO: 764104 - DNA, 120 bp, Artificial Sequence
  ENSG00000221869_1 (sequence is synthesized)
aaccgggccgggcgggcaagccgggccgcggggccgagccaggggccctaggcgagccaggcgccgccgcccccgccatgtacgacgacgagagcgccatcgacttcagcgcctacatcg

SEQ ID NO: 764105 - DNA, 120 bp, Artificial Sequence
  ENSG00000221869_2 (sequence is synthesized)
actccatggccgccgtgcccaccctggagctgtgccacgacgagctcttcgccgacctcttcaacagcaatcacaaggcgggcggcgcggggcccctggagcttcttcccggcggccccg

SEQ ID NO: 764106 - DNA, 120 bp, Artificial Sequence
  ENSG00000221869_3 (sequence is synthesized)
cgcctgctcaagcgcgagcccgactggggcgacggcgacgcgcccggctcgctgttgcccgcgcaggtggccgcgtgcgcacagaccgtggtgagcttggcggccgcagggcagcccacc

SEQ ID NO: 764107 - DNA, 80 bp, Artificial Sequence
  ENSG00000221869_4 (sequence is synthesized)
accgtggtgagcttggcggccgcagggcagcccaccccgcccacgtcgccggagccgccgcgcagcagccccaggcagac

SEQ ID NO: 764108 - DNA, 120 bp, Artificial Sequence
  ENSG00000221869_5 (sequence is synthesized)
cgccgtgcgcaagagccgcgacaaggccaagcggcgcaaccaggagatgcagcagaagttggtggagctgtcggctgagaacgagaagctgcaccagcgcgtggagcagctcacgcggga

SEQ ID NO: 764109 - DNA, 120 bp, Artificial Sequence
  ENSG00000221869_6 (sequence is synthesized)
cctggccggcctccggcagttcttcaagcagctgcccagcccgcccttcctgccggccgccgggacagcagactgccggtaacgcgcggccggggcgggagagactcagcaacgacccat

SEQ ID NO: 764110 - DNA, 120 bp, Artificial Sequence
  ENSG00000221869_7 (sequence is synthesized)
acctcagacccgacggcccggagcggagcgcgccctgccctggcgcagccagagccgccgggtgcccgctgcagtttcttgggacataggagcgcaaagaagctacagcctggacttacc

SEQ ID NO: 764111 - DNA, 120 bp, Artificial Sequence
  ENSG00000221869_8 (sequence is synthesized)
accactaaactgcgagagaagctaaacgtgtttattttcccttaaattatttttgtaatggtagctttttctacatcttactcctgttgatgcagctaaggtacatttgtaaaaagaaaa

SEQ ID NO: 764112 - DNA, 120 bp, Artificial Sequence
  ENSG00000221869_9 (sequence is synthesized)
aaaaccagacttttcagacaaaccctttgtattgtagataagaggaaaagactgagcatgctcacttttttatattaatttttacagtatttgtaagaataaagcagcatttgaaatcgc

SEQ ID NO: 764113 - DNA, 120 bp, Artificial Sequence
  ENSG00000221878_0 (sequence is synthesized)
ggaaggacagcacagctgacagccgtgctcaggaagattctggatcctaggctcatctccacagaggagaacacgcagggagcagagaccatggggcccctctcagcccctccctgcaca

SEQ ID NO: 764114 - DNA, 120 bp, Artificial Sequence
  ENSG00000221878_1 (sequence is synthesized)
cagcatataacctggaaagggctcctgctcacagcatcacttttaaacttctggaacccgcccaccacagcccaagtcacgattgaagcccagccaccaaaagtttccgaggggaaggat

SEQ ID NO: 764115 - DNA, 120 bp, Artificial Sequence
  ENSG00000221878_2 (sequence is synthesized)
gttcttctacttgtccacaatttgccccagaatcttactggctacatctggtacaaaggacaaatcagggacctctaccattatgttacatcatatatagtagacggtcaaataattaaa

SEQ ID NO: 764116 - DNA, 120 bp, Artificial Sequence
  ENSG00000221878_3 (sequence is synthesized)
tatgggcctgcatacagtggacgagaaacagtatattccaatgcatccctgctgatccagaatgtcacccaggaagacacaggatcctacactttacacatcataaagcgaggtgatggg

SEQ ID NO: 764117 - DNA, 120 bp, Artificial Sequence
  ENSG00000221878_4 (sequence is synthesized)
actggaggagtaactggacgtttcaccttcaccttatacctggagactcccaaaccctccatctccagcagcaatttcaaccccagggaggccacggaggctgtgattttaacctgtgat

SEQ ID NO: 764118 - DNA, 120 bp, Artificial Sequence
  ENSG00000221878_5 (sequence is synthesized)
cctgagactccagatgcaagctacctgtggtggatgaatggtcagagcctccctatgactcacagcttgcagctgtctgaaaccaacaggaccctctacctatttggtgtcacaaactat

SEQ ID NO: 764119 - DNA, 120 bp, Artificial Sequence
  ENSG00000221878_6 (sequence is synthesized)
actgcaggaccctatgaatgtgaaatacggaacccagtgagtgccagccgcagtgacccagtcaccctgaatctcctcccgaagctgcccaagccctacatcaccatcaataacttaaac

SEQ ID NO: 764120 - DNA, 120 bp, Artificial Sequence
  ENSG00000221878_7 (sequence is synthesized)
cccagggagaataaggatgtctcaaccttcacctgtgaacctaagagtgagaactacacctacatttggtggctaaatggtcagagcctcccggtcagtcccagggtaaagcgacgcatt

SEQ ID NO: 764121 - DNA, 120 bp, Artificial Sequence
  ENSG00000221878_8 (sequence is synthesized)
gaaaacaggatcctcattctacccagtgtcacgagaaatgaaacaggaccctatcaatgtgaaatacgggaccgatatggtggcatccgcagtgacccagtcaccctgaatgtcctctat

SEQ ID NO: 764122 - DNA, 120 bp, Artificial Sequence
  ENSG00000221878_9 (sequence is synthesized)
cctgctttgcggactctaacccaccggcacagtattcttggacaattaatgggaagtttcagctatcaggacaaaagctttctatcccccagattactacaaagcatagcgggctctatg

SEQ ID NO: 764123 - DNA, 120 bp, Artificial Sequence
  ENSG00000221878_10 (sequence is synthesized)
cttgctctgttcgtaactcagccactggcaaggaaagctccaaatccgtgacagtcagagtctctggtaagtggatcccagcatccttggcaatagggttttaggtgcagtctatctgac

SEQ ID NO: 764124 - DNA, 120 bp, Artificial Sequence
  ENSG00000221878_11 (sequence is synthesized)
tttcagagaaaagtcaggaaaacatttgtattcccagcctgtgtcccatgggcacaagcaaatcccaaattttcctcctgaaccctccaaatttgtctaagaacttcgaaaactttaaca

SEQ ID NO: 764125 - DNA, 120 bp, Artificial Sequence
  ENSG00000221878_12 (sequence is synthesized)
aacaggctgatatcttcataacattcccagcctagaccaagcaggaaaaacattgatttcattgaaataattgataataatgaggataatgtttttatgatttttatttgaaaatatgct

SEQ ID NO: 764126 - DNA, 120 bp, Artificial Sequence
  ENSG00000221878_13 (sequence is synthesized)
gattctttatgtggatagttttctagatttatggaaatttgtcttttaatctatctctagcttatagtggttcaataaactatacttctgggaatgataattgaaatatttacttttgct

SEQ ID NO: 764127 - DNA, 120 bp, Artificial Sequence
  ENSG00000221878_14 (sequence is synthesized)
ctctacctgaatgccccagaattgggcaactattcatgagtattgatatgtttatggtaatacagatatttgcacaaacagagtaacaacctgctctctttgtaacaggacacatttcaa

SEQ ID NO: 764128 - DNA, 120 bp, Artificial Sequence
  ENSG00000221878_15 (sequence is synthesized)
atcattggttatattaccaaggctttgactgggatgttatatttaagaatatagctagaatgaaccagtatgaactgcaggcaaactctgaagtcagccttggtttggcttcctattctc

SEQ ID NO: 764129 - DNA, 120 bp, Artificial Sequence
  ENSG00000221878_16 (sequence is synthesized)
aagagttttgtaaaggtttaatctgagattccttataaaaacttacagcaaagaaaattttaaaagagagcctacatagtccattgctactcttgctgcacttatgtaaacaatcagacc

SEQ ID NO: 764130 - DNA, 120 bp, Artificial Sequence
  ENSG00000221878_17 (sequence is synthesized)
aagtttgaagaaactcaacctattttgcaaacaaacttattctactgaaattatcattggtaaaactagagatgcccatagagagaaaaattatgtggaaaataaaaccgtagtacacct

SEQ ID NO: 764131 - DNA, 120 bp, Artificial Sequence
  ENSG00000221878_18 (sequence is synthesized)
ccaaatccgtgacagtcagagtctctgactggacattaccctgaattctactagttcctccaattccatcttctcccatggaacctcaaagagcaagacccactctgttccagaagccct

SEQ ID NO: 764132 - DNA, 120 bp, Artificial Sequence
  ENSG00000221878_19 (sequence is synthesized)
ataagtcagagttggacaactcaatgtaaatttcatgggaaaatccttgtacctgatgtctgagccactcagaactcaccaaaatgttcaacaccataacaacagctgctcaaactgtaa

SEQ ID NO: 764133 - DNA, 120 bp, Artificial Sequence
  ENSG00000221878_20 (sequence is synthesized)
acaaggaaaacaagttgatgacttcacactgtggacagcttttcccaagatgtcagaataagactccccatcatgatgaggctctcacccctcttagctgtccttgcttgtgcctgcctc

SEQ ID NO: 764134 - DNA, 120 bp, Artificial Sequence
  ENSG00000221878_21 (sequence is synthesized)
tttcacttggcaggataatgcagtcattagaatttcacatgtagtataggagcttctgagggtaacaacagagtgtcagatatgtcatctcaacctcagacttttacataacatctcagg

SEQ ID NO: 764135 - DNA, 120 bp, Artificial Sequence
  ENSG00000221878_22 (sequence is synthesized)
aggaaatgtggctctctccatcttgcatacagggctcccaatagaaatgaacacagagatattgcctgtgtgtttgcagagaagatggtttctataaagagtaggaaagctgaaattata

SEQ ID NO: 764136 - DNA, 120 bp, Artificial Sequence
  ENSG00000221878_23 (sequence is synthesized)
gtagactcccctttaaatgcacattgtgtggatggctctcaccatttcctaagagatacattgtaaaacgtgacagtaagactgattctagcagaataaaacatgtactacatttgctaa

SEQ ID NO: 764137 - DNA, 120 bp, Artificial Sequence
  ENSG00000221878_24 (sequence is synthesized)
gaacacgcagggagcagagaccatggggcccctctcagcccctccctgcacacagcatataacctggaaagggctcctgctcacagtggagactcccaaaccctccatctccagcagcaa

SEQ ID NO: 764138 - DNA, 120 bp, Artificial Sequence
  ENSG00000221878_25 (sequence is synthesized)
ctcaacaattgggaggaaaaaaaacacccagggcatggaggcccctgagaactctcacatctacaggagtctgcagcctgttccaggcactggggtgcgaccaagatcacaaaagtccct

SEQ ID NO: 764139 - DNA, 120 bp, Artificial Sequence
  ENSG00000221878_26 (sequence is synthesized)
gtcctcacggagctcatgctgtcatggggaggaagacagacatgcaaagagatctagaatgtgagatcaggtgttgacaagaaccctggagggagcagagcagggaaaggtcaaaaagga

SEQ ID NO: 764140 - DNA, 120 bp, Artificial Sequence
  ENSG00000221878_27 (sequence is synthesized)
tccagcagttcattcccacactttccaccagtcagttctgcatttgcaaatgtccacatgtatttctggaaagatccacatggtcctcacctgccctctgcagaaggagaggaaacttaa

SEQ ID NO: 764141 - DNA, 120 bp, Artificial Sequence
  ENSG00000221878_28 (sequence is synthesized)
agaacccaggacagggaacatgcttctgctccaaaaccaccagctcttgcttgtccccttcactctttctagatcattccttgcactctgctctatctttagaggtcactggttcaagta

SEQ ID NO: 764142 - DNA, 79 bp, Artificial Sequence
  ENSG00000221878_29 (sequence is synthesized)
gatggtctcccctgtgttatttctgctgaaacatccagtcccaggccaggctgctcagtatctgcagggtttcaggaca

SEQ ID NO: 764143 - DNA, 120 bp, Artificial Sequence
  ENSG00000221878_30 (sequence is synthesized)
cccaggccaggctgctcagtatctgcagggtttcaggacaatgggaagtcccattattactcatctctagaatgtccttggaaatggaagttgcagagaaatcacatctaggggggcaaa

SEQ ID NO: 764144 - DNA, 120 bp, Artificial Sequence
  ENSG00000221878_31 (sequence is synthesized)
gtaggatgcaatttggaaagggcccagcagttgcacattccaggtaatgaacccagggtgagccagccagtcaactcattagtgagggactgggaggggtaccaggcgctgtgactccca

SEQ ID NO: 764145 - DNA, 120 bp, Artificial Sequence
  ENSG00000221878_32 (sequence is synthesized)
ctgacatgtctgtccatgacccagcactgctgctcaattgacacttgagaaagtctatgcttccctaagactgagcaggtggcctcacagtctttgagcccttagatcatcatgcatcta

SEQ ID NO: 764146 - DNA, 120 bp, Artificial Sequence
  ENSG00000221878_33 (sequence is synthesized)
ccttgtgacacacacaccagctattggctttcaaggactcacacgtgttgacaggtgggagatgccaactctaattgaaggatgcctgtggaggaatcaaaggtgccacacaggacaatc

SEQ ID NO: 764147 - DNA, 120 bp, Artificial Sequence
  ENSG00000221878_34 (sequence is synthesized)
cctgggtaggcacagccttaaccaagaatataaggggagtggacgctcttgtcatgggagacttggggcccacagcttgtgatgggagaaacaggtgaatacctcaggcttcggctcagt

SEQ ID NO: 764148 - DNA, 120 bp, Artificial Sequence
  ENSG00000221878_35 (sequence is synthesized)
gaacatagaggggatttggctgtcacttgagggtgtgtctcggctcagagggtcactctgtccctttaagagaccaggagcatccccttccctcggataacatcacctgtggctttattc

SEQ ID NO: 764149 - DNA, 120 bp, Artificial Sequence
  ENSG00000221878_36 (sequence is synthesized)
gttcctctgttagccaggctgccatcccaaatacacatggccagaggccgggcttctcagtccctctcaggtccaagtatgtagacctttacccctggacatcaaagctggtggtgactt

SEQ ID NO: 764150 - DNA, 120 bp, Artificial Sequence
  ENSG00000221878_37 (sequence is synthesized)
cctgccccaggcaaaccagagtaggcctaggcttgatccacaataagagaaaagaggctgctcctgtcatgggagactcagggtccacagcttgtgatggaagaaacaggtgaatgtctc

SEQ ID NO: 764151 - DNA, 120 bp, Artificial Sequence
  ENSG00000221880_0 (sequence is synthesized)
aaaactcagaaactcctccaagcaacccagacttcataccagctcccaacaccatgacctgctgccagaccagcttctgtggatatcccagctgctccaccagtgggacatgcggctcca

SEQ ID NO: 764152 - DNA, 120 bp, Artificial Sequence
  ENSG00000221880_1 (sequence is synthesized)
gctgctgccagccaagctgctgtgagaccagctgctgccagccaagctgctgccagaccagcttctgcggatttcctagcttctcaactagtgggacctgcagctccagttgctgccagc

SEQ ID NO: 764153 - DNA, 120 bp, Artificial Sequence
  ENSG00000221880_2 (sequence is synthesized)
caagctgctgtgagaccagctgctgccagccaagctgctgccagaccagctcctgcggaactggctgtggcattggtggtggcattggctatggccaggagggcagcagtggagctgtga

SEQ ID NO: 764154 - DNA, 120 bp, Artificial Sequence
  ENSG00000221880_3 (sequence is synthesized)
gcacccgtatcaggtggtgccgcccagactgccgtgtggagggtacctgcctgcccccctgctgtgtggtgagctgcacacccccaacctgctgccagctgcaccacgccgaggcctcct

SEQ ID NO: 764155 - DNA, 120 bp, Artificial Sequence
  ENSG00000221880_4 (sequence is synthesized)
ctgccgcccagtctgctgctgctactcctgtgagcccacctgctaaaagccagtttgctgattttcaacttgaaatttccactttcagttccattcatgaacgaattatttcttcaagca

SEQ ID NO: 764156 - DNA, 120 bp, Artificial Sequence
  ENSG00000221880_5 (sequence is synthesized)
cttatggacaacgaacaaattcttcaacctttctttgtctttcttatgggggttaccaaatattttggcctcagaattatctgattcctttcaattccagaaagaccttactcttctctc

SEQ ID NO: 764157 - DNA, 120 bp, Artificial Sequence
  ENSG00000221880_6 (sequence is synthesized)
tgaggacgccaaaatacaaatttgacccaagaaatgaaaaagccgatttaccttgaaactgagcctttgcaagcattgaagcccacgctctgagtctcagcgccgacgagaccatggaag

SEQ ID NO: 764158 - DNA, 120 bp, Artificial Sequence
  ENSG00000221880_7 (sequence is synthesized)
agccatctgtccttctcaggacactcacttcctgtatcccaccgtcctgcaaattgcaccccctatgaaagaggaataatataccaaggtctaataaattttaactattggtgcaacaaa

SEQ ID NO: 764159 - DNA, 120 bp, Artificial Sequence
  ENSG00000221882_0 (sequence is synthesized)
taagtgaactgagtgaactgatacctcccctgctgggacatgtccttacagaaactcatggagccagaagctgggaccaataggaccgctgttgctgagttcattctactgggcctagtg

SEQ ID NO: 764160 - DNA, 120 bp, Artificial Sequence
  ENSG00000221882_1 (sequence is synthesized)
caaacagaagagatgcagccagttgtctttgtgctcctcctctttgcctatctggtcacaactgggggcaacctcagcatcctggcagccgtcttggtggagcccaaactccacgccccc

SEQ ID NO: 764161 - DNA, 120 bp, Artificial Sequence
  ENSG00000221882_2 (sequence is synthesized)
atgtacttcttcctggggaacctgtcagtgctggatgtcggatgtatcactgtcactgttcctgcaatgttgggtcgtctcttgtcccacaagtccacaatttcctatgacgcctgcctc

SEQ ID NO: 764162 - DNA, 120 bp, Artificial Sequence
  ENSG00000221882_3 (sequence is synthesized)
tcccagctcttcttcttccaccttctggctgggatggactgcttcctgctgaccgccatggcctatgaccgactcctggccatctgccagcccctcacctacagcacccgcatgagtcag

SEQ ID NO: 764163 - DNA, 120 bp, Artificial Sequence
  ENSG00000221882_4 (sequence is synthesized)
acagtccagaggatgttggtggctgcgtccttggcttgtgccttcaccaacgcactgacccacactgtggccatgtccacgctcaacttctgtggccccaatgaggtcaatcacttctac

SEQ ID NO: 764164 - DNA, 120 bp, Artificial Sequence
  ENSG00000221882_5 (sequence is synthesized)
tgtgacctcccacagctcttccagctctcctgctccagcacccaactcaatgagctgctgctctttgctgtgggtttcatcatggcaggcacacctttggttctcatcatcactgcctac

SEQ ID NO: 764165 - DNA, 120 bp, Artificial Sequence
  ENSG00000221882_6 (sequence is synthesized)
agccacgtggcagctgcagttctacgaatccgttcagtggagggccgaaagaaggccttctccacgtgtggctcccacctcaccgtggtttgtcttttctttggaagaggtatcttcaac

SEQ ID NO: 764166 - DNA, 120 bp, Artificial Sequence
  ENSG00000221882_7 (sequence is synthesized)
tacatgagactgggttcagaggaggcttcagacaaggataaaggggttggagttttcaacactgttatcaaccctatgctgaaccctcttatctacagcctcagaaaccctgatgttcag

SEQ ID NO: 764167 - DNA, 120 bp, Artificial Sequence
  ENSG00000221882_8 (sequence is synthesized)
aggaaaaattcagccacaactatttttcctatctcctgatgcttgaagatcggtgttacatatttgtcctactaggaaaccctacataatttattcattcaacaaatacttattagagta

SEQ ID NO: 764168 - DNA, 120 bp, Artificial Sequence
  ENSG00000221882_9 (sequence is synthesized)
cctctatgatctggacagtcttccaaggcattggtggacaaaatggacaaaagtctctgcactcatgcaactcacatgctataaaagtagacaaagtaaataagcatcatatataccaca

SEQ ID NO: 764169 - DNA, 120 bp, Artificial Sequence
  ENSG00000221882_10 (sequence is synthesized)
tgatgatagtttctatagagatgaacaaagatgttaatatgaagtcaggttctgccaagcaagccctgtgcaagttttaccctgtttttggctgtgcctactttctggatagagttaaag

SEQ ID NO: 764170 - DNA, 120 bp, Artificial Sequence
  ENSG00000221882_11 (sequence is synthesized)
ccttgtagttctgtgtgcctggcaagcagcattctacaaagaatgtccagtcggtcaatcacagcctaagtgaccaaaagtatttctgcaatatttctggtgaggacatgagattccctg

SEQ ID NO: 764171 - DNA, 120 bp, Artificial Sequence
  ENSG00000221882_12 (sequence is synthesized)
cagatcagaataggggaaaattttttgtttgtttctttgttttgttttgttgttgttttgttaaaaacttgttaaaaagttttttaaaaaaaccaaaaccataggcctagtgcaatggat

SEQ ID NO: 764172 - DNA, 120 bp, Artificial Sequence
  ENSG00000221882_13 (sequence is synthesized)
caatggattatttcattcatttgtttgcctttcaccttcattttcttctctccgctaccacaaaagaatcctgctggatgttgactgggcgcagggtggctgacgcctgtaatcccagca

SEQ ID NO: 764173 - DNA, 70 bp, Artificial Sequence
  ENSG00000221882_14 (sequence is synthesized)
agtgaaaccccttctctactataaatacaaaaacaaaattagccggtgtagtggtgggcgcctgtagtcc

SEQ ID NO: 764174 - DNA, 120 bp, Artificial Sequence
  ENSG00000221882_15 (sequence is synthesized)
ggggccggcacgccgccgtcgggcggtcgtaggacatggccgccaggaggtagctctcggtgatgcccagagccacgaagaagtacatctcggcaaagcacgcctggaaggatatggcct

SEQ ID NO: 764175 - DNA, 120 bp, Artificial Sequence
  ENSG00000221882_16 (sequence is synthesized)
cagcgttggcaaggagagtttctgaaacttccactggagggctctgcgtgttccggcaggaatggtattctgaccttttcagctagcagaggatgaggaggacaaggtggtggtgtcatt

SEQ ID NO: 764176 - DNA, 120 bp, Artificial Sequence
  ENSG00000221882_17 (sequence is synthesized)
gcagcctggggaccgtgacggtggtaaagcagacgtccacgaggctcagcttttggaagagcaatgaatgaaaacagaggtgaagggaccgtgaaggagagggtgatggacaaactccaa

SEQ ID NO: 764177 - DNA, 120 bp, Artificial Sequence
  ENSG00000221882_18 (sequence is synthesized)
gctgtagtgaacacagccctgtacagagaagacagcagcttgattcctctcatttctcagtcattagcccctcactcgctctccgggaggataacggggtgtgcgcagctcctccccttc

SEQ ID NO: 764178 - DNA, 120 bp, Artificial Sequence
  ENSG00000221883_0 (sequence is synthesized)
ctccacaggcgggcgttaaaccgcgcgggcagcgctgcgagagctcccaaagatgactcgagtggtgagccccgaggcggcgcgtttccccgccgcgccagacagggagagagggcctag

SEQ ID NO: 764179 - DNA, 120 bp, Artificial Sequence
  ENSG00000221883_1 (sequence is synthesized)
atgtgccggcgccggttggtcagaggcggtggcctctgacctttccgagagctgagaaggcggcgggaggaaaaaaggcagacacacgctgggcgcccggccgctgacggcgggtaatgc

SEQ ID NO: 764180 - DNA, 120 bp, Artificial Sequence
  ENSG00000221883_2 (sequence is synthesized)
cccgggcctcccgggcgacggcgaaggcggagtcccggcccggccagggaggcgcgcggagaggcccccccagcggccagccaaggtaaacaaggccgtgacgtgcgccgcgcacttacc

SEQ ID NO: 764181 - DNA, 120 bp, Artificial Sequence
  ENSG00000221883_3 (sequence is synthesized)
aggccgtgacgtgcgccgcgcacttaccgggagctgcggcctcgcggccgctgagcccgaacaagccagaccgggtcaggccgggccagagggaccggattggggcgaagcggcagcgga

SEQ ID NO: 764182 - DNA, 120 bp, Artificial Sequence
  ENSG00000221883_4 (sequence is synthesized)
ggcggcgggccgacgccggtcaagcccgcgctgcttcctccagaagagtcgtccccacagctccggaagtgcttggcgccgttgcgtcacttccggatcggggtcgacccacggtcgctc

SEQ ID NO: 764183 - DNA, 120 bp, Artificial Sequence
  ENSG00000221883_5 (sequence is synthesized)
gggtcgcgacaggctcccggctagagggcctgtttagcgccgcctccttgaaacttagcgctctgacccagagtctgaccagggtacggcaggcgccgaccgcgtctggagccactattc

SEQ ID NO: 764184 - DNA, 120 bp, Artificial Sequence
  ENSG00000221883_6 (sequence is synthesized)
gcgtttctcaccggcttctcatttcactgtttgtactccgggatcgggcacggagaagacatcctggcgtcagtggagcagataaccattgtttctcggccgctatctggtcagagggga

SEQ ID NO: 764185 - DNA, 120 bp, Artificial Sequence
  ENSG00000221883_7 (sequence is synthesized)
gctgggccgggaaattctgcctacaccccgaggcggtcgcagggtggccccagagccgcaaccacaccaggctttcgcttcccctgccgaggcctcgttcgccgcgcagttctccgactt

SEQ ID NO: 764186 - DNA, 120 bp, Artificial Sequence
  ENSG00000221883_8 (sequence is synthesized)
acggtcaccgtgcaagattgcatcttaactgccttgcttgcagtttcttttcacagtataggagttgtcatcatgacttccagttaccttctgggaccggttgtcaaatgatgtggctag

SEQ ID NO: 764187 - DNA, 120 bp, Artificial Sequence
  ENSG00000221883_9 (sequence is synthesized)
agacggaggctcactcagattgttgctgcaccacaatggaaatgccagtatgaagccgctgatgttaggaaggctccaggttgtgcaattccatagacaacaaatcaaatcatttccaac

SEQ ID NO: 764188 - DNA, 78 bp, Artificial Sequence
  ENSG00000221883_10 (sequence is synthesized)
ttgtgcaattccatagacaacaaatcaaatcatttccaaccatactggagtcgcgtatatacatattcaagacacctg

SEQ ID NO: 764189 - DNA, 120 bp, Artificial Sequence
  ENSG00000221886_0 (sequence is synthesized)
ggagaacccggatggaacccgggcctggctgaggcggaggttgttgcggatgcttctctctccaggcgcaccgcagattcctgcccgggggttggacccgaggaaccgccgtctctactg

SEQ ID NO: 764190 - DNA, 120 bp, Artificial Sequence
  ENSG00000221886_1 (sequence is synthesized)
gttccgacggccagaggctgggccctaggctgagcggagagtgggactggagcctgaaacgggcgcctaaaagaagcccgtgcatcccataggcctgcgcctcaggcttggagacgggcg

SEQ ID NO: 764191 - DNA, 120 bp, Artificial Sequence
  ENSG00000221886_2 (sequence is synthesized)
ggcggagaccgcgctgagtcttttttttttttttcctagcagctggcgttcttatctcacccgggaggctgtaaaaatctccgtccttaacagtaacaccatcaggtcctatcagttaag

SEQ ID NO: 764192 - DNA, 120 bp, Artificial Sequence
  ENSG00000221886_3 (sequence is synthesized)
agctgcttgttatttgcatgcattcttataattaaatctcctaacaaccctgtaagcaaaattctgtggcatctctggaatactacctgagaatttttgtgtgccatgtcgaagaaacgc

SEQ ID NO: 764193 - DNA, 120 bp, Artificial Sequence
  ENSG00000221886_4 (sequence is synthesized)
aaatgggatgatgactatgttcgctactggttcacctgtacaacggaagtagatggaactcagcgtccacagtgtgtgttgtgtaactcagtattttcaaatgctgacctcagaccatca

SEQ ID NO: 764194 - DNA, 120 bp, Artificial Sequence
  ENSG00000221886_5 (sequence is synthesized)
aaactgtcagaccattttaacagacagcatggtggtgtagctgggcatgatctcaatagcctgaagcatatgccagcaccatctgatcagagtgaaaccttgaaagcatttggagttgca

SEQ ID NO: 764195 - DNA, 120 bp, Artificial Sequence
  ENSG00000221886_6 (sequence is synthesized)
tctcatgaggatactttattacaagcatcgtatcaatttgcgtatttatgtgccaaggagaagaatcctcatacagtagctgaaaagttagtgaaaccttgtgcactggaaatagcacaa

SEQ ID NO: 764196 - DNA, 120 bp, Artificial Sequence
  ENSG00000221886_7 (sequence is synthesized)
atagttttgggaccagatgcacaaaaaaagcttcagcaggtacccttatcagatgatgtgatccattctagaattgatgaaatgagccaggatatcttacagcaagttctagaagatatc

SEQ ID NO: 764197 - DNA, 120 bp, Artificial Sequence
  ENSG00000221886_8 (sequence is synthesized)
aaagccagtcctcttaaagtgggtattcagcttgctgagacaactgacatggatgactgcagtcagctaatggcatttgtgcgctatataaaagaaagagagatcgtagaagaatttctc

SEQ ID NO: 764198 - DNA, 120 bp, Artificial Sequence
  ENSG00000221886_9 (sequence is synthesized)
ttctgtgaaccattgcagctatccatgaaaggaatagatgtgttcaatctcttcagagacttctttctgaagcataagatagcacttgatgtatgtggctctgtttgtactgatggtgcc

SEQ ID NO: 764199 - DNA, 120 bp, Artificial Sequence
  ENSG00000221886_10 (sequence is synthesized)
tcctctatgctaggagaaaattccgagtttgttgcctacgtgaaaaaagagatacctcatatcgtagttacacattgtttattgaatcctcatgcacttgtcataaagacattgcctaca

SEQ ID NO: 764200 - DNA, 120 bp, Artificial Sequence
  ENSG00000221886_11 (sequence is synthesized)
aaagggagagctccaaatcatcgcctatttcaggctttctttgaagaaattggcatagaatatagtgtcctccttttccatactgaaatgaggtggctttcccgaggccaaatacttact

SEQ ID NO: 764201 - DNA, 120 bp, Artificial Sequence
  ENSG00000221886_12 (sequence is synthesized)
cacatttttgaaatgtatgaagaaataaatcagtttcttcaccacaagagcagtaatttagttgatggctttgaaaataaagagtttaaaattcacctagcataccttgcagatttattc

SEQ ID NO: 764202 - DNA, 120 bp, Artificial Sequence
  ENSG00000221886_13 (sequence is synthesized)
aaacacttaaatgaactcagtgcatctatgcagaggactgggatgaacacagtatcagctagagagaagttatctgcttttgttaggaagtttccattttggcaaaaacgaattgagaaa

SEQ ID NO: 764203 - DNA, 120 bp, Artificial Sequence
  ENSG00000221886_14 (sequence is synthesized)
agaaattttaccaattttccttttcttgaagaaataattgtttcagataatgaaggcatattcattgcagctgaaataacactgcatctgcaacaattgagcaacttcttccatggatat

SEQ ID NO: 764204 - DNA, 120 bp, Artificial Sequence
  ENSG00000221886_15 (sequence is synthesized)
ttttccattggagatcttaatgaggcaagtaaatggatattggatccatttctttttaatatcgattttgttgatgatagttatttaatgaaaaatgatcttgctgaattacgagctagt

SEQ ID NO: 764205 - DNA, 120 bp, Artificial Sequence
  ENSG00000221886_16 (sequence is synthesized)
ggccaaatcctaatggaatttgagacaatgaagcttgaggatttctggtgtgcccaattcacagcatttccaaacctggcaaagacagctctagaaatccttatgccatttgcaactaca

SEQ ID NO: 764206 - DNA, 120 bp, Artificial Sequence
  ENSG00000221886_17 (sequence is synthesized)
tacctttgtgagttgggattttcatcacttttacatttcaaaacaaagtccagaagctgctttaatctgagtgatgatatccgtgtggctatttcaaaaaaagttcctcgtttctcggac

SEQ ID NO: 764207 - DNA, 120 bp, Artificial Sequence
  ENSG00000221886_18 (sequence is synthesized)
atcattgaacaaaagctacagctacagcagaagtcactgtaagctgatatacttttttaatgaataatttcaatcttaatatcattgtaaaattaagctgtaattctgtctctttcatat

SEQ ID NO: 764208 - DNA, 120 bp, Artificial Sequence
  ENSG00000221886_19 (sequence is synthesized)
ttatgatatactgaattctatgtctaaaaaacttaagaactttaattttgaatgaggcatgtgaaaatatgttttgagaataaaaacacagcagaaaagattaagtactactgcctagtt

SEQ ID NO: 764209 - DNA, 120 bp, Artificial Sequence
  ENSG00000221886_20 (sequence is synthesized)
gctatcatgagattttcccaattctaagtatctgtttaacctgttcgtgtggtatatgaaaaagatacctaagcactagaatatccagctaaatggtgcaataggctaggaattgagcca

SEQ ID NO: 764210 - DNA, 120 bp, Artificial Sequence
  ENSG00000221886_21 (sequence is synthesized)
ggagaaaagagaagatatcccagaagtcaaaaaggcaaaatgaaagattgagttcgcccgtctttgttatggagaggttaatgaaatcagaagaggattatgaaatataatgggaaaagg

SEQ ID NO: 764211 - DNA, 120 bp, Artificial Sequence
  ENSG00000221886_22 (sequence is synthesized)
aatgatctggcttatgtaagacttacttttaaatatactctttggagttagtctcacaatgtccattcccctagctcctgtgctatgaatatcatattaataaatagcctaatatattaa

SEQ ID NO: 764212 - DNA, 120 bp, Artificial Sequence
  ENSG00000221886_23 (sequence is synthesized)
tgcattcttataattaaatctcctaacaaccctgtaagccacattctctggcacagaactttggaaactttggggatcacttacttatcttggagatagaatgttttctaagcaaaattc

SEQ ID NO: 764213 - DNA, 120 bp, Artificial Sequence
  ENSG00000221887_0 (sequence is synthesized)
attcactgggaactaacacccggcgccgctcagacatctctattcccgcctctccgacccggtctcacttcgctcctgggcagctgcgcggagaactggggctcaccgtcatggatgctc

SEQ ID NO: 764214 - DNA, 120 bp, Artificial Sequence
  ENSG00000221887_1 (sequence is synthesized)
tatcagaagcaaatggcacatttgcattaaaccttttgaaaaagctaggggaaaacaactcaaacaacttatttttttccccatgagcatatcatcagccttggccatggttttcatggg

SEQ ID NO: 764215 - DNA, 120 bp, Artificial Sequence
  ENSG00000221887_2 (sequence is synthesized)
ggcaaagggaaacactgcagctcagatgtctcaggcactttgttttagtaaaatcggaggtgaagatggagatattcatcgaggttttcagtcacttcttgttgcaattaacagaactga

SEQ ID NO: 764216 - DNA, 120 bp, Artificial Sequence
  ENSG00000221887_3 (sequence is synthesized)
cactgaatatgtgcttagaactgccaacgggctctttggagaaaagtcttatgatttcctcacaggttttacagattcctgtggcaaattctaccaagcaacgataaaacagctagactt

SEQ ID NO: 764217 - DNA, 120 bp, Artificial Sequence
  ENSG00000221887_4 (sequence is synthesized)
tgtgaatgatacagagaagtccacaacacgtgtaaactcctgggttgctgataaaactaaaggtgaaaatatattgttattctatttcgataatattttaaacagttttatagtcagttc

SEQ ID NO: 764218 - DNA, 120 bp, Artificial Sequence
  ENSG00000221887_5 (sequence is synthesized)
tttacaaaactgtcaaatataaaaaggagtccttttttctctaaacaactatgcaaacattaaaacctttctttggaaatattgccaactcgtagaccttttctctagctttagcttttc

SEQ ID NO: 764219 - DNA, 120 bp, Artificial Sequence
  ENSG00000221887_6 (sequence is synthesized)
ccttatcaagtatctgtgatgtctctctagatgaaataatctcttccaggtttttttgcttgttaatattaggtagtttttcttttcacaaatagcgttaaaatttgaatttaaaaattt

SEQ ID NO: 764220 - DNA, 120 bp, Artificial Sequence
  ENSG00000221887_7 (sequence is synthesized)
ctagctgtctccctcactggtattgccatactgtatggtttacaggcttgaaatgcaactgctgtgatcagtgataagggaacacactgatgatttagattgaacagggagagttatatt

SEQ ID NO: 764221 - DNA, 120 bp, Artificial Sequence
  ENSG00000221887_8 (sequence is synthesized)
gccctcagaacttcactgacacaacccatattttctttccataactggccaacttttccctttgtaccaaagccagctacttagcttcagggagagaatgagactgaagattacaaggag

SEQ ID NO: 764222 - DNA, 120 bp, Artificial Sequence
  ENSG00000221887_9 (sequence is synthesized)
acatccacattatatgtgggctgagagaggaaagagggagtatcagaggttgccgggtttgctactctcattcctcttcctcctctgcccaacacttggacttggaaagaagtctgaaag

SEQ ID NO: 764223 - DNA, 120 bp, Artificial Sequence
  ENSG00000221887_10 (sequence is synthesized)
gtggggaataatcagcccatatgattcttccactgcagagagagcctctgagtgttacagccaggagcaacagggtggcaccctcttcttcagggaaacacacacctctttgcactgcct

SEQ ID NO: 764224 - DNA, 120 bp, Artificial Sequence
  ENSG00000221887_11 (sequence is synthesized)
tgtggatagtccagtcaagtggagtaagaggtgggagtggggagtgtaaatggagtaacctctaagtatccaagcaggagggtgttttttttttttctttcctggaatgaggataatcaa

SEQ ID NO: 764225 - DNA, 120 bp, Artificial Sequence
  ENSG00000221887_12 (sequence is synthesized)
tttcaatatgaattatgaaaatgaatgataatggttttatctgttatagaaatataatataatcagactttagccatgtaaatcataaaacatagagataacaatatgcatattgttcct

SEQ ID NO: 764226 - DNA, 120 bp, Artificial Sequence
  ENSG00000221887_13 (sequence is synthesized)
tcctagagggtcttgtgaaattttgtttgtcatattctctttgaagagttatcattcactattttatttctgtcttgtaaagcctgaaagctcatgtgctgccttgacatctatgggctt

SEQ ID NO: 764227 - DNA, 120 bp, Artificial Sequence
  ENSG00000221887_14 (sequence is synthesized)
ctcagggcctcagaggcctggccatgaagtcccctgctcttgtcagatatgtgcaccctattcacccactgagcaggaaggctcttcccccttctaagttcccttaccaggcagtcagct

SEQ ID NO: 764228 - DNA, 120 bp, Artificial Sequence
  ENSG00000221887_15 (sequence is synthesized)
gtaccctccctgggtctcaacgtggctcacttccctccagcctggaaaattattcaaacaagcctgtcacatctggaggagccaggaatcgcctcttcctcttgttactgcaaagcctgc

SEQ ID NO: 764229 - DNA, 120 bp, Artificial Sequence
  ENSG00000221887_16 (sequence is synthesized)
cttccacagcccctactggttcactctattcccaaatgcaactctcctgtgaccccgcatggcatgtggtgacctccctccctgtgagcagttgtgactaataaactgccgccaatttca

SEQ ID NO: 764230 - DNA, 120 bp, Artificial Sequence
  ENSG00000221887_17 (sequence is synthesized)
ttctaccaagcaacgataaaacagctagactttgtgaatgatacagagaagtccacaacacgtgtaaactcctgggttgctgataaaactaaagtccacaagggaacgaagaaacaccac

SEQ ID NO: 764231 - DNA, 120 bp, Artificial Sequence
  ENSG00000221887_18 (sequence is synthesized)
caacagcgtccacatggccttcacgacatggccctgtggacacatcagacgttgtcttgcagtgcctcatccacactatctgtaccactgcaggcctggatacgtcatggttttcatggt

SEQ ID NO: 764232 - DNA, 120 bp, Artificial Sequence
  ENSG00000221887_19 (sequence is synthesized)
aaccaaactcccaggggccaaattatatcctttgtaaaggacttcaaaccaccaggcatttgctggaagtttcacggaggaaaacaagcatttttcatcttttaatctgttttgctggtc

SEQ ID NO: 764233 - DNA, 120 bp, Artificial Sequence
  ENSG00000221887_20 (sequence is synthesized)
aaagaggaaaaggagtggatggacaaagtggggcccaaagtctggatctagttctgaccaacaaggagaaattgatgcacaatggggaagtgaccttggcattttcaactggcagagccg

SEQ ID NO: 764234 - DNA, 120 bp, Artificial Sequence
  ENSG00000221887_21 (sequence is synthesized)
atggatgacctctgtgaagcaaatggcacttttgccatcagcttatttaaaatattgggggaagaggacaactcaagaaacgtattcttctctcccatgagcatctcctctgccctggcc

SEQ ID NO: 764235 - DNA, 120 bp, Artificial Sequence
  ENSG00000221887_22 (sequence is synthesized)
atggtcttcatgggggcaaagggaagcactgcagcccagatgtcccaggcactttgtttatacaaagacggagatattcaccgaggtttccagtcacttctcagtgaagttaacagaact

SEQ ID NO: 764236 - DNA, 120 bp, Artificial Sequence
  ENSG00000221887_23 (sequence is synthesized)
ggcactcagtacttgcttagaactgccaacagactctttggagaaaagacgtgtgatttccttccagactttaaagaatactgtcagaagttctatcaggcagagctggaggagttgtcc

SEQ ID NO: 764237 - DNA, 120 bp, Artificial Sequence
  ENSG00000221888_0 (sequence is synthesized)
tttgcattttcttttgggggaagaagtcagtcttgaaagaagttgatactgacatgtccagcatgtctatgtgactatgaagacagaatatcatgaacacaagatgtcattggaaagcat

SEQ ID NO: 764238 - DNA, 82 bp, Artificial Sequence
  ENSG00000221888_1 (sequence is synthesized)
ctctctcatgaataagagacttaacactgctggcttttacaatttaataacttatttttctagatttgttgggaatatggaa

SEQ ID NO: 764239 - DNA, 120 bp, Artificial Sequence
  ENSG00000221888_2 (sequence is synthesized)
tttaataacttatttttctagatttgttgggaatatggaaaaaagaaatctaacagttgtcagggaattcgtccttctgggacttcctagctcagcagagcagcagcacctcctgtctgt

SEQ ID NO: 764240 - DNA, 120 bp, Artificial Sequence
  ENSG00000221888_3 (sequence is synthesized)
gctctttctctgtatgtatttagccaccaccttggggaacatgctcatcattgcgacgattggctttgactctcacctccattcccctatgtacttcttccttagtaacttggcctttgt

SEQ ID NO: 764241 - DNA, 120 bp, Artificial Sequence
  ENSG00000221888_4 (sequence is synthesized)
tgacatctgctttacgtcgactacagtcccccaaatggtagtgaatatcttgactggcaccaagactatctcttttgcaggctgcctcacccagctcttcttcttcgtttcttttgtgaa

SEQ ID NO: 764242 - DNA, 120 bp, Artificial Sequence
  ENSG00000221888_5 (sequence is synthesized)
tggctggactgtggcttgttacttacctccacgccctcctgcatactgtcctaatagcacagctgtccttctgtgcctccaatatcatccatcatttcttctgtgatctcaatcctctcc

SEQ ID NO: 764243 - DNA, 120 bp, Artificial Sequence
  ENSG00000221888_6 (sequence is synthesized)
tgcagctctcttgctctgacgtctccttcaatgtaatgatcatttttgcagtaggaggtctattggctctcacgccccttgtctgtatcctcgtatcttatggacttatcttctccactg

SEQ ID NO: 764244 - DNA, 120 bp, Artificial Sequence
  ENSG00000221888_7 (sequence is synthesized)
ttctgaagatcacctctactcagggcaagcagagagctgtttccacctgcagctgccacctgtcagtggtggtgttgttttacggcacagccatcgccgtctatttcagcccttcatccc

SEQ ID NO: 764245 - DNA, 120 bp, Artificial Sequence
  ENSG00000221888_8 (sequence is synthesized)
cccatatgcctgagagcgacactctgtcaaccatcatgtattcaatggtggctccgatgctgaatcctttcatctataccctaaggaacagggatatgaagaggggacttcagaaaatgc

SEQ ID NO: 764246 - DNA, 120 bp, Artificial Sequence
  ENSG00000221888_9 (sequence is synthesized)
ttctcaagtgcacagtctttcagcagcaataatgacctcagtgactgaattaaataatactaatgtggtgataagaaagtgtgactagatgctcacaataacagtgagaagagaaaccaa

SEQ ID NO: 764247 - DNA, 120 bp, Artificial Sequence
  ENSG00000221888_10 (sequence is synthesized)
gaaagaaacacacttgtctatatctcattcttctctttttcactcttgactagaaatctgaatcaatgcataggtccatctatgcttttgtgattggatattcaggaaagagaaaagtca

SEQ ID NO: 764248 - DNA, 120 bp, Artificial Sequence
  ENSG00000221888_11 (sequence is synthesized)
aatgtctcccttatgctggaaatcgtgttaagcactttatatgaattatcacattaaatcctctgagtaaatatataaaaaccatatagcattctttatacagaaagtgaatcttaggga

SEQ ID NO: 764249 - DNA, 120 bp, Artificial Sequence
  ENSG00000221888_12 (sequence is synthesized)
agttaaatagtctgcatacaacccatagctgataaatagtttctgactccagtacaaatataccttagtgatgagaatctctgtgatatagttcccaaatgctacatattaagataaatt

SEQ ID NO: 764250 - DNA, 120 bp, Artificial Sequence
  ENSG00000221888_13 (sequence is synthesized)
ttcctaaacttcttgtctgtgagttcagatttagaattaaaggggcataaattctaatgttaattcgacaatgtggtagaacacattttaaatagtgagtcttcttaaaaatcactaaaa

SEQ ID NO: 764251 - DNA, 120 bp, Artificial Sequence
  ENSG00000221888_14 (sequence is synthesized)
taatttattcaagttttaaagtatgtatgctttcctccaatcccctctcacttcaaatacagtcaatgattttattctattgacacatgtccttgtcatgtgtgtccctaactgatctca

SEQ ID NO: 764252 - DNA, 120 bp, Artificial Sequence
  ENSG00000221888_15 (sequence is synthesized)
ggcatggaggaactcagaatctcccagccatctttatagggcagaggctaactgatctcccccaacaactaggagtgctttgggtatacaatatctttagagaagagatcaggttctcag

SEQ ID NO: 764253 - DNA, 120 bp, Artificial Sequence
  ENSG00000221888_16 (sequence is synthesized)
taattatatttgaggtcattcaattaaatagactccatttaagatattaaccatccaatccaatctaattgtttattcaacctattccggttcctttctacaattttacatctgagaatg

SEQ ID NO: 764254 - DNA, 120 bp, Artificial Sequence
  ENSG00000221888_17 (sequence is synthesized)
aactaagatcatttctgcttgtccttttctagaattaaaatgtctgctcacagacctctgtaatttcttgaacgaacacatgtataatatttaaaaccttataaacacacacgtgcaccc

SEQ ID NO: 764255 - DNA, 120 bp, Artificial Sequence
  ENSG00000221888_18 (sequence is synthesized)
tttctcaaggaagaccaaatacatacatacataagaaaatttaaatccattcagggaaaaaaagtttcttcaaaaaagcaacaatgttgatatagatattttagctcttctaacatgtat

SEQ ID NO: 764256 - DNA, 120 bp, Artificial Sequence
  ENSG00000221888_19 (sequence is synthesized)
acctaatttataataccaaatagggtttaaaaaatacctattaggagctatgtttattacataggtgatgaaataatatgtataccaaactcctgtgacatgcaatttacctgtgcaaat

SEQ ID NO: 764257 - DNA, 120 bp, Artificial Sequence
  ENSG00000221888_20 (sequence is synthesized)
ctgcacatgtacccctgaatctaaaataacagtttaaaaatgtagattctcagaatataaataaataaataaaagcattggtgaagtaaattgtaacttcagttttacccaataaaaatg

SEQ ID NO: 764258 - DNA, 120 bp, Artificial Sequence
  ENSG00000221888_21 (sequence is synthesized)
ggtaagacgtgtctgtagttaaaagattatgtcacaaaagtgaattcaatccttcactagagtgtaggtgtagaaaactgtttaagcttagaagtttcggtgcaggacactgctagggtt

SEQ ID NO: 764259 - DNA, 120 bp, Artificial Sequence
  ENSG00000221888_22 (sequence is synthesized)
tagagaccatccatgttaggctttcaaatatcccccaggccagtttcaggttgggcagcctactaccccatgacatccaatattatattgacatactgatttcatttctcttggatgtat

SEQ ID NO: 764260 - DNA, 120 bp, Artificial Sequence
  ENSG00000221888_23 (sequence is synthesized)
acccaatagtgattgctggatcgtacagtagttctatttttaattttttgagtaaacgtcatactgttttccataagggctatactaatctacattcccaccgatagtgaagaaagattc

SEQ ID NO: 764261 - DNA, 120 bp, Artificial Sequence
  ENSG00000221888_24 (sequence is synthesized)
tttttcctccataccctcatcaaacttttttatcttttgacttttttcatagccactcagacaagtgtgaggtgcatctcacggtggttttaattggcatttcccttatgaataacgatt

SEQ ID NO: 764262 - DNA, 120 bp, Artificial Sequence
  ENSG00000221888_25 (sequence is synthesized)
ttgagcattttttcatatctgttggcaatttgaatgtcttcttgtgagaaatgtctattcaagtactttgctctttttaaaaattgtgttatttggcagttttttgctactgagttattt

SEQ ID NO: 764263 - DNA, 120 bp, Artificial Sequence
  ENSG00000221888_26 (sequence is synthesized)
gaactccttatatactttgaatattaactccttatcagatgtatgatttgcaaatattttctcccattttgtaggtcatctcttcattctgttggttgttacctttgctgtaaaagactt

SEQ ID NO: 764264 - DNA, 120 bp, Artificial Sequence
  ENSG00000221888_27 (sequence is synthesized)
ttagtttaatttactagcgcttgttaattttagttttgtcaattgtgggagtcatatctaaaagattatcatgcataccaatgtcatagagctttccccctgtgctttcttctattagtt

SEQ ID NO: 764265 - DNA, 120 bp, Artificial Sequence
  ENSG00000221888_28 (sequence is synthesized)
ttatagtttctggtcttctgtttatgtgtttaatatattttgtgttgatttttgtatatggtgtcagataagggtccaattccattcatctccatatggatattcagttgttctaaaacc

SEQ ID NO: 764266 - DNA, 120 bp, Artificial Sequence
  ENSG00000221888_29 (sequence is synthesized)
acttattgaagagatggtccattccatattgtgtgtccctaccacctttgtcaaagatcaattgaccatgaatgtatcaatttatttctatgtgtctatttttatgccagtaccatgcca

SEQ ID NO: 764267 - DNA, 120 bp, Artificial Sequence
  ENSG00000221888_30 (sequence is synthesized)
tttttgattactgtatctttttattgcattttaaaatttaattggcataaaataatcatacacacttatggagtacacagggatgttttgataaatataatgtacaggtatcagatcaag

SEQ ID NO: 764268 - DNA, 80 bp, Artificial Sequence
  ENSG00000221890_0 (sequence is synthesized)
agagcggcggcagcagcggccgcggcgacagctccagctccggctccggctccggctccggctccggctcccgcgcctgc

SEQ ID NO: 764269 - DNA, 120 bp, Artificial Sequence
  ENSG00000221890_1 (sequence is synthesized)
cgccgccgcgcctgccgggggcctcgggcgcccccgccgcccgcctcacgctgaagttcctggccgtgctgctggccgcgggcatgctggcgttcctcggtgccgtcatctgcatcatcg

SEQ ID NO: 764270 - DNA, 120 bp, Artificial Sequence
  ENSG00000221890_2 (sequence is synthesized)
ggcatgctggcgttcctcggtgccgtcatctgcatcatcgccagcgtgcccctggcggccagcccggcgcgggcgctgcccggcggcgccgacaatgcttcggtcgcctcgggcgccgcc

SEQ ID NO: 764271 - DNA, 80 bp, Artificial Sequence
  ENSG00000221890_3 (sequence is synthesized)
acccgcggccagcgcgcacccgctgccgcccgggcccctgttcagccgcttcctgtgcacgccgctggctgctgcctgcc

SEQ ID NO: 764272 - DNA, 120 bp, Artificial Sequence
  ENSG00000221890_4 (sequence is synthesized)
gggggacgcggcgggcgctgcgccgggcgagcgcgaagagctgctgctgctgcagagcacggccgagcagctgcgccagacggcgctgcagcaggaggcgcgcatccgcgccgaccagga

SEQ ID NO: 764273 - DNA, 120 bp, Artificial Sequence
  ENSG00000221890_5 (sequence is synthesized)
gaccaggacaccatccgtgagctcaccggcaagctgggccgctgcgagagcggcctgccgcgcggcctccagggcgccgggccccgccgcgacaccatggccgacgggccctgggactcg

SEQ ID NO: 764274 - DNA, 120 bp, Artificial Sequence
  ENSG00000221890_6 (sequence is synthesized)
gggactcgcctgcgctcattctggagctggaggacgccgtgcgcgccctgcgggaccgcatcgaccgcctggagcaggagcttccagcccgtgtgaacctctcagctgccccagccccag

SEQ ID NO: 764275 - DNA, 120 bp, Artificial Sequence
  ENSG00000221890_7 (sequence is synthesized)
tctctgctgtgcccaccggcctacactccaagatggaccagctggaggggcagctgctggcccaggtgctggcactggagaaggagcgtgtggccctcagccacagcagccgccggcaga

SEQ ID NO: 764276 - DNA, 120 bp, Artificial Sequence
  ENSG00000221890_8 (sequence is synthesized)
ggcaggaagtggaaaaggagttggacgtcctgcagggtcgtgtggctgagctggagcacgggtcctcagcctacagtcctccagatgccttcaagatcagcatccccatccgtaacaact

SEQ ID NO: 764277 - DNA, 120 bp, Artificial Sequence
  ENSG00000221890_9 (sequence is synthesized)
acatgtacgcccgcgtgcggaaggctctgcccgagctctacgcattcaccgcctgcatgtggctgcggtccaggtccagcggcaccggccagggcacccccttctcctactcagtgcccg

SEQ ID NO: 764278 - DNA, 120 bp, Artificial Sequence
  ENSG00000221890_10 (sequence is synthesized)
ggcaggccaacgagattgtactgctagaggcgggccatgagcccatggagctgctgatcaacgacaaggtggcccagctgcccctgagcctgaaggacaatggctggcaccacatctgca

SEQ ID NO: 764279 - DNA, 120 bp, Artificial Sequence
  ENSG00000221890_11 (sequence is synthesized)
tcgcctggaccacaagggatggcctatggtctgcctaccaggacggggagctgcagggctccggtgagaacctggctgcctggcaccccatcaagcctcatgggatccttatcttgggcc

SEQ ID NO: 764280 - DNA, 120 bp, Artificial Sequence
  ENSG00000221890_12 (sequence is synthesized)
aggagcaggataccctgggtggccggtttgatgccacccaggcctttgtcggtgacattgcccagtttaacctgtgggaccacgccctgacaccagcccaggtcctgggcattgccaact

SEQ ID NO: 764281 - DNA, 120 bp, Artificial Sequence
  ENSG00000221890_13 (sequence is synthesized)
gcactgcgccactgctgggcaacgtccttccctgggaagacaagttggtggaggcctttgggggtgcaacaaaggctgccttcgatgtctgcaaggggagggccaaggcatgaggggcca

SEQ ID NO: 764282 - DNA, 120 bp, Artificial Sequence
  ENSG00000221890_14 (sequence is synthesized)
cctcatccagggcccctcccttgcctgccactttggggacttgaggggggtcatattccctcctcagcctgcccacgcactggccttccctcctgccccactcctggctgtgcctcccat

SEQ ID NO: 764283 - DNA, 120 bp, Artificial Sequence
  ENSG00000221890_15 (sequence is synthesized)
ttcccctcacctgtacccacacctccagaatgccctgccctgcgagtgtgtcccctgtccccacctgagtggggaggagcgtctcaagtgaacagtgggagcctgcccacctggcactgc

SEQ ID NO: 764284 - DNA, 120 bp, Artificial Sequence
  ENSG00000221890_16 (sequence is synthesized)
actggagttgtctcttaccccaccctccctgcccatcaactgtatctgatttcactaattttgacagcacccccagtagggtaggattgtgtatgagggggaccccactatctcagtggt

SEQ ID NO: 764285 - DNA, 120 bp, Artificial Sequence
  ENSG00000221890_17 (sequence is synthesized)
gggggtggccgcccgcccccttgtcccccatgcaacaggcccagtggcttccccttcagggccacaacaggctgtagaaggggatgacgaggacatcagaggttagacttaccctcctcc

SEQ ID NO: 764286 - DNA, 120 bp, Artificial Sequence
  ENSG00000221890_18 (sequence is synthesized)
ctctttccaccagctgccagtcaagggcagtgggatctcgatggagcctccccccccccccacccatgcctccctcttcctcctctttcctcctctctttgtgtgtagcggtttgaatgt

SEQ ID NO: 764287 - DNA, 120 bp, Artificial Sequence
  ENSG00000221890_19 (sequence is synthesized)
tggttccatgcctggcccagccccacctcagtctccaggacattcctttcccagctccagcctggagggaaggggacaaagaccccaggaggccaaagggctgcagtcaccccttgtgct

SEQ ID NO: 764288 - DNA, 120 bp, Artificial Sequence
  ENSG00000221890_20 (sequence is synthesized)
cacccatagtgatggccactggtatagtcatcgctctccctccatgccaaggacaggacttggaccgcttcagcctgggctgggagcagccctaaggtagaggcctcatggcccaggaga

SEQ ID NO: 764289 - DNA, 120 bp, Artificial Sequence
  ENSG00000221890_21 (sequence is synthesized)
ccccacctctggcagagccacattacctaccctgtgcatggtcctggggcagcaaggaagaagctcagagggtggggagaagcatgaagcagtgagcagagcactgggtgagagggagaa

SEQ ID NO: 764290 - DNA, 120 bp, Artificial Sequence
  ENSG00000221890_22 (sequence is synthesized)
gaccttggttcctagccagccctgctaatgtgctgtgtggccttctgtaagtccctgccctctctgggcctggccttcctcattcgtgagctgaggccctcgctttggtcatttgctctc

SEQ ID NO: 764291 - DNA, 120 bp, Artificial Sequence
  ENSG00000221890_23 (sequence is synthesized)
cagattgggtgtgagcttctctgtgattccaggtggatatgtggggaaagctctggtgaccctgggcttcgcaggggtagatcccaggactcggcagtggatgggatgcagccagtcatg

SEQ ID NO: 764292 - DNA, 120 bp, Artificial Sequence
  ENSG00000221890_24 (sequence is synthesized)
aaaaaccagctccctttggatcaacccagcctggcacccttgcctgtctgagagtgtctcaaagggctgatggcttcctggtccccttgagtcatcaccagcttccccaagagagtgtca

SEQ ID NO: 764293 - DNA, 68 bp, Artificial Sequence
  ENSG00000221890_25 (sequence is synthesized)
agcctggccaacgtggtgaaaccccatcttcactaaaaatacaaaacttagctggttatcttgaactg

SEQ ID NO: 764294 - DNA, 88 bp, Artificial Sequence
  ENSG00000221890_26 (sequence is synthesized)
taatcttaaagatgagaaaagccaccccatctggcaccacagctgcatcttgcttgtgagaaatggggaagagttcagggaggacacg

SEQ ID NO: 764295 - DNA, 120 bp, Artificial Sequence
  ENSG00000221890_27 (sequence is synthesized)
cttgcttgtgagaaatggggaagagttcagggaggacacgtgacctgcacaggatcacagagcatggggcagagccaggactagagctcagggcatctgactccctcttcagtgttcttc

SEQ ID NO: 764296 - DNA, 120 bp, Artificial Sequence
  ENSG00000221890_28 (sequence is synthesized)
cccctccatgttgcctgcccctgaagacctttgagttcagtctacacctaagcaggtagacatccgcgaggtcagatgctttccaacatgacacctgaacatcttcctttatgcaacacc

SEQ ID NO: 764297 - DNA, 120 bp, Artificial Sequence
  ENSG00000221890_29 (sequence is synthesized)
caaacatcttggcatccccaccccaggaagtgcggggaggaggttatgatccctgggcgcttcggcagaatggagagctgaggtgtccctcccctgctagtcacctaccaggtgtctgag

SEQ ID NO: 764298 - DNA, 120 bp, Artificial Sequence
  ENSG00000221890_30 (sequence is synthesized)
cagctgcatgctccctggctcaagtgggcactgtaccttttgcctgcctttttgttccctatctccactccctgaggccacttagcctgagacatgatgcaagagctgcaggccgggggg

SEQ ID NO: 764299 - DNA, 120 bp, Artificial Sequence
  ENSG00000221890_31 (sequence is synthesized)
ctcagtgccatggaagctactccaagttgcattgcctcccgcgcccagatcctgctttccatttcgagaacataaatagattgcccagcccctccagtacaatcccactggaagaaaagg

SEQ ID NO: 764300 - DNA, 120 bp, Artificial Sequence
  ENSG00000221890_32 (sequence is synthesized)
caatggcgggcttcagccagacctgctgagacctaggttgccacggtaacagccaaagacatcaacccaagtgctgggtcaagtgtctcatcatactggcactgttgctggggtgacggc

SEQ ID NO: 764301 - DNA, 120 bp, Artificial Sequence
  ENSG00000221890_33 (sequence is synthesized)
agaattcagaacttcaatttcagtgacgccaagcttgatgtgtttctgttattgttttgaagaaggtagctcttgtggaggacttgggagaaggatggggtcttaggaaggaggtgacag

SEQ ID NO: 764302 - DNA, 120 bp, Artificial Sequence
  ENSG00000221890_34 (sequence is synthesized)
cacttgcatggtcacttgagcccacacacacgctcaaccccaagtcctttatgctttgtcacagtgaagatgagacctctgacgtccaagccttgttcctgtgctgcatcacccactcag

SEQ ID NO: 764303 - DNA, 120 bp, Artificial Sequence
  ENSG00000221890_35 (sequence is synthesized)
ccttccaaagggaacaggaacaaatttccccagcaccactgtttgggtcccgcttttcctatcttctgctgcccctgagcacatccaagcagacagggaaagaggagtcagacatggccc

SEQ ID NO: 764304 - DNA, 120 bp, Artificial Sequence
  ENSG00000221890_36 (sequence is synthesized)
agtcacatcctgagctgctcctggctgataaccacgatggagcccgtgtttgtcctgccatctggcactgcactgagtgtggcacaggcaccgtcctgttgatctcacaacacagttcta

SEQ ID NO: 764305 - DNA, 120 bp, Artificial Sequence
  ENSG00000221890_37 (sequence is synthesized)
agttaggacgttcttggctccgttagacaggtgaggaaactggggcacagagaggtgatgtcatctgcctggtgtcaatcagctagcaagtgatggagcccagatttcaaaccaaagggg

SEQ ID NO: 764306 - DNA, 120 bp, Artificial Sequence
  ENSG00000221890_38 (sequence is synthesized)
gttacgtccaggggctgagttcccactcacctgtgtagagtgccatctgggcaccattgctccagacgtgttccgacccctttcccagcccacagggcttgaagtgaaggaacagaggca

SEQ ID NO: 764307 - DNA, 120 bp, Artificial Sequence
  ENSG00000221890_39 (sequence is synthesized)
gggggtgggccagccccagggccagggtccccttggtgaagccgtgccagggggctcagctgcttcagggaatgtgtccctcccaccatgggccagagcttcagcccttctttagctcag

SEQ ID NO: 764308 - DNA, 120 bp, Artificial Sequence
  ENSG00000221890_40 (sequence is synthesized)
ctagagttcacaggagagccaaaaaagaaaaggaagctgagcatctcccgagtcctgggcagggaaggggagggaaattgctgcttctccaactcttgcttggggccaagccctgcacca

SEQ ID NO: 764309 - DNA, 120 bp, Artificial Sequence
  ENSG00000221890_41 (sequence is synthesized)
gttgcttcccagctgttatctgccagatcttcccatcttgtggcatgtggtgcccccaccaacatcccaaggggaccaatccccttgccaccactttgcatcacctgggaccacagattt

SEQ ID NO: 764310 - DNA, 120 bp, Artificial Sequence
  ENSG00000221890_42 (sequence is synthesized)
ggacaggaagggctctgagaagaggccaaagccctcattttacagatgaggaagctgaagcccggggaggggagcgaccctcaaggccacccagctggacacgggagacttgagcccagc

SEQ ID NO: 764311 - DNA, 120 bp, Artificial Sequence
  ENSG00000221890_43 (sequence is synthesized)
cttctgactgcattcagccctctctaggacgcagcagcctctccccagcactgagtcccccctcctttgtgtgtcccagcacccttggcctgagtaaacttggaaaggggctccctccca

SEQ ID NO: 764312 - DNA, 120 bp, Artificial Sequence
  ENSG00000221890_44 (sequence is synthesized)
gagaagggactactctcttcacccctttattccagctgcctgccaccccagacccccacctcccaccctgacccccgacccctgggtggggaaggggctcacatgggcccaggctgagtg

SEQ ID NO: 764313 - DNA, 120 bp, Artificial Sequence
  ENSG00000221890_45 (sequence is synthesized)
tgagtgagcatgtcaagttgtctgacactgtgacattagtgcaccctactgacaacccctccccagccttgcccctttctcctctccctgttttgtacataaattgacatgagctgcaac

SEQ ID NO: 764314 - DNA, 120 bp, Artificial Sequence
  ENSG00000221890_46 (sequence is synthesized)
atgtgtgcgtgtgtgtgcgtgtgtgtgtgtgtgtatgtgtgtgtgatctgtgtcatggttttgttacctttttgtttttgtaaacttgaatgttcaaaataaacatgctgtttactctga

SEQ ID NO: 764315 - DNA, 120 bp, Artificial Sequence
  ENSG00000221900_0 (sequence is synthesized)
gtgccttccaagcgcccagaggccaacggtcccccagccatgggcgctgcagctccggccgagtccgcagacctcgggaacttctggaaggcgggagaacccctgctgcaaggccccgac

SEQ ID NO: 764316 - DNA, 120 bp, Artificial Sequence
  ENSG00000221900_1 (sequence is synthesized)
gccctggcggctcccatgagcaggtcacccagcacgccccagaccacgccatctccccagggtcgccagagtccctggcccctgaggtccctgactcagagccatattcagtacttccag

SEQ ID NO: 764317 - DNA, 120 bp, Artificial Sequence
  ENSG00000221900_2 (sequence is synthesized)
ccagtgggggcgcccggtgcccagcacccacctcatcgaggtgcggcccacccaggaccccgccaagccgcagcgggtggtctccgagggctggaggcgccctgcccttcccggggagac

SEQ ID NO: 764318 - DNA, 120 bp, Artificial Sequence
  ENSG00000221900_3 (sequence is synthesized)
ctggggcgagacctctcctgtgcctgggagggttgcatgaaaggggggctgtgtcgtgcctggaacccaggacggacctggagcccggtgaccatcgggatcgcgccccctgagcgtcag

SEQ ID NO: 764319 - DNA, 120 bp, Artificial Sequence
  ENSG00000221900_4 (sequence is synthesized)
gagagcccctggagatcccctggacagagagcccgccccgcaggccgccccgccgcccaggagctcctggacccctgcacccgggagactctgctgggggcgctcagccagtgccccaag

SEQ ID NO: 764320 - DNA, 120 bp, Artificial Sequence
  ENSG00000221900_5 (sequence is synthesized)
cccctgagcaaaaatggagcggttgcttccttcgtgcccaggccagggcctctgaagccgagcctcggcccctggagcctcagtttttgtgatgatgcttggccttccgtgctggtccag

SEQ ID NO: 764321 - DNA, 120 bp, Artificial Sequence
  ENSG00000221900_6 (sequence is synthesized)
cccgccccatccgccatctgggacttctgggaggcgacaacgccttcctgcggcagctgcagtagggtctccttcgccctcgaggtcacccagtctgctggcccctttggctcctaagaa

SEQ ID NO: 764322 - DNA, 120 bp, Artificial Sequence
  ENSG00000221900_7 (sequence is synthesized)
tctgggctctgctacccacctccggagacacaagcccacgtatctactttcacttgctcatccttgctctacctcaacgtggggccctgacaccacgttatcaaacatgcagcccccaca

SEQ ID NO: 764323 - DNA, 120 bp, Artificial Sequence
  ENSG00000221900_8 (sequence is synthesized)
cccctcgtctgcccgcccccagatcttccctctgtgctccctgccaccccagcagctgttgatttcagaacccttgccttcgccctgctggccctctcctccctgcccttcttcctgccc

SEQ ID NO: 764324 - DNA, 120 bp, Artificial Sequence
  ENSG00000221900_9 (sequence is synthesized)
ttcctctgaaaagaggcatttcgggaaggcttgctttttctccatgtctcccagtttgtatagttaaattgtccagttgtatagttaaatatttgatcttattaaaaacatttgtctgca

SEQ ID NO: 764325 - DNA, 120 bp, Artificial Sequence
  ENSG00000221909_0 (sequence is synthesized)
gtgacgctttccctgggctctgaaggccagggggcttggatgtgagtctagtgctcctggtccccaaagtcacaaccccttctatcccagcatcccagacttctccgggcggggacagag

SEQ ID NO: 764326 - DNA, 120 bp, Artificial Sequence
  ENSG00000221909_1 (sequence is synthesized)
ttggacgtgcatggctgtgtcctgcaatcccctcgccacgaccgcccgggacggagtggaagcgggtccgtgcccccgttcctcgcgccagcctcggcggtggcaagcgctgtcccccag

SEQ ID NO: 764327 - DNA, 120 bp, Artificial Sequence
  ENSG00000221909_2 (sequence is synthesized)
cagaggtgtccctggatacaggatagcaaaacctgatctcataaaacctaggtcacaaaggacagccctgcaaaacagaccctatttggatcaagtgagccagttcctggaacctgaata

SEQ ID NO: 764328 - DNA, 120 bp, Artificial Sequence
  ENSG00000221909_3 (sequence is synthesized)
atgactcctgaatcaagggatactacagatttgtctccagggggtacccaggagatggaaggcatcgtgatagtgaaggtggaggaggaagatgaagaagaccattttcaaaaggaaaga

SEQ ID NO: 764329 - DNA, 120 bp, Artificial Sequence
  ENSG00000221909_4 (sequence is synthesized)
aacaaagtagagtcatcgccacaagttctcagtcgctctacaactatgaatgagagagccttattgtcatcgtatttagttgcatatagagtggcaaaagagaaaatggctcacacagcg

SEQ ID NO: 764330 - DNA, 120 bp, Artificial Sequence
  ENSG00000221909_5 (sequence is synthesized)
gctgaaaaaattatccttccagcatgtatggacatggtacggacaatttttgatgacaaatcagctgataaactaagaactatacctcttagtgataatacaatatctcgtcgaatctgt

SEQ ID NO: 764331 - DNA, 120 bp, Artificial Sequence
  ENSG00000221909_6 (sequence is synthesized)
acgattgcaaaacatttggaagcaatgcttattacacggctgcagtccggtatagactttgcaatccaactcgatgagagcactgatattgcaagttgtcccacactcttggtttatgtc

SEQ ID NO: 764332 - DNA, 120 bp, Artificial Sequence
  ENSG00000221909_7 (sequence is synthesized)
agatatgtgtggcaagatgattttgtagaggatctcttatgttgtttaaatttaaattcacatataactggattagatttatttactgaattagaaaactgccttcttggtcagtataaa

SEQ ID NO: 764333 - DNA, 120 bp, Artificial Sequence
  ENSG00000221909_8 (sequence is synthesized)
ttaaactggaaacattgtaaaggaatttcaagtgatggaacagcaaatatgaccggaaaacacagcagacttactgaaaaattgttagaagcaacccacaacaatgctgtttggaatcac

SEQ ID NO: 764334 - DNA, 120 bp, Artificial Sequence
  ENSG00000221909_9 (sequence is synthesized)
tgttttattcatcgagaagctttggtatccaaagaaatttcaccaagtctgatggatgtattgaaaaatgcagtgaaaactgttaattttattaaaggaagctcactgaatagccgactt

SEQ ID NO: 764335 - DNA, 120 bp, Artificial Sequence
  ENSG00000221909_10 (sequence is synthesized)
gctttctcaaggaaaagtattgagcagagtatatgaactcaggaacgagatttacatttttctcgttgaaaagcaatctcatttggcaaatatttttgaagacgacatttgggtaacaaa

SEQ ID NO: 764336 - DNA, 120 bp, Artificial Sequence
  ENSG00000221909_11 (sequence is synthesized)
attggcatatttaagtgatatttttggcattcttaatgaattaagcctgaaaatgcaggggaaaaacaatgatatatttcagtatcttgaacatattctaggattccaaaagacgttatt

SEQ ID NO: 764337 - DNA, 120 bp, Artificial Sequence
  ENSG00000221909_12 (sequence is synthesized)
attgtggcaagcaagacttaaaagtaaccgccctagctactatatgtttccaacattattgcaacacatcgaagagaacattattaatgaagactgcttaaaagaaataaaattagagat

SEQ ID NO: 764338 - DNA, 120 bp, Artificial Sequence
  ENSG00000221909_13 (sequence is synthesized)
attgttgcatctcacttctttgtctcaaacttttaattattactttccggaagagaaatttgaatcattaaaggaaaatatttggatgaaagatccatttgcttttcaaaacccagaatc

SEQ ID NO: 764339 - DNA, 120 bp, Artificial Sequence
  ENSG00000221909_14 (sequence is synthesized)
aataattgagttaaacttggagcctgaagaagagaatgaattattgcagctcagttcatcattcacactaaagaattattataagatattaagtttatcagcattttggattaagattaa

SEQ ID NO: 764340 - DNA, 120 bp, Artificial Sequence
  ENSG00000221909_15 (sequence is synthesized)
agatgactttccactgctaagtaggaagagtatattgctgttactaccattcacaactacatatttgtgtgaactaggattttcaatcttgacacggttaaaaacaaagaagagaaatag

SEQ ID NO: 764341 - DNA, 120 bp, Artificial Sequence
  ENSG00000221909_16 (sequence is synthesized)
gctcaatagtgcaccagatatgcgggtagcattatcttcatgtgttcctgactggaaggaacttatgaacagacaagcacacccatcacattaaatacaaactttacaaaattctgtgta

SEQ ID NO: 764342 - DNA, 61 bp, Artificial Sequence
  ENSG00000221909_17 (sequence is synthesized)
ggagaccgaggtgggcagatcacccttagccaggcgtggtggcacatgcctgcagtcccag

SEQ ID NO: 764343 - DNA, 120 bp, Artificial Sequence
  ENSG00000221909_18 (sequence is synthesized)
aaccttagccaggcgtggtggcacatgcctgcagtcccagttacttgggtgcctgaggcaggagaatctcttaaaccaggaaggcagagattgcagtgagctgagataatcccactgcat

SEQ ID NO: 764344 - DNA, 120 bp, Artificial Sequence
  ENSG00000221909_19 (sequence is synthesized)
tccagcctgggcaacagcgtgagacttcatctcaaaaaaaaaaaattgtatttgtacttttaaagggattttgcagtatgttgtagttaaacgttaataaaattatatttgtaattagga

SEQ ID NO: 764345 - DNA, 120 bp, Artificial Sequence
  ENSG00000221909_20 (sequence is synthesized)
ccggatgaggaactcggaggaggagctgggcccgcgcgtccatgattcgaaggctcgttttcgcagcttttccacgtctttttccggtcccactgccctccatgctaactcactgggcgt

SEQ ID NO: 764346 - DNA, 120 bp, Artificial Sequence
  ENSG00000221909_21 (sequence is synthesized)
ctctagccgttataccaacaatgactgcgaccagtgttgggaaagcgccccctgggcccctccctgacgccagcccatccttgagactccctgcaaggaggcggcccgacccagtgggat

SEQ ID NO: 764347 - DNA, 120 bp, Artificial Sequence
  ENSG00000221910_0 (sequence is synthesized)
tctttgattcaacagcttctgtttttttctgactctttctacagattaatattcctcacatttttaaatggaaatagataaccagacgtgggtgagagaatttattctccttggcttatc

SEQ ID NO: 764348 - DNA, 120 bp, Artificial Sequence
  ENSG00000221910_1 (sequence is synthesized)
cagtgactggtgcactcagatatccctgttttccctgttcttggtcacatacctcatgacagtgctggggaactgtctcattgtccttctgatcagactggacagccgactccacactcc

SEQ ID NO: 764349 - DNA, 120 bp, Artificial Sequence
  ENSG00000221910_2 (sequence is synthesized)
catgtatttctttctcaccaacctctcccttgtcgatgtctcctatgccacaagcgtagtcccccagctgctggcacattttcttgcagaacataaagccatcccattccagagctgtgc

SEQ ID NO: 764350 - DNA, 120 bp, Artificial Sequence
  ENSG00000221910_3 (sequence is synthesized)
agcccagttatttttctccctggccttgggtgggattgagtttgttctcctggcagtgatggcctatgaccgccatgtggctgtgtctgaccgcctgcgatactcggccatcatgcatgg

SEQ ID NO: 764351 - DNA, 120 bp, Artificial Sequence
  ENSG00000221910_4 (sequence is synthesized)
gtcagtggctccatcaactctcttgtgcagactgctatcacctttcagctgcccatgtgcactaacaagtttattgatcacatatcctgtgaactcctagctgtggtcaggctggcttgt

SEQ ID NO: 764352 - DNA, 120 bp, Artificial Sequence
  ENSG00000221910_5 (sequence is synthesized)
gtggacacctcctccaatgaggctgccatcatggtgtctagcattgttcttctgatgacacctttctgcctggttctgttgtcctacatccggatcatctccaccatcctaaagatccag

SEQ ID NO: 764353 - DNA, 120 bp, Artificial Sequence
  ENSG00000221910_6 (sequence is synthesized)
tccagagaaggaagaaagaaagccttccacacgtgtgcctctcacctcacggtggttgccctgtgctacggcacaacgattttcacttacatccagccccactctggtccctcagtcctt

SEQ ID NO: 764354 - DNA, 120 bp, Artificial Sequence
  ENSG00000221910_7 (sequence is synthesized)
caagagaagctgatctctgtcttctatgccattgttatgcctctgctgaaccctgtgatttatagtctaaggaataaagaggtgaagggggcctggcataaactattagagaaattctct

SEQ ID NO: 764355 - DNA, 120 bp, Artificial Sequence
  ENSG00000221910_8 (sequence is synthesized)
gggttaacatccaagctgggaacttgactcatgaacattactttaagaagaagctttgcctcatttttctccacccagctcagatatggcagggataaactatgttgctctggcaaccgg

SEQ ID NO: 764356 - DNA, 120 bp, Artificial Sequence
  ENSG00000221914_0 (sequence is synthesized)
aggccagccggcgccattttgaaagtggagtcgcctgcccctgccgctgccgccgccgccgtcgctgtcgtagtcgccgccgccgctgccggagaaagagcacgagcggggaagccccag

SEQ ID NO: 764357 - DNA, 120 bp, Artificial Sequence
  ENSG00000221914_1 (sequence is synthesized)
agtgaaatctagcatcctgccggctggtctgcccgcccctccttccttttccccccggcccccgtcccctccccccgcaggtgccatccgccgccatccgccctctctacccccccatcc

SEQ ID NO: 764358 - DNA, 120 bp, Artificial Sequence
  ENSG00000221914_2 (sequence is synthesized)
ccaggtgaggggggtgagttcaggaagcggagaccccgaggaacccagcagggtcaccatttgcagcgcaacatggcaggagctggaggagggaatgatattcagtggtgtttttctcag

SEQ ID NO: 764359 - DNA, 120 bp, Artificial Sequence
  ENSG00000221914_3 (sequence is synthesized)
gtgaaaggagcagtagatgatgatgtagcagaagcagatataatttctacagtagaatttaatcattctggagaattactagcaacaggagataaaggtggtagagttgtcatctttcaa

SEQ ID NO: 764360 - DNA, 120 bp, Artificial Sequence
  ENSG00000221914_4 (sequence is synthesized)
caggagcaggagaacaaaatccagtctcatagcagaggagaatataatgtttacagcaccttccagagccatgaaccagagtttgactacttgaaaagtttagaaatagaagaaaagatc

SEQ ID NO: 764361 - DNA, 120 bp, Artificial Sequence
  ENSG00000221914_5 (sequence is synthesized)
aacaaaattaggtggttaccccagaaaaatgctgctcagtttttattgtctaccaatgataaaacaataaaattatggaaaatcagtgaaagggacaaaagaccagaagggtataacttg

SEQ ID NO: 764362 - DNA, 120 bp, Artificial Sequence
  ENSG00000221914_6 (sequence is synthesized)
aaagaggaggatggaaggtatagagatcctactacagttactacactacgagtgccagtctttaggcctatggatctaatggttgaggccagtccacgaagaatatttgccaatgctcat

SEQ ID NO: 764363 - DNA, 120 bp, Artificial Sequence
  ENSG00000221914_7 (sequence is synthesized)
acatatcacatcaactcaatttctattaatagtgattatgaaacatatttatctgcagatgatttgcggattaatctttggcatctggaaattacagacaggagttttaacattgtggat

SEQ ID NO: 764364 - DNA, 120 bp, Artificial Sequence
  ENSG00000221914_8 (sequence is synthesized)
atcaagcctgccaatatggaagagctaacagaggtgattacagcagcagaatttcatccaaacagctgtaacacatttgtatacagcagcagtaaaggaactattcggctatgtgacatg

SEQ ID NO: 764365 - DNA, 120 bp, Artificial Sequence
  ENSG00000221914_9 (sequence is synthesized)
agggcatctgccctctgtgatagacattctaaattgtttgaagaacctgaagatcccagtaacaggtcatttttttccgaaatcatctcctctatttcggatgtaaaattcagccatagt

SEQ ID NO: 764366 - DNA, 120 bp, Artificial Sequence
  ENSG00000221914_10 (sequence is synthesized)
ggtcgatatatgatgactagagactatttgtcagtcaaaatttgggacttaaatatggaaaacaggcctgtggaaacataccaggtgcatgaatacctcagaagtaaactctgttcactg

SEQ ID NO: 764367 - DNA, 120 bp, Artificial Sequence
  ENSG00000221914_11 (sequence is synthesized)
tatgaaaatgactgcatatttgacaaatttgaatgttgttggaatggatctgacagtgttgtcatgactggatcttacaataatttcttcagaatgtttgacagaaacacaaagcgagac

SEQ ID NO: 764368 - DNA, 120 bp, Artificial Sequence
  ENSG00000221914_12 (sequence is synthesized)
ataaccctagaagcatcgcgggaaaacaataagcctcgcacagttctgaagcctcgcaaagtctgtgcaagtggcaagcgaaagaaagatgaaataagtgttgacagcctagacttcaat

SEQ ID NO: 764369 - DNA, 120 bp, Artificial Sequence
  ENSG00000221914_13 (sequence is synthesized)
aagaaaatccttcacacagcctggcaccccaaggaaaatatcattgccgtagctactacaaacaatctgtatatatttcaagacaaagtgaattagggttggcattcctagcagaagaac

SEQ ID NO: 764370 - DNA, 120 bp, Artificial Sequence
  ENSG00000221914_14 (sequence is synthesized)
ccacttcctgcttagttgagatagttgaatctagcattcgttcctataaaagagagaggtccattgtggcgcccctttccagtgtttgacagtgtgccattcgacaacacattgttatag

SEQ ID NO: 764371 - DNA, 120 bp, Artificial Sequence
  ENSG00000221914_15 (sequence is synthesized)
ctacatggagaaagctctgtggattcatcactgtggtgttctccatgtctgctagccatttaggtaagggtagggcacttttaatttaaatgacttcttgcaccatcttgcctaatggac

SEQ ID NO: 764372 - DNA, 120 bp, Artificial Sequence
  ENSG00000221914_16 (sequence is synthesized)
tcatgctatgggatttaattgtgtatcctcattactgtatcatttgtggggtacaccccttccccctttttttaaattaaatacagctcattcttactgtggcttgtagcattcctcctc

SEQ ID NO: 764373 - DNA, 120 bp, Artificial Sequence
  ENSG00000221914_17 (sequence is synthesized)
ttctggcctcctggactgctccccttcatctcttacccttgccccctccacccggtcttggtggtggtatattaaaaaaagaaagaatgaaagcacacaaaatgagtcagtttggggtca

SEQ ID NO: 764374 - DNA, 120 bp, Artificial Sequence
  ENSG00000221914_18 (sequence is synthesized)
gtggtataaagggggtatatgttgcaaacaaatgttttagtaacagttggctgtaatcactcctcgccgtgtctggcactgaaaataaggaaaaaaaacctactactgaataaaagtgac

SEQ ID NO: 764375 - DNA, 120 bp, Artificial Sequence
  ENSG00000221914_19 (sequence is synthesized)
aaagaatggagaatctggttttctttttctttttaacctacctcttgtagccaatattttgtgtcatacctttgggcacagtgaaacaaaatgggttttcattgtttattggtatttttg

SEQ ID NO: 764376 - DNA, 120 bp, Artificial Sequence
  ENSG00000221914_20 (sequence is synthesized)
ttaattatttttaacaagtgttcttttacatgcaggaggagaggtattggttctctatgaacatattttgaatataggttttattaaggatttcacaatctataaatgctactagttttt

SEQ ID NO: 764377 - DNA, 120 bp, Artificial Sequence
  ENSG00000221914_21 (sequence is synthesized)
ttttttttttttaccatcatgagggtattggatacattgtgtctctatttaactcattatgtgttaatgaaattgttgtaaatgggaaccaaatttgtagaacttaatttctacttttta

SEQ ID NO: 764378 - DNA, 120 bp, Artificial Sequence
  ENSG00000221914_22 (sequence is synthesized)
gagtgcttaatttcatttttgccttactaaatagtcaaagacttataaaacatttttaacaagttagaacttttttgttattcagtcatataaaatagcagaaaactaacatcaagtgac

SEQ ID NO: 764379 - DNA, 120 bp, Artificial Sequence
  ENSG00000221914_23 (sequence is synthesized)
actgcactaaatactttttttgtattttactgctatcaaatcagaatgaaatatactttaccatagatatttttcttctatttttggttttccaaagctatatgaaagacaaatttttaa

SEQ ID NO: 764380 - DNA, 120 bp, Artificial Sequence
  ENSG00000221914_24 (sequence is synthesized)
aggtacagcgttcaaaaagtgcttaatgaactccaacagctgcctcaaataaaaatctgtatatgaatacattttccctaagcggtgatacattatccaaagatgaagagtgctcctatt

SEQ ID NO: 764381 - DNA, 120 bp, Artificial Sequence
  ENSG00000221914_25 (sequence is synthesized)
tttaataggtagaatgtacctttgtcagtcttgcagaaactttaatggagaagaaatggactttatttttgaaaggtgaaatgaacaggcatttatattattagagaatggtagtcttat

SEQ ID NO: 764382 - DNA, 120 bp, Artificial Sequence
  ENSG00000221914_26 (sequence is synthesized)
tttggtggaacataatgtaacaaccttgaatttcagaggactctgagtgcttctatgtccactacctattgttctattcttcaataatgaaaaagaattcaacgagccgaccgtgattcc

SEQ ID NO: 764383 - DNA, 120 bp, Artificial Sequence
  ENSG00000221914_27 (sequence is synthesized)
ctctactacaaatattatgtcttgtaagttagcatttttagcacacaggagaaattttatgtaataaaattactgtatcttttggatttaacaaatttgtatttgaaacacattctatgt

SEQ ID NO: 764384 - DNA, 120 bp, Artificial Sequence
  ENSG00000221914_28 (sequence is synthesized)
ctgataattcttaatggcacttttactaatttatttggggatcttgggtacattcttaatttgtgtttattcttcacgcttgacttgcaagtgggatattcccctgccacaagtgtcaaa

SEQ ID NO: 764385 - DNA, 120 bp, Artificial Sequence
  ENSG00000221914_29 (sequence is synthesized)
cagtgatattcttcctgtgttgtgactggacagttttccagatcttttttgggagattttcctacagcttggttgtatgtcttgagataacaccaccaaacagctctcagaaattctttt

SEQ ID NO: 764386 - DNA, 120 bp, Artificial Sequence
  ENSG00000221914_30 (sequence is synthesized)
ttgattgatcagtagctatgatgattctcctccatgacactaaggattagtttatatatttaagagaaataattgctaaaattaaaatgcctctatcaaggaatgctattataaattatt

SEQ ID NO: 764387 - DNA, 120 bp, Artificial Sequence
  ENSG00000221914_31 (sequence is synthesized)
gttaacattctcaagtattaattttttaatttcattggtgtagcaaactctaagcccagccactcattttacatggccatggttaatctttttattaataaaaattatacttagaataaa

SEQ ID NO: 764388 - DNA, 120 bp, Artificial Sequence
  ENSG00000221914_32 (sequence is synthesized)
aatttggatatataatttttgcagaaatgtttcctactggaggatttccttgaagccgagactgctataaattcaagatgattttgttgtccaagaaatcagatataatttctacagtag

SEQ ID NO: 764389 - DNA, 120 bp, Artificial Sequence
  ENSG00000221914_33 (sequence is synthesized)
gcgtgcagatttgtccctcccgctcgggagcctggtggatcttctcccacctccccaccttgccccccgcctttatttttttttcctgcaggtcttcatttaatttctatttttccccct

SEQ ID NO: 764390 - DNA, 120 bp, Artificial Sequence
  ENSG00000221914_34 (sequence is synthesized)
gctgcaagccttcttgggtgtatatacacatttattttgcctcgagaaggaagagcgccttataagttaaaatacagtgggggcatatgtgtattttttccccactgtagatgccaatat

SEQ ID NO: 764391 - DNA, 80 bp, Artificial Sequence
  ENSG00000221914_35 (sequence is synthesized)
gagatttgatgggtttgtcaggcgccatgtaagaggtaactttcacctcccgtcatgattctgaggccttcccagccatg

SEQ ID NO: 764392 - DNA, 120 bp, Artificial Sequence
  ENSG00000221914_36 (sequence is synthesized)
atatgaatcattactccttacccaggcagtaatgttcccgaagttttctcttcgttctatgtttcatggtagtttaaccttattaactcttctgcaggctttttgtacacttaagaaaac

SEQ ID NO: 764393 - DNA, 120 bp, Artificial Sequence
  ENSG00000221914_37 (sequence is synthesized)
ggtctcactttggccagggacagaagcaggactcaagcacaagacagtatttcacgccatcagacttcatctctggtttgtcatgttagctatcacaaggtgccagtctttaggcctatg

SEQ ID NO: 764394 - DNA, 120 bp, Artificial Sequence
  ENSG00000221914_38 (sequence is synthesized)
agtagtgctctgcagtgtttatttcatcctcaagatcacttatttgagacatagtcctcaagtggaattatgaaatcaaagagtgactccataaagtgcctcacaacacaagagctgagc

SEQ ID NO: 764395 - DNA, 120 bp, Artificial Sequence
  ENSG00000221914_39 (sequence is synthesized)
atatggcaagggtgaaagagtcattgtatagtggagaagcctggcaaacattgtcttaaccaaatgacccaagttaacgccaccagctataaaacaataaaattatggaaaatcagtgaa

SEQ ID NO: 764396 - DNA, 120 bp, Artificial Sequence
  ENSG00000221914_40 (sequence is synthesized)
cgcctgcccctgccgctgccgccgccgccgtcgctgtcgtagtcgccgccgccgctgccggagaaagagcacgagcggggaagccccagagtgaaatctagcatcctgccggctgatgat

SEQ ID NO: 764397 - DNA, 120 bp, Artificial Sequence
  ENSG00000221914_41 (sequence is synthesized)
ctttctaatgcagtaccaagtattggggactaacctctttccaaactggtgctcttggtggtagttgtatgtgtgggcagaactaggctgagctggaggagggaatgatattcagtggtg

SEQ ID NO: 764398 - DNA, 120 bp, Artificial Sequence
  ENSG00000221914_42 (sequence is synthesized)
atctttccttaaaatgattacatattctgtttgtctgaaataagcctcagacatgataagtacaattacagaggttcaaagtcttaaacccgtgtgtccagagccacttgtacccttggt

SEQ ID NO: 764399 - DNA, 120 bp, Artificial Sequence
  ENSG00000221914_43 (sequence is synthesized)
aatctgcctacctcctcatgaggcattccaggttattcctggaagctctcttggggggcatgtctattgattgccaaggaatatatctctcatggaatgctgttgttctttggtaacttg

SEQ ID NO: 764400 - DNA, 120 bp, Artificial Sequence
  ENSG00000221914_44 (sequence is synthesized)
cggttgggctctgtaaccttgtattgaagtagagctgttcctttctttcccatcctcccttcctactttgagcttcctaggaagatttcttctgaggtttccttggcttaaaaaaaaaaa

SEQ ID NO: 764401 - DNA, 120 bp, Artificial Sequence
  ENSG00000221914_45 (sequence is synthesized)
aaaaaaaacaactttggtttaaaaacttcaggatacaatattcttgtcttgttgaatattaactcatgaaaattgatacatgcctgttaccaaaataattttacctggctactagaaaat

SEQ ID NO: 764402 - DNA, 120 bp, Artificial Sequence
  ENSG00000221914_46 (sequence is synthesized)
aagatcctggtatgaatttgggatgggcgaggatggtgtgtttctcatggtgatgatacaggcagtcagtgaggcatattgcaggaataataccaataaacctggtgcactgaagtcaga

SEQ ID NO: 764403 - DNA, 120 bp, Artificial Sequence
  ENSG00000221914_47 (sequence is synthesized)
agtcccaggtgagtctggttctaaattagtcatatgactggaagtatactgcatacttatgcatcttcaacttcaatattcaattaaactaagaagctttcaggagaattctagccagag

SEQ ID NO: 764404 - DNA, 120 bp, Artificial Sequence
  ENSG00000221914_48 (sequence is synthesized)
agatgtttttcagttctttattagcctggcattttacctcacttgtagggagtttgtgaatggttgtttaggaaatgctttgtccaagccagaatattgtacaccttgccctttttgtgt

SEQ ID NO: 764405 - DNA, 120 bp, Artificial Sequence
  ENSG00000221914_49 (sequence is synthesized)
gaaatccccctcgccccctgacaaggcaccgcttccttattcctccctccatcaccccctagcgaccgcccgcgcctcgcgcagagccacagggcgcccctcgggtttgagggagtaggg

SEQ ID NO: 764406 - DNA, 120 bp, Artificial Sequence
  ENSG00000221914_50 (sequence is synthesized)
tacagatcaaatcttctagttgtagctaaaaaataccaagaattagatgttatgggttaattttctttttagcctctttaatctgaaccataaacatttattagcttggcatgtctttca

SEQ ID NO: 764407 - DNA, 120 bp, Artificial Sequence
  ENSG00000221914_51 (sequence is synthesized)
agcaaaatattgaaactaagaactgcaaattctaatagtattgcaaccagtaaaagaagatatattatccacattgttcattttttcttcagcactcgaaaggatcaacatcagttgctt

SEQ ID NO: 764408 - DNA, 120 bp, Artificial Sequence
  ENSG00000221914_52 (sequence is synthesized)
tttaaaactaaatctatgtaatattgttctattttatgttctcaaaaactgaaataatgaagttttctgaatcttaattgctatttgaaactgagccttttgtaatttctgtttttcatg

SEQ ID NO: 764409 - DNA, 120 bp, Artificial Sequence
  ENSG00000221914_53 (sequence is synthesized)
gttagtatcatgccaaccatggataccatctttgtgtttacgagagtcaacataagcagaactcggttttaattggtatgttttctttttccaggagctggaggagggaatgatattcag

SEQ ID NO: 764410 - DNA, 120 bp, Artificial Sequence
  ENSG00000221914_54 (sequence is synthesized)
aatgtgcattctaaaatgttgctaaattatgataatctacctaattttacctgatttgctacttttctacttataaacagttggagtagtgattaaaagtagtcacattataggcaaatg

SEQ ID NO: 764411 - DNA, 120 bp, Artificial Sequence
  ENSG00000221914_55 (sequence is synthesized)
tatcatatatagataaaactatttttattgaatttgtaccagcatcttgccaagttttgtgtgattgaagggtatttttttcttactgatttttttgtgttacatgctcacttttgatcc

SEQ ID NO: 764412 - DNA, 120 bp, Artificial Sequence
  ENSG00000221914_56 (sequence is synthesized)
taaccccacatgagttgctattcctctgtattacagattttcacttaatgtcacagagacatggcctgaatcattccactatatttaaagttaaaatagacactgaaaataagtttagat

SEQ ID NO: 764413 - DNA, 120 bp, Artificial Sequence
  ENSG00000221914_57 (sequence is synthesized)
tgtttcatatagaatagagaattctaagcatttagaaggtaccttctcatttctgtcatttctccttaagtagctccttaaaaagagatggtgaaatatagacacttccttttttccttt

SEQ ID NO: 764414 - DNA, 120 bp, Artificial Sequence
  ENSG00000221914_58 (sequence is synthesized)
gagttacaacaaatactttggaacttttgtttgtaattaatattaatgttgaaatatgtcatatttctcagactttttaaatatgagatttctagtttatccttttttgacatattagta

SEQ ID NO: 764415 - DNA, 120 bp, Artificial Sequence
  ENSG00000221914_59 (sequence is synthesized)
aatacagaattatataattcaaaaaacaggcacagctttgttagcttttgacattgtataatatgatactatcaaatttttaataatatatgcccagaataaccatataatttatcacca

SEQ ID NO: 764416 - DNA, 120 bp, Artificial Sequence
  ENSG00000221914_60 (sequence is synthesized)
ataggcttcagttaaatttatgcccagaaaatggtatttaagaaagaaataggcacagtttcagtgttgttatcagtagttaatggactgaaagccaagaatagtgatattcagatattg

SEQ ID NO: 764417 - DNA, 120 bp, Artificial Sequence
  ENSG00000221914_61 (sequence is synthesized)
ctataatgttcttttattagtctcttaactgtgccattttcaagtgtttttggcctgaatgttttattcaggcttataaaggctatgtgtgccatgcccagaatggagttttcctttgtc

SEQ ID NO: 764418 - DNA, 120 bp, Artificial Sequence
  ENSG00000221914_62 (sequence is synthesized)
ataccagtaggaaaatgtacctccctgaagggcttgtgtgttttgtaaaaggacaaaatgcctttattgttactgagaagattgagattaataggtttaaaaggtgtgtgtatgtgtctg

SEQ ID NO: 764419 - DNA, 120 bp, Artificial Sequence
  ENSG00000221914_63 (sequence is synthesized)
tatatgccctttttttctttttaaagatatggacttgttaaatcattttcctaatttcagtgcagtatatttgtatttttcccccaggtgcatgaatacctcagaagtaaactctgttca

SEQ ID NO: 764420 - DNA, 120 bp, Artificial Sequence
  ENSG00000221914_64 (sequence is synthesized)
gtaagcagttgttgatgggggtgcatggggccattgctgggtagtgctgaatatggacttgattggtagcaaagctgtctggaacagtggtcttggggtgggaggtaggggtcaaatggt

SEQ ID NO: 764421 - DNA, 120 bp, Artificial Sequence
  ENSG00000221914_65 (sequence is synthesized)
atcccttcttttataagagctctttttttaagctttcagcagcgaaataaccaaaaggcgggcagcagaaaggaaaaggacaatacatcatattaaataacagatcggggagttgaccct

SEQ ID NO: 764422 - DNA, 120 bp, Artificial Sequence
  ENSG00000221914_66 (sequence is synthesized)
aaagtgggcataggaagaaggtgtgcctcacctagctctttctgggcaagactttatcattatttttagatgaacttccttattatgggtgctcagttttttttcatcagtttttttcat

SEQ ID NO: 764423 - DNA, 120 bp, Artificial Sequence
  ENSG00000221914_67 (sequence is synthesized)
agactataccatcaaatacataagagtaaattagcaatcaaattgatccatatttaacgtcattatttccctaatgaattgagcttatttattcagctttatttagccttttcccccgtt

SEQ ID NO: 764424 - DNA, 120 bp, Artificial Sequence
  ENSG00000221914_68 (sequence is synthesized)
aagttttctcatttaatccttgaaggcctttagaaatataaaaaacagaatgtaattgtataaagacacaactaatggggtattgagaatgtgcagggtcctttggaattgattacatat

SEQ ID NO: 764425 - DNA, 120 bp, Artificial Sequence
  ENSG00000221916_0 (sequence is synthesized)
gatgatgtcacctggagcgagtagcgcgcggcgtggaacgcgagtcgcgaccccggctcccggcagtggcgcgcactagccctcgcgccgcacgggacacgagggctgggcgggcagcgg

SEQ ID NO: 764426 - DNA, 120 bp, Artificial Sequence
  ENSG00000221916_1 (sequence is synthesized)
gatgaggctaaaggttggatttcaaggcgggggctgcttccggaaagacgcgctgtgtttggaaggtggagtgagcgcccggtgggcgagggcacctcattctgcacccctgcgcccgcc

SEQ ID NO: 764427 - DNA, 120 bp, Artificial Sequence
  ENSG00000221916_2 (sequence is synthesized)
tcgggaactgcacgcggcacccccacccgcgactcccacgcagacagtagtgcggcctgcagggttcccccggcggacgaggctaatggttcgctccgccccgcccacacagaggccgcc

SEQ ID NO: 764428 - DNA, 120 bp, Artificial Sequence
  ENSG00000221916_3 (sequence is synthesized)
ggactctggaggaagggacttggccttcgccctcagacgctcttaagggtaggcagcgttgtcctcagttctgccccagcactcagacccagactgggtccctgcctccgccctccgccc

SEQ ID NO: 764429 - DNA, 120 bp, Artificial Sequence
  ENSG00000221916_4 (sequence is synthesized)
tcggactagtctcttggaagccggcctgtctccgccttcagacctagggagaggtcttaacctctgttctcagactctggaaaaggcttctcaacggcttggcctgacctcagctcctcg

SEQ ID NO: 764430 - DNA, 120 bp, Artificial Sequence
  ENSG00000221916_5 (sequence is synthesized)
cattccctccacatctcaagacaccaacccagggatgcaggacagacacacagacactcagtgagggtcaaatatctttaaataaagtgccaggaacaataaatactgtacaggaagaga

SEQ ID NO: 764431 - DNA, 120 bp, Artificial Sequence
  ENSG00000221923_0 (sequence is synthesized)
agtttcctggagacccggaagcagattacgtggagtgacggtcatgctgcggcgtggacacttggcattcagggacgtggccatagaattccctcaggaggagtggaaatgtctggaccc

SEQ ID NO: 764432 - DNA, 120 bp, Artificial Sequence
  ENSG00000221923_1 (sequence is synthesized)
tgctcagaggactttatacagggaagtgatggtggagaactacaggaacctggtctttctgggaatctgtcttcctgacctgagtgttatctccatgttggagcaaaggagagatccccg

SEQ ID NO: 764433 - DNA, 120 bp, Artificial Sequence
  ENSG00000221923_2 (sequence is synthesized)
gaatctgcagagtgaagtgaaaatagcaaacaatccaggtggcagggagtgcatcaaaggtgtgaacgcagagagcagctctaaattgggaagcaatgccggaaacaagtctcttaaaaa

SEQ ID NO: 764434 - DNA, 120 bp, Artificial Sequence
  ENSG00000221923_3 (sequence is synthesized)
tcaacttggattaacctttcagttacatctgagtgaactgcagctatttcaagctgaaaggaatatttctggatgtaaacatgtcgaaaaacctatcaacaattccttagtttcaccact

SEQ ID NO: 764435 - DNA, 120 bp, Artificial Sequence
  ENSG00000221923_4 (sequence is synthesized)
tcaaaaaatttattctagtgtcaaatcccacattttaaataaatacagaaatgattttgatgattctccatttctcccacaagaacaaaaagcacaaataagggaaaaaccgtgtgaatg

SEQ ID NO: 764436 - DNA, 120 bp, Artificial Sequence
  ENSG00000221923_5 (sequence is synthesized)
taatgagcatggcaaagcctttagagtgtcttcaagacttgctaacaatcaagtaatccacactgcagataacccttacaaatgtaatgaatgtgacaaggtcttcagtaacagttcaaa

SEQ ID NO: 764437 - DNA, 120 bp, Artificial Sequence
  ENSG00000221923_6 (sequence is synthesized)
ccttgtacaacatcaaagaattcatactggagagaagccttacaagtgtcatgaatgtggcaagctcttcaatcgaatttcactccttgcacgacatcagagaatacatactggagagaa

SEQ ID NO: 764438 - DNA, 120 bp, Artificial Sequence
  ENSG00000221923_7 (sequence is synthesized)
agaatacatactggagagaaaccttacaaatgtcatgagtgtggcaaagtcttcactcaaaattctcaccttgcaaatcatcacagaatccacactggagagaaaccttacaaatgtaat

SEQ ID NO: 764439 - DNA, 120 bp, Artificial Sequence
  ENSG00000221923_8 (sequence is synthesized)
cagaaatgcacaccttgcacgacatcagaaaattcatagtggagagaaaccttacaaatgtaaggaatgtggcaaagcattttcagggggttcaggccttactgctcatcttgtaattca

SEQ ID NO: 764440 - DNA, 120 bp, Artificial Sequence
  ENSG00000221923_9 (sequence is synthesized)
cttatgaatgtaaagaatgtggcaaggtcttcaggcacaagttttgtctaaccaatcatcatagaatgcacacgggagagcaaccttacaaatgtaatgaatgtggcaaagcatttagag

SEQ ID NO: 764441 - DNA, 120 bp, Artificial Sequence
  ENSG00000221923_10 (sequence is synthesized)
actgttcaggccttactgcccatctactaattcacactggagagaaaccttacaaatgtaaagaatgtgccaaggtcttcaggcatagattatccctaagcaatcatcagagatttcata

SEQ ID NO: 764442 - DNA, 120 bp, Artificial Sequence
  ENSG00000221923_11 (sequence is synthesized)
ctggagagaaaccttacagatgtgatgaatgtggcaaggacttcactcgaaattcaaaccttgcaaatcatcacagaatccatactggagagaaaccttacaaatgcagtgaatgtcaca

SEQ ID NO: 764443 - DNA, 120 bp, Artificial Sequence
  ENSG00000221923_12 (sequence is synthesized)
aagtctttagtcacaattcacaccttgcacgacataggcaaattcatactggagagaagtcttacaaatgcaatgaatgtggcaaggtcttcagccacaagttatacctaaaaaaacatg

SEQ ID NO: 764444 - DNA, 120 bp, Artificial Sequence
  ENSG00000221923_13 (sequence is synthesized)
agagaattcatactggggagaaaccgtacagatgtcatgaatgtggtaaggacttcactcgaaattcaaacctggcaaatcatcacagaatccatactggagagaaaccgtacagatgaa

SEQ ID NO: 764445 - DNA, 120 bp, Artificial Sequence
  ENSG00000221923_14 (sequence is synthesized)
atgtgtgtggtaagatctttagtaataattcacaccttgcacagcatgagataattcattcatgagagagttcttacaaactgagtatggcaaactcttcatgctaagttctagcattaa

SEQ ID NO: 764446 - DNA, 120 bp, Artificial Sequence
  ENSG00000221923_15 (sequence is synthesized)
tcaacatcagagattccatactaaagagaaatcatagcaatgtatgtgaatcaggtctcttgaggcctgccaaatgactagatatcaaaacatacatcttggatgaaaccatacagatgg

SEQ ID NO: 764447 - DNA, 120 bp, Artificial Sequence
  ENSG00000221923_16 (sequence is synthesized)
attatgtatgctgaggctattattcaaggaccattactatggaacatgataagatttacacaagcgataattcagtctctagttctccaatatttatgatactgcatgctgcagaaaagt

SEQ ID NO: 764448 - DNA, 120 bp, Artificial Sequence
  ENSG00000221923_17 (sequence is synthesized)
cacagctccaaatacgttgaatctcatgacgcgatgcatgtcgaaggtccaagggcatgtggaaatggtcagttatattcaggcaattaaaaaacctaattatatggggttttttgaaaa

SEQ ID NO: 764449 - DNA, 120 bp, Artificial Sequence
  ENSG00000221923_18 (sequence is synthesized)
agacagggtttcactctgctgcccaggctagatggcagtggtgcagttttaggtcgctgcatccttgactttgagggcagaactgctcttcccagctcaggtgatccacccgcctcagcc

SEQ ID NO: 764450 - DNA, 120 bp, Artificial Sequence
  ENSG00000221923_19 (sequence is synthesized)
ttacaggcatgagtcactgtacccggctctgatatttttaataatgcttcaatgaacatgggtttctaaatatctctttaagctgctatcttagttcttttgtatatatacccagatgag

SEQ ID NO: 764451 - DNA, 120 bp, Artificial Sequence
  ENSG00000221923_20 (sequence is synthesized)
gaattgttgcctatactggtaatttgattttggattatttgagaaaatgtcatacttatttttttttttattattattttcgagacagggtttcactctgtcacccaggatagagtgtgg

SEQ ID NO: 764452 - DNA, 120 bp, Artificial Sequence
  ENSG00000221923_21 (sequence is synthesized)
caatgccgcgatctcggctcactgcaaccttcgcttcctggattcaagcaattcttctgcatcggcctccccaagtgctaggattacaggcagagcagctctaaattgggaagcaatgcc

SEQ ID NO: 764453 - DNA, 120 bp, Artificial Sequence
  ENSG00000221923_22 (sequence is synthesized)
gtgaaaatagcaaacaatccagggtcttgctctgtcacccaggctgtcgtagagtggcaatcatcagtggcaatcgtggcttaactcatagcctcaaactcctggtctcaagtgatcctc

SEQ ID NO: 764454 - DNA, 120 bp, Artificial Sequence
  ENSG00000221923_23 (sequence is synthesized)
aagtggtgggattacaagcatgagccactgtaccctgcaaaaccacactttgagtttctgtttgggagctctctgcaagtgagagaattctttgggaaaataaaagtttaaatcctgtga

SEQ ID NO: 764455 - DNA, 120 bp, Artificial Sequence
  ENSG00000221923_24 (sequence is synthesized)
gactaaactcagacgttctaatgagagtctggcggtcgcttccctgagtgttaaaatcgctcggaggctggtcctgtccccggtctttcaccacagggccatgtagacagctcctgtcgc

SEQ ID NO: 764456 - DNA, 120 bp, Artificial Sequence
  ENSG00000221923_25 (sequence is synthesized)
ggagtttgcctgcttcaaatccttcagtgacccctagacacggcccgcgctgcgtaaagttctcacccgcgagatggatccacgtctttccggtcccccaagcctcgccctcttttcaca

SEQ ID NO: 764457 - DNA, 120 bp, Artificial Sequence
  ENSG00000221923_26 (sequence is synthesized)
agcctccattgggcttttgctaacacctaaataaatatttagtggacaaaattaggttagtgcaaaagtaatggcaaaccgcgatcacttttgcaccaacctaatatttatgggccgggg

SEQ ID NO: 764458 - DNA, 120 bp, Artificial Sequence
  ENSG00000221923_27 (sequence is synthesized)
ctggaattccatcttctccggaggcccaggctggagaattccttgagcacaggagtttgagaccactctggacaacataggacacttggcattcagggacgtggccatagaattccctca

SEQ ID NO: 764459 - DNA, 120 bp, Artificial Sequence
  ENSG00000221926_0 (sequence is synthesized)
gatttatggaaagcacctggtgcgtgttctgccctctgaggaccctgccctttcccaaaaggggtatcttaagaaggaaaatatggctgctctttgccggacagcagagtcccagtagga

SEQ ID NO: 764460 - DNA, 120 bp, Artificial Sequence
  ENSG00000221926_1 (sequence is synthesized)
tttccattttccaaacctggtatcatctcctagttggaagaagtggtaagcccacgaacacaaatgcaggagggagaggtgccaagaagcagcggtacacagcaggcacagagacacgtg

SEQ ID NO: 764461 - DNA, 120 bp, Artificial Sequence
  ENSG00000221926_2 (sequence is synthesized)
gtcttcagcagagcctatggggttcagatgattcacataagaatagaagtttcagggctggacctggggaggcagcctgagcctgagccggctgtcctgagcctgagtactctagctgcc

SEQ ID NO: 764462 - DNA, 120 bp, Artificial Sequence
  ENSG00000221926_3 (sequence is synthesized)
ttgtcgtcatcgcatctggctgccatccagcgccagcacacagtaatgagtggccgagcttcctctgggagggaggaaacagttaaaatcttgcagcagctgcaatcatctaggcgtggt

SEQ ID NO: 764463 - DNA, 120 bp, Artificial Sequence
  ENSG00000221926_4 (sequence is synthesized)
tctcttgtctgacttgggctgcacagatcctgggccaagggacagaagaaagacagcctaggagcagagcctcccagatggctgagttggatctaatggctccagggccactgcccaggg

SEQ ID NO: 764464 - DNA, 120 bp, Artificial Sequence
  ENSG00000221926_5 (sequence is synthesized)
ccactgctcagcccccagcccctctcagcccagactctgggtcacccagcccagattctgggtcagccagcccagtggaagaagaggacgtgggctcctcggagaagcttggcagggaga

SEQ ID NO: 764465 - DNA, 120 bp, Artificial Sequence
  ENSG00000221926_6 (sequence is synthesized)
cggaggaacaggacagcgactctgcagagcagggggatcctgctggtgaggggaaagaggtcctgtgtgacttctgccttgatgacaccagaagagtgaaggcagtgaagtcctgtctaa

SEQ ID NO: 764466 - DNA, 120 bp, Artificial Sequence
  ENSG00000221926_7 (sequence is synthesized)
cctgcatggtgaattactgtgaagagcacttgcagccgcatcaggtgaacatcaaactgcaaagccacctgctgaccgagccagtgaaggaccacaactggcgatactgccctgcccacc

SEQ ID NO: 764467 - DNA, 120 bp, Artificial Sequence
  ENSG00000221926_8 (sequence is synthesized)
acagcccactgtctgccttctgctgccctgatcagcagtgcatctgccaggactgttgccaggagcacagtggccacaccatagtctccctggatgcagcccgcagggacaaggaggctg

SEQ ID NO: 764468 - DNA, 120 bp, Artificial Sequence
  ENSG00000221926_9 (sequence is synthesized)
aactccagtgcacccagttagacttggagcggaaactcaagttgaatgaaaatgccatctccaggctccaggctaaccaaaagtctgttctggtgtcggtgtcagaggtcaaagcggtgg

SEQ ID NO: 764469 - DNA, 120 bp, Artificial Sequence
  ENSG00000221926_10 (sequence is synthesized)
ctgaaatgcagtttggggaactccttgctgctgtgaggaaggcccaggccaatgtgatgctcttcttagaggagaaggagcaagctgcgctgagccaggccaacggtatcaaggcccacc

SEQ ID NO: 764470 - DNA, 120 bp, Artificial Sequence
  ENSG00000221926_11 (sequence is synthesized)
tggagtacaggagtgccgagatggagaagagcaagcaggagctggagaggatggcggccatcagcaacactgtccagttcttggaggagtactgcaagtttaagaacactgaagacatca

SEQ ID NO: 764471 - DNA, 120 bp, Artificial Sequence
  ENSG00000221926_12 (sequence is synthesized)
gggctgaaggataaactctcgggcatccgcaaagttatcacggaatccactgtacacttaatccagttgctggagaactataagaaaaagctccaggagttttccaaggaagaggagtat

SEQ ID NO: 764472 - DNA, 120 bp, Artificial Sequence
  ENSG00000221926_13 (sequence is synthesized)
gacatcagaactcaagtgtctgccgttgttcagcgcaaatattggacttccaaacctgagcccagcaccagggaacagttcctccaatatgcgtatgacatcacgtttgacccggacaca

SEQ ID NO: 764473 - DNA, 120 bp, Artificial Sequence
  ENSG00000221926_14 (sequence is synthesized)
gcacacaagtatctccggctgcaggaggagaaccgcaaggtcaccaacaccacgccctgggagcatccctacccggacctccccagcaggttcctgcactggcggcaggtgctgtcccag

SEQ ID NO: 764474 - DNA, 120 bp, Artificial Sequence
  ENSG00000221926_15 (sequence is synthesized)
cagagtctgtacctgcacaggtactattttgaggtggagatcttcggggcaggcacctatgttggcctgacctgcaaaggcatcgaccggaaaggggaggagcgcaacagttgcatttcc

SEQ ID NO: 764475 - DNA, 120 bp, Artificial Sequence
  ENSG00000221926_16 (sequence is synthesized)
ggaaacaacttctcctggagcctccaatggaacgggaaggagttcacggcctggtacagtgacatggagaccccactcaaagctggccctttccggaggctcggggtctatatcgacttc

SEQ ID NO: 764476 - DNA, 120 bp, Artificial Sequence
  ENSG00000221926_17 (sequence is synthesized)
ccgggagggatcctttccttctatggcgtagagtatgataccatgactctggttcacaagtttgcctgcaaattttcagaaccagtctatgctgccttctggctttccaagaaggaaaac

SEQ ID NO: 764477 - DNA, 120 bp, Artificial Sequence
  ENSG00000221926_18 (sequence is synthesized)
gccatccggattgtagatctgggagaggaacccgagaagccagcaccgtccttggtggggactgctccctagactccaggagccatatcccagacctttgccagctacagtgatgggatt

SEQ ID NO: 764478 - DNA, 120 bp, Artificial Sequence
  ENSG00000221926_19 (sequence is synthesized)
tgcattttagggtgatttgggggcagaaataactgctgatggtagctggcttttgaaatcctatggggtctctgaatgaaaacattctccagctgctctcttttgctccatatggtgctg

SEQ ID NO: 764479 - DNA, 67 bp, Artificial Sequence
  ENSG00000221926_20 (sequence is synthesized)
aacattctccagctgctctcttttgctccatatggtgctgttctctatgtgtttgcagtagcagtgg

SEQ ID NO: 764480 - DNA, 85 bp, Artificial Sequence
  ENSG00000221926_21 (sequence is synthesized)
tgcctgtttgtagtaatttttaggcaccaaatctccctcatcttctagtgccattctcctctctgttcaggtaaatgtcacactg

SEQ ID NO: 764481 - DNA, 120 bp, Artificial Sequence
  ENSG00000221926_22 (sequence is synthesized)
tagtgccattctcctctctgttcaggtaaatgtcacactgtgcccagaatggatgaccaggaaccttaaagagtggctgaaaagattgcagagttatcataataaattgctaacttgcgt

SEQ ID NO: 764482 - DNA, 120 bp, Artificial Sequence
  ENSG00000221926_23 (sequence is synthesized)
ctttctctggaggatctccgcgcgtggcgagtctgtgtcctccctgtcccccagagcagacaccctctctgtgtctggaccggggaggagcagacgctggacaggtttctggtagaatgc

SEQ ID NO: 764483 - DNA, 120 bp, Artificial Sequence
  ENSG00000221926_24 (sequence is synthesized)
tggcaatttccaggaagatacgtggagaacggaaaggttgctacacccaaatagtgaagcaaaggctatgattatggaggattggacctgcaaactccagaacagagcaaccttgtaaaa

SEQ ID NO: 764484 - DNA, 120 bp, Artificial Sequence
  ENSG00000221926_25 (sequence is synthesized)
aacttcactaggaagaatggagagaactggaccttgctcagagagtcttgtacagggatgtaatgctggagaactataggaacctggtctccttgggatttccattttccaaacctggta

SEQ ID NO: 764485 - DNA, 120 bp, Artificial Sequence
  ENSG00000221926_26 (sequence is synthesized)
gcacctccagagcaggcacagagacacgtggtcttcagcagagcctatggggttcagatgattcacataagaatagaagtttcagggctggacctggggaggcagcctgagcctgagccg

SEQ ID NO: 764486 - DNA, 120 bp, Artificial Sequence; identical to SEQ ID NO: 167159
  ENSG00000221926_27 (sequence is synthesized)

SEQ ID NO: 764487 - DNA, 120 bp, Artificial Sequence
  ENSG00000221926_28 (sequence is synthesized)
aggatcagaaagaaggaaacctctcctgagggtcttcagcagtggaagagggcagtcaggacagggacagtgaggaaacgttacatcgctaaaaagggctacttatgcgtattctatgcg

SEQ ID NO: 764488 - DNA, 120 bp, Artificial Sequence
  ENSG00000221926_29 (sequence is synthesized)
gtttccggcccctttctctggaggatctccgcgcgtggcgagtctgtgtcctccctgtcccccagagcagacaccctctctgtgtctggaccggggaggagcagacgctggacaggtgtc

SEQ ID NO: 764489 - DNA, 120 bp, Artificial Sequence
  ENSG00000221926_30 (sequence is synthesized)
tgactctgcagggccctagtggtataaaggtactgagacttgcctgtgttcagggcttcctgaagattaaatggctgccgaagttcttgagtttagctttagctcaaaagatactgcgtc

SEQ ID NO: 764490 - DNA, 120 bp, Artificial Sequence
  ENSG00000221926_31 (sequence is synthesized)
gggaacctcgttttcagagcagtggctcacgcagatcctgagcccagttaatggtcatacctttccctgagtttatgttcattctatcctctgagattatctttgaagtctcattacata

SEQ ID NO: 764491 - DNA, 120 bp, Artificial Sequence
  ENSG00000221926_32 (sequence is synthesized)
gaacgggaaggagttcacggcctggtaaatgtcacactgtgcccagaatggatgaccaggaaccttaaagagtggctgaaaagattgcagagttatcataataaattgctaacttgcgta

SEQ ID NO: 764492 - DNA, 120 bp, Artificial Sequence
  ENSG00000221926_33 (sequence is synthesized)
tttctctggaggatctccgcgcgtggcgagtctgtgtcctccctgtcccccagagcagacaccctctctgtgtctggaccggggaggagcagacgctggacagggtgtgtgtgttcagca

SEQ ID NO: 764493 - DNA, 120 bp, Artificial Sequence
  ENSG00000221926_34 (sequence is synthesized)
gtggattgtcagacttggggtcccggctgctcccttttgggtctctccccgggcccgctgatctgactgtaattccttctgctggagctagggttcggccaccttgacgcgccccctctg

SEQ ID NO: 764494 - DNA, 120 bp, Artificial Sequence
  ENSG00000221926_35 (sequence is synthesized)
cccctggagcgtgtctttgggttttgtgtgtgtgggagtggggtgtatgtgtgtttcttatccgagacacctctgggtcgtttgcttggaaaccggctgagggcccgcataccctggagc

SEQ ID NO: 764495 - DNA, 120 bp, Artificial Sequence
  ENSG00000221926_36 (sequence is synthesized)
atttggttgcaaagtgaggcaggtagcgcccaaggctcctgtaccagggccaggttaggcaccaacgcgtcccttatgtctctgcagcctgcagtgtggtggaaccgtttcatagactga

SEQ ID NO: 764496 - DNA, 120 bp, Artificial Sequence
  ENSG00000221926_37 (sequence is synthesized)
agtgtgaacgtaggaggggatggatatcagagatctgtttatccacattttcagagagtggtattgctctgatgtgagcgtaggcaggttactctctgtgtctcgtgttctttacctgta

SEQ ID NO: 764497 - DNA, 120 bp, Artificial Sequence
  ENSG00000221926_38 (sequence is synthesized)
atttgaggtttgttgtacctactattaagtggtggttgtgaggattaaatggaattttgacatgcaacagttgacacagggccagacaccaagtaagggatcaatcagttgttgctttta

SEQ ID NO: 764498 - DNA, 120 bp, Artificial Sequence
  ENSG00000221926_39 (sequence is synthesized)
ttaatagtaggcatccatctgcccatttgcacgtaagaaggaaacacccaagaatgaaaagtagcttgttgtaggtcacccagccaactagcacatagtggaaattagaatccaggcact

SEQ ID NO: 764499 - DNA, 120 bp, Artificial Sequence
  ENSG00000221926_40 (sequence is synthesized)
ttttacaattgagacccaaagaaggacaattagtcatgcttatattatgcgatcggctggcatttctgtgactagcttcccaggttgctgatgcctatacttttaagttaaatccaagat

SEQ ID NO: 764500 - DNA, 120 bp, Artificial Sequence
  ENSG00000221926_41 (sequence is synthesized)
ggtctggatcactttttcagtggtttatgccttacctatgaaagaaatgtagtctattgagcgtatttctgtgaaacattaccaggcttcagccccttctttccccaggaagcccaggga

SEQ ID NO: 764501 - DNA, 120 bp, Artificial Sequence
  ENSG00000221926_42 (sequence is synthesized)
gagaaagacagggctggagaccagtttgctgatagtgaccccaaaccagaaagttcattgggcctgcacctccagtagaactggacctgaggcagctaggaataggatgcatgtttctga

SEQ ID NO: 764502 - DNA, 120 bp, Artificial Sequence
  ENSG00000221926_43 (sequence is synthesized)
cttgatttttaaaatcccatgttctcacttgttttttttaaaatcccacttattctgagggtctagcagctagagaagtgctttctattttgttagaccctgagcttgacacttcacatg

SEQ ID NO: 764503 - DNA, 120 bp, Artificial Sequence
  ENSG00000221931_0 (sequence is synthesized)
gcttgtctttctagggtatcaagggacatgagaaatggcacagtaatcacagaattcatcctgctaggctttcctgttatccaaggcctacaaacacctctctttattgcaatctttctc

SEQ ID NO: 764504 - DNA, 120 bp, Artificial Sequence
  ENSG00000221931_1 (sequence is synthesized)
acctacatattaacccttgcaggcaatgggcttattattgccactgtgtgggctgagcccaggctacaaattccaatgtacttcttcctttgtaacttgtctttcttagaaatctggtac

SEQ ID NO: 764505 - DNA, 120 bp, Artificial Sequence
  ENSG00000221931_2 (sequence is synthesized)
accaccacagtcatccccaaactgctaggaacctttgtagtggcaagaacagtaatctgcatgtcctgctgcctgctgcaggccttcttccacttcttcgtgggcaccaccgagttcttg

SEQ ID NO: 764506 - DNA, 120 bp, Artificial Sequence
  ENSG00000221931_3 (sequence is synthesized)
atcctcactatcatgtcttttgaccgctacctcaccatctgcaatccccttcaccaccccaccatcatgaccagcaaactctgcctgcagctggccctgagctcctgggtggtgggcttc

SEQ ID NO: 764507 - DNA, 120 bp, Artificial Sequence
  ENSG00000221931_4 (sequence is synthesized)
agccgcctgcatagacaccagcattttggaactcctgggcgtcatagcaaccatccttgtgatcccagggtcacttctctttaatatgatttcttatatctacattctgtccgcaatcct

SEQ ID NO: 764508 - DNA, 120 bp, Artificial Sequence
  ENSG00000221931_5 (sequence is synthesized)
acgaattccttcagccactggccaccaaaagactttctctacctgtgcctcgcacctgacagttgtctccctgctctacggggctgttctgttcatgtacctaagacccacagcacactc

SEQ ID NO: 764509 - DNA, 120 bp, Artificial Sequence
  ENSG00000221931_6 (sequence is synthesized)
ctcctttaagattaataaggtggtgtctgtgctaaatactatcctcaccccccttctgaatccctttatttatactattagaaacaaggaggtgaagggagccttaagaaaggcaatgac

SEQ ID NO: 764510 - DNA, 120 bp, Artificial Sequence
  ENSG00000221931_7 (sequence is synthesized)
ttgcccaaagactggtcatgcaaagtaaaacatgcaacacatcaaagtgagcttaatgcagataaaaacaatgaaagttgagagaggattttggagaagtttggtaaaacaggctccccc

SEQ ID NO: 764511 - DNA, 120 bp, Artificial Sequence
  ENSG00000221932_0 (sequence is synthesized)
tttcatttcatcaaaagtttattgagcatccagtatgtgctaggcactctgctggatgctagtaatacaaagatgaagatgaaaacaacacaaaaacaaaccccacttccttacttaccc

SEQ ID NO: 764512 - DNA, 120 bp, Artificial Sequence
  ENSG00000221932_1 (sequence is synthesized)
ctccccacccccaatttaaggcagatttggcttaagcctggcaagctggcccctcagggattcagcaccagggtatggcatgttctcatctcaccctaaccttcacctgtgcatctcaag

SEQ ID NO: 764513 - DNA, 120 bp, Artificial Sequence
  ENSG00000221932_2 (sequence is synthesized)
gctgaccagcaggtactccttatccaagtcctgctgcctcttccaccttcttgagaaacttttcccctacatgcattatctcattatggatgaggcacctgggaagtttaggggagctgc

SEQ ID NO: 764514 - DNA, 120 bp, Artificial Sequence
  ENSG00000221932_3 (sequence is synthesized)
gaaggcacacctgctcaaatgagcctggggaagtgccgagggacagggagctgagacaggcatgctgtggggttcagggcagagggggcaaactagaaatgtcagtgcctttggggctga

SEQ ID NO: 764515 - DNA, 120 bp, Artificial Sequence
  ENSG00000221932_4 (sequence is synthesized)
gacaaaacttgacctggtgtggaggtgatgggtaactggggccttggaattgctccatgggttgatggcgaatcagagctggagtttaggagactagggatgcaaggacccttggaggca

SEQ ID NO: 764516 - DNA, 120 bp, Artificial Sequence
  ENSG00000221932_5 (sequence is synthesized)
tggcatgggcatgtcctggctacacagcggcccagcctctttattttgatgttagtgtgattagggagtctgccctttttctgtgccctgggacctgagcatgtgggagcagggcagatg

SEQ ID NO: 764517 - DNA, 120 bp, Artificial Sequence
  ENSG00000221932_6 (sequence is synthesized)
ggtggcaggaggccaggggttggatcatgttccccccaaatgctgggaagcaataagcctcctcctccccccaccatttctctggagattaggacttattctcacagctggaggaagctc

SEQ ID NO: 764518 - DNA, 120 bp, Artificial Sequence
  ENSG00000221932_7 (sequence is synthesized)
aacaactttcctgaggacaatgattgtttgaaaggcttgttttgtaaggaagccaggaggaatatatgagtttgatgagctaaaacagttcctcatttggtctagttttcgggccagggg

SEQ ID NO: 764519 - DNA, 120 bp, Artificial Sequence
  ENSG00000221932_8 (sequence is synthesized)
agtaagtgaaattcacttctctataagaataagcccatccatctcttttattcatgaacagagacagaaagagtgcttggcatggcatgcctccgagggaggctgtgggaggaggccaag

SEQ ID NO: 764520 - DNA, 120 bp, Artificial Sequence
  ENSG00000221932_9 (sequence is synthesized)
ctggcaggctcgggttctttgcccttgctagcgcccaggtcagagggaaaaggaatgtactcgtacccttccctcaccaccttgtaggtccccaggtaccaggtgcccagggaagaaggc

SEQ ID NO: 764521 - DNA, 120 bp, Artificial Sequence
  ENSG00000221932_10 (sequence is synthesized)
cttcacaatgatccccccagctcagaacagcccctgcacacccagtaaccggcatctggcttctccttagcttagtgcagctgtggattctgggaaagtggcctctctaatctgaacttg

SEQ ID NO: 764522 - DNA, 120 bp, Artificial Sequence
  ENSG00000221933_0 (sequence is synthesized)
ttcagacttggtgagctccttgtttcttctacagggaaatggggggaaatcagacttccatcacagagttcctcctactgggatttcccattggcccaaggattcagatgctcctctttg

SEQ ID NO: 764523 - DNA, 120 bp, Artificial Sequence
  ENSG00000221933_1 (sequence is synthesized)
ggctcttctccctgttctacatcttcattctgttggggaacgggacaatcctggggctcatctcactggactccagactccacacccccatgtacttcttcctctcacacctggcggtcg

SEQ ID NO: 764524 - DNA, 120 bp, Artificial Sequence
  ENSG00000221933_2 (sequence is synthesized)
tcgacatcgcctgtgcttgcagcacggtgccccagatgctggtgaacctcctgcatccagccaagcccatctcctttgctggctgcatgacccagatgtttctgtttttgagttttgcac

SEQ ID NO: 764525 - DNA, 120 bp, Artificial Sequence
  ENSG00000221933_3 (sequence is synthesized)
atacagaatgtctcctcctggtggtgatgtcctatgatcggtacgtggccatctgccaccctctccgatattctaccatcatgacctggaaagtctgcatcactttggcattgacttcct

SEQ ID NO: 764526 - DNA, 120 bp, Artificial Sequence
  ENSG00000221933_4 (sequence is synthesized)
ccttctgtggaccccagaaacttaatcactttttctgtgaaattatggctgttctcaaacttgcctgtgcggatacccacattaatgaggtaatggttttggcaggggcagtgtctgtgc

SEQ ID NO: 764527 - DNA, 120 bp, Artificial Sequence
  ENSG00000221933_5 (sequence is synthesized)
tggtgggagccttcttttccactgtaatatcttatgttcatattctatgtgccattctaaagatccagtcaggagaggggtgccagaaagccttctccatctgctcctcccacctctgtg

SEQ ID NO: 764528 - DNA, 120 bp, Artificial Sequence
  ENSG00000221933_6 (sequence is synthesized)
tggttggactcttttatggcacagccatcatcatgtatgttgagccccagtatgagagccccaaggagcagaagaaatatctcctgctgtttcacagcctcttcaatcccatgcttaatc

SEQ ID NO: 764529 - DNA, 120 bp, Artificial Sequence
  ENSG00000221933_7 (sequence is synthesized)
ccctaatttatagtcttaggaacaaggaagtccaaggtactctaaagaggatgcttgaaaagaagagaacttcatgaaagcctgaaagaatagtaaaatagctggcttcaaagggctttg

SEQ ID NO: 764530 - DNA, 120 bp, Artificial Sequence
  ENSG00000221933_8 (sequence is synthesized)
ttcctatgactacctcccgagaaagcccattctgctttcctctctccagcattgaaggtcggagctgcacaattaataaaaatatgtttatactagctgtatagtgtacacacttttaat

SEQ ID NO: 764531 - DNA, 120 bp, Artificial Sequence
  ENSG00000221933_9 (sequence is synthesized)
ataattatgtgaaatattctgaaagttggaaataaatgtgtatctttttgttctgtaaataagacttgaaggcgaatttttgtagaataaggatatgggagttaggagagactgataaca

SEQ ID NO: 764532 - DNA, 76 bp, Artificial Sequence
  ENSG00000221933_10 (sequence is synthesized)
tgtagaataaggatatgggagttaggagagactgataacaaagtcattatttaattattcttaatttagaacgtgc

SEQ ID NO: 764533 - DNA, 120 bp, Artificial Sequence
  ENSG00000221937_0 (sequence is synthesized)
cccattcttggcgcagaaacctgaaagtcaggatcaaagagaatggcaacggtgaacacagatgccacagataaagacatatccaagttcaaggtcaccttcactttggtggtctccgga

SEQ ID NO: 764534 - DNA, 120 bp, Artificial Sequence
  ENSG00000221937_1 (sequence is synthesized)
atagagtgcatcactggcatccttgggagtggcttcatcacggccatctatggggctgagtgggccaggggcaaaacactccccactggtgaccgcattatgttgatgctgagcttttcc

SEQ ID NO: 764535 - DNA, 120 bp, Artificial Sequence
  ENSG00000221937_2 (sequence is synthesized)
aggctcttgctacagatttggatgatgctggagaacattttcagtctgctattccgaattgtttataaccaaaactcagtgtatatcctcttcaaagtcatcactgtctttctgaaccat

SEQ ID NO: 764536 - DNA, 120 bp, Artificial Sequence
  ENSG00000221937_3 (sequence is synthesized)
tccaatctctggtttgctgcctggctcaaagtcttctattgtcttagaattgcaaacttcaatcatcctttgttcttcctgatgaagaggaaaatcatagtgctgatgccttggcttctc

SEQ ID NO: 764537 - DNA, 120 bp, Artificial Sequence
  ENSG00000221937_4 (sequence is synthesized)
tatcccctcctccaactccacggagaagaagtacttctctgagaccaatatggtcaacctggtatttttctataacatggggatcttcgttcctctgatcatgttcatcctggcagccac

SEQ ID NO: 764538 - DNA, 120 bp, Artificial Sequence
  ENSG00000221937_5 (sequence is synthesized)
cctgctgatcctctctctcaagagacacaccctacacatgggaagcaatgccacagggtccagggaccccagcatgaaggctcacataggggccatcaaagccaccagctactttctcat

SEQ ID NO: 764539 - DNA, 120 bp, Artificial Sequence
  ENSG00000221937_6 (sequence is synthesized)
cctctacattttcaatgcaattgctctatttctttccacgtccaacatctttgacacttacagttcctggaatattttgtgcaagatcatcatggctgcctaccctgccggccactcagt

SEQ ID NO: 764540 - DNA, 120 bp, Artificial Sequence
  ENSG00000221937_7 (sequence is synthesized)
acaactgatcttgggcaaccctgggctgagaagagcctggaagcggtttcagcaccaagttcctctttacctaaaagggcagactctgtgactggaactcacggagttctgcgggacctg

SEQ ID NO: 764541 - DNA, 120 bp, Artificial Sequence
  ENSG00000221938_0 (sequence is synthesized)
gcatctttgactggcccacagctctgaccttcctgtcctagatgtccacaagagcatggaaggcaacaagacatggatcacagacatcaccttgccgcgattccaggttggtccagcact

SEQ ID NO: 764542 - DNA, 120 bp, Artificial Sequence
  ENSG00000221938_1 (sequence is synthesized)
ggagattctcctctgtggacttttctctgccttctatacactcaccctgctggggaatggggtcatctttgggattatctgcctggactgtaagcttcacacacccatgtacttcttcct

SEQ ID NO: 764543 - DNA, 120 bp, Artificial Sequence
  ENSG00000221938_2 (sequence is synthesized)
ctcacacctggccattgttgacatatcctatgcttccaactatgtccccaagatgctgacgaatcttatgaaccaggaaagcaccatctccttttttccatgcataatgcagacattctt

SEQ ID NO: 764544 - DNA, 120 bp, Artificial Sequence
  ENSG00000221938_3 (sequence is synthesized)
gtatttggcttttgctcacgtagagtgtctgattttggtggtgatgtcctatgatcgctatgcggacatctgccaccccttacgttacaatagcctcatgagctggagagtgtgcactgt

SEQ ID NO: 764545 - DNA, 120 bp, Artificial Sequence
  ENSG00000221938_4 (sequence is synthesized)
gttctcatcctgagcctgcccttctgcgggcctcatgaaatcaaccacttcttctgtgaaatcctgtctgtcctcaagttggcctgtgctgacacctggctcaaccaggtggtcatcttt

SEQ ID NO: 764546 - DNA, 120 bp, Artificial Sequence
  ENSG00000221938_5 (sequence is synthesized)
gcagcctgcgtgttcatcctggtggggccactctgcctggtgctggtctcctacttgcgcatcctggccgccatcttgaggatccagtctggggagggccgcagaaaggccttctccacc

SEQ ID NO: 764547 - DNA, 120 bp, Artificial Sequence
  ENSG00000221938_6 (sequence is synthesized)
tgctcctcccacctttgcgtggtgggactcttctttggcagcgccattgtcacgtacatggcccccaagtcccgccatcctgaggagcagcagaaagttctttccctgttttacagcctt

SEQ ID NO: 764548 - DNA, 120 bp, Artificial Sequence
  ENSG00000221938_7 (sequence is synthesized)
ttcaatccaatgctgaaccccctgatatatagcctaaggaatgcagaggtcaagggcgccctgaggagggcactgaggaaggagaggctgacgtgagacatctcaaagggaaccatgggg

SEQ ID NO: 764549 - DNA, 120 bp, Artificial Sequence
  ENSG00000221938_8 (sequence is synthesized)
ttttttttgtcttctgctagaataaatgctaccttaaactggaatactatagacctatacatataaactgaagacacaaatcttttagaaaagataggtaaatgcatttataatactgga

SEQ ID NO: 764550 - DNA, 120 bp, Artificial Sequence
  ENSG00000221938_9 (sequence is synthesized)
taggcataaattcataaagaagacacaaaagtccctagatataaaatttttaagttcgataaatataggacctcttcacattaatcattgtgctcatcaaagtcaccattaagaaagaag

SEQ ID NO: 764551 - DNA, 120 bp, Artificial Sequence
  ENSG00000221938_10 (sequence is synthesized)
aaatgcaagccacaaaccaagtgatcgtatggaaactacatgtacccagaaatggaactattgttcatacagtacatagaaagaactcctttaaatcagcaataaaaaatataaacaacc

SEQ ID NO: 764552 - DNA, 120 bp, Artificial Sequence
  ENSG00000221938_11 (sequence is synthesized)
aaattttataaaattagcaaaacatgtgaacatatactcttacagaaaatacaaggggctgataaacatacaaatgctgctttccaccattagtaagcaaggaattgtaaattaaaacca

SEQ ID NO: 764553 - DNA, 120 bp, Artificial Sequence
  ENSG00000221938_12 (sequence is synthesized)
ccatgagatactattatatacccactaagatgtctgaaatttttaatggcttatttatcattgaggttattggaaatctatttctaatattggaaatggtcgatactagcagagtttgtg

SEQ ID NO: 764554 - DNA, 120 bp, Artificial Sequence
  ENSG00000221938_13 (sequence is synthesized)
ccaatagtagccaagtcacattgagttaacaggagcatagtacacatcctcaagatcaataattagtgacacttcctgtgaagatacacaggttaatgcttaaggctttgagggccatct

SEQ ID NO: 764555 - DNA, 120 bp, Artificial Sequence
  ENSG00000221938_14 (sequence is synthesized)
tctgcgtcaaaacaactcaactctgacaaaagcagccatagacaatgtgtaaacaaatgggtgtgcccgtgttccaataaaactttatttgtaaaaacaggtggctgctggaatggtgcc

SEQ ID NO: 764556 - DNA, 120 bp, Artificial Sequence
  ENSG00000221938_15 (sequence is synthesized)
cagggacagtagtttgtgaacccttgttctagatcttaaaactagcatagttccagctgatcccactttagagaccctcactgggtggggcctcagggagcatgtgattagacatgtctt

SEQ ID NO: 764557 - DNA, 120 bp, Artificial Sequence
  ENSG00000221938_16 (sequence is synthesized)
gcagtcaaattcctgtgatcacattgtacttacttgagagtgagacttttcctcctttgacactttctaaaatatgccatgactcaatagccagtggactgtaaatattcatggtttctc

SEQ ID NO: 764558 - DNA, 120 bp, Artificial Sequence
  ENSG00000221944_0 (sequence is synthesized)
gcagagggctggactcagcggcggagctggctgctggcctcagttctgcctctgtccaggtccttgtgacccgcccgctctcctaagggagcgtgtcctggccccctcccgcagcggctc

SEQ ID NO: 764559 - DNA, 120 bp, Artificial Sequence
  ENSG00000221944_1 (sequence is synthesized)
ggaaaaaaggcagcaccgcgtcgttgacggcgcgggctctggactcgctgcttggtaaaaaccttcctcttcctccagtgcgggacgcactctctggtatctcttttgacctcccggagg

SEQ ID NO: 764560 - DNA, 120 bp, Artificial Sequence
  ENSG00000221944_2 (sequence is synthesized)
ctttcctttgtcggtcgcggcgccactgtactatggcatacctcgttttattacgcttcgcagatagggcattctgaaaacaaatggagggtttgtggcagccctgagtccagcaattgt

SEQ ID NO: 764561 - DNA, 120 bp, Artificial Sequence
  ENSG00000221944_3 (sequence is synthesized)
atcagcgccatttttccaacagcatgtgctcacttggtgtctctgtgttacattttggtaattctcaaaatatttaaaactttttcatgatttctgtgtctgttatggtgatctatgatc

SEQ ID NO: 764562 - DNA, 120 bp, Artificial Sequence
  ENSG00000221944_4 (sequence is synthesized)
agtgatctttgatgttgctattgtcattgttttggggtgccacatacagcgtcttttataagacgtggaacttaatgttgtgtgtgttctgaccgctccacccacagaccgttccccatc

SEQ ID NO: 764563 - DNA, 120 bp, Artificial Sequence
  ENSG00000221944_5 (sequence is synthesized)
tattccctgagacacaacaatattgagattaggcgaattaatgactctgcaatggcctctaagtgctcaagtgaaaggaagagtcgcacatctctcactttaaatcaaaaactagaaatg

SEQ ID NO: 764564 - DNA, 120 bp, Artificial Sequence
  ENSG00000221944_6 (sequence is synthesized)
actttaaatcaaaaactagaaatgattaaactgagtgaggaaggtatgtcaaaagccgagataggccgaaggctaggcctcctgcggcaaacagttagccaagttgtaaatgcaaaggaa

SEQ ID NO: 764565 - DNA, 120 bp, Artificial Sequence
  ENSG00000221944_7 (sequence is synthesized)
aagttcttgaaggaagttaaaagtgctactccaatgaacacacgaatgataagaaagcgaaacagccttattgctgatatggagaaggttttagtggtctggatagaagatcagaccagc

SEQ ID NO: 764566 - DNA, 88 bp, Artificial Sequence
  ENSG00000221944_8 (sequence is synthesized)
gatcagaccagccgacaaagccctaactctcttcaactctatgaaagctgagagaggtgtggaagctgcagaagaaaagtttgaagct

SEQ ID NO: 764567 - DNA, 67 bp, Artificial Sequence
  ENSG00000221944_9 (sequence is synthesized)
catttccataacataaaagcctttagctaagatcattgacgaaggtggctacactaaacaacagatt

SEQ ID NO: 764568 - DNA, 120 bp, Artificial Sequence
  ENSG00000221944_10 (sequence is synthesized)
ctgaaaatcctagggcccttaagaattatactaaatctactctacccgtgctatataaatggaacagcaaagcccggatgacagcacatctgtttacagcgtggtttactgaatatttta

SEQ ID NO: 764569 - DNA, 89 bp, Artificial Sequence
  ENSG00000221944_11 (sequence is synthesized)
cccggatgacagcacatctgtttacagcgtggtttactgaatattttaaacccactgttgagacctactgctcagaaaagaagattccc

SEQ ID NO: 764570 - DNA, 120 bp, Artificial Sequence
  ENSG00000221944_12 (sequence is synthesized)
acatccattctgcagcccatggatcaaggggtaatttcgaccttcaagtcttattatttgagaaatacatttcataaggctctagctgccatggatagtgatgtctctgatggatctggg

SEQ ID NO: 764571 - DNA, 89 bp, Artificial Sequence
  ENSG00000221944_13 (sequence is synthesized)
tgggcaaagcaattagatgccattaaaaacattcgtgattcatgggaggaggtcaaattgtcaacattaacaggagtttggaagaagtt

SEQ ID NO: 764572 - DNA, 90 bp, Artificial Sequence
  ENSG00000221944_14 (sequence is synthesized)
gatgactaaagtgcagatgtggtggaaatagcaaaagaactagaattagaagtagagcctgaagatgtaactgaattgctgcaatctcat

SEQ ID NO: 764573 - DNA, 89 bp, Artificial Sequence
  ENSG00000221944_15 (sequence is synthesized)
gtgcagatgtggtggaaatagcaaaagaactagaattagaagtagagcctgaagatgtataacagatgaggagttgtttcttatggatg

SEQ ID NO: 764574 - DNA, 120 bp, Artificial Sequence
  ENSG00000221944_16 (sequence is synthesized)
tgtgggcaaaatgctatcaaacagcatcgcatgctacagagaaatctttcatgaaaggaagagtcaactcatgcgaaaagcttcaccgatgtcttattttaggaaattgccacagccacc

SEQ ID NO: 764575 - DNA, 120 bp, Artificial Sequence
  ENSG00000221944_17 (sequence is synthesized)
ccaaccttcagcagccaccaccctgaccagtcagcaaccatcaacctcgaggcaagaccctccaccagcaaaaagagtacgactcaccgaaggctcagattgataatcagcattttttag

SEQ ID NO: 764576 - DNA, 120 bp, Artificial Sequence
  ENSG00000221944_18 (sequence is synthesized)
agattgataatcagcattttttagcaataaagtatttttaaatttaggtatgtatattgttttattagacaatgctattgcactcttgctggtctacagtatagtgtaaacataactttt

SEQ ID NO: 764577 - DNA, 120 bp, Artificial Sequence
  ENSG00000221946_0 (sequence is synthesized)
ccccacatcggtccgtcctgcttccagctgctgcagcgcgccttcgccgccaaagcatccagcagccccctgctccggcccagcatggcgaccccgacccagacccccacaaaggctcct

SEQ ID NO: 764578 - DNA, 120 bp, Artificial Sequence
  ENSG00000221946_1 (sequence is synthesized)
gaggaacctgacccattttactatgactacaacacggtgcagactgtgggcatgactctggcaaccatcttgttcctgctgggtatcctcatcgtcatcagcaagaaggtgaagtgcagg

SEQ ID NO: 764579 - DNA, 120 bp, Artificial Sequence
  ENSG00000221946_2 (sequence is synthesized)
cgaccctgcctgagcgcgggagcctgaggaccgggtggaggcggtggggacccagccgcgcgccgggagcgctccccggaatgagccgccccacccaccccaaggctggagccgctgcac

SEQ ID NO: 764580 - DNA, 120 bp, Artificial Sequence
  ENSG00000221946_3 (sequence is synthesized)
cctgctgtccctctccaggccttggcaatgacgatcccccaaagagcccgtctgcaccccagacccagggcctcaggcctccagctcctgggatccgggagtccatcccggcccagcacc

SEQ ID NO: 764581 - DNA, 120 bp, Artificial Sequence
  ENSG00000221946_4 (sequence is synthesized)
cccagcatccccgtgtatggcccccctgcacctccttgtctcatccccgaagatccgtccccctggcccctcagtgtccatgtcttgagcttaataaatgtgcatttggttttttcctct

SEQ ID NO: 764582 - DNA, 120 bp, Artificial Sequence
  ENSG00000221946_5 (sequence is synthesized)
cttgttctgtctctctctcccaacaggcaagaaggtgaagtgcaggaaggcggactccaggtctgagagcccaacctgcaaatcctgtaagtctgagcttccctcttcagcccctggtgg

SEQ ID NO: 764583 - DNA, 120 bp, Artificial Sequence
  ENSG00000221946_6 (sequence is synthesized)
cctgacccattttactatggtgagtgttggatttggggatagggctggactggggagtagctgcaggtgctcacagatcactccggacatggcttcagctgtggccacacgatacgtgct

SEQ ID NO: 764584 - DNA, 120 bp, Artificial Sequence
  ENSG00000221946_7 (sequence is synthesized)
gggccactggccacgggaccatatatgtgggtgtggttcacatcagctgagttcatggagggcagaaccagatgggggagtggggatgcctcacactctctctgagcccccttcaggtct

SEQ ID NO: 764585 - DNA, 120 bp, Artificial Sequence
  ENSG00000221946_8 (sequence is synthesized)
caccgggatctgggctggtgccttggtgtcgccagagaagcagatgaaggaaaaccttagaagcaatgactctgagcccaggctgcctggatttgaatcctgccttatccactcactagc

SEQ ID NO: 764586 - DNA, 120 bp, Artificial Sequence
  ENSG00000221946_9 (sequence is synthesized)
ctgggcccttctgtaaacaagggatagtaatagttcccacctatgaggactgtgggaaagatacctgactggtggcattaaatctcctccatggcactgaagctcaaataagctacccca

SEQ ID NO: 764587 - DNA, 120 bp, Artificial Sequence
  ENSG00000221946_10 (sequence is synthesized)
ggcctggtagatcgggctccagtttcccctctgaacaccctcctcttgcccccaccccacccctttgctcattcatactttttccctaggtgtcaatttctctcccatctcaggaccttt

SEQ ID NO: 764588 - DNA, 120 bp, Artificial Sequence
  ENSG00000221946_11 (sequence is synthesized)
gcgtgtgctatgattctgcagtaatgcttctcctttgtacacgaccggctaaggctcccccttattcaggcctcagatcaaacatagactactctactgggataggccctcctgactccc

SEQ ID NO: 764589 - DNA, 120 bp, Artificial Sequence
  ENSG00000221946_12 (sequence is synthesized)
tggcaaggaagagccacaccatactcagctggtgtcgcatgacttgtttttgagggggattgtttctttaatgttttatcacaatacgaaagtcaactccttgctggtagaggcctggac

SEQ ID NO: 764590 - DNA, 120 bp, Artificial Sequence
  ENSG00000221946_13 (sequence is synthesized)
cactactggtacagagtgagtgctccataaattcatatctcaacaaatacttagcgggcacaggctctatttctggcaatgttccaagcagctggagacactgcaatgaaccacacagac

SEQ ID NO: 764591 - DNA, 120 bp, Artificial Sequence
  ENSG00000221947_0 (sequence is synthesized)
agaggtcacgtgacgccgcgcgggctgcgcgggcagtggtgggaaggctggcgcgaggcgtgaggtggcgtgaggcgaagctggaatctgcctctgtcacgggggctggtgcctcacggg

SEQ ID NO: 764592 - DNA, 120 bp, Artificial Sequence
  ENSG00000221947_1 (sequence is synthesized)
tttgtgtcctagacaggcgagtggatccaagtgggcgagagacattttaatctggaagagtcttgtgatttgggagacagtgaagaagaagtaaaatattcacaagatgaagatttttcc

SEQ ID NO: 764593 - DNA, 120 bp, Artificial Sequence
  ENSG00000221947_2 (sequence is synthesized)
agaagggactttgagtcaaagatggctttttatatttgacaagtcttgtcatctgtaatgaagatcattgtgaaacagaagattgattaaagccttgtaacattggacctagattagaga

SEQ ID NO: 764594 - DNA, 120 bp, Artificial Sequence
  ENSG00000221947_3 (sequence is synthesized)
tttagaaaagaaagtcaaaattagtcactttagtgttagtgttcccatttcataatatttattctttcttctaaatagatttagggagtagaaattaaaattcaatgctataccaaaggg

SEQ ID NO: 764595 - DNA, 120 bp, Artificial Sequence
  ENSG00000221947_4 (sequence is synthesized)
tatactaatatttgtttggctttttttccctttttgtgagggagaaaaaagtagataacgaaaagctatagtcattcgtaatgaaatatactaaacagaattttatgatgtcagttcttg

SEQ ID NO: 764596 - DNA, 120 bp, Artificial Sequence
  ENSG00000221947_5 (sequence is synthesized)
gcattataatctacgtaactgatttaattgtggacatatgggtatctgtcagatttttccatgaaggacagtatgtttttagtgctttagcgttaagctttatgctttttggaacacttg

SEQ ID NO: 764597 - DNA, 120 bp, Artificial Sequence
  ENSG00000221947_6 (sequence is synthesized)
tggctcagtgttttagttattcttggttcaaggctgatttaaagaaagcaggccaagaaagtcagcattgttttcttctacttcattgcttgcaaggaggagtttttacaaggtattggt

SEQ ID NO: 764598 - DNA, 120 bp, Artificial Sequence
  ENSG00000221947_7 (sequence is synthesized)
ttgccttaaaaaggggttaccatgcagcttttaaatatgacagcaatactagtaacttcgtggaagaacaaattgatctacataaagaagttatagatagagtgactgatttgagcatgc

SEQ ID NO: 764599 - DNA, 120 bp, Artificial Sequence
  ENSG00000221947_8 (sequence is synthesized)
tcagactatttgagacctacctggaaggctgcccacaacttattcttcaactctacattcttctggagcatggacaagcgaatttcagtcagtatgcggccatcatggtctcttgctgtg

SEQ ID NO: 764600 - DNA, 120 bp, Artificial Sequence
  ENSG00000221947_9 (sequence is synthesized)
ctatttcttggtcaactgttgattatcaagtagctttaagaaaatccttgcctgacaaaaagcttcttaatggattatgtcccaaaatcacatatctcttttacaagttgtttacattat

SEQ ID NO: 764601 - DNA, 120 bp, Artificial Sequence
  ENSG00000221947_10 (sequence is synthesized)
tatcgtggatgctgagtgttgtacttctactattcttaaatgttaagattgctttatttctgttgttatttctttggttgttaggtataatatgggcatttaaaaacaacacccagtttt

SEQ ID NO: 764602 - DNA, 120 bp, Artificial Sequence
  ENSG00000221947_11 (sequence is synthesized)
gtacttgtataagtatggaattcttatataggattgttgttggattcattcttatctttacattttttaatattaagggacagaataccaagtgtccaatgtcttgttattatattgtta

SEQ ID NO: 764603 - DNA, 120 bp, Artificial Sequence
  ENSG00000221947_12 (sequence is synthesized)
gggtactgggcactttggggatattgactgtattctgggtttgccccctcactatttttaatccagactattttatacctatcagtataactatagttcttactcttcttcttggaattc

SEQ ID NO: 764604 - DNA, 120 bp, Artificial Sequence
  ENSG00000221947_13 (sequence is synthesized)
gttctaagagaatgtagaatgagatatttcctaatggaataagctattcatttatgatatatattttcttatattttgtttcattggttagtaaagaaaatgtgtgttatgtgggtgtgt

SEQ ID NO: 764605 - DNA, 120 bp, Artificial Sequence
  ENSG00000221947_14 (sequence is synthesized)
tgtctcttatttttgccacctttaatttgaaattagttcagtgaaataggagatacatagtagtattttatttttaaaattaatttctcatttggttttgaagatcttgagtactcagat

SEQ ID NO: 764606 - DNA, 120 bp, Artificial Sequence
  ENSG00000221947_15 (sequence is synthesized)
atctttctactgcctggtagagctgccatcttgagcctgaaatataagaaatggtctggttttcataatgagaaggctggaattgagcttccctcccattttccttgttcctgaactaat

SEQ ID NO: 764607 - DNA, 120 bp, Artificial Sequence
  ENSG00000221947_16 (sequence is synthesized)
actactgtacctgttatggaggactgcaaagggaagagaaaagcagaacactgtattattttttcctttattgtcttcagtgcatatatttgcagttggggacaggttgagtagaggaaa

SEQ ID NO: 764608 - DNA, 120 bp, Artificial Sequence
  ENSG00000221947_17 (sequence is synthesized)
agggaaagaagggaaagcagaaaacaaatttttagcatctgctgtgctttcatccatgaaatctccaattcagtaagtgcaaaagagaattggtgtgcatctgagaggtctgacatttca

SEQ ID NO: 764609 - DNA, 120 bp, Artificial Sequence
  ENSG00000221947_18 (sequence is synthesized)
gaggtctgacatttcattatttacttatttcctagcttttctgaattaatgcactcttaacatataattatattaatcctatttgtgctagaatagttgtatctaaatcatattttaaaa

SEQ ID NO: 764610 - DNA, 120 bp, Artificial Sequence
  ENSG00000221947_19 (sequence is synthesized)
aaaattatggtaaaaacatataaaatttaccatcttaatcactttgagtgtacagttcatcagtgttaactgtattcaccttgtgcaacagatctcaaggactttttcaccttgtaaaac

SEQ ID NO: 764611 - DNA, 120 bp, Artificial Sequence
  ENSG00000221947_20 (sequence is synthesized)
taagattctctatttattgaacaaatccccatttcctccttccccaagtctctctcaactgaaattataattttttgtttctatgagtttgaatactttagataccttgttgccatggtt

SEQ ID NO: 764612 - DNA, 120 bp, Artificial Sequence
  ENSG00000221947_21 (sequence is synthesized)
tgaatgtgccccccagatttcatgtgtgtgaaacttaatctccaaatttgtatgttgatggcatttggaagtggtggggactttgtttatttatttatttttaattttttaattttatat

SEQ ID NO: 764613 - DNA, 120 bp, Artificial Sequence
  ENSG00000221947_22 (sequence is synthesized)
attagacttttgaactagctgttccttcaagctggaaggcttttccatctctatgcacatggccaatttcactactcaaatgccaccttctcagtcttgtcatctgtaatgaagatcatt

SEQ ID NO: 764614 - DNA, 120 bp, Artificial Sequence
  ENSG00000221947_23 (sequence is synthesized)
agatatttctgatgaagaaaacgatctgctcttacctattttatgaatcagcagcatagtgtatcagagtggctaatgacatctgcttttgaagaagaagtaaaatattcacaagatgaa

SEQ ID NO: 764615 - DNA, 120 bp, Artificial Sequence
  ENSG00000221947_24 (sequence is synthesized)
caaagagaactttgataactgcacaatcatcaatcattctcagagaacagaaagctccagttcaagcctattatctactaaaggactcatcttagccctgtgattaaaaagaattgatta

SEQ ID NO: 764616 - DNA, 120 bp, Artificial Sequence
  ENSG00000221947_25 (sequence is synthesized)
cttcggctgtttcttatagcaagatctttactttcatctaaaatagtgctcttatatttcacactgagtttcaaaattccaaagaggagacctgtacactactgtgatttgatgtgatag

SEQ ID NO: 764617 - DNA, 120 bp, Artificial Sequence
  ENSG00000221947_26 (sequence is synthesized)
aatgccaaagtgggggaacaagttgaaagtaggtccaaaacttcactaatttatatgaaaatgtgcctttaaaagtattgaatatataaaagtattagaagttagtttctttttcatatt

SEQ ID NO: 764618 - DNA, 120 bp, Artificial Sequence
  ENSG00000221954_0 (sequence is synthesized)
ccttcctggaggttttatcacccacactacatagatggagaagaaaaagaatgtgactgaattcattttaataggtcttacacagaaccccataatggagaaagtcacgtttgtagtatt

SEQ ID NO: 764619 - DNA, 120 bp, Artificial Sequence
  ENSG00000221954_1 (sequence is synthesized)
tttggttctttacatgataacactttcaggcaacctgctcattgtggttaccattaccaccagccaggctctgagctcccccatgtacttcttcctgacccacctttctttgatagacac

SEQ ID NO: 764620 - DNA, 120 bp, Artificial Sequence
  ENSG00000221954_2 (sequence is synthesized)
agtttattcttcttcttcagctcctaagttgattgtggattcctttcaagagaagaaaatcatctcctttaatgggtgtatggctcaagcctatgcagaacacatttttggtgctactga

SEQ ID NO: 764621 - DNA, 120 bp, Artificial Sequence
  ENSG00000221954_3 (sequence is synthesized)
gatcatcctgctgacagtgatggcctgtgactgctatgtggccatctgcaaacctctgaactacacaaccattatgagccacagcctgtgcattctcctggtggcagtggcctgggtggg

SEQ ID NO: 764622 - DNA, 120 bp, Artificial Sequence
  ENSG00000221954_4 (sequence is synthesized)
aaacttgtttgcatagacactcatacccttggtctctttgttgctgtgaacagtgggtttatctgcttattaaacttccttatcttggtggtatcctatgtgatcatcttgagatcttta

SEQ ID NO: 764623 - DNA, 120 bp, Artificial Sequence
  ENSG00000221954_5 (sequence is synthesized)
aagaacaatagcttggaggggaggtgtaaagccctctccacctgtatttctcacatcatagtagttgtcttattctttgtgccctgtatatttgtgtatctgcgctcagtgaccactctg

SEQ ID NO: 764624 - DNA, 120 bp, Artificial Sequence
  ENSG00000221954_6 (sequence is synthesized)
cccattgataaagctgttgctgtattttatactatggtggtcccaatgttaaatcccgtggtctacacactcagaaatgctgaggtaaaaagtgcaataaggaagctttggagaaaaaaa

SEQ ID NO: 764625 - DNA, 120 bp, Artificial Sequence
  ENSG00000221954_7 (sequence is synthesized)
gtgacttcagataatgattaaataagaccattgagcactcaacatagaggtaataggtatttaagcttcttgatttgtagatgaatatgtcaactctaacaaggggctggctaatgcttg

SEQ ID NO: 764626 - DNA, 120 bp, Artificial Sequence
  ENSG00000221955_0 (sequence is synthesized)
tccagagcagtctccctgtccagatcaccaggatccctgcttgctggagaatgacccagatgtcccaggtgcaggagctcttccatgaggcagcccagcaggatgccctggcccagcccc

SEQ ID NO: 764627 - DNA, 120 bp, Artificial Sequence
  ENSG00000221955_1 (sequence is synthesized)
agccctggtggaagacccagctgttcatgtgggagcctgtgctgtttgggacctgggatggtgtgttcacatcctgcatgatcaacatctttggggttgtgctcttcctgaggactggct

SEQ ID NO: 764628 - DNA, 120 bp, Artificial Sequence
  ENSG00000221955_2 (sequence is synthesized)
ggctggtgggaaacacaggagtgctcctgggcatgttcctggtgtccttcgtcatcctggtggccctcgtcacggtgctgtctggcattggcgtcggggagcgcagcagcatcggcagcg

SEQ ID NO: 764629 - DNA, 120 bp, Artificial Sequence
  ENSG00000221955_3 (sequence is synthesized)
gtggcgtctactccatgatctcctcggtcctgggtgggcagacgggaggcaccatcgggctgctctatgtgtttggacagtgtgttgcaggtgccatgtatatcaccggctttgctgaat

SEQ ID NO: 764630 - DNA, 120 bp, Artificial Sequence
  ENSG00000221955_4 (sequence is synthesized)
ccatctcggatttgctgggcctcgggaatatctgggctgtgcgaggaatttcagttgcggtgcttctggccttgctgggcattaacctcgcaggtgtcaaatggataatccgcctccagc

SEQ ID NO: 764631 - DNA, 120 bp, Artificial Sequence
  ENSG00000221955_5 (sequence is synthesized)
tgctgttgctgttcctgctggccgtgtccacactggactttgtggtgggttctttcacccacctggacccagaacatggtttcattggatattcacccgaactgctacagaacaacacgc

SEQ ID NO: 764632 - DNA, 120 bp, Artificial Sequence
  ENSG00000221955_6 (sequence is synthesized)
tgcccgattacagcccgggggaatcttttttcactgtctttggggttttcttcccagcggctacaggagtcatggccggcttcaacatggggggcgacctcagggagcctgccgccagca

SEQ ID NO: 764633 - DNA, 120 bp, Artificial Sequence
  ENSG00000221955_7 (sequence is synthesized)
ttcccctgggctccctggcagctgttggcatctcgtggtttctgtacatcatcttcgtcttcctcctgggcgccatctgcactcgagaggcccttcgctatgacttcctgatagcggaaa

SEQ ID NO: 764634 - DNA, 120 bp, Artificial Sequence
  ENSG00000221955_8 (sequence is synthesized)
aggtatccctcatgggcttcctgttccttttgggcttatacatctcgtccctggcttcctgcatgggaggactttatggagctccccgcatcctgcagtgcattgcccaggagaaagtga

SEQ ID NO: 764635 - DNA, 120 bp, Artificial Sequence
  ENSG00000221955_9 (sequence is synthesized)
tccctgcacttgcctgtctgggacaagggaaggggccaaacaaaacacccgtggctgccatctgcctgaccagcttggtgaccatggcctttgtttttgtgggtcaagtgaacgttctgg

SEQ ID NO: 764636 - DNA, 120 bp, Artificial Sequence
  ENSG00000221955_10 (sequence is synthesized)
cccccatcgtcaccatcaacttcatgctgacatacgttgcagtggactactcttacttctccctgtccatgtgttcctgcagcctgaccccggtgcctgagccggtgctcagggagggcg

SEQ ID NO: 764637 - DNA, 120 bp, Artificial Sequence
  ENSG00000221955_11 (sequence is synthesized)
cagaaggcctccactgctctgagcacctgctcttagagaaagctcccagttacggctctgagggacctgcccaaagagtcttggagggcacgctactggaattcaccaaggacatggatc

SEQ ID NO: 764638 - DNA, 120 bp, Artificial Sequence
  ENSG00000221955_12 (sequence is synthesized)
agctcctccagctaaccaggaagcttgagagtagccagcccaggcaaggagagggtaacaggaccccagaaagtcagaagaggaaaagcaagaaggccaccaagcagaccctacaagata

SEQ ID NO: 764639 - DNA, 120 bp, Artificial Sequence
  ENSG00000221955_13 (sequence is synthesized)
gcttcctcttggacctcaaatcccctccttctttccctgtcgagatctctgacaggttgcccgctgcctcctgggaggggcaggagtcctgctggaacaagcagacttccaagagcgaag

SEQ ID NO: 764640 - DNA, 120 bp, Artificial Sequence
  ENSG00000221955_14 (sequence is synthesized)
agtccaggctccaagaacaagatgtctggagaagatccacttctttctatacccacatgtgcaacccctgggtctccctgttgggggctgttgggtcccttctcatcatgtttgtgatac

SEQ ID NO: 764641 - DNA, 120 bp, Artificial Sequence
  ENSG00000221955_15 (sequence is synthesized)
agtgggtgtataccctggttaacatgggtgttgctgccatcgtgtatttctacattggccgggccagtccagggcttcaccttggatcagcctccaacttcagctttttccggtggatga

SEQ ID NO: 764642 - DNA, 120 bp, Artificial Sequence
  ENSG00000221955_16 (sequence is synthesized)
ggtctctcttgctcccctcctgcaggagcttgcggtcccctcaggagcagatcatcttggcgccgtccctggctaaggttgacatggagatgactcagctcacccaggagaatgcagact

SEQ ID NO: 764643 - DNA, 120 bp, Artificial Sequence
  ENSG00000221955_17 (sequence is synthesized)
tcgccactcgggatcgctaccaccactcctccctcgtgaaccgggagcagctgatgcctcactactagatgcagtgctgggaccttcctcttttggagctgtcccatgtacagtggaccc

SEQ ID NO: 764644 - DNA, 120 bp, Artificial Sequence
  ENSG00000221955_18 (sequence is synthesized)
aagctcaggaccttcgtggagctgcttctccaacctgagaaactcaagacccatcctcccgctgtcactttggacaatggaaatctacattttcttttccctttttttttttttttgaga

SEQ ID NO: 764645 - DNA, 120 bp, Artificial Sequence
  ENSG00000221955_19 (sequence is synthesized)
aggcgtgagccaccatgcctggccagaaatctatgttttcttagaacatgtggaagaaggaaaaagacaaaaaaggaaatctggattctgaggaccacgtctcacccagggtgacatcag

SEQ ID NO: 764646 - DNA, 120 bp, Artificial Sequence
  ENSG00000221955_20 (sequence is synthesized)
gggtgacatcaggaatggtgctagcctctgcaacacgacacccagtctgaagagctctatacaggtactaagactagcaggggacaccaagactctgcacaaccagattgcttgtgcaga

SEQ ID NO: 764647 - DNA, 120 bp, Artificial Sequence
  ENSG00000221955_21 (sequence is synthesized)
gggccacaataagtgtatgttttatattttattgtattatttattcaaaaataaataatacactcacatgtttccacacccaaaagatatatagagtgaaaagtctccctccaatcctta

SEQ ID NO: 764648 - DNA, 120 bp, Artificial Sequence
  ENSG00000221955_22 (sequence is synthesized)
ttctccacctgctcagttcctgtctaccctggcctagaggtaaccactattctcatccgtacatccagcatttctttatggatatacaagcaaatgggaatgtagagtctcacattctct

SEQ ID NO: 764649 - DNA, 120 bp, Artificial Sequence
  ENSG00000221955_23 (sequence is synthesized)
ctttatacacaaaagttagcacgttatacacatgttctgcaccttgcttttttcccttaacaatctatcttggagacatttcatatcaattcatatgccatttgttcatttttttcattg

SEQ ID NO: 764650 - DNA, 120 bp, Artificial Sequence
  ENSG00000221955_24 (sequence is synthesized)
tataaatgtgttataatttatttcgccagttccacaatgatgagcatttggattctttccaatcttttgcaatgacaatcagctctgcagtgaataatcttgtacaaatgtgcaagcata

SEQ ID NO: 764651 - DNA, 120 bp, Artificial Sequence
  ENSG00000221955_25 (sequence is synthesized)
aagtgtatctctaggataaattcccaaaagtggaattgcaggatcaaaaggtacatgcatttgtaaactattattgtttagtgagggtctttttaattaaagaattaacatgaattgcct

SEQ ID NO: 764652 - DNA, 120 bp, Artificial Sequence
  ENSG00000221955_26 (sequence is synthesized)
cccatgtgcaaggatgacatgcaaattcgtgaagtgttccatatttttatatatatttaaaagtaaaaaaagaaacaaaacaatggtaccccttttttggtaagaaatatgccagaagag

SEQ ID NO: 764653 - DNA, 120 bp, Artificial Sequence
  ENSG00000221955_27 (sequence is synthesized)
aaatagtacaaaaagtgtcctcccaagccagctggggaagcttcatgactggcctttctctcattctgatacaagttccctttggaaacagaaggttgagtgagggaattggatggggct

SEQ ID NO: 764654 - DNA, 120 bp, Artificial Sequence
  ENSG00000221955_28 (sequence is synthesized)
ctgccatgcaagacgtgactttgcttctccttccccttctgccatgatttgtgatgcctcctcagccatgtggaactgagtcatggccggcttcaacatggggggcgacctcagggagcc

SEQ ID NO: 764655 - DNA, 120 bp, Artificial Sequence
  ENSG00000221955_29 (sequence is synthesized)
ggagccagtaccagaatggatgagtgtccagagtcctgggaggtgccaagggtgtcccattcctggctgggcttgggcctggattgtggcatgggaacctaacaactgggcacctccggg

SEQ ID NO: 764656 - DNA, 120 bp, Artificial Sequence
  ENSG00000221955_30 (sequence is synthesized)
agactcagatgttgctcctgcgtgcactccaccacactcggcccccagattcggctcatcagaagcttcctctaggctcatgtcctcttcccttcttatcctcagtcatcaagaacagag

SEQ ID NO: 764657 - DNA, 120 bp, Artificial Sequence
  ENSG00000221955_31 (sequence is synthesized)
atgaaatcttgcaccgtctcacccgggacatgaaccctgctttgtccagtgtggccacaccgtacacaccgcctgccatcagtcacttagtacctggcttggttatcaggtcaactgtca

SEQ ID NO: 764658 - DNA, 120 bp, Artificial Sequence
  ENSG00000221955_32 (sequence is synthesized)
agtagcagagggcttgagctcgaggccaataatagccaagtgctatgtcacgatgcctgcatcatccgcctcacttctcgtcacgtaggcgttttatcatcttacatcatcacaagaaga

SEQ ID NO: 764659 - DNA, 80 bp, Artificial Sequence
  ENSG00000221955_33 (sequence is synthesized)
cgcctcctcgccacctgggcccgagactcccggtgctggcgtggcaggggtgcccccgccgggacgggacagctgggacc

SEQ ID NO: 764660 - DNA, 120 bp, Artificial Sequence
  ENSG00000221955_34 (sequence is synthesized)
gatgcctgcctcgcctttgccttccaccatgattgaaagtttcctgaggcctccctggaagcagaagctgctatgcttcccgtacagcctgtggaaccataagccaattaaacctctttt

SEQ ID NO: 764661 - DNA, 120 bp, Artificial Sequence
  ENSG00000221955_35 (sequence is synthesized)
attgtggttggccagtttgttctcaaagtgtggtctctgggaacgcatgcggaatccagatttctaggccccaccccaagcctactgaaccaggaactctgaggaggggcccagaagttt

SEQ ID NO: 764662 - DNA, 120 bp, Artificial Sequence
  ENSG00000221955_36 (sequence is synthesized)
gtgtttagcaagccctgcagctgagtctggcagacgcttcatttgaggaccactgtgcaatccatatgaaatgtggtggtggattcagctgaaaccatggaatgaatgggggcgaggctg

SEQ ID NO: 764663 - DNA, 120 bp, Artificial Sequence
  ENSG00000221955_37 (sequence is synthesized)
gggatgtggaaactgtatcccagggatcagatctagacgactcagtggatgattgcatggggtgcaggtgggtgggtgctgggggggtagaaaggcacaggagcaggttctggcactggc

SEQ ID NO: 764664 - DNA, 120 bp, Artificial Sequence
  ENSG00000221955_38 (sequence is synthesized)
agttgccaggggagattgaaaagcagcctatgcgcagagctgcagctggagggcttgcggtgggacagcttccaggagagggtcccgcaggagaggaaggggcagccctggggaaggcga

SEQ ID NO: 764665 - DNA, 120 bp, Artificial Sequence
  ENSG00000221955_39 (sequence is synthesized)
atcaatccagcactgtctagagattaggagctggtgatgcaagtgcctgtggcgaaaccaatgcatcgcgccgattataactgataagctcagccttcttgtgggagtcatggccggctt

SEQ ID NO: 764666 - DNA, 120 bp, Artificial Sequence
  ENSG00000221955_40 (sequence is synthesized)
cagggtaaagggtttcctgaagtttctacctgctctaagtttctacccttgaggctgattgactagtccagtgagatcaaggaaatgaaaggcatttcacacaccagcaggatgccctgg

SEQ ID NO: 764667 - DNA, 120 bp, Artificial Sequence
  ENSG00000221963_0 (sequence is synthesized)
agttttgcaatcaattcctgttcaaaggccaccctactcttcctatccgtctttctccagcccagacactcacagccccctgccagaccaggggacctcggagaggcaaggacagaggtt

SEQ ID NO: 764668 - DNA, 120 bp, Artificial Sequence
  ENSG00000221963_1 (sequence is synthesized)
caggatcttcctctccctcgggacccaaggccacaaaggagagctccgtggagagaagaaaatcatttgactcctggggacacagatttgctgccacagaggctgatggacaaccaggcg

SEQ ID NO: 764669 - DNA, 120 bp, Artificial Sequence
  ENSG00000221963_2 (sequence is synthesized)
gagagagaaagtgaggctggtgttggtttgcaaagggatgaggatgacgctcctctgtgtgaagacgtggagctacaagacggagatctgtcccccgaagaaaaaatatttttgagagaa

SEQ ID NO: 764670 - DNA, 120 bp, Artificial Sequence
  ENSG00000221963_3 (sequence is synthesized)
tttcccagattgaaagaagatctgaaagggaacattgacaagctccgtgccctcgcagacgatattgacaaaacccacaagaaattcaccaaggctaacatggtggccacctctactgct

SEQ ID NO: 764671 - DNA, 120 bp, Artificial Sequence
  ENSG00000221963_4 (sequence is synthesized)
gtcatctctggagtgatgagcctcctgggtttagcccttgccccagcaacaggaggaggaagcctgctgctctccaccgctggtcaaggtttggcaacagcagctggggtcaccagcatc

SEQ ID NO: 764672 - DNA, 120 bp, Artificial Sequence
  ENSG00000221963_5 (sequence is synthesized)
gtgagtggtacgttggaacgctccaaaaataaagaagcccaagcacgggcggaagacatactgcccacctacgaccaagaggacagggaggatgaggaagagaaggcagactatgtcaca

SEQ ID NO: 764673 - DNA, 120 bp, Artificial Sequence
  ENSG00000221963_6 (sequence is synthesized)
gctgctggaaagattatctataatcttagaaacaccttgaagtatgccaagaaaaacgtccgtgcattttggaaactcagagccaacccacgcttggccaatgctaccaagcgtcttctg

SEQ ID NO: 764674 - DNA, 120 bp, Artificial Sequence
  ENSG00000221963_7 (sequence is synthesized)
accactggccaagtctcctcccggagccgcgtgcaggtgcaaaaggcctttgcgggaacaacactggcgatgaccaaaaatgctcgcgtgctgggaggtgtgatgtccgccttctccctt

SEQ ID NO: 764675 - DNA, 120 bp, Artificial Sequence
  ENSG00000221963_8 (sequence is synthesized)
ggctatgacttggccactctctcaaaggaatggaagcacctgaaggaaggagcaaggacaaagtttgcggaagagttgagagccaaggccttggagctggagaggaaactcacagaactc

SEQ ID NO: 764676 - DNA, 120 bp, Artificial Sequence
  ENSG00000221963_9 (sequence is synthesized)
acccagctctacaagagcttgcagcagaaagtgaggtcaagggccagaggggtggggaaggatttaactgggacctgcgaaaccgaggcttactggaaggagttaagggagcatgtgtgg

SEQ ID NO: 764677 - DNA, 120 bp, Artificial Sequence
  ENSG00000221963_10 (sequence is synthesized)
atgtggctgtggctgtgtgtgtgtctgtgtgtctgtgtgtatgtacagtttacatgaatgttcctcaggacatggcatacaatggccttggaggtccaaataatatcaagtacatcttgg

SEQ ID NO: 764678 - DNA, 120 bp, Artificial Sequence
  ENSG00000221963_11 (sequence is synthesized)
agatgagggtgcctgtcctggacagacctcggcatgccttctgtttctccttcaatgctccttaaggcctatgtgctgggaaaagggtcttccctgtttgtttgtttgtttgtttgtttg

SEQ ID NO: 764679 - DNA, 120 bp, Artificial Sequence
  ENSG00000221963_12 (sequence is synthesized)
cccaaaatgctgggattacaagcgtgagctaccctgcccagccgggtcttcccagttttaacaaagaggtcacagagccacaggcggagttaggaactaaattgtctcctcctcccaatt

SEQ ID NO: 764680 - DNA, 120 bp, Artificial Sequence
  ENSG00000221963_13 (sequence is synthesized)
aattcatatgttgaagtcctaaaccaaaatgtggctgtatttagagatggaccctttgggaggtaattagggttgactgaggccatagggtgaggtcctaacccgatggaattgacttct

SEQ ID NO: 764681 - DNA, 120 bp, Artificial Sequence
  ENSG00000221963_14 (sequence is synthesized)
ttataagaggaggaggaaatacaagagggcctccccacccctgctgcacacctacactgaaggaaggctatttgcagatgcagcaagaaggcagccatctgcaaggcagaagaagagagc

SEQ ID NO: 764682 - DNA, 120 bp, Artificial Sequence
  ENSG00000221963_15 (sequence is synthesized)
cctcaccaggaactgaataagtcagtcagtctgggacttccagcctctagaactgtgaaacaataaatttctgtggtgtaagcaactcaatctatagtagtttgttactattttgttata

SEQ ID NO: 764683 - DNA, 120 bp, Artificial Sequence
  ENSG00000221963_16 (sequence is synthesized)
gcaaccaaagatgactaagccagacaggttatgtcactcgccaagtgtcttagtctgtttgtgctgctataacaaaataccttagactgggtaatttacaaacaacagagatgtatccag

SEQ ID NO: 764684 - DNA, 120 bp, Artificial Sequence
  ENSG00000221963_17 (sequence is synthesized)
agatccacagttctggaggctgagaagtctaaaatcaaggcaccagcagattccacatctcgtgaaggctcactctctgcttcacagatggcactgtcttgctgtgttctcacatggcag

SEQ ID NO: 764685 - DNA, 120 bp, Artificial Sequence
  ENSG00000221963_18 (sequence is synthesized)
aaggggcaaacaagcccccctgggcctcttttataaaggcactaactctatgcctaaaggcagggccctcatgactctatcacctaccaaaaggctccacttctttatactattggaggg

SEQ ID NO: 764686 - DNA, 120 bp, Artificial Sequence
  ENSG00000221963_19 (sequence is synthesized)
gtagaaggaacttcctttctagaccttgaaggtttaagaatttgaatctataaaacaagctgacaatagacagattaacaggagaaaaagcatatacattttttaatgtgggccagatgg

SEQ ID NO: 764687 - DNA, 120 bp, Artificial Sequence
  ENSG00000221963_20 (sequence is synthesized)
cagaagcttaaataacaccccaagctacaggaagtgaggcctctgatggggaggtagtgacacaggctgtgggagggggtagggggaggaagtctgtggtgagcaaagtttgccttatta

SEQ ID NO: 764688 - DNA, 83 bp, Artificial Sequence
  ENSG00000221963_21 (sequence is synthesized)
agggggaggaagtctgtggtgagcaaagtttgccttattacactgataaagtgtaattacactaataaagctggatcacctga

SEQ ID NO: 764689 - DNA, 120 bp, Artificial Sequence
  ENSG00000221963_22 (sequence is synthesized)
aaaaaaaaaaaaaagaagaagaatacagtcatgtatctcttggtgacagggacgcattctgataaatgtgtcattaggcaattgcattgtagtgtgattatcacagattgtacttataca

SEQ ID NO: 764690 - DNA, 120 bp, Artificial Sequence
  ENSG00000221963_23 (sequence is synthesized)
tgtgattatcacagattgtacttatacaaaacttagatggcatagcctactgcatacctaggctatatgggagagcctattgctcccaggctacgcacctgtacagcatgtgactactga

SEQ ID NO: 764691 - DNA, 120 bp, Artificial Sequence
  ENSG00000221963_24 (sequence is synthesized)
atactataggcaattgcagcacaatgggaaatatttgtgtatctaaacatatgtaaacagagaaaaaggaaagtaaaaatatggcataaaagataagaattggctctcctgtacagggca

SEQ ID NO: 764692 - DNA, 120 bp, Artificial Sequence
  ENSG00000221963_25 (sequence is synthesized)
cttactacgaatggagcttgcagggctgagagttgctccagatgagtcagtgagtggtgaatgaatgtgaaggcctagggcattactgtatactactgtaggctttataaacacagcaca

SEQ ID NO: 764693 - DNA, 120 bp, Artificial Sequence
  ENSG00000221963_26 (sequence is synthesized)
cttagggtacacaaaatgcatattaaaacattttcttccttcagtatattaggcaataggaatttttcaagtccactataaatcttatcaaaccatggttgtatatgcagttgaccgaaa

SEQ ID NO: 764694 - DNA, 120 bp, Artificial Sequence
  ENSG00000221963_27 (sequence is synthesized)
cattgttattggacacataactatagttgaaagaataagcaaaaagtctatctaggtgtgctgtcttgagcaacttttaattattctcctgtcctgcaatatgagttaatcttctctgat

SEQ ID NO: 764695 - DNA, 120 bp, Artificial Sequence
  ENSG00000221963_28 (sequence is synthesized)
cgatgtagattccaggaaggggtgtccaggacaattaccttccttctggagaaacttcccttaatcaaataagagaacttcaaagaaaatccctccctgtgctttggaagggaagggagg

SEQ ID NO: 764696 - DNA, 120 bp, Artificial Sequence
  ENSG00000221963_29 (sequence is synthesized)
tgggcagcagtgggtcagagatagacctttgttctcttatttctgaggcccttcagtctcctttattcaaagcactcagcatgccaaagcaccctattttagggtatctttttctgagcc

SEQ ID NO: 764697 - DNA, 120 bp, Artificial Sequence
  ENSG00000221963_30 (sequence is synthesized)
ctaaacactgtgttggggatgtcaactgtgacaggaaaatatcttggggccccagaatcactaaggaaaactcaagcttagggaaacttcttagggcaaacccacctcccactctattca

SEQ ID NO: 764698 - DNA, 69 bp, Artificial Sequence
  ENSG00000221963_31 (sequence is synthesized)
gggaaacttcttagggcaaacccacctcccactctattcaaagttatctctctgctcactgagatagat

SEQ ID NO: 764699 - DNA, 85 bp, Artificial Sequence
  ENSG00000221963_32 (sequence is synthesized)
attagtatgccccaaccatcttggccacatgtcatcaggacttcctgagtctgtgtcacagtgtgtcctcaaccttggcaaaata

SEQ ID NO: 764700 - DNA, 120 bp, Artificial Sequence
  ENSG00000221963_33 (sequence is synthesized)
aactttctaaattaactgagacctgtctcggattttctgggttcacattttggaaaccatgaatggattctgggtggagatgcccctgacccttgacaaatctatcggtgcttggtacca

SEQ ID NO: 764701 - DNA, 72 bp, Artificial Sequence
  ENSG00000221963_34 (sequence is synthesized)
gaggactccctccagaaaatccctgatctcttaaaatttggtagagatcggaagtttattttgctgtacaac

SEQ ID NO: 764702 - DNA, 120 bp, Artificial Sequence
  ENSG00000221963_35 (sequence is synthesized)
aaaatttggtagagatcggaagtttattttgctgtacaacacctctttttttggagttttacttgctcccaacaaggaaggcaagttttcctgctttcatgatgatggaaggcaggtgat

SEQ ID NO: 764703 - DNA, 120 bp, Artificial Sequence
  ENSG00000221963_36 (sequence is synthesized)
gtttttatggagtttcagctttcttccaatgcacttagagcactcagaaattgtataatttgtgtgaccattgttagttttgcttaactgttttgttgtttgtttctgtcttagtcaaat

SEQ ID NO: 764704 - DNA, 120 bp, Artificial Sequence
  ENSG00000221963_37 (sequence is synthesized)
ctgaaggggaaccctaaattacggggtcaaggactctgaagtggtaggaaaacagccagcttaaaaaactttttttaaattttaattactataggggctttatttacataacacagccag

SEQ ID NO: 764705 - DNA, 120 bp, Artificial Sequence
  ENSG00000221963_38 (sequence is synthesized)
taaagaagctcagtggttgaaagtctgcttaactgaaacagtaacatccatgatgtgtgttttgtgcatgtttgtatttgaaaggccttcatgtttttgtttcttgtttgtttttctctc

SEQ ID NO: 764706 - DNA, 120 bp, Artificial Sequence
  ENSG00000221963_39 (sequence is synthesized)
ctaagaccttgtcttttttttgtagcaaaagttttttttttttttttccttttacttctcagttgactgaattctgttttcaccggattttttgactaaaatagctattgcaacagaggc

SEQ ID NO: 764707 - DNA, 120 bp, Artificial Sequence
  ENSG00000221963_40 (sequence is synthesized)
tactcttgggttaaggaagaatgtagtttcgttttatgtttaatatcgctcaaagaaaaataaaagcatctccctctaacaccaccagacttttcctctctgtaccttatcatgtaaatt

SEQ ID NO: 764708 - DNA, 120 bp, Artificial Sequence
  ENSG00000221963_41 (sequence is synthesized)
ttgctatttgattttcacctgggttgtttcctttaatgtgcaaaaatttaaggctatttagctgacaactgcctagggttgtaaaacaggttatcaagaatctgaaagtctaagatagga

SEQ ID NO: 764709 - DNA, 120 bp, Artificial Sequence
  ENSG00000221963_42 (sequence is synthesized)
aaaaaaagtgggggggcattataaatctataaaatgtacttctattggcatgcctaatacgtctttatatgtatgtatgtgttgtgtacacgatgttttagtgctaaaaatatgtaaaag

SEQ ID NO: 764710 - DNA, 120 bp, Artificial Sequence
  ENSG00000221963_43 (sequence is synthesized)
aatatgtaaaagagctctacttggcttaaagaaaaataaaagtgcttaaatcagatactaaaaaagaaaaggctagtcaaatgctttttcaaatttatgtaacttaagtaaaatctttaa

SEQ ID NO: 764711 - DNA, 89 bp, Artificial Sequence
  ENSG00000221963_44 (sequence is synthesized)
tattaatcaaacagttttatacttatccctgccaaataccagaaggtgtcaaaatttggcataggggttataaaactataaacccagcc

SEQ ID NO: 764712 - DNA, 120 bp, Artificial Sequence
  ENSG00000221963_45 (sequence is synthesized)
aacagttttatacttatccctgccaaataccagaaggtgtcaaaatttggcataggggttataaaactataaacccagcccaaaacagaatgatctttgcttgtgtaatttttaataaat

SEQ ID NO: 764713 - DNA, 120 bp, Artificial Sequence
  ENSG00000221963_46 (sequence is synthesized)
aatttagtaagattaccataacttctaatcctgtggctttaggcagtttagtccacagacaataaggaggtttgttttgggaaaggactgttattgtcattgtttcgaagctgaacttaa

SEQ ID NO: 764714 - DNA, 120 bp, Artificial Sequence
  ENSG00000221963_47 (sequence is synthesized)
gcccaggaatgaacaaggacagcttggaagttaagagcaaggtggagtcagttaggtcaaatcgtttttcactgtctcagttgtaattttgcaatggaagtttcataactttaaatcatg

SEQ ID NO: 764715 - DNA, 120 bp, Artificial Sequence
  ENSG00000221963_48 (sequence is synthesized)
ttgcaatggaagtttcataactttaaatcatgactatcacagtttttataaataatctaggtaaacaattaataaaataactaggtaaatgtaatgggataaatacttatagaccaactg

SEQ ID NO: 764716 - DNA, 120 bp, Artificial Sequence
  ENSG00000221963_49 (sequence is synthesized)
gtcatattaaattaaataatagataatttattatttgggtattttccaataaatatatcttgtaggaaaacattgttgcttaaaaaaaagtgtgtccttttttaaaaaaatggtgaacaa

SEQ ID NO: 764717 - DNA, 120 bp, Artificial Sequence
  ENSG00000221963_50 (sequence is synthesized)
tttaaaaaaatggtgaacaagttttgtctaattcaaagcttattaaaaggttatatataaaacaaggtaaaaggaaccagaaaagaaaaaaaatgtaaataaagttataaaaataaagaa

SEQ ID NO: 764718 - DNA, 120 bp, Artificial Sequence
  ENSG00000221963_51 (sequence is synthesized)
ttttttcaaggttaaaaagctgaaaaagaaataattttatataagaaagaattttatatggtaaatttagtcctaaaataaaataactggttgtttaacaaggagggatgttcaggacaa

SEQ ID NO: 764719 - DNA, 89 bp, Artificial Sequence
  ENSG00000221963_52 (sequence is synthesized)
atgataagatttcccaaaagcttttatataatcaagttgtcatattattattaagttttggtttgcttagggaagaaagagctaatttt

SEQ ID NO: 764720 - DNA, 120 bp, Artificial Sequence
  ENSG00000221963_53 (sequence is synthesized)
attaagttttggtttgcttagggaagaaagagctaatttttaaaaaatcaaggttattacatccatgtatcttcctgtgtatgcttttaaagtccttgtaacattgagttacagggcttt

SEQ ID NO: 764721 - DNA, 120 bp, Artificial Sequence
  ENSG00000221963_54 (sequence is synthesized)
aactcctgtgtctgaaaaatcacaaacactgatgacaatcaaagcctcatcttaaggccccgtagaagatgccaatcaaaataaactgcattcctgaggcactaggcaagaaattaaagc

SEQ ID NO: 764722 - DNA, 120 bp, Artificial Sequence
  ENSG00000221963_55 (sequence is synthesized)
caactcctcaaggcccagggactattgcggaagaggtgggcgcgtaagattgtaagggccgattttgaaagatccagtaagttcagtttctctatgaactaatcattcaagtcaaaggca

SEQ ID NO: 764723 - DNA, 120 bp, Artificial Sequence
  ENSG00000221963_56 (sequence is synthesized)
ggcacactgatgcaaaatcagtatatggacccctgtgtctgattagcaaggttttcttgaagcattaaccaactccttcataaaggttataaaaggcttatggaagttatattttataat

SEQ ID NO: 764724 - DNA, 120 bp, Artificial Sequence
  ENSG00000221963_57 (sequence is synthesized)
caagattaaatcttatagtttgtttacaaaattttgaaaatcaaatgtgattggcttcaggctgtttttattagggcttcttgtttagaaagttaagtcacctctctcaaagaatgaagg

SEQ ID NO: 764725 - DNA, 120 bp, Artificial Sequence
  ENSG00000221963_58 (sequence is synthesized)
tttttgctttttttgaaatccttgaattatcacttggattaaataaatgactttacgatgacctgtaattttattttgtaatgtcaagtgttttaaaccttttgtatttgacaagctttc

SEQ ID NO: 764726 - DNA, 120 bp, Artificial Sequence
  ENSG00000221963_59 (sequence is synthesized)
tttgtatttgacaagctttccaaaatcaaattataaattatgtatttttctaacctaattaatcctttaagatcttagtttccctaaagtcctaaaatgacataatttggcttatttggt

SEQ ID NO: 764727 - DNA, 120 bp, Artificial Sequence
  ENSG00000221963_60 (sequence is synthesized)
atcagtaataatcataattgttatattaaaattattgtgtgccacagaggtaaaaaatttccttgtcagttttgtcttttgactatggctgccttaaaacttttttcttccatgcacaat

SEQ ID NO: 764728 - DNA, 120 bp, Artificial Sequence
  ENSG00000221963_61 (sequence is synthesized)
atggctgccttaaaacttttttcttccatgcacaattgttgttttggtcctcttttttaaatatatttttattattatttttgagatggggactcactctgttgcccaggctggagtgca

SEQ ID NO: 764729 - DNA, 83 bp, Artificial Sequence
  ENSG00000221963_62 (sequence is synthesized)
cctcaggtgatcagcccaccttggcctctcaaagtgctgaaattacagatgtgagccacacacctggcctagtaaaactccaa

SEQ ID NO: 764730 - DNA, 81 bp, Artificial Sequence
  ENSG00000221963_63 (sequence is synthesized)
gaaaagtttcaggactcatggagagctaaaatgttcatgagtatcaagcagaacaggaattaactgcatagactgaaccaa

SEQ ID NO: 764731 - DNA, 120 bp, Artificial Sequence
  ENSG00000221963_64 (sequence is synthesized)
tatcaagcagaacaggaattaactgcatagactgaaccaatctttttgactttttgcttaaaatgtttgctgatcctttgttttgtgtttcagtcttaaaacttttcttttgagctattg

SEQ ID NO: 764732 - DNA, 70 bp, Artificial Sequence
  ENSG00000221963_65 (sequence is synthesized)
atcagaaactatttgtaagtattcttaacttatggtgatacagttatttgcataagtgcaataagaatct

SEQ ID NO: 764733 - DNA, 120 bp, Artificial Sequence
  ENSG00000221963_66 (sequence is synthesized)
tttgcataagtgcaataagaatctgttctaatttgtaacaggacacgattggagaaattggttgttttactaagactttgactggaatggtgtgcttttctttaaggaatcaaacttgac

SEQ ID NO: 764734 - DNA, 120 bp, Artificial Sequence
  ENSG00000221963_67 (sequence is synthesized)
atcaaacttgacttatggaaccaataaagtccttggaaaaactggccccatattttgtgtacacagtctccgtacaagatttctgacctgtagtaagtaaagaatgtcactttctgacag

SEQ ID NO: 764735 - DNA, 120 bp, Artificial Sequence
  ENSG00000221963_68 (sequence is synthesized)
gccccaggtttacctcagaacctcaagaggagaggaaattcacccaatttataagtatttgatggcacaaatccatggctgggcatggctttaagaaagtcttatctgagattcctcctg

SEQ ID NO: 764736 - DNA, 120 bp, Artificial Sequence
  ENSG00000221963_69 (sequence is synthesized)
tggaacaaagttaattggttccagagattcaaagccagagttgctgtcagttcattggtagagatgccatcactgggcaagtgttctgaaaacatcttatctgaataacagcagtcctgg

SEQ ID NO: 764737 - DNA, 120 bp, Artificial Sequence
  ENSG00000221963_70 (sequence is synthesized)
agaacatctagggatctagcaaagcgagagatacatgaaggacataaaaacgtttttagaaagtccttggaaacagttctcatttcagacatgtaagcatgagctaggatgaaaagtgat

SEQ ID NO: 764738 - DNA, 120 bp, Artificial Sequence
  ENSG00000221963_71 (sequence is synthesized)
ttcatcctggtatctgcaattttcacattcattaggtttcaacatataaactttcaggggacacagacattcagactatagcaccaagctgtagaagctacatagttgtagaccagggtc

SEQ ID NO: 764739 - DNA, 120 bp, Artificial Sequence
  ENSG00000221963_72 (sequence is synthesized)
agcaacccaagaagcctgacttccaagctgtgcttttaacttccccaccatgttgcacctaaagctttggagttttcctgtgattagtgtttttggtgttgttttattttttttcttaca

SEQ ID NO: 764740 - DNA, 120 bp, Artificial Sequence
  ENSG00000221963_73 (sequence is synthesized)
ggaactcttgcaagaagaaaggactatgagttcaactttagagggagccatggggactaaacaaaattctgaggccccctcaaccatctaaatggacttccttctgggccaggacactcg

SEQ ID NO: 764741 - DNA, 120 bp, Artificial Sequence
  ENSG00000221963_74 (sequence is synthesized)
aaaattaaacctgaaagactggttcaggccatgatgggaagtgggagtcgaacatgcctcatcataccctccagcattaacatcaacacagaccttaaggctgataagaagcatttacaa

SEQ ID NO: 764742 - DNA, 90 bp, Artificial Sequence
  ENSG00000221963_75 (sequence is synthesized)
tctgcatgataaaactttggtctccacaacctcttacaacccaggcattcctttctatcgataatttgttatatctacctataatctaga

SEQ ID NO: 764743 - DNA, 120 bp, Artificial Sequence
  ENSG00000221963_76 (sequence is synthesized)
caatcagaaaattgttatatctacctataatctagaagcccccacatcaagttgttttgcctttctggacaggaccaatgtatatcttaaatgtatttgattgatctctcatgtctccct

SEQ ID NO: 764744 - DNA, 120 bp, Artificial Sequence
  ENSG00000221963_77 (sequence is synthesized)
aaaatgtataaaaccacgctgttccccgaccacctggagcacatgttctcagggtctcctgagggctgtgtcacaggccatgttcacttacatttggctcagaataaatctcttcaaata

SEQ ID NO: 764745 - DNA, 120 bp, Artificial Sequence
  ENSG00000221968_0 (sequence is synthesized)
ggcagggcggggccggagcagcgggcggcggcggaggcggcgcccgggagcgctcttcgcttccctcggggtcttgctcggacctcggccaccgcctgggatccccaggactcgtgcgtg

SEQ ID NO: 764746 - DNA, 120 bp, Artificial Sequence
  ENSG00000221968_1 (sequence is synthesized)
ccaccgcctgggatccccaggactcgtgcgtgcagcatgggcggcgtcggggagccgggaccgcgggagggacccgcgcagccgggggcgccgctgcccaccttctgctgggagcagatc

SEQ ID NO: 764747 - DNA, 120 bp, Artificial Sequence
  ENSG00000221968_2 (sequence is synthesized)
agcagatccgcgcgcacgaccagcccggcgacaagtggctggtcatcgagcgccgcgtctacgacatcagccgctgggcacagcggcacccagggggcagccgcctcatcggccaccacg

SEQ ID NO: 764748 - DNA, 120 bp, Artificial Sequence
  ENSG00000221968_3 (sequence is synthesized)
gcgctgaggacgccacggatgccttccgtgccttccatcaagatctcaattttgtgcgcaagttcctacagcccctgttgattggagagctggctccggaagaacccagccaggatggac

SEQ ID NO: 764749 - DNA, 120 bp, Artificial Sequence
  ENSG00000221968_4 (sequence is synthesized)
ccctgaatgcgcagctggtcgaggacttccgagccctgcaccaggcagccgaggacatgaagctgtttgatgccagtcccaccttctttgctttcctactgggccacatcctggccatgg

SEQ ID NO: 764750 - DNA, 120 bp, Artificial Sequence
  ENSG00000221968_5 (sequence is synthesized)
aggtgctggcctggctccttatctacctcctgggtcctggctgggtgcccagtgccctggccgccttcatcctggccatctctcaggctcagtcctggtgtctgcagcatgacctgggcc

SEQ ID NO: 764751 - DNA, 120 bp, Artificial Sequence
  ENSG00000221968_6 (sequence is synthesized)
atgcctccatcttcaagaagtcctggtggaaccacgtggcccagaagttcgtgatggggcagctaaagggcttctccgcccactggtggaacttccgccacttccagcaccacgccaagc

SEQ ID NO: 764752 - DNA, 120 bp, Artificial Sequence
  ENSG00000221968_7 (sequence is synthesized)
cagcacctgtacttcttcctgatcggcccgccgctgctcaccctggtgaactttgaagtggaaaatctggcgtacatgctggtgtgcatgcagtgggcggatttgctctgggccgccagc

SEQ ID NO: 764753 - DNA, 120 bp, Artificial Sequence
  ENSG00000221968_8 (sequence is synthesized)
ttctatgcccgcttcttcttatcctacctccccttctacggcgtccctggggtgctgctcttctttgttgctgtcagggtcctggaaagccactggttcgtgtggatcacacagatgaac

SEQ ID NO: 764754 - DNA, 120 bp, Artificial Sequence
  ENSG00000221968_9 (sequence is synthesized)
cacatccccaaggagatcggccacgagaagcaccgggactgggtcagctctcagctggcagccacctgcaacgtggagccctcacttttcaccaactggttcagcgggcacctcaacttc

SEQ ID NO: 764755 - DNA, 120 bp, Artificial Sequence
  ENSG00000221968_10 (sequence is synthesized)
cagatcgagcaccacctcttccccaggatgccgagacacaactacagccgggtggccccgctggtcaagtcgctgtgtgccaagcacggcctcagctacgaagtgaagcccttcctcacc

SEQ ID NO: 764756 - DNA, 120 bp, Artificial Sequence
  ENSG00000221968_11 (sequence is synthesized)
gcgctggtggacatcgtcaggtccctgaagaagtctggtgacatctggctggacgcctacctccatcagtgaaggcaacacccaggcgggcagagaagggctcagggcaccagcaaccaa

SEQ ID NO: 764757 - DNA, 120 bp, Artificial Sequence
  ENSG00000221968_12 (sequence is synthesized)
gccagcccccggcgggatcgataccctcacccctccactggccagcctgggggtgccctgcctgccctcctggtactgttgtcttcccctcggccccctcacatgtgtattcagcagccc

SEQ ID NO: 764758 - DNA, 120 bp, Artificial Sequence
  ENSG00000221968_13 (sequence is synthesized)
tatggccttggctctgggcctgatgggacaggggtagagggaaggtgagcatagcacattttcctagagcgagaattgggggaaagctgttatttttatattaaaatacattcagatgta

SEQ ID NO: 764759 - DNA, 120 bp, Artificial Sequence
  ENSG00000221968_14 (sequence is synthesized)
cagcagcggaggttctgtccagtcccaggactgtcggcgtccctcttgacagggccacctgctctctgccgattgccatctccagcatgttggacaatcttcactggactctttgaggaa

SEQ ID NO: 764760 - DNA, 120 bp, Artificial Sequence
  ENSG00000221968_15 (sequence is synthesized)
tgtcagggtcctggaaagccactggttcgtgtggatcacacagatgaaccacatccccaaggagatcggccacgagaagcaccgggactggctggcagccacctgcaacgtggagccctc

SEQ ID NO: 764761 - DNA, 120 bp, Artificial Sequence
  ENSG00000221968_16 (sequence is synthesized)
caaccagcagcacctgtacttcttcctgagtgagtgtccatctgtccttctggggtgggggagtgcctgggcctgcactgtcctccctgctgtcctggaccactcccagccacttcctgg

SEQ ID NO: 764762 - DNA, 120 bp, Artificial Sequence
  ENSG00000221968_17 (sequence is synthesized)
ggcggggcacgtctgtcaggtctccctggtcatggcatcctcccagcctctgcagtctgtacacactctcccagcagcatgcctttgccccagctgtctcccgtgcctgggacaccttgc

SEQ ID NO: 764763 - DNA, 120 bp, Artificial Sequence
  ENSG00000221968_18 (sequence is synthesized)
agccacgggccatcacagccctgctgggagcttccccaagccccacgtagaatttcttcttgccctcactagagtggtccggagccctagagtctttgggcagttgttggggcggacaga

SEQ ID NO: 764764 - DNA, 120 bp, Artificial Sequence
  ENSG00000221968_19 (sequence is synthesized)
gtgaggactcaagtctggccctgacttgcggtgaagggtggtgggaggtggtggggtaagggcagcctggggaggcttggacacagaattgggggtgatatggggtcattcagctggatg

SEQ ID NO: 764765 - DNA, 120 bp, Artificial Sequence
  ENSG00000221968_20 (sequence is synthesized)
tgaccagcaccaacgtcccaggggcattcctggagtaacagagcccctcactctggcgcccactcaccttggcagcccagccccactcctgaacactctcatgccccttcttgcagtcgg

SEQ ID NO: 764766 - DNA, 71 bp, Artificial Sequence
  ENSG00000221968_21 (sequence is synthesized)
aagaccagctgggcaacatggcaaacctcatctctacaaaaaataaaaataaaaaattagctgggcatggt

SEQ ID NO: 764767 - DNA, 78 bp, Artificial Sequence
  ENSG00000221968_22 (sequence is synthesized)
gctgggcaacatggcaaacctcatctctacaaaaaactaacagctacgagagaggctaaggtgggaggatcacctgag

SEQ ID NO: 764768 - DNA, 85 bp, Artificial Sequence
  ENSG00000221968_23 (sequence is synthesized)
tggggtcagtagaaccccaagagtcttcttccctcccagctcccctgtacaccagccccagctctgcaggtagctgggggcccag

SEQ ID NO: 764769 - DNA, 120 bp, Artificial Sequence
  ENSG00000221968_24 (sequence is synthesized)
tgtacaccagccccagctctgcaggtagctgggggcccagacagcttcctggggacccccagccttccctctgcccttttttctaccagttttgctgcccctccttcaagactcatgtcc

SEQ ID NO: 764770 - DNA, 120 bp, Artificial Sequence
  ENSG00000221968_25 (sequence is synthesized)
agagggggtgagatctgcacttatacagccccctcctctgtaatgagtgagccaagtcagcccaggttattccagaaggggcaccctaccagccccccagtccccaagctgccctgggcc

SEQ ID NO: 764771 - DNA, 120 bp, Artificial Sequence
  ENSG00000221968_26 (sequence is synthesized)
tataaaagcaggcaaggggacccctagtagatcatgtaggtgttacctcttagtgggtgctggaggggcctgaagtgctttcttcccccagggtggtaggagaatgtcctggcagtgact

SEQ ID NO: 764772 - DNA, 120 bp, Artificial Sequence
  ENSG00000221968_27 (sequence is synthesized)
tcagggcccgctgtcacttccgttttaagactcaccagctggtaggctcattagcaagaggacaataggaggcccctgtcctcagtcagctttcttcaaaggtgtttcctttagcaactg

SEQ ID NO: 764773 - DNA, 120 bp, Artificial Sequence
  ENSG00000221968_28 (sequence is synthesized)
ggaggcctcccttctccagacccatggggacaacaccacccagctactggttctataagctgctgtatggctctggctagcccattcagagaaagcctctgaaagtacaaggaaaaaaat

SEQ ID NO: 764774 - DNA, 120 bp, Artificial Sequence
  ENSG00000221968_29 (sequence is synthesized)
cagtccaagagctgtgaacaattagtgagccgattacaataccaagaccacaggcagacctggaaggctaagtgagcccaggtgtgaagttcaagcttactttacttctgggccacttcc

SEQ ID NO: 764775 - DNA, 120 bp, Artificial Sequence
  ENSG00000221968_30 (sequence is synthesized)
tggctggtctctttccctggcccttatctttctcctggtctgtcttctcttctcaccccctttctttactctttcttccttctcctgcatcgtactccacccccactccagctattacac

SEQ ID NO: 764776 - DNA, 120 bp, Artificial Sequence
  ENSG00000221968_31 (sequence is synthesized)
cagctattacacagaatcgcgagaatgttggattattcattttatttatgatgttttcttttttgtaaaaatagagacaaggtctcactatgtggcccaggctggtcttgaactcctggc

SEQ ID NO: 764777 - DNA, 80 bp, Artificial Sequence
  ENSG00000221968_32 (sequence is synthesized)
agcaatcctcgtgccttggcctcttaattttatttactttaaaaaaaaaattaggctgggcgcggtggctcacacctata

SEQ ID NO: 764778 - DNA, 90 bp, Artificial Sequence
  ENSG00000221968_33 (sequence is synthesized)
gtgggcagatcaactgaggtcaggagttaaagaccagcttggccacctggggtcaggagtttgagaccagctactccggaggctgagacc

SEQ ID NO: 764779 - DNA, 76 bp, Artificial Sequence
  ENSG00000221968_34 (sequence is synthesized)
ttgcatgttatgttttgtgctcctgcttcctgctttgtaagtcaaatcagtttaactgttcaagtgtcttccttgc

SEQ ID NO: 764780 - DNA, 120 bp, Artificial Sequence
  ENSG00000221968_35 (sequence is synthesized)
gtaagtcaaatcagtttaactgttcaagtgtcttccttgcaaacccccaaggactcaatgtgtgtcgcccttgactgatccccccgccccgtgacccagtggtcctcagttccaggtttt

SEQ ID NO: 764781 - DNA, 120 bp, Artificial Sequence
  ENSG00000221968_36 (sequence is synthesized)
cccacctacccttcacccactgcttatgtttataaaaacggggtaaatcaaatgttcgtgacccagatcttattctacatgcagtggaaacttgtatgacttaagctttttggaaaagca

SEQ ID NO: 764782 - DNA, 120 bp, Artificial Sequence
  ENSG00000221968_37 (sequence is synthesized)
gaaccttttttcgtggttcaagaaatcaaagtcttcccgggaggtctttctgtaaatccagagctgcagatgtttgaccgtgttcagagaggggcccttgtgctgggtgaagtggatggg

SEQ ID NO: 764783 - DNA, 120 bp, Artificial Sequence
  ENSG00000221968_38 (sequence is synthesized)
gcacagcaggcaatgggtgaaaagcaggacaacctggggccctgggaggaccagggagggcccatgtctttgactgttcatcagccggctgacttcctgtccgcctgtcgtctgctctgc

SEQ ID NO: 764784 - DNA, 120 bp, Artificial Sequence
  ENSG00000221968_39 (sequence is synthesized)
ccccgggcatacggctgccgtggcaggaggtggtgcctcgggggacagtacctgcccatgaaggcaaacagggtgcacatgtgcgtgcaacagtgtggctcacatgtatgcgtgcaacag

SEQ ID NO: 764785 - DNA, 120 bp, Artificial Sequence
  ENSG00000221968_40 (sequence is synthesized)
tgtggctcacatgtgtgcgcgcagcaggagagcgagtgtgcccgtgactgtacgtgtggtgggggggggttgaggaacagggggggtgtgggtctctctcggtgagggtgtcttcccagg

SEQ ID NO: 764786 - DNA, 120 bp, Artificial Sequence
  ENSG00000221968_41 (sequence is synthesized)
aggagttgctgggctgactctgccaggcatctgtgtccctggcagggtcttccccaacacaccctgcatgacaccttcgtcactaaaatcagcctcgtgagctggcagggcaaggaccct

SEQ ID NO: 764787 - DNA, 120 bp, Artificial Sequence
  ENSG00000221968_42 (sequence is synthesized)
gttcctttactcagctgagaaaaccagagagggtggtggcctgtcctgggctctgaggcaaatcaggcagaagggttggatgcctgaggtcctcctcccacccaccaggcctccagacct

SEQ ID NO: 764788 - DNA, 120 bp, Artificial Sequence
  ENSG00000221968_43 (sequence is synthesized)
tgctgctcttctttgttgctgtcaggtatggcagggagtggcgaggtcacacacaggcgacaggtgacccccactgcagccccccaccagagcttcccttttcccgtctgcagaatgggg

SEQ ID NO: 764789 - DNA, 120 bp, Artificial Sequence
  ENSG00000221968_44 (sequence is synthesized)
ccagtggtactgcctccctggcttgctggtggaatcacataaacacaagcgtggcaggagcccagggtcggtgggtttagggagcgtggcctggcttgtaagtggcccggtgggtgtcgg

SEQ ID NO: 764790 - DNA, 120 bp, Artificial Sequence
  ENSG00000221968_45 (sequence is synthesized)
agctgctctggactcagcctcacagtggacactgctccattcagattctttaaacactggcaagggggcgatggccacaatcctattgtacagataaggaagtcaaggccacttggggac

SEQ ID NO: 764791 - DNA, 120 bp, Artificial Sequence
  ENSG00000221968_46 (sequence is synthesized)
atggggcagctaaaggtgagggtggggtgggtggtcagccaggtgctgggtggcgctgggtctgcccaagtgtgtgggcacagtcgggggcacagcctgccctgagagccccctcctcct

SEQ ID NO: 764792 - DNA, 120 bp, Artificial Sequence
  ENSG00000221968_47 (sequence is synthesized)
gccccgcagagattggggcccatggtttgaaggctgttcacaggcaccccgagacagcgtcccccctctgggcgcactggatttgacgttgcaggacgcgcggctggaagccccccaggc

SEQ ID NO: 764793 - DNA, 120 bp, Artificial Sequence; identical to SEQ ID NO: 753533
  ENSG00000221970_0 (sequence is synthesized)

SEQ ID NO: 764794 - DNA, 120 bp, Artificial Sequence; identical to SEQ ID NO: 753534
  ENSG00000221970_1 (sequence is synthesized)

SEQ ID NO: 764795 - DNA, 120 bp, Artificial Sequence
  ENSG00000221970_2 (sequence is synthesized)
ctggcgaacctcctgcatccagccaagcccatctcctttgctggctgcatgacgcagacctttctctgtttgagttttggacacagcgaatgtctcctgctggtgctgatgtcctacgat

SEQ ID NO: 764796 - DNA, 120 bp, Artificial Sequence; identical to SEQ ID NO: 753536
  ENSG00000221970_3 (sequence is synthesized)

SEQ ID NO: 764797 - DNA, 120 bp, Artificial Sequence; identical to SEQ ID NO: 753537
  ENSG00000221970_4 (sequence is synthesized)

SEQ ID NO: 764798 - DNA, 120 bp, Artificial Sequence; identical to SEQ ID NO: 753538
  ENSG00000221970_5 (sequence is synthesized)

SEQ ID NO: 764799 - DNA, 120 bp, Artificial Sequence; identical to SEQ ID NO: 753539
  ENSG00000221970_6 (sequence is synthesized)

SEQ ID NO: 764800 - DNA, 120 bp, Artificial Sequence
  ENSG00000221970_7 (sequence is synthesized)
cacctaagttcactactctctttatatctgagactgaatgaaccaagagactctgcaaagcattcctttttcctgcctgggaagtatttagtttttgatgcatttgttatacttaacatt

SEQ ID NO: 764801 - DNA, 120 bp, Artificial Sequence
  ENSG00000221970_8 (sequence is synthesized)
ttttaatttaagcacttattgagttgagaatgtcggggaaagatttattttgtacactgctatgagtccagaagtttaaaacagacactccacctgtgacttagtcaggtatgctcagta

SEQ ID NO: 764802 - DNA, 120 bp, Artificial Sequence
  ENSG00000221970_9 (sequence is synthesized)
gtagaggaatagcagttattaccagataaagtcatatctataaaaagtttttaaaaatacagccacaggcagagactccagaacccattgatacctctgtccattttcatcctcatttgg

SEQ ID NO: 764803 - DNA, 120 bp, Artificial Sequence
  ENSG00000221970_10 (sequence is synthesized)
atgtttcccctcaattgtacttcctttcttataagcagtaaatgtacctaagtgcctacttcagcttggagggaaattgatttttataaaatcctacaaactgacaatttctgttgtcag

SEQ ID NO: 764804 - DNA, 120 bp, Artificial Sequence
  ENSG00000221970_11 (sequence is synthesized)
agagagtgaatccataaacattcagctggcaatctgaagcaattacacaacaaaatccactttccaacctgccctgagactgtgatggtcacttgtttctactcttctcacctcctccag

SEQ ID NO: 764805 - DNA, 120 bp, Artificial Sequence
  ENSG00000221970_12 (sequence is synthesized)
gggactgtctatgattgtctctaaataagcacatgctcttcacttagaggaagttagtaccaccacacaacttttcactgctggggacgaatggaaagccccacacagagacaattcaat

SEQ ID NO: 764806 - DNA, 120 bp, Artificial Sequence
  ENSG00000221970_13 (sequence is synthesized)
ggaaaaaagcgttttaataataatgttaatagttagcattattataaattactctgcaccatccactgcacattgataggtactttatagagataacctcagtttatcattatagccaat

SEQ ID NO: 764807 - DNA, 120 bp, Artificial Sequence
  ENSG00000221970_14 (sequence is synthesized)
tcatttcccattattatcccattttatagatgtgaacttcaagcagatggtaaatgttagactcatacccaaacaatctggctcccaagccttctttacttaaccaggacaatgtgggac

SEQ ID NO: 764808 - DNA, 120 bp, Artificial Sequence
  ENSG00000221970_15 (sequence is synthesized)
tttattagcaacatttcaaattaagaataagtctaaccaatcctaacgtaggatatgttaagtgaatgtgggtttcttccccatctagaatgtgccatgatgaggccaggagagtcagag

SEQ ID NO: 764809 - DNA, 120 bp, Artificial Sequence
  ENSG00000221970_16 (sequence is synthesized)
attatttatggaaggcttcttatcctgtttgacgagtcctgtgggcatggctgcaaaggaggttaagagattcagaggaacacagaacacagacagggtgggagtagaggctgttctcaa

SEQ ID NO: 764810 - DNA, 120 bp, Artificial Sequence
  ENSG00000221970_17 (sequence is synthesized)
tcacatacaacactcacatgctcacgtacatgcgtgtgcacacacacacacacacacacacatatacgcacagtgcttagtgaagcactattccaagaaccttacaagtaagagctcttt

SEQ ID NO: 764811 - DNA, 120 bp, Artificial Sequence
  ENSG00000221970_18 (sequence is synthesized)
aagtcctcataaaaaccctatgaggtagagactattactactatttttaggcgagaaaacagaactatagagagattatataatttaaccaatgctcccagctaataagtacctagtcca

SEQ ID NO: 764812 - DNA, 120 bp, Artificial Sequence
  ENSG00000221970_19 (sequence is synthesized)
gaatcaaacttaggcaatatgactgctgaacccataatcgtaaccattatataaaaatcaaagagatcatgaaatttccaaagatgaagaggaggagagatgaaaagcaattttcaatct

SEQ ID NO: 764813 - DNA, 120 bp, Artificial Sequence
  ENSG00000221970_20 (sequence is synthesized)
aagatgaagaggaggagagatgaaaagcaattttcaatctctagccaaagataggcattgggctccagacagaaaagtacttaaagctgggggaaaaacaaacaaacaaacaaacaaaca

SEQ ID NO: 764814 - DNA, 120 bp, Artificial Sequence
  ENSG00000221970_21 (sequence is synthesized)
atgaggtggtagcaagaaggaactgtgactccaagggtcagagacggaggaggagcctcttgacgggcaggatggtgaaaccaaaaacaatggataaaacttttaagttgatggttcatc

SEQ ID NO: 764815 - DNA, 120 bp, Artificial Sequence
  ENSG00000221970_22 (sequence is synthesized)
aagttgatggttcatcaattgaagaacattagaaagtgtttttgtaaattatctagccgggcatggcaacgtgtgcctatatccccagctattcgggaggctgaggcaagaggatcactt

SEQ ID NO: 764816 - DNA, 120 bp, Artificial Sequence
  ENSG00000221970_23 (sequence is synthesized)
gcctgggtgacagagtgagaccttgtgtccaacaataataaaaatgaaataatttattaaattttttaaaattacccaaactggatatacaatttgtaattccattgctgccgaacagtt

SEQ ID NO: 764817 - DNA, 120 bp, Artificial Sequence
  ENSG00000221970_24 (sequence is synthesized)
atatacaatttgtaattccattgctgccgaacagtttttaaacggttgtttagtttcacggcagatgctgcatactgcattgcaactaacactgggaagggatacattcaagtggcagga

SEQ ID NO: 764818 - DNA, 120 bp, Artificial Sequence
  ENSG00000221970_25 (sequence is synthesized)
caaaggtgaggagctctaataccaggggtaggtttcaagggatgaatactcccctggtaccagaggagcagcaggaaatcatggtgtgcagaaaccatgctcaggcggttgcctgtgtgg

SEQ ID NO: 764819 - DNA, 120 bp, Artificial Sequence
  ENSG00000221970_26 (sequence is synthesized)
accctaaattctgtgtgtgcagtcctctcttaggattggcccaggcatccaagaagcccacgatgctgcctaccccttaaatacacaaggtgcgtaccggaggccctggttctagttcca

SEQ ID NO: 764820 - DNA, 120 bp, Artificial Sequence
  ENSG00000221970_27 (sequence is synthesized)
gatgtaccatttgctagctgtgttttttgcagagaagtcccttaaactgcttaagcttcagtccttcatctgaaaattatgcatatggaagctgtttaggacaccacagagtgccactga

SEQ ID NO: 764821 - DNA, 120 bp, Artificial Sequence
  ENSG00000221970_28 (sequence is synthesized)
aaacccaaagcaagatgcaaatggacacattttttttctgaagacttaaaagtgctatgtgaacataagataaactgttatgattaccctgctgtcagaagttattttaatcctgtcagg

SEQ ID NO: 764822 - DNA, 120 bp, Artificial Sequence
  ENSG00000221970_29 (sequence is synthesized)
gttgctaaactttctgatctggaaccaaaattgctctttaaacaggaagagcattggtgctggtaggtcacctacgcctttgccctcatggcttccccttgtcccccctagaggcacagg

SEQ ID NO: 764823 - DNA, 120 bp, Artificial Sequence
  ENSG00000221970_30 (sequence is synthesized)
aggccactcactcttggagggcatagctggaccaggagcatgagctgtggcccagactcagggaacctctgtgagtcagctggcaaaggctcccggggagcctgtctctgaatctggtcc

SEQ ID NO: 764824 - DNA, 120 bp, Artificial Sequence
  ENSG00000221970_31 (sequence is synthesized)
tagcccgttcacttggaaaaaacaggagacttctcccaaggtcaaggaattcagattttggttttggtttccaactttttgtaatcctcaacctgggatttacagtgcatgtctcaatta

SEQ ID NO: 764825 - DNA, 120 bp, Artificial Sequence
  ENSG00000221970_32 (sequence is synthesized)
tgtttcattcattgcttcacaaagggaaggacaagcactggttcatctctttacacctatacattcctagcacagagtgagtactcacaaaaaacatacggaatacatagaggacacttt

SEQ ID NO: 764826 - DNA, 120 bp, Artificial Sequence
  ENSG00000221970_33 (sequence is synthesized)
atctgttgaccccatttccaaattttcagtgttgagccatcttctgatttctaaacttctttaaatccctctaattttaggttatactacagtagaaatttaattgtagctgataattat

SEQ ID NO: 764827 - DNA, 120 bp, Artificial Sequence
  ENSG00000221970_34 (sequence is synthesized)
tgagcacttactatgtggttggcactgcataaaatgctttagaaaaattcttacatcaaatatgtggagtaggtactaatactatcctaacattaaagggggggaaataaagtttagtgt

SEQ ID NO: 764828 - DNA, 120 bp, Artificial Sequence
  ENSG00000221970_35 (sequence is synthesized)
aattaattaatttattcaaggtcgccaaatcattcagtggtagaaacatgaatcaagaccaggcagtctgactgtaaataaattctgagccactctcttgcagaggacctcctgatattc

SEQ ID NO: 764829 - DNA, 120 bp, Artificial Sequence
  ENSG00000221977_0 (sequence is synthesized)
atggacagtctaaaccaaacaagagtgactgaatttgtcttcttgggactcactgataaccgggtgctggaaatgctgtttttcatggcattctcagccatttatatgctaacgctttcg

SEQ ID NO: 764830 - DNA, 120 bp, Artificial Sequence
  ENSG00000221977_1 (sequence is synthesized)
gggaacattctcatcatcattgccacagtctttactccaagtctccatacccccatgtatttcttcctgagcaatctgtcctttattgacatctgccactcatctgtcactgtgcctaag

SEQ ID NO: 764831 - DNA, 120 bp, Artificial Sequence
  ENSG00000221977_2 (sequence is synthesized)
atgttggagggtttgcttttagaaagaaagaccatttcctttgacaactgcatcacacagctcttcttcctacatctctttgcctgtgccgagatctttctgctgatcattatggcgtat

SEQ ID NO: 764832 - DNA, 120 bp, Artificial Sequence
  ENSG00000221977_3 (sequence is synthesized)
cactcactagggcagaccttcttgactattcgtctaccttactgtggccccaacattattgacagctacttctgtgatgtgcctcttgttatcaagctggcctgcacagatacatacctc

SEQ ID NO: 764833 - DNA, 120 bp, Artificial Sequence
  ENSG00000221977_4 (sequence is synthesized)
acaggaatactgattgtgaccaatagtggaaccatctccctctcctgtttcttggccgtggtcacctcctatatggtcatcctggtttctcttcgaaaacactcagctgaagggcgccgg

SEQ ID NO: 764834 - DNA, 120 bp, Artificial Sequence
  ENSG00000221977_5 (sequence is synthesized)
aaagccctgtctacctgctcggcccacttcatggtggttgccctcttctttgggccatgtatcttcatctatactcggccagacaccagcttctccattgacaaggtggtgtctgtcttc

SEQ ID NO: 764835 - DNA, 120 bp, Artificial Sequence
  ENSG00000221977_6 (sequence is synthesized)
tacacagtggtcacccctttgctgaatcccttcatttacaccttgaggaatgaggaggtaaaaagtgccatgaagcagctcaggcagagacaagtttttttcacgaaatcatatacataa

SEQ ID NO: 764836 - DNA, 120 bp, Artificial Sequence
  ENSG00000221977_7 (sequence is synthesized)
aatttaccctgtgcagaattttgagtttcatgattttatatcctaggcttctataatagggtatcagaggcgaatggaatcattagaggagatacagagtagatgaaacaattatgagaa

SEQ ID NO: 764837 - DNA, 120 bp, Artificial Sequence
  ENSG00000221977_8 (sequence is synthesized)
aagtgaatgaaataacattatagtaactttataacaattagctaaagcatccctgcacaactggagaaaactgatggcatctcgctgtgctgcctaggcagaccttgaacttctggactt

SEQ ID NO: 764838 - DNA, 120 bp, Artificial Sequence
  ENSG00000221977_9 (sequence is synthesized)
tattatttaaataaagcaaaagatcatagtggaagttataaggaaaaataacgtgggaaagtttaaagacagcttttgatttcatcagtaaaagaatacaatttggggaactcagttcag

SEQ ID NO: 764839 - DNA, 120 bp, Artificial Sequence
  ENSG00000221977_10 (sequence is synthesized)
tctcagtttcaggagcaggtagagtgagaattgactctcttgatttatactgttctgtgggctattgcctctgggaagctatacatcactcctgtgatttatacattatagtagtttcaa

SEQ ID NO: 764840 - DNA, 120 bp, Artificial Sequence
  ENSG00000221977_11 (sequence is synthesized)
tcttgttttccaatatattttcaagtgtataaataagcctttacttatttatattgaattaaacttttgttgcttttgaatgtaattctctcatgtctagatctattttgtacttttttt

SEQ ID NO: 764841 - DNA, 120 bp, Artificial Sequence
  ENSG00000221977_12 (sequence is synthesized)
ttgagacaggaattttttgtactattcctgcaacttcctgtaagtctgaaattattgtcaaaataaaaagttaaaacaaaacaaaactatacacccacaagaatagtaaaaattaaaaag

SEQ ID NO: 764842 - DNA, 79 bp, Artificial Sequence
  ENSG00000221977_13 (sequence is synthesized)
acaaaactatacacccacaagaatagtaaaaattaaaaaggtagaaaataccaagtggttttttttttttttttcctaa

SEQ ID NO: 764843 - DNA, 88 bp, Artificial Sequence
  ENSG00000221977_14 (sequence is synthesized)
cctcctgaatagctgggactataggtgcatgccatcatgcctggctaatttttatatgtttagtagagatgaactcctgagttcaagc

SEQ ID NO: 764844 - DNA, 120 bp, Artificial Sequence
  ENSG00000221977_15 (sequence is synthesized)
gttcaagccacctgcccctctcagctaatcattaactactatcactcattgggctgaagtatatcagtttattgtggaatgggcaagtccatatgaagagggatccatgacaaatttctt

SEQ ID NO: 764845 - DNA, 120 bp, Artificial Sequence
  ENSG00000221977_16 (sequence is synthesized)
aggtaatgatgatgatattctgtgactgaaataagtaggattagctgtaaatgaagatcctatagatggtcagagagctaccatacaatatcaactttaatggagctgatggaatgaaat

SEQ ID NO: 764846 - DNA, 120 bp, Artificial Sequence
  ENSG00000221977_17 (sequence is synthesized)
gaaatatggttaataataaaaatattaagtataaatatgtttctttgcttattctgaaaaaaatttataattgattggggtctttgtcactattttccacatggtctgtcaacttataga

SEQ ID NO: 764847 - DNA, 120 bp, Artificial Sequence
  ENSG00000221977_18 (sequence is synthesized)
aataatacttgagtattctggagaactggagagcagacaacatagccatccacacattacagacatacacaatacagagtgagtgacccactaactctaactaaagagtaatacatgatt

SEQ ID NO: 764848 - DNA, 120 bp, Artificial Sequence
  ENSG00000221977_19 (sequence is synthesized)
accttttagtaatcaaaaggacaaagaatcagaagcagtctattcattaaactgagagatgctcatgaaaatatctaaatatcattacttcaagttgacaaacaagggtagaaaatggtc

SEQ ID NO: 764849 - DNA, 120 bp, Artificial Sequence
  ENSG00000221977_20 (sequence is synthesized)
agtcccctataattctcatataaaacttgagtcatagtaagagttttagatatctatgatgaaatgaagtccagatatcactactatgtacatgttaaaaacttagaaaaatgatctaat

SEQ ID NO: 764850 - DNA, 80 bp, Artificial Sequence
  ENSG00000221978_0 (sequence is synthesized)
agaagccgaaggggagtcggcggcacaaaatggcggcggcggcggcggcggctggtgctgcagggtcggcagctcccgcg

SEQ ID NO: 764851 - DNA, 120 bp, Artificial Sequence
  ENSG00000221978_1 (sequence is synthesized)
ggtcgcagggggtgctgatcggggacaggctgtactccggggtgctcatcaccttggagaactgcctcctgcctgacgacaagctccgtttcacgccgtccatgtcgagcggcctcgaca

SEQ ID NO: 764852 - DNA, 120 bp, Artificial Sequence
  ENSG00000221978_2 (sequence is synthesized)
ccgacacagagaccgacctccgcgtggtgggctgcgagctcatccaggcggccggtatcctgctccgcctgccgcaggtggccatggctaccgggcaggtgttgttccagcggttctttt

SEQ ID NO: 764853 - DNA, 120 bp, Artificial Sequence
  ENSG00000221978_3 (sequence is synthesized)
ataccaagtccttcgtgaagcactccatggagcatgtgtcaatggcctgtgtccacctggcttccaagatagaagaggccccaagacgcatacgggacgtcatcaatgtgtttcaccgcc

SEQ ID NO: 764854 - DNA, 120 bp, Artificial Sequence
  ENSG00000221978_4 (sequence is synthesized)
ttcgacagctgagagacaaaaagaagcccgtgcctctactactggatcaagattatgttaatttaaagaaccaaattataaaggcggaaagacgagttctcaaagagttgggtttctgcg

SEQ ID NO: 764855 - DNA, 120 bp, Artificial Sequence
  ENSG00000221978_5 (sequence is synthesized)
tccatgtgaagcatcctcataagataatcgttatgtaccttcaggtgttagagtgtgagcgtaaccaacacctggtccagacctcatggaattacatgaacgacagccttcgcaccgacg

SEQ ID NO: 764856 - DNA, 120 bp, Artificial Sequence
  ENSG00000221978_6 (sequence is synthesized)
tcttcgtgcggttccagccagagagcatcgcctgtgcctgcatttatcttgctgcccggacgctggagatccctttgcccaatcgtccccattggtttcttttgtttggagcaactgaag

SEQ ID NO: 764857 - DNA, 120 bp, Artificial Sequence
  ENSG00000221978_7 (sequence is synthesized)
aagaaattcaggaaatctgcttaaagatcttgcagctttatgctcggaaaaaggttgatctcacacacctggagggtgaagtggaaaaaagaaagcacgctatcgaagaggcaaaggccc

SEQ ID NO: 764858 - DNA, 120 bp, Artificial Sequence
  ENSG00000221978_8 (sequence is synthesized)
aagcccggggcctgttgcctgggggcacacaggtgctggatggtacctcggggttctctcctgcccccaagctggtggaatcccccaaagaaggtaaagggagcaagccttccccactgt

SEQ ID NO: 764859 - DNA, 120 bp, Artificial Sequence
  ENSG00000221978_9 (sequence is synthesized)
ctgtgaagaacaccaagaggaggctggagggcgccaagaaagccaaggcggacagccccgtgaacggcttgccaaaggggcgagagagtcggagtcggagccggagccgtgagcagagct

SEQ ID NO: 764860 - DNA, 120 bp, Artificial Sequence
  ENSG00000221978_10 (sequence is synthesized)
actcgaggtccccatcccgatcagcgtctcctaagaggaggaaaagtgacagcggctccacatctggtgggtccaagtcgcagagccgctcccggagcaggagtgactccccaccgagac

SEQ ID NO: 764861 - DNA, 120 bp, Artificial Sequence
  ENSG00000221978_11 (sequence is synthesized)
aggccccccgcagcgctccctacaaaggctctgagattcggggctcccggaagtccaaggactgcaagtacccccagaagccacacaagtctcggagccggagttcttcccgttctcgaa

SEQ ID NO: 764862 - DNA, 120 bp, Artificial Sequence
  ENSG00000221978_12 (sequence is synthesized)
tgagcgggaccaccctgggcacagcaggcatcggaggtgaggcggggttgcagtgactggtggccgcaagcccttccctggggagtacctgatggctgccctttgacccccggtggctgc

SEQ ID NO: 764863 - DNA, 120 bp, Artificial Sequence
  ENSG00000221978_13 (sequence is synthesized)
cctttgacccccgggtgtgctctcagcgcaagtggtcctagaacaggattctttttggaaatgtctgtcgactggaccttggtggatttggaaatggaactgagggaccggtgacacgtg

SEQ ID NO: 764864 - DNA, 120 bp, Artificial Sequence
  ENSG00000221978_14 (sequence is synthesized)
cttcagaccggtctggggtgcggcgcacacctgggcccgtgcagggctcagctcggcagcagctctgagggcagctcaatgaaaaagtgaatgcacacgcccttgttggcgtggcctggc

SEQ ID NO: 764865 - DNA, 120 bp, Artificial Sequence
  ENSG00000221978_15 (sequence is synthesized)
atggcctggtgctatcggcagccgctctccactccccgactgatactcaattacgtgaagccaagaaagatgatttttagaacctttgcctatattaggttgtacttatgtacatatttt

SEQ ID NO: 764866 - DNA, 120 bp, Artificial Sequence
  ENSG00000221978_16 (sequence is synthesized)
gcagtgtttcacaggagaaagtggccttaactgccccttattctctctccacgttgtaaataaacatgtgtttaatacaagttaaagctatgtatgaaaactcagaacttgaatcccgtc

SEQ ID NO: 764867 - DNA, 120 bp, Artificial Sequence
  ENSG00000221978_17 (sequence is synthesized)
agcttaaaacttgtgtagggaatcctgacttttaaaatgtgagggtatttggatctgtgttgaaagtcgtatatttttatctgtgcggtgctgagtgcaggccaccagctcctaaataga

SEQ ID NO: 764868 - DNA, 120 bp, Artificial Sequence
  ENSG00000221978_18 (sequence is synthesized)
ggttccctatatgcgcgtatgacatggtgaataaacacaactctctccactcaggacatccggagcgttatggacgtggtaggtggtcgttctgtgtgcttgtgaaagtgtccaggcgtg

SEQ ID NO: 764869 - DNA, 120 bp, Artificial Sequence
  ENSG00000221978_19 (sequence is synthesized)
tgcacagccagtgcgcccacttccgggctccttgctccctgctgtactgaagttttggattttgcatccaatcctgtgtgcctgcccttctgccgaaggcttgtgaggggcctgagtcct

SEQ ID NO: 764870 - DNA, 120 bp, Artificial Sequence
  ENSG00000221978_20 (sequence is synthesized)
ctgcccatcaggatgacaggctccttcctgcagggccataggagggaagttttggaaacacagaatgattccaaggtgctctcgttcctgagggggactggtttgtaacccatgacatct

SEQ ID NO: 764871 - DNA, 120 bp, Artificial Sequence
  ENSG00000221978_21 (sequence is synthesized)
gtgggcgagagaggcagctgggagcaggacacttggagggtcaccccacgggggtggcacctgcactctgagtgccccccactgtcatcagctgcctcttaccgtggacacagttttggt

SEQ ID NO: 764872 - DNA, 120 bp, Artificial Sequence
  ENSG00000221978_22 (sequence is synthesized)
tttggggactagggggccccactcctggtggtaccgtttggacttactagggcagtgggacatataggccggggctagtgggataacggggagttacgcctgatgacttttttgatggaa

SEQ ID NO: 764873 - DNA, 120 bp, Artificial Sequence
  ENSG00000221978_23 (sequence is synthesized)
tcctgcattagatagctggtgggaccccccctcagaattggggaactgaggagactccagggagggtgtccttccagggagagcagctatgaggggccccctagcttcctgtgcctggaa

SEQ ID NO: 764874 - DNA, 120 bp, Artificial Sequence
  ENSG00000221978_24 (sequence is synthesized)
gtaagagaaccagtaaagggccatacacacctgtacccaagagaccgctctccatttgctttctttttttactaaataattgtaaaatattattatgacataaagaaccatttaaggcca

SEQ ID NO: 764875 - DNA, 64 bp, Artificial Sequence
  ENSG00000221978_25 (sequence is synthesized)
tcgctcaggtaatttgtgtgtgagtgtgtgtctatgtatatatatatatagagagagagagaga

SEQ ID NO: 764876 - DNA, 120 bp, Artificial Sequence
  ENSG00000221978_26 (sequence is synthesized)
tatatatatagagagagagagagagagacacacactcacatgttttggggtttttttgttttgttttgtttttcttgagacagagtctcgctgtgttgccaggtgagtactgtggcgtga

SEQ ID NO: 764877 - DNA, 120 bp, Artificial Sequence
  ENSG00000221978_27 (sequence is synthesized)
tttcaccatgttgggcaggatggtctcaatgtattgactttgtgatccgccctcctcggcctcccgaagtgctgggctcacaggcgtgagcccccgcgtccagccccatctgcatttctg

SEQ ID NO: 764878 - DNA, 120 bp, Artificial Sequence
  ENSG00000221978_28 (sequence is synthesized)
catttctgtgatgtctgtgtaagttctgggtcccagctgggagccggaagttacagtctgcttgcgtcgctgtttgacctgtagaggggccttatctcgctctacgaacttgtttcttat

SEQ ID NO: 764879 - DNA, 120 bp, Artificial Sequence
  ENSG00000221978_29 (sequence is synthesized)
ctgctgtccaagcgctttggtgcagggacagcggcatcttcagccaatccagtgcaggctctccaccgaaggctggctctagactggtggtacgcacatagcatagccatggccgactcc

SEQ ID NO: 764880 - DNA, 120 bp, Artificial Sequence
  ENSG00000221978_30 (sequence is synthesized)
tgctgtggttctctgacgattgtgcttcttgttaatcctctgtcgtgctttggtaatcgtattgattagagttggtaactgtcttgacttgaattttgtccctttaaaactgctgtacct

SEQ ID NO: 764881 - DNA, 120 bp, Artificial Sequence
  ENSG00000221978_31 (sequence is synthesized)
gtatgataaagatgcagtacctttctcttaaaaaaaaatgctatggaaagctgtgagaattgaagagacaaattggctgtgtcagtgtggggttatgtcatgatttctagaagccctgaa

SEQ ID NO: 764882 - DNA, 120 bp, Artificial Sequence
  ENSG00000221978_32 (sequence is synthesized)
gttgctcttttgagcagctttgcatgacacgctctggtaaaaggtgtgcatctttaaattatttcatggatactttgaaaaatattgtatcacttcaaatacagcaataagtttatatgt

SEQ ID NO: 764883 - DNA, 120 bp, Artificial Sequence
  ENSG00000221978_33 (sequence is synthesized)
cccgcctagaccccgaccccagcccctgccccgaccccagcctcggcgccattccctagccagcccatgcccctgacccggggcctccccgcccgccagtgcgctggatcccgagacggc

SEQ ID NO: 764884 - DNA, 120 bp, Artificial Sequence
  ENSG00000221978_34 (sequence is synthesized)
cagtgcgctggatcccgagacggcgggacgcgaagagcctttgtggacgtgggaagcgtttcagtgtttggttctgcgtggggagtcccacgttactcgatgactttcggccgcgaaggc

SEQ ID NO: 764885 - DNA, 120 bp, Artificial Sequence
  ENSG00000221978_35 (sequence is synthesized)
gggtaggcagcccagtgacttggttgtgggctggagttgtccgagtgcccagtgctcctgctgtataaattccaatcagactcccaaaatgggcactggcagtcacggtaggtggcccgt

SEQ ID NO: 764886 - DNA, 120 bp, Artificial Sequence
  ENSG00000221978_36 (sequence is synthesized)
cccctccctgcaagcctggacttcctgtgtcccccaccctgaagagagcagtcagtgggcttcctctgggagctgttgacttggcgcagggggaccttttcctggggagggtggagggac

SEQ ID NO: 764887 - DNA, 120 bp, Artificial Sequence
  ENSG00000221978_37 (sequence is synthesized)
gggtgcggagtctccctccgcacgatgctcccacgcgtccaacttgcacccaaggggcttttccctcttccaagtggactccttcaaggaagctgcagctcggtcagcagagaaggggcc

SEQ ID NO: 764888 - DNA, 120 bp, Artificial Sequence
  ENSG00000221978_38 (sequence is synthesized)
tgccgccagcgccctggaggaagaggaagaggaacccaagaggatggcttgtctcccagcagccacaccggctttgtgctcagccagttcatttgagtttgcatgtttctctgcactatg

SEQ ID NO: 764889 - DNA, 120 bp, Artificial Sequence
  ENSG00000221978_39 (sequence is synthesized)
gattttgagcatttagatttctttaatcaaaagcgttttagtgactccagtagacattttctttctgaggcatcgtgctttgcatgagagcaggccaaggttgaggggaaaagtaaagtt

SEQ ID NO: 764890 - DNA, 120 bp, Artificial Sequence
  ENSG00000221978_40 (sequence is synthesized)
tcaagatttcatttgtttttaagaattttaagttcgtggattaatatcactacttgaatactgacagttgttgattagacaccgaaaggttactgattgttgaatgtatctgtgttagag

SEQ ID NO: 764891 - DNA, 120 bp, Artificial Sequence
  ENSG00000221978_41 (sequence is synthesized)
ctgtgcactggcacgcttgcatcaggggctggggccacacggccgccacacagattcccccgtgatgcctggagctgcttccagagccgggtgtctccaagaggcacctgtaggacttcc

SEQ ID NO: 764892 - DNA, 120 bp, Artificial Sequence
  ENSG00000221978_42 (sequence is synthesized)
catttagaaatctcttgagtgggtttgtatgttaccttctccaaggtttatttaggacagagatattgctggaaggtcatgggtcagattccctcacaacccacctcgtctgcgggtgca

SEQ ID NO: 764893 - DNA, 120 bp, Artificial Sequence
  ENSG00000221978_43 (sequence is synthesized)
gccccactccaaggctccccgttattggggtatgtgaggagcagtaaatataaaaccagttcaactgtcctcatggaatcaccctttctgtttttgcagtattcataaagctagtgtaag

SEQ ID NO: 764894 - DNA, 120 bp, Artificial Sequence
  ENSG00000221978_44 (sequence is synthesized)
gtctggttttagtctattaaatcttagagatctaaaggaaatgctcaaaatgtagccaggttttaaatgctttaacttttaaaaaatgtaaatttttgtatgtttatagcttctaaatat

SEQ ID NO: 764895 - DNA, 120 bp, Artificial Sequence
  ENSG00000221978_45 (sequence is synthesized)
gaaagttaaagaatgtactgtgatgaaatgttcagtattatgttgcttctcagtatcatgttgcttctcagtattgtgttgcttctgattctatgaatgttcattttaagaccccttgtt

SEQ ID NO: 764896 - DNA, 120 bp, Artificial Sequence
  ENSG00000221978_46 (sequence is synthesized)
ggactgtctagctctgagtcctagcaatagactccttagaggagtagtacgtttatctagattttctctagataatgcaggcggaagacctgggttcccgggtggggcattgcagttctt

SEQ ID NO: 764897 - DNA, 120 bp, Artificial Sequence
  ENSG00000221978_47 (sequence is synthesized)
gaagaggactgagtgcatccctgacttggctttccagtttctatttataatctcaagaatagttcctgacgtattcgtcttctagtgtcagctgtttattttagtaacacatttttaagt

SEQ ID NO: 764898 - DNA, 120 bp, Artificial Sequence
  ENSG00000221978_48 (sequence is synthesized)
cttgtcatctgatgaaggtgttatagtgtggggccatagatgatacacgtcatcagacctagagttcagtgtgatgcaaagggcctgtctgcagttcttttttttgagatggagtctcgc

SEQ ID NO: 764899 - DNA, 84 bp, Artificial Sequence
  ENSG00000221978_49 (sequence is synthesized)
ctcagcctcccaagtagctgggattgcagcctggagtgcagtggcgctatctgggatcactgcaagctccgcctaccagattct

SEQ ID NO: 764900 - DNA, 120 bp, Artificial Sequence
  ENSG00000221983_0 (sequence is synthesized)
gtgctccgtgcgcaagcgctttcggcggcgattaggtggtttccggttccgctatcttctttttcttcagcgaggcggccgagctgacgcaaacatgcagatctttgtgaagaccctcac

SEQ ID NO: 764901 - DNA, 120 bp, Artificial Sequence
  ENSG00000221983_1 (sequence is synthesized)
tggcaaaaccatcacccttgaggtcgagcccagtgacaccattgagaatgtcaaagccaaaattcaagacaaggagggtatcccacctgaccagcagcgtctgatatttgccggcaaaca

SEQ ID NO: 764902 - DNA, 120 bp, Artificial Sequence
  ENSG00000221983_2 (sequence is synthesized)
cttctctccgccagcttgcccagaaatacaactgcgacaagatgatctgccgcaagtgctatgctcgccttcaccctcgtgctgtcaactgccgcaagaagaagtgtggtcacaccaaca

SEQ ID NO: 764903 - DNA, 120 bp, Artificial Sequence
  ENSG00000221983_3 (sequence is synthesized)
acctgcgtcccaagaagaaggtcaaataaggtggttctttccttgaagggcagcctcctgcccaggccccgtggccctggagcctcaataaagtgtccctttcattgactggagcagcaa

SEQ ID NO: 764904 - DNA, 120 bp, Artificial Sequence
  ENSG00000221983_4 (sequence is synthesized)
gactctactcagcactccattctgtgccacctgtggggtcttctgtcctagattctgtcacatcggcattggtccctgccctatgcccctgactctggatttgtcatctgtaaaactgga

SEQ ID NO: 764905 - DNA, 120 bp, Artificial Sequence
  ENSG00000221983_5 (sequence is synthesized)
gtaaaaacctcagtcgtgtaattggtgggactgaggatcagttttgtcattgctgggatcctgtcaggcactttgaggtgtccctcaggccttggccctgaagtgtctaggtgtgtggag

SEQ ID NO: 764906 - DNA, 120 bp, Artificial Sequence
  ENSG00000221983_6 (sequence is synthesized)
cctgaagtgtctaggtgtgtggagatgggtagaaaattaggtacacccaatggtgtagaacgttgattctcaaatttttttattttatacaaatggggtctcactatgttgtccaggctg

SEQ ID NO: 764907 - DNA, 120 bp, Artificial Sequence
  ENSG00000221983_7 (sequence is synthesized)
gtcttgaactcctgggctcaagccatccgcccatctcagcccctcaaagtgttgggattacaagcaagaactgccatgcctgacccagttctcagttttttgtttgtttgtttgtttgtt

SEQ ID NO: 764908 - DNA, 65 bp, Artificial Sequence
  ENSG00000221983_8 (sequence is synthesized)
ggctggagtgcagtggcgcagtctcggcttactacaacctctgcctccggggttcacatcctggc

SEQ ID NO: 764909 - DNA, 78 bp, Artificial Sequence
  ENSG00000221983_9 (sequence is synthesized)
tcactgtcgccttggcctcccagaatgctggtattacaggcgtgagccagcacgcctggcccagttactcagttttga

SEQ ID NO: 764910 - DNA, 120 bp, Artificial Sequence
  ENSG00000221983_10 (sequence is synthesized)
tgagctgtaccctctcctatgataatcactcttaagaagggcaacccttggtgttttccccttaaggtcacccaggctggaatgcagtggtgtggtcatggctccctgtaccctggaact

SEQ ID NO: 764911 - DNA, 120 bp, Artificial Sequence
  ENSG00000221983_11 (sequence is synthesized)
caggcttgggtgatcctctctcctttgcctccgaagtagccaggactacaggtgtgcacccaccaccacactcagataattgctttggtgtttttaaagcttgtaatgatcagtaggctg

SEQ ID NO: 764912 - DNA, 120 bp, Artificial Sequence
  ENSG00000221983_12 (sequence is synthesized)
aggtgggcaaatcataaggtcaagagttttttagatggggtgagcacagaccaattcctgttttatttactgatttaaaattttgagacagtctcactgtcacccaggttggggtgcagt

SEQ ID NO: 764913 - DNA, 86 bp, Artificial Sequence
  ENSG00000221983_13 (sequence is synthesized)
ttttgagacagtctcactgtcacccaggttggggtgcagtggtaggatcatagcttgctgcagccttgatctcccaggatgcttgt

SEQ ID NO: 764914 - DNA, 82 bp, Artificial Sequence
  ENSG00000221983_14 (sequence is synthesized)
ggggtcttgctatgttgcccaggctggcttcaaactcctgaacttaaaagcctcctgtttagttttggttttttaccatcgt

SEQ ID NO: 764915 - DNA, 120 bp, Artificial Sequence
  ENSG00000221983_15 (sequence is synthesized)
tgcctctcgggttcaagcgattctcctttctcagcctcttgagtagctggaattaccagtgtgcgccaccaccaccacgcctggctagtttttctgtttttagtagagacagggttttgc

SEQ ID NO: 764916 - DNA, 89 bp, Artificial Sequence
  ENSG00000221983_16 (sequence is synthesized)
ttgtgatctacctgtcttggccttccaaagtgctaggattacaagcgtaagccacagcgcctggccttgctacattttttttttttttt

SEQ ID NO: 764917 - DNA, 89 bp, Artificial Sequence
  ENSG00000221983_17 (sequence is synthesized)
tggccacagacatggtctcgctatgttgcccagaatggttttgcactgggtccaagcagttctgccgcagcctcccaaagtgctgggat

SEQ ID NO: 764918 - DNA, 120 bp, Artificial Sequence
  ENSG00000221983_18 (sequence is synthesized)
aagtgctgggattacaggggtgaggcaccttgctggcccctgttttgattagggtgcagtgctggtgaagccggtgcacgaggccagtgatgcatcctaatgaggggtggagttggcggg

SEQ ID NO: 764919 - DNA, 120 bp, Artificial Sequence
  ENSG00000221983_19 (sequence is synthesized)
acttcctgggccagtttggggactttcacaaaagacccccatgactcagggttttgagttcttaactgatcgaatgaaggattcaaaattaaccactccaaggggggattgaaggaagaa

SEQ ID NO: 764920 - DNA, 120 bp, Artificial Sequence
  ENSG00000221983_20 (sequence is synthesized)
ccactcttaatggacaaaaagaaagaaaggggagggagtaacagggatatgagctctagccgcccaagctagcaatggcaacccttctgggtccccttccagcatgtggaagctttcctt

SEQ ID NO: 764921 - DNA, 120 bp, Artificial Sequence
  ENSG00000221983_21 (sequence is synthesized)
tcgcttcattcaataaacagctgctgctcactctcctggtccgtggactctttttgaactgttaacactccccgcaaaggtccgcagcttcattcttcaaagttagcgagaccaggaacc

SEQ ID NO: 764922 - DNA, 120 bp, Artificial Sequence
  ENSG00000221983_22 (sequence is synthesized)
gagctggttggtggcggcggtcgtgcgggttcgcgccgggccgagagcgggttgggggctgcgggaggctgcaggggcctgggcggcagaagaggcggccctgagctggctcatgcgggc

SEQ ID NO: 764923 - DNA, 120 bp, Artificial Sequence
  ENSG00000221983_23 (sequence is synthesized)
cagtctcggcagggtggctgggcagggctcgcgaggccacggctcggagcccagaccggggcccaggaggcgagcgccgttttggagaggagcctgcctgctctgcctgccagcgtgacc

SEQ ID NO: 764924 - DNA, 89 bp, Artificial Sequence
  ENSG00000221983_24 (sequence is synthesized)
ggcggccgagctggttggtggcggcggtcgtgcggatggagtcttgctctgtcgcctaagctggagttcagtggtgcggctcgagcgat

SEQ ID NO: 764925 - DNA, 73 bp, Artificial Sequence
  ENSG00000221983_25 (sequence is synthesized)
cctgccaccacgcccagttctcatcttgaactcttgacctcaaatgatccgtctgcctcggccttccaaagtg

SEQ ID NO: 764926 - DNA, 120 bp, Artificial Sequence
  ENSG00000221983_26 (sequence is synthesized)
gttcgccagcatccaagatggcggcagggcggggcccaaggcgcggcgcgaattgtgacgcaggcgtccggcgtgctccgtgcgcaagcgctttcggcggcgattagacgcaaacatgca

SEQ ID NO: 764927 - DNA, 120 bp, Artificial Sequence
  ENSG00000221983_27 (sequence is synthesized)
gagagttttggtgtaattgagaaggaagctaagagtgttgggtgctccagcttggagttagagaggagagaggctgcgacaggaaggcatgtgtgttgtaggggatggcttcccatccag

SEQ ID NO: 764928 - DNA, 120 bp, Artificial Sequence
  ENSG00000221983_28 (sequence is synthesized)
gctggcagcaggagcagcctgtgcagatcaggacctggctgccgtggaagagggtgggaccgccttcagggaagatggatctagcaagatgatgccaaaggacgcaaacatgcagatctt

SEQ ID NO: 764929 - DNA, 120 bp, Artificial Sequence
  ENSG00000221983_29 (sequence is synthesized)
tacctcagttggccttttgagaaactgggggtagtgctggagctcccctgcagaggacactgccagtaatatggtccgcagagcctctaactgagcctccctccccctcaggtatcccac

SEQ ID NO: 764930 - DNA, 120 bp, Artificial Sequence
  ENSG00000221983_30 (sequence is synthesized)
ctgaccagcagcgtctgatatttgccggcaaacagctggaggatggccgcactctctcagactacaacatccagaaaggtaccggggttggggttgctgggcagggacccaagatcccca

SEQ ID NO: 764931 - DNA, 120 bp, Artificial Sequence
  ENSG00000221986_0 (sequence is synthesized)
agcctctgggaaggcccagcatggaggcagccacagctccggaggtggccgcaggatccaagctgaaggtgaaagaagccagcccagcggatgctgaaccaccccaggcttcacctggac

SEQ ID NO: 764932 - DNA, 120 bp, Artificial Sequence
  ENSG00000221986_1 (sequence is synthesized)
agggggctggcagccccactccccagctcctgccccctatagaagagcaccccaagatctggctacctcgggccctgaggcagacctacatccggaaggttggggacacagtgaacctac

SEQ ID NO: 764933 - DNA, 120 bp, Artificial Sequence
  ENSG00000221986_2 (sequence is synthesized)
taatcccattccagggcaagcccaaacctcaagccatctggacacatgatggctgtgccttggacaccaggcgtgtgagtgtgcggaatggggagcaagactccatcctcttcatccgag

SEQ ID NO: 764934 - DNA, 120 bp, Artificial Sequence
  ENSG00000221986_3 (sequence is synthesized)
aagcccaacgtgctgactcaggtcgctaccaactccgcgtgcagctgggtgggctggaggccaccgccaccattgacatcctggtgattgagaggccaggccctcctcagagtattaagc

SEQ ID NO: 764935 - DNA, 120 bp, Artificial Sequence
  ENSG00000221986_4 (sequence is synthesized)
tggtggacgtttggggcttcagcgctacactggaatggacaccgccccaagatacggggaatacagcacttctgggatacacggtgcagaaggctgacacaaaatccgggctgtggttca

SEQ ID NO: 764936 - DNA, 120 bp, Artificial Sequence
  ENSG00000221986_5 (sequence is synthesized)
caccagctgcatcgtctctgacctcatcatcggcaactcctatgccttccgtgtctttgctgaaaaccagtgcggactcagtgaaacagcccccatcactacggacctcgcccacatcca

SEQ ID NO: 764937 - DNA, 120 bp, Artificial Sequence
  ENSG00000221986_6 (sequence is synthesized)
gaaagcagctactgtttacaagaccaaggggtttgcccaacgagacttctctgaagccccaaagtttacccagcctctggccgactgcactacagtcaccggctataatacccagctctt

SEQ ID NO: 764938 - DNA, 120 bp, Artificial Sequence
  ENSG00000221986_7 (sequence is synthesized)
ctgctgtgtccgcgcctctccccggcccaagatcatctggctgaagaacaagatggatatccaaggcaaccctaagtacagagccctgactcacctgggaatctgctccctagagatccg

SEQ ID NO: 764939 - DNA, 120 bp, Artificial Sequence
  ENSG00000221986_8 (sequence is synthesized)
caagccgggtccctttgatggaggcatctatacctgcaaggcggtgaaccccctaggggaggcatctgtggactgtcgggtggatgtgaaagttcctaattgaggacacctaagaaggca

SEQ ID NO: 764940 - DNA, 120 bp, Artificial Sequence
  ENSG00000221986_9 (sequence is synthesized)
tggtactctgacaaagccagtgcccagcaatgaagtgaattcatggcacaggagccagggaccgtgacaacggtgccctcagcagcctggtgtcctctggccatttgctgtcatggctac

SEQ ID NO: 764941 - DNA, 120 bp, Artificial Sequence
  ENSG00000221986_10 (sequence is synthesized)
aaagtgctccctcttttcagtgcctccaggaagcccgccagtggtgagactgtgtcctcaaggagcttcggcaccatgtctggtttggattcatctaaataaatatgtggttccccagtg

SEQ ID NO: 764942 - DNA, 120 bp, Artificial Sequence
  ENSG00000221986_11 (sequence is synthesized)
caagcagcacattattggcaaaagacagctcagctcatcatttagaaccggacagctcttttagattttccgtcattcacattagctatgttgtgaacaaagtgatgcataaggcgaaaa

SEQ ID NO: 764943 - DNA, 120 bp, Artificial Sequence
  ENSG00000221986_12 (sequence is synthesized)
agaagcttgagacagaactaaagagaacaagttcccagtgtcctctctgacttgtagctgctggctgatggaaattggaaatgaatttgatcccataagacatttatttaaggctctcac

SEQ ID NO: 764944 - DNA, 120 bp, Artificial Sequence
  ENSG00000221986_13 (sequence is synthesized)
tggtatgtagcaaatgaaagcctaaaggggtgcgttacaagtacagacttctcaggaaagcgctctccgacagtcggcttgcagagacaactctccctccctcacctccctctctgtgtt

SEQ ID NO: 764945 - DNA, 120 bp, Artificial Sequence
  ENSG00000221986_14 (sequence is synthesized)
aatgatacttgtgttcgtgttagttgcccctttccctctctcacagccagtgcccagcaatgaagtgaattcatggcacaggagccagggaccgtgacaacggtgccctcagcagcctgg

SEQ ID NO: 764946 - DNA, 120 bp, Artificial Sequence
  ENSG00000221988_0 (sequence is synthesized)
ggagtagagtagggcaggagaaactgggccaggctgcacttagctcaaggggcctcgaggactctctgcgtctctggagacaagggcactacacgcacttcagaatgaagagttgcggga

SEQ ID NO: 764947 - DNA, 120 bp, Artificial Sequence
  ENSG00000221988_1 (sequence is synthesized)
gcatgctggggctctgcgggcagcggctccccgcggcgtgggtcctgcttctgttgcctttcctgccgctgctgctgcttgcagcccccgcgccccaccgcgcgtcctacaagccggtca

SEQ ID NO: 764948 - DNA, 120 bp, Artificial Sequence
  ENSG00000221988_2 (sequence is synthesized)
tcgtggtgcatgggctcttcgacagctcgtacagcttccgccacctgctggaatacatcaatgagacacaccccgggactgtggtgacagtgctcgatctcttcgatgggagagagagct

SEQ ID NO: 764949 - DNA, 120 bp, Artificial Sequence
  ENSG00000221988_3 (sequence is synthesized)
tgcgacccctgtgggaacaggtgcaagggttccgagaggctgtggtccccatcatggcaaaggcccctcaaggggtgcatctcatctgctactcgcaggggggccttgtgtgccgggctc

SEQ ID NO: 764950 - DNA, 120 bp, Artificial Sequence
  ENSG00000221988_4 (sequence is synthesized)
tgctttctgtcatggatgatcacaacgtggattctttcatctccctctcctctccacagatgggacagtatggagacacggactacttgaagtggctgttccccacctccatgcggtcta

SEQ ID NO: 764951 - DNA, 120 bp, Artificial Sequence
  ENSG00000221988_5 (sequence is synthesized)
acctctatcggatctgctatagcccctggggccaggaattctccatctgcaactactggcatgatccccaccacgatgacttgtacctcaatgccagcagcttcctggccctgatcaatg

SEQ ID NO: 764952 - DNA, 120 bp, Artificial Sequence
  ENSG00000221988_6 (sequence is synthesized)
gggaaagagaccatcccaatgccacagtatggcggaagaactttctgcgtgtgggccacctggtgctgattgggggccctgatgatggtgttattactccctggcagtccagcttctttg

SEQ ID NO: 764953 - DNA, 120 bp, Artificial Sequence
  ENSG00000221988_7 (sequence is synthesized)
tctattggcccggggggccatagtgaggtgtccaatggccggtatctcccacacagcctggcactccaaccgtaccctttatgagacctgcattgaaccttggctctcctgaggatatat

SEQ ID NO: 764954 - DNA, 120 bp, Artificial Sequence
  ENSG00000221988_8 (sequence is synthesized)
tcaggggtccccaggaactcctcggtccagagaccaagtggtggccttggaaagcagatgtcaggctttggtgtgcctgtgaccacctcattgctcccatattatcccccatttttagta

SEQ ID NO: 764955 - DNA, 120 bp, Artificial Sequence
  ENSG00000221988_9 (sequence is synthesized)
gagacggggttttagtagagacttggcctcccagaacccccttcctctgctcctccatgaatgacaattccaggcctcccctacctcatgtcctctcatttgggggattgctccgtgctg

SEQ ID NO: 764956 - DNA, 120 bp, Artificial Sequence
  ENSG00000221988_10 (sequence is synthesized)
tccctttctctcaaggccgaagttgggaagtgagaaaccatgtttttaacttgtggctgcttttgctgctgctgctcctccgtatctggctgtatgggtggagaacccaccccctgccca

SEQ ID NO: 764957 - DNA, 120 bp, Artificial Sequence
  ENSG00000221988_11 (sequence is synthesized)
ccacaggggtctccttccaggccactcaggacatttttagcttctctcctccccatgttcccttttttctctaaagtcccctgacatcagccctcccaactcctaagagggactacccat

SEQ ID NO: 764958 - DNA, 120 bp, Artificial Sequence
  ENSG00000221988_12 (sequence is synthesized)
gagagtggggttctgaggctcccctatggggacagttccgttcttgaagtgtcagtgttggggaatatctgtggcctatgaggcccatctcaggtttggggatcccccagtccctatgat

SEQ ID NO: 764959 - DNA, 120 bp, Artificial Sequence
  ENSG00000221988_13 (sequence is synthesized)
cagtgttggagtacccccctgggagagcctagtttctttgaggccccaggccctcttttaactacctttgaataggtgttatccctgtatttatggaaataaagttccatttcctcagtg

SEQ ID NO: 764960 - DNA, 120 bp, Artificial Sequence
  ENSG00000221988_14 (sequence is synthesized)
gtcattcccctgcgctctctttcctcacccttccccccgccaccgtgggttccagacttgggataagtaaacagcgggtggagcgaggcctacggacccaggccaggtgggagtctgcac

SEQ ID NO: 764961 - DNA, 120 bp, Artificial Sequence
  ENSG00000221988_15 (sequence is synthesized)
tcttcaaggggcctgggctgctgctcacgggtattaaagaactccgcgttgttcatggctgaggcgatgcattaggaagatcctggacctagagaacaagtcccccgaacgctgagttgg

SEQ ID NO: 764962 - DNA, 120 bp, Artificial Sequence
  ENSG00000221988_16 (sequence is synthesized)
tcgaggactctctgcgtctctggagacaagggcactacacgcacttcagaatgaagagttcacctagggcgcaatggaatattccattgcccctcctgtcctgggtctgtgttgcgggga

SEQ ID NO: 764963 - DNA, 120 bp, Artificial Sequence
  ENSG00000221988_17 (sequence is synthesized)
aagttaaaagtaggctattttgtgacacggacctggtgtgggagcgagaggaggtggcttgattgccgggcgtctgttccgagggaggagggtgttgccatctccctcacatgcccttat

SEQ ID NO: 764964 - DNA, 120 bp, Artificial Sequence
  ENSG00000221988_18 (sequence is synthesized)
gactggtcgaaattacgcgggcatgagtcagcgcatccctacgcgccctccgccccttgagggtgggtcgcttatagggaggggagtagagtagggcaggagaaactgggccaggctgca

SEQ ID NO: 764965 - DNA, 120 bp, Artificial Sequence
  ENSG00000221988_19 (sequence is synthesized)
cttagctcaaggggcctcgaggactctctgcgtctctggagacaagggcactacacgcacttcagaatgaagagttacttgggataagtaaacagcgggtggagcgaggcctacggaccc

SEQ ID NO: 764966 - DNA, 120 bp, Artificial Sequence
  ENSG00000221988_20 (sequence is synthesized)
ggtgtgagccaccgcacctggcctacattatcactactattttattactatccaccttgactattgctgcagcttccttattgggcttttcaccaccagtcttgcctcccttttctgctt

SEQ ID NO: 764967 - DNA, 120 bp, Artificial Sequence
  ENSG00000221988_21 (sequence is synthesized)
catcccccaaccccagttggtctttatctcatgcctaaactggcctgctccttccactgttcagttagtgctcctccccccattcatcatgtcacccaagaccaaaacctgggagtcata

SEQ ID NO: 764968 - DNA, 120 bp, Artificial Sequence
  ENSG00000221988_22 (sequence is synthesized)
tcccaaccccttgtatcaagccagtcactaagtcctgctgactcttctcctctccatccctatcaccccctcccccactttataaaaacttttaattttgaaattcttatagattcatag

SEQ ID NO: 764969 - DNA, 120 bp, Artificial Sequence
  ENSG00000221988_23 (sequence is synthesized)
gaaattgcaaagatagtatagcaaggcccttcacccagcttcccccagtggttgcatcctatgtaattatagcacagtatcaaaaccaggaaattcacattggttcaatgtgtgtgtgta

SEQ ID NO: 764970 - DNA, 120 bp, Artificial Sequence
  ENSG00000221989_0 (sequence is synthesized)
tgcatctttgacccacagctctgaccttcctgtcctagatgagggtttgtctttctctgccacaagagcatggaaggcaaccagacatggatcacagacatcaccctgctgggattccag

SEQ ID NO: 764971 - DNA, 120 bp, Artificial Sequence
  ENSG00000221989_1 (sequence is synthesized)
gttggtccagcactggcgattctcctctgtggactcttctctgtcttctatacactcaccctgctggggaatggggtcatctttgggattatctgcctggactctaagcttcacacaccc

SEQ ID NO: 764972 - DNA, 120 bp, Artificial Sequence
  ENSG00000221989_2 (sequence is synthesized)
atgtacttcttcctctcacacctggccatcattgacatgtcctatgcttccaacaatgttcccaagatgttggcaaacctaatgaaccagaaaagaaccatctcctttgttccatgcata

SEQ ID NO: 764973 - DNA, 120 bp, Artificial Sequence
  ENSG00000221989_3 (sequence is synthesized)
atgcagacttttttgtatttggcttttgctgttacagagtgcctgattttggtggtgatgtcctatgataggtatgtggccatctgccaccctttccagtacactgtcatcatgagctgg

SEQ ID NO: 764974 - DNA, 120 bp, Artificial Sequence
  ENSG00000221989_4 (sequence is synthesized)
gtgggccccgggatgtgaaccacctcttctgtgaaattctgtctgtcctcaagctggcctgtgctgacacctgggttaaccaagtggtcatatttgctacctgtgtgtttgtcttagtcg

SEQ ID NO: 764975 - DNA, 120 bp, Artificial Sequence
  ENSG00000221989_5 (sequence is synthesized)
ggcctctttccttgattctggtctcctacatgcacatcctcggggccatcctgaagatccagacaaaggagggccgcataaaggccttctccacctgctcctcccacctgtgtgtggttg

SEQ ID NO: 764976 - DNA, 120 bp, Artificial Sequence
  ENSG00000221989_6 (sequence is synthesized)
gactattctttggcatagccatggtggtttacatggtcccagactctaatcaacgagaggagcaggagaaaatgctgtccctgtttcacagtgtctttaatccaatgctgaaccccctga

SEQ ID NO: 764977 - DNA, 120 bp, Artificial Sequence
  ENSG00000221989_7 (sequence is synthesized)
tctacagcctgaggaatgctcagttgaagggcgccctccacagagcactccagaggaagaggtccatgagaacggtgtatgggctttgcctttaaaacatgtggtttgctgaagcaagaa

SEQ ID NO: 764978 - DNA, 120 bp, Artificial Sequence
  ENSG00000221994_0 (sequence is synthesized)
gagtttgtggggtgatgggggatctgtgcggtgtttgatgatgtctgtaagggacgaagttccggaaatggaattaccgagtcagatgagaaacacaagtcatcaatgaattaacaagca

SEQ ID NO: 764979 - DNA, 120 bp, Artificial Sequence
  ENSG00000221994_1 (sequence is synthesized)
acacattgtcacatccagctgttgaagagtggttaactcagcttgatctccgaagactcttctgcaccccaccccgcccccaactgctttccaaagagaaacagaaaatgattgagtccc

SEQ ID NO: 764980 - DNA, 120 bp, Artificial Sequence
  ENSG00000221994_2 (sequence is synthesized)
aggaaccagtgacatttgaggatgtggctgtggacttcacgcaggaagagtggcagcagttgaatcctgctcagaagaccctgcatagggatgtgatgctggagacctataatcacctgg

SEQ ID NO: 764981 - DNA, 120 bp, Artificial Sequence
  ENSG00000221994_3 (sequence is synthesized)
tctccgtggggtgttcaggtataaaaccagatgtaatctttaagttggaacatggaaaggacccatggatcatagagagtgagttgtcaaggtggatctacccagacagagtgaaaggcc

SEQ ID NO: 764982 - DNA, 120 bp, Artificial Sequence
  ENSG00000221994_4 (sequence is synthesized)
ttgaatcttcccagcagatcatttctggagaacttttatttcaaagggagatactagaaagagccccaaaggataattcattgtactctgttttaaaaatctggcatattgataatcaga

SEQ ID NO: 764983 - DNA, 120 bp, Artificial Sequence
  ENSG00000221994_5 (sequence is synthesized)
tggatagatatcaaggaaatcaagacagagttttgaggcaggtcacagtcatcagtcgtgaaacattgactgatgagatgggttccaagtacagtgcatttgggaaaatgttcaatcggt

SEQ ID NO: 764984 - DNA, 120 bp, Artificial Sequence
  ENSG00000221994_6 (sequence is synthesized)
gcacagaccttgctcctttaagtcaaaaattccataagtttgattcatgtgaaaatagcttgaagtctaattcagacttactaaattataacaggagctatgcaagaaagaaccccacta

SEQ ID NO: 764985 - DNA, 120 bp, Artificial Sequence
  ENSG00000221994_7 (sequence is synthesized)
agagatttagatgtgggagaccacctaagtataatgcttcctgttctgtgcctgagaaggaaggcttcattcatactggaatggagccctatggagatagtcaatgtgaaaaagttctca

SEQ ID NO: 764986 - DNA, 120 bp, Artificial Sequence
  ENSG00000221994_8 (sequence is synthesized)
gtcataagcaagcccatgttcagtataagaaatttcaagccagagagaaacccaatgtttgtagtatgtgtgggaaagcctttatcaagaagtcacagctcattatacatcaaagaattc

SEQ ID NO: 764987 - DNA, 120 bp, Artificial Sequence
  ENSG00000221994_9 (sequence is synthesized)
atactggagagaaaccatatgtatgtggagattgtaggaaagccttcagtgagaaatcacacctcattgtgcatcagaggattcatactggggagaaaccctatgaatgtactaagtatg

SEQ ID NO: 764988 - DNA, 120 bp, Artificial Sequence
  ENSG00000221994_10 (sequence is synthesized)
agagaaaccctatgagtgttttgagtgtccaaaagctttctcccagaagtcacatctaattatacatcagagagttcataccagagagaagccctttgaatgcagtgaatgcaggaaagc

SEQ ID NO: 764989 - DNA, 120 bp, Artificial Sequence
  ENSG00000221994_11 (sequence is synthesized)
cttctgtgagatgtctcacctttttatacaccagataactcatactgggaagaagccctatgaatgtactgaatgtgggaagaccttccctcggaaaacacagctcattatacatcagag

SEQ ID NO: 764990 - DNA, 120 bp, Artificial Sequence
  ENSG00000221994_12 (sequence is synthesized)
aacgcatactggagagaagccctataagtgtggtgaatgtgggaaaactttctgccaacagtcccacctcataggacatcaaagaattcatacaggagaaaaaccttatgtgtgtactga

SEQ ID NO: 764991 - DNA, 120 bp, Artificial Sequence
  ENSG00000221994_13 (sequence is synthesized)
ctgtgggaaggccttttcccagaagtcacacctcactggccatcaaagacttcatactggagagaaaccttatatgtgtactgaatgtggaaaatccttctctcagaaatcacctcttat

SEQ ID NO: 764992 - DNA, 120 bp, Artificial Sequence
  ENSG00000221994_14 (sequence is synthesized)
catacaccagagaattcatacaggggagaaaccttatcagtgtggtgaatgtggcaaaaccttctcccagaaatcactcctcattattcatctgagagttcacacaggggagaaacctta

SEQ ID NO: 764993 - DNA, 120 bp, Artificial Sequence
  ENSG00000221994_15 (sequence is synthesized)
tgagtgtactgagtgtgggagggccttttccctgaagtcacatctcattctacatcagagaggtcatactggagagaaaccctatgaatgtagtgaatgtggaaaggccttctgtggaaa

SEQ ID NO: 764994 - DNA, 120 bp, Artificial Sequence
  ENSG00000221994_16 (sequence is synthesized)
gtctccactcattatacatcagaaaactcatcctagggagaaaacccctgaatgtgctgagtctggaatgacttttttctggaaatcacagatgattacatatcagagaagacacactgg

SEQ ID NO: 764995 - DNA, 120 bp, Artificial Sequence
  ENSG00000221994_17 (sequence is synthesized)
ggagaaaccctccagatgcagtgactgtgggaaggcattctgccagcatgtatactttactgggcatcagaatccatataggaaagacaccttgtatatatgctgattgtgggaaggcct

SEQ ID NO: 764996 - DNA, 120 bp, Artificial Sequence
  ENSG00000221994_18 (sequence is synthesized)
attcccagaagtcagtcctcattgtctatgggaaaactcacattgaatagaaatagtgacaacttctcaactgtagaatagactaatatgttcctcagtatacatgattacccttccaca

SEQ ID NO: 764997 - DNA, 120 bp, Artificial Sequence
  ENSG00000221994_19 (sequence is synthesized)
gaatgatctgcttaggccctcagaatattttcaacatcacaaatatggaatcaatttgctcaccctcaaactgtctcagccctcttcacagaataaatgtatctggaagaattagcacta

SEQ ID NO: 764998 - DNA, 120 bp, Artificial Sequence
  ENSG00000221994_20 (sequence is synthesized)
ctggtggccgggaacgcccactcacccggacaagtcgcggcccttccaagcctcacactgctttcgtaggatcaattccgaatacccaaactcggagatatcacgaggactcccccgggc

SEQ ID NO: 764999 - DNA, 120 bp, Artificial Sequence
  ENSG00000221994_21 (sequence is synthesized)
ccccaaacgcacctctcctctggctggaatgggagcctccagaagcagtgcgagaccacggccagcgacagaggtcctggcgctggcggaatgacgccatttttgttactggtagagctc

SEQ ID NO: 765000 - DNA, 120 bp, Artificial Sequence
  ENSG00000221994_22 (sequence is synthesized)
ggcttcgtggctgtttcggagccaccgaaagataagctccctcgtcaccctgacatctctccgggaagactggaagggaaatggcctttcgggggatgttgaacgcatttgggcaggcgg

SEQ ID NO: 765001 - DNA, 120 bp, Artificial Sequence
  ENSG00000221994_23 (sequence is synthesized)
atctacccaggtatatttggattatgtatcttaatctgagaactactttagacattgtggtccaatctgagagtattctgtttttcagtagatggagtgctggctgttcctcggaacctg

SEQ ID NO: 765002 - DNA, 120 bp, Artificial Sequence
  ENSG00000221994_24 (sequence is synthesized)
gtattcatgctggcttcctggaccctttgtgtctttttctgcctggaaaagtaggaatccatggtgcatacagaagatacaaagaattgtttgagtctggagtgcagtggcacaatctca

SEQ ID NO: 765003 - DNA, 90 bp, Artificial Sequence
  ENSG00000221994_25 (sequence is synthesized)
cctcccaagttgctgggactacaggcacgtgccaccacgtccagagagaggaatgtgattacagctcattgcagcctcgaactcctggac

SEQ ID NO: 765004 - DNA, 120 bp, Artificial Sequence
  ENSG00000221994_26 (sequence is synthesized)
tcctcctgcctcagcctcctgagtagcacagtgacctgcccctaaaggttcatgcgcatccctcagacccctctttagacgcgccccgcttctccctctgccctctccccttgcccaagc

SEQ ID NO: 765005 - DNA, 120 bp, Artificial Sequence
  ENSG00000221994_27 (sequence is synthesized)
tctgccctctccccttgcccaagccccgaggtgggggcctggtgtgaatgctccggccgaagtgaacctgcacccccgcacccgaaggcctctttccggcttctgggcaaggcggccccg

SEQ ID NO: 765006 - DNA, 120 bp, Artificial Sequence
  ENSG00000221994_28 (sequence is synthesized)
gtgagctcggccgtcacacatctctgctttttcccaagaagagcaggaaatggccaaaccccaggggctagtgacatttgaagatgtagctgtggatttcacccaggaggagtggcagta

SEQ ID NO: 765007 - DNA, 120 bp, Artificial Sequence
  ENSG00000221995_0 (sequence is synthesized)
ctgctgagtgacagcctccccctggctctcctgcctcccccagctcttctccctgtggggagggagatctagcagttaggccctttatgcccacacccccaccatggaagaagggcagag

SEQ ID NO: 765008 - DNA, 120 bp, Artificial Sequence
  ENSG00000221995_1 (sequence is synthesized)
cctgactcattggaatcccattgttgccagtttctctggtgcgtggtgacattttagatcaccctgcttatgtgaagctgtttttggcatgctgccctcccagggcaagcttgctgcttc

SEQ ID NO: 765009 - DNA, 120 bp, Artificial Sequence
  ENSG00000221995_2 (sequence is synthesized)
ccaggaggtatgtcccccgagtgcagcccctggggcacagacatttgtctcccagatgcatgaactaacacacctgtcgcatgcttgtgctgtggagcggctggacacctaggctgactt

SEQ ID NO: 765010 - DNA, 120 bp, Artificial Sequence
  ENSG00000221995_3 (sequence is synthesized)
tgaatggattataccaaacggactgatgtaagaccttttaaggaatggagcaagtggaatggctcagccctgctctgtcacttcccccatgcagcagatggttactgggtgctctgggag

SEQ ID NO: 765011 - DNA, 120 bp, Artificial Sequence
  ENSG00000221995_4 (sequence is synthesized)
ctgggtgctctgggaggaacaggaagcatctctgttgtaccaaggaaccagtgttggctccatagtaagacaagagtcagccgagcatggttattcacacctgtaatcccagcactttgg

SEQ ID NO: 765012 - DNA, 120 bp, Artificial Sequence
  ENSG00000221995_5 (sequence is synthesized)
atatgagtcaatatttgatcaggcatctcagccttcctcttagcagccctgctaagtgccccacacccctagggcaggaagtcagctgatggacctgggagaggggtttggaaagcaaag

SEQ ID NO: 765013 - DNA, 120 bp, Artificial Sequence
  ENSG00000221995_6 (sequence is synthesized)
agggccaggccttgttgcacactgcgcctctacccccagatggacatgggcctaaagctgggccatcccacactgactggcaactggcagatttcagaccccaatgccctcagcccacca

SEQ ID NO: 765014 - DNA, 120 bp, Artificial Sequence
  ENSG00000221995_7 (sequence is synthesized)
tcacccttgaccccacaaccagcaataacaaaaagaccaaaagcctgtttcttccaccagccaccagcgcagttcctcttttccaccaggaaagctggagtagtcctgacgccatatata

SEQ ID NO: 765015 - DNA, 120 bp, Artificial Sequence
  ENSG00000221995_8 (sequence is synthesized)
ccacccgctccaaggaggattggattcactgttggtagagtggccatcaagccagaacctagccaaccaacacggagccagagggagaaggccaggggagggaggacctcagtggtgctc

SEQ ID NO: 765016 - DNA, 120 bp, Artificial Sequence
  ENSG00000221995_9 (sequence is synthesized)
agcatcaactggctttggggtgggggcatgggatggagcagtcacttagcttcccatctggtgatgaggaccagcaagaatttgcaacaggaacgcagcttccatagcaaagtcaagggg

SEQ ID NO: 765017 - DNA, 120 bp, Artificial Sequence
  ENSG00000221995_10 (sequence is synthesized)
aggggagctgccgccctgggcttgcctggcaggaattagcttatgtaccaaattgtttgtgacagtgctgagcaggagacgctggcttgtgaggaggaaggcttttttaaacaatttggt

SEQ ID NO: 765018 - DNA, 120 bp, Artificial Sequence
  ENSG00000221995_11 (sequence is synthesized)
taaaatgttcaaattgccagctctgactcttgccctggagaggagggcagcggcctgctgttgactccctgatggctggagcagtggaagccactaagaatggctaaagatcacccaagc

SEQ ID NO: 765019 - DNA, 120 bp, Artificial Sequence
  ENSG00000221995_12 (sequence is synthesized)
tacgggcaagggcaatctcgtgggtccgcagcccaaggcagagagagacatggagtttaccacctccccggcagctcctgccactgcccagcgtcttgatgaaacagtatggaaacacgg

SEQ ID NO: 765020 - DNA, 120 bp, Artificial Sequence
  ENSG00000221995_13 (sequence is synthesized)
ctgtcatttatccaggtgtctgcctagcaggtacaggaatgtgggcttggggactggagcccccaccttaaaaagaggtgaggcaatggaaaggaccagaggggccctgattcagcaatt

SEQ ID NO: 765021 - DNA, 120 bp, Artificial Sequence
  ENSG00000221995_14 (sequence is synthesized)
tacagtgccttggagctcgccagcagcacctcatttgcatctggattccagccctggcatctgcctcgccccgctctgctcacaaagtaaccccactgtctttccacaaagccaggcact

SEQ ID NO: 765022 - DNA, 120 bp, Artificial Sequence
  ENSG00000221995_15 (sequence is synthesized)
ccttagcctaacggcagatcctagccctgagtgcccagaaattctatgtaaagaatgagaaccaaaccaggctcccactaatttagaattcaaacaaccccaaagctaaaataaccccaa

SEQ ID NO: 765023 - DNA, 120 bp, Artificial Sequence
  ENSG00000221995_16 (sequence is synthesized)
tttttttctatattgcatagtcatcagtgagctttataattttgtcctagaaacccccccagagtccctaagtgcctttggcctatcaaagtaagactcatttatgttcagtctagtttg

SEQ ID NO: 765024 - DNA, 120 bp, Artificial Sequence
  ENSG00000221995_17 (sequence is synthesized)
tgttaaatgtgttttgtgctatcctgattcctttaaaaatggtaattcattcatgagaaatacgataactattaaccagactgccccattcctgaaccattttgcataattgaacatgta

SEQ ID NO: 765025 - DNA, 120 bp, Artificial Sequence
  ENSG00000221995_18 (sequence is synthesized)
ttctatcagcctcttcctttcccccagggatagagaccgacctttctttacataacccctgggcacttgcccaagccagcaggagaattcaggtttggtccttttttttttttttttttt

SEQ ID NO: 765026 - DNA, 120 bp, Artificial Sequence
  ENSG00000221995_19 (sequence is synthesized)
ttaatctcaggtcaaccaatcgagtggcggggtgaagtcgtccaaagtctttgaggtctaagagtcccagattcaagtttacatactggctgtgtggccttggggaagatcctttcatct

SEQ ID NO: 765027 - DNA, 120 bp, Artificial Sequence
  ENSG00000221995_20 (sequence is synthesized)
tatctcacatgcctaggccgtgtcttacacataggagtactcagtgaccaaatcttgccctctgcatctctcactgccaccttgggaaaagctaagaaggtggttcttgccgcagaacgc

SEQ ID NO: 765028 - DNA, 120 bp, Artificial Sequence
  ENSG00000221995_21 (sequence is synthesized)
tgactcctcctattttggtttggggatagaactttaaaagggctagtaaacaaaggtcccttttcagcttaagtcagaattataggcagcagggaacatggaactcctgcttgcccaagt

SEQ ID NO: 765029 - DNA, 120 bp, Artificial Sequence
  ENSG00000221995_22 (sequence is synthesized)
tggaactctaggatctggaggcagggctgcagctccagggaccacgccgagtgtggggcatcagtaggagaggagccacactgggctgtgttttctccaatggtgttgaaacgagagtgc

SEQ ID NO: 765030 - DNA, 120 bp, Artificial Sequence
  ENSG00000221995_23 (sequence is synthesized)
acttgaactgacggaggcagtggaggcaggaggagtacgggaaaggtggccccaaggctttgggagaaagaaaagagaaggtgaatggagctgtgagatgaggtcccctcttccctgttc

SEQ ID NO: 765031 - DNA, 120 bp, Artificial Sequence
  ENSG00000221995_24 (sequence is synthesized)
agtgctgtgatcctgctccatcagggggaagaggcctcttcacatctgggatagctggaggcctccagagccagaggcctgatgaagactctgagttatgttattgtaccaagaaagggg

SEQ ID NO: 765032 - DNA, 120 bp, Artificial Sequence
  ENSG00000221995_25 (sequence is synthesized)
cttttccccttgggccatcctaaaacaggtcttcccagcctctccttcctgagcctccatttcttgttagtagatgatggcatggtcaaagctgaaaattctcacaggcctcagggagcc

SEQ ID NO: 765033 - DNA, 120 bp, Artificial Sequence
  ENSG00000221995_26 (sequence is synthesized)
atcattaggggaaagggttcagatctgggagtatttgacagggaaagcgcctcctcctcagaaggaatctttttaggaatcactcgcctaagagagcccctaccctagacaagttgtact

SEQ ID NO: 765034 - DNA, 120 bp, Artificial Sequence
  ENSG00000221995_27 (sequence is synthesized)
caccagacctccagtctccaagccaatgtggttcacggactgcctgcttcagagccttctggggaaggactgaaaatgcagaattactgggttgtacccaaaagccagcgattcaaggtt

SEQ ID NO: 765035 - DNA, 120 bp, Artificial Sequence
  ENSG00000221995_28 (sequence is synthesized)
tctaagaggaagggcccaggaacctgcatcagattcttatgcacgcttgagtccgagactcactgctctcagcatccctttcctcggagctttaaaagcttccagagtctccttcctctt

SEQ ID NO: 765036 - DNA, 120 bp, Artificial Sequence
  ENSG00000221995_29 (sequence is synthesized)
agcattttgagtatcttctaagtaagccaaggaaggtttttacttaacaatgtttggcttttggggagtgctctgacgcagctttgtgggcctccagaaccaaaggcgtgcgtgcttaat

SEQ ID NO: 765037 - DNA, 120 bp, Artificial Sequence
  ENSG00000221995_30 (sequence is synthesized)
ggtaggagtgtcatttgtccctaaccttattcctcggtccctgcagccccaccagctactggaagtcccttgcccctgatcggtcagatgatgagcacgaccctctcgacaacacctcca

SEQ ID NO: 765038 - DNA, 120 bp, Artificial Sequence
  ENSG00000221995_31 (sequence is synthesized)
gaccgcgatactcccacagttatctgagtgacagcgacacagaggccaagctgacggagactaacgcatagcccaggggagtggttggcagccctctcaccccagggcctgtggctgcct

SEQ ID NO: 765039 - DNA, 120 bp, Artificial Sequence
  ENSG00000221995_32 (sequence is synthesized)
gggcacctctcccaggaagtggtggggcaccggtctcccccacccgactgctgatctgcatgggaaacaccctgaccttcttctgtcaggggcactttccaggctatgggtgtctgatgt

SEQ ID NO: 765040 - DNA, 120 bp, Artificial Sequence
  ENSG00000221995_33 (sequence is synthesized)
ctccacgtggaagaggtgggggaaagaggagtttctgaagagaactttttgctcctctgtctcaaaatgccagactcttggcttctaccctgtgtcaccgtgggcagtggcaggtggcct

SEQ ID NO: 765041 - DNA, 120 bp, Artificial Sequence
  ENSG00000221995_34 (sequence is synthesized)
ggcactgcatggagccagcacgttgacctccctctcagctccctgctcagggacggtggacaggttgcctactgggacactctaggttgctgggtccatggggaggattgggggaggaga

SEQ ID NO: 765042 - DNA, 120 bp, Artificial Sequence
  ENSG00000221995_35 (sequence is synthesized)
agcagtgccttccctctcgtgtggggtgggggctctctcttcttggtgcctgctgtctttctactttttaatttaaatacccaacctctccatcacagctgcatccctgagagtgggagg

SEQ ID NO: 765043 - DNA, 120 bp, Artificial Sequence
  ENSG00000221995_36 (sequence is synthesized)
gggctgtagtggtagctggggctcccaagaacgactcgggaatgtcatctccatcttcacccttcagagagcagtcctttctctgtgcagctggagacgctggtgaggagagccgggtcc

SEQ ID NO: 765044 - DNA, 120 bp, Artificial Sequence
  ENSG00000221995_37 (sequence is synthesized)
aggttcttaagaatgaggtgcggaggggctctccggtgctgctgggctgggttgagcaagcctacgcagacaagtgtgtgtgtggaccatccgcacctccagcccccaccccaccctctt

SEQ ID NO: 765045 - DNA, 120 bp, Artificial Sequence
  ENSG00000221995_38 (sequence is synthesized)
tgtctcagcgtgttatgtgcaatgacctatttaaggtaaacccattccaactacagcagttcagggctgatccaagcactgcctccctcctgctctgtccaggtggtctggaccataaac

SEQ ID NO: 765046 - DNA, 120 bp, Artificial Sequence
  ENSG00000221995_39 (sequence is synthesized)
tcaacttgagagggaaggcttggggttgaggacttgtgatcagaaaaactgaagatggaagttttggccggtgctcattagacatgagtcctcactctgtgtcctgagcccgtgtcattc

SEQ ID NO: 765047 - DNA, 120 bp, Artificial Sequence
  ENSG00000221995_40 (sequence is synthesized)
ttccaacctccctgcccccacacacttatcccagacacaacaccatgtggtctggaggtcccagcccccaccctaaaaaggttatccctgagaactccaccagacttgggagcccaagtg

SEQ ID NO: 765048 - DNA, 120 bp, Artificial Sequence
  ENSG00000221995_41 (sequence is synthesized)
cagtgcctggtgctgctcccatctgccgccccccttctctcctgcaattggtttgtactcactgggctgtgctctcccctgtttacccgatgtatggaaataaaggcccttttcctcctg

SEQ ID NO: 765049 - DNA, 120 bp, Artificial Sequence
  ENSG00000221996_0 (sequence is synthesized)
agctcctggtgacatcgcaaagaatgttgcagattttatcttcttctacctctgtgagtaggaggtgaggttctgaaagttctccccagctatgcctactgtaaaccacagtggcactag

SEQ ID NO: 765050 - DNA, 120 bp, Artificial Sequence
  ENSG00000221996_1 (sequence is synthesized)
ccacacagtcttccacttgctgggcatccctggcctacaggaccagcacatgtggatttctatcccattcttcatttcctatgtcaccgcccttcttgggaacagcctgctcatcttcat

SEQ ID NO: 765051 - DNA, 120 bp, Artificial Sequence
  ENSG00000221996_2 (sequence is synthesized)
tatcctcacaaagcgcagcctccatgaacccatgtacctcttcctctgcatgctggctggagcagacattgtcctctccacgtgcaccattcctcaggccttagctatcttctggttccg

SEQ ID NO: 765052 - DNA, 120 bp, Artificial Sequence
  ENSG00000221996_3 (sequence is synthesized)
tgctggggacatctccctggatcgttgcatcactcagctcttcttcatccattccaccttcatctctgagtcagggatcttgctggtgatggcctttgaccactatattgccatatgcta

SEQ ID NO: 765053 - DNA, 120 bp, Artificial Sequence
  ENSG00000221996_4 (sequence is synthesized)
aaatttgtgtgactgtctctctgagaagttatggtacaattttccctatcatatttcttttaaaaagattgactttctgccagaataatattattccacacaccttttgtgaacacattg

SEQ ID NO: 765054 - DNA, 120 bp, Artificial Sequence
  ENSG00000221996_5 (sequence is synthesized)
gcctagccaaatatgcatgtaatgacattcgaataaacatttggtatgggttttccattctaatgtcgacggtggtcttagatgttgtactaatttttatttcctatatgctgattctcc

SEQ ID NO: 765055 - DNA, 120 bp, Artificial Sequence
  ENSG00000221996_6 (sequence is synthesized)
atgctgtcttccacatgccttctccagatgcttgccacaaagctctcaacacatttggctcccatgtctgcatcatcatcctcttttatgggtctggcatcttcacaatccttacccaga

SEQ ID NO: 765056 - DNA, 120 bp, Artificial Sequence
  ENSG00000221996_7 (sequence is synthesized)
ggtttggacgccacattccaccttgtatccacatcccgttggctaatgtctgcattctggctccacctatgctgaatcccattatttatgggatcaaaaccaagcaaatccaggaacagg

SEQ ID NO: 765057 - DNA, 120 bp, Artificial Sequence
  ENSG00000221996_8 (sequence is synthesized)
tggttcagtttttgtttataaaacagaaataactttggtttaagaactgagttttcagaatctctagctatctggtaagtgggtatgaaagtggtagatgggagaggtcagctgataccg

SEQ ID NO: 765058 - DNA, 120 bp, Artificial Sequence
  ENSG00000222009_0 (sequence is synthesized)
aggcttcccaccccgtcggctgcctgggcagactcccagccagggcctctttcgccgccgccgccgccgccagccagccagcttcttcccaggaccataggccactccagcctcagcttc

SEQ ID NO: 765059 - DNA, 120 bp, Artificial Sequence
  ENSG00000222009_1 (sequence is synthesized)
tcctggccccctccctgtgtctgttcctgtccccgagcctctggcctctgatgccttcaggagcttgggcctctcctgctccactcctaaacttcagcttctcagcaaacaggcctccca

SEQ ID NO: 765060 - DNA, 120 bp, Artificial Sequence
  ENSG00000222009_2 (sequence is synthesized)
agtccctgcttctccctctcaggccttgctaacctcaccagctctagggcctggccaggcctcccaggctccctcctccaccccaaccccttctcactcatggagcccttgggactggtc

SEQ ID NO: 765061 - DNA, 120 bp, Artificial Sequence
  ENSG00000222009_3 (sequence is synthesized)
gtgcatgggaaagctgaacctttttccgcagcactccgaagccttgtcaacaacccgcgatacagtgatgtttgcttcgtggttggtcaagaacggcaggaggtatttgcccatcggtgc

SEQ ID NO: 765062 - DNA, 120 bp, Artificial Sequence
  ENSG00000222009_4 (sequence is synthesized)
ttgttggcctgtagatgcaacttcttccagcgacttctgggcacagagccaggccccggggtgcccagtcctgtggtgctaagcactgtgccaactgaggccttcctggcagtgctggag

SEQ ID NO: 765063 - DNA, 120 bp, Artificial Sequence
  ENSG00000222009_5 (sequence is synthesized)
ttcctatataccaacagtgtcaagctgtaccgccactctgtgctggaagtgctgacagcggctgtggagtatgggctggaggaactgagagagctgtgcctgcagtttgtggtgaaggtg

SEQ ID NO: 765064 - DNA, 120 bp, Artificial Sequence
  ENSG00000222009_6 (sequence is synthesized)
ttggtttgtgaggccctgcaggtggccgtaacctttggcctggggcagctgcaggagcgctgcgtggctttcatagaggcccacagccaggaggccctccggacccgaggcttcctggag

SEQ ID NO: 765065 - DNA, 120 bp, Artificial Sequence
  ENSG00000222009_7 (sequence is synthesized)
ctgtcggcggccgcgctgctgcccctgctccgcagcgacaagctctgcgtggacgaggctgaactggtccgcgcggcccgaagctgggcgcgcgtgggcgcggcggtgctggagcggccg

SEQ ID NO: 765066 - DNA, 120 bp, Artificial Sequence
  ENSG00000222009_8 (sequence is synthesized)
gtggctgaggtggcggccccggtggtgaaagagctgagactagccttgctggccccggcggagctgagcgccctggaagagcagaaccggcaggaaccactcatcccggtggagcagatt

SEQ ID NO: 765067 - DNA, 120 bp, Artificial Sequence
  ENSG00000222009_9 (sequence is synthesized)
gtggaggcgtggaaatgccatgccctgcggagaggggatgaggcccggggcgccccgtgtcgccgccggagaggcaccctgccccgggagcatcaccgctttctggacctgtccttcaaa

SEQ ID NO: 765068 - DNA, 120 bp, Artificial Sequence
  ENSG00000222009_10 (sequence is synthesized)
tgatccaacgccgggactcgcagggagccctcgacccgcccagctgagcctgccccaaactacagctcccgaagtgctcggcgttcggagcgggcttccgttcccagcgtgcccagtgag

SEQ ID NO: 765069 - DNA, 120 bp, Artificial Sequence
  ENSG00000222009_11 (sequence is synthesized)
ccgggcgccggaagaaccgttgtctgccacgcgcagccccttgtgcgggatcaagcccgtgtgggcgaggtggggtcgggccgggcagggcttgggctgggcctccctgagggggtgaaa

SEQ ID NO: 765070 - DNA, 120 bp, Artificial Sequence
  ENSG00000222009_12 (sequence is synthesized)
ctcgaaaacgaggatttccttcgttccacaccctgactctacgccctgcccctgggcattgtcgtctactagtctattctgatgactcccacatatctatctgttcagctcagctccctc

SEQ ID NO: 765071 - DNA, 120 bp, Artificial Sequence
  ENSG00000222009_13 (sequence is synthesized)
tcatagaggcccacagccaggtactgctcccttcatactcctcaccctacgcaccgcattctgctcctccctgacccatttgccggctcgcaggaggccctccggacccgaggcttcctg

SEQ ID NO: 765072 - DNA, 120 bp, Artificial Sequence
  ENSG00000222009_14 (sequence is synthesized)
ctttctctttctctatctctttctttctttctttctttctctcctctctcttttttttgagacggagtctcgcactctcgcccaggccggagggcagtggtgccatctcggctcactgca

SEQ ID NO: 765073 - DNA, 76 bp, Artificial Sequence
  ENSG00000222009_15 (sequence is synthesized)
tccgcccgcctcggaggctggagtgtagtggtgcgatttcggctcacttcaaactccgcctcccgggttcaagcga

SEQ ID NO: 765074 - DNA, 120 bp, Artificial Sequence
  ENSG00000222009_16 (sequence is synthesized)
ttcattccagacctgcccccctggagatcgctccctgaatgcccctcagacaccacaggctcggcgagaaattgatctccccagcttttccccagctctgcccccatcgtgtttctcatt

SEQ ID NO: 765075 - DNA, 120 bp, Artificial Sequence
  ENSG00000222009_17 (sequence is synthesized)
tccgtggacacccacgccagaaacctggatctcatccttgccttatcgctcttcacacctgccttaggtctctttttaccttgtaagagaccttaagagacctttccagttggttcagtt

SEQ ID NO: 765076 - DNA, 120 bp, Artificial Sequence
  ENSG00000222009_18 (sequence is synthesized)
ctctcagccccaggttcaacctgtcctgtctgacacgtctcacagccttcctgccttcactccagcgccccctcaatccatttcccacagtgcagccagacctgtttttgattgtcagtc

SEQ ID NO: 765077 - DNA, 120 bp, Artificial Sequence
  ENSG00000222009_19 (sequence is synthesized)
ctatggggcttaagtcctggaacatcccattgacctccaggacaaaattcaatctatttcactttcagggcactcaaaactactagtgagtggttcctcacctcttctctcaaatacaat

SEQ ID NO: 765078 - DNA, 120 bp, Artificial Sequence
  ENSG00000222009_20 (sequence is synthesized)
ctttgtataaattcatttatcctggaggtattagtcctctagctccataccttactcagttactgcagacccctctgctacctccttcattcactatacatcttgttttcccgaggatgt

SEQ ID NO: 765079 - DNA, 120 bp, Artificial Sequence
  ENSG00000222009_21 (sequence is synthesized)
gaatctccctcaagaaagatccctggggcctggagtggtgtcttactcgtttctgcttcctcagtctctgtcagataatcagtgctatgtaaatgttaagtaaatgactttatttattta

SEQ ID NO: 765080 - DNA, 120 bp, Artificial Sequence
  ENSG00000222009_22 (sequence is synthesized)
cacggatgaaattcaagtttctgctaaaaatagaagtatccttgagtcaggaagggaacaagtggaggaagataagcatcctgaaagaaggggagaattttgcatggcctttatctggtt

SEQ ID NO: 765081 - DNA, 120 bp, Artificial Sequence
  ENSG00000222009_23 (sequence is synthesized)
cgtgggcgcggtgagtggggctgggggagcgcaagggcacggaaggaggtgctggccacgagactggtgagcgggcggcaggacaggtgcccgactcagggctggcgtttgcaggcggtg

SEQ ID NO: 765082 - DNA, 120 bp, Artificial Sequence
  ENSG00000222011_0 (sequence is synthesized)
agagctttcaaatcccaacttgcccctggggattgcgcggctgatgtttagaacgcctagtcaagccaaccggctcgctcttgtttcagcaaaccctgacttacgtctcctatttgactt

SEQ ID NO: 765083 - DNA, 120 bp, Artificial Sequence
  ENSG00000222011_1 (sequence is synthesized)
gaggcggcacagtggccaagtcgattggccgtggcaagtgaccctccctgtggctgaagtgttctgaggactggcgagagaggcgcgccatgcttgccccctgctcaggttgggagcttg

SEQ ID NO: 765084 - DNA, 120 bp, Artificial Sequence
  ENSG00000222011_2 (sequence is synthesized)
gctgcttccgtctctgtctccgtcaggtccgactgtgggctggcgctgggcgctgggcttgctgggcttgccaagccaggccgtacagctcaggtgggagcgagcgctggcccggatcgg

SEQ ID NO: 765085 - DNA, 120 bp, Artificial Sequence
  ENSG00000222011_3 (sequence is synthesized)
agactgaggtccctccgcctggcccggggcgccgaactctgaaggagtggacactgcaggtgagcccgtttggtcggctgcgggcgcggctcccgtgccacctggccgtgaggcccctgg

SEQ ID NO: 765086 - DNA, 120 bp, Artificial Sequence
  ENSG00000222011_4 (sequence is synthesized)
accccctcacctacccggatggcgaccgcgtgctggtcgcggtgtgcggcgtggagggcggcgtgcggggcctggacggcctgcaggtgaagtacgacgaggatctggaggagatggcca

SEQ ID NO: 765087 - DNA, 120 bp, Artificial Sequence
  ENSG00000222011_5 (sequence is synthesized)
ttgtgtctgatactatccacccccaggcgtccgtggaggtgaacgcgcccctgaagtttggtttagatatcaagtcatcagggtctggctgtgtaaaagttcaaagtattgagggtgata

SEQ ID NO: 765088 - DNA, 120 bp, Artificial Sequence
  ENSG00000222011_6 (sequence is synthesized)
attgcaaaattgaaacagagcatgggactagtatcttgcagtctgttaagggtcaaaaattgcatgttcaaacaaaaggaggcaaagtgatctgtctgggaacagtttatggaaatatag

SEQ ID NO: 765089 - DNA, 120 bp, Artificial Sequence
  ENSG00000222011_7 (sequence is synthesized)
atattcatgcatcagataaaagtgctgtgaccatagataaactgcagggaagttctgttactgtatctaccgaagatggtttgctgaaagccaagtatctttatacagaatcatcatttc

SEQ ID NO: 765090 - DNA, 120 bp, Artificial Sequence
  ENSG00000222011_8 (sequence is synthesized)
tgtcttctgctgctggggatattacattaggaagtgttcatggtaatataacattacaaagcaagatgggtaacatcacagtagattcgtcttctggatgtctaaaagcctcaactaatc

SEQ ID NO: 765091 - DNA, 120 bp, Artificial Sequence
  ENSG00000222011_9 (sequence is synthesized)
cccataaaggttctattattgtcaaggtcccatcttcacttcaagctcatttacagttatcagggaaagaggttgatgtgaactcagaagtccatgttcaggaaatggctgaagttcgta

SEQ ID NO: 765092 - DNA, 120 bp, Artificial Sequence
  ENSG00000222011_10 (sequence is synthesized)
aagatgatgttgtaacagtgactggactcatgaatcaagcaagcaaacgtgaaaaatggattaaggctgatgccccaaaaggcactgtaagttttagaaggcaaagttggtttcagtccc

SEQ ID NO: 765093 - DNA, 120 bp, Artificial Sequence
  ENSG00000222011_11 (sequence is synthesized)
tgaaactgcaggactaaaactgatttgagttggatttatgatttttaacaatgattcgcagatctgtgactacaaaaatgtaaatcccaccattcatataaaggttgaaaacaacaaatt

SEQ ID NO: 765094 - DNA, 120 bp, Artificial Sequence
  ENSG00000222011_12 (sequence is synthesized)
gagaatgaatactggtgaactgttttgggaggctttttcaaaatttgtgctttgctattgtattcattttctactgctctgtaacaaattaccacaaatttagcagcataaaataatact

SEQ ID NO: 765095 - DNA, 120 bp, Artificial Sequence
  ENSG00000222011_13 (sequence is synthesized)
catttacagctatgtctaggttctccgctcagggaatcacaaggctagaaatcaagattttggccaggctgagttctcatctggagtctctgggaagaaatctacttccaacttcattca

SEQ ID NO: 765096 - DNA, 120 bp, Artificial Sequence
  ENSG00000222011_14 (sequence is synthesized)
gattattgggaaaatccagttccttgtgactggatgactgaggtctccattttcttgctggctgtcagccagcaatcactctaagcttctagaggccacccacatgccttctcatgttgc

SEQ ID NO: 765097 - DNA, 120 bp, Artificial Sequence
  ENSG00000222011_15 (sequence is synthesized)
ccctccatcttcaagccagcagtgatgcgctgagttcttctcatgctttgaatatctgacttcttctgcagccagctggaagaatatatacttttaaagggctcacttgattaggtcagg

SEQ ID NO: 765098 - DNA, 120 bp, Artificial Sequence
  ENSG00000222011_16 (sequence is synthesized)
cccacccaggataacctttgttttgccatataatgtaacattcataggagtgatggcccatcacattcagttttcactcccactcaaggaaaggagattatacaaaggcatccatcatgt

SEQ ID NO: 765099 - DNA, 120 bp, Artificial Sequence
  ENSG00000222011_17 (sequence is synthesized)
ggggacaattagcttagaattctttataatgtagctctcacatgacaggttttctacttagtaccttttatggcatcaatgtaaatttaagctgtaaataaaaaacaaatatgtgaagca

SEQ ID NO: 765100 - DNA, 120 bp, Artificial Sequence
  ENSG00000222011_18 (sequence is synthesized)
aaggggtccaggtcagagtttagagctttcaaatcccaacttgcccctggggattgcgcggctgatgtttagatatcaagtcatcagggtctggctgtgtaaaagttcaaagtattgagg

SEQ ID NO: 765101 - DNA, 84 bp, Artificial Sequence
  ENSG00000222011_19 (sequence is synthesized)
ctaatcagggtgccatagatgtttatgtcagccaactggggaaagtggaattgaaatcccataaaggagatcatggctcagtgc

SEQ ID NO: 765102 - DNA, 120 bp, Artificial Sequence
  ENSG00000222011_20 (sequence is synthesized)
aaaaatgcatgtctatgaaattttacttataattttgtaagttcatgtgagcttggttaagagttcttgacttaaaacaacaagtgtgcgcctcccgtcgcccaagatgccgaaaggaaa

SEQ ID NO: 765103 - DNA, 120 bp, Artificial Sequence
  ENSG00000222011_21 (sequence is synthesized)
cgcctcccgtcgcccaagatgccgaaaggaaaggaggccaaggggaagaagttggctctggcccctgcttttgtgaagaagcaggaggccaagaaagtggtgaatcccctgtttgagaaa

SEQ ID NO: 765104 - DNA, 120 bp, Artificial Sequence
  ENSG00000222011_22 (sequence is synthesized)
caggacatccagcccaaaagagacctcacctgctttgtgaaatggccccgctatatcaggttgcaatggcagagatccatactctataagcagctgaaagtgcctcctgcgattaaccag

SEQ ID NO: 765105 - DNA, 120 bp, Artificial Sequence
  ENSG00000222014_0 (sequence is synthesized)
actcagcaggttgggctgcggcggcggcggctggggaagccgaagcgccgcgcgtgagagatcccggatacatctgcggtttgggctccgccaccctccgtctctctcccgcaggtctct

SEQ ID NO: 765106 - DNA, 120 bp, Artificial Sequence
  ENSG00000222014_1 (sequence is synthesized)
gagccgggtgcggaaggagggaacggccctagccttgggaagccaaagcacacccctggctcctgccgacaccgccctccttcccttcccagccgcgggcctcgctccgtgctcggctac

SEQ ID NO: 765107 - DNA, 120 bp, Artificial Sequence
  ENSG00000222014_2 (sequence is synthesized)
ctactctgccgggaggcggcggcggctgccagtctgtggcgagccctgctgccctccagccgggctcctccagccgggctcctccaccggcccttgcaggggcgcagagagctcggcgcc

SEQ ID NO: 765108 - DNA, 120 bp, Artificial Sequence
  ENSG00000222014_3 (sequence is synthesized)
cttccgctcgcctttttcgtcagccggctggaggagcatcggtccgggaggtctctgggctgaggcggcgacagctcctctagttccaccatgtccgcgggcggagacttcgggaatccg

SEQ ID NO: 765109 - DNA, 120 bp, Artificial Sequence
  ENSG00000222014_4 (sequence is synthesized)
ctgaggaaattcaagctggtgttcctgggggagcaaagcgttgcaaagacatctttgatcaccagattcaggtatgacagttttgacaacacctatcaggcaataattggcattgacttt

SEQ ID NO: 765110 - DNA, 120 bp, Artificial Sequence
  ENSG00000222014_5 (sequence is synthesized)
ttatcaaaaactatgtacttggaggatggaacaatcgggcttcggctgtgggatacggcgggtcaggaacgtctccgtagcctcattcccaggtacatccgtgattctgctgcagctgta

SEQ ID NO: 765111 - DNA, 120 bp, Artificial Sequence
  ENSG00000222014_6 (sequence is synthesized)
gtagtttacgatatcacaaatgttaactcattccagcaaactacaaagtggattgatgatgtcagaacagaaagaggaagtgatgttatcatcacgctagtaggaaatagaacagatctt

SEQ ID NO: 765112 - DNA, 120 bp, Artificial Sequence
  ENSG00000222014_7 (sequence is synthesized)
gctgacaagaggcaagtgtcagttgaggagggagagaggaaagccaaagggctgaatgttacgtttattgaaactagggcaaaagctggatacaatgtaaagcagctctttcgacgtgta

SEQ ID NO: 765113 - DNA, 120 bp, Artificial Sequence
  ENSG00000222014_8 (sequence is synthesized)
gcagcagctttgccgggaatggaaagcacacaggacggaagcagagaagacatgagtgacataaaactggaaaagcctcaggagcaaacagtcagcgaagggggttgttcctgctactct

SEQ ID NO: 765114 - DNA, 120 bp, Artificial Sequence
  ENSG00000222014_9 (sequence is synthesized)
cccatgtcatcttcaacccttcctcagaagcccccttactctttcattgactgcagtgtgaatattggcttgaaccttttcccttcattaataacgttttgcaattcatcattgctgcct

SEQ ID NO: 765115 - DNA, 120 bp, Artificial Sequence
  ENSG00000222014_10 (sequence is synthesized)
gtctcgtggaggtgatctattagcttcacaagcacaaaaaaagtcagcgtcttcattatttatattttacaaaaagccaaattatttcagcatattccggtgataactttaaaaattaga

SEQ ID NO: 765116 - DNA, 120 bp, Artificial Sequence
  ENSG00000222014_11 (sequence is synthesized)
tacattttcttaacatttttttcttttttaatgttatgataatgtacttcaaaatgatggaaatctcaacagtatgagtatggcttggttaacgagcagtatgttcacagcctgctttat

SEQ ID NO: 765117 - DNA, 120 bp, Artificial Sequence
  ENSG00000222014_12 (sequence is synthesized)
cctcaaaacaaacaagagatggcaaagcagcagtccgaccaagcccactggaattatcctttaattttacagataccacttgctgtaggctgtggaccaagatgtccagaattattcttg

SEQ ID NO: 765118 - DNA, 120 bp, Artificial Sequence
  ENSG00000222014_13 (sequence is synthesized)
agcactgatgtaaattacttagatcttctttgaggtcagaattcagcgatcacggtaggcagtgcttgaatgagaaaagcctcctggtgcatcttcaaaatgagtcctaaagaacatact

SEQ ID NO: 765119 - DNA, 120 bp, Artificial Sequence
  ENSG00000222014_14 (sequence is synthesized)
gagtacttataagtagcagaacataaaatgtatttctgactaacacaaatggtcctttcacatgtgctttattagactctgggagagaaaagtaaccaagtgcttcagaacaggttttta

SEQ ID NO: 765120 - DNA, 120 bp, Artificial Sequence
  ENSG00000222014_15 (sequence is synthesized)
gtatttacttcttcatggtaagataatgaagttctaatgaactatttctcccaaggttttaaaattgtcaagagttattctgtttgtttaaaaagtaagaaacctctgtaagcaatagat

SEQ ID NO: 765121 - DNA, 120 bp, Artificial Sequence
  ENSG00000222014_16 (sequence is synthesized)
tttgcttgggttttctttcttaaaaaaataatactatgcaggcaagacaccataaaagtttaattccttacagaagaaccagtggaagaatttaaatttggcactacgatcaaaactact

SEQ ID NO: 765122 - DNA, 120 bp, Artificial Sequence
  ENSG00000222014_17 (sequence is synthesized)
gaattagcagaaataacgatatctaaagcttaccagcaaaagaaccctcagcagaatagcaaaaactttgctcaggacatttgaggtcaaattgaagacggaagacggaagacggaaacc

SEQ ID NO: 765123 - DNA, 120 bp, Artificial Sequence
  ENSG00000222014_18 (sequence is synthesized)
ggaaaccgttttcttgtaagcccctagaggcagatcaggtaaagcatacatagtagagggaaaggagagaatggaaataaaactgaatattatgcagatttatgccttattttttagcat

SEQ ID NO: 765124 - DNA, 120 bp, Artificial Sequence
  ENSG00000222014_19 (sequence is synthesized)
tttttaaggttgggtctttcaggctggttttggtttgtattagatctgtatagtttaactagtgatttagttttatatttaagctacgattaatattttttctttggcgatatttctttg

SEQ ID NO: 765125 - DNA, 120 bp, Artificial Sequence
  ENSG00000222014_20 (sequence is synthesized)
ctttttttttttttaacaactttccatttttagatgtttcgttgaatctatttagagcttcaccatggcaatatgtatttcccttaaaacactgcaaacaaatatactaggagtgtgccc

SEQ ID NO: 765126 - DNA, 120 bp, Artificial Sequence
  ENSG00000222014_21 (sequence is synthesized)
ttttaatctttactagttattgtgagattgctgtgtaagctaataaacacatttgtaaatacattgtttgcaggaagaaaacttcgagttacaggtcaggaaaagcctgctgaatttatg

SEQ ID NO: 765127 - DNA, 120 bp, Artificial Sequence
  ENSG00000222014_22 (sequence is synthesized)
ttgtaaacgttacttaacacagtataaagatgaaaagacaacaaaagtatcttcatacttcctcatcccctcattgcaacaaaaccttaaactgggagaaccttagtcccctctctttcc

SEQ ID NO: 765128 - DNA, 120 bp, Artificial Sequence
  ENSG00000222014_23 (sequence is synthesized)
tcttcctcctccacttcccacttattgtcactttgtaatattcagagagcacttggattatggatctgaatagagaaatgcttacagataatcattagcccacataccagtaacttatac

SEQ ID NO: 765129 - DNA, 120 bp, Artificial Sequence
  ENSG00000222014_24 (sequence is synthesized)
ttaaagatgggatggagttataaagtgcttttataatacaatataattgctaaaggcaagggttgactctttgttttattttgacatggcatgtcctgaaataaatattgattcactatg

SEQ ID NO: 765130 - DNA, 120 bp, Artificial Sequence
  ENSG00000222018_0 (sequence is synthesized)
atgcctcgctttgcaagccctcttttaagaaatgtcattatcagaagtcaatttgatggcatcaagaggaagcaatgcctccaatatctgaaaaccctgagaacactgcaatatgatgga

SEQ ID NO: 765131 - DNA, 120 bp, Artificial Sequence
  ENSG00000222018_1 (sequence is synthesized)
tttaagaccgtatattttggggaaaccaatatcccagaaagtctcgtaactggggaagatattagtgatggatatttcatacaaaccccaacttggtgtattgtgcatgctgcgggtagt

SEQ ID NO: 765132 - DNA, 120 bp, Artificial Sequence
  ENSG00000222018_2 (sequence is synthesized)
caaggatgggtgccttggaaatatcgggtgttcctaagagacgagctgtgtatcaaacaagaagacagcctcttctctgagttctgtgatgtggtgaggaaggcctatggaaagtgtgtc

SEQ ID NO: 765133 - DNA, 120 bp, Artificial Sequence
  ENSG00000222018_3 (sequence is synthesized)
atcgtggtcaaagagagaaggcagcaggaagagcagaggccaaaggaagacagagaggctgagggccagttctatatccctacagtcattagcttagcaagcattatgtgttgcccagag

SEQ ID NO: 765134 - DNA, 120 bp, Artificial Sequence
  ENSG00000222018_4 (sequence is synthesized)
tggccaagtcctgtggccatgaactactctctctgccttccccttgtaattatctgaaccctttagactcagcctggtcttctctgaaatggtttatcatcaataacagaaacgagtttt

SEQ ID NO: 765135 - DNA, 120 bp, Artificial Sequence
  ENSG00000222018_5 (sequence is synthesized)
gtttgcagtccattgacagtggctattcttaccaatgtatacttttcagcaatttaattagcaaaggaattgaaaggataaacgcaagcaagtggagaacattaactagcaaagtacgga

SEQ ID NO: 765136 - DNA, 120 bp, Artificial Sequence
  ENSG00000222018_6 (sequence is synthesized)
gatgggaaaactactatcttgggaaattttcttaagggtggttcctccaacaagcagtgaggctgctacatgtctggtctttaccgtcaactctgttgagatgaattccacaccactgca

SEQ ID NO: 765137 - DNA, 120 bp, Artificial Sequence
  ENSG00000222018_7 (sequence is synthesized)
gccaaagatacttcaacagcgacctcacatggggtgctgcgagaactgggttgctcctaaggatgttggcaaagcgctttgagtttactagaagtttcattaaaatttgttggtaagtta

SEQ ID NO: 765138 - DNA, 120 bp, Artificial Sequence
  ENSG00000222028_0 (sequence is synthesized)
attcagccccagggatggctctgcaggatgtgtgcaagtggcagtcccctgacacccagggaccatcacctcacctgcctcgggctggcggctgggctgtgccccggggttgtgaccctc

SEQ ID NO: 765139 - DNA, 120 bp, Artificial Sequence
  ENSG00000222028_1 (sequence is synthesized)
aaaccttcctgcagatccatggccccagactggcccacggcaccaccactctggccttccgcttccgtcatggagtcattgctgcagctgacacgcgttcctcctgtggcagctatgtgg

SEQ ID NO: 765140 - DNA, 120 bp, Artificial Sequence
  ENSG00000222028_2 (sequence is synthesized)
cgtgtccagcctcatgcaaggtcatccctgtgcaccagcacctcctgggtaccacctctggcacctctgccgactgtgctacctggtatcgggtattacagcgggagctgcggcttcggg

SEQ ID NO: 765141 - DNA, 120 bp, Artificial Sequence
  ENSG00000222028_3 (sequence is synthesized)
aactgagggagggtcagctgcccagtgtggccagtgctgccaagctcttgtcagccatgatgtctcaataccggggactggatctctgtgtggccactgccctctgcggctgggaccgct

SEQ ID NO: 765142 - DNA, 120 bp, Artificial Sequence
  ENSG00000222028_4 (sequence is synthesized)
ctggccctgagctcttctacgtctatagcgacggcacccgcctgcagggggacatcttctctgtgggctctggatctccctatgcctacggcgtgctagaccgtggctatcgctacgaca

SEQ ID NO: 765143 - DNA, 120 bp, Artificial Sequence
  ENSG00000222028_5 (sequence is synthesized)
tgagcacccaggaagcctacgccctggctcgctgcgccgtggcccacgccacccaccgtgatgcctattcagggggctctgtagaccttttccacgtgcgggagagtggatgggagcatg

SEQ ID NO: 765144 - DNA, 120 bp, Artificial Sequence
  ENSG00000222028_6 (sequence is synthesized)
tgtcacgcagtgatgcctgtgtgctgtacgtggagttacagaagctcctggagccggagccagaggaggatgccagccatgcccatcctgagcctgccactgcccacagagctgcagaag

SEQ ID NO: 765145 - DNA, 120 bp, Artificial Sequence
  ENSG00000222028_7 (sequence is synthesized)
gatgccagcagggactgagacggtgtgagaagcaggacttggttggggatggtgtaggcctggggagtgggtgggaggatgggcagcagggggagggtcccgctggcagcagcctcacag

SEQ ID NO: 765146 - DNA, 120 bp, Artificial Sequence
  ENSG00000222028_8 (sequence is synthesized)
cgtctggctctagcctgtatgggttgctggcttcatttattgcaagtctccatcctttcatgactcccagagctattatggctctgcccaacaagttcctattgactcccagtggattgg

SEQ ID NO: 765147 - DNA, 120 bp, Artificial Sequence
  ENSG00000222028_9 (sequence is synthesized)
tccagcctccttcttggcaccaagtccgtctttcattcaacacttgcagtgtgcctactgcatgccagacgcatgctaggtgctagaccctcttttcttgccatcttctctgcttttttc

SEQ ID NO: 765148 - DNA, 120 bp, Artificial Sequence
  ENSG00000222028_10 (sequence is synthesized)
catcatctcatccccagtttctcttagtttcggtcctttatgtgtctcagcttcagcgtctttgtctttttctcctgatcactttgtcagcatggtaagatggggcacccgggaagggag

SEQ ID NO: 765149 - DNA, 120 bp, Artificial Sequence
  ENSG00000222028_11 (sequence is synthesized)
cagcccctctcagaacgaggcgtagtgatagacaccctttggatggtgatgggcttgtcttatctgctctccttctctgacttgaccatcatgactagaatgattatccctttactgaat

SEQ ID NO: 765150 - DNA, 120 bp, Artificial Sequence
  ENSG00000222028_12 (sequence is synthesized)
gcagttctcatcgcaaccctttgaggtaaaaatgagtctctctttacagaagaggaatcaggttcaaagggttatgtggcttgccagggtcacacagtaagtggcagggatgacacttag

SEQ ID NO: 765151 - DNA, 120 bp, Artificial Sequence
  ENSG00000222028_13 (sequence is synthesized)
atccaggccttctcctccagggtccatgctctttcagcacagctccccctcccaggccctctgccctgcctttcctctcttccctgcaggcttccggagagggatgtggagggagaaagt

SEQ ID NO: 765152 - DNA, 120 bp, Artificial Sequence
  ENSG00000222028_14 (sequence is synthesized)
agctaggccagtcccctgcctggtggctcatgtggctttatcttccaggcctggagccatcccccacagcccacccttgctctccagctttctgggcctggcggtgccgctgccagactt

SEQ ID NO: 765153 - DNA, 120 bp, Artificial Sequence; identical to SEQ ID NO: 685449
  ENSG00000222036_0 (sequence is synthesized)

SEQ ID NO: 765154 - DNA, 90 bp, Artificial Sequence; identical to SEQ ID NO: 685450
  ENSG00000222036_1 (sequence is synthesized)

SEQ ID NO: 765155 - DNA, 90 bp, Artificial Sequence
  ENSG00000222036_2 (sequence is synthesized)
caagatgggcaagtggtgccgccactgcttcccctggacttctggagaccacgacgactctgctatgaagacactcaggagcaagatggg

SEQ ID NO: 765156 - DNA, 81 bp, Artificial Sequence
  ENSG00000222036_3 (sequence is synthesized)
gctgagtgggcccctggggagactacgacgacagcgctttcatggagccgaggtaccacgtccgtcgagaagatctggaca

SEQ ID NO: 765157 - DNA, 120 bp, Artificial Sequence; identical to SEQ ID NO: 685453
  ENSG00000222036_4 (sequence is synthesized)

SEQ ID NO: 765158 - DNA, 120 bp, Artificial Sequence
  ENSG00000222036_5 (sequence is synthesized)
tggaaattcagaagtagtaaaactcctgctggacagacgatgtcaacttaatatccttgacaacaaaaagaggacagctctgacaaaggccgtacaatgccaggaagatgaatgtgcgtt

SEQ ID NO: 765159 - DNA, 120 bp, Artificial Sequence
  ENSG00000222036_6 (sequence is synthesized)
tacaatgccaggaagatgaatgtgcgttaatgttgctggaacatggcactgatccgaatattccagatgagtatggaaataccgctctacactatgctatctacaatgaagataaattaa

SEQ ID NO: 765160 - DNA, 120 bp, Artificial Sequence; identical to SEQ ID NO: 685456
  ENSG00000222036_7 (sequence is synthesized)

SEQ ID NO: 765161 - DNA, 120 bp, Artificial Sequence
  ENSG00000222036_8 (sequence is synthesized)
taaatgcactggatagatatggaagaactgttctcatacttgctgtatgttgtggatcggcaagtatagtcagccttctacttgagcaaaacattgatgtatcttctcaagatctatctg

SEQ ID NO: 765162 - DNA, 82 bp, Artificial Sequence
  ENSG00000222036_9 (sequence is synthesized)
tcataatgtaatttgccagttactttctgactacaaagaaaaacagatactaaaagtctcttctgaaaacagcaatccagaa

SEQ ID NO: 765163 - DNA, 90 bp, Artificial Sequence
  ENSG00000222036_10 (sequence is synthesized)
cagccagagggtggtgatagaaaggttgaagaagaaatgaagaagcacggaagtactcatatgggattcccagaaaacctgcctaacggt

SEQ ID NO: 765164 - DNA, 120 bp, Artificial Sequence
  ENSG00000222036_11 (sequence is synthesized)
aagtactcatatgggattcccagaaaacctgcctaacggtgccactgctgacaatggtgatgatggattaattccaccaaggaaaagcagaacacctgaaagccagcaatttcctgacac

SEQ ID NO: 765165 - DNA, 120 bp, Artificial Sequence
  ENSG00000222036_12 (sequence is synthesized)
tgagaatgaacagtatcacagtgatgaacaaaatgatactcagaagcaactttctgaagaacagaacactggaatattacaagatgagattctgattcatgaagaaaagcagatagaagt

SEQ ID NO: 765166 - DNA, 120 bp, Artificial Sequence
  ENSG00000222036_13 (sequence is synthesized)
ggctgaaaatgaattctgagctttctcttagttataagaaagaaaaagacctcttgcatgaaaatagtacgttgcaggaagaaattgtcatgctaagactggaactagacgtaatgaaac

SEQ ID NO: 765167 - DNA, 120 bp, Artificial Sequence
  ENSG00000222036_14 (sequence is synthesized)
atcagagccagctaagagaaaagaaatatttggaggaaattgaaagtgtggaaaaaaagaatgataatcttttaaagggtctacaactgaatgagctcaccatggatgatgatactgccg

SEQ ID NO: 765168 - DNA, 120 bp, Artificial Sequence
  ENSG00000222036_15 (sequence is synthesized)
tgctcgtcattgacaacggctctggcatgtgcaaggccggctttgcaggtgacgatgccccccgggctgtcttcccttccatcgtggggtgccccaggcaccagaacatgatggggggca

SEQ ID NO: 765169 - DNA, 74 bp, Artificial Sequence
  ENSG00000222036_16 (sequence is synthesized)
atcgtggggtgccccaggcaccagaacatgatggggggcatgcgtcagatggagtcctatgtgggcaagagcac

SEQ ID NO: 765170 - DNA, 120 bp, Artificial Sequence
  ENSG00000222036_17 (sequence is synthesized)
tggcaccacaccttctacaatgagctgcgtgtggctcccgaggagcaccccatcctgctgaccgaggcacccctgaaccccaaggccaaccgtgagaagatgacccagatcatgtttgag

SEQ ID NO: 765171 - DNA, 120 bp, Artificial Sequence
  ENSG00000222036_18 (sequence is synthesized)
tcaacaccccagccatgtacgtggccatccaagccgtgctgtccttgtacacctctggccgtactactggcattgtgatggactctggtgacggggtcacccacactgtgcccatctatg

SEQ ID NO: 765172 - DNA, 120 bp, Artificial Sequence
  ENSG00000222036_19 (sequence is synthesized)
aggggaatgccctcccccatgccaccctgcgcctagacctggctggccgggaactgactgactacctcatgaagatcctcaccgagcgtggctatagtttcaccaccatggccgagcagg

SEQ ID NO: 765173 - DNA, 120 bp, Artificial Sequence
  ENSG00000222036_20 (sequence is synthesized)
aaatcgtgcgtgacatcacagagaagctgtgctatgttgccctggacttcgagcaggagatggccacagcggcctccagctcctccctagagaacagctatgagctgcccaacggccagg

SEQ ID NO: 765174 - DNA, 120 bp, Artificial Sequence
  ENSG00000222036_21 (sequence is synthesized)
tcatcaccattagcaacgagcggttccgctgccccgaggtgctcttccagccttgcttcctgggcatggaatcctgtggcatccacgaaactaccttcaactctatcatgaagtctgatg

SEQ ID NO: 765175 - DNA, 120 bp, Artificial Sequence
  ENSG00000222036_22 (sequence is synthesized)
tggacatccacaaagacctgtacaccaacacagtgctatctggtggcaccaccatgtaccctggcattgcccacaggatgcagaaggagatcgctgccctggcgcctagcacgatgaaga

SEQ ID NO: 765176 - DNA, 86 bp, Artificial Sequence
  ENSG00000222036_23 (sequence is synthesized)
cagaaggagatcgctgccctggcgcctagcacgatgaagatcaagattgttgctcctcccaagcgcaagtactccgtgtgggtcgg

SEQ ID NO: 765177 - DNA, 120 bp, Artificial Sequence
  ENSG00000222036_24 (sequence is synthesized)
cctccattgtccaccgcaaatgcttctaggtggacgctgacttagttgcattacaccctttcttgacaaaaccaaacttcgcagaaagccacatgagattggtatggctttaattgtttt

SEQ ID NO: 765178 - DNA, 120 bp, Artificial Sequence
  ENSG00000222036_25 (sequence is synthesized)
cttatttcattttttgttttgttttttattggcttgactcaggatttaaaaactggaatggtgaaggcgagagcagttggttggagtgagcttcccccaaagttctacaatgtggctgag

SEQ ID NO: 765179 - DNA, 120 bp, Artificial Sequence
  ENSG00000222036_26 (sequence is synthesized)
tggctgaggactttgatcgtacattgtttttcttttcaatagtcattccaaatattgtgagatgcattgtttcaggaagccccttgcccttctaaaagccaccccacttctctctaagga

SEQ ID NO: 765180 - DNA, 120 bp, Artificial Sequence
  ENSG00000222036_27 (sequence is synthesized)
aattttttgaatctttgcctaaatactttttaattttgttttatttagaatgatcagccttcgcggccccccttttttgtaccccaacttggggtgtatgaaggcttttggtctccctga

SEQ ID NO: 765181 - DNA, 120 bp, Artificial Sequence
  ENSG00000222036_28 (sequence is synthesized)
gagtggctggaggcagccagggcttacctgtactctgacttaaggagagttggaaaaaagtgcacaccttaaaaaaaattcaatgaggaagcattaacaaaaacagtatttctgtacagt

SEQ ID NO: 765182 - DNA, 120 bp, Artificial Sequence
  ENSG00000222036_29 (sequence is synthesized)
ggacagcttagcatgttgacaactgagaataaaatgctcagttctgaactggacaatgtaagacacaacgacgaaacactggaaatggaaattcaattacatcattgtagactggctact

SEQ ID NO: 765183 - DNA, 81 bp, Artificial Sequence
  ENSG00000222036_30 (sequence is synthesized)
ggaaatggaaattcaattacatcattgtagactggctactgctctacatgattgtgaccaaagtcagagagctgaaagaga

SEQ ID NO: 765184 - DNA, 120 bp, Artificial Sequence
  ENSG00000222036_31 (sequence is synthesized)
cagaatctttctcaacaagtctaatgtagacagtaaaatcaacaggctaaaaattaagttccatgaaacaagataaaactctgagagaaaagatggggcaggccgccatctttcccgttc

SEQ ID NO: 765185 - DNA, 120 bp, Artificial Sequence
  ENSG00000222036_32 (sequence is synthesized)
gggcaacttagtcattccagcctgagggctttggagagtacaaactgaccagggaaagaagagatcccagagcacagcatagctgctttaccaaatcatggccagactgcttctgtaagc

SEQ ID NO: 765186 - DNA, 120 bp, Artificial Sequence
  ENSG00000222036_33 (sequence is synthesized)
aggcccctgatcctgttccacctcactggacaggacctcccaactggggcctccagctacccccaccagcatcccttggccaatggaaatttgaaatgttcctgggacagagctcctgga

SEQ ID NO: 765187 - DNA, 120 bp, Artificial Sequence
  ENSG00000222036_34 (sequence is synthesized)
gagaggggcaggccaccacctttgctgtttgggtgactagccgttctggcctgcaggctttggagagcccaagctgacaaggggtagaagaggtgcctcagcacagcacagccacgctac

SEQ ID NO: 765188 - DNA, 120 bp, Artificial Sequence
  ENSG00000222036_35 (sequence is synthesized)
gaaaacatggccagactcttgtttaagtcagtccccgaacacatttctagtcagtgggtgaagtctttcaaccagggtctctggctaccttgactgctgttctctggccgacagaggtct

SEQ ID NO: 765189 - DNA, 120 bp, Artificial Sequence
  ENSG00000222036_36 (sequence is synthesized)
caggcctccctgagtcagagctcccggggggaggaccagattgtcatctttgctgtttgggtgacccagccatttcagccttagggcttcagagtgtctgaggtagccaggggctgaagt

SEQ ID NO: 765190 - DNA, 120 bp, Artificial Sequence
  ENSG00000222036_37 (sequence is synthesized)
gaacccccagcacagcacagctgctctataaaaacgtggccagactttttctttaagcaagtccctgttcttattcctcctgactaggtaagacttctcaacttgcctccagccacatct

SEQ ID NO: 765191 - DNA, 120 bp, Artificial Sequence
  ENSG00000222036_38 (sequence is synthesized)
tattggtgtgttcagattggcaacaggttcgtacctcagtggtacagagctcccagaggaaggggtaggctatcatcttccctggaaaatacgagtcaattagggacttgaggggacccc

SEQ ID NO: 765192 - DNA, 120 bp, Artificial Sequence
  ENSG00000222036_39 (sequence is synthesized)
cagcattccacagcagcccttcagaaaagtggccagactctgtacttgatgggcagatcctcctggcctgtgtctctagccagcccaccactggagctatcaagccagtagcaactcagc

SEQ ID NO: 765193 - DNA, 120 bp, Artificial Sequence
  ENSG00000222036_40 (sequence is synthesized)
agttccttggacagagcttccaggagcaaatgaaatcctttctgccactgcctttgcagtgaactgcccttgctatcctcagaagatatatcacgggagcaaagaccctaagtgccatat

SEQ ID NO: 765194 - DNA, 120 bp, Artificial Sequence
  ENSG00000222036_41 (sequence is synthesized)
caacacctccaataagctgcagttgacccaaagaacaagccaatccatctcccataggtaccacacacactccactactcatcaccagacagggaaccctggcttgggcccacagcacag

SEQ ID NO: 765195 - DNA, 90 bp, Artificial Sequence
  ENSG00000222036_42 (sequence is synthesized)
cccacagcacagaccctccatcctgggccgattacactgagtgattgctaactcacatgtctctgggatggagcacccaggagacaagca

SEQ ID NO: 765196 - DNA, 120 bp, Artificial Sequence
  ENSG00000222036_43 (sequence is synthesized)
cagggacagctatctctctaggctccacttgcccttgtgagacactttgtcccagcactttaggaatgctgaggtcagaccagccacatctcatgtgcaagattgcccagcagacatcag

SEQ ID NO: 765197 - DNA, 120 bp, Artificial Sequence
  ENSG00000222036_44 (sequence is synthesized)
tcaggtctgagagttccccttttaaaaaaggggacttgcttaaaaaagaagtctagccacgattgtgtagagcagctgtgctgtgctggagattcacttttgagagagttctcctctgag

SEQ ID NO: 765198 - DNA, 120 bp, Artificial Sequence
  ENSG00000222036_45 (sequence is synthesized)
tgagacctgatctttagaggctgggcagtcttgcacatgagatggggctggtctgatctcagcactccttagtctgcttgcctctcccagggccccagcctggccacacctgcttacagg

SEQ ID NO: 765199 - DNA, 120 bp, Artificial Sequence
  ENSG00000222036_46 (sequence is synthesized)
gcactctcagatgcccataccatagtttctgtgctagtggaccgtaccatatcagtggagagctgcagcaaggtggcccctacggccacgcaccagcctgcacattacctctccatactg

SEQ ID NO: 765200 - DNA, 120 bp, Artificial Sequence
  ENSG00000222036_47 (sequence is synthesized)
tcctacatcactttgctgtgtgtgtttacacaggtggattttgctttacttgcactgacagcacacaggagggcagcacacaccccaacccacatcaactgccattaaagaaaagaaatt

SEQ ID NO: 765201 - DNA, 86 bp, Artificial Sequence
  ENSG00000222036_48 (sequence is synthesized)
gagggcagcacacaccccaacccacatcaactgccattaaagaaaagaaatttcagcccataatttcatgtccagcaaaattaggc

SEQ ID NO: 765202 - DNA, 120 bp, Artificial Sequence
  ENSG00000222036_49 (sequence is synthesized)
aagcactaaatatggaaagaaaaaaccatcaccagccactacaaaaatgcagtgaagaacgcagtgaattacgcagtccagtgatgctaaaaaccaaccacatacgttaagtctgcaaaa

SEQ ID NO: 765203 - DNA, 89 bp, Artificial Sequence
  ENSG00000222036_50 (sequence is synthesized)
gcagtgaattacgcagtccagtgatgctaaaaaccaaccacatacgttaagtctgcaaaataaccagctgacagcatgacgacaggata

SEQ ID NO: 765204 - DNA, 120 bp, Artificial Sequence
  ENSG00000222036_51 (sequence is synthesized)
ctcccattgaaagacacggggcaagctggataaagaaccaagacccactggagtatgctgtcttcaagaaacccatctcacatgcggtggcatacataggctcaaaataaaggaatggag

SEQ ID NO: 765205 - DNA, 120 bp, Artificial Sequence
  ENSG00000222036_52 (sequence is synthesized)
acagaaaaaagcaggtgttgcactcctactttctgacaaaacagactatgcgaataaagataaaaaagagaaggacattacaaaggtggtcctgacctttgataaatctcattgcttgat

SEQ ID NO: 765206 - DNA, 120 bp, Artificial Sequence
  ENSG00000222036_53 (sequence is synthesized)
accaacctgggctgttttaattgcccaaaccaataggataatttgctgaggttgtggagcttctcccctgcagagagtccctgatctcccaaaatttggttgagatgtaaggttgatttt

SEQ ID NO: 765207 - DNA, 120 bp, Artificial Sequence
  ENSG00000222036_54 (sequence is synthesized)
gctgtacaactccttttctgaagttttactcatttccaaaaaggaaggcaagttttcctgcttccatgacgatggagagcaggcatctcctttcctgagtttcagcttgcttctgacagg

SEQ ID NO: 765208 - DNA, 66 bp, Artificial Sequence
  ENSG00000222036_55 (sequence is synthesized)
gacctcccgaagctcagatggtcctccaacctcaacctcagttttttttttctttctttcttttta

SEQ ID NO: 765209 - DNA, 69 bp, Artificial Sequence; identical to SEQ ID NO: 685468
  ENSG00000222036_56 (sequence is synthesized)

SEQ ID NO: 765210 - DNA, 120 bp, Artificial Sequence
  ENSG00000222038_0 (sequence is synthesized)
ggtagacgtgatctgctcgctactaccggcctccccaggctgttaaaagcagatggtagctgaggttgattcaatgccggctgcctcttctgtgaagaagccatttgttctcaggagcaa

SEQ ID NO: 765211 - DNA, 74 bp, Artificial Sequence
  ENSG00000222038_1 (sequence is synthesized)
ctgcctcttctgtgaagaagccatttgttctcaggagcaagatgggcaagtggtgccgacttctggagaccagg

SEQ ID NO: 765212 - DNA, 74 bp, Artificial Sequence
  ENSG00000222038_2 (sequence is synthesized)
tgctggcttggggagactacgacgacagcgccttcgtggagccgagataccacgtccgtcgagaagatctggac

SEQ ID NO: 765213 - DNA, 120 bp, Artificial Sequence
  ENSG00000222038_3 (sequence is synthesized)
cagagctgcctggtggggtaaagtcgccagaaaggatctgatcgtcatgctcagggacactgacgtgaacaagcaggacaagcaaaagaggactgctctacatctggcctctgccaatgg

SEQ ID NO: 765214 - DNA, 120 bp, Artificial Sequence
  ENSG00000222038_4 (sequence is synthesized)
ctctgccaatgggaattcaggagtagtaaaactcctgctggacagacgatgtcaacttaatgtccttgacaacaaaaagaggacagctctgacaaaggccgtacaatgccaggaagatga

SEQ ID NO: 765215 - DNA, 120 bp, Artificial Sequence
  ENSG00000222038_5 (sequence is synthesized)
aatgccaggaagatgaatgtgcgttaatgttgctggaacatggcactgatccaaacattccagatgagtatggaaataccactctacactacgctatctacaatgaagataaattaatgg

SEQ ID NO: 765216 - DNA, 120 bp, Artificial Sequence
  ENSG00000222038_6 (sequence is synthesized)
atacggtgctgatatcgaatcaaaaaacaagcatggcctcacaccactgctacttggtgtacatgagcaaaaacagcaagtggtgaaatttttaatcaagaaaaaagcgaatttaaatgc

SEQ ID NO: 765217 - DNA, 78 bp, Artificial Sequence
  ENSG00000222038_7 (sequence is synthesized)
tggtgaaatttttaatcaagaaaaaagcgaatttaaatgcactggatagatatggaagaactgcccttctacttgagc

SEQ ID NO: 765218 - DNA, 69 bp, Artificial Sequence
  ENSG00000222038_8 (sequence is synthesized)
gctgacatcagaggaagagtcacaaaggttcaaaggcagtgaaaatagccagccagaagaagaaatgaa

SEQ ID NO: 765219 - DNA, 120 bp, Artificial Sequence
  ENSG00000222038_9 (sequence is synthesized)
gaagcatgaaagtaataatgtgggattactagaaaacctgagtaatggtgtcactgctggcaatggtgatgatggattaattcctcaaaggaagagcagaacacctgaaaatcagcaatt

SEQ ID NO: 765220 - DNA, 120 bp, Artificial Sequence
  ENSG00000222038_10 (sequence is synthesized)
tcctgacaacgaaagtgaagagtatcacagaatttgcgaattagtttctgactacaaagaaaaacagatgccaaaatactcttctgaaaacagcaacccagaacaagacttaaagctgac

SEQ ID NO: 765221 - DNA, 83 bp, Artificial Sequence
  ENSG00000222038_11 (sequence is synthesized)
ggccagccagagaaaagatcctagaaaattttatggctatcgaagaaatgaagaagcacggaagtactcacgtcggattccca

SEQ ID NO: 765222 - DNA, 120 bp, Artificial Sequence
  ENSG00000222038_12 (sequence is synthesized)
agaaatgaagaagcacggaagtactcacgtcggattcccagaaaacctgactaatggtgccactgctggcaatggtgatgatggattaattcctccaaggaagagcagaacacctgaaag

SEQ ID NO: 765223 - DNA, 120 bp, Artificial Sequence
  ENSG00000222038_13 (sequence is synthesized)
atgaagagtatcacagtgacgaacaaaatgatactcagaagcaattttgtgaagaacagaacactggaatattacacgatgagattctgattcatgaagaaaagcagatagaagtggttg

SEQ ID NO: 765224 - DNA, 120 bp, Artificial Sequence
  ENSG00000222038_14 (sequence is synthesized)
aaaaaatgaattctgagctttctcttagttgtaagaaagaaagagacttcttgcatgaaaatagtatgttgcgggaagaaattgccatgctaagactggagctagacacaatgaaacatc

SEQ ID NO: 765225 - DNA, 120 bp, Artificial Sequence
  ENSG00000222038_15 (sequence is synthesized)
agagccagctaagaaaaaagaaatatttggaggatattgaaagtgtgaaaaaaaagaatgataatcttttaaaggctctacaattgaatgagctcaccatggatgatgataccgctgtgc

SEQ ID NO: 765226 - DNA, 120 bp, Artificial Sequence
  ENSG00000222038_16 (sequence is synthesized)
tcgtcattgacaacggctctggcatgtgcaaggccggctttgcgggcgacgatgccccccgggctgtcttcccttccatcgtggggtgccccaggcagcagggcatgatggggggcatgc

SEQ ID NO: 765227 - DNA, 74 bp, Artificial Sequence
  ENSG00000222038_17 (sequence is synthesized)
gtggggtgccccaggcagcagggcatgatggggggcatgcatcagaaagagtcctatgtgggcaagaacacggc

SEQ ID NO: 765228 - DNA, 120 bp, Artificial Sequence
  ENSG00000222038_18 (sequence is synthesized)
ctggcaccacaccttctacaacgagctgcgtgtggcccccgaggagcaccccatcctgctgaccgaggcccccctgaaccccaaggccaaccgcgagaagatgacccagatcatgtttga

SEQ ID NO: 765229 - DNA, 120 bp, Artificial Sequence
  ENSG00000222038_19 (sequence is synthesized)
acaccccagccatgtacgtggccatccaggccatgctgtccctgtacacctctggccgtactactggcatcgtgatggactctggtgacggggtcacccacactgtgcccatctatgatg

SEQ ID NO: 765230 - DNA, 120 bp, Artificial Sequence
  ENSG00000222038_20 (sequence is synthesized)
ggaatgccctcccccatgccaccctgcgcctagacctggctgggcgggaactgactgactacctcatgaagatcctcaccgagcgtggctataggttcaccaccatggccgagcgggaaa

SEQ ID NO: 765231 - DNA, 120 bp, Artificial Sequence
  ENSG00000222038_21 (sequence is synthesized)
tcgtgcgtgacatcaaagagaagctgtgctatgttgccctggacttcgagcaggagatggccatggtggcctccagctcctccctagagaagagctacgagctgcccgatggccaggtca

SEQ ID NO: 765232 - DNA, 120 bp, Artificial Sequence
  ENSG00000222038_22 (sequence is synthesized)
tcaccatcagcaacgagtggttccgctgccccgaggcgctcttccagccttgcttcctgggcatggaatcctgtggcatccatgaaactaccttcaactccatcatgaagtctgatgtgg

SEQ ID NO: 765233 - DNA, 120 bp, Artificial Sequence
  ENSG00000222038_23 (sequence is synthesized)
acatccgcaaagacctgtacaccaacacagtgctgtctggcggcaccaccatgtaccctggcatggcccacagaatgcagaaggagatcgctgccctggcgcctagcatgatgaagatca

SEQ ID NO: 765234 - DNA, 83 bp, Artificial Sequence
  ENSG00000222038_24 (sequence is synthesized)
aaggagatcgctgccctggcgcctagcatgatgaagatcaggatcattgctcctcccaagcgcaagtactccgtgtgggtcgg

SEQ ID NO: 765235 - DNA, 120 bp, Artificial Sequence
  ENSG00000222038_25 (sequence is synthesized)
ccattgtccaccgcaaatgcttctaggtggactctgacttagttgcgttacaccctttcttgacaaaaccaaacttctcagaaaacaacatgagattggcatggctttatttgttttctt

SEQ ID NO: 765236 - DNA, 120 bp, Artificial Sequence
  ENSG00000222038_26 (sequence is synthesized)
gtttcattttttgttttgttttttattggcttgactcaggatttaaaaaccggaatggtgaaggtgacagcagtcggttggaggaagcttcctccaaagttctacaatgtggccaaggac

SEQ ID NO: 765237 - DNA, 120 bp, Artificial Sequence
  ENSG00000222046_0 (sequence is synthesized)
atggcaggtggcagtccagcagccaagagggtagtggtgtaccggaatggggacccattcttcccaggctcccagctggtggtgactcaacgccgcttccccaccatggaggccttcctc

SEQ ID NO: 765238 - DNA, 120 bp, Artificial Sequence
  ENSG00000222046_1 (sequence is synthesized)
tgcgaggtgacatcagctgtgcaggccccactggctgtgcgtgccctctacacaccttgtcatggccaccctgtcaccaacctggcagacttgaagaacagagggcagtatgtggccgct

SEQ ID NO: 765239 - DNA, 120 bp, Artificial Sequence
  ENSG00000222046_2 (sequence is synthesized)
ggatttgaacgattccacaagctccactatttaccccatagagggaaggacccaggtgggaagagctgcagactacaaggtcctcccgtgactcgccacttgtgtgatggggccattgga

SEQ ID NO: 765240 - DNA, 120 bp, Artificial Sequence
  ENSG00000222046_3 (sequence is synthesized)
cggcagctgcctgcaggtgctcccagctatatccatgtgttcaggaatggggacctggtaagtcccccatttagtctgaagctgtcccaggctgccagccaggactgggaaactgtgttg

SEQ ID NO: 765241 - DNA, 120 bp, Artificial Sequence
  ENSG00000222046_4 (sequence is synthesized)
aagctcctgactgagaaggtcaagttgcagagtggggctgtgtgcaaactctgcaccctagaggggctcccactgtcagcagggaaggagctggtaactggccattactatgtggctgtc

SEQ ID NO: 765242 - DNA, 120 bp, Artificial Sequence
  ENSG00000222046_5 (sequence is synthesized)
tctggagctgctggtgcccagcccctccctgcccaggggctgctggcaacctccaggctcgaagtctaggccccacaggcagggggcccaaggccacagggcccaggtaacccagccctc

SEQ ID NO: 765243 - DNA, 120 bp, Artificial Sequence
  ENSG00000222046_6 (sequence is synthesized)
tccaaaggaaccagaccgaattaagccatctgctttctatgccagaccccagcagaccattcagccaagaagcaagctccccacactctcattcccatcaggagttataggagtatatgg

SEQ ID NO: 765244 - DNA, 120 bp, Artificial Sequence
  ENSG00000222046_7 (sequence is synthesized)
agctccccaccgaaggaaggagacagcgggggccctggaagtagcagatgatgaagacactcagacagaggagcccttggatcagagggcagcacagatagtggaagaggccttgtccct

SEQ ID NO: 765245 - DNA, 120 bp, Artificial Sequence
  ENSG00000222046_8 (sequence is synthesized)
ggaaaaccagcctggggctggggctgctatctcagcctcagccccagctctgccatcttgagagccagcagctccagagggcaactggggaccactactctggccaccttttgtccttag

SEQ ID NO: 765246 - DNA, 120 bp, Artificial Sequence
  ENSG00000222046_9 (sequence is synthesized)
cctccagcagcttgttcctcaggagccagcacctccgctgggctcacagggtacactgcggcctcctcagccctccccgttctcctgctcctaaacccacagcccagccttcccttcctc

SEQ ID NO: 765247 - DNA, 120 bp, Artificial Sequence
  ENSG00000222046_10 (sequence is synthesized)
tgagcagagcagccctggctgtgggggctatttccttatgggattctctggccagagaaaggagtagctgactaagcctgggagagggtttgtcacaataaaagaatacttactaacctc

SEQ ID NO: 765248 - DNA, 120 bp, Artificial Sequence
  ENSG00000222046_11 (sequence is synthesized)
gcagctgcctgcaggtgctcccagctatatccagtgagtgccagtgtgagggagcaggggtgttgatgtttgttttagtaaggccaagaaaatggtgttgggtttgttctaggagcctct

SEQ ID NO: 765249 - DNA, 120 bp, Artificial Sequence
  ENSG00000222046_12 (sequence is synthesized)
ggttactgttgggaatgtagaagtccagcatgcttgatgggtgaagagagaccagtgttatggttattgctggccctgtgccacccttcccctcacatgtagggactcctggggacactc

SEQ ID NO: 765250 - DNA, 120 bp, Artificial Sequence
  ENSG00000222046_13 (sequence is synthesized)
ctgagaaggtcaagttgcagagtggggctgtgtgcaagtgagtatggggactgcgagggcccaaaagtccccaaagagagcctcgccactggcttcagctgtggctgaggatgaagaggc

SEQ ID NO: 765251 - DNA, 120 bp, Artificial Sequence
  ENSG00000222046_14 (sequence is synthesized)
ccagccctcagaggcagggtagagcctgggtgcctagaggccagagggcaccttggaatagctgcacccaccccttcagtctgctgaatgtgaagaagcatcgagtctaccagcccttat

SEQ ID NO: 765252 - DNA, 120 bp, Artificial Sequence
  ENSG00000222047_0 (sequence is synthesized)
gctgatggagatgactctactgcaaaaatgacaaccagcaagaaagcgggtggtgcccgtttcctccctggggaccctcagagggccaggccattctcttccttggtgtgactgcggatc

SEQ ID NO: 765253 - DNA, 120 bp, Artificial Sequence
  ENSG00000222047_1 (sequence is synthesized)
cagggcccagctgaagagcatcagatctgtgggcatgttgcaccagtgaatgttggagaagtacttgttggacacacatgttcctccatttagacagtcacagttcgctggagagaacaa

SEQ ID NO: 765254 - DNA, 120 bp, Artificial Sequence
  ENSG00000222047_2 (sequence is synthesized)
agccaactgttgtaggggtggatactcacatggaacttgatgaagttcattgctgccctggaagagattcgggaggaggcttcatcaaaggtcccatgctccagggactccagggtgagg

SEQ ID NO: 765255 - DNA, 120 bp, Artificial Sequence
  ENSG00000222047_3 (sequence is synthesized)
gtaaactggccccaatcccaaaacccactcttccctctccctctcgcctcaccctgttcgtatctagttctcaaatggaagaccatgggtttccagccaggagaaatggattgacccaag

SEQ ID NO: 765256 - DNA, 120 bp, Artificial Sequence
  ENSG00000222047_4 (sequence is synthesized)
caagcttcatctaccagatgcccgcaggctggggcagtcccggcggcctcttcctcccttgccagccagtgccaacccccgtggttctcaagcctccgctgccaccctgtcccatttcct

SEQ ID NO: 765257 - DNA, 120 bp, Artificial Sequence
  ENSG00000222047_5 (sequence is synthesized)
ggggagagtctggccctgctgtggatggaatccggaggaccccagctccctgagcagcccctcctctcccctggtgctgatcagaggtccttgggcagcatcagtcaaagcaagagcgca

SEQ ID NO: 765258 - DNA, 120 bp, Artificial Sequence
  ENSG00000222047_6 (sequence is synthesized)
ctcactttggagtcgctcacgaccaggacgcagagaagcaggcgcgccagcagggctctcatggtggcgaggtcggggcgctagacggcggctctgcaaaggaaggagaagtcagggcaa

SEQ ID NO: 765259 - DNA, 120 bp, Artificial Sequence
  ENSG00000222047_7 (sequence is synthesized)
gaggcggaggaacgggaaggcaggccaggcgggcgactgcagcgcaggggagatgcccgcggtgaccaggctccccagctgtctctctcctctctgggctccggactccgggcagcctgg

SEQ ID NO: 765260 - DNA, 120 bp, Artificial Sequence
  ENSG00000222047_8 (sequence is synthesized)
ctctcctctctgggctccggactccgggcagcctggatcggcacccgcgggggacgcccgggacggggcgccttgactccgtgcagccgccggggagcccagggagcccgggcagcccag

SEQ ID NO: 765261 - DNA, 120 bp, Artificial Sequence
  ENSG00000222047_9 (sequence is synthesized)
cgggctccggggctgcggtctccgcactgtgctgcgacccgcggcgcctgctctatatcagggcccgccccggcgccgcccctccctctcccgcccggctccctcccctgtcttgcagcg

SEQ ID NO: 765262 - DNA, 120 bp, Artificial Sequence
  ENSG00000222047_10 (sequence is synthesized)
cccctgtcttgcagcgctcagcgacccggaccccgcgtgcttccgcaacgctcacaaagatttgggggaagcgcgatctccagcggaggggacccaacagcgtctggactgaggaatcga

SEQ ID NO: 765263 - DNA, 120 bp, Artificial Sequence
  ENSG00000222047_11 (sequence is synthesized)
gaggcttgtaaattctccgtgcttcctcccatgcacctggccgggggcctgccccagtgcaaggagtccccgaattgcagagaggagagaaggcgcacaggagactctctacctcgccca

SEQ ID NO: 765264 - DNA, 120 bp, Artificial Sequence
  ENSG00000222047_12 (sequence is synthesized)
gctctgaagcctcctggggtcctctaatcagttcttctgcaacttctccccgctgggccccaacttgcctaagactgcctcagacccccttgcccgcagctgatggagctgtgaagtctt

SEQ ID NO: 765265 - DNA, 120 bp, Artificial Sequence
  ENSG00000222047_13 (sequence is synthesized)
catcaacgcgacaaatgtacgagacatactctcccagaagcacagacagaaaaacccctgcctgtaggggctccctctgtgcgtctgttcagtggcagtccccagatatcaccaacacaa

SEQ ID NO: 765266 - DNA, 120 bp, Artificial Sequence
  ENSG00000222047_14 (sequence is synthesized)
ccagtggatggaacaaagccgggcttattgctttcggcagtaagggggtttgtttgatggtgctatcagagggggaaaggcaaggccagattactgaaaatttgcagcttggtttaaagt

SEQ ID NO: 765267 - DNA, 120 bp, Artificial Sequence
  ENSG00000222047_15 (sequence is synthesized)
ccgtttttgacagggcttgataaggattgggttaggtgtcgtgatatgatgttacaggattgtgggaacaaagtcctagggcataaactgttggtgcttcctattgaagtgttaacgggt

SEQ ID NO: 765268 - DNA, 120 bp, Artificial Sequence
  ENSG00000222047_16 (sequence is synthesized)
cttttgggaagtttccataatgagcaattcatttatttgtgcaggcaagaataaaagtaaagacaatggaaacatgtagacagttctaactgtggaggttctggagggtgtggaagttct

SEQ ID NO: 765269 - DNA, 120 bp, Artificial Sequence
  ENSG00000222047_17 (sequence is synthesized)
gttctcacctctgagtagaggaattgggagactggaggacaaaataagaggaagatttatttttcactgtttgtccttttacactcttaacattttaaaaagcacatctctgtatagccc

SEQ ID NO: 765270 - DNA, 120 bp, Artificial Sequence
  ENSG00000222047_18 (sequence is synthesized)
attccaaaaagataattatgcattttttaatgcatgtgtatttagtgttttacttcatcatagagccttgtttattctattcagatagaaacaattgtttatcaaataaaattgtcctcc

SEQ ID NO: 765271 - DNA, 88 bp, Artificial Sequence
  ENSG00000222047_19 (sequence is synthesized)
aaatggtgccagacgtggtggtatgagcctgtaattccagtggcctaggagtttgagatcagcctgggtgacagagcaagaccctgtc

SEQ ID NO: 765272 - DNA, 120 bp, Artificial Sequence
  ENSG00000223350_0 (sequence is synthesized)
gagagactgaagaacccagcattgcagcagctccaccatggcctgggctcctctgctcctcaccctcctcagtctcctcacagggtccctctcccagcctgtgctgactcagccaccttc

SEQ ID NO: 765273 - DNA, 120 bp, Artificial Sequence
  ENSG00000223350_1 (sequence is synthesized)
agcggctacagtaattataaagtggactggtaccagcagagaccagggaagggcccccggtttgtgatgcgagtgggcactggtgggattgtgggatccaagggggatggcatccctgat

SEQ ID NO: 765274 - DNA, 120 bp, Artificial Sequence
  ENSG00000223350_2 (sequence is synthesized)
cgcttctcagtcttgggctcaggcctgaatcggtacctgaccatcaagaacatccaggaagaggatgagagtgactaccactgtggggcagaccatggcagtgggagcaacttcgtgtaa

SEQ ID NO: 765275 - DNA, 120 bp, Artificial Sequence
  ENSG00000223417_0 (sequence is synthesized)
ggtgacctctgaaactcagtactgcggcgaatgagctcctgaccttgaggagtacttaacagaattatttctcgaagaatcattgtgggaacccttcaaagaacccagcgaaacatgaat

SEQ ID NO: 765276 - DNA, 120 bp, Artificial Sequence
  ENSG00000223417_1 (sequence is synthesized)
tctggaatctcgcaagtcttccagagggaactcacctgccccatctgcctgaactacttcatagacccggtcaccatagactgtgggcacagcttttgcaggccctgtttctacctcaac

SEQ ID NO: 765277 - DNA, 120 bp, Artificial Sequence
  ENSG00000223417_2 (sequence is synthesized)
tggcaagacatcccaattcttactcagtgctttgaatgcctaaagacaacacagcagagaaacctcaaaactaacattcgattgaagaagatggcttcccgtgccagaaaagccagtctc

SEQ ID NO: 765278 - DNA, 120 bp, Artificial Sequence
  ENSG00000223417_3 (sequence is synthesized)
tggctattcctgagctctgaggagcaaatgtgtggcactcacagggagacaaagaagatattctgtgaagtggacaggagcctgctctgtttgctgtgctccagctctctggagcaccgg

SEQ ID NO: 765279 - DNA, 120 bp, Artificial Sequence
  ENSG00000223417_4 (sequence is synthesized)
tatcacagacactgtcccgctgagtgggctgctgaggaacaccgggagaagcttttaaagaaaatgcagtctttatgggaaaaagtttgtgaaaatcagagaaacctgaacgtggaaacc

SEQ ID NO: 765280 - DNA, 120 bp, Artificial Sequence
  ENSG00000223417_5 (sequence is synthesized)
accagaatcagccactggaaggattatgtgaatgtaaggctagaagctattagagctgagtatcagaagatgcctgcatttcatcatgaagaagaaaaacataatttggagatgctgaaa

SEQ ID NO: 765281 - DNA, 120 bp, Artificial Sequence
  ENSG00000223417_6 (sequence is synthesized)
gagggagattttaagaggaacgtatgcggagctgatgaaaatgtgccataaaccagatgtggagctacttcaggcttttggagacatattacacaggagtgagtccgtgctgctgcacat

SEQ ID NO: 765282 - DNA, 120 bp, Artificial Sequence
  ENSG00000223417_7 (sequence is synthesized)
ggcccatcactggactgagggacaggctcaaccaattccgagtggatattactctgcctcataatgaagccaacagtcatatcttccgacgtggagatttgagaagcatttgtattggat

SEQ ID NO: 765283 - DNA, 120 bp, Artificial Sequence
  ENSG00000223417_8 (sequence is synthesized)
gtgaccgtcaaaatgcgccccatatcactgcaacacctacaagttttcttgcatggggtgctcagactttcacctctggcaaatattactgggaggtccatgtgggggactcttggaatt

SEQ ID NO: 765284 - DNA, 120 bp, Artificial Sequence
  ENSG00000223417_9 (sequence is synthesized)
gggcctttggtgtctgtaataagtattggaaagggacgaatcagaatggcaatatacatggagaggagggactctttagtcttgggtgtgttaagaatgacattcagtgcagcctcttta

SEQ ID NO: 765285 - DNA, 120 bp, Artificial Sequence
  ENSG00000223417_10 (sequence is synthesized)
ccacctccccacttacactgcagtatgtcccaagacctaccaaccatgtaggattattcctggattgtgaagctagaactgtgagcttcgttgatgttaatcaaagctcccctatacaca

SEQ ID NO: 765286 - DNA, 120 bp, Artificial Sequence
  ENSG00000223417_11 (sequence is synthesized)
gctccttctcacctcctctcaggcctatcttttgctgtgttcacctctgaccagagacaaatcagatatgtgttcatctgctgtgggaacccctttatcccagaaagccctcttccttgt

SEQ ID NO: 765287 - DNA, 120 bp, Artificial Sequence
  ENSG00000223417_12 (sequence is synthesized)
cctcttccttgtgccttatcaaacaggacaaatacgttctgttttatgtcttgaattgcattctaatgttattaaaactcatttattgtgttactattaaatgtggtaaaaacactaaaa

SEQ ID NO: 765288 - DNA, 120 bp, Artificial Sequence
  ENSG00000223417_13 (sequence is synthesized)
taatcttccagttgccccctaatgactttggaccaaagctttgaatcctgaccattgggatccagccagctgaggatttttcttcctaactgactttaacagggatctcatacttgctca

SEQ ID NO: 765289 - DNA, 120 bp, Artificial Sequence
  ENSG00000223417_14 (sequence is synthesized)
aaatatattctctgtttttttttctttatttctgactgccactgagtgaaataatagttgacagacatgtctgaatggagttaaaatcagtggaagagagtcgggatcttttgcttcatg

SEQ ID NO: 765290 - DNA, 120 bp, Artificial Sequence
  ENSG00000223417_15 (sequence is synthesized)
caaaaacttggagtgaagcgttaatgataactgggaaatgctgtttttctttctctttatctaactgtgttgcacttatccatcatgtttcattgtactaatctatcctttgagttaata

SEQ ID NO: 765291 - DNA, 120 bp, Artificial Sequence
  ENSG00000223443_0 (sequence is synthesized)
tgactcattccttaattgagtgctgatatttgattggtttatcgcacacctgatgggtgggtggggtgttcgcggttggtgggggtgagttatataagggctgatgcggccagagagctc

SEQ ID NO: 765292 - DNA, 88 bp, Artificial Sequence
  ENSG00000223443_1 (sequence is synthesized)
gagagctcgtcatttgaagactctcttggaagagatagcgtcttgctgcaacctgcacgggcgacatggaggacgactcactctactt

SEQ ID NO: 765293 - DNA, 60 bp, Artificial Sequence
  ENSG00000223443_2 (sequence is synthesized)
cttttcaaaactcacatcttctcggcctgaggcccgtgtcgacctctgtgatgatttggc

SEQ ID NO: 765294 - DNA, 85 bp, Artificial Sequence
  ENSG00000223443_3 (sequence is synthesized)
acatgctgtcccgggagcactctcaaacatgtcagcgtcccaagttgggccctccacagtcctggtcatgtcatccagccctcac

SEQ ID NO: 765295 - DNA, 72 bp, Artificial Sequence
  ENSG00000223443_4 (sequence is synthesized)
agaatgcctatcattgcggttctgccaaggtcctcatccttgtcttgaagagattctccgatgtcacaggca

SEQ ID NO: 765296 - DNA, 68 bp, Artificial Sequence
  ENSG00000223443_5 (sequence is synthesized)
agagagaccacccctgcctccaggcacccgagttggacgagcccaagagcaaaacaaaacgaagcctg

SEQ ID NO: 765297 - DNA, 70 bp, Artificial Sequence
  ENSG00000223443_6 (sequence is synthesized)
gaaaagtcgaaggtaccctgcctcccaacgtacttgtgattcatcaatcgaaatacaagtgtgggatgaa

SEQ ID NO: 765298 - DNA, 84 bp, Artificial Sequence
  ENSG00000223443_7 (sequence is synthesized)
agctccctgctaaacctctcttcgacgacccggacagatcaggagtccgtgaacactggcaccctcgcttctctgcaagggagg

SEQ ID NO: 765299 - DNA, 120 bp, Artificial Sequence
  ENSG00000223496_0 (sequence is synthesized)
agggcgttgggcggaaggggttcgcacgccaagaaccgccatgcctggggatcaccgccgcatccgcggccctgaagaatcgcagccgccgcagctgtacgcggccgacgaggaggaggc

SEQ ID NO: 765300 - DNA, 120 bp, Artificial Sequence
  ENSG00000223496_1 (sequence is synthesized)
gcccggcacccgcgacccaacgcggctacggcccgtgtacgcgcgcgccgggctgctgagccaggccaagggctcggcctacctggaggcgggaggcaccaaggtgctgtgtgccgtgtc

SEQ ID NO: 765301 - DNA, 80 bp, Artificial Sequence
  ENSG00000223496_2 (sequence is synthesized)
caccaaggtgctgtgtgccgtgtcgggcccgcgacaggccgagggcggcgagcgcggcggcggcccggccggagcaggcg

SEQ ID NO: 765302 - DNA, 120 bp, Artificial Sequence
  ENSG00000223496_3 (sequence is synthesized)
cccccgggcggctgcgaggagcgtgagctggcgctggcgctgcaggaggcgctggagccggctgtgcgcctgggccgctacccgcgcgcgcagctcgaggtgtcggcgctgctgctggag

SEQ ID NO: 765303 - DNA, 120 bp, Artificial Sequence
  ENSG00000223496_4 (sequence is synthesized)
ggcgctgctgctggaggacggtggctcggccctggccgccgcgctcaccgccgccgcgctcgccctggccgacgcgggcgtggagatgtacgacctggtggtgggctgcggcctcagcct

SEQ ID NO: 765304 - DNA, 120 bp, Artificial Sequence
  ENSG00000223496_5 (sequence is synthesized)
cgcgccggggcccgcgcccacctggctcctggaccccacgcggctcgaggaagagcgcgccgccgccggcctcaccgtggcgctcatgcctgtgctgaatcaggtggccgggctgctggg

SEQ ID NO: 765305 - DNA, 120 bp, Artificial Sequence
  ENSG00000223496_6 (sequence is synthesized)
cagcggcgagggcggcctgacagagagctgggcggaggccgtacgcctgggcctcgagggctgccagcgcctctaccccgtgctgcagcagagcctggtgcgggccgcccgccgcagggg

SEQ ID NO: 765306 - DNA, 120 bp, Artificial Sequence
  ENSG00000223496_7 (sequence is synthesized)
cgccgccgcccagccctgaaccagaagcctgagcaactacggacgcaagccgaggaccgtgctgccgccgtccacgaaaagacccgcgccatcggcctccagtttgcgtcgagaattcct

SEQ ID NO: 765307 - DNA, 120 bp, Artificial Sequence
  ENSG00000223496_8 (sequence is synthesized)
ggaagggccctgatatgactgtggttggactgacctgactgccagatggtgggacttggtctggagcagggactacttggaatgataaaggcaaaactcaacagcccctggagctgcgct

SEQ ID NO: 765308 - DNA, 120 bp, Artificial Sequence
  ENSG00000223496_9 (sequence is synthesized)
gctgcgcttgtggtggagctggaccctgaaattacctggaccttttttttagagacagggtttctttctgcagtctcaaactcctagccttgattgatcctcctgccttggcctcccaaa

SEQ ID NO: 765309 - DNA, 120 bp, Artificial Sequence
  ENSG00000223496_10 (sequence is synthesized)
atttcttgattgcacagaatgtacggtgatattggcggacttaaggacatcgaattgtttatcaggaataaagtattatgtgtgttttctgcggccctggataatgctgtagcattcagg

SEQ ID NO: 765310 - DNA, 120 bp, Artificial Sequence
  ENSG00000223496_11 (sequence is synthesized)
gtcgattgagtaaaaaaaatgtagagatggtttcctgtttgtttttgcttctagttttcattcatttgctatttattctcttctggctttgcttgtgtatgcatatatataaaaccatta

SEQ ID NO: 765311 - DNA, 120 bp, Artificial Sequence
  ENSG00000223496_12 (sequence is synthesized)
ttattattattattatttttagtttctagtggaaggcttttatttggttctgtgaatagtcattttgtttcctaagaacttccagcaagttgtattcattccattcatctagaattccta

SEQ ID NO: 765312 - DNA, 120 bp, Artificial Sequence
  ENSG00000223496_13 (sequence is synthesized)
gcaagttgtattcattccattcatctagaattcctaggctgcctttgtcgggcctgcaggtattaatggagaatagcagctttttatttttttatatttattttttgagacagagtctca

SEQ ID NO: 765313 - DNA, 90 bp, Artificial Sequence
  ENSG00000223496_14 (sequence is synthesized)
tgatctctataagatttttttcctctggtttttagtaaatgttttttttgagattgcttagcaccagaatgatttgcaaatttgaaaata

SEQ ID NO: 765314 - DNA, 120 bp, Artificial Sequence
  ENSG00000223496_15 (sequence is synthesized)
agattgcttagcaccagaatgatttgcaaatttgaaaataggaactccactaggaatgccggatagaagagtgcttcacatttgtagagggagacaagaactaaatatcacgacgtcttt

SEQ ID NO: 765315 - DNA, 120 bp, Artificial Sequence
  ENSG00000223496_16 (sequence is synthesized)
ctgagccttttggtttgctaacgtgccccaaattcttattccaaacggtataagataattatgtgtaaatgaataccagctctacttagttttatttcatatttgtgtatctgaatatat

SEQ ID NO: 765316 - DNA, 82 bp, Artificial Sequence
  ENSG00000223496_17 (sequence is synthesized)
acttagttttatttcatatttgtgtatctgaatatattaaaatatcttttttttttttttgatgcggagtcttgctctgttg

SEQ ID NO: 765317 - DNA, 120 bp, Artificial Sequence
  ENSG00000223496_18 (sequence is synthesized)
tcctgccttggcctcccaaagtactgtgattactatcatgagccaccacacctggcctaaaagatcattgatttagttttgagtaagattttaagtgattaaattatggtattgttgtgt

SEQ ID NO: 765318 - DNA, 120 bp, Artificial Sequence
  ENSG00000223496_19 (sequence is synthesized)
gtgtctggaatatctgatattagggttttttttttttttttttacagtttttgatatgctttattttgggtatgtagtttacaaaatataaaggaaatataaggagtgttctcttttttt

SEQ ID NO: 765319 - DNA, 120 bp, Artificial Sequence
  ENSG00000223496_20 (sequence is synthesized)
cttttttttttaaataaaaagtgtatttttaactgggcatggtggctcactcctgtaaccccagcactgtgggaggctgaggctggtgaatcgcctgagtccaggagtttgagaccagcc

SEQ ID NO: 765320 - DNA, 85 bp, Artificial Sequence
  ENSG00000223496_21 (sequence is synthesized)
aaaaaaggaaaaaaaataagtcagaaggctgaggcaggaggatcgcttgtgcctgggaggttgaagctacagtgagctatggtca

SEQ ID NO: 765321 - DNA, 120 bp, Artificial Sequence
  ENSG00000223496_22 (sequence is synthesized)
cttgtgcctgggaggttgaagctacagtgagctatggtcaagctactgcactccattataggcaaccctatctcaaaaaagcaaagcaaaacaaaacatttttccccttgattatagagg

SEQ ID NO: 765322 - DNA, 120 bp, Artificial Sequence
  ENSG00000223496_23 (sequence is synthesized)
tttgagaaaaatttgagggaagattcagaaaattacctgtaactgaacagaatgccaccagcttgggcttattctgcatgcataattatgaacattttcccagctcttgtgaaaattctc

SEQ ID NO: 765323 - DNA, 120 bp, Artificial Sequence
  ENSG00000223496_24 (sequence is synthesized)
acattcatagaaagatagatgcaccagtaaaataaatacctgtaaatacgataataatttcataataatatgcttcacctagatttaccagttactaatattttgccagttttattttct

SEQ ID NO: 765324 - DNA, 120 bp, Artificial Sequence
  ENSG00000223496_25 (sequence is synthesized)
cacacacttttgttgagcatctgaaaaccatacacatgatgacagttcaacccataatgttttagtttgcatctcccaagaataaggtttttcttctgtataacaagaatattgtaatca

SEQ ID NO: 765325 - DNA, 120 bp, Artificial Sequence
  ENSG00000223496_26 (sequence is synthesized)
tacctaagaaaatgaattttattacatatgtgttctatattcaaatttctgtaattacccctaagatgtcttttaaatgatttttagcattgatagtctgtgcctgtgtagattataaca

SEQ ID NO: 765326 - DNA, 120 bp, Artificial Sequence
  ENSG00000223496_27 (sequence is synthesized)
tctgtgcctgtgtagattataacattggctattgcaaaataatggttttctttttctctttttttttgagacgaaatcttgctctattgtccaagctggagggcagtggcacaatctcgg

SEQ ID NO: 765327 - DNA, 70 bp, Artificial Sequence
  ENSG00000223496_28 (sequence is synthesized)
tgatggttttctgattctagcatttcttttataagattgctatgtaaagcacagcttttctttttttagg

SEQ ID NO: 765328 - DNA, 120 bp, Artificial Sequence
  ENSG00000223496_29 (sequence is synthesized)
ataagattgctatgtaaagcacagcttttctttttttagggaaaaatgtcttttaacagctgcaaaataaatattctttcaatggaatgacaattattatttttgccatatatttatttt

SEQ ID NO: 765329 - DNA, 120 bp, Artificial Sequence
  ENSG00000223496_30 (sequence is synthesized)
aaaaatttatgtataatggtaacctgagcctgcatgttattcatgtgtggtgccatactgatctttaattttaatgtgaagcaagtactaatatagtaaagcataaattatataaaattt

SEQ ID NO: 765330 - DNA, 120 bp, Artificial Sequence
  ENSG00000223496_31 (sequence is synthesized)
gctttatattttggattgcaaattaattgctgtactttatagaaaagtttcccaaatccgttttacttttttgtatttgaaatttaatcacaggtggaatcttaaagagagcatttaggg

SEQ ID NO: 765331 - DNA, 120 bp, Artificial Sequence
  ENSG00000223496_32 (sequence is synthesized)
atattgtaaacagatgttattaaggactaatgttaacaaacattgaagaagagaaaacagtatttgtttttagcttaacatcttagtggagtgaaatattttcagtatatttattttatt

SEQ ID NO: 765332 - DNA, 120 bp, Artificial Sequence
  ENSG00000223496_33 (sequence is synthesized)
ctcagcctcccgagtagttgggatttacaagtcaattttttttttaactaaaactacagaatctatttttcttggtctcatactcagttttttatgtagtcacttagtaaataacctaat

SEQ ID NO: 765333 - DNA, 120 bp, Artificial Sequence
  ENSG00000223496_34 (sequence is synthesized)
ttgcttgttttctccacactaattttagggtgaattcctcatttcgcttttcagatcatggggtgagggggatggttgtgtgtgtgaggaactgaggaatcagatggaaaacaatgcctc

SEQ ID NO: 765334 - DNA, 120 bp, Artificial Sequence
  ENSG00000223496_35 (sequence is synthesized)
tgctcctttgagtataatcagtgatatttgaggttccagggttaaatgctgcatttttatttctgacgttcgtaccttaaaatatttgaagaaaataaactatttcattgttgtcagaaa

SEQ ID NO: 765335 - DNA, 120 bp, Artificial Sequence
  ENSG00000223501_0 (sequence is synthesized)
agtttgtgtttcagacttccatatttccatttgcagttgggtgaagtggttagagctgaaaggggacagctggagtcaaacaacttaactcaaatatctgggaacgatttcgcgctgagg

SEQ ID NO: 765336 - DNA, 120 bp, Artificial Sequence
  ENSG00000223501_1 (sequence is synthesized)
aagaccctttgggacttgtagctccactccggggaacggactcgccgggactgacagttgccggaagtgaggctgcggggaatggccgccgctgcgaccatggcggctgcggcccgggaa

SEQ ID NO: 765337 - DNA, 120 bp, Artificial Sequence
  ENSG00000223501_2 (sequence is synthesized)
ctggtgttgcgggctgggacctcagatatggaggaggaagagggcccgctggcgggtggtcctgggctccaggaaccactgcaacttggggagttggatatcacttctgatgaattcatc

SEQ ID NO: 765338 - DNA, 120 bp, Artificial Sequence
  ENSG00000223501_3 (sequence is synthesized)
ctggatgaagtggatgttcacattcaggcaaatctggaggatgagttagtaaaggaagctcttaaaacgggtgtagatctccgtcactattcaaagcaagttgagctggagctacagcag

SEQ ID NO: 765339 - DNA, 120 bp, Artificial Sequence
  ENSG00000223501_4 (sequence is synthesized)
attgaacagaaatccattcgggattatattcaagagagtgagaatatagcatctctacacaaccagatcacagcctgtgatgctgtcctggagcgaatggagcagatgttgggagctttt

SEQ ID NO: 765340 - DNA, 120 bp, Artificial Sequence
  ENSG00000223501_5 (sequence is synthesized)
cagagtgacctcagctccatcagctctgagatccggacactgcaggaacagtcaggagccatgaacattcgacttcgaaatcgccaggcagttcgggggaaacttggggagcttgttgat

SEQ ID NO: 765341 - DNA, 120 bp, Artificial Sequence
  ENSG00000223501_6 (sequence is synthesized)
ggtctggtggtgccttctgctctggtcacggcaattctggaggctccagtgacagagcccaggttcttggagcagctacaggagctggatgccaaggcagccgcagtcagagagcaggaa

SEQ ID NO: 765342 - DNA, 120 bp, Artificial Sequence
  ENSG00000223501_7 (sequence is synthesized)
gctagaggcacagcagcctgcgcagatgtcagaggcgtgctcgatcggctccgggtcaaggcagtgacgaagatccgagagtttatcctccagaagatttattccttcaggaaacccatg

SEQ ID NO: 765343 - DNA, 120 bp, Artificial Sequence
  ENSG00000223501_8 (sequence is synthesized)
accaactatcagatcccccagacggccctgctgaagtacaggttcttctatcagtttctgctgggcaatgaacgagcaacagcaaaggagatcagggatgaatatgtggagacgctgagc

SEQ ID NO: 765344 - DNA, 120 bp, Artificial Sequence
  ENSG00000223501_9 (sequence is synthesized)
aagatttacctgtcttactaccgctcttacctggggcggctcatgaaggtgcagtatgaggaagtcgctgagaaagatgatctaatgggtgtggaagatacagcaaagaaaggattcttc

SEQ ID NO: 765345 - DNA, 120 bp, Artificial Sequence
  ENSG00000223501_10 (sequence is synthesized)
tcaaagccatcgctccgcagcaggaacaccattttcaccctaggaacccgcggctctgtcatctcccccactgaacttgaggcccccatcctggtgcctcacacagcgcagcgcggagag

SEQ ID NO: 765346 - DNA, 120 bp, Artificial Sequence
  ENSG00000223501_11 (sequence is synthesized)
cagaggtatccatttgaggccctcttccgcagccagcactacgccctcctagacaattcctgccgcgaataccttttcatctgtgaattttttgttgtgtctggcccagctgcacacgac

SEQ ID NO: 765347 - DNA, 120 bp, Artificial Sequence
  ENSG00000223501_12 (sequence is synthesized)
ttatctagctgactgctacgatgccattgctgtttttctctgtatccacattgttctccggttccgtaacattgcagcaaagagggatgttcctgccctggacaggtactgggaacaggt

SEQ ID NO: 765348 - DNA, 120 bp, Artificial Sequence
  ENSG00000223501_13 (sequence is synthesized)
gcttgccttgctatggccacggtttgaactgatcctggagatgaatgttcagagcgtccgaagcactgacccccagcgcctaggggggttggatactcggccccactatatcacacgccg

SEQ ID NO: 765349 - DNA, 120 bp, Artificial Sequence
  ENSG00000223501_14 (sequence is synthesized)
ctatgcagagttctcctccgctcttgtcagtatcaaccagacaattcctaatgaacggaccatgcaattgctgggacagctgcaggtggaggtggagaattttgtcctccgagtggcagc

SEQ ID NO: 765350 - DNA, 120 bp, Artificial Sequence
  ENSG00000223501_15 (sequence is synthesized)
tgagttctcctcaaggaaggagcagcttgtgtttctgatcaacaactatgacatgatgctgggtgtgctgatggagcgggctgcagatgacagcaaagaggttgagagcttccagcagct

SEQ ID NO: 765351 - DNA, 120 bp, Artificial Sequence
  ENSG00000223501_16 (sequence is synthesized)
gctcaatgctcggacacaggaattcattgaagagttgctgtctcccccttttgggggtttagtggcatttgtgaaggaggctgaggctttgattgagcgtggacaggctgagcgacttcg

SEQ ID NO: 765352 - DNA, 120 bp, Artificial Sequence
  ENSG00000223501_17 (sequence is synthesized)
aggggaagaagcccgggtaactcagctgatccgtggctttggtagttcctggaaatcatcagtggaatctctgagtcaggatgtaatgcggagtttcaccaacttcagaaatggcaccag

SEQ ID NO: 765353 - DNA, 120 bp, Artificial Sequence
  ENSG00000223501_18 (sequence is synthesized)
tatcattcagggagcgctgacccagctgatccagctctatcatcgcttccaccgggtgctgtcccagccgcagctccgagccctccctgcccgggctgagctcatcaacattcaccacct

SEQ ID NO: 765354 - DNA, 120 bp, Artificial Sequence
  ENSG00000223501_19 (sequence is synthesized)
tatggtggagctcaagaagcataagcccaacttctgatgtgccagaaaccgccctgagatctgccggtcatctccatggacttctgcaccccattccatacccttcttcacctggggtac

SEQ ID NO: 765355 - DNA, 120 bp, Artificial Sequence
  ENSG00000223501_20 (sequence is synthesized)
cccttccagttttccccttgcttcccaggcccttgacatggcttacctgccttcactcccagcaccttgcccaacaggataagctggatccccttggccttctgaatatcccagtgtctt

SEQ ID NO: 765356 - DNA, 120 bp, Artificial Sequence
  ENSG00000223501_21 (sequence is synthesized)
caggtttcccaagaccacttccctgtgggcttccaaaatggcctttatcatttctccagtctgtcaccctcctttcctgctcccatacacccaaggcttgtttcttcccctgtaaaaacc

SEQ ID NO: 765357 - DNA, 120 bp, Artificial Sequence
  ENSG00000223501_22 (sequence is synthesized)
actgcctcaatctctggttcactcaactagtcaccatgtcctgaggcatgaagcctcctcagctcttggaattgctggcaaggggtgactgcctctgagtcattgtgtttttcaaagtga

SEQ ID NO: 765358 - DNA, 120 bp, Artificial Sequence
  ENSG00000223501_23 (sequence is synthesized)
tttcttttctgtagctttttgacctaagatctcagcaatttgaacactaacctctcccctcctggctcaagaattactccgaagtcagtctgcagaaaataaatatttagtatgacatga

SEQ ID NO: 765359 - DNA, 120 bp, Artificial Sequence
  ENSG00000223501_24 (sequence is synthesized)
tagactcctactgacctggtatcatcaacctttattcccattcatttgctccggaggcagtagtgctgctttttgactcacctttctccaaccactgccccccaacccccacaactagct

SEQ ID NO: 765360 - DNA, 120 bp, Artificial Sequence
  ENSG00000223501_25 (sequence is synthesized)
gggtaggagggactgaaggtagagtcacatcacatggaggtgggttggctaaggaagttgggaggttgtgttggttgggccaggaggtgggtgtgattttccttcccactctctcctaga

SEQ ID NO: 765361 - DNA, 120 bp, Artificial Sequence
  ENSG00000223501_26 (sequence is synthesized)
gctgggtgtgctgatggtaataggtgctccttctccttgccttcctacccagaaaattcggtttcccccactgctgttagctctgtgagggcagagatgatgcctgtcttgttcagtgtt

SEQ ID NO: 765362 - DNA, 120 bp, Artificial Sequence
  ENSG00000223501_27 (sequence is synthesized)
ttactcttggagtctggcacagtgtccagcttagtacaataagtgtggaatgaaggggacatcctgaagtgaaggactgctttccccaaactagacatttccctttgtcttcccttagga

SEQ ID NO: 765363 - DNA, 120 bp, Artificial Sequence
  ENSG00000223501_28 (sequence is synthesized)
ctggtgttgcgggctgggacctcagatatggaggaggaagagggcccgctggtgagagcgcggagctgtttctcctccgtagttccggtgctcctagcttcagaaagacctgagctgggt

SEQ ID NO: 765364 - DNA, 120 bp, Artificial Sequence
  ENSG00000223501_29 (sequence is synthesized)
ttaggcacaagggtgggaacttggctgctacccgtgatattacctgtttggctccccgtacccttccctgtgatcagacccgaccctgagcgggaccctagtggctgaaactcatgttct

SEQ ID NO: 765365 - DNA, 120 bp, Artificial Sequence
  ENSG00000223501_30 (sequence is synthesized)
ggggcacaaaatttcaacttcactccacattttggggtagagtcacgaagtagtatagtgtaaaggttaagaacatggcctctgaagccagactgcctgagttctatctctgccacttac

SEQ ID NO: 765366 - DNA, 120 bp, Artificial Sequence
  ENSG00000223501_31 (sequence is synthesized)
acgctgtgtgcccttgggcaagttaaccagcttctctgtgccatcatttctcacacctttaaggtgaggaagatagaacctattgtatacatcgtcgttaggattagatgaatatgtgta

SEQ ID NO: 765367 - DNA, 120 bp, Artificial Sequence
  ENSG00000223501_32 (sequence is synthesized)
agattgcacctggcatgcaggcgggtggtcctgggctccaggaaccactgcaacttggggagttggatatcacttctgatgaattcatcctggatgaagtggatgggtgtagatctccgt

SEQ ID NO: 765368 - DNA, 120 bp, Artificial Sequence
  ENSG00000223501_33 (sequence is synthesized)
gactgaaaccttttagaatgtgatgaaagctatagcctccctccccagaaagatgcacacattattttgacacatagttttgcatatgattgcaagggagggagagacaccctgaagccc

SEQ ID NO: 765369 - DNA, 120 bp, Artificial Sequence
  ENSG00000223501_34 (sequence is synthesized)
agcttccaggaggaagaggcggtgcgatctaggagaagtgcttccggaaactgtttcagcgcgacctggctggatttatgagagtatggcttgggtaccacaacttccggtgcgcctttc

SEQ ID NO: 765370 - DNA, 120 bp, Artificial Sequence
  ENSG00000223510_0 (sequence is synthesized)
cgctcaagagagcaagatgttctcgtgttgcttccccacttcgagaggttgctgcttcaggaatggagggagtgagagccttttccgacgatgccgaagaaggctcatccctcaccccag

SEQ ID NO: 765371 - DNA, 120 bp, Artificial Sequence
  ENSG00000223510_1 (sequence is synthesized)
acgcctgtcgcccgttgtaataaggcgcatccaggtaccacaggacagcctggggcaggccctagcaggccaggccacaccagagatcccattggggctgcagctgcacactgtccttgt

SEQ ID NO: 765372 - DNA, 120 bp, Artificial Sequence
  ENSG00000223510_2 (sequence is synthesized)
ccaggagattcaggagctcattgaggcacagacacttgctcctggtccatgtgcagaagtaagagcactgccagcaccagcggcggagccagagccagcatgggaagaggcccctccaga

SEQ ID NO: 765373 - DNA, 120 bp, Artificial Sequence
  ENSG00000223510_3 (sequence is synthesized)
gaggagctgcctgaaatcacggaggtgccggagagcattaaaagaaggctgggaagaagagttccagcagctacgcctgctcccagaggcaacctcctcctccaggcatggatgcgggtc

SEQ ID NO: 765374 - DNA, 120 bp, Artificial Sequence
  ENSG00000223510_4 (sequence is synthesized)
cacagctgggcatccaggctgtttgcccctaatgtgctgcccgggacaggcccttaacaggcgggcagtgggtgaggggaccaggaggtggctccaaagggtaaagcaaacaaagctttt

SEQ ID NO: 765375 - DNA, 120 bp, Artificial Sequence
  ENSG00000223510_5 (sequence is synthesized)
aacgacagccgttgtgccccaggctctccatgccaccacctgccctaccatttattaatagtgttagaattacaagttgatgaaacgagattacaataaagtttgatttctgaaacttca

SEQ ID NO: 765376 - DNA, 120 bp, Artificial Sequence
  ENSG00000223547_0 (sequence is synthesized)
agtctttggcccctcccgccgggtgaggttggcaccccgtttttcctgctctgagagggaccggttgccaccgccatacttctgtcgccctgtcgtctgtgttgtgactgctttggacgt

SEQ ID NO: 765377 - DNA, 120 bp, Artificial Sequence
  ENSG00000223547_1 (sequence is synthesized)
gggagtcacctgaaagccaggaaatggacttggtggctttcgaggatgtggctgtgaacttcacccaggaggagtggtctttgctggatccttcccagaagaatctctacagagaagtga

SEQ ID NO: 765378 - DNA, 120 bp, Artificial Sequence
  ENSG00000223547_2 (sequence is synthesized)
tgcaggaaaccttgaggaatctggcctccataggagaaaaatggaaagaccagaacattgaagatcagtacaaaaatcccaggaataatctaagaagtcttctgggagagagagttgatg

SEQ ID NO: 765379 - DNA, 120 bp, Artificial Sequence
  ENSG00000223547_3 (sequence is synthesized)
aaaatacagaagaaaatcattgtggagaaacttctagccagattccagatgacacactgaacaaaaaaacttctcctggagtaaaatcatgtgaaagcagtgtgtgtggagaagtcttcg

SEQ ID NO: 765380 - DNA, 120 bp, Artificial Sequence
  ENSG00000223547_4 (sequence is synthesized)
tgggtcattcttcccttaataggcacattagagctgacactgcacacaagccgtctgagtatcaggaatatggacaggagccatataagtgtcaacaacgtaagaaagccttcagatgtc

SEQ ID NO: 765381 - DNA, 120 bp, Artificial Sequence
  ENSG00000223547_5 (sequence is synthesized)
acccctcctttcaaatgcaagaaaaggctcacactggagaaaaactctatgattgtaaagaatgtggaaaaaccttcatatcccattcaagcattcaaagacacatgataatgcacaatg

SEQ ID NO: 765382 - DNA, 120 bp, Artificial Sequence
  ENSG00000223547_6 (sequence is synthesized)
gagatggaacttataaatgtaagttttgtgggaaagcctgcccttgtctcagcatatatcttatacatgaacgagttcacactggagagaaaccatataaatgtaaacaatgtggtaaag

SEQ ID NO: 765383 - DNA, 120 bp, Artificial Sequence
  ENSG00000223547_7 (sequence is synthesized)
cctttagttattcaacttcccttcaaatacatgaaagaactcacactggagagaagccttatgaatgtaaggaatgtgggaaagcattcggtagtcccaattccctttatgaacatagaa

SEQ ID NO: 765384 - DNA, 120 bp, Artificial Sequence
  ENSG00000223547_8 (sequence is synthesized)
gaactcacactggagagaagccatatgaatgcaaacaatgtggaaaagccttcagatggttccattcctttcaaatacatgaaagaactcacagtgaggagaaggcttatgaatgtacca

SEQ ID NO: 765385 - DNA, 120 bp, Artificial Sequence
  ENSG00000223547_9 (sequence is synthesized)
aatgtgggaaagcattcaagtgtcccagttatctttgtagacatgaagtgacccactctgggaaaaagccctgtgaatgtaaacaatgtgggaaagcattatcttatcttaactttcaaa

SEQ ID NO: 765386 - DNA, 120 bp, Artificial Sequence
  ENSG00000223547_10 (sequence is synthesized)
gacacatgaaaatgcacactagaatgagaccttataaatgtaagactgtggaaaagcctttgattctcccagttcgttttgaagacatgaaagaactcacactggagagaaaccttatga

SEQ ID NO: 765387 - DNA, 88 bp, Artificial Sequence
  ENSG00000223547_11 (sequence is synthesized)
gaagacatgaaagaactcacactggagagaaaccttatgaatgcaagcactgtggtaaagccttcaatcgttccagttcctttcacta

SEQ ID NO: 765388 - DNA, 90 bp, Artificial Sequence
  ENSG00000223547_12 (sequence is synthesized)
ccgagatctgcctcacaccttcaaatgcatggaaggactcacactcaagagaaaccctatgaatgtaagcagtgtggtaaagccttcatt

SEQ ID NO: 765389 - DNA, 120 bp, Artificial Sequence
  ENSG00000223547_13 (sequence is synthesized)
cttcaaatgcatggaaggactcacactcaagagaaaccctatgaatgtaagcagtgtggtaaagccttcattttttccacttcctttcgatatcatgaaaggactcacactggagagaaa

SEQ ID NO: 765390 - DNA, 120 bp, Artificial Sequence
  ENSG00000223547_14 (sequence is synthesized)
cacatctgcctcacaccttcaaatgcatgaaaggactcacactggaaagcaactgtatgaatctaaacaatgtgaaaaaacctttggatctgtcagaaaccttcaaattcatgaaaagac

SEQ ID NO: 765391 - DNA, 120 bp, Artificial Sequence
  ENSG00000223547_15 (sequence is synthesized)
acaccctggagagaaaccctataaggaatatggaaaagcattcaacaatttctcttcctttcaaatacatgcaacaatgcacagaggacagaatgcctatgaatgtaaagagtgtgacaa

SEQ ID NO: 765392 - DNA, 120 bp, Artificial Sequence
  ENSG00000223547_16 (sequence is synthesized)
agcattcatatctgccaagatccttcgagtacatgcaagaacacaccctggagagaaaccctatgaatgtaaggaatgcggaaaagcgttcaattatttttcttctttgcgtatacacaa

SEQ ID NO: 765393 - DNA, 120 bp, Artificial Sequence
  ENSG00000223547_17 (sequence is synthesized)
aaggatgcacactggagagaaaccatattaatgtaaggattgtgggaaagcattcagtttgcctggttcctttcgtagacataaaagggctcacactggagtgaaaccgtatgaatgcaa

SEQ ID NO: 765394 - DNA, 120 bp, Artificial Sequence
  ENSG00000223547_18 (sequence is synthesized)
ataaaagggctcacactggagtgaaaccgtatgaatgcaaggaatgtggcaaagccttcacttcttctggttcctttcagtgtcataaaaggattcacactggagagaaaccctatgagt

SEQ ID NO: 765395 - DNA, 120 bp, Artificial Sequence
  ENSG00000223547_19 (sequence is synthesized)
gagaaaccctatgagtgtaagcaatgtggaaaagcctttatttctttcagttccattcagtaccatgaaaggactcacactggagagaaacagtatgagtgtaagcagtgtggtaaagcc

SEQ ID NO: 765396 - DNA, 120 bp, Artificial Sequence
  ENSG00000223547_20 (sequence is synthesized)
gtatgagtgtaagcagtgtggtaaagccttcatgtcttctactgcatttcagtatcatgaaaagacccacaccagagagaaacactatgaatgtaagcagtgtgggaaagccttcatttc

SEQ ID NO: 765397 - DNA, 120 bp, Artificial Sequence
  ENSG00000223547_21 (sequence is synthesized)
acactggagagaaaccctatgaatgtaagcagtgtggtaaagccttcagatctgccactcaacttcagatgcatagaaagattcacactggcgagaaaccctatgaatgtaagcaatgtg

SEQ ID NO: 765398 - DNA, 120 bp, Artificial Sequence
  ENSG00000223547_22 (sequence is synthesized)
ctatgaatgtaagcaatgtgggaaagcctacagatctgtctcacaacttctggtgcatgaaaggactcacactgtagagcaaccctatgaatataagcaatatgggaaagccttcagatt

SEQ ID NO: 765399 - DNA, 120 bp, Artificial Sequence
  ENSG00000223547_23 (sequence is synthesized)
agccttcagatttgctaagaaccttcaaatacagacaatgaatgtaaacaattaaatgtttatagcagctgcatactaacatgttattctgtattttttttttctttttgagacagagtc

SEQ ID NO: 765400 - DNA, 69 bp, Artificial Sequence
  ENSG00000223547_24 (sequence is synthesized)
tacaggtatgagccaccgtgcccggccgttattctctattttttgttgttgtttgagacgggttcaagc

SEQ ID NO: 765401 - DNA, 62 bp, Artificial Sequence
  ENSG00000223547_25 (sequence is synthesized)
gctgttattctctatttaattaattgagaagccataataaaatatctcagtgccatcatgca

SEQ ID NO: 765402 - DNA, 120 bp, Artificial Sequence
  ENSG00000223547_26 (sequence is synthesized)
attgagaagccataataaaatatctcagtgccatcatgcattagatcaagtttatgttaccacattattttttggacattgtgagtcaatattaccaagtggacaaaatcccaggcatct

SEQ ID NO: 765403 - DNA, 120 bp, Artificial Sequence
  ENSG00000223547_27 (sequence is synthesized)
ttttcctcatgtaaattttaattttcatgcttatatacttagaacatttatcttggtcctaattttttgttcattcataataccaaaagttatctcatgttcttcagagtgactttgtgc

SEQ ID NO: 765404 - DNA, 120 bp, Artificial Sequence
  ENSG00000223547_28 (sequence is synthesized)
catatcccacagtggcatacctgtcttcaaagagggtataattcacaaaaggacttacactagaggaaaaccctatgaatgtaagctgcgtgggaaagcattttctgatctgagtggcat

SEQ ID NO: 765405 - DNA, 90 bp, Artificial Sequence
  ENSG00000223547_29 (sequence is synthesized)
gtaagctgcgtgggaaagcattttctgatctgagtggcattgaaacccacatggtattgcacatgacagataggcctctctccccgttca

SEQ ID NO: 765406 - DNA, 62 bp, Artificial Sequence
  ENSG00000223547_30 (sequence is synthesized)
agtagagacggggcttcactatgttggccaggtcatacaggcatgagccactgcacccggcc

SEQ ID NO: 765407 - DNA, 120 bp, Artificial Sequence
  ENSG00000223547_31 (sequence is synthesized)
tcaaagacataaaaggatgcacaataaagagagaccctctgaatgcaagcaatatggaaaagcattccattgtatcagatccttttgtagccatgaaagaactcgctgaagagaaaccct

SEQ ID NO: 765408 - DNA, 120 bp, Artificial Sequence
  ENSG00000223547_32 (sequence is synthesized)
gtaaatgaagggaatgtgaaaagccttcattcctgaaatgaagcaattcatactattaatatatgagagaaatcctattataagaaattgattgctgtgcacggtagcttacctgtaatt

SEQ ID NO: 765409 - DNA, 79 bp, Artificial Sequence
  ENSG00000223547_33 (sequence is synthesized)
taagaaattgattgctgtgcacggtagcttacctgtaattccagcacttcctaccagcctgggcaacatagtgaaaccc

SEQ ID NO: 765410 - DNA, 120 bp, Artificial Sequence
  ENSG00000223547_34 (sequence is synthesized)
gagaatcacttgaacccaggagctggatgttgcagtgacccgagattacgccactgtaccccagcagagtgagactccatctgaaaaaaaaagcaaggggccggcacggtggttcacgcc

SEQ ID NO: 765411 - DNA, 62 bp, Artificial Sequence
  ENSG00000223547_35 (sequence is synthesized)
cgagattacgccactgtaccccagcagagtgagactccatctgaaaaaaaaagcaaggggcc

SEQ ID NO: 765412 - DNA, 76 bp, Artificial Sequence
  ENSG00000223547_36 (sequence is synthesized)
aggaagcattcagttgtcccacttcctttcaaacaggaagagacactagagagaaaccctctgagataactgactg

SEQ ID NO: 765413 - DNA, 120 bp, Artificial Sequence
  ENSG00000223547_37 (sequence is synthesized)
agcattcagttgtcccacttcctttcaaacaggaagagacactagagagaaaccctctgagataactgactgttgaattaagaagagaggcctggccggacacagtggctcacgcctgta

SEQ ID NO: 765414 - DNA, 120 bp, Artificial Sequence
  ENSG00000223547_38 (sequence is synthesized)
agagaagtctgacaggacaataaaatttagaaatggagttggaggatgtcataatacaattcaccagtgtcctatcttacatgcaatttcaaaggcagacaagaggaagtcatcagtcac

SEQ ID NO: 765415 - DNA, 120 bp, Artificial Sequence
  ENSG00000223547_39 (sequence is synthesized)
attttagaggcaccaaacaggtgccacatccatacaggctgactccctgctcccagcccattttttcctgaatctttggcttgccaatcaagaatgtcctcaaaatttgctcagaggtgt

SEQ ID NO: 765416 - DNA, 120 bp, Artificial Sequence
  ENSG00000223547_40 (sequence is synthesized)
gggcctttgggtaaaggtgtcttcagaagctccacattaaagatccatcagtggttaagggcaaattgaagagaaataaagactaagatatttttttaaaagactgaaagaatagaacaa

SEQ ID NO: 765417 - DNA, 79 bp, Artificial Sequence
  ENSG00000223547_41 (sequence is synthesized)
gactaagatatttttttaaaagactgaaagaatagaacaatgaaaaagccccatctgtaatacagtttttctttttctt

SEQ ID NO: 765418 - DNA, 120 bp, Artificial Sequence
  ENSG00000223547_42 (sequence is synthesized)
tggctcattgcaatctgggcctcctggtttcaagtgattctggtgtctcagccacctgagtagtcaggattacaggtgcacaccaccacgcatggctaaatttttgtatttttagtagag

SEQ ID NO: 765419 - DNA, 120 bp, Artificial Sequence
  ENSG00000223547_43 (sequence is synthesized)
gtcttaaactcctgacctcaagtgatccgtctgtcttggcctttcaaaatgctgggattataggcgtgatccactgtgcctggcctggtgtttctttaggtataatgtctttaccagaga

SEQ ID NO: 765420 - DNA, 120 bp, Artificial Sequence
  ENSG00000223547_44 (sequence is synthesized)
gagagctaatgcagactgtcatgggtgagattgttctctgatgttcaattcccctactttgtatattgagtcagtatgagatgcgatttgtttggcaagcacctttgttcctgctgttac

SEQ ID NO: 765421 - DNA, 120 bp, Artificial Sequence
  ENSG00000223547_45 (sequence is synthesized)
tgacccttatcttgtagcctcacagctactatgcttttgtccagtccaactagataggagcttcttcctctgctgcagtgactggtctcacccagggctttcaggaaggtgagaataagc

SEQ ID NO: 765422 - DNA, 120 bp, Artificial Sequence
  ENSG00000223547_46 (sequence is synthesized)
accttcctcctcccaggaagttttgagtttcctgtgtttcatttctgaatgtaatgtctccatttattttcaattatgtttgattatatttgattaaaaacaataatttttttggcaacc

SEQ ID NO: 765423 - DNA, 120 bp, Artificial Sequence
  ENSG00000223547_47 (sequence is synthesized)
aagatttctgtacatgtgtcatagaaatagttgaacttttccacaactgtatactgacaaacattattctttcttaattaattcagtagctatattaaaatatgtattagatcaagttca

SEQ ID NO: 765424 - DNA, 120 bp, Artificial Sequence
  ENSG00000223572_0 (sequence is synthesized)
ccttgcacacccacagggtagacggatcgagtttcagcttaaaccgaggggtgtgggggaagggtgttgggttcagctagtccacgtgggtgctgtcctccacttggtgctgaaatctgg

SEQ ID NO: 765425 - DNA, 120 bp, Artificial Sequence
  ENSG00000223572_1 (sequence is synthesized)
gcggccacatccccggggcgggagggggctacatccccggctttagacgcgcgagtctcaggtcccgctaattacctggcgggtgctgcccacccctgccctcgcgcacctagcgcggtg

SEQ ID NO: 765426 - DNA, 120 bp, Artificial Sequence
  ENSG00000223572_2 (sequence is synthesized)
gcaggcgggaaggcggggcctgggggagccccacccctggagactgcggctggggcctccctctcctccgcccgcccgcctgccactagctcattgcgcctctcctgcagtctgattggc

SEQ ID NO: 765427 - DNA, 120 bp, Artificial Sequence
  ENSG00000223572_3 (sequence is synthesized)
accggctcccattccggctccagcctccaatccgacccccatttcggctgcagcctcggacctagctccggccctcggtctatccggttgcatcctccctccctgttccggatcttatct

SEQ ID NO: 765428 - DNA, 120 bp, Artificial Sequence
  ENSG00000223572_4 (sequence is synthesized)
tgcgccagcgcctactccaggatcccgtagccagacctcaagccatggctggtcccttctcccgtctgctgtccgcccgcccgggactcaggctcctggctttggccggagcggggtctc

SEQ ID NO: 765429 - DNA, 120 bp, Artificial Sequence
  ENSG00000223572_5 (sequence is synthesized)
tagccgctgggtttctgctccgaccggaacctgtacgagctgccagtgaacgacggaggctgtatcccccgagcgctgagtacccagacctccgaaagcacaacaactgcatggccagtc

SEQ ID NO: 765430 - DNA, 120 bp, Artificial Sequence
  ENSG00000223572_6 (sequence is synthesized)
acctgaccccagcagtctatgcacggctctgcgacaagaccacacccactggttggacgctagatcagtgtatccagactggcgtggacaaccctggccaccccttcatcaagactgtgg

SEQ ID NO: 765431 - DNA, 120 bp, Artificial Sequence
  ENSG00000223572_7 (sequence is synthesized)
atctagatgccagtaaaatccgttctggctactttgatgagaggtatgtattgtcctctagagtcagaactggccgaagcatccgaggactcagtctgcctccagcttgcactcgagcag

SEQ ID NO: 765432 - DNA, 120 bp, Artificial Sequence
  ENSG00000223572_8 (sequence is synthesized)
agcgacgagaggtggaacgtgttgtggtggatgcactgagtggcctgaagggtgacctggctggacgttactataggctcagtgagatgacagaggctgaacagcagcagcttattgatg

SEQ ID NO: 765433 - DNA, 120 bp, Artificial Sequence
  ENSG00000223572_9 (sequence is synthesized)
accactttctgtttgataagcctgtgtccccgttgctgactgcagcaggaatggctcgagactggccagatgctcgtggaatttggcacaacaatgagaagagcttcctgatctgggtga

SEQ ID NO: 765434 - DNA, 120 bp, Artificial Sequence
  ENSG00000223572_10 (sequence is synthesized)
atgaggaggatcatacacgggtgatctccatggagaagggtggtaacatgaagagagtgtttgaaagattctgccgaggcctcaaagaggtggagagacttatccaagaacgtggctggg

SEQ ID NO: 765435 - DNA, 120 bp, Artificial Sequence
  ENSG00000223572_11 (sequence is synthesized)
agttcatgtggaatgagcgtttgggatacatcttgacctgtccatctaacctgggcactggacttcgggcaggagtgcacatcaaactgcccctgctaagcaaagatagccgcttcccaa

SEQ ID NO: 765436 - DNA, 120 bp, Artificial Sequence
  ENSG00000223572_12 (sequence is synthesized)
agatcctggagaacctaagactccaaaagcgtggtactggaggagtggacactgctgccacaggcggtgtctttgatatttctaatttggaccgactaggcaaatcagaggtggagctgg

SEQ ID NO: 765437 - DNA, 120 bp, Artificial Sequence
  ENSG00000223572_13 (sequence is synthesized)
tgcaactggtcatcgatggagtaaactatttgattgattgtgaacggcgtctggagagaggccaggatatccgcatccccacacctgtcatccacaccaagcattaactccccatcgcca

SEQ ID NO: 765438 - DNA, 120 bp, Artificial Sequence
  ENSG00000223572_14 (sequence is synthesized)
gctgatgactcaagattccaaggagttctgctcattctaatgatggcccattctacttgctctggacctgccctcgcatcccctgcctccatcctagtaaagactccttgctatgctgca

SEQ ID NO: 765439 - DNA, 120 bp, Artificial Sequence
  ENSG00000223572_15 (sequence is synthesized)
cttcacctcactttaccttctcctccagcacaggaactaggaactacggagagagaagccaagggagaggaggaggaggaaactaacgattccctgcccacccccacacccagcaccacc

SEQ ID NO: 765440 - DNA, 120 bp, Artificial Sequence
  ENSG00000223572_16 (sequence is synthesized)
cttgccgagaaaacgcagagggcatcctgtgagcagcaaacacatctgagcctggaaaagacgcagagaagtaaaagatcaaagcctcggacctagctccggccctcggtctatccggtt

SEQ ID NO: 765441 - DNA, 120 bp, Artificial Sequence
  ENSG00000223572_17 (sequence is synthesized)
tcactctaggactaaaggtataaaccagctgggaccatactgggaaaaccaggacatgtggtcacactaagattaggaaaagagtgtcaggaaccttagaaagtgaagaaggcaggtaat

SEQ ID NO: 765442 - DNA, 120 bp, Artificial Sequence
  ENSG00000223572_18 (sequence is synthesized)
gcaaagaaggaataactgagatggcacgtcagtgcctgggatgtgtgcagtgggatggtgaggtgtgcagataaggaaaacattcgagcttagattgatgttggcggggagaggttgctg

SEQ ID NO: 765443 - DNA, 120 bp, Artificial Sequence
  ENSG00000223572_19 (sequence is synthesized)
tgttcatgactctaatataaccacccagttctgagacaaggtaggccttgactctggattctatcattcttgttaaagtatcgggtctaggctttaagttgagagttcagagggagactg

SEQ ID NO: 765444 - DNA, 120 bp, Artificial Sequence
  ENSG00000223572_20 (sequence is synthesized)
gggaaggtggaggatagaatggttcgagttctagaatatgtggctctagatgagaggttgaactgaatcatcaatcctacatggattgggtctccgtattcaagtctacattagaaatcc

SEQ ID NO: 765445 - DNA, 120 bp, Artificial Sequence
  ENSG00000223572_21 (sequence is synthesized)
ctggccagccagaggcaactagaactattaggaaagcatagactctgaaagtccctaaagagattaccaaggtttaccctctttctaattccccctcctcccgcggagcaaagccagaca

SEQ ID NO: 765446 - DNA, 120 bp, Artificial Sequence
  ENSG00000223572_22 (sequence is synthesized)
tggccaactggacagctcccaggtaactgcactaggtctaggcgtctgtgccctccctccatggttactgggtaccccctccccagcgctgagtacccagacctccgaaagcacaacaac

SEQ ID NO: 765447 - DNA, 120 bp, Artificial Sequence
  ENSG00000223572_23 (sequence is synthesized)
gaaatcaatgcacaattgaagtctggggagggattccctctccttaaccatctctccctcttaactccccttaggtatttgctgacctgtttgaccctgtgatccaagagcgacacaatg

SEQ ID NO: 765448 - DNA, 120 bp, Artificial Sequence
  ENSG00000223573_0 (sequence is synthesized)
agagctggagccggagccgggcgggcgccatggaggggctgcggcgggggctgtcgcgctggaagcgctaccacatcaaggtgcacctggcggacgaggcgctgctgctaccgctgaccg

SEQ ID NO: 765449 - DNA, 120 bp, Artificial Sequence
  ENSG00000223573_1 (sequence is synthesized)
tgcggccgcgggacacgctcagcgacctgcgcgcccagctggtgggccagggcgtgagctcctggaagcgcgccttctactacaacgcgcggcggctggacgaccaccagacggtgcgcg

SEQ ID NO: 765450 - DNA, 120 bp, Artificial Sequence
  ENSG00000223573_2 (sequence is synthesized)
acgaccaccagacggtgcgcgacgcgcgcctgcaggacggctcggtgctgctgctcgtcagcgaccccagcgaggcgcagcggctcacacccgcaatcccagcactttgggaggctgagg

SEQ ID NO: 765451 - DNA, 65 bp, Artificial Sequence
  ENSG00000223573_3 (sequence is synthesized)
tagtctgggtgacagggtgaaactccgtctctaaagaaataaataataaaattttatttcacgcc

SEQ ID NO: 765452 - DNA, 120 bp, Artificial Sequence
  ENSG00000223573_4 (sequence is synthesized)
gcgaccccaggtagtctgggttggaggaggcagagccatgaccaaggggacctgggtactggctgaaggaataggctggggtagagggcacttttggaaggcacttctcctgcctcccgg

SEQ ID NO: 765453 - DNA, 120 bp, Artificial Sequence
  ENSG00000223573_5 (sequence is synthesized)
gagcctagatctcactccagggtctgggctcccaggtggaccatgaaaccctggcctgaccagctgatgcacactgcttcagacactcctgctggagccccagtccctgacaaggaccta

SEQ ID NO: 765454 - DNA, 120 bp, Artificial Sequence
  ENSG00000223573_6 (sequence is synthesized)
ggacatttttgctcctgcccagcctatcgggagggagccttgagcctttcagctctgctgtgtgactttgaggttgttgctcccctcttggggccctgggtgccctgtcttcagtggaaa

SEQ ID NO: 765455 - DNA, 120 bp, Artificial Sequence
  ENSG00000223573_7 (sequence is synthesized)
gcactgtgccaccttggaaagctcccatgggcagccagagggcatcgcaagaagagaagcacagaaggggcaggagagacactcagaggcacttccgctcttgcccaggacattttccca

SEQ ID NO: 765456 - DNA, 120 bp, Artificial Sequence
  ENSG00000223573_8 (sequence is synthesized)
gccacacctttgcccaagccgtgccccctgcctggagcacttttcaacctcttctctgcagctccaatacacctgggattgcagtctcctccaggaagtcttctcagattccctccttcc

SEQ ID NO: 765457 - DNA, 120 bp, Artificial Sequence
  ENSG00000223573_9 (sequence is synthesized)
cagccagagagcacctagccttctttggggcccccacaggccctttgtgcagtgaacagccctggctgggggtgcagccagtcgtgtccgaactctccaatgactaagcggggagatgcg

SEQ ID NO: 765458 - DNA, 120 bp, Artificial Sequence
  ENSG00000223573_10 (sequence is synthesized)
gacatcctagctccttctcaggcctccaactgtgccccatttccacccccaaatacctccccaggaggcacctgtgcccaccccctgggctgtttcccccttccccttaaatccggatgc

SEQ ID NO: 765459 - DNA, 120 bp, Artificial Sequence
  ENSG00000223573_11 (sequence is synthesized)
ctcgtcttgcatagggtcttggggcagcggggaaggggttctgaagaactctggccaagaggacgaggatctgggggtggggaactgggcctagctgtgggaggtcatcgcggggcattg

SEQ ID NO: 765460 - DNA, 120 bp, Artificial Sequence
  ENSG00000223573_12 (sequence is synthesized)
cagggagtgcgttgtgggaattccgggtggagaccctcagggcagtgtgccgggcctccgttgcacctctgacctgcagccacgtcatcgttgcgcagcccctggggagggtctttgggg

SEQ ID NO: 765461 - DNA, 120 bp, Artificial Sequence
  ENSG00000223573_13 (sequence is synthesized)
agggggtgccgaggctacgcatgtcctcgagggccgtgtacactctccaggcaccatgggcggaggcgccagaggctgggaagaaataatgttttagttaagagtcctgttggctgcagg

SEQ ID NO: 765462 - DNA, 120 bp, Artificial Sequence
  ENSG00000223573_14 (sequence is synthesized)
actcagagcatggacaggtggatagtaaatcaccaccacggggacagccgtgcccagactgtgcgtttgcttagctcggggacagcacttggcccggggtctcctgctcgcctcccttca

SEQ ID NO: 765463 - DNA, 120 bp, Artificial Sequence
  ENSG00000223573_15 (sequence is synthesized)
gagcatctgccaaacttcgggcatctaccctgcaattcccgcttggctgagaggagggggagaaggaggggaagagagaggagccccacttcactccggcaggcagacctgctggagctg

SEQ ID NO: 765464 - DNA, 120 bp, Artificial Sequence
  ENSG00000223573_16 (sequence is synthesized)
cttgggtcttgctggcccctgggtgtgcctggaggggggtcttcctatccccctccacctctccccttggtgcctaacccaggactttgtccccagagacccactgtgtgccccctggag

SEQ ID NO: 765465 - DNA, 120 bp, Artificial Sequence
  ENSG00000223573_17 (sequence is synthesized)
ctcctcctagagcagagtctgctgctgtctgttctgcagagggtagcctgaggcccaaggaggttgtcagggacacacagcagggggaggcagcccagatccctgctcatgcgtggtttg

SEQ ID NO: 765466 - DNA, 120 bp, Artificial Sequence
  ENSG00000223573_18 (sequence is synthesized)
ggcctctgctaacagctgggccacatgcgtgtatctagagcctgggtcccctctgtcctcatttccctgtgcatattcagggacatgcctcgtcagggtttggcaagaaaatggggcatt

SEQ ID NO: 765467 - DNA, 120 bp, Artificial Sequence
  ENSG00000223573_19 (sequence is synthesized)
catttaataatctccccagtttcattccttggtccttactccatgccaggacttgtgcacatctttttggagccctgtctcacttgattgacagccggccaggcgcggtggctcacgcct

SEQ ID NO: 765468 - DNA, 120 bp, Artificial Sequence
  ENSG00000223573_20 (sequence is synthesized)
cgtctcaaaaaaaaaaaaaaaaaagattgacagcctcactgctcaggggccaggataacagcccattttacagatggcttttggcttgcccaaggtcaccaccctctgaactgaggcgtc

SEQ ID NO: 765469 - DNA, 120 bp, Artificial Sequence
  ENSG00000223573_21 (sequence is synthesized)
gaggcgtccccaacccatgccgggagctggtggaggaagtggggaagggtttcccgcttctccactgggggtggaggtgggagaaagcattttcagggtgttttgacatttaacaaacag

SEQ ID NO: 765470 - DNA, 120 bp, Artificial Sequence
  ENSG00000223573_22 (sequence is synthesized)
tatgcaaatcacatgcaaatcgcatgcaaatcaccacccatttcttaagcctcgacagcgctggcatgttctgaaataataatgttggacctgtcccttgatgatgacctgggtcgggag

SEQ ID NO: 765471 - DNA, 120 bp, Artificial Sequence
  ENSG00000223573_23 (sequence is synthesized)
gtgcacggccttttccttcctccgtcttcccttcccttcccttcccttcccatctgttctcccttccttcgcccccttcctttcctctccctccctatcttccatttttctcttcttcct

SEQ ID NO: 765472 - DNA, 120 bp, Artificial Sequence
  ENSG00000223573_24 (sequence is synthesized)
tcacatcatttgtccaagacctccctggcctgagataaacataagttgcaaaagtggcttcctgcagcccattttccaggttgggaaactgaggcatgggcctaaggtcccacagccaca

SEQ ID NO: 765473 - DNA, 120 bp, Artificial Sequence
  ENSG00000223573_25 (sequence is synthesized)
ccgaggaaagcagcccccactgaatgtcaccatgcaccaaagtgcatggtcctcgtgacacaaagaggggagatgacagtggctggagttgtcagagctgctttgaggaagctccaggcc

SEQ ID NO: 765474 - DNA, 120 bp, Artificial Sequence
  ENSG00000223573_26 (sequence is synthesized)
tgataggcttgacagggccaaggggaactattgtggaatgtcttggccttgaatgacaggctgctgattttggatctggagaaagctcacactgactcttcctgctcccccagtctgttt

SEQ ID NO: 765475 - DNA, 120 bp, Artificial Sequence
  ENSG00000223573_27 (sequence is synthesized)
ttctcctgctactccatccatgtatccctgagtttgggccacagtccctccacttggtttgcatgtcccaccttctttgtttggcaagctcctattcatccttcaaagccctagcttcaa

SEQ ID NO: 765476 - DNA, 120 bp, Artificial Sequence
  ENSG00000223573_28 (sequence is synthesized)
tacctgctacttcatgcagccattgcttatccttcaaggagagcctacttccctcaaggaccctgctgcttccagtctcaccttctgactcactcgggatccactgaactgggaggtctg

SEQ ID NO: 765477 - DNA, 120 bp, Artificial Sequence
  ENSG00000223573_29 (sequence is synthesized)
tgtctcctcccagcagagtcatcactacctttggggccgcaggatcacccagcttggaactagatacagaaatgctgttttgagagtgtactgaataaaagattacatgtttgaaaacaa

SEQ ID NO: 765478 - DNA, 89 bp, Artificial Sequence
  ENSG00000223573_30 (sequence is synthesized)
gggcacttttggaaggcacttctcctgcctcccgggagcctagatctcactccaggtggcagaaaacagccaagttccaaacagtgagc

SEQ ID NO: 765479 - DNA, 120 bp, Artificial Sequence
  ENSG00000223573_31 (sequence is synthesized)
gccgcggaagcccccatctctctgcccgcccagcgtttcccccacgggcccaacaccacctttgtgggaggccctggaggcgcaggtggaggctggaatgggggcttcctcaagggtcga

SEQ ID NO: 765480 - DNA, 80 bp, Artificial Sequence
  ENSG00000223591_0 (sequence is synthesized)
atgggcagagtgaggaaccgcgccactgctcagcggcggaggcgaaagcggcccggggatcctcccgccgcctgcgcggc

SEQ ID NO: 765481 - DNA, 120 bp, Artificial Sequence
  ENSG00000223591_1 (sequence is synthesized)
gtccaagtcggggtcgggagccacgcggcggccaagaggtggctgggtaggtggcgacggaagcgccgctggcggcgggtccggaaggcgggccccagagacctgctgccctccgcgcca

SEQ ID NO: 765482 - DNA, 120 bp, Artificial Sequence
  ENSG00000223591_2 (sequence is synthesized)
accccggacccgccggggcccgccccgtcccccaaggatctggacctgggcgcacagcgggagcgctgggagacgttcaggaagctgcggggcctcagctgcgagggcgccgccaaggtc

SEQ ID NO: 765483 - DNA, 120 bp, Artificial Sequence
  ENSG00000223591_3 (sequence is synthesized)
ctgctggacaccttcgagtacccgggcctcgtgcatcacaccgggggctgccactgcggcgcggtccgctttgcggtctgggcccctgcagatctgcgcgtcgtggattgcagctgcagg

SEQ ID NO: 765484 - DNA, 120 bp, Artificial Sequence
  ENSG00000223591_4 (sequence is synthesized)
ctgtgcaggaagaagcagcaccgccacttcctcgtcccggcctcgcgcttcacgctgctccagggcgcagaaagcatcgtcacctatcggtccaacacgcacccggcgctgcacagcttc

SEQ ID NO: 765485 - DNA, 120 bp, Artificial Sequence
  ENSG00000223591_5 (sequence is synthesized)
tgcagcaggtgcggggtgcagagtttccacgcagctgtctctgacccccgcgtgtacggcgtcgccccgcactgcctggacgagggcaccgtgcgcagcgtggtcatcgaggaggtcggc

SEQ ID NO: 765486 - DNA, 120 bp, Artificial Sequence
  ENSG00000223591_6 (sequence is synthesized)
cagtcagcccctgcctgtccccgcgaacaggagcagtgattggggccgcaagcccgcctgaaaccggcccgggcggccctgcggggagcgtccgagtacctgcacagatcccatgctgtg

SEQ ID NO: 765487 - DNA, 120 bp, Artificial Sequence
  ENSG00000223591_7 (sequence is synthesized)
aaagaggtgtttctggcctggtcacaccggggattcccttccagtatttgcccttcccctccgctagttttcagtgaactcgcttacgatccaaatcttgaacacacctttgtctgcgta

SEQ ID NO: 765488 - DNA, 120 bp, Artificial Sequence
  ENSG00000223591_8 (sequence is synthesized)
gtacaacgttaatcttgcaattcggtaaggaagaagagtgtctctgatttttcaaaccatccattgtatctctcgcttttactgttctgcctacagttgtcacaaatcacctgcagatga

SEQ ID NO: 765489 - DNA, 120 bp, Artificial Sequence
  ENSG00000223591_9 (sequence is synthesized)
ttcctgtgtactgtacgttcctggtgctattgtgaacaggcttgttgttttcagcgctttgcctctggtgtgtaggacggcaacacacaaccagtttgtaaacatgtgctaggacgtctt

SEQ ID NO: 765490 - DNA, 120 bp, Artificial Sequence
  ENSG00000223591_10 (sequence is synthesized)
ccattgattatggtgtgcgtgggctcccgcacctgtgagtttcaggtagacgttcatattttcactgcttagattcgagttatgctatttactggtttttaaatgatatatttcaagatt

SEQ ID NO: 765491 - DNA, 120 bp, Artificial Sequence
  ENSG00000223591_11 (sequence is synthesized)
tggtcgtgttacatacctcattactctttatttcctgtaacagcgaaagctgttactatttcgcttgttgtttgggaagtgtctctgggtaaggagatggggatacaggaatgagaaaga

SEQ ID NO: 765492 - DNA, 120 bp, Artificial Sequence
  ENSG00000223591_12 (sequence is synthesized)
catctgtgcacacaggaatgagaaagacatctgcgcactgtctgccctctttaatcttttgaaatacctgtcttgtacatgtgttaagtatatagaaatcagtaaataccttctaggaaa

SEQ ID NO: 765493 - DNA, 120 bp, Artificial Sequence
  ENSG00000223601_0 (sequence is synthesized)
acaaaattgtgtgaaaatcacagaaacaatcacccacaatgtcccgcccaagaaacaacccacagaccagcagcccacaagacagtacaaaggatgggagcagcttccattactttcaag

SEQ ID NO: 765494 - DNA, 120 bp, Artificial Sequence
  ENSG00000223601_1 (sequence is synthesized)
ggagatttgagctctctgggaagagcagacagtatccagcagatgcattggagccccaacctggtattggagatgttaaggtcattgaaaaagcaactaagtctatgctagacccagcac

SEQ ID NO: 765495 - DNA, 120 bp, Artificial Sequence
  ENSG00000223601_2 (sequence is synthesized)
agagatctcatttttaccttgtaaccccaagcttagtatttttgtgttttatattcgatggattacacaaggcactactcagtgtcggtgtgagcaaaaggtctaatattgtgattggga

SEQ ID NO: 765496 - DNA, 120 bp, Artificial Sequence
  ENSG00000223601_3 (sequence is synthesized)
atgagaacaaggaaacaggtactctctatgctagcaaatttgaagatgttttgcctaccttcactgcccttgagatgtcatcaattctgcgtcactgctgtgatctgataggcattgctg

SEQ ID NO: 765497 - DNA, 120 bp, Artificial Sequence
  ENSG00000223601_4 (sequence is synthesized)
ccggatcgagtgacccgatatgcaccaacagcctccaagtacagagacaattcaaggcaatgatgatatccattggaagacctttgcatagtgaaagtgctgatttattaattagctata

SEQ ID NO: 765498 - DNA, 120 bp, Artificial Sequence
  ENSG00000223601_5 (sequence is synthesized)
ccagctatagattggatcaactcaagaccatgggttggaggattaatgttcacatttctatttggagaatttgaatcccctgcgtgcgagctacttgatcaagttaaagtagttgccagc

SEQ ID NO: 765499 - DNA, 120 bp, Artificial Sequence
  ENSG00000223601_6 (sequence is synthesized)
aaagcacagatgatgacctactacactgtgagaatgttcctggatcagtgtgtggatggttccactgctttacccgctgttgtgttggagattccagtttttgagcagaagaaaccactg

SEQ ID NO: 765500 - DNA, 120 bp, Artificial Sequence
  ENSG00000223601_7 (sequence is synthesized)
gctaaaaaggtacttggagatttctttgaatttgggggtgtacttcgccaccctgttattggggtgctatcaccacaaatgttcccaaacctagcaacagcagcaaactactgggccaaa

SEQ ID NO: 765501 - DNA, 120 bp, Artificial Sequence
  ENSG00000223601_8 (sequence is synthesized)
agaaggaattccacattttctggatttgaagcccttgacattataccaggatcaactattacattccctgtacttcaaatggcatctgctcagaaaatctccagaggaagtgacatggat

SEQ ID NO: 765502 - DNA, 120 bp, Artificial Sequence
  ENSG00000223601_9 (sequence is synthesized)
ccatatacacttaacatccttcgcggttatgggatttcgggatttgaataacaaatacgtgaactaatccttatatatacatataaaaagaaattatgtgaaaatcacattctaaaatag

SEQ ID NO: 765503 - DNA, 120 bp, Artificial Sequence
  ENSG00000223609_0 (sequence is synthesized)
gggagaggcaaagggctgggggccagagaggagaagtaaaaagccacacatgaagcagcaatgcaggcatgcttctggctcatctgtgatcaccaggaaactcccagatctgacactgta

SEQ ID NO: 765504 - DNA, 120 bp, Artificial Sequence
  ENSG00000223609_1 (sequence is synthesized)
gtgcatttcactgctgacaagaaggctgctgccaccagcctgtgaagcaaggttaaggtgagaaggctggaggtgagattctgggcagtgttcactagcaacctcaaacagacaccatgg

SEQ ID NO: 765505 - DNA, 120 bp, Artificial Sequence
  ENSG00000223609_2 (sequence is synthesized)
tgcatctgactcctgaggagaagactgctgtcaatgccctgtggggcaaagtgaacgtggatgcagttggtggtgaggccctgggcagattactggtggtctacccttggacccagaggt

SEQ ID NO: 765506 - DNA, 120 bp, Artificial Sequence
  ENSG00000223609_3 (sequence is synthesized)
gcctttagtgatggcctggctcacctggacaacctcaagggcactttttctcagctgagtgagctgcactgtgacaagctgcacgtggatcctgagaacttcaggctcttgggcaatgtg

SEQ ID NO: 765507 - DNA, 120 bp, Artificial Sequence
  ENSG00000223609_4 (sequence is synthesized)
ctggtgtgtgtgctggcccgcaactttggcaaggaattcaccccacaaatgcaggctgcctatcagaaggtggtggctggtgtggctaatgccctggctcacaagtaccattgagatcct

SEQ ID NO: 765508 - DNA, 120 bp, Artificial Sequence
  ENSG00000223609_5 (sequence is synthesized)
ggactgtttcctgataaccataagaagaccctatttccctagattctattttctgaacttgggaacacaatgcctacttcaagggtatggcttctgcctaataaagaatgttcagctcaa

SEQ ID NO: 765509 - DNA, 120 bp, Artificial Sequence
  ENSG00000223609_6 (sequence is synthesized)
tgtgtaagaaggttcctgaggctctacagatagggagcacttgtttattttacaaagagtacatgggaaaagagaaaagcaagggaaccgtacaaggcattaatgggtgacacttctacc

SEQ ID NO: 765510 - DNA, 120 bp, Artificial Sequence
  ENSG00000223609_7 (sequence is synthesized)
attgtggcattatttgaattcagaaaagagtgaaaaactactgggatcttcattcctgggtctaattccacatttttttttaagaacacatctgtaaaaatgttctgtactagcatattc

SEQ ID NO: 765511 - DNA, 120 bp, Artificial Sequence
  ENSG00000223609_8 (sequence is synthesized)
ccaggaacttcgttaaatttaatctggctgaatatgggaggacaggaccagcataaaaggcagggcagagtcgactgttgcttacactttcttctgacataacagtgttcactagcaacc

SEQ ID NO: 765512 - DNA, 120 bp, Artificial Sequence
  ENSG00000223614_0 (sequence is synthesized)
cttttgtgtttctctgcgtccagagctccagttcttctcttcactgctctgcgtcctctgctcttagaggtcaagccactgtggccttgtgtcctgcaggtatccgcagatttatggcta

SEQ ID NO: 765513 - DNA, 120 bp, Artificial Sequence
  ENSG00000223614_1 (sequence is synthesized)
aaagaccgggaccccctggaagccgagaaatgggactgttgacattcagagacatagctatagaattctctctggcggagtggcaatgcctggatcatgctcagcagaatttatatagag

SEQ ID NO: 765514 - DNA, 120 bp, Artificial Sequence
  ENSG00000223614_2 (sequence is synthesized)
atgtgatgttagagaactacagaaacctgttctccctgggtatgactgtctctaagccagacttgatcgcctgtctggagcaaaataaagagccccagaatataaagagaaatgagatgg

SEQ ID NO: 765515 - DNA, 120 bp, Artificial Sequence
  ENSG00000223614_3 (sequence is synthesized)
cagccaaacacccagttacatgttctcatttcaaccaagaccttcagccagagcagagcataaaagattcactccaaaaagtaataccaagaacatatggaaaatgtggacatgagaatt

SEQ ID NO: 765516 - DNA, 120 bp, Artificial Sequence
  ENSG00000223614_4 (sequence is synthesized)
tacaattaaaaaaatgttgtaaaagagtagatgagtgtgaggtgcacaaaggaggttataatgaccttaaccaatgtttgtcaaatacccaaaacaaaatatttcagactcataaatgtg

SEQ ID NO: 765517 - DNA, 120 bp, Artificial Sequence
  ENSG00000223614_5 (sequence is synthesized)
tcaaagtcttcagtaaattttcaaattccaatagacacaatgcaagatatactggaaagaaacatttgaaatgtaaaaaatatggcaaatcattttgcatgttttcacacctaaatcaac

SEQ ID NO: 765518 - DNA, 120 bp, Artificial Sequence
  ENSG00000223614_6 (sequence is synthesized)
tcatactaaggagaagtcctacaaatgtgaagaatgtggcaaatcctttaaccactcctcaagcggtactacacataaaagaattcttactggagagaaaccctacagatgtgaggaatg

SEQ ID NO: 765519 - DNA, 90 bp, Artificial Sequence
  ENSG00000223614_7 (sequence is synthesized)
gcatgtgaagaatgtggccaagcctttaggcgctcctcaacacttactaaccacaagagaattcatactggagagagaccctacaaatgt

SEQ ID NO: 765520 - DNA, 74 bp, Artificial Sequence
  ENSG00000223614_8 (sequence is synthesized)
aatgtggccaagcctttaggcgctcctcaacacttactaaccacaagagaattcatacgtatcctcagccctca

SEQ ID NO: 765521 - DNA, 65 bp, Artificial Sequence
  ENSG00000223614_9 (sequence is synthesized)
gactcttaaggaacctttaactgctcctcaactgtaaaggcacataagagaattcatactggaga

SEQ ID NO: 765522 - DNA, 88 bp, Artificial Sequence
  ENSG00000223614_10 (sequence is synthesized)
actggagagaaaccatacaaatgtgaagaatgtgacaaagcttttaagtggcattcaagtcttgctaaacataagataataatgtggc

SEQ ID NO: 765523 - DNA, 120 bp, Artificial Sequence
  ENSG00000223614_11 (sequence is synthesized)
gaaaccctacaaatgtaaataatgtggcaaagtccagccctcagaccttataatacataaaataatttatactggaaagaaagcattacaagtgtagagaatgtggccaagcctttatct

SEQ ID NO: 765524 - DNA, 120 bp, Artificial Sequence
  ENSG00000223614_12 (sequence is synthesized)
agttccataccttaattgtacataagagaattcatattggacaaaaatcttataaatgtaaaaaaatgtaacaaagcctttaaccaaccctcaaagcataatgaacctaagagaatttat

SEQ ID NO: 765525 - DNA, 120 bp, Artificial Sequence
  ENSG00000223638_0 (sequence is synthesized)
atgaaatcagaatctgattggattaaaaaggagggaaagggtgtggctaaggtgggtggagacaccctctggtataaaagcccctggcaggcagctctcactccagatctgagctgtccg

SEQ ID NO: 765526 - DNA, 120 bp, Artificial Sequence
  ENSG00000223638_1 (sequence is synthesized)
cagaagcagctggaggccaggggagaaactccagaaggagagacatttgccatggctgagcacttcaaacagatcattagatgtcctgtctgtctaaaagatcttgaagaagccgtgcaa

SEQ ID NO: 765527 - DNA, 120 bp, Artificial Sequence
  ENSG00000223638_2 (sequence is synthesized)
ctgaaatgtggatatgcctgctgcctccagtgcctcaattcactccagaaggagcccgatggggaaggtttactgtgccgtttctgctctgtggtctctcagaaggatgacatcaagccc

SEQ ID NO: 765528 - DNA, 120 bp, Artificial Sequence
  ENSG00000223638_3 (sequence is synthesized)
aagtacaagctgagggcgctggtttccatcatcaaggaactagagcccaagctgaaatctgttctaacaatgaacccaaggatgaggaagtttcaagtggatatgacgttcgatgtggac

SEQ ID NO: 765529 - DNA, 120 bp, Artificial Sequence
  ENSG00000223638_4 (sequence is synthesized)
gagcaagctgagaggttcgacactgccctgtgcgtcctgggcacccctcgcttcacttccggccgccattactgggaggtggacgtgggcaccagccaagtgtgggatgtgggcgtgtgc

SEQ ID NO: 765530 - DNA, 120 bp, Artificial Sequence
  ENSG00000223638_5 (sequence is synthesized)
aaggaatctgtgaaccgacaggggaagattgtgctttcttcagaacacggcttcttgactgtgggttgcagagaaggaaaggtctttgctgccagcactgtgcctatgactcctctctgg

SEQ ID NO: 765531 - DNA, 120 bp, Artificial Sequence
  ENSG00000223638_6 (sequence is synthesized)
gtgagtccccagttgcacagagtggggattttcctggatgtaggtatgaggtccattgccttttacaatgttagtgatgggtgccatatctacacattcatcgagattcctgtttgcgag

SEQ ID NO: 765532 - DNA, 120 bp, Artificial Sequence
  ENSG00000223638_7 (sequence is synthesized)
ccctggcgtccattttttgctcataaacgtggaagtcaagatgatcagagcatcctgagtatctgttctgtgatcaatccatccgctgccagtgccccagtttcttctgagggaaagtaa

SEQ ID NO: 765533 - DNA, 89 bp, Artificial Sequence
  ENSG00000223648_0 (sequence is synthesized)
agctctgggagaggagcccccgccctgggattcccaggtgttttcatttggtgatcagcactgaacacagaagagtcatgatggagttt

SEQ ID NO: 765534 - DNA, 120 bp, Artificial Sequence
  ENSG00000223648_1 (sequence is synthesized)
gcagcctctggattcaccttcagtagctatgctatgcactgggtccgccaggctccagggaagggactggaatatgtttcagctattagtagtaatgggggtagcacatattatgcagac

SEQ ID NO: 765535 - DNA, 120 bp, Artificial Sequence
  ENSG00000223648_2 (sequence is synthesized)
tattatgcagactctgtgaagggcagattcaccatctccagagacaattccaagaacacgctgtatcttcaaatgggcagcctgagagctgaggacatggctgtgtattactgtgcgaga

SEQ ID NO: 765536 - DNA, 120 bp, Artificial Sequence
  ENSG00000223658_0 (sequence is synthesized)
agagtggcccaaccgggagcgcagccgccagctccggaaggcgcgggaccccaggacccggtcccaggctgcctttgaccctggcacactgtcctaacgcctggaaaatggtttccgcta

SEQ ID NO: 765537 - DNA, 120 bp, Artificial Sequence
  ENSG00000223658_1 (sequence is synthesized)
gtgggacatcattttttaagggtatgttgcttgggagcatttcctgggttttgataactatgtttggccaaattcacattcgacacagaggtcaaactcaagaccacgagcaccatcacc

SEQ ID NO: 765538 - DNA, 120 bp, Artificial Sequence
  ENSG00000223658_2 (sequence is synthesized)
ttcgtccacctaacaggaacgatttcttaaacacttcaaaagtgatactcttggagctcagtaaaagtattcgtgttttctgtatcatctttggagaatccgaagatgagagttactggg

SEQ ID NO: 765539 - DNA, 120 bp, Artificial Sequence
  ENSG00000223658_3 (sequence is synthesized)
ctgtactgaaagagacctggaccaaacactgtgacaaagcagagctctacgatactaaaaatgataatttgttcaatatagaaagtaatgacaggtgggtacagatgaggaccgcttaca

SEQ ID NO: 765540 - DNA, 120 bp, Artificial Sequence
  ENSG00000223658_4 (sequence is synthesized)
aatacgtctttgaaaagtatggtgacaactacaactggttcttccttgcacttcccactacgtttgctgtcattgaaaatttaaagtaccttttgtttacaagggatgcatcccagccct

SEQ ID NO: 765541 - DNA, 120 bp, Artificial Sequence
  ENSG00000223658_5 (sequence is synthesized)
gatgaaaagacttaacagacttctcgataactctgagacctgtgcagatcaaagtgtgatttggaagttatctgaagataagcagctggcaatatgcctgaaatatgcaggagttcatgc

SEQ ID NO: 765542 - DNA, 120 bp, Artificial Sequence
  ENSG00000223658_6 (sequence is synthesized)
agaaaatgcagaggattatgaaggaagagatgtatttaatacaaaaccaatcgcacagcttattgaagaggcattgtctaataaccctcagcaagtagtagaaggctgctgttcagatat

SEQ ID NO: 765543 - DNA, 120 bp, Artificial Sequence
  ENSG00000223658_7 (sequence is synthesized)
ggctattactttcaatggactgaccccccaaaagatggaagtaatgatgtatggcctgtaccggctcagggcatttggacactatttcaatgacacactcgttttcttgcctccagttgg

SEQ ID NO: 765544 - DNA, 120 bp, Artificial Sequence
  ENSG00000223658_8 (sequence is synthesized)
ttcagaaaatgactgaggcctggagaataatagacctgtgctgtccaagagcacttgaaatgtggctagtccaaattctgatacagtgtaagtgtaaaatacgtacttcattcaataatt

SEQ ID NO: 765545 - DNA, 120 bp, Artificial Sequence
  ENSG00000223658_9 (sequence is synthesized)
acttcattcaataattcatatattattagaaaacagtatgaagatgtaaaacatctcagtaatatttcatattgactccacattgaaataatgttttggatattttgcattaaataaaat

SEQ ID NO: 765546 - DNA, 80 bp, Artificial Sequence
  ENSG00000223802_0 (sequence is synthesized)
ccgcggcggggccgacggggcccgagcccatgccgagctacgcgcagctagtgcagcgcggctggggcagcgcgctggcg

SEQ ID NO: 765547 - DNA, 80 bp, Artificial Sequence
  ENSG00000223802_1 (sequence is synthesized)
gtcgcggcctggctgagcacgcgcacctggcgccgcccgagctgctgctgctggcgctcggcgcgctgggctggaccgcc

SEQ ID NO: 765548 - DNA, 120 bp, Artificial Sequence
  ENSG00000223802_2 (sequence is synthesized)
ctgcgctccgcggccactgcgcgcctctttcggcccctggcgaagcggtgctgcctccagcccagagatgccgccaagatgcccgagagcgcttggaagtttctcttctacctgggcagc

SEQ ID NO: 765549 - DNA, 120 bp, Artificial Sequence
  ENSG00000223802_3 (sequence is synthesized)
tggagctacagtgcctacctgctgtttggcaccgactaccccttcttccatgacccaccatctgtcttctacgactggacgccgggcatggcagtgccacgggacattgcagccgcctac

SEQ ID NO: 765550 - DNA, 120 bp, Artificial Sequence
  ENSG00000223802_4 (sequence is synthesized)
ctgctccagggaagcttctatggccactccatctacgctacgctatacatggacacctggcgcaaggactcggtggtcatgctgctccaccacgtggtcactctcatcctcatcgtctcc

SEQ ID NO: 765551 - DNA, 120 bp, Artificial Sequence
  ENSG00000223802_5 (sequence is synthesized)
tcctacgccttccggtaccacaatgtgggcatccttgtgctcttcctgcacgatatcagtgacgtgcagcttgagttcaccaagctcaacatttacttcaagtcccgcggcggctcctac

SEQ ID NO: 765552 - DNA, 120 bp, Artificial Sequence
  ENSG00000223802_6 (sequence is synthesized)
catcggctgcatgccttggcagcagacttgggctgcctcagcttcggcttcagctggttctggttccgcctctactggttcccgctcaaggtcctgtatgccaccagtcactgcagtctg

SEQ ID NO: 765553 - DNA, 120 bp, Artificial Sequence
  ENSG00000223802_7 (sequence is synthesized)
cgcacggtgcctgacatccccttctacttcttcttcaatgcgctcctgctgctgctcacccttatgaacctctactggttcctgtacatcgtggcgtttgcagccaaggtgttgacaggc

SEQ ID NO: 765554 - DNA, 120 bp, Artificial Sequence
  ENSG00000223802_8 (sequence is synthesized)
caggtgcacgagctgaaggacctgcgggagtatgacacagccgaggcccagagcctgaagcccagcaaagccgagaagccactgaggaacggcctggtgaaggacaagcgcttctgaacc

SEQ ID NO: 765555 - DNA, 120 bp, Artificial Sequence
  ENSG00000223802_9 (sequence is synthesized)
cctcggccccgcccccgtggacccggccccaccccgaataccccggccacgctccccgtccttggccgcccctccaccccctccaactctgctcctctagggccgccgccacctcccctg

SEQ ID NO: 765556 - DNA, 120 bp, Artificial Sequence; identical to SEQ ID NO: 284167
  ENSG00000223802_10 (sequence is synthesized)

SEQ ID NO: 765557 - DNA, 120 bp, Artificial Sequence; identical to SEQ ID NO: 284168
  ENSG00000223802_11 (sequence is synthesized)

SEQ ID NO: 765558 - DNA, 120 bp, Artificial Sequence; identical to SEQ ID NO: 284169
  ENSG00000223802_12 (sequence is synthesized)

SEQ ID NO: 765559 - DNA, 120 bp, Artificial Sequence; identical to SEQ ID NO: 284170
  ENSG00000223802_13 (sequence is synthesized)

SEQ ID NO: 765560 - DNA, 80 bp, Artificial Sequence; identical to SEQ ID NO: 284171
  ENSG00000223802_14 (sequence is synthesized)

SEQ ID NO: 765561 - DNA, 80 bp, Artificial Sequence; identical to SEQ ID NO: 284172
  ENSG00000223802_15 (sequence is synthesized)

SEQ ID NO: 765562 - DNA, 80 bp, Artificial Sequence; identical to SEQ ID NO: 284173
  ENSG00000223802_16 (sequence is synthesized)

SEQ ID NO: 765563 - DNA, 120 bp, Artificial Sequence; identical to SEQ ID NO: 284174
  ENSG00000223802_17 (sequence is synthesized)

SEQ ID NO: 765564 - DNA, 120 bp, Artificial Sequence; identical to SEQ ID NO: 284175
  ENSG00000223802_18 (sequence is synthesized)

SEQ ID NO: 765565 - DNA, 120 bp, Artificial Sequence; identical to SEQ ID NO: 284176
  ENSG00000223802_19 (sequence is synthesized)

SEQ ID NO: 765566 - DNA, 120 bp, Artificial Sequence
  ENSG00000223802_20 (sequence is synthesized)
tcgtgggcaggcccccaagacccagcagcagatgaggccgacgcggatgctgccccccaagcctactccaaaacagagactgcaataaaggcgtggacgatgtggccagtaccctgaagg

SEQ ID NO: 765567 - DNA, 120 bp, Artificial Sequence
  ENSG00000223802_21 (sequence is synthesized)
acaggacagtgaggaaggggagggagaggctggggaggggcaggcagggcgacaggcagggtctcagcggtagggacactgagggccaggcctagtggctggtgtggcgggagtggcgag

SEQ ID NO: 765568 - DNA, 120 bp, Artificial Sequence
  ENSG00000223802_22 (sequence is synthesized)
ccagggccctgtgggtggtgaggagtagttgctggccagcctggatgacgacctctgacccatgtcgccactggagctggtggcagtggggctggggaggaaggaacgccaagggccaca

SEQ ID NO: 765569 - DNA, 120 bp, Artificial Sequence
  ENSG00000223802_23 (sequence is synthesized)
gagagaacccaggctccatctgggccgagacatcctggcctctgagtttgacaggggagcccactgcccggccaaacaggagctggggctgggagctcagactcagtccagcccaggtgg

SEQ ID NO: 765570 - DNA, 120 bp, Artificial Sequence
  ENSG00000223802_24 (sequence is synthesized)
gagtcctggggaaggagatagcccacgagcctcaccagccctgggtgacagccagatggtgtccgaagccccaggcctggggcaggcagggggtgtctgggccagggatgaacggaggcc

SEQ ID NO: 765571 - DNA, 120 bp, Artificial Sequence
  ENSG00000223802_25 (sequence is synthesized)
aaactgggtaacaagcagagtcgggtgtgcagtgtctcataggcaacgtgaggagtgtttgagcaggagccggggcaggaggttgtggaaggccctggaaggtgccgaccagccaggccc

SEQ ID NO: 765572 - DNA, 120 bp, Artificial Sequence
  ENSG00000223802_26 (sequence is synthesized)
tctgatttggccggtgggggccatcggtgacgtgggaacgatggtttcagggaagcagtggctcagagctccgtgacgttttttggaacgggaggtgcgagatgcagacatttaacacat

SEQ ID NO: 765573 - DNA, 120 bp, Artificial Sequence
  ENSG00000223802_27 (sequence is synthesized)
ccggggctgtagccaggcagaggagcgtcagaccccccaccctgtttggaagggagaacccatcagattcgccttgggtgtagatgaaacagaaataaaagaatcaaagacgactcaaga

SEQ ID NO: 765574 - DNA, 120 bp, Artificial Sequence
  ENSG00000223802_28 (sequence is synthesized)
aggtgcgcctcccaacgccctggcgtgggccgtgtccttttgaagaatgagaatgtttcattgagcctacgcctcctgaatgcgggagggccacgggatggtcccaagactgtgccaagg

SEQ ID NO: 765575 - DNA, 120 bp, Artificial Sequence
  ENSG00000223865_0 (sequence is synthesized)
ccttcttttcctgactgcagctcttttcattttgccatccttttccagctccatgatggttctgcaggtttctgcggccccccggacagtggctctgacggcgttactgatggtgctgct

SEQ ID NO: 765576 - DNA, 120 bp, Artificial Sequence
  ENSG00000223865_1 (sequence is synthesized)
cacatctgtggtccagggcagggccactccagagaattaccttttccagggacggcaggaatgctacgcgtttaatgggacacagcgcttcctggagagatacatctacaaccgggagga

SEQ ID NO: 765577 - DNA, 120 bp, Artificial Sequence
  ENSG00000223865_2 (sequence is synthesized)
gttcgcgcgcttcgacagcgacgtgggggagttccgggcggtgacggagctggggcggcctgctgcggagtactggaacagccagaaggacatcctggaggagaagcgggcagtgccgga

SEQ ID NO: 765578 - DNA, 120 bp, Artificial Sequence
  ENSG00000223865_3 (sequence is synthesized)
caggatgtgcagacacaactacgagctgggcgggcccatgaccctgcagcgccgagtccagcctagggtgaatgtttccccctccaagaaggggcccttgcagcaccacaacctgcttgt

SEQ ID NO: 765579 - DNA, 120 bp, Artificial Sequence
  ENSG00000223865_4 (sequence is synthesized)
ctgccacgtgacggatttctacccaggcagcattcaagtccgatggttcctgaatggacaggaggaaacagctggggtcgtgtccaccaacctgatccgtaatggagactggaccttcca

SEQ ID NO: 765580 - DNA, 120 bp, Artificial Sequence
  ENSG00000223865_5 (sequence is synthesized)
gatcctggtgatgctggaaatgaccccccagcagggagatgtctacacctgccaagtggagcacaccagcctggatagtcctgtcaccgtggagtggaaggcacagtctgattctgcccg

SEQ ID NO: 765581 - DNA, 120 bp, Artificial Sequence
  ENSG00000223865_6 (sequence is synthesized)
gagtaagacattgacgggagctgggggcttcgtgctggggctcatcatctgtggagtgggcatcttcatgcacaggaggagcaagaaagttcaacgaggatctgcataaacagggttcct

SEQ ID NO: 765582 - DNA, 120 bp, Artificial Sequence
  ENSG00000223865_7 (sequence is synthesized)
gagctcactgaaaagactattgtgccttaggaaaagcatttgctgtgtttcgttagcatctggctccaggacagaccttcaacttccaaattggatactgctgccaagaagttgctctga

SEQ ID NO: 765583 - DNA, 120 bp, Artificial Sequence
  ENSG00000223865_8 (sequence is synthesized)
agtcagtttctatcattctgctctttgattcaaagcactgtttctctcactgggcctccaaccatgttcccttcttcttagcaccacaaataatcaaaacccaacatgactgtttgtttt

SEQ ID NO: 765584 - DNA, 120 bp, Artificial Sequence
  ENSG00000223865_9 (sequence is synthesized)
cctttaaaaatatgcaccaaatcatctctcatcacttttctctgagggttttagtagacagtaggagttaataaagaagttcattttggtttaaacataggaaagaagagaaccatgaaa

SEQ ID NO: 765585 - DNA, 120 bp, Artificial Sequence
  ENSG00000223865_10 (sequence is synthesized)
atggggatatgttaactattgtataatggggcctgttacacatgacactcttctgaattgactgtatttcagtgagctgcccccaaatcaagtttagtgccctcatccatttatgtctca

SEQ ID NO: 765586 - DNA, 120 bp, Artificial Sequence
  ENSG00000223865_11 (sequence is synthesized)
gaccactattcttaactattcaatggtgagcagactgcaaatctgcctgataggacccatattcccacagcactaattcaacatataccttactgagagcatgttttatcattaccatta

SEQ ID NO: 765587 - DNA, 120 bp, Artificial Sequence
  ENSG00000223865_12 (sequence is synthesized)
agaagttaaatgaacatcagaatttaaaatcataaatataatctaatacactttaaccattttctttgtgtgccatcacaaatactccttaaccaaatacggcttggacttttgaatgca

SEQ ID NO: 765588 - DNA, 120 bp, Artificial Sequence
  ENSG00000223865_13 (sequence is synthesized)
tccaatagacgtcatttgtcgtctaagtctgcattcatccaccagcctaggcctcctgtcttaattttcatacagacagaaatgactccccactggggaaagagcaaagcaatacatgta

SEQ ID NO: 765589 - DNA, 120 bp, Artificial Sequence
  ENSG00000223865_14 (sequence is synthesized)
gcactctttttcaaacactggtctttttttttttcttaacaatccaacattgttatgtgttttgcgtctcatattgacaccttttggtcaaggtagaggacatgtttgttgtaagctttc

SEQ ID NO: 765590 - DNA, 120 bp, Artificial Sequence
  ENSG00000223865_15 (sequence is synthesized)
tttttcgtgtagaggatggattcttcactcctgatacacacaatcagtgcacagcagctctcttatacatccagttgatgccttcagtctccctggcttcttacaagcatcttctgggcc

SEQ ID NO: 765591 - DNA, 120 bp, Artificial Sequence
  ENSG00000223865_16 (sequence is synthesized)
attcccgaaagctactgtgctcctcttgcccatctccccttgcaaataatatcttccatcgggggaccggcttcctccaatttcaggagaggtggggctgaaggcacagacttgggcgtc

SEQ ID NO: 765592 - DNA, 120 bp, Artificial Sequence
  ENSG00000223865_17 (sequence is synthesized)
actggcacagatataagtaaatacagctggagtctgcagagaggctggactgagtcagggagtcaggaaagagaagccacacacaaggacaaccaatcatgtttctcataatcttcttaa

SEQ ID NO: 765593 - DNA, 120 bp, Artificial Sequence
  ENSG00000223865_18 (sequence is synthesized)
cctagggaataggacacaatcattttttctttttaaaacatctttatccctgatcagcctcatttcctcaaaaactataaaggaaaatgctgctgacttgtttttgcgtagtaatttcag

SEQ ID NO: 765594 - DNA, 120 bp, Artificial Sequence
  ENSG00000223865_19 (sequence is synthesized)
ctgtcacataataagctaaggaagacagtatatagtaaataaggaccctttatctgtcttattttcccttttggcttcacaggaaacttgtgagaaacctatgcagcataaaattaatat

SEQ ID NO: 765595 - DNA, 120 bp, Artificial Sequence
  ENSG00000223865_20 (sequence is synthesized)
gatttcaatccagggattcaacgatggaaggaggtcatgagaatagcagaaagtcttcaaatcgagatcattatgaaatcctcagacccagagcacataaatcctaccctcagagtcact

SEQ ID NO: 765596 - DNA, 120 bp, Artificial Sequence
  ENSG00000223865_21 (sequence is synthesized)
gagcagttaacattacaaattacaaaccatatccagtcagagtcattctctttcctgcttgtctcctgtactcatgttacaggttagggcagtaccccgagtggagtgaacaatctctgg

SEQ ID NO: 765597 - DNA, 120 bp, Artificial Sequence
  ENSG00000223865_22 (sequence is synthesized)
actaacacttgtcaggatcagaagctgaggtatctgcacccacattacaggaacaggatatgtgctcctagggaactgagggtgtcaggagatgaggaatgtccctggagtcacagaaag

SEQ ID NO: 765598 - DNA, 120 bp, Artificial Sequence
  ENSG00000223865_23 (sequence is synthesized)
aaggtatcagatgtgtctcactctgacatatgcaggtgtttatgaaactctgggatttctaaggaaggatgcagtgcagagacaggtcccagaggagacaagagctgagagaccatccaa

SEQ ID NO: 765599 - DNA, 120 bp, Artificial Sequence
  ENSG00000223865_24 (sequence is synthesized)
actgggaccaccttgtcactagacttcaaattttcaatattgatagagtgttttctaagagtcaggccctttgctgagtgctatgtgcagcaggatcaaaggcagccaggaggtagagga

SEQ ID NO: 765600 - DNA, 120 bp, Artificial Sequence
  ENSG00000223865_25 (sequence is synthesized)
gtcttgaggtacatcagtcattggagttgaagagcagagattcaaaggaaagttggaactggagctttaaaggagatgtgaagtgggtgactcaacctctgactcagaaaaattgatacc

SEQ ID NO: 765601 - DNA, 120 bp, Artificial Sequence
  ENSG00000223865_26 (sequence is synthesized)
tgcagaagaaaaaacccggcgggcttaggactcccagctgagtgttgtatcctccatccctttccacctggtcccttcattttctacccctcacagttccctaacgagaaggtggtccac

SEQ ID NO: 765602 - DNA, 120 bp, Artificial Sequence
  ENSG00000223865_27 (sequence is synthesized)
ccaacagacaacactgcctcagatggttatcaaggggtaccctaagaagaaatcatctcaccctctctttgtccccatttgtcaagtagcagtgaggccgagccaggggatggtgaaagt

SEQ ID NO: 765603 - DNA, 120 bp, Artificial Sequence
  ENSG00000223865_28 (sequence is synthesized)
ggaaggaggtgggagttgggcatcgggtgtgaagatgctcttgaaaggggttttaataaccacttgctaccaggccagtgaacacttaccatagttgatgccttttgagcatgttgcatt

SEQ ID NO: 765604 - DNA, 120 bp, Artificial Sequence
  ENSG00000223865_29 (sequence is synthesized)
gtaaactgtccctgaaattactgtgcacttggcttatgggatgaaacatcctcctagttcttttgtctctcagcttctctgaagtctcattgagcaccttctcttcaatttcttttacac

SEQ ID NO: 765605 - DNA, 120 bp, Artificial Sequence
  ENSG00000223865_30 (sequence is synthesized)
agtaagaataggatcagctgtgctaaactaacaaatacccagatatccaggtttggctcatgttacacgtccaaagtaagtcatgcaggaagctctgctcatcatcgtactcaggaagtc

SEQ ID NO: 765606 - DNA, 120 bp, Artificial Sequence
  ENSG00000223865_31 (sequence is synthesized)
aggctgacagtctttctcctgcacatctgctcccagaacctccccagcagaatgaagggaacctaagaatttattcactggcttttaatgatccctcctagaaagaacacacttctcgca

SEQ ID NO: 765607 - DNA, 120 bp, Artificial Sequence
  ENSG00000223865_32 (sequence is synthesized)
tttcattttccaatgtaaatcatatggctgcaactaacttcaaataagtgggaatacttgaaggtggaaaacatttaagaagtacacactaaataaataataaaatacttctacaagaga

SEQ ID NO: 765608 - DNA, 120 bp, Artificial Sequence
  ENSG00000223865_33 (sequence is synthesized)
cagaagggactgccttcccctcagtgctcgcccctccctagtgatcactcagtgcccctgagctcattcttttcagtaaattctctctctgcgtggtgagaaaacaggcctggagaggct

SEQ ID NO: 765609 - DNA, 120 bp, Artificial Sequence
  ENSG00000223865_34 (sequence is synthesized)
atcctcctgcctcagcctcccatgtagctagaactacagatacacgtaccaccatgtctggctaatttatttttctttttagagatgggttctcactatgttgcccaggccggtctcaaa

SEQ ID NO: 765610 - DNA, 120 bp, Artificial Sequence
  ENSG00000223865_35 (sequence is synthesized)
gctaatttatttttctttttagagatgggttctcactatgttgcccaggccggtctcaaaaccctgggctcaagtgatcctcatgcctcaacctcccaaagtgctaagattataggcatg

SEQ ID NO: 765611 - DNA, 120 bp, Artificial Sequence
  ENSG00000223865_36 (sequence is synthesized)
ctgctttctgaggaggaaaaaggtactggtggcagagatccaaaagaaaagttgccagtggcagtgtggaaattcacctgagaacaacaggacaagctggggcacaaatgcaaagatgca

SEQ ID NO: 765612 - DNA, 120 bp, Artificial Sequence
  ENSG00000223865_37 (sequence is synthesized)
gagggaggcaacacctggtcatctgtgagaccttcatgggacctgaagacgcagcacagaggaggaacttgaaaaaggacgggatttctactactcaagcatgtaggagctcaggatatt

SEQ ID NO: 765613 - DNA, 120 bp, Artificial Sequence
  ENSG00000223865_38 (sequence is synthesized)
tgagggctttgggccggcggtcccagggcagccccgcgggcccgtgcccagggcgcaggagcagccgggttggcctaagggaccttagtgccgggcggaaaggggactttgggttgggga

SEQ ID NO: 765614 - DNA, 120 bp, Artificial Sequence
  ENSG00000223865_39 (sequence is synthesized)
ttcatggggggagcccatctggagcttgtcaggggagcgagcgcggggacctggactgggctgagcatggagtgaggaggacgagagcagagagacccccgggacttcatcaggcctggc

SEQ ID NO: 765615 - DNA, 120 bp, Artificial Sequence
  ENSG00000223865_40 (sequence is synthesized)
agctgactgcatgtggggtgaaaaaaggaagccacaggacagcgcacaaggaaagaggaaaaaaatgaagggaggaggaggaggaagctggggagatcacacctttgattttcttgttcc

SEQ ID NO: 765616 - DNA, 120 bp, Artificial Sequence
  ENSG00000223865_41 (sequence is synthesized)
ctgagctcattcttttcagtaaattctctctctgcgtggtgagaaaacaggcctggagaggctctgcgacccgcttaggaccacagaactcggtactaggaaaactcctattttaaaatc

SEQ ID NO: 765617 - DNA, 120 bp, Artificial Sequence
  ENSG00000223865_42 (sequence is synthesized)
cagccctgggtgggaagatttgggaagaatcgttaatattgagagagagagggagaaagaggattagatgagagtggcgcctccgctcatgtccgccccctccccgcagagaattacctt

SEQ ID NO: 765618 - DNA, 120 bp, Artificial Sequence
  ENSG00000223953_0 (sequence is synthesized)
gaacaactggtttcctcttggagtctgggaggaggaaagcggagccggcagggagcgaaccaggactggggtgacggcagggcagggggcgcctggccggggagaagcgcgggggctgga

SEQ ID NO: 765619 - DNA, 120 bp, Artificial Sequence
  ENSG00000223953_1 (sequence is synthesized)
gcaccaccaactggagggtccggagtagcgagcgccccgaaggaggccatcggggagccgggaggggggactgcgagaggaccccggcgtccgggctcccggtgccagcgctatgaggcc

SEQ ID NO: 765620 - DNA, 120 bp, Artificial Sequence
  ENSG00000223953_2 (sequence is synthesized)
actcctcgtcctgctgctcctgggcctggcggccggctcgcccccactggacgacaacaagatccccagcctctgcccggggcaccccggccttccaggcacgccgggccaccatggcag

SEQ ID NO: 765621 - DNA, 80 bp, Artificial Sequence
  ENSG00000223953_3 (sequence is synthesized)
ggcgcgcccggggctccgggagagaaaggcgagggcgggaggccgggactgccgggacctcgaggggaccccgggccgcg

SEQ ID NO: 765622 - DNA, 120 bp, Artificial Sequence
  ENSG00000223953_4 (sequence is synthesized)
aggagaggcgggacccgcggggcccaccgggcctgccggggagtgctcggtgcctccgcgatccgccttcagcgccaagcgctccgagagccgggtgcctccgccgtctgacgcaccctt

SEQ ID NO: 765623 - DNA, 120 bp, Artificial Sequence
  ENSG00000223953_5 (sequence is synthesized)
acattacgacgccgtcaccggcaagttcacctgccaggtgcctggggtctactacttcgccgtccatgccaccgtctaccgggccagcctgcagtttgatctggtgaagaatggcgaatc

SEQ ID NO: 765624 - DNA, 120 bp, Artificial Sequence
  ENSG00000223953_6 (sequence is synthesized)
cattgcctctttcttccagtttttcggggggtggcccaagccagcctcgctctcggggggggccatggtgaggctggagcctgaggaccaagtgtgggtgcaggtgggtgtgggtgacta

SEQ ID NO: 765625 - DNA, 120 bp, Artificial Sequence
  ENSG00000223953_7 (sequence is synthesized)
cattggcatctatgccagcatcaagacagacagcaccttctccggatttctggtgtactccgactggcacagctccccagtctttgcttagtgcccactgcaaagtgagctcatgctctc

SEQ ID NO: 765626 - DNA, 120 bp, Artificial Sequence
  ENSG00000223953_8 (sequence is synthesized)
actcctagaaggagggtgtgaggctgacaaccaggtcatccaggagggctggcccccctggaatattgtgaatgactagggaggtggggtagagcactctccgtcctgctgctggcaagg

SEQ ID NO: 765627 - DNA, 120 bp, Artificial Sequence
  ENSG00000223953_9 (sequence is synthesized)
aatgggaacagtggctgtctgcgatcaggtctggcagcatggggcagtggctggatttctgcccaagaccagaggagtgtgctgtgctggcaagtgtaagtcccccagttgctctggtcc

SEQ ID NO: 765628 - DNA, 120 bp, Artificial Sequence
  ENSG00000223953_10 (sequence is synthesized)
aggagcccacggtggggtgctctcttcctggtcctctgcttctctggatcctccccaccccctcctgctcctggggccggcccttttctcagagatcactcaataaacctaagaaccctc

SEQ ID NO: 765629 - DNA, 120 bp, Artificial Sequence
  ENSG00000223953_11 (sequence is synthesized)
cggccctgcgagcgctcagcctcaggggcacggcagtggggtggggaccgactgggccgcgccggggtggggagagaggcaggtcccaggattctgggtcccgactccagtcctgcctgg

SEQ ID NO: 765630 - DNA, 120 bp, Artificial Sequence
  ENSG00000223953_12 (sequence is synthesized)
ggggcgcctggccggggagaagcgcgggggctggagcaccaccaactggagggtccggagtagcgagcgccccgaaggaggccatcggggagccgggagggggggactgccgggacctcg

SEQ ID NO: 765631 - DNA, 120 bp, Artificial Sequence
  ENSG00000224041_0 (sequence is synthesized)
gggtcagagctctggggaggaactgctcagttaggacccagacggaaccatggaagccccagcgcagcttctcttcctcctgctactctggctcccagataccactggagaaatagtgat

SEQ ID NO: 765632 - DNA, 120 bp, Artificial Sequence
  ENSG00000224041_1 (sequence is synthesized)
ggaaagagccaccctctcctgcagggccagtcagagtgttagcagcaacttagcctggtaccagcagaaacctggccaggctcccaggctcctcatctatggtgcatccatcagggccac

SEQ ID NO: 765633 - DNA, 120 bp, Artificial Sequence
  ENSG00000224041_2 (sequence is synthesized)
tggcatcccagccaggttcagtggcagtgggtctgggacagagttcactctcaccatcagcatcctgcagtctgaagattttgcagtttattactgtcagcagtataataactggcctcc

SEQ ID NO: 765634 - DNA, 120 bp, Artificial Sequence
  ENSG00000224051_0 (sequence is synthesized)
ggggcccgcacggcggctacggcctaggtgagcggctcggactcggcggccgcacctgcccaacccaacccgcacggtccggaagtcgccgaggggccgggagcgggaggggacgtcgtc

SEQ ID NO: 765635 - DNA, 120 bp, Artificial Sequence
  ENSG00000224051_1 (sequence is synthesized)
ggcggccgaggacccggctcccgcgcaggacggagccgtggctcaggtcggcccctccccaacaccaccccgggcctccgccccttcctgggcctctcggtggagcagggacccgaaccg

SEQ ID NO: 765636 - DNA, 120 bp, Artificial Sequence
  ENSG00000224051_2 (sequence is synthesized)
tggagcagggacccgaaccggtgcccatccagtccggtgccatctgaagcccccttcccagaaaatgagccacagagcaagctgaccccagcgacacagccccccagccctactgtattt

SEQ ID NO: 765637 - DNA, 120 bp, Artificial Sequence
  ENSG00000224051_3 (sequence is synthesized)
ccgttcctatcaaaaaatggatgactcggagacaggtttcaatctgaaagtcgtcctggtcagtttcaagcagtgtctcgatgagaaggaagaggtcttgctggacccctacattgccag

SEQ ID NO: 765638 - DNA, 120 bp, Artificial Sequence
  ENSG00000224051_4 (sequence is synthesized)
ctggaagggcctggtcaggtttctgaacagcctgggcaccatcttctcattcatctccaaggacgtggtctccaagctgcggatcatggagcgcctcaggggcggcccgcagagcgagca

SEQ ID NO: 765639 - DNA, 120 bp, Artificial Sequence
  ENSG00000224051_5 (sequence is synthesized)
ctaccgcagcctgcaggccatggtggcccacgagctgagcaaccggctggtggacctggagcgccgctcccaccacccggagtctggctgccggacggtgctgcgcctgcaccgcgccct

SEQ ID NO: 765640 - DNA, 120 bp, Artificial Sequence
  ENSG00000224051_6 (sequence is synthesized)
gcactggctgcagctgttcctggagggcctgcgtaccagccccgaggacgcacgcacctccgcgctctgcgccgactcctacaacgcctcgctggccgcctaccacccctgggtcgtgcg

SEQ ID NO: 765641 - DNA, 120 bp, Artificial Sequence
  ENSG00000224051_7 (sequence is synthesized)
ccgcgccgtcaccgtggccttctgcacgctgcccacacgcgaggtcttcctggaggccatgaacgtggggcccccggagcaggccgtgcagatgctaggcgaggccctccccttcatcca

SEQ ID NO: 765642 - DNA, 120 bp, Artificial Sequence
  ENSG00000224051_8 (sequence is synthesized)
ggccagggccgtgagtcccgtggcagagccttctgggcgctgcgggaacaggagatcctctgtcgcccctgtgagctgagctggttaggaaccacagactgtgacagagaaggtggcgac

SEQ ID NO: 765643 - DNA, 120 bp, Artificial Sequence
  ENSG00000224051_9 (sequence is synthesized)
cagcccagaagaggcccaccctctcggtccggaacaagacgcctcggccacggctccccctcggcctattacacgcgtgcgcagccaggcctcgccagggtgcggtgcagagcagagcag

SEQ ID NO: 765644 - DNA, 120 bp, Artificial Sequence
  ENSG00000224051_10 (sequence is synthesized)
gcaggggtgggggccgggcctgcaagagcccgaaaggtcgccaccccctagcctgtggggtgcatctgcgaaccagggtgaagtcacaggtcccggggtgtggaggctccatcctttctc

SEQ ID NO: 765645 - DNA, 120 bp, Artificial Sequence
  ENSG00000224051_11 (sequence is synthesized)
ctttctgccagccgatgtgtcctcatctcaggcccgtgcctgggaccccgtgtctgcccaggtgggcagccttgagcccaggggactcagtgccctccatgccctggctggcagaaaccc

SEQ ID NO: 765646 - DNA, 120 bp, Artificial Sequence
  ENSG00000224051_12 (sequence is synthesized)
tcaacagcagtctgggcactgtggggctctccccgcctctcctgccttgtttgcccctcagcgtgccaggcagactgggggcaggacagccggaagctgagaccaaggctcctcacagaa

SEQ ID NO: 765647 - DNA, 120 bp, Artificial Sequence
  ENSG00000224051_13 (sequence is synthesized)
gggcccaggaagtccccgcccttgggacagcctcctccgtagcccctgcacggcaccagttccccgagggacgcagcaggccgcctcccgcagcggccgtgggtctgcacagcccagccc

SEQ ID NO: 765648 - DNA, 120 bp, Artificial Sequence
  ENSG00000224051_14 (sequence is synthesized)
agcccaaggcccccaggagctgggactctgctacacccagtgaaatgctgtgtcccttctcccccgtgccccttgatgccccctccccacagtgctcaggagacccgtggggcacggaac

SEQ ID NO: 765649 - DNA, 120 bp, Artificial Sequence
  ENSG00000224051_15 (sequence is synthesized)
aggagggtctggaccctgtggcccagccaaaggctaccagacagccacaaccagcccagccaccatccagtgcctggggcctggccactggctcttcacagtggaccccagcacctcggg

SEQ ID NO: 765650 - DNA, 120 bp, Artificial Sequence
  ENSG00000224051_16 (sequence is synthesized)
gtggcagagggacggcccccacggcccagcagacatgcgagcttccagagtgcaatctatgtgatgtcttccaacgttaataaatcacacagcctcccaggagggagacgctggggtgca

SEQ ID NO: 765651 - DNA, 120 bp, Artificial Sequence
  ENSG00000224051_17 (sequence is synthesized)
cctgaccttgggccgttgggctgccctgggaaaggcctggaggtgtcctgggtcaccttcctgggctggcaagctgcctgcctcctgcacagccactgcccttcctgttgttaccgagcc

SEQ ID NO: 765652 - DNA, 120 bp, Artificial Sequence
  ENSG00000224051_18 (sequence is synthesized)
accagccacagctctgagaagctcctggcagcttctgtttgccactggctcgaatctgggcaggaaggcaaggcccgcagaatatctggtgaccaagaaggaaaccccagagcctcagag

SEQ ID NO: 765653 - DNA, 120 bp, Artificial Sequence
  ENSG00000224051_19 (sequence is synthesized)
accatcttctcagtggacaaaattaaggcccgaggaggggaggggcgtgctggaagtctatgggactgcatctttctgaggcccaggagcagccatcccccacacctgaagcccgaaaat

SEQ ID NO: 765654 - DNA, 120 bp, Artificial Sequence
  ENSG00000224107_0 (sequence is synthesized)
ctcaaggaaagagagggagtgccaagctgttactgtttaccctctggcccagatctttcttcagaagaaacctgagtggtctcacaggggtttggagtaagattcatacctgcttcacca

SEQ ID NO: 765655 - DNA, 120 bp, Artificial Sequence
  ENSG00000224107_1 (sequence is synthesized)
gtgattttcaaaggaggcaaatcctatttgaagctaaagtcacataaagagatttggaatgaggaaacaaattatagcagcctgcaagttgtagaatgaagaaatgcaaatgtaaagtac

SEQ ID NO: 765656 - DNA, 120 bp, Artificial Sequence
  ENSG00000224107_2 (sequence is synthesized)
ccagacttcctcggttgtgctgttttactgaggttgggtggagtcaacacatcatggataaagaagtccctaaaggcagtcccagggagcccgcactgaacatcaagaagtcagacaaat

SEQ ID NO: 765657 - DNA, 120 bp, Artificial Sequence
  ENSG00000224107_3 (sequence is synthesized)
ccttcaaacgcaagaagcccaccgaaaatgtgctgatctttttaatcaacagacaactgggcaggcacagaagtgacatcgacctgtcaagatgggtgtggatgctgtcataaagcaact

SEQ ID NO: 765658 - DNA, 120 bp, Artificial Sequence
  ENSG00000224107_4 (sequence is synthesized)
ctagggtggacatggccttggacaaaaagtcatgtggcttacatgctgaagcctgcccatatttttgagaaattaaatataattagaacaataaactcctcccatgtttgagtcattaaa

SEQ ID NO: 765659 - DNA, 120 bp, Artificial Sequence
  ENSG00000224109_0 (sequence is synthesized)
gccaatcctgctggcgcagacaaggaggctgctcagcaactgacgggaaaatgggggtagcgggctgggcacgcgctccggaggctgcaggcgccatgggcagagtgaggaaccgcgcca

SEQ ID NO: 765660 - DNA, 120 bp, Artificial Sequence
  ENSG00000224109_1 (sequence is synthesized)
gtgaggaaccgcgccactgctcagcggcggaggcgaaagcggcccggggatcctcccgccgcctgcgcggccatcgcggtcatgggcgccagccgcgcgcagtgcccccgggtccaagtc

SEQ ID NO: 765661 - DNA, 120 bp, Artificial Sequence
  ENSG00000224109_2 (sequence is synthesized)
ggggtcgggagccacgcggcggccaagaggtggctgggaaagttgcggcggaagcgccggtggcggcgggcccgggaggcgggctccagagatccgctgccctccgcgccactcccggac

SEQ ID NO: 765662 - DNA, 120 bp, Artificial Sequence
  ENSG00000224109_3 (sequence is synthesized)
agtcccctaaggagctggacctgggcgcacagcgggagcgctgggagacgttcaggaaactgtggggcctcagctgcgagggcgccgccaaggtcctgctggacaccttcgagtacccgg

SEQ ID NO: 765663 - DNA, 120 bp, Artificial Sequence
  ENSG00000224109_4 (sequence is synthesized)
gcctcgtgcatcacaccgggggctgccactgcggcgcggtccgctttgcggtctgggcccctgcagatctgcgcgtcgtggattgcagctgcaggctgtgcaggaagaagcagcaccgcc

SEQ ID NO: 765664 - DNA, 120 bp, Artificial Sequence
  ENSG00000224109_5 (sequence is synthesized)
acttcctcgtcccggcctcgcgcttcacgctgctccagggcgcagaaagcatcgtcacctatcggtccaacacgcacccggcgctgcacagcttctgcagcaggtgcggggtgcagagtt

SEQ ID NO: 765665 - DNA, 120 bp, Artificial Sequence
  ENSG00000224109_6 (sequence is synthesized)
tccacgcagctgtctctgacccccgcgtgtacggcgtcgccccgcactgcctggacgagggcaccgtgcgcagcgtggtcatcgaggaggtcggcggtggcgacccgggggaggaggccg

SEQ ID NO: 765666 - DNA, 120 bp, Artificial Sequence
  ENSG00000224109_7 (sequence is synthesized)
ccgaggagcacaaggccatccacaagacgtcctcccagtcagcccctgcctgtccccgcgaacaggagcagtgattggggccgcaagcccgcctgaaaccggcccgggcggccctgcggg

SEQ ID NO: 765667 - DNA, 120 bp, Artificial Sequence
  ENSG00000224109_8 (sequence is synthesized)
ccatgctgtaaaagaggtgtttctggcctggtcacaccggggattcccttccagtatttgcccttcccctccgctagttttcagtgaactcgcttacgatccaaatcttgaacacacctt

SEQ ID NO: 765668 - DNA, 120 bp, Artificial Sequence
  ENSG00000224109_9 (sequence is synthesized)
tgtctgcgtagtacaacgttaatcttgcaattcgataaggaagaagagtgtctctgatttttcaaaccatccattgtatctctcgcttttactgttctgcctacagttgtcacaaatcac

SEQ ID NO: 765669 - DNA, 120 bp, Artificial Sequence
  ENSG00000224109_10 (sequence is synthesized)
ctgcagatgattcctgtgtactgtacgttcctggtgctattgtgaacaggcttgttgttttcagcgctttgcgtctggtgtgtaggacggcaacacacaaacagtttgtaaacatgtgct

SEQ ID NO: 765670 - DNA, 120 bp, Artificial Sequence
  ENSG00000224109_11 (sequence is synthesized)
aggacgtcttccattcattatcgtgtgtgtgcgacgtgtgtgttttagatagacattcacgtttgcactacttagtccagttatctagtgttttttatatgatatgttttaagattcatt

SEQ ID NO: 765671 - DNA, 120 bp, Artificial Sequence
  ENSG00000224109_12 (sequence is synthesized)
agtattacatacctcattgctcttattagacgaatgatgttagtattttcctcagttttgttttagaaactgtctctgggaaaggagatgggagataggaatgagaaacgtctgtgtgct

SEQ ID NO: 765672 - DNA, 120 bp, Artificial Sequence
  ENSG00000224109_13 (sequence is synthesized)
gtatgccctctttaatctttctaaatacctatcttatacatgtgtaagtattcagaaatcagtaaatatttaataatagaaaagtatgtatttctatgctgtatattacaaaaccaactc

SEQ ID NO: 765673 - DNA, 120 bp, Artificial Sequence
  ENSG00000224109_14 (sequence is synthesized)
taatttatatgtaattcttggtatctgaaatttttatcaaacaatcagtggtgggttcaatgatacatatcagtattatcattttatggcttcatagaattaaaaaatatggatctttca

SEQ ID NO: 765674 - DNA, 120 bp, Artificial Sequence
  ENSG00000224109_15 (sequence is synthesized)
taatttatgtaatcaacctcctctgatggatgtttagcttttttccaactttcagtgtaataataatatttcaaaggagcaaacttctaataaatgtctgcattgttctactacttcggt

SEQ ID NO: 765675 - DNA, 120 bp, Artificial Sequence
  ENSG00000224373_0 (sequence is synthesized)
ttttcacctctccatacaaaggcaccacccacatgcaaatcctcacttaagcacccacaggaaaccaccacacatttccttaaattcaggttccagctcacatgggaaatactttctgag

SEQ ID NO: 765676 - DNA, 120 bp, Artificial Sequence
  ENSG00000224373_1 (sequence is synthesized)
agtcctggacctcctgtgcaagaacatgaaacatctgtggttcttccttctcctggtggcagctcccagatgggtcctgtcccaggtgcagctgcaggagtcgggcccaggactggtgaa

SEQ ID NO: 765677 - DNA, 120 bp, Artificial Sequence
  ENSG00000224373_2 (sequence is synthesized)
gtccctcacctgcactgtctctggtggctccatcagtagttactactggagctggatccggcagcccccagggaagggactggagtggattgggtatatctattacagtgggagcaccaa

SEQ ID NO: 765678 - DNA, 120 bp, Artificial Sequence; identical to SEQ ID NO: 753189
  ENSG00000224373_3 (sequence is synthesized)

SEQ ID NO: 765679 - DNA, 120 bp, Artificial Sequence
  ENSG00000224383_0 (sequence is synthesized)
aaccggcgccagccatggcctctggggcgggcggaagctggggtcgctccccaccgcagagcgcagtcccgacgccctgggtcaccttcctgcagcccctctcgtgggccgtcccacctg

SEQ ID NO: 765680 - DNA, 120 bp, Artificial Sequence
  ENSG00000224383_1 (sequence is synthesized)
cgcccccgcagccaggccgcgtgaaggaagacctgctggaactgatgatgctgcagaacgcgcagatgcaccagctgctgctgagtcgcctggtggctggagcgctgcagccccggcctg

SEQ ID NO: 765681 - DNA, 120 bp, Artificial Sequence
  ENSG00000224383_2 (sequence is synthesized)
cctcgccctgccctcaggtctacctggaggttccacaggaagagcctgaggaggaggaggaggagatggacgtgcgggagaaagggcctttggtgtttcaccaccactacttgccctatt

SEQ ID NO: 765682 - DNA, 120 bp, Artificial Sequence
  ENSG00000224383_3 (sequence is synthesized)
tgatgccctccccgggtgccctgctgccctggccagcccccttcttccccacccctgcttgtcagccctacttgcaggacgtgcccaggattcagcactgtcctgcctccagggaaaggg

SEQ ID NO: 765683 - DNA, 120 bp, Artificial Sequence
  ENSG00000224383_4 (sequence is synthesized)
agactactatgatgccgagagcctcctatgaggacagaccccggccctgggaactgcaccagcttcctgctctggatacagccccggagccgcctcctgcacctctcttgtcgactcccc

SEQ ID NO: 765684 - DNA, 120 bp, Artificial Sequence
  ENSG00000224383_5 (sequence is synthesized)
tcagtccctgccccacgccaatgagttcctggacgggccggatctgtgctgttgtgtaagagctccctagagcaccacccaggcccttgaagccacgtcagcccgcctctgccccactgc

SEQ ID NO: 765685 - DNA, 120 bp, Artificial Sequence
  ENSG00000224383_6 (sequence is synthesized)
ttcctgcctggagcagggggaggcctgggaacagagcccccaccctctctccctcacccctctctctgggatgatgaggtctccttccagcctagtaatggagcaagaggggaggggggg

SEQ ID NO: 765686 - DNA, 120 bp, Artificial Sequence
  ENSG00000224383_7 (sequence is synthesized)
attccttctgctttccacagctttgaaggcccctttgaggtggctggaggggcccagagtggtcggggagagactttgctgggcagcgcccctgagcagagtcagttcgctgggcccccc

SEQ ID NO: 765687 - DNA, 120 bp, Artificial Sequence
  ENSG00000224383_8 (sequence is synthesized)
acccctcatcccaggaagcagctctgttggcagaaaggagaggtcagagctttgtcctgctgtggccaggagtggcctgaggtctcctggggccaggtgggaacagtgtgtcctctgccc

SEQ ID NO: 765688 - DNA, 120 bp, Artificial Sequence
  ENSG00000224383_9 (sequence is synthesized)
cctgggccagggtgtgtttcccccaccctccctcagtagcaatgagctactcgggccagatgggggcctgttgcatgggctgggaggcccctgtgaaggagagggtggggagggaggcat

SEQ ID NO: 765689 - DNA, 120 bp, Artificial Sequence
  ENSG00000224383_10 (sequence is synthesized)
gctagaaaaggcaatgtcccaagtctctgctgcctgtcacagtccttcagccagggctggacctcaaccctgaggagtcacactgagttccagtgaccaccgtggtggtggccatgccac

SEQ ID NO: 765690 - DNA, 120 bp, Artificial Sequence
  ENSG00000224383_11 (sequence is synthesized)
tgctatggccggaaggcctggggcagcctcctccaagccgctcgcaccccgtaggtgcccatccgctgctggcgcaagtgctggccgaagatgaagcagagcaggacagatgtcacgaac

SEQ ID NO: 765691 - DNA, 120 bp, Artificial Sequence
  ENSG00000224383_12 (sequence is synthesized)
agggacagcaacaccgacaccaccgtgactatgatgaccatctggctgtccgacacaggctctggggagggagggggcaagggtcttagacgtcctgtgatcccagttaccagggaccaa

SEQ ID NO: 765692 - DNA, 120 bp, Artificial Sequence
  ENSG00000224383_13 (sequence is synthesized)
aagggagtggaagtccacccccaacccagacccccagaccccgccgcccgctcatgcatccagcagtcaccccagttgcagagatgagtggtgaatggtgtctgcattaaaattattatc

SEQ ID NO: 765693 - DNA, 120 bp, Artificial Sequence
  ENSG00000224383_14 (sequence is synthesized)
tggaaaaaaggtggcccagggctcaggctaccagctggacttctgtgtggctgtgagggcagatgtccccttgtcagcagccatgggaccagtgtgtagctgctggacaccgtggcctgg

SEQ ID NO: 765694 - DNA, 120 bp, Artificial Sequence
  ENSG00000224383_15 (sequence is synthesized)
agggtggcatggtcccagccaagccccttcttgggcagagctgagtgaacttcatgccaggctccctgtgtgccggccgtccagggtcaccaagcagcagagctctggggacctcagtgg

SEQ ID NO: 765695 - DNA, 120 bp, Artificial Sequence
  ENSG00000224383_16 (sequence is synthesized)
gggcagtcaggccaaacttctcattgtggaggggagccaaggccagggagagccgtcaaggtcatggggcttgatggtggccgaggaactagttgacctctcccgacctctggagcagtt

SEQ ID NO: 765696 - DNA, 120 bp, Artificial Sequence
  ENSG00000224383_17 (sequence is synthesized)
gaggtccaagctggggacttggaaagaacttcagggaagagggagagtaagagggaagcctcaggatgaagggtgggctcctgggtgtttgcttcccaagtgggactcaagatttttctt

SEQ ID NO: 765697 - DNA, 120 bp, Artificial Sequence
  ENSG00000224383_18 (sequence is synthesized)
cccccgaggggctgaaagtgacttatcactcccaactccatccacggatcccccctcaccatagatctccaacatcttcggggctgagtgtttgtgaaagatgttgccaccgcgagacat

SEQ ID NO: 765698 - DNA, 120 bp, Artificial Sequence
  ENSG00000224383_19 (sequence is synthesized)
caagtccagcacagccaggcaggagaagttgcggtggccatcctctctgtcagccgtgctgttgaatgtggctgtggcctcctgcggagcaggggctgccttcccgaaggtctcatagtg

SEQ ID NO: 765699 - DNA, 120 bp, Artificial Sequence
  ENSG00000224383_20 (sequence is synthesized)
cagagtctcattgccacggaacaggaagagggtgaggctgtccaggggctccacggtgggcaccctgcactcaatggtgaaggacttgcccacagccaccaaagtgggttgcagtgtcag

SEQ ID NO: 765700 - DNA, 120 bp, Artificial Sequence
  ENSG00000224383_21 (sequence is synthesized)
gatgacctgccttggaggctctgcaggggacaaaggagggaggtctggtcaggatgggggtgcagtcccagcagcctccccctggccagggccatctcctgtcaccatggtgttccacgg

SEQ ID NO: 765701 - DNA, 120 bp, Artificial Sequence
  ENSG00000224383_22 (sequence is synthesized)
ttggggaggaggtggcctggccggctccagtgcagagaggaagagggcagcagttgaggatggaggctggactgtgtggtagttttacagacatgatggtttccggtgaccaggtgtcta

SEQ ID NO: 765702 - DNA, 120 bp, Artificial Sequence
  ENSG00000224383_23 (sequence is synthesized)
caaggacaaggttcagaaattgtacagccaactggaaagatataaaagtttgggtctgtctcctctccttcagaaatgaaatataaatttcaaacattaaacagttgggtgatcacgttg

SEQ ID NO: 765703 - DNA, 120 bp, Artificial Sequence
  ENSG00000224383_24 (sequence is synthesized)
ggcgccagccatggcctctggggcgggcggaagctggggtcgctccccaccgcagagcgcagtcccgacggagagctgtgcccccacccccaccccccagtgccacagggactgtgggtg

SEQ ID NO: 765704 - DNA, 120 bp, Artificial Sequence
  ENSG00000224383_25 (sequence is synthesized)
cccgcagccaggccgcgtgaaggaaggtgagactcccgggtccccccaccccacccccaccatcaccaccactcaccctcttctgcctcgcacatcctctgggagtccccgcagcacaac

SEQ ID NO: 765705 - DNA, 120 bp, Artificial Sequence
  ENSG00000224383_26 (sequence is synthesized)
ttctgctctgggctggaagttgcagaagagctgtgcaggggctggtggtcggtggagataacttgtgggtgaaactccagaggccacccctgggcctctgatgggggtctttttctttcc

SEQ ID NO: 765706 - DNA, 120 bp, Artificial Sequence
  ENSG00000224383_27 (sequence is synthesized)
cccatctcaggagagctgtgcccccacccccaccccccagtgccacagggactgtgggtgctgatgtacccccggcttcaggtagggctggggtggtgggcagcggggcccaggcctggg

SEQ ID NO: 765707 - DNA, 120 bp, Artificial Sequence
  ENSG00000224383_28 (sequence is synthesized)
cttagcttgggagacggcagagtggggagctgtccctggaggggccagatcctggaggggtgggggacgaggagagacagccccaaaccgagaggaagaggcgtggcagggagcagggag

SEQ ID NO: 765708 - DNA, 120 bp, Artificial Sequence
  ENSG00000224383_29 (sequence is synthesized)
gccgcggggcggggaggagagaacctggcccctgcggggttagggaggccactggccgggggggttggggctcgcgacgtgtccccatccattccccccaccccacctggctgactccgc

SEQ ID NO: 765709 - DNA, 120 bp, Artificial Sequence
  ENSG00000224389_0 (sequence is synthesized)
agaaggtagcagacagacagacggatctaacctctcttggatcctccagccatgaggctgctctgggggctgatctgggcatccagcttcttcaccttatctctgcagaagcccaggttg

SEQ ID NO: 765710 - DNA, 120 bp, Artificial Sequence
  ENSG00000224389_1 (sequence is synthesized)
ctcttgttctctccttctgtggttcatctgggggtccccctatcggtgggggtgcagctccaggatgtgccccgaggacaggtagtgaaaggatcagtgttcctgagaaacccatctcgt

SEQ ID NO: 765711 - DNA, 120 bp, Artificial Sequence
  ENSG00000224389_2 (sequence is synthesized)
aataatgtcccctgctccccaaaggtggacttcacccttagctcagaaagagacttcgcactcctcagtctccaggtgcccttgaaagatgcgaagagctgtggcctccatcaactcctc

SEQ ID NO: 765712 - DNA, 120 bp, Artificial Sequence
  ENSG00000224389_3 (sequence is synthesized)
agaggccctgaggtccagctggtggcccattcgccatggctaaaggactctctgtccagaacgacaaacatccagggtatcaacctgctcttctcctctcgccgggggcacctctttttg

SEQ ID NO: 765713 - DNA, 120 bp, Artificial Sequence
  ENSG00000224389_4 (sequence is synthesized)
cagacggaccagcccatttacaaccctggccagcgggttcggtaccgggtctttgctctggatcagaagatgcgcccgagcactgacaccatcacagtcatggtggagaactctcacggc

SEQ ID NO: 765714 - DNA, 120 bp, Artificial Sequence
  ENSG00000224389_5 (sequence is synthesized)
ctccgcgtgcggaagaaggaggtgtacatgccctcgtccatcttccaggatgactttgtgatcccagacatctcagagccagggacctggaagatctcagcccgattctcagatggcctg

SEQ ID NO: 765715 - DNA, 120 bp, Artificial Sequence
  ENSG00000224389_6 (sequence is synthesized)
gaatccaacagcagcacccagtttgaggtgaagaaatatgtccttcccaactttgaggtgaagatcacccctggaaagccctacatcctgacggtgccaggccatcttgatgaaatgcag

SEQ ID NO: 765716 - DNA, 120 bp, Artificial Sequence
  ENSG00000224389_7 (sequence is synthesized)
ttagacatccaggccaggtacatctatgggaagccagtgcagggggtggcatatgtgcgctttgggctcctagatgaggatggtaagaagactttctttcgggggctggagagtcagacc

SEQ ID NO: 765717 - DNA, 120 bp, Artificial Sequence
  ENSG00000224389_8 (sequence is synthesized)
aagctggtgaatggacagagccacatttccctctcaaaggcagagttccaggacgccctggagaagctgaatatgggcattactgacctccaggggctgcgcctctacgttgctgcagcc

SEQ ID NO: 765718 - DNA, 120 bp, Artificial Sequence
  ENSG00000224389_9 (sequence is synthesized)
atcattgagtctccaggtggggagatggaggaggcagagctcacatcctggtattttgtgtcatctcccttctccttggatcttagcaagaccaagcgacaccttgtgcctggggccccc

SEQ ID NO: 765719 - DNA, 120 bp, Artificial Sequence
  ENSG00000224389_10 (sequence is synthesized)
ttcctgctgcaggccttggtccgtgagatgtcaggctccccagcttctggcattcctgtcaaagtttctgccacggtgtcttctcctgggtctgttcctgaagtccaggacattcagcaa

SEQ ID NO: 765720 - DNA, 120 bp, Artificial Sequence
  ENSG00000224389_11 (sequence is synthesized)
aacacagacgggagcggccaagtcagcattccaataattatccctcagaccatctcagagctgcagctctcagtatctgcaggctccccacatccagcgatagccaggctcactgtggca

SEQ ID NO: 765721 - DNA, 120 bp, Artificial Sequence
  ENSG00000224389_12 (sequence is synthesized)
gccccaccttcaggaggccccgggtttctgtctattgagcggccggattctcgacctcctcgtgttggggacactctgaacctgaacttgcgagccgtgggcagtggggccaccttttct

SEQ ID NO: 765722 - DNA, 120 bp, Artificial Sequence
  ENSG00000224389_13 (sequence is synthesized)
cattactactacatgatcctatcccgagggcagatcgtgttcatgaatcgagagcccaagaggaccctgacctcggtctcggtgtttgtggaccatcacctggcaccctccttctacttt

SEQ ID NO: 765723 - DNA, 120 bp, Artificial Sequence
  ENSG00000224389_14 (sequence is synthesized)
gtggccttctactaccatggagaccacccagtggccaactccctgcgagtggatgtccaggctggggcctgcgagggcaagctggagctcagcgtggacggtgccaagcagtaccggaac

SEQ ID NO: 765724 - DNA, 120 bp, Artificial Sequence
  ENSG00000224389_15 (sequence is synthesized)
ggggagtccgtgaagctccacttagaaaccgactccctagccctggtggcgctgggagccttggacacagctctgtatgctgcaggcagcaagtcccacaagcccctcaacatgggcaag

SEQ ID NO: 765725 - DNA, 120 bp, Artificial Sequence
  ENSG00000224389_16 (sequence is synthesized)
gtctttgaagctatgaacagctatgacctcggctgtggtcctgggggtggggacagtgcccttcaggtgttccaggcagcgggcctggccttttctgatggagaccagtggaccttatcc

SEQ ID NO: 765726 - DNA, 120 bp, Artificial Sequence
  ENSG00000224389_17 (sequence is synthesized)
agaaagagactaagctgtcccaaggagaagacaacccggaaaaagagaaacgtgaacttccaaaaggcgattaatgagaaattgggtcagtatgcttccccgacagccaagcgctgctgc

SEQ ID NO: 765727 - DNA, 120 bp, Artificial Sequence
  ENSG00000224389_18 (sequence is synthesized)
caggatggggtgacacgtctgcccatgatgcgttcctgcgagcagcgggcagcccgcgtgcagcagccggactgccgggagcccttcctgtcctgctgccaatttgctgagagtctgcgc

SEQ ID NO: 765728 - DNA, 120 bp, Artificial Sequence
  ENSG00000224389_19 (sequence is synthesized)
aagaagagcagggacaagggccaggcgggcctccaacgagccctggagatcctgcaggaggaggacctgattgatgaggatgacattcccgtgcgcagcttcttcccagagaactggctc

SEQ ID NO: 765729 - DNA, 120 bp, Artificial Sequence
  ENSG00000224389_20 (sequence is synthesized)
tggagagtggaaacagtggaccgctttcaaatattgacactgtggctccccgactctctgaccacgtgggagatccatggcctgagcctgtccaaaaccaaaggcctatgtgtggccacc

SEQ ID NO: 765730 - DNA, 120 bp, Artificial Sequence
  ENSG00000224389_21 (sequence is synthesized)
ccagtccagctccgggtgttccgcgagttccacctgcacctccgcctgcccatgtctgtccgccgctttgagcagctggagctgcggcctgtcctctataactacctggataaaaacctg

SEQ ID NO: 765731 - DNA, 120 bp, Artificial Sequence
  ENSG00000224389_22 (sequence is synthesized)
gaggggctgtgcctggctgggggcggagggctggcccagcaggtgctggtgcctgcgggctctgcccggcctgttgccttctctgtggtgcccacggcagccaccgctgtgtctctgaag

SEQ ID NO: 765732 - DNA, 120 bp, Artificial Sequence
  ENSG00000224389_23 (sequence is synthesized)
gtggtggctcgagggtccttcgaattccctgtgggagatgcggtgtccaaggttctgcagattgagaaggaaggggccatccatagagaggagctggtctatgaactcaaccccttggac

SEQ ID NO: 765733 - DNA, 120 bp, Artificial Sequence
  ENSG00000224389_24 (sequence is synthesized)
caccgaggccggaccttggaaatacctggcaactctgatcccaatatgatccctgatggggactttaacagctacgtcagggttacagcctcagatccattggacactttaggctctgag

SEQ ID NO: 765734 - DNA, 120 bp, Artificial Sequence
  ENSG00000224389_25 (sequence is synthesized)
ggggccttgtcaccaggaggcgtggcctccctcttgaggcttcctcgaggctgtggggagcaaaccatgatctacttggctccgacactggctgcttcccgctacctggacaagacagag

SEQ ID NO: 765735 - DNA, 120 bp, Artificial Sequence
  ENSG00000224389_26 (sequence is synthesized)
cagtggagcacactgcctcccgagaccaaggaccacgccgtggatctgatccagaaaggctacatgcggatccagcagtttcggaaggcggatggttcctatgcggcttggttgtcacgg

SEQ ID NO: 765736 - DNA, 120 bp, Artificial Sequence
  ENSG00000224389_27 (sequence is synthesized)
ggcagcagcacctggctcacagcctttgtgttgaaggtcctgagtttggcccaggagcaggtaggaggctcgcctgagaaactgcaggagacatctaactggcttctgtcccagcagcag

SEQ ID NO: 765737 - DNA, 120 bp, Artificial Sequence
  ENSG00000224389_28 (sequence is synthesized)
gctgacggctcgttccaggacctctctccagtgatacataggagcatgcaggggggtttggtgggcaatgatgagactgtggcactcacagcctttgtgaccatcgcccttcatcatggg

SEQ ID NO: 765738 - DNA, 120 bp, Artificial Sequence
  ENSG00000224389_29 (sequence is synthesized)
ctggccgtcttccaggatgagggtgcagagccattgaagcagagagtggaagcctccatctcaaaggcaagctcatttttgggggagaaagcaagtgctgggctcctgggtgcccacgca

SEQ ID NO: 765739 - DNA, 120 bp, Artificial Sequence
  ENSG00000224389_30 (sequence is synthesized)
gctgccatcacggcctatgccctgacactgaccaaggcccctgcggacctgcggggtgttgcccacaacaacctcatggcaatggcccaggagactggagataacctgtactggggctca

SEQ ID NO: 765740 - DNA, 120 bp, Artificial Sequence
  ENSG00000224389_31 (sequence is synthesized)
gtcactggttctcagagcaatgccgtgtcgcccaccccggctcctcgcaacccatccgaccccatgccccaggccccagccctgtggattgaaaccacagcctacgccctgctgcacctc

SEQ ID NO: 765741 - DNA, 120 bp, Artificial Sequence
  ENSG00000224389_32 (sequence is synthesized)
ctgcttcacgagggcaaagcagagatggcagaccaggctgcggcctggctcacccgtcagggcagcttccaagggggattccgcagtacccaagacacggtgattgccctggatgccctg

SEQ ID NO: 765742 - DNA, 120 bp, Artificial Sequence
  ENSG00000224389_33 (sequence is synthesized)
tctgcctactggattgcctcccacaccactgaggagaggggtctcaatgtgactctcagctccacaggccggaatgggttcaagtcccacgcgctgcagctgaacaaccgccagattcgc

SEQ ID NO: 765743 - DNA, 120 bp, Artificial Sequence
  ENSG00000224389_34 (sequence is synthesized)
ggcctggaggaggagctgcagttttccttgggcagcaagatcaatgtgaaggtgggaggaaacagcaaaggaaccctgaaggtccttcgtacctacaatgtcctggacatgaagaacacg

SEQ ID NO: 765744 - DNA, 120 bp, Artificial Sequence
  ENSG00000224389_35 (sequence is synthesized)
acctgccaggacctacagatagaagtgacagtcaaaggccacgtcgagtacacgatggaagcaaacgaggactatgaggactatgagtacgatgagcttccagccaaggatgacccagat

SEQ ID NO: 765745 - DNA, 120 bp, Artificial Sequence
  ENSG00000224389_36 (sequence is synthesized)
gcccctctgcagcccgtgacacccctgcagctgtttgagggtcggaggaaccgccgcaggagggaggcgcccaaggtggtggaggagcaggagtccagggtgcactacaccgtgtgcatc

SEQ ID NO: 765746 - DNA, 120 bp, Artificial Sequence
  ENSG00000224389_37 (sequence is synthesized)
tggcggaacggcaaggtggggctgtctggcatggccatcgcggacgtcaccctcctgagtggattccacgccctgcgtgctgacctggagaagctgacctccctctctgaccgttacgtg

SEQ ID NO: 765747 - DNA, 120 bp, Artificial Sequence
  ENSG00000224389_38 (sequence is synthesized)
agtcactttgagaccgaggggccccacgtcctgctgtattttgactcggtccccacctcccgggagtgcgtgggctttgaggctgtgcaggaagtgccggtggggctggtgcagccggcc

SEQ ID NO: 765748 - DNA, 120 bp, Artificial Sequence
  ENSG00000224389_39 (sequence is synthesized)
agcgcaaccctgtacgactactacaaccccgagcgcagatgttctgtgttttacggggcaccaagtaagagcagactcttggccaccttgtgttctgctgaagtctgccagtgtgctgag

SEQ ID NO: 765749 - DNA, 120 bp, Artificial Sequence
  ENSG00000224389_40 (sequence is synthesized)
gggaagtgccctcgccagcgtcgcgccctggagcggggtctgcaggacgaggatggctacaggatgaagtttgcctgctactacccccgtgtggagtacggcttccaggttaaggttctc

SEQ ID NO: 765750 - DNA, 120 bp, Artificial Sequence
  ENSG00000224389_41 (sequence is synthesized)
cgagaagacagcagagctgctttccgcctctttgagaccaagatcacccaagtcctgcacttcaccaaggatgtcaaggccgctgctaatcagatgcgcaacttcctggttcgagcctcc

SEQ ID NO: 765751 - DNA, 120 bp, Artificial Sequence
  ENSG00000224389_42 (sequence is synthesized)
tgccgccttcgcttggaacctgggaaagaatatttgatcatgggtctggatggggccacctatgacctcgagggacacccccagtacctgctggactcgaatagctggatcgaggagatg

SEQ ID NO: 765752 - DNA, 120 bp, Artificial Sequence
  ENSG00000224389_43 (sequence is synthesized)
ccctctgaacgcctgtgccggagcacccgccagcgggcagcctgtgcccagctcaacgacttcctccaggagtatggcactcaggggtgccaggtgtgagggctgccctcccacctccgc

SEQ ID NO: 765753 - DNA, 120 bp, Artificial Sequence
  ENSG00000224389_44 (sequence is synthesized)
tgggaggaacctgaacctgggaaccatgaagctggaagcactgctgtgtccgctttcatgaacacagcctgggaccagggcatattaaaggcttttggcagcaaagtgtcagtgttggca

SEQ ID NO: 765754 - DNA, 120 bp, Artificial Sequence
  ENSG00000224389_45 (sequence is synthesized)
ccctcgtccatcttccaggatgactttgtgatcccagacatctcagagtgagcgctcccaatgtgggggctgcccccaagctacaccaccccaattcctgttaggctctccacctcccac

SEQ ID NO: 765755 - DNA, 120 bp, Artificial Sequence
  ENSG00000224389_46 (sequence is synthesized)
acagaggcacgtccccagatgccctgaccctcagcctcctgagcctctggttaacccccacagtcctcttcccagggaagcaggctgctggctctccgtgccccactgtacagatgggct

SEQ ID NO: 765756 - DNA, 120 bp, Artificial Sequence
  ENSG00000224389_47 (sequence is synthesized)
tgtgctgtgtctcggggccagccggggtagacgggccttctctgcctttccctacacagattgacactgtggctccccgactctctgaccacgtgggagatccatggcctgagcctgtcc

SEQ ID NO: 765757 - DNA, 120 bp, Artificial Sequence
  ENSG00000224389_48 (sequence is synthesized)
ccagggcaaccccctctgtcccaggtactgagccctgtcatgtgcagggcctgtgaccaactccccttttccacagctgacctccctctctgaccgttacgtgagtcactttgagaccga

SEQ ID NO: 765758 - DNA, 120 bp, Artificial Sequence
  ENSG00000224389_49 (sequence is synthesized)
ccctcggggaccggccgttttggtctctctgggtgtagcctgctcctcttacaggtcatgcacgcagcctgtttgctctgacaccaacttcctaccctctcagcctcaaagtaactcacc

SEQ ID NO: 765759 - DNA, 120 bp, Artificial Sequence
  ENSG00000224389_50 (sequence is synthesized)
caaggaccacgccgtggatctgatccagaaaggttctgggtgcaagggcaagcaggaggggggccaggaaaggacagttactggaagatggacagcccaggaggctacagagggaaagaa

SEQ ID NO: 765760 - DNA, 120 bp, Artificial Sequence
  ENSG00000224389_51 (sequence is synthesized)
ggcccctgatgaggatggggagcatggccttgggctcaaacagcagaagggtgagtgtcacctgagcggccacctctcctctccaaggctacatgcggatccagcagtttcggaaggcgg

SEQ ID NO: 765761 - DNA, 120 bp, Artificial Sequence
  ENSG00000224389_52 (sequence is synthesized)
tgagactgagggcctggggcggggcagtggaggcgggatggccggggccccccccacactgtctgatgggttccccaacttcagggaagtgccctcgccagcgtcgcgccctggagcggg

SEQ ID NO: 765762 - DNA, 120 bp, Artificial Sequence
  ENSG00000224389_53 (sequence is synthesized)
gaggctgaggtgtggccgaggacctgaccatctggaagtgtgaaaatccccttgggctgtcagaagccttgggcttggccataaatagggaggcagtggcacctctccatgggggtggcg

SEQ ID NO: 765763 - DNA, 120 bp, Artificial Sequence
  ENSG00000224389_54 (sequence is synthesized)
aaggtggaatgagaggatctacacagagtccccagcctgggctcaccctgcaccttctcttcccctctgaccacttttgcgcacgtcatccccgcagccaaggatgtcaaggccgctgct

SEQ ID NO: 765764 - DNA, 120 bp, Artificial Sequence
  ENSG00000224389_55 (sequence is synthesized)
ctcctatgggacaatggacaccggggtagtgagggggcagagagccctggggctccctgggactgaggaggcagaatggaggggcctgtgccctaactcctctctgttctccagagcgca

SEQ ID NO: 765765 - DNA, 120 bp, Artificial Sequence
  ENSG00000224389_56 (sequence is synthesized)
caccgggtttactgagtatgcgttaggaggtttctcaggagacagctgtgtcagcggctggtgctcttgagaacttgtgatgtcatcagagagaaggacaagaatgtgagcccgtgagac

SEQ ID NO: 765766 - DNA, 120 bp, Artificial Sequence
  ENSG00000224420_0 (sequence is synthesized)
gtccaactcttttcatccctctcctgggtctgcgcccctcccctctgcggtacccgtgtcctgcctagtaggggatgggggtggctttccagcacagccagccctcaagtttcccagaac

SEQ ID NO: 765767 - DNA, 120 bp, Artificial Sequence
  ENSG00000224420_1 (sequence is synthesized)
agtctccccacctccccccaacactcgacattgttcctctctggctgttttttcctgttcgggtcccttcaaggcccaactgtgcccagccctctgcagctggggacactgagtgggttg

SEQ ID NO: 765768 - DNA, 120 bp, Artificial Sequence
  ENSG00000224420_2 (sequence is synthesized)
ggggtgtatgtttgcaaggatagaatttctcatgggggagtggccctgcttcctcccctagaatggcttggggcttagggctggggacttgccctccatggaggtcagtgggagttgcag

SEQ ID NO: 765769 - DNA, 120 bp, Artificial Sequence
  ENSG00000224420_3 (sequence is synthesized)
ctgtaaggtggcagggcctacccatcttacagaggtgaagacgaggtccctctgcctctgctgcagacatggcgtctgcacccacccttccaccctcagggcctggccacggggtcctgg

SEQ ID NO: 765770 - DNA, 120 bp, Artificial Sequence
  ENSG00000224420_4 (sequence is synthesized)
gtcccccacaatactgtgcactcgacctggttgacccaggacaccctcctcgttgaacagccctggctacacctgcttcagtgcaactggagccctcaccggcgagtgcctgacacctcg

SEQ ID NO: 765771 - DNA, 120 bp, Artificial Sequence
  ENSG00000224420_5 (sequence is synthesized)
gccttttctcttccggaggggcgctcctcagtgtgtttggggtctccctcgctccacgccctccagggggccgcatgtgcacttgccctgcattgcctggcccccgaggttccagggtcc

SEQ ID NO: 765772 - DNA, 120 bp, Artificial Sequence
  ENSG00000224420_6 (sequence is synthesized)
caactgtctactaaccggcttcccgacagggtgagggtgaggtcgcatctacaaccagagccagcgcttccccgccgccaccccttttcttggaatcccgctgcttagctacctgcgggt

SEQ ID NO: 765773 - DNA, 120 bp, Artificial Sequence
  ENSG00000224420_7 (sequence is synthesized)
ggcgagtctccacagacctcctagggggatagacagcagctggtgtgaccccacacacccagtgaggtctctggagccgcggtgcgggaagcggggacccgggtttgaatcctgcccctc

SEQ ID NO: 765774 - DNA, 120 bp, Artificial Sequence
  ENSG00000224420_8 (sequence is synthesized)
tggtgtggtgcggcctcttcccacagacttttggcctcagtgttccccgcctgggaagtggggactggccctggtacctggctccagagctgcacccagaggcgatcagcccggtgcggg

SEQ ID NO: 765775 - DNA, 120 bp, Artificial Sequence
  ENSG00000224420_9 (sequence is synthesized)
aacggggcggggtggccgcaactacgggccacggatcctgacccgccctgcccacgatgactatccacatcctcatcctgctgttgctcctcgccttctccgcccaaggggacctggaca

SEQ ID NO: 765776 - DNA, 120 bp, Artificial Sequence
  ENSG00000224420_10 (sequence is synthesized)
ctgcagccaggcgaggccagcaccaggtcccccagcaccgcgggcacgtctgctacctgggcgtatgccggacccaccgcctggcggagatcatatactggattcgctgtctccaccaag

SEQ ID NO: 765777 - DNA, 120 bp, Artificial Sequence
  ENSG00000224420_11 (sequence is synthesized)
gagccctcggggaaggccagccacgagccccaggacccctacagctatgggcgccgccggtggcgcgaggcggaagcccggctcggttcccaggattccggcctgcagcgagggggctag

SEQ ID NO: 765778 - DNA, 120 bp, Artificial Sequence
  ENSG00000224420_12 (sequence is synthesized)
cgcagtgcccagctcgctgggtgacctcgggcacggctcgtcccctcctcggcttcagtttgcctatctgtatgttggagcttctactccacatttcttctcccctaactccagcccctg

SEQ ID NO: 765779 - DNA, 120 bp, Artificial Sequence
  ENSG00000224420_13 (sequence is synthesized)
aaaccgtcttccccagtccctccccgggctgcgactaggttggacctagaagcacacgggaccaggctgggcgaagaacactgacgcccagagccgaataaacaagagttccgtgtttca

SEQ ID NO: 765780 - DNA, 120 bp, Artificial Sequence
  ENSG00000224440_0 (sequence is synthesized)
agtatggcaaaggtgaccagtgagccacagaagcctaatgaagatgtggacgaacagaccccatcaacctcaagtaccaaagggaggaagaaggggaagacaccccgtcaacgaaggtcc

SEQ ID NO: 765781 - DNA, 120 bp, Artificial Sequence
  ENSG00000224440_1 (sequence is synthesized)
agccggtgaaactaacacccctgcaggaaaacctaagaaagctagaggaccaatactgcgtggtcgttatcaccggctgaaagaaaaaatgaagaaagaagaggccgacaaagagcaaag

SEQ ID NO: 765782 - DNA, 120 bp, Artificial Sequence
  ENSG00000224440_2 (sequence is synthesized)
cgagacctcagttctgtgatgtctctagaggtccgccactgaaaagtcatcaatcatacagtcagtgaattctacaccaacaggttaaaaccatgaaaataaaatcaacctgaatcgaaa

SEQ ID NO: 765783 - DNA, 120 bp, Artificial Sequence
  ENSG00000224470_0 (sequence is synthesized)
ccggctgtggggggcgctgggtgtggggcggctccggggccggggatggcggcggccgcggttgcggcggctccgggacgagtgagtggatcctgggaagcgctgtgaaatgggctggct

SEQ ID NO: 765784 - DNA, 120 bp, Artificial Sequence
  ENSG00000224470_1 (sequence is synthesized)
aatgggctggctcccgagccagccgggaggacacttactacagctgctcagaagcaccactggaaactcagatgtgggcgccccagccagaagcagagaggggtacagggaagctacaga

SEQ ID NO: 765785 - DNA, 120 bp, Artificial Sequence
  ENSG00000224470_2 (sequence is synthesized)
gaagccccttctgatgccccagggagcaagtcgactccttccaggctccaggaacaccacaaagcaatatgaaacctgttcatgaaaggagtcaggaatgccttccaccaaagaaacgag

SEQ ID NO: 765786 - DNA, 120 bp, Artificial Sequence
  ENSG00000224470_3 (sequence is synthesized)
acctccccgtgaccagcgaggatatggggagaactaccagctgctccactaaccacacaccctccagtgatgcttctgaatggtcccgaggggttgtggtggctgggcagagccaggcag

SEQ ID NO: 765787 - DNA, 120 bp, Artificial Sequence
  ENSG00000224470_4 (sequence is synthesized)
gagccagagtcagcctggggggtgatggagctgaggccatcaccggtctgacagtggaccagtatggcatgctgtataaggtggctgtgccgcctgccaccttttcaccaactggactcc

SEQ ID NO: 765788 - DNA, 120 bp, Artificial Sequence
  ENSG00000224470_5 (sequence is synthesized)
catctgtggtgaatatgagtcccttgcccccaacgtttaatgtagcgtcttcactaattcaacatccaggcatccactatcctccactccactatgctcagctcccatccacctcgctgc

SEQ ID NO: 765789 - DNA, 120 bp, Artificial Sequence
  ENSG00000224470_6 (sequence is synthesized)
agttcattgggtctccttatagccttccctatgctgtgccacctaatttcctaccgagtcccctcctatctccttctgccaaccttgccacctctcaccttccacactttgtgccatatg

SEQ ID NO: 765790 - DNA, 120 bp, Artificial Sequence
  ENSG00000224470_7 (sequence is synthesized)
cctcacttctggctgaaggagccactcctcccccacaggctccctccccggcccactcatttaacaaagctccctctgccacctccccatctgggcaattgccacatcattcaagtactc

SEQ ID NO: 765791 - DNA, 120 bp, Artificial Sequence
  ENSG00000224470_8 (sequence is synthesized)
agccgctggaccttgctccaggtcggatgcccatttattatcagatgtccaggctacctgctgggtatactttgcatgaaacccctccagcaggtgccagcccagttcttacccctcagg

SEQ ID NO: 765792 - DNA, 120 bp, Artificial Sequence
  ENSG00000224470_9 (sequence is synthesized)
agagccagtctgctctggaagcagctgctgcaaatggaggacagagaccacgagagcgaaatttagtaagacgggaaagtgaagcccttgactcccccaacagcaagggtgaaggccagg

SEQ ID NO: 765793 - DNA, 120 bp, Artificial Sequence
  ENSG00000224470_10 (sequence is synthesized)
gactggtgccagtggtagaatgtgtggtggatggacagttgttttcaggttctcagactccacgggtagaggtagcagcaccagcacaccgggggaccccggacactgaccttgaggtcc

SEQ ID NO: 765794 - DNA, 120 bp, Artificial Sequence
  ENSG00000224470_11 (sequence is synthesized)
agcgggtggttggcgctttagcttctcaggactatcgtgtggtggcagctcagaggaaggaggaacccagccccctcaacctatcccatcatacccccgaccatcagggtgaggggcgag

SEQ ID NO: 765795 - DNA, 120 bp, Artificial Sequence
  ENSG00000224470_12 (sequence is synthesized)
ggtcagccaggaaccctgcagagctggcagagaaaagtcaggcccgtgggttctaccctcagtcccatcaggaaccagtaaaacatagacctttacccaaagcaatggttgtagccaatg

SEQ ID NO: 765796 - DNA, 120 bp, Artificial Sequence
  ENSG00000224470_13 (sequence is synthesized)
gcaacctggtgcccactggaactgactcaggcctgctgcctgtgggctcggagatcctggtagcatcaagtctggacgtgcaggccagagccaccttcccagacaaggagccaacgccgc

SEQ ID NO: 765797 - DNA, 120 bp, Artificial Sequence
  ENSG00000224470_14 (sequence is synthesized)
cccccattacctcctctcacttgccttcccatttcatgaaaggcgccatcatccagctggctacgggagagctgaagcgggtggaggacctccagacccaggattttgtgcgcagtgccg

SEQ ID NO: 765798 - DNA, 120 bp, Artificial Sequence
  ENSG00000224470_15 (sequence is synthesized)
aagtgagcggggggctgaagattgactctagcacggtcgtggacattcaggagagccaatggcctggatttgtcatgctgcattttgtggttggtgagcagcagagcaaagtgagcatcg

SEQ ID NO: 765799 - DNA, 120 bp, Artificial Sequence
  ENSG00000224470_16 (sequence is synthesized)
aagtgccccccgagcaccccttctttgtatatggccagggttggtcctcttgcagccctgggcggacgacacaactcttctctctgccctgccatcggctacaggtgggagatgtctgca

SEQ ID NO: 765800 - DNA, 120 bp, Artificial Sequence
  ENSG00000224470_17 (sequence is synthesized)
tctctatcagtttacagagcttgaacagtaactcagtttctcaggccagctgtgctcccccaagccagctgggtcccccccgagaaaggcctgagaggacggtcttgggatccagagagc

SEQ ID NO: 765801 - DNA, 120 bp, Artificial Sequence
  ENSG00000224470_18 (sequence is synthesized)
tatgtgacagtgaggggaagagccagccggcaggagagggctcccgtgtggtagagccttcccagcctgagtccggtgctcaggcctgctggccagccccgagcttccaaagatacagca

SEQ ID NO: 765802 - DNA, 120 bp, Artificial Sequence
  ENSG00000224470_19 (sequence is synthesized)
tgcaaggggaggaggcacgggctgcgctgctccgtccctctttcattccacaggaggtaaagctgtccattgaagggcgttccaatgcgggaaaatgaacctcttccccagaccaggact

SEQ ID NO: 765803 - DNA, 120 bp, Artificial Sequence
  ENSG00000224470_20 (sequence is synthesized)
ggggctttaccccagagcctcgcctcgccgccgtgagcaggcagaggatttgcacacgccgagcagggaatggctttcttggcagtgagatttgggggaaaggggaggcatgaagtcagc

SEQ ID NO: 765804 - DNA, 120 bp, Artificial Sequence
  ENSG00000224470_21 (sequence is synthesized)
ctcccaaggcaggatctgttgttcattaccccatggcatcctttcaggacaaccccagagggtgttgtgatggggagcagcaggcctggggcaaggaaggaagggggtgcacacaggaga

SEQ ID NO: 765805 - DNA, 120 bp, Artificial Sequence
  ENSG00000224470_22 (sequence is synthesized)
agaaacattccaaaatcagggcctccctgttctttcctccccatccctagctcctgcaagagaaagtccaggctttgggagcagatggcagagggagggagtaaagaaagagccaaaaat

SEQ ID NO: 765806 - DNA, 120 bp, Artificial Sequence
  ENSG00000224470_23 (sequence is synthesized)
gatgatccacagcttatagtagcagttaaactgtcagaagttttttttcttttttgtggtagaagggcaggaggccccaaggttggaaataagagggttcccacccagaacccttcttgt

SEQ ID NO: 765807 - DNA, 120 bp, Artificial Sequence
  ENSG00000224470_24 (sequence is synthesized)
gagagatgcgcactttaaagggtgattttgttccagatgtctatggctgggtgtgtgggggaggagcactctcatctgcaggactctgcttgatcctctgcttcatagcccttccccatc

SEQ ID NO: 765808 - DNA, 120 bp, Artificial Sequence
  ENSG00000224470_25 (sequence is synthesized)
tctcctcaccattctgcctacaaggcttctagcagcacgggggcccggagggagagccccttcagggttcagagtgaagtactaccttgccagggactcagtcaggggactttgggagaa

SEQ ID NO: 765809 - DNA, 120 bp, Artificial Sequence
  ENSG00000224470_26 (sequence is synthesized)
agacttgatagccaggctgactgggttctaggcaggccctctggaaaggtagctcacctaacaaagctcctccatctcagcatgccagacccactttgaaatctcacagaatcttgctgg

SEQ ID NO: 765810 - DNA, 120 bp, Artificial Sequence
  ENSG00000224470_27 (sequence is synthesized)
taatggtgactttagaactagtagaccctttttcccaggcactgaccccccacctttgtctgtgttgtgcccaagtgcctgcgccacccccaccctcctgctgcgctgaccgctgcatgg

SEQ ID NO: 765811 - DNA, 120 bp, Artificial Sequence
  ENSG00000224470_28 (sequence is synthesized)
tgtcgtgacctgggcctcatttgtagctgcactgcctttccttgtctgcaaagttggttttgtccactctgaccaagacctctagtttttggtgggtagggggtctctctggtttcccct

SEQ ID NO: 765812 - DNA, 120 bp, Artificial Sequence
  ENSG00000224470_29 (sequence is synthesized)
tcagctataatctctatttttaaaatctcaaaatcatgtcccctccacttccactgccaaacagcttggtgaagaaacaagaagggaactatgccctgggccagggcgaatgcgtggctg

SEQ ID NO: 765813 - DNA, 120 bp, Artificial Sequence
  ENSG00000224470_30 (sequence is synthesized)
ggcagtgcccatcatggcattttcacatgtcccatatgcccctcctgtcttattccactgcttctcccagcattctggtgcctccaagccatcccctcccaccaccagctctaagattct

SEQ ID NO: 765814 - DNA, 120 bp, Artificial Sequence
  ENSG00000224470_31 (sequence is synthesized)
aggatagtcttgataacatttcagtacctgaatagatgtcattttgtgttggtatattcctctgcaaaaagtattttcaatcttggttgcattggcaccccccctaccccccaccaatgt

SEQ ID NO: 765815 - DNA, 120 bp, Artificial Sequence
  ENSG00000224470_32 (sequence is synthesized)
gggtaagtttttttgtttgttttttgggggtctttagactcttgaaggcaactcagggtattgtccacgcagctctctggttagacttctcccaggctatgatcctggcatgtcctttat

SEQ ID NO: 765816 - DNA, 120 bp, Artificial Sequence
  ENSG00000224470_33 (sequence is synthesized)
aaggtatacttggattggccgagacctggcctggcatcaggagtccaaacctctgaggtctgatctctgctctgtcaaggactttcggcaagtctcgtgacctctggctctttcacttcc

SEQ ID NO: 765817 - DNA, 120 bp, Artificial Sequence
  ENSG00000224470_34 (sequence is synthesized)
tccccacctgccaaatggggataaataatcttacctacctcctggggggaggggaagttctgagaatggagtcattcttagtgttcaggtgctaaaggttgttctcctgggggaacagag

SEQ ID NO: 765818 - DNA, 120 bp, Artificial Sequence
  ENSG00000224470_35 (sequence is synthesized)
tgactgaaactggcttgtttgctacaagccctaccctccactctttcattccttgaaagcagtttgcctggtcagtcagcttttgggggtccatcaaaggaggttgctgacctgaccgtg

SEQ ID NO: 765819 - DNA, 120 bp, Artificial Sequence
  ENSG00000224470_36 (sequence is synthesized)
agtgcttcagtatctggtttgtgtcagaaccagacgccaactttgtactgcatttgggatcatatctttccccttctctgtcccccattctctgaatgctgctttctctggcttgtttcc

SEQ ID NO: 765820 - DNA, 120 bp, Artificial Sequence
  ENSG00000224470_37 (sequence is synthesized)
tacagtgggggcctgtggggttgagtcttgaggaatcccctcaaatgagaaggccttgggagaaggcctcatctctggctgtttcatgagcaactcattcctagagttcattgtttgcat

SEQ ID NO: 765821 - DNA, 120 bp, Artificial Sequence
  ENSG00000224470_38 (sequence is synthesized)
gggtttctcacaagcgtccttcctcataggaaggctcatcaactgaatttagtgacatgtacacagtagatgctcaagcagtgtctgcaaggacacaagctgagctttctccttatgggg

SEQ ID NO: 765822 - DNA, 120 bp, Artificial Sequence
  ENSG00000224470_39 (sequence is synthesized)
caaacctatgtctaaccagatacagaccaattagtttagatcaaatcaccttccacttgggctacttgtgactttccaacctggtaacttccactgaattctggaaagagaaattcttga

SEQ ID NO: 765823 - DNA, 120 bp, Artificial Sequence
  ENSG00000224470_40 (sequence is synthesized)
ggaccctggcaagttgggccctgacctttctgttgctgtctcttgctggtgaagcaataccagcagttcctgtaataccacaatatcgttccatgcatatataacatattaatacttgat

SEQ ID NO: 765824 - DNA, 120 bp, Artificial Sequence
  ENSG00000224470_41 (sequence is synthesized)
tttgctgagctgcaaaggtatctgtcataaaatatggtccccaggaaaagaatctctgtgctctaaatctcggtcagagctgtggcctcccccttgcctttaacctctagtttagtcttt

SEQ ID NO: 765825 - DNA, 120 bp, Artificial Sequence
  ENSG00000224470_42 (sequence is synthesized)
tcctccaggcatgaaaaatatgactaacctgtggtgtgtccattcttccttataggaatttcctgagtttgcaggagacatgagagcagtttttagcgagtattttagtgggaagttgcc

SEQ ID NO: 765826 - DNA, 120 bp, Artificial Sequence
  ENSG00000224470_43 (sequence is synthesized)
aactttttaagaatgagcagttgacaagggccagagcctgtcccttgtcagcagtaggacatttccagctcttaggaatagaaaggaggactgctgactgtctggcgctgtataaaaatg

SEQ ID NO: 765827 - DNA, 120 bp, Artificial Sequence
  ENSG00000224470_44 (sequence is synthesized)
tgtataccaatttgggaataggggaacccagtcatggatggataataagccaagtcttgaatcattcctatcaagattagtatacatgaggaagaggtggcatggggggaaggggctctg

SEQ ID NO: 765828 - DNA, 120 bp, Artificial Sequence
  ENSG00000224470_45 (sequence is synthesized)
ggagttcagagctgagtacttgtacctgagggagggcccccagccaatctgggctggtccttctatattcttggtcccagttggtcataacaccaagggctttgccctgcgctgctttgc

SEQ ID NO: 765829 - DNA, 120 bp, Artificial Sequence
  ENSG00000224470_46 (sequence is synthesized)
cactgctgctgtccgctcactgtcctgcctgctgtcctctacagctccctatccttccatgtctttggccatgtagattaagtgtaggcgtccggttcattcttacctgtgttaggccat

SEQ ID NO: 765830 - DNA, 120 bp, Artificial Sequence
  ENSG00000224470_47 (sequence is synthesized)
gttattttatagcgaagtcatgttcgatagggatggtatgaaatgctgctggtgggctggtaaatccaaagggataaggcttcagtgctgttgggagccctctggctccaaatgtctgac

SEQ ID NO: 765831 - DNA, 120 bp, Artificial Sequence
  ENSG00000224470_48 (sequence is synthesized)
tatcttgagggagaaacaagcaggtttctactagtggtgtcttctgttgtattaacttctttcctttgtggtatcttgtatcctgttttaaaaactaaatgaagggaaccacattagggc

SEQ ID NO: 765832 - DNA, 120 bp, Artificial Sequence
  ENSG00000224470_49 (sequence is synthesized)
ccatgccagcatcccagtgaagttcgtccagctccagttaggtggattctggagttcggagagggtttaaagtttggctgaaatagcacctcaagtggggtttagttttatttttacctg

SEQ ID NO: 765833 - DNA, 120 bp, Artificial Sequence
  ENSG00000224470_50 (sequence is synthesized)
cgggcatcatgggcgatttagggggaagcacaggatggtggtgtggtttaaacctgcagcaagcaggcatgttgaagagttgagtgatcacgctggagatgaagggttggacatggattg

SEQ ID NO: 765834 - DNA, 120 bp, Artificial Sequence
  ENSG00000224470_51 (sequence is synthesized)
actgggaaaaggcctgggtccattggagtaaagataacctagtcgattgaattggccatgggaagttaggtcacagtcttataaacaaagtaaataggacagagactaagttttagggag

SEQ ID NO: 765835 - DNA, 120 bp, Artificial Sequence
  ENSG00000224470_52 (sequence is synthesized)
acatcttggcctcctaggctaagtttactaaaccacactgaagctatagtaccttccagatgggcaaaagtgtacactacagttgaggagctgaaccttattaggttggatgtcgatcag

SEQ ID NO: 765836 - DNA, 120 bp, Artificial Sequence
  ENSG00000224470_53 (sequence is synthesized)
gaacctgtttgccctttgctgggaagccttcactctccagctttcctggggtagggaaggtctcccacattatgcaataataaaataagcatctgggtctttgcagctgtcagttgctct

SEQ ID NO: 765837 - DNA, 120 bp, Artificial Sequence
  ENSG00000224470_54 (sequence is synthesized)
ttcaactctaggatccatctttggaccagaagcctggtctgtgcctaggatgacactggccccagagatgctagagtcgactgcactctctccttagctgcagaccatgcacagtgcctg

SEQ ID NO: 765838 - DNA, 120 bp, Artificial Sequence
  ENSG00000224470_55 (sequence is synthesized)
gggcggaaggaggagaggtgttgcggtttgccctgctgcctccccagcaggaacaatagtcataaatgcacttttcacactaaaggtttctttattagttctccagttaaacctagatcc

SEQ ID NO: 765839 - DNA, 120 bp, Artificial Sequence
  ENSG00000224470_56 (sequence is synthesized)
ctccctggtagattgcgaactcaaagttttgtgatcccaaagccattccactgcaaatgcccagcagtgaagatggcctcaaattgggttcttgcctgcagtgtgtgtggcagcagccca

SEQ ID NO: 765840 - DNA, 120 bp, Artificial Sequence
  ENSG00000224470_57 (sequence is synthesized)
tgtgcctttacctgttgtcaaacttgcaagcatttatttgtctttatgactgtcatggggactgaggttcttcagagaaagagtgtgagctgatgacacagtggttttacacccaccccc

SEQ ID NO: 765841 - DNA, 120 bp, Artificial Sequence
  ENSG00000224470_58 (sequence is synthesized)
tgggcagggagtttgcacgtagttgtgagctgtgagtggttagtgcattgctggtattgctgaaggcagggttgatccctcacttgactgatacttgcattcaagagaatctagattgtg

SEQ ID NO: 765842 - DNA, 120 bp, Artificial Sequence
  ENSG00000224470_59 (sequence is synthesized)
ttgggggagggactgactgtactcatggctaacttaaagtattaaaataaggctgtcccctacaaccttcttagtcacacaggatccctgtagccaaaacagtatatgatccagctgcag

SEQ ID NO: 765843 - DNA, 120 bp, Artificial Sequence
  ENSG00000224470_60 (sequence is synthesized)
agagcagactgctctcagcttgcacagcaccttaggcgagggaagaatatacggatagggaatggggtggagaaaggatgggaatgttgtcatccaggtggctttagggtcctaaggagt

SEQ ID NO: 765844 - DNA, 120 bp, Artificial Sequence
  ENSG00000224470_61 (sequence is synthesized)
ggagaaggatggcactggggaggtctggatggatctgtgtaggagttccctgtagataaattactgatcccccatctactatccccagtatgtaatggctgaattaatatgtaatcaact

SEQ ID NO: 765845 - DNA, 120 bp, Artificial Sequence
  ENSG00000224470_62 (sequence is synthesized)
gcattgtatctaaagccttagaactagtcaggtgctccctccacccaataccatttcttaccctctaatcctacctgatctttaacaaagcattaataattctaaggataatctctattt

SEQ ID NO: 765846 - DNA, 120 bp, Artificial Sequence
  ENSG00000224470_63 (sequence is synthesized)
tgttgtgcttttttgtaactgttttaaataaatcaatttgtactgtatatttgtacttttgtgagatcctttttgctgttttaccattttaagtctctgtacttggctacacacagattg

SEQ ID NO: 765847 - DNA, 120 bp, Artificial Sequence
  ENSG00000224470_64 (sequence is synthesized)
tatttttattgttaatgctcttcttatggatacctgcatttaacttgtggactatgtaaacacaatatctatcaatatctatatatctatatatctatctatataaactactagcttttc

SEQ ID NO: 765848 - DNA, 120 bp, Artificial Sequence
  ENSG00000224470_65 (sequence is synthesized)
gtgagtggatcctgggaagcgctgtgaaatgggctggctcccgagccagccgggaggacacttactacagctgctcagaagcaccactggaaactcaggtaataccggcactttgaattc

SEQ ID NO: 765849 - DNA, 120 bp, Artificial Sequence
  ENSG00000224470_66 (sequence is synthesized)
tggaacctggttggaagaaataggcagcaaagttcatgtgcactgaagtgttcagaccaaaaagttgctttataacaatggacaaaagcatttgtgaaaggtgacaataagagaaaaggg

SEQ ID NO: 765850 - DNA, 120 bp, Artificial Sequence
  ENSG00000224470_67 (sequence is synthesized)
aaagagaactttcttatgaatcatacagatacggggaaaaaaacaggcatgtttagaggaatggaaccagaatttcatggagtggtgcctggagcagacctacagtggagaaggagctat

SEQ ID NO: 765851 - DNA, 120 bp, Artificial Sequence
  ENSG00000224470_68 (sequence is synthesized)
gttgcggcggctccgggacgagtgagtggatcctgggaagcgctgtgaaatgggctggctcccgagccagccgggaggacacttactacagctgctcagaagcaccactggaaactcagg

SEQ ID NO: 765852 - DNA, 120 bp, Artificial Sequence
  ENSG00000224470_69 (sequence is synthesized)
tgatgaaaagagagtgcgttcccacctccagctctggtgcagttcccacggagcaaagcaaactcgactgaatccaagtgatctgtatctgccaaaaaggagaggacaagaaagctggtc

SEQ ID NO: 765853 - DNA, 120 bp, Artificial Sequence
  ENSG00000224470_70 (sequence is synthesized)
acttagccgcctggctgttcacctgacccctggggttgggtctggggcgtgtctaatcagccgagatggtccctctgcttcttcaagcatgagcccagaatgcctgagcctgccctggca

SEQ ID NO: 765854 - DNA, 120 bp, Artificial Sequence
  ENSG00000224531_0 (sequence is synthesized)
ggagaagccgctacagccgcggccgggcgacgctgacatctggcatccctggggtctcagagacacgggtggacagcgacgagggccttgtggccgccgtgtgtacccgtgcttaccctc

SEQ ID NO: 765855 - DNA, 120 bp, Artificial Sequence
  ENSG00000224531_1 (sequence is synthesized)
tgtcctccctacaggcgcgcggcgtccgccatggaagcgcatccgaccgctggggtctctgggtgccgcggcctcggctctccggggcgatgagggactagaggcgccctgaggcccgcc

SEQ ID NO: 765856 - DNA, 120 bp, Artificial Sequence
  ENSG00000224531_2 (sequence is synthesized)
gatgagggactagaggcgccctgaggcccgcctgcctcccgcgctctggccaccccggcgggaaaaggatcgggcgggcgggcggtcccacagtgcccgcctttgcgccgccccaccccc

SEQ ID NO: 765857 - DNA, 120 bp, Artificial Sequence
  ENSG00000224531_3 (sequence is synthesized)
gcgcccgccgctgaagcgcaggacgcgccgccgcccgcgctcaccgccgtccgcgccagccgccccgagccgactgcccttctgcccccaagatgtggcacagcgtcgggctgactctgc

SEQ ID NO: 765858 - DNA, 120 bp, Artificial Sequence
  ENSG00000224531_4 (sequence is synthesized)
atgtggcacagcgtcgggctgactctgcttgtgttcgtggccacgctgctgatcgtcctgctgctgatggtgtgcggttggtattttgtatggcatctttttttatcaaaattcaagttt

SEQ ID NO: 765859 - DNA, 120 bp, Artificial Sequence
  ENSG00000224531_5 (sequence is synthesized)
ctccgggaactggtgggagacacaggatcccaagagggagatcatgagccttcagggtctgaaactgaagaagacacttcctcctctccacacagaatcagatccgctcgccaaaggagg

SEQ ID NO: 765860 - DNA, 120 bp, Artificial Sequence
  ENSG00000224531_6 (sequence is synthesized)
gcacctgctgatgaaggccacagacccctgacatagtcctgtacttgtgaaggatgaaaaggcagttgccagcttctgtcttttactgacttcgctttgaaatttactaatgactgaaga

SEQ ID NO: 765861 - DNA, 120 bp, Artificial Sequence
  ENSG00000224531_7 (sequence is synthesized)
acatttgtattggattttaagtcgaattttaaaaaagatttacatgtaagccatataaaaataaagggaactgaaaccaaattggactattataaatttcatcttaaagataatcttttg

SEQ ID NO: 765862 - DNA, 120 bp, Artificial Sequence
  ENSG00000224531_8 (sequence is synthesized)
tttcaccagctttctacttatacacttattccttggcttttgggcttattttcttgcactggtgcagatctggtaaacattaaaggcttgaaaaaccatattttgttagccctaaaatgt

SEQ ID NO: 765863 - DNA, 120 bp, Artificial Sequence
  ENSG00000224531_9 (sequence is synthesized)
acatttttcttcccattttaacttatctgaaattgggatgcatctcattactgtcaaccaggtgatagtcatgtaacgctcctaccgtgtgcatgtgtgaatttacagcttgtcatcgtg

SEQ ID NO: 765864 - DNA, 120 bp, Artificial Sequence
  ENSG00000224531_10 (sequence is synthesized)
tcatccctttaaccaacatgtgttttgttggtatcaaatgtgtcaggtttaattgacattttaaaatgtcttcaaaaagatcacactatgattcagcattgaaacgaaaagttattgtgt

SEQ ID NO: 765865 - DNA, 120 bp, Artificial Sequence
  ENSG00000224531_11 (sequence is synthesized)
atgcagaaaagcatggaaacagagcagcagggcgtacatttgatattagtgaagcaaatattcgtcgctggagaaatgatcgcaattccatattttcctgcaaagcaacaacaaaatgtt

SEQ ID NO: 765866 - DNA, 120 bp, Artificial Sequence
  ENSG00000224531_12 (sequence is synthesized)
ttacgggacctaagaaaggtaggtacccacaagtagatgaagctgtactacgtttcgtcagtgagacacgtgcaaaaggattgcctatcacacgccaagcaatgcaattgaaggcaggag

SEQ ID NO: 765867 - DNA, 120 bp, Artificial Sequence
  ENSG00000224531_13 (sequence is synthesized)
aagttgccaaaaccctaggaattgatgaaacaaaattcaaagccacaagaggctggtgtgaccgattcatgcgtcgagcaggactatcattaaggcatcaaacatcgttttgtcccaagc

SEQ ID NO: 765868 - DNA, 120 bp, Artificial Sequence
  ENSG00000224531_14 (sequence is synthesized)
tccccactgccattaaacagaagacagtgttggagcactctttcaagaagtgctgcataaccagtactcttgacaacaccgggagagacgttctgtggaaaaatgcagacatcaatgact

SEQ ID NO: 765869 - DNA, 120 bp, Artificial Sequence
  ENSG00000224531_15 (sequence is synthesized)
gtggtttgaaaagtgattcagaagagttggattcagaatatgaagttataattataacttaaccaatttatttcacacattttctttacatatgcacaagattgatgtgataaaaatctg

SEQ ID NO: 765870 - DNA, 120 bp, Artificial Sequence
  ENSG00000224531_16 (sequence is synthesized)
tttaactcaaagcgctgtttcaataaatataaacattttctgtgatatgaaagcattgtgtcatagtttaatgggcagtgttttttcttagtgatacatatggtgcatcttaacaattgg

SEQ ID NO: 765871 - DNA, 120 bp, Artificial Sequence
  ENSG00000224531_17 (sequence is synthesized)
tagtgtcttaggttaaattaaaaatggtagcttgtaaatttatttttctttttaagatagcagttatttattggggaatttgattctgactcttacaatgttaaacttgtaatcctgtgt

SEQ ID NO: 765872 - DNA, 120 bp, Artificial Sequence
  ENSG00000224531_18 (sequence is synthesized)
gaaacacatgtttttgggggggagggggtaaccaagatttcagggtagtaacttaggaatctaagaactatcttctactttaggaagagtgggattagttactccctttgtataggagga

SEQ ID NO: 765873 - DNA, 120 bp, Artificial Sequence
  ENSG00000224531_19 (sequence is synthesized)
ctttatgctcaaggaatgtgttgtggagaaaaacacttcttcacaaacaattcagtgacaagacctcaaaggtaatgcgtattgaggaaaacagtagtgggtgaaaattcccgcttagct

SEQ ID NO: 765874 - DNA, 120 bp, Artificial Sequence
  ENSG00000224531_20 (sequence is synthesized)
acaaccttcctgtttagtgttacctgctttgtacaagaatgaagtgcaaagccaacttactttattaatccaagttctttttatgtttttcttaacctttattaaggactagtcatcaca

SEQ ID NO: 765875 - DNA, 120 bp, Artificial Sequence
  ENSG00000224531_21 (sequence is synthesized)
aaatatctatttaacctctattttatgatggtgtgttattatgtttgatacctcatacttcttgcttagagttttgtttaacagttcactggctctgtcccaatgtttgtgatgaacacc

SEQ ID NO: 765876 - DNA, 120 bp, Artificial Sequence
  ENSG00000224531_22 (sequence is synthesized)
tttttgctatattgtagctcttggagatactaaaagagaattcacagaacataactttagttttatgtgtttgctaggggaagatttcctagcagctgagagcaaggcacagtctctgtc

SEQ ID NO: 765877 - DNA, 120 bp, Artificial Sequence
  ENSG00000224531_23 (sequence is synthesized)
ttcatttctttattagatacaattttctatttttatgtgactctagggcataacaaaacagtgacagtttcaagcgttaattttaatgcttcctactagctaaatatcatcttaaaatga

SEQ ID NO: 765878 - DNA, 120 bp, Artificial Sequence
  ENSG00000224531_24 (sequence is synthesized)
ttatcagaaaaaaaaataatgcccccaaaaacttttgggggcattatttggtactgggaggatatttaaattagatttttcatagtctattgttttgaactatggattctgttttatggt

SEQ ID NO: 765879 - DNA, 120 bp, Artificial Sequence
  ENSG00000224531_25 (sequence is synthesized)
ggatacctaaggtttatataatagttgctggaaaacttaaagtagctggtgagcttcctgttatgtcactattaaagaatgatggctgatgtaactctgcccctgaaatctacaagggtc

SEQ ID NO: 765880 - DNA, 120 bp, Artificial Sequence
  ENSG00000224531_26 (sequence is synthesized)
atgcccaaattaatacaggttaacctttgtagaggtatatatgttggcattatttattgacatttatgcttcaagcatgtcttattttatgtaattttaagaaatactctatttaacttg

SEQ ID NO: 765881 - DNA, 120 bp, Artificial Sequence
  ENSG00000224531_27 (sequence is synthesized)
tgaaatatacctaaaagcatactagttagctcttagactctcacttagggagggtaaagaaacatcactgatgccaatatgaagatctataaacaaatcctttgtttagaacttttttct

SEQ ID NO: 765882 - DNA, 120 bp, Artificial Sequence
  ENSG00000224531_28 (sequence is synthesized)
cttcgtgcacctcacaacacacttaccatggtacatatttcttaatgccactaagaaaggcaagatagtgaacgcagaattatttatgtggtatagtgtttgttttcctgttttagtgct

SEQ ID NO: 765883 - DNA, 120 bp, Artificial Sequence
  ENSG00000224531_29 (sequence is synthesized)
tttgtagctaaaacttactggaactgcatcacaactacatttgcagtctcagtgggaggtggactagcctgtggttaattttagagcttaaaagtttataagcattaaaaacacatacat

SEQ ID NO: 765884 - DNA, 120 bp, Artificial Sequence
  ENSG00000224531_30 (sequence is synthesized)
gtattagaatcttgtctaacccctcacaaaggatgatggtgatcagcatgccatcttttgaagattaattctaaaattgaggactctggtaggttgttttatttccttcccaaccagcca

SEQ ID NO: 765885 - DNA, 120 bp, Artificial Sequence
  ENSG00000224531_31 (sequence is synthesized)
ttcatttccaattgttctgcctttgaaactttttgtgaaaattgcctgtaccaattgcattggttgcgttgctctgatttaaatgccaaaaacactaaatatttgtgtagtgctgttaaa

SEQ ID NO: 765886 - DNA, 120 bp, Artificial Sequence
  ENSG00000224531_32 (sequence is synthesized)
tgaggtttttgatatttccatcaaaatgaatataaaattcacttgatggattttgtagtgatgttttcacagttgaaacaaacatattgctgtgcggtggacagccacttcacagacatg

SEQ ID NO: 765887 - DNA, 120 bp, Artificial Sequence
  ENSG00000224531_33 (sequence is synthesized)
cagacccatttctttagagatattaggtttaaaacccattttaattttattttgctgaaggtttggaatatataaagtaatggattcacaaaatatgatatcttaaaacatgttgaaaga

SEQ ID NO: 765888 - DNA, 120 bp, Artificial Sequence
  ENSG00000224531_34 (sequence is synthesized)
tttgaaagtggtgcatttttacttttaagagcagcaatctttgaaattagtcaacaatgcagtcttttttaaaagtcagttttctcaagtagtatgttgtaacgtaagatgtaactgata

SEQ ID NO: 765889 - DNA, 120 bp, Artificial Sequence
  ENSG00000224531_35 (sequence is synthesized)
taactagattttgactggtaaacttaaagtgctttttatatttgaggttgactttaaaaagccattgagcagtcctcagaggttatggactctcaagcgactaatggaatagtgttctgt

SEQ ID NO: 765890 - DNA, 120 bp, Artificial Sequence
  ENSG00000224531_36 (sequence is synthesized)
tgtgaagtctagaactaaagcaccttgtattgtctgcttctaaagtgtcctatagtttttaacttaaagtgtaaagagtaacattttatcttatgtcaattaaagttacatttttcattt

SEQ ID NO: 765891 - DNA, 120 bp, Artificial Sequence
  ENSG00000224531_37 (sequence is synthesized)
gttggtgtacatgtgctacctgttttatggggaatgtttaacacgatcctccaagttggttctatgcataaccattcaccaaatactgctgctgtgattccttgaaggaaatattctgtg

SEQ ID NO: 765892 - DNA, 120 bp, Artificial Sequence
  ENSG00000224531_38 (sequence is synthesized)
gtctgctatgatgcattgccatcttgctgcttgacaataggtttataaataattagaattacgtgttttaatagtacctttgtatatataacaagatgtaaaattaaagatgaggaatgt

SEQ ID NO: 765893 - DNA, 120 bp, Artificial Sequence
  ENSG00000224531_39 (sequence is synthesized)
gtgtaaatgatcattcactgtttttgttttaaaactggtcagtactatgaagcttctgtggtttgtatgatgttttaactttcactttaaactgcatagaataaattaaattgaaaacaa

SEQ ID NO: 765894 - DNA, 120 bp, Artificial Sequence
  ENSG00000224578_0 (sequence is synthesized)
gtgcttggttgtataagtgtactctggtgtgtcctccatgactatgagaaagacatgcccagactagctcactgacaccacaaggaggatgagatcagctgcctcatgggcatgtgaact

SEQ ID NO: 765895 - DNA, 120 bp, Artificial Sequence
  ENSG00000224578_1 (sequence is synthesized)
aaataaaataatcaaatgagattatggatgcaagagtccagctactgcagttcgtgctttacaaaggaaagggataaccatcagcaccgctgtatacatatattcttggaggactccagt

SEQ ID NO: 765896 - DNA, 120 bp, Artificial Sequence
  ENSG00000224578_2 (sequence is synthesized)
taaacagtttaactacctatgacattcaagacaccactcaaacaacagaggggtattccccctcatgtcttctgacactggatctcaagcagatctgaacaatttggattgctttttctg

SEQ ID NO: 765897 - DNA, 120 bp, Artificial Sequence
  ENSG00000224578_3 (sequence is synthesized)
tataggcaaggtaaagtaaagtgtgagaggtcatcaatgactacagacctaccattctaggaagtctccctcaaatccattaagagtctcaatatctgagtttaattattatgataatta

SEQ ID NO: 765898 - DNA, 120 bp, Artificial Sequence
  ENSG00000224578_4 (sequence is synthesized)
tcagttcccatgtttttagcagttttctgacccaaggaagttgcaaatatatcagaataagatcttttcctttctgcccttggacgccgccgaagaagcatcgttaaagtctctcttcac

SEQ ID NO: 765899 - DNA, 79 bp, Artificial Sequence
  ENSG00000224578_5 (sequence is synthesized)
tggacgccgccgaagaagcatcgttaaagtctctcttcaccctgccgtcatgtctaagtcagagtctcctaaagagccc

SEQ ID NO: 765900 - DNA, 73 bp, Artificial Sequence
  ENSG00000224578_6 (sequence is synthesized)
gagcctgaggagccattttgagcaatggggaacgctcacggactgtgtggtaatgagagatccaaacacgaag

SEQ ID NO: 765901 - DNA, 63 bp, Artificial Sequence
  ENSG00000224578_7 (sequence is synthesized)
ttgaagtgattgaaatcatgactgacgtggataagattgtcattcagaaataccatactgtga

SEQ ID NO: 765902 - DNA, 120 bp, Artificial Sequence
  ENSG00000224578_8 (sequence is synthesized)
tttggtggtggtcgtggaggtggtttcggtgggaatgacaacttcggtcgtggaggaaacttcagtggtcgtggtggctttggtggcagccgtggtggtggtggatatggtggcagtggg

SEQ ID NO: 765903 - DNA, 120 bp, Artificial Sequence
  ENSG00000224578_9 (sequence is synthesized)
gaaattttgaaggcagaagctctggcccccatggcggtggaggccaatactttgcaaaaccacgaaaccaaggtggctatggcggttccagcagcagcagtagctatggcagtggcagaa

SEQ ID NO: 765904 - DNA, 120 bp, Artificial Sequence
  ENSG00000224586_0 (sequence is synthesized)
ttgggctaagtccctgccaagataccaaaagactgcagaggtgggcaaagacctcaggcccccagactagcaatctacaaacactagtcatgactacacagttaagggtcgtccatctgc

SEQ ID NO: 765905 - DNA, 120 bp, Artificial Sequence
  ENSG00000224586_1 (sequence is synthesized)
ttccccttctcctagcctgctttgtgcaaacaagtcccaagcaggagaagatgaagatggattgccacaaagacgagaaaggcaccatctatgactatgaggccatcgcacttaataaga

SEQ ID NO: 765906 - DNA, 120 bp, Artificial Sequence
  ENSG00000224586_2 (sequence is synthesized)
atgaatatgtttccttcaagcagtatgtgggcaagcacatcctcttcgtcaacgtggccacctactgtggtctgacagcgcaatatcctgaactaaatgcactccaggaggagctgaagc

SEQ ID NO: 765907 - DNA, 120 bp, Artificial Sequence
  ENSG00000224586_3 (sequence is synthesized)
cctatggtctagttgtgttgggctttccctgcaaccaatttggaaagcaagaaccaggagataacaaagagattcttcctgggctcaagtatgtccgtccagggggaggatttgtaccta

SEQ ID NO: 765908 - DNA, 120 bp, Artificial Sequence
  ENSG00000224586_4 (sequence is synthesized)
gtttccagctttttgagaaaggggatgtgaatggtgaaaaagaacagaaagtcttcagtttcttgaagcactcctgtcctcatccctctgagattttgggcacattcaaatctatatcct

SEQ ID NO: 765909 - DNA, 120 bp, Artificial Sequence
  ENSG00000224586_5 (sequence is synthesized)
gggaccctgtaaaggtccatgacatccgttggaactttgaaaagttcctggtggggcctgatggaatccctgtcatgcgctggtcccaccgggctacggtcagctcagtcaagacagaca

SEQ ID NO: 765910 - DNA, 120 bp, Artificial Sequence
  ENSG00000224586_6 (sequence is synthesized)
caaaaaaaaggaatacccatcttctcaccacactctcttcctgcatgggctccacctgagtaaatcaccgccacatactgccagaattcccactctccacaaactagatttatatttgga

SEQ ID NO: 765911 - DNA, 120 bp, Artificial Sequence
  ENSG00000224586_7 (sequence is synthesized)
aggctactgctcttttgcctctcaagagtatgtgggtgaagactgaaacaaatggaaacctaaaatccccagacctctgttacaggttgaatcattcatatccaccagagggaaatcatc

SEQ ID NO: 765912 - DNA, 120 bp, Artificial Sequence
  ENSG00000224586_8 (sequence is synthesized)
cttccacgacaatggttcagtcggccatcacatcctgaagaacattcctagacattctgactcttccatctctctctaccctggaggtgtagaaatagcaatggggtcacagtcacacaa

SEQ ID NO: 765913 - DNA, 120 bp, Artificial Sequence
  ENSG00000224586_9 (sequence is synthesized)
tttaggttccacttcataacattttttgtctcctaggacaaacgtgtatcatcagtttccaactgttttggctcagttttcatccatgacacctccccctaccagccattctcctgtggg

SEQ ID NO: 765914 - DNA, 120 bp, Artificial Sequence
  ENSG00000224586_10 (sequence is synthesized)
agcaagaacattgcttcaaaagaagagagggcatctccatgcttgtgggacccaaaacctatctctggccctacaaaagttttcctaattgtctgatctttagtgcattcaggttatggc

SEQ ID NO: 765915 - DNA, 120 bp, Artificial Sequence
  ENSG00000224586_11 (sequence is synthesized)
acctggagaggaatgccctttatcttttgaaggatgggatttcccatctcaaccctggattcctcaccttcagaacgagccctgccactgtctccaataaaatgttttctgcagcatcga

SEQ ID NO: 765916 - DNA, 120 bp, Artificial Sequence
  ENSG00000224586_12 (sequence is synthesized)
tcttcattttactcatggggaaactgaaggccagggatgggaattgcccaggttcacaaaggaatttaacaatggagctggcttctgattcccagggcagtgttctttctactctacctg

SEQ ID NO: 765917 - DNA, 120 bp, Artificial Sequence
  ENSG00000224586_13 (sequence is synthesized)
ctgatgagtggagtaagaggtcagaagacctggggaaagataagcaactaagatatcctaaaaatagttcagcaatttaaaaccctcccttctcagagagtccagacaggaggccttcaa

SEQ ID NO: 765918 - DNA, 120 bp, Artificial Sequence
  ENSG00000224586_14 (sequence is synthesized)
tccagagccaaggagtagcctgttttttacagaagcatgtaagattacacagatgccaggaattattgttaccagtattatcacttaaaaaaaatcttccagatggattgccacaaagac

SEQ ID NO: 765919 - DNA, 120 bp, Artificial Sequence
  ENSG00000224586_15 (sequence is synthesized)
acagcgcaatatcctgatttccaggggaatcaatatatacttgagaactaggagcctctcagaagattccagaagtcttcttgataaatacaggacagaagacccatgtttttgagactt

SEQ ID NO: 765920 - DNA, 120 bp, Artificial Sequence
  ENSG00000224650_0 (sequence is synthesized)
aatttctcaaatcccattgttgtcacccatcttcctcaggacactttcatctgccctgggtcctgctctttcttcaggtgtctcaccccagagcttgatatatagtaggagacatgcaaa

SEQ ID NO: 765921 - DNA, 120 bp, Artificial Sequence
  ENSG00000224650_1 (sequence is synthesized)
tagggccctcactctgctgaagaaaaccagccctgcagctctgggagaggagccccagccctgggattcccagctgtttctgcttgctgatcaggactgcacacagagaactcaccatgg

SEQ ID NO: 765922 - DNA, 120 bp, Artificial Sequence
  ENSG00000224650_2 (sequence is synthesized)
gcagcctctggattcaccttcagtagctactggatgcactgggtccgccaagctccagggaaggggctggtgtgggtctcacgtattaatagtgatgggagtagcacaagctacgcggac

SEQ ID NO: 765923 - DNA, 120 bp, Artificial Sequence
  ENSG00000224650_3 (sequence is synthesized)
agctacgcggactccgtgaagggccgattcaccatctccagagacaacgccaagaacacgctgtatctgcaaatgaacagtctgagagccgaggacacggctgtgtattactgtgcaaga

SEQ ID NO: 765924 - DNA, 84 bp, Artificial Sequence; identical to SEQ ID NO: 656958
  ENSG00000224712_0 (sequence is synthesized)

SEQ ID NO: 765925 - DNA, 79 bp, Artificial Sequence
  ENSG00000224712_1 (sequence is synthesized)
aggaggtccaaccgccgtagacaggaaggaattaaaattgtcctggaagacatctttactttatggagacaggtggaaa

SEQ ID NO: 765926 - DNA, 120 bp, Artificial Sequence
  ENSG00000224712_2 (sequence is synthesized)
ttaaaattgtcctggaagacatctttactttatggagacaggtggaaaccaaagttcgagctaaaatctgtaagatgaaggtgacaacaaaagtcaaccgtcatgacaaaatcaatggaa

SEQ ID NO: 765927 - DNA, 89 bp, Artificial Sequence
  ENSG00000224712_3 (sequence is synthesized)
ggaaatgtttcaacgtgcgcaagcgttgcggcggcgggcagaggactactacagatgcaaaatcaccccttctgcaagaaagcctcttt

SEQ ID NO: 765928 - DNA, 71 bp, Artificial Sequence
  ENSG00000224712_4 (sequence is synthesized)
ccccttccaccctcagctccaccctcagtggatgataatctcaagacacctcccaagactaaggaagaata

SEQ ID NO: 765929 - DNA, 120 bp, Artificial Sequence
  ENSG00000224877_0 (sequence is synthesized)
gacggacctaagatggcggcctccagggggctgggaatagccgctcatgtcggctaacggagcggtgtggggccgcgtgcgaagccgcctccgcgccttccccgagcggctggccgcctg

SEQ ID NO: 765930 - DNA, 120 bp, Artificial Sequence
  ENSG00000224877_1 (sequence is synthesized)
cggggccgaggccgcggcgtacggcaggtgcgtgcaggcctccacggccccgggcggccgcctgagtaaggacttctgcgcgcgggagttcgaggccctgcggagctgcttcgccgctgc

SEQ ID NO: 765931 - DNA, 120 bp, Artificial Sequence
  ENSG00000224877_2 (sequence is synthesized)
tgatggcccctggtggcacatatcgaatgcctagggcagaaaggaagtgggaatggcgaagatgtgacattcctcggtgttagatcctgttttttcttaacaagttgaggcgtgggtaga

SEQ ID NO: 765932 - DNA, 120 bp, Artificial Sequence
  ENSG00000224877_3 (sequence is synthesized)
gcaggaattggttttccagcattgtgtccgtaaacctgagttagaataagatgtaacggaagccacgataaagactcggtcaaatcctgcagcctggggcttactgtgtgcagactgcaa

SEQ ID NO: 765933 - DNA, 120 bp, Artificial Sequence
  ENSG00000224877_4 (sequence is synthesized)
gcggccgcctgagtaaggacttctgcgcgcgggagttcgaggccctgcggagctgcttcgccgctgcggtaggccaagaagacgctggagggaggctgttaggagggactctgagcttca

SEQ ID NO: 765934 - DNA, 120 bp, Artificial Sequence
  ENSG00000224877_5 (sequence is synthesized)
atgtgtgcaaaaaagcgccttgtaaaacgcgtaagctttcgtgttagcactgccgccggggggtgtcatgccaggattgacccaacacaggactcccggaaagtgcccagcaccttccgg

SEQ ID NO: 765935 - DNA, 120 bp, Artificial Sequence
  ENSG00000224877_6 (sequence is synthesized)
gtcttcacctccctggcacttgcagcccctgtgcacctgcagtggtggattccttcagcacgtgtcctgcggggaacccccagccaccctcacaactggcacgatagggcttcttgcccg

SEQ ID NO: 765936 - DNA, 120 bp, Artificial Sequence
  ENSG00000224877_7 (sequence is synthesized)
agctgttaatccggagatttggaccagagaaagggtatttgaacaagagttccacggccttcatccctacccggccccagcagccttggatccaggggtggacaactcatcagaagttgc

SEQ ID NO: 765937 - DNA, 120 bp, Artificial Sequence
  ENSG00000224877_8 (sequence is synthesized)
ctgggtgtggtggcgcgtgcctgtaatcctaccgctttgggaggctgaggccaagaagacgctggagggaggctgttaggagggactctgagcttcacacctgtctgctgccatgggtgc

SEQ ID NO: 765938 - DNA, 120 bp, Artificial Sequence
  ENSG00000224877_9 (sequence is synthesized)
gacaccggaagaggacggacctaagatggcggcctccagggggctgggaatagccgctcatgtcggctaacggagcggtgtggggccgcgtgcgaagccgcctccacggccccgggcggc

SEQ ID NO: 765939 - DNA, 120 bp, Artificial Sequence
  ENSG00000224877_10 (sequence is synthesized)
cgcctgccgcgtgctttagacgccggctgacaaaatcaccgagccatcgacgagcccgcgaaacctcggccgtcctgggcttgtccctgcatgtttgtaaagcgggactggcaccaacct

SEQ ID NO: 765940 - DNA, 120 bp, Artificial Sequence
  ENSG00000224940_0 (sequence is synthesized)
cgcggagtgcggagtgcggagcgcggggcctggccgcccgcctggaccttcctcctcaaaagctgctgaacaactgagtccctgcccaccaaggccacccgaagccaggtggggccatgg

SEQ ID NO: 765941 - DNA, 120 bp, Artificial Sequence
  ENSG00000224940_1 (sequence is synthesized)
ccaggcatggctgtctagggctgggactgttctgctgcgtcctgtttgctgctactgtgggcccccagcccaccccctccatcccaggtgcccctgccaccactttgacccccgtacctc

SEQ ID NO: 765942 - DNA, 120 bp, Artificial Sequence
  ENSG00000224940_2 (sequence is synthesized)
aaagtgaggcctctatgctgtctctcaacctgggacttaacttcaaattccatcttcggggacctgctgctgtctgggggagcccagtcacagagacccagccactctctcttgggccag

SEQ ID NO: 765943 - DNA, 120 bp, Artificial Sequence
  ENSG00000224940_3 (sequence is synthesized)
gccaggagccaggggaagaggtggccagtgggctgaggactgaccccctttgggaattgctggtgggctcctcagggaactctctcactgagtggggctccaccgaaggtggctcaaagc

SEQ ID NO: 765944 - DNA, 120 bp, Artificial Sequence
  ENSG00000224940_4 (sequence is synthesized)
cccgggcctcctccctgcttccggagtccacatcccggcgctctgggcccagcgatgggcccactgccccctatcagcccaggaggagcactgtgacctgggacactgctctgatggtga

SEQ ID NO: 765945 - DNA, 120 bp, Artificial Sequence
  ENSG00000224940_5 (sequence is synthesized)
cagcacttccatccagtgctcccaggccccaccagagcgagctggagctgaagtttgacatggcactgagagcaggtgcagcccccacgcttgggcatcgaacgctgcccctgctgccca

SEQ ID NO: 765946 - DNA, 120 bp, Artificial Sequence
  ENSG00000224940_6 (sequence is synthesized)
gcctgcgggccagcctggcagagattgctgggcgcctgggaccctttggattctttggcactactctgtccccactccggaacttctccggcctgagccccccaggtgaaactacatcca

SEQ ID NO: 765947 - DNA, 120 bp, Artificial Sequence
  ENSG00000224940_7 (sequence is synthesized)
caagctctgcctctggagtttcgggttctctggggttccttggtaccactctgtccctgcccccatactccctggagaggaagctctccagcccaagtcctctggacccagctgcttccc

SEQ ID NO: 765948 - DNA, 120 bp, Artificial Sequence
  ENSG00000224940_8 (sequence is synthesized)
taagttttgcctcgattgcaacaacatcattagaccccacagtccccatctctggcccagatgacctctctcctcccgccagcctcgggaacccttcggggcagccagagtgtgggccag

SEQ ID NO: 765949 - DNA, 120 bp, Artificial Sequence
  ENSG00000224940_9 (sequence is synthesized)
aggggcagcctcccgaggcgccgaggcccctctttttcctgaccctggaggccgactgggcagaggccagggctcgctgggggctggcctgggaggcccacgtgtacgggcgattacacc

SEQ ID NO: 765950 - DNA, 120 bp, Artificial Sequence
  ENSG00000224940_10 (sequence is synthesized)
gtggacttccgcccgccctccccaatcaacctgcgacgcagcatcgaggaggccctctgcagcgaggccctgcttgcgcctggcctcttccagggccctgccttcgaggacgctctgcct

SEQ ID NO: 765951 - DNA, 120 bp, Artificial Sequence
  ENSG00000224940_11 (sequence is synthesized)
gggctcggactctaccgcaccgcctcgctggggaccgggggcagggccagtgagagatcaggggaggcctctggccccgctgcgcccccggagctcccctcccctggggcttggcccgca

SEQ ID NO: 765952 - DNA, 120 bp, Artificial Sequence
  ENSG00000224940_12 (sequence is synthesized)
ggcagcagcgtctcatctggctcgttctgcggactctcgcgggacagctcgtccatgctgctgtgttccagccccgacaggcccccgcgctgccctctggtctgcgtcctcagtcccccg

SEQ ID NO: 765953 - DNA, 120 bp, Artificial Sequence
  ENSG00000224940_13 (sequence is synthesized)
cggccctcaggaagcagccccagcctcccggcctcaggatcctaccaggccctgtccccaccctctcgcgactccccagagcctgcttctgagctgcaggccgaggaggccttgctgcag

SEQ ID NO: 765954 - DNA, 120 bp, Artificial Sequence
  ENSG00000224940_14 (sequence is synthesized)
gagcagttcctggacgcctgccgacagatcgacgagctgagcgtgggcagcgacaccatagacctgtgaagaggtggccaccttgctaccctgcgatatgcccctttctggcgcctgccc

SEQ ID NO: 765955 - DNA, 120 bp, Artificial Sequence
  ENSG00000224940_15 (sequence is synthesized)
tgcccgagacctgcacactgtaatccttccccaatcctccctggctcagatacctctccagattccttccccatccaggggtccctgggtgggtgggtcagcagccaggctctatcgatt

SEQ ID NO: 765956 - DNA, 120 bp, Artificial Sequence
  ENSG00000224940_16 (sequence is synthesized)
gggaatcagtgccaccttctctggagccctgggtgctgatgccctcagctgcaaatctaggttggcaggggtcccattttccttggcattcaccagcaataaagctccaaggtgctccac

SEQ ID NO: 765957 - DNA, 120 bp, Artificial Sequence
  ENSG00000224940_17 (sequence is synthesized)
tcctgaccaccactccccactctggtgctgagtgagaggggctgtcctcagaggaccctgggacctgcctcaggcccccctacccacctctgccatgcctaggaatcccacccctgtgtg

SEQ ID NO: 765958 - DNA, 120 bp, Artificial Sequence
  ENSG00000224940_18 (sequence is synthesized)
aatgggactccctttcctccatgtgacacccacaggggtccatgacccatctaggagactttatagcagttgggtgggaggggaatgctcttaatttatcaataaaatattttcagagga

SEQ ID NO: 765959 - DNA, 120 bp, Artificial Sequence
  ENSG00000224940_19 (sequence is synthesized)
gcctgagagaagcggtgagataccacgaagcgttgcccagctgggcgccagggccgccacgaccgccccttttcggaggctcggcgaggagacctgcctgcgggagagaccccggggagc

SEQ ID NO: 765960 - DNA, 120 bp, Artificial Sequence
  ENSG00000224940_20 (sequence is synthesized)
tggttgccttgctggcgctgctggctctggccctcttgccctggcggtgcccgcccggcgccccctgcctggcgctgctggacctgctgctgctgtcggccgggaccacgcgggccttcc

SEQ ID NO: 765961 - DNA, 120 bp, Artificial Sequence
  ENSG00000224940_21 (sequence is synthesized)
cgctcttctacgacgcctatgggcacagggatcgactgcccgcgctcgcctggctgctgctgcaggaccttccgctgccctgcttggctgccggcctggggctggcctgcctgctgctgg

SEQ ID NO: 765962 - DNA, 120 bp, Artificial Sequence
  ENSG00000224940_22 (sequence is synthesized)
ccgccgccctcgggagcgccgcgcatcgcccgctgcggcccctgcggctcgcctcgcgcgggctgcacgcctttctcgccgctttcctttccgggctgctgctggcgctctcctgctggg

SEQ ID NO: 765963 - DNA, 80 bp, Artificial Sequence
  ENSG00000224940_23 (sequence is synthesized)
ggagggtcgggcttcaagggcgccacacccctgccgcaggggcgcagccccttcgcccctcgggagtcctggcggcgcgc

SEQ ID NO: 765964 - DNA, 120 bp, Artificial Sequence
  ENSG00000224940_24 (sequence is synthesized)
ggcgcgcacggccccggtggcgggcaccttcgggctgctgagcggagccctgcagggctatgaggtgctgcacgccctgggctacggcggccaatccggcctggaagggccctggccctg

SEQ ID NO: 765965 - DNA, 120 bp, Artificial Sequence
  ENSG00000224940_25 (sequence is synthesized)
gtgggccttccagctaggcctgcgcctgggcgaggtgggcgtcgcgctcccgttggcgctgctgggcctctacccggcgctctgcagtcctcgcgtgccgccgcgctgctgggccaagct

SEQ ID NO: 765966 - DNA, 120 bp, Artificial Sequence
  ENSG00000224940_26 (sequence is synthesized)
cttccgcttgtccccgggccacgcggctccgctgctgccgggaggctgggtcactgggcccccagacaaggagcccctggggagcgccatcgctcgcggggacgcggagctgctgcagct

SEQ ID NO: 765967 - DNA, 120 bp, Artificial Sequence
  ENSG00000224940_27 (sequence is synthesized)
gtgcgcgctggcagggccaggcccagacctcctactccagggcggaggttgccggggcttcgaaggcgcggcggccaacccggccccgtccccggcttcctctccctgcagcgattacac

SEQ ID NO: 765968 - DNA, 120 bp, Artificial Sequence
  ENSG00000224940_28 (sequence is synthesized)
ggtgagagcgctgcgggccggggctgggccgggggcggctcaggggcagcggggcggcgaggctgcggtctctggactaggcgaggggccgccgggggctggaggtccggatcttcagtc

SEQ ID NO: 765969 - DNA, 120 bp, Artificial Sequence
  ENSG00000224960_0 (sequence is synthesized)
agtgccgtggagaacagacctgacggggcgaggccagaggacgctatggcaggcctgaggtacagtgtaaaagtctatgtcctgaacgaagacgaggaatggaacaatctaggcaccggt

SEQ ID NO: 765970 - DNA, 120 bp, Artificial Sequence
  ENSG00000224960_1 (sequence is synthesized)
caggtctcatccacctatgacgagcagttccagggcatgtcgctgcttgttcggtcagattcagatgggtcggtcatcctgcggtcacagatacctccagacaggccctatgggaaatac

SEQ ID NO: 765971 - DNA, 120 bp, Artificial Sequence
  ENSG00000224960_2 (sequence is synthesized)
caagagacactaattgtttggtatgaagctgagaaccagggtttggtgctaaaattccaggacccagccggctgccaggatatttggaaagaaatttgccaagctcaaggtaaggatccg

SEQ ID NO: 765972 - DNA, 120 bp, Artificial Sequence
  ENSG00000224960_3 (sequence is synthesized)
tctatccaaaccacagtgaacatttcagatgaaccagaggaagactttaatgaaatgtcagtaattagtaatatggttgtgctgcctgactgtgaactcaatacacttgatcaaattgct

SEQ ID NO: 765973 - DNA, 120 bp, Artificial Sequence
  ENSG00000224960_4 (sequence is synthesized)
gacatagttacctcagttttctcgtcacctgttacggatagggaaagactggctgagatcttgaaaaatgaggcttatattccaaaactactgcaactgttccacacttgtgaaaatcta

SEQ ID NO: 765974 - DNA, 120 bp, Artificial Sequence
  ENSG00000224960_5 (sequence is synthesized)
gagaatactgaaggtttacaccatttgtatgaaattattaagggaattttgttcctcaacgaggcatgtctgtttgagataatgttttctgacgagtgtatcatggatgtggtgggatgc

SEQ ID NO: 765975 - DNA, 120 bp, Artificial Sequence
  ENSG00000224960_6 (sequence is synthesized)
cttgagtatgaccctgctttggatcagccaaaaaggcatagggacttcttgaccaacgatgcgaagttcaaggaagttataccaataactaactctgaacttaggcaaaaaatacatcag

SEQ ID NO: 765976 - DNA, 120 bp, Artificial Sequence
  ENSG00000224960_7 (sequence is synthesized)
acatacagattacagtacatttatgacattcttttgcctgtgccttccatatttgaagataattttctttctacacttacaacttttattttctccaacaaggctgagatagtaagcatg

SEQ ID NO: 765977 - DNA, 120 bp, Artificial Sequence
  ENSG00000224960_8 (sequence is synthesized)
ctgcagaaagatcacaaatttttgtatgaagtttttgcacagttaaaggatgagactacacatgatgatagacggtgtgaattgctattttttttcaaggagttatgttcattttctcag

SEQ ID NO: 765978 - DNA, 120 bp, Artificial Sequence
  ENSG00000224960_9 (sequence is synthesized)
gcattacagcctcaaagcaaggatgcactatttgaaacgttgatacagttgggagttcttcctgctcttaaaatcgtaatgatcagggatgatttgcaagtaaggtcagctgctgcagtt

SEQ ID NO: 765979 - DNA, 120 bp, Artificial Sequence
  ENSG00000224960_10 (sequence is synthesized)
atatgtgcttatctagtggagtacagtccatccaggatccgagaatttataatttcagaagctcacgtgtgcaaagatagtgaccttttcattaatgtaataattaaacaaatgatctgt

SEQ ID NO: 765980 - DNA, 120 bp, Artificial Sequence
  ENSG00000224960_11 (sequence is synthesized)
gatactgatcctgagttaggaggtgctgttcatttgatggtagttctgcatactctacttgatccacgcaacatgctgacaacacctgagaaaagtgaaagaagtgaatttctacatttc

SEQ ID NO: 765981 - DNA, 120 bp, Artificial Sequence
  ENSG00000224960_12 (sequence is synthesized)
ttctacaaacattgcatgcataaatttacagcaccacttttggctgccacctcagaacacaactgtgaggaggatgatatagctggatatgacaaaagcaaaaattgccccaatgataat

SEQ ID NO: 765982 - DNA, 120 bp, Artificial Sequence
  ENSG00000224960_13 (sequence is synthesized)
cttgctttgatattagagctacttacattttgtatacaacatcatacattctacataagaagctatatcttgaacaaagacttgctaagaaaggccttgatattgatgaattcaaagcat

SEQ ID NO: 765983 - DNA, 120 bp, Artificial Sequence
  ENSG00000224960_14 (sequence is synthesized)
actcacctgattttgtgtgttcttcgctttatgagaaggatgatttgccttaatgatgaagcttataataattacatcatcaagggaaatctttttgagccagttgtaaatgctcttcta

SEQ ID NO: 765984 - DNA, 120 bp, Artificial Sequence
  ENSG00000224960_15 (sequence is synthesized)
gataatggaactcggtacaatatgttgaattcagctattcttgagctatttgaatacataagagtggaaaatatcaagcctcttgtttcacatatagttgaaaagttttataacacactt

SEQ ID NO: 765985 - DNA, 120 bp, Artificial Sequence
  ENSG00000224960_16 (sequence is synthesized)
gaatcgattgaatatgttcagacattcaaaggattgaagattaaatatgaaaaagagagagacagacaaagtcaaatacaaaagaatttacattctgtactgcaaaatatagtagttttc

SEQ ID NO: 765986 - DNA, 120 bp, Artificial Sequence
  ENSG00000224960_17 (sequence is synthesized)
agaggtaccatagaagaaattgggctggaagaagaaatatgttttatggaagatgcaggagaagtagttatgccaccactggaagatgacgatgaatttatggagaccaaaagaacccaa

SEQ ID NO: 765987 - DNA, 120 bp, Artificial Sequence
  ENSG00000224960_18 (sequence is synthesized)
gaaggagaagcagttatgccaccactggaagatgacgataaatttacggagaccaaaagaacccaccaagaaggagaagcagttatgccaccactggaagatgacgatgaatttatggag

SEQ ID NO: 765988 - DNA, 120 bp, Artificial Sequence
  ENSG00000224960_19 (sequence is synthesized)
actaaaagaaaccaagaacatgaaggcaaggtagactctcccaaaagaacatcttctggtgacttcaaattctcttcatcttattctgcttgtgctgctattggaacaggtagcccaagt

SEQ ID NO: 765989 - DNA, 120 bp, Artificial Sequence
  ENSG00000224960_20 (sequence is synthesized)
ggtagcagtgtggttcgtttagtggatcatccagatgatgaagaagaaaaagaggaagatgaagaagaaaaagaggaagataaagaagatgaaacatcccccaagaagaaacctcatctt

SEQ ID NO: 765990 - DNA, 120 bp, Artificial Sequence
  ENSG00000224960_21 (sequence is synthesized)
agctcctaaaatctatatggggcaccctcaaaatgtggctcaacaaaaattctataaacgtccataagctaaaaagactgattccacaagctttttcatgtgaacttataatgataaatc

SEQ ID NO: 765991 - DNA, 120 bp, Artificial Sequence
  ENSG00000224960_22 (sequence is synthesized)
acagatataacgagttaagagggtttaattctgtaaaaacaaaatttctcataatcttaaaaaaaaacagtaaccagaacctgggtgataaactttttagcaagaaagtcttaatttgtg

SEQ ID NO: 765992 - DNA, 120 bp, Artificial Sequence
  ENSG00000224960_23 (sequence is synthesized)
tcacgatttgggggaggaaaccatctttgggaaggaaagtcttagtttggaatggggaagaaccaggtcgataatgttaatgtagttttgttctagaggtatatattagaaataataaca

SEQ ID NO: 765993 - DNA, 120 bp, Artificial Sequence
  ENSG00000224960_24 (sequence is synthesized)
gttcagttaaaagcctacaaattacttgtataatggtactagccatggtattctttccttcagttacctttttaacacaaaagtttatgtttatatgaaaaacaaagttaactataaaaa

SEQ ID NO: 765994 - DNA, 120 bp, Artificial Sequence
  ENSG00000224960_25 (sequence is synthesized)
atgttagtctcttcagacatttctataaagatataacaaaatttaagcttataagtaattggaaggaagtagctttcagagtgtactttcattcattaaaaaagcaagctggatttacaa

SEQ ID NO: 765995 - DNA, 120 bp, Artificial Sequence
  ENSG00000224982_0 (sequence is synthesized)
acaagccggcggccagagccccagaccacacagaccgtgcgctcctccgccctcccggcgccgccggcctcgcccatgtctcagtacgcccctagcccggacttcaagagggctttggac

SEQ ID NO: 765996 - DNA, 120 bp, Artificial Sequence
  ENSG00000224982_1 (sequence is synthesized)
agcagtcccgaggccaacactgaagatgacaagaccgaggaggacgtgcccatgcccaagaactacctgtggctcaccatcgtctcgtgtttttgccctgcgtaccccatcaacatcgtg

SEQ ID NO: 765997 - DNA, 120 bp, Artificial Sequence
  ENSG00000224982_2 (sequence is synthesized)
gctttggtcttttccatcatgtctctgaacagctacaacgatggagactacgaaggagccaggcggcttgggcggaatgctaagtgggtagccatcgcctccatcatcattggccttctc

SEQ ID NO: 765998 - DNA, 120 bp, Artificial Sequence
  ENSG00000224982_3 (sequence is synthesized)
atcatcggcatttcttgtgcagttcacttcacaaggaatgcctgaggaaccagcggtcagtgggctgtgagcgtggaggatggacctcatccacacacaccccaaaggagtttctaagga

SEQ ID NO: 765999 - DNA, 120 bp, Artificial Sequence
  ENSG00000224982_4 (sequence is synthesized)
atggatccttgacttcagactgtgagatcttttcctccaggactctccagaggcaggtccctggcaaatgaacaagaaaaaaaaaaaaaaaaagtccaaaatttaggcaatccaagctgc

SEQ ID NO: 766000 - DNA, 120 bp, Artificial Sequence
  ENSG00000224982_5 (sequence is synthesized)
acagccggatcagccaaagtcattgatttgtaaaaatgaaaagaaaacagaaaaaagaaaaatgaagtctcactgtctcagtttagcgaatcccgttgtgtccactcctgtcctccagag

SEQ ID NO: 766001 - DNA, 120 bp, Artificial Sequence
  ENSG00000224982_6 (sequence is synthesized)
gcgagcctcaggaaatcacataacttttcactgaggggatccagggggtctccatatagggggagatggaggtttctaggaagagcagcaggtgctggtatttacaatgttgagcacaaa

SEQ ID NO: 766002 - DNA, 120 bp, Artificial Sequence
  ENSG00000224982_7 (sequence is synthesized)
catttgcagcatgtttaaaattgtctagtagagttcaagttgtggatttgcttttccttttattcttataaccttcagtaactcctcctctgggagtcagcactcccatgcccagagttc

SEQ ID NO: 766003 - DNA, 120 bp, Artificial Sequence
  ENSG00000224982_8 (sequence is synthesized)
acccatctggtcatcaaacactcaaagaaggggcttttctggccttttgtcttgatgcttatatttccaaataggccccctcccttgcttgcatccacgttggtcaacttgaccaaaacc

SEQ ID NO: 766004 - DNA, 120 bp, Artificial Sequence
  ENSG00000224982_9 (sequence is synthesized)
tcactcttcactcaaacaggctctgagaatggacttagtggccaattctaggtacatgagcacttcctgtatcccagttttgggaataaactggctgtatttatagaatgtgcttttttt

SEQ ID NO: 766005 - DNA, 120 bp, Artificial Sequence
  ENSG00000224982_10 (sequence is synthesized)
ttttcaatttctcactctctctcctatctctagcaagtctcaggcaagatctttgattttcctggatgccacctggaaatgccacccattgtgtttcttttctgtcaaatgtaaaccctt

SEQ ID NO: 766006 - DNA, 120 bp, Artificial Sequence
  ENSG00000224982_11 (sequence is synthesized)
tggtttaatgatgccattattctgcctgccagaacgcagtaacccagtgtctcacagagcacaaggggtgtgccactggtggtacacaagataatttttaagtagtttctaggaacaaca

SEQ ID NO: 766007 - DNA, 120 bp, Artificial Sequence
  ENSG00000224982_12 (sequence is synthesized)
ttaagtaataccaaatcacaaagaatgtttccccttttctattcttttttcatcctgattacagcaaggaaaaagtctctgtttagtgctagcaggtcctttacacctttcagacactat

SEQ ID NO: 766008 - DNA, 120 bp, Artificial Sequence
  ENSG00000224982_13 (sequence is synthesized)
ggctcttttccctttttagcaaagaaagagcaggcctcagagtcttctgtctagatagaatttaatgatattgttttgtgtcatggtatttattttatttattaccttccatttacagct

SEQ ID NO: 766009 - DNA, 120 bp, Artificial Sequence
  ENSG00000224982_14 (sequence is synthesized)
tcccacagtgggggatgtgacatattgtttctgttcaaataaattaagaaaaacaagagaactcaagaaaatatcaagtaattaacacaccagataagtatatgtggcaaaagtcacttc

SEQ ID NO: 766010 - DNA, 120 bp, Artificial Sequence
  ENSG00000224982_15 (sequence is synthesized)
attaacacaccagataagtatatgtggcaaaagtcacttcaaagaattaatgtcagaaagatggtgataatgaagcaaaagaaaggcagattatgctggccgggcgtggtggctcacgcc

SEQ ID NO: 766011 - DNA, 84 bp, Artificial Sequence
  ENSG00000224982_16 (sequence is synthesized)
tcccagctaaaaggcggaggttgccgtgagctgagactgtgccactacactccagcccggggtgacagagcaagactccatctc

SEQ ID NO: 766012 - DNA, 120 bp, Artificial Sequence
  ENSG00000224982_17 (sequence is synthesized)
aaagaaaaaagaaaggcagattattctaattgaatgaataagaggctgagagtcaatacctagttccaacgcccttttgtttttgcagggtttttattggccactaactagctatgcaag

SEQ ID NO: 766013 - DNA, 120 bp, Artificial Sequence
  ENSG00000224982_18 (sequence is synthesized)
ctgattttaggcaagtttcatagcctctctgtgcctaaaattccttcacctgcaaaatggggataagaatgcctgcctacttacctcacagtgctgttatgagaattaattgttgtaata

SEQ ID NO: 766014 - DNA, 120 bp, Artificial Sequence
  ENSG00000224982_19 (sequence is synthesized)
gttgtgactaaccattggcggggagaattctaagtactataccaatacaaatttcagcattttttcatatactgaaccctagcaaaaaaaaaaaaaattctgatgaacatcagattcaac

SEQ ID NO: 766015 - DNA, 120 bp, Artificial Sequence
  ENSG00000224982_20 (sequence is synthesized)
ctgtcattttacccggatgttgtgatgagccagcacttgtcccaggaggacgttgaatcagggacacgaaatctcagcacacagagattctagcatcattccaatagattggaccctgat

SEQ ID NO: 766016 - DNA, 120 bp, Artificial Sequence
  ENSG00000224982_21 (sequence is synthesized)
ttctgtttctgacatcctgttttttgtttgtgcgtgtttgggtccctggtcttttacccaaatcaaatgaaaagtgttgctcagaggcagaataaaaatggttttaagtaagcctgtgta

SEQ ID NO: 766017 - DNA, 120 bp, Artificial Sequence
  ENSG00000224982_22 (sequence is synthesized)
aatcttgcctgaggaaccagcggtcagtgggctgtgagcgtggaggatggacctcatccacacacaccccaaaggagtttctaaggaatggatccttgacttcagactgtgagatctttt

SEQ ID NO: 766018 - DNA, 120 bp, Artificial Sequence
  ENSG00000225110_0 (sequence is synthesized)
ctcatctacctggggcttctgggagaagcgggaagccctgtagtcttagcacagcgggctttggagacccctgcgctgcgcagcgcggccgcgtgactgaggcgagatcttccaccctcc

SEQ ID NO: 766019 - DNA, 120 bp, Artificial Sequence
  ENSG00000225110_1 (sequence is synthesized)
tgctccagggcctctaggtggcctccagagtgggctccacagcttgaaggcggcgtttttccgcgggtggtcgcagcgtccgcagagtcggagaaagctgcgtcagagactgcaacagtc

SEQ ID NO: 766020 - DNA, 120 bp, Artificial Sequence
  ENSG00000225110_2 (sequence is synthesized)
agcacacattcctgtctgatcaggctccctccctcaagtcctctgcgatagctctggcgatgcttcaggactggtgcaggaggatgggtgtgaacgcagagcgctctctgctcatcctgg

SEQ ID NO: 766021 - DNA, 120 bp, Artificial Sequence
  ENSG00000225110_3 (sequence is synthesized)
atatccctgacgactgcgaggaacatgagttccaggaggccgtgcgggctgccctgtcgcccctgggcaggtaccgagtgctcatcaaggtcttcagaaaggagctcggggccagggcag

SEQ ID NO: 766022 - DNA, 120 bp, Artificial Sequence
  ENSG00000225110_4 (sequence is synthesized)
ccttggtggaattcgctgagggtttaaaccaaagcttgattccccgccaaatagcaggcaaagggggaccctggaaagtgatctccctgccccaggcccttgatgctgagtttcaggata

SEQ ID NO: 766023 - DNA, 120 bp, Artificial Sequence
  ENSG00000225110_5 (sequence is synthesized)
tacccagtttccctgcacagccccaggggcaagcagtggccagaggtgcaggtgaagcaggagctgcaggtgaggcaggatctgtaggtgaggcaggaggtgtgaatgaggaaagatctg

SEQ ID NO: 766024 - DNA, 83 bp, Artificial Sequence
  ENSG00000225110_6 (sequence is synthesized)
tctgtaggtgaggcaggaggtgtgaatgaggaaagatctgcaggtgaagatgaggcaggaggtataggtgaggcaggaggtgt

SEQ ID NO: 766025 - DNA, 120 bp, Artificial Sequence
  ENSG00000225110_7 (sequence is synthesized)
aggcaggaggtgcaggtgaggcaggaggtgcaggtgaggaaggaggtacaggtgaggaaggaggtgcaggtgaggcaggaggcgcaggtgaggaaggaggtgaagatgaggcaggagctg

SEQ ID NO: 766026 - DNA, 120 bp, Artificial Sequence
  ENSG00000225110_8 (sequence is synthesized)
caggtgaggcagtaggtgcaggtgtggtggaggcctggacccagtcatggcgccagaccctgcggcctctggtgaaaactatggcctaccgggaactgagacccttttccgggagggagc

SEQ ID NO: 766027 - DNA, 120 bp, Artificial Sequence
  ENSG00000225110_9 (sequence is synthesized)
agccaggctgcgtggaagagtcctttgagagctggttggaggacgccaaggatatgctgcagctgtggtgccacgcgtcggaaagggagagaaggaggcggctgctggacagcttggatg

SEQ ID NO: 766028 - DNA, 120 bp, Artificial Sequence
  ENSG00000225110_10 (sequence is synthesized)
gcctggccctggatatcgtgagcggcctcctggaggaagatccagacttctctgcgcaggactgcctgacggcgctggggcaggtgtttaggagccgggatacatggatgacctcgcgga

SEQ ID NO: 766029 - DNA, 120 bp, Artificial Sequence
  ENSG00000225110_11 (sequence is synthesized)
tgaagttcctgacctgcacgcaggggccccaggaggggctgtttgccttcgtggtgcgcctggaaggcctgctgcagaaggccgtggagaagggggcggtccacccagccatggccaacc

SEQ ID NO: 766030 - DNA, 120 bp, Artificial Sequence
  ENSG00000225110_12 (sequence is synthesized)
acctgcgactgcggcaggtgctgtctcgggcccgccccagcgaggcactccaggataccctgaggaggatgcagctggagaggaggccacctgacttcctgaggctgctgcggctcatcc

SEQ ID NO: 766031 - DNA, 120 bp, Artificial Sequence
  ENSG00000225110_13 (sequence is synthesized)
gggcagcggccccagtggagagtgaagacccagctgctgcccaggcctccccggcccagggggacgccagcgaggctgatcccggagcagaagatgctgatgaggctgcttccaccacca

SEQ ID NO: 766032 - DNA, 120 bp, Artificial Sequence
  ENSG00000225110_14 (sequence is synthesized)
aagaggccgccagggttgcccctgccactggggaagatgaaaatgcccctgcaggccttgaaggcctaggtcagggaaggtcccccgacgcccctgggggcctcccagccaggatgggca

SEQ ID NO: 766033 - DNA, 120 bp, Artificial Sequence
  ENSG00000225110_15 (sequence is synthesized)
gtgcagtcgacatggccccaggaggtcccagctgggagccagagggccttgtccaggttggaggccaggaggctgaggagcctccccaggaggggctcaagcccatcttagaggagtcag

SEQ ID NO: 766034 - DNA, 120 bp, Artificial Sequence
  ENSG00000225110_16 (sequence is synthesized)
aaaacgaggatgaggatggggctggggaggcgggcaagcccaagtcccccccgggcaaataggctctgagggccctgagggctcctctcctctcaggcagcagcaccctggaggcagaca

SEQ ID NO: 766035 - DNA, 120 bp, Artificial Sequence
  ENSG00000225110_17 (sequence is synthesized)
gaggccaggccagggccggtccctcaccccatgttgggagctgtgcctcccacctcccctaatgggtcctggccaccaccaccagcccttcccagtgactcagatgaccacgtttgatac

SEQ ID NO: 766036 - DNA, 120 bp, Artificial Sequence
  ENSG00000225110_18 (sequence is synthesized)
caaatggggagctggcctggagggagctctgagcggccagcctgaagatgtctgccccccaccccttgtcctgtgttgggagagatgggggaaagaggccctctcaagggtgacagctgc

SEQ ID NO: 766037 - DNA, 120 bp, Artificial Sequence
  ENSG00000225110_19 (sequence is synthesized)
ctacatgtcccaagaggtggcccccacttgccatccctggggcagactgccccccgttccgggaagcccaccctcacctctgtaggccccatagtgacccacgcgtccgaacagcagacg

SEQ ID NO: 766038 - DNA, 120 bp, Artificial Sequence
  ENSG00000225110_20 (sequence is synthesized)
cccactcacccaccgctagccattgttcctacacaaagttgtatgctgtgcgcccatcggtgcggctgcctctgggcctggggcacatgctgtgagcttcctgctagcccaggctctgct

SEQ ID NO: 766039 - DNA, 120 bp, Artificial Sequence
  ENSG00000225110_21 (sequence is synthesized)
agctgctacctgtcccttgtcgtgagcaccacctctgctttcctggtgtagatctaggccaggggctgcttgttctcgtggagctgtgtgtgttcttctctgagcagctcctccccggag

SEQ ID NO: 766040 - DNA, 120 bp, Artificial Sequence
  ENSG00000225110_22 (sequence is synthesized)
gcccccagcacagtcctgggagatggtggaaggaggcgccagggcacgatggacgctcatcctgtgactgctatggtgagcatgaccacgatggtgcccgtgaccatgatggtgaccatg

SEQ ID NO: 766041 - DNA, 120 bp, Artificial Sequence
  ENSG00000225110_23 (sequence is synthesized)
actgtgtgaggaagaaccggacctgggacagagcagagctgccctgcctgaggctccccggggagctttgtgctttggtgttctattcctgttgttacttgtgactcagtttccttgact

SEQ ID NO: 766042 - DNA, 120 bp, Artificial Sequence
  ENSG00000225110_24 (sequence is synthesized)
tgggggggtgttccctgctgtgttttcagtgtcctgtgagggctatagggcagggccctgccccagcggatgggctcgggagggggctccctgaagccagtggacactgccagagtccac

SEQ ID NO: 766043 - DNA, 120 bp, Artificial Sequence
  ENSG00000225110_25 (sequence is synthesized)
catcctggcaagaggcggaccctggggccctcaggaaggagggagttggcagcgggggctgcagcaggagtaggagcagatgaggcgtcttgccaggaaccccaggaggagggggcccgg

SEQ ID NO: 766044 - DNA, 120 bp, Artificial Sequence
  ENSG00000225110_26 (sequence is synthesized)
gacctgtgtgggacctgtgtcctgtggtggcaatttgcagtttctctctgtgttgtgattcccttctcttcaatggtttcagtacatgtttctcttcaataaacttcattcagtgttcca

SEQ ID NO: 766045 - DNA, 120 bp, Artificial Sequence
  ENSG00000225180_0 (sequence is synthesized)
gaatcgctcccagcctgggaagaagcctcccacgccagggccccggacccaggagaggccatggaaagcctgaaccccagctggctgacaccccccacacccccaagggcccttagtctg

SEQ ID NO: 766046 - DNA, 120 bp, Artificial Sequence
  ENSG00000225180_1 (sequence is synthesized)
agaccaactctcctggacaccaggggcccacgcaggccctccgtgccccagttacctgtgccctggaggcagccacggagtcacgaccacgcgggggacgccagcccacaggcggaggcc

SEQ ID NO: 766047 - DNA, 120 bp, Artificial Sequence
  ENSG00000225180_2 (sequence is synthesized)
ggtttcgaggcggctggcagccgcccccccaccccatgccctttgggtggcacctgtgctggtggagtgggggtggctggctttgcacacaggcctgctcctgtaccgtgctgcgacagc

SEQ ID NO: 766048 - DNA, 120 bp, Artificial Sequence
  ENSG00000225180_3 (sequence is synthesized)
catgaaggaagaacctggctgagtctccacctgccgtggactgtaccaggtttggggaggccaggcactgctaagggtcagtctgcccagaccagtgtggacacaccaagtgcctgcgag

SEQ ID NO: 766049 - DNA, 120 bp, Artificial Sequence
  ENSG00000225180_4 (sequence is synthesized)
cccctgggagctgcccgtgccaggctggagtgccggggaggggcgaggacagctgcagccccgagatgtaaacaggcttgcaggtataaaagctggagcccctgggcctctccacacccc

SEQ ID NO: 766050 - DNA, 120 bp, Artificial Sequence
  ENSG00000225180_5 (sequence is synthesized)
tgcaccccacgaattgactccctatccacccaggaccaggatggaggaggacttctcctcccagatgaagaagatggccttggccatgggcacgtccctatcagacaaggacattgagct

SEQ ID NO: 766051 - DNA, 120 bp, Artificial Sequence
  ENSG00000225180_6 (sequence is synthesized)
gctgcccacagacatgagacaccacgggtccttcaactacctcaagttcttcaagcacatccgcaagctccacgcctcgggccagctggacgacgccatccacacggccttccagtccct

SEQ ID NO: 766052 - DNA, 120 bp, Artificial Sequence
  ENSG00000225180_7 (sequence is synthesized)
ggacaaggacaagagtggcttcattgagtggaacgagatcaagtacatcctgtccatcatccccagcagcgggcccaccaccccgctgacagacgaggaggccgaggccatgatccaggc

SEQ ID NO: 766053 - DNA, 120 bp, Artificial Sequence
  ENSG00000225180_8 (sequence is synthesized)
ggcagacacacacggggacgggaggatcaactacgaagaattttctgaattgatcaaaaaggagaaaattccaaagaagaagtagcaccatgactagccctggccagccaaggggctccc

SEQ ID NO: 766054 - DNA, 120 bp, Artificial Sequence
  ENSG00000225180_9 (sequence is synthesized)
atggggtaaccggggtgaccacgcacctgggcagaagccgttggggccggtaagaggcggcagccgtgagggtggacccagcttttgaaggaaaatggaagaaaagcagcattaagtgaa

SEQ ID NO: 766055 - DNA, 120 bp, Artificial Sequence
  ENSG00000225180_10 (sequence is synthesized)
ggaacgagatcaagtaatggctggcggccacggaggggtggggcccaggccacccagaccacgccgaatgcccacatggcggacccggccttcccccaccgggtccccgctggccttgca

SEQ ID NO: 766056 - DNA, 120 bp, Artificial Sequence
  ENSG00000225180_11 (sequence is synthesized)
gctggcagggctgggccagaaccagctagaagcccaggaggctcagaggcccaggctcccggcccgaagtgcccttgcctacaaggtggggggcgaacggctcgtgagtcactgggcact

SEQ ID NO: 766057 - DNA, 120 bp, Artificial Sequence
  ENSG00000225180_12 (sequence is synthesized)
gctgtggtcaggagacctcatcccttttctggggctgatgggtccaggacaccaggacctgcggcgggcggggacatgggggtgcaggacccggcagcccccatcccagggcggggtctt

SEQ ID NO: 766058 - DNA, 120 bp, Artificial Sequence
  ENSG00000225190_0 (sequence is synthesized)
atcgtcggctcggaggctgaggggctgccgcggccgggagcgcccctcgcctcgctcctcgctccgcttggtgtcatgtgattctctgagggagcagctgcgtgagtggagatgctttca

SEQ ID NO: 766059 - DNA, 120 bp, Artificial Sequence
  ENSG00000225190_1 (sequence is synthesized)
gtggtggagaatggactggacccccaggctgccatcccggtcatcaagaagaagctggtgggatccgtgaaggccttgcagaagcagtacgtgtccctggacacggtggtcactagtgaa

SEQ ID NO: 766060 - DNA, 120 bp, Artificial Sequence
  ENSG00000225190_2 (sequence is synthesized)
gacggagatgccaacaccatgtgcagcgccctggaggccgtatttatccatggcctgcacgccaagcacatccgagctgaggccggaggaaaaaggaagaaaagtgcccaccagaagcct

SEQ ID NO: 766061 - DNA, 120 bp, Artificial Sequence
  ENSG00000225190_3 (sequence is synthesized)
ctgccccagcctgtcttctggcccctcctgaaagctgtcacccacaaacacatcatctcagagttggagcacctgacgtttgtcaacacggatgtgggccgctgccgggcatggctgcgg

SEQ ID NO: 766062 - DNA, 120 bp, Artificial Sequence
  ENSG00000225190_4 (sequence is synthesized)
ctggccctgaacgatggcctgatggagtgctacctgaagctgctgctgcaggagcaggcccgcttgcatgagtactaccagcccaccgccctgctccgggatgctgaggagggcgagttc

SEQ ID NO: 766063 - DNA, 120 bp, Artificial Sequence
  ENSG00000225190_5 (sequence is synthesized)
ctccttagcttcctgcagggcctcacgtccttgtccttcgaactctcctacaagtctgccatcttaaatgagtggacgctcaccccattggccctgtctgggctttgcccgctttctgag

SEQ ID NO: 766064 - DNA, 120 bp, Artificial Sequence
  ENSG00000225190_6 (sequence is synthesized)
ctggaccctctctctacctctggtgcagaactacagcggaaggaatctctggattccatttcccattcttcaggctctgaagacatcgaagtccatcactcgggccataagatacggagg

SEQ ID NO: 766065 - DNA, 120 bp, Artificial Sequence
  ENSG00000225190_7 (sequence is synthesized)
aaccagaagctgactgcctcctccctcagcctggacacggccagttcatcccagctgtcctgcagcctaaactctgatagctgcttactccaagagaatggctccaagagtccagaccat

SEQ ID NO: 766066 - DNA, 120 bp, Artificial Sequence
  ENSG00000225190_8 (sequence is synthesized)
tgcgaggagcccatgtcctgtgactcagacctgggcacagcaaatgctgaggactcagaccggtctctgcaagaggtattgttggaattcagcaaagcccaggtaaactctgtgccaacc

SEQ ID NO: 766067 - DNA, 120 bp, Artificial Sequence
  ENSG00000225190_9 (sequence is synthesized)
aacggactgagccaagaaacagagatccccacaccacaggcctcgctctccctccatggcctcaacaccagcacatacctgcactgtgaggcacctgcagagccccttcctgcccaggca

SEQ ID NO: 766068 - DNA, 120 bp, Artificial Sequence
  ENSG00000225190_10 (sequence is synthesized)
gcctctggaactcaagatggtgtccacgtgcaggagccgcgtccccaggcgcccagccccctggacttacagcagcctgtagagagcacctcaggccagcagccttctagtactgtcagc

SEQ ID NO: 766069 - DNA, 120 bp, Artificial Sequence
  ENSG00000225190_11 (sequence is synthesized)
gagacagccagagaagtgggccaagggaatggcctgcagaaggcccaggctcatgacggagctggtctgaagctggtagtttcctcacccaccagtccgaaaaacaagagctggatctca

SEQ ID NO: 766070 - DNA, 120 bp, Artificial Sequence
  ENSG00000225190_12 (sequence is synthesized)
gaggatgacttctaccggccttcccgggagcaacccctggagagtgcttcagaccacccaatagcttcttacagggggactccagggtcaaggcctggtctccacaggcatttttctcaa

SEQ ID NO: 766071 - DNA, 120 bp, Artificial Sequence
  ENSG00000225190_13 (sequence is synthesized)
gaaccaagaaaaaactgctccctgggggcgttagaccaagcgtgtgtaccttccccaggaagaaggcaagcccaggcagccccatcccaggggcataagagcttccgggtggtacaccgg

SEQ ID NO: 766072 - DNA, 120 bp, Artificial Sequence
  ENSG00000225190_14 (sequence is synthesized)
agacagatgggactgtccaacccattccggggtctcatgaagctgggcaccgtggagcggcggggggcaatgggcatctggaaggagctcttctgcgagctctccccgctggagttccgc

SEQ ID NO: 766073 - DNA, 120 bp, Artificial Sequence
  ENSG00000225190_15 (sequence is synthesized)
ctctacctgagcaacgaggagcacacctgtgtggagaactgctcgctgcttcgctgtgagtctgtggggccagcccatagtgatgggcgctttgagctggtcttctctggcaagaagctg

SEQ ID NO: 766074 - DNA, 120 bp, Artificial Sequence
  ENSG00000225190_16 (sequence is synthesized)
gccctgcgcgcctcctcccaggacgaagctgaggactggctggaccgggtgcgggaggccctgcagaaggtccggcctcagcaggaggatgagtgggtgaacgtgcagtacccagaccag

SEQ ID NO: 766075 - DNA, 120 bp, Artificial Sequence
  ENSG00000225190_17 (sequence is synthesized)
cctgaggaaccccccgaggcgccccagggctgcctctctccctcagacctgctctcggagcccgcggccctccagggcacacagtttgactggtcgtccgcccaggttccagagccagat

SEQ ID NO: 766076 - DNA, 120 bp, Artificial Sequence
  ENSG00000225190_18 (sequence is synthesized)
gccatcaaggagtccctgctgtacttgtacatggacaggacctggatgccctatatattttctctgtccttggaggctctgaaatgtttccgcatcaggaacaatgagaagatgctgagt

SEQ ID NO: 766077 - DNA, 120 bp, Artificial Sequence
  ENSG00000225190_19 (sequence is synthesized)
gacagccacggcgtggagaccatccgggacatcctgccagacaccagccttgggggcccatccttcttcaaaatcatcacggccaaggctgtcctgaagctgcaggccggaaacgccgag

SEQ ID NO: 766078 - DNA, 120 bp, Artificial Sequence
  ENSG00000225190_20 (sequence is synthesized)
gaagccgccctgtggagggatctggtccgcaaagtcctggcatcctacttggagacagccgaggaggcggtgaccctgggcgggagcctggatgaaaactgtcaggaggtgctgaaattt

SEQ ID NO: 766079 - DNA, 120 bp, Artificial Sequence
  ENSG00000225190_21 (sequence is synthesized)
ctgcgcaggctgctcccggcagatcggcttctcctttgtacgacccaagctctgtgccttctctggcctctattactgtgacatctgccaccaagacgatgcctcagtgattccggccag

SEQ ID NO: 766080 - DNA, 120 bp, Artificial Sequence
  ENSG00000225190_22 (sequence is synthesized)
gatcatccacaactgggacctcaccaagcgcccgatctgcaggcaggccctgaagtttctgacacagatccgggcccagcccctcatcaacctgcagatggtgaacgcgtctctgtacga

SEQ ID NO: 766081 - DNA, 120 bp, Artificial Sequence
  ENSG00000225190_23 (sequence is synthesized)
gcatgtggagcggatgcacctcattgggaggagacgggagcagctgaagctcctgggggattacctgggcctgtgccggagtggcgccctgaaggagctcagcaagaggctcaaccacag

SEQ ID NO: 766082 - DNA, 120 bp, Artificial Sequence
  ENSG00000225190_24 (sequence is synthesized)
gaattatctcttggaatctccgcataggttcagtgttgctgacctccaacagatcgcagacggggtgtatgaaggattcctcaaggccctgattgaatttgcctcccagcatgtctacca

SEQ ID NO: 766083 - DNA, 120 bp, Artificial Sequence
  ENSG00000225190_25 (sequence is synthesized)
ctgcgacctgtgcacccagcgcggcttcatctgccagatctgccagcaccacgacatcatcttcccctttgagtttgacaccacagtcaggtgtgccgagtgcaagaccgtcttccacca

SEQ ID NO: 766084 - DNA, 120 bp, Artificial Sequence
  ENSG00000225190_26 (sequence is synthesized)
gagctgccaggctgtggtgaagaagggctgcccccgctgtgcccgccggcgcaagtaccaggaacagaacattttcgcctgatgcccatctgctgaccccgctctgaaagccgggggtga

SEQ ID NO: 766085 - DNA, 120 bp, Artificial Sequence
  ENSG00000225190_27 (sequence is synthesized)
gtgtggctcagccatcccggctgggtttgccatcagcccaggatactcaccgtgtcacagctgtgtccccttgtcaggaagaccctcagatgtggccagagcaccggcctcccagagaaa

SEQ ID NO: 766086 - DNA, 120 bp, Artificial Sequence
  ENSG00000225190_28 (sequence is synthesized)
gcccaggaagtccccgtggtgtcccctggccctccccccacccctctgctgcaggaggcgtggccaccaccagatgctccctgtctggggcaggcagggccgtttactcaccaggccctg

SEQ ID NO: 766087 - DNA, 120 bp, Artificial Sequence
  ENSG00000225190_29 (sequence is synthesized)
gctcaccagcgtcccggcgcctccgttagggctgcccaaacactgtggaaaggggacttggggagcattttcaattccacattcctgattaaaaggtctagttttttaaggtgggttttt

SEQ ID NO: 766088 - DNA, 120 bp, Artificial Sequence
  ENSG00000225190_30 (sequence is synthesized)
cccattcatatttcaacagaaagtatttttttattcttgaccctacgtgagtcacccatgaaatccagacattctcacccccagcggatgcacaggagccactcaggcctggcttagagg

SEQ ID NO: 766089 - DNA, 120 bp, Artificial Sequence
  ENSG00000225190_31 (sequence is synthesized)
tagcgggtggctggtgggcaggccactgctgggacagggtctatgggcccacccagtgcctttccttggccctcactgccagtgccaaaccgcccctcagcagggcagggccagtcctgg

SEQ ID NO: 766090 - DNA, 120 bp, Artificial Sequence
  ENSG00000225190_32 (sequence is synthesized)
cgaccccggttcctctgtgtcctctttactccccaccccagtgcgtctcgcctgctgagcccaccgctttctcagcgtcagagcccctagctcttctctagcctggggccttggccccat

SEQ ID NO: 766091 - DNA, 120 bp, Artificial Sequence
  ENSG00000225190_33 (sequence is synthesized)
taggagaaggagaaatgactggaaaccagcactgtcagcactttgagccctcctcggtttatggagggtcgccgtcttgcccacccccgatccccgtgcgctcctcacccctctacagac

SEQ ID NO: 766092 - DNA, 120 bp, Artificial Sequence
  ENSG00000225190_34 (sequence is synthesized)
aggggcgctgctgcagatgctccaggcccaccttggtgggtgcccggggtcacactctctgcctgactgacccctgccagggcacagataggcaggaccccagagagggcaggcagccac

SEQ ID NO: 766093 - DNA, 120 bp, Artificial Sequence
  ENSG00000225190_35 (sequence is synthesized)
gccctgcactgtggagaagtgacctggtcctaagctgtgcagggcgtgcgggggaactgccctgtggatgcagccaccacctcacaaagccatgaattcccaaagcatcactgaacttgc

SEQ ID NO: 766094 - DNA, 120 bp, Artificial Sequence
  ENSG00000225190_36 (sequence is synthesized)
ccagccgggacactggagactgaagaagttccccggagcaggactgcctttgaaggggccttggggctggggtgggagtctggaattgttttcaaagtgatggtcagaccctccaggctt

SEQ ID NO: 766095 - DNA, 120 bp, Artificial Sequence
  ENSG00000225190_37 (sequence is synthesized)
cggggaaatgtgggtttgctggtctctctgtcgccttcccccacctctcctggacctagcaggccctcagtcctagctgtcttacctgcgctcagcttggagtcaggcctcaggtggaga

SEQ ID NO: 766096 - DNA, 120 bp, Artificial Sequence
  ENSG00000225190_38 (sequence is synthesized)
gccgcatgtcactgtcagagatgagcccacccccacccttccctgggggcgattagctgctgagtcacccacccagccttggagctggatgcctgtgcagcagaacagaggcaacggtgg

SEQ ID NO: 766097 - DNA, 120 bp, Artificial Sequence
  ENSG00000225190_39 (sequence is synthesized)
caggcaggtggaggctgcgcacagcttctcccggtcatggcacacacctgtgcccagacgccaatgcctcctaagccaggagctgggttatgcaccgccatggcccacattaacgctcca

SEQ ID NO: 766098 - DNA, 120 bp, Artificial Sequence
  ENSG00000225190_40 (sequence is synthesized)
ccacaagcccagcctagtcagagccctcattgccccatccctgagtgggcaggagcctggcctggggagggcttgggcctgtgaggattctccccgaaggtgccctcggaggcagcaggt

SEQ ID NO: 766099 - DNA, 120 bp, Artificial Sequence
  ENSG00000225190_41 (sequence is synthesized)
ttgaggccctggggggcccgttccccagaagctgccagtgctttcagatgcattgactcttcccgcctcccctccctcagaaaggtagtgcccacactatttttaaaatgttattttatg

SEQ ID NO: 766100 - DNA, 120 bp, Artificial Sequence
  ENSG00000225190_42 (sequence is synthesized)
caatacactgttcctagtgagcagggctctggccctgaggagtctttgcaatgtattgaaggaattgctgccgtgtgagttttgaatgattttgcagtaaagacctgatctttctcatca

SEQ ID NO: 766101 - DNA, 120 bp, Artificial Sequence
  ENSG00000225190_43 (sequence is synthesized)
attggcattggtattaggatcagggccaagggtagaaccttcaacaccctgtcagccaggagagactgagatggatcactcagctgcacacggagtcccggtgttgctactggtgtgagc

SEQ ID NO: 766102 - DNA, 120 bp, Artificial Sequence
  ENSG00000225190_44 (sequence is synthesized)
attggtgtggtagaaactagagctgcgttggcggctgagcccttgttctctgctcccccggccacctctgaaatgggatctgctgtgcttaggacacgtctcagcactgaaaccagtgta

SEQ ID NO: 766103 - DNA, 120 bp, Artificial Sequence
  ENSG00000225190_45 (sequence is synthesized)
gcaggccgaattacactcctagcccctgccccgcccaggcggggggtgtctgcctggtgagcagcgccaggggagtgtaaacaaacaacacaggctagcctgggttctggaaacctttct

SEQ ID NO: 766104 - DNA, 120 bp, Artificial Sequence
  ENSG00000225190_46 (sequence is synthesized)
agtgcatggagacgagaggtgtttctaaagatgggagaaatgacagcgtgcatgtgtgccgatgggagtcaccccatagagaaggaagaaagcagtgacagaggagaggactgctccttg

SEQ ID NO: 766105 - DNA, 120 bp, Artificial Sequence
  ENSG00000225190_47 (sequence is synthesized)
tccttgagtagttggccaagggagagacctcctgcacaaatggagggtttggcctcacgcagaaagaagcacacttggttcatccctggcagcaggagggaaggcgtgggtgtagggaac

SEQ ID NO: 766106 - DNA, 120 bp, Artificial Sequence
  ENSG00000225190_48 (sequence is synthesized)
agggcgtgtggaggggatcttttgggtgctcttattttctcagtgaaatacaggacgcaagagcagcagtggacggtgagaatggggatgttcccatccagctttcagggtcccatgtga

SEQ ID NO: 766107 - DNA, 120 bp, Artificial Sequence
  ENSG00000225190_49 (sequence is synthesized)
tagtgccccgtggctggcctgtgttctggggacagtcactggccacatgcactgcagggcatcaggcagcagaggctgccttgggcaggacagagacaggcccgccaactaatgtgcccc

SEQ ID NO: 766108 - DNA, 120 bp, Artificial Sequence
  ENSG00000225190_50 (sequence is synthesized)
tgcagtacctggtggctatccccatggagaaaggccttgactcccaaggctgcttctgcgcaggtgccgatttgctctgctgccacccccagcctgccagcctcactccacctcctgctg

SEQ ID NO: 766109 - DNA, 120 bp, Artificial Sequence
  ENSG00000225190_51 (sequence is synthesized)
gttcctgatttaggctccccacccttctgcctccccgcaaatgcccccatccttcccctagggatgaggccacagatcaggcttgccctacagcttctgctcctccccagccccggctgg

SEQ ID NO: 766110 - DNA, 120 bp, Artificial Sequence
  ENSG00000225190_52 (sequence is synthesized)
ggccagtgccctgctcataggcagtgggccctgctcacccgtccctctcctgccacctcccactgatgggcggcaggctggctactcactgcgctgctcagggagtcccagcctgcttca

SEQ ID NO: 766111 - DNA, 120 bp, Artificial Sequence
  ENSG00000225190_53 (sequence is synthesized)
ttttcttcttgctctaccgtcctgttctttcagagcaggggcatggtttccttccaaatatttctgctgcttttataagtgtacacccttttttttaattataaaaatgggctcgtgcta

SEQ ID NO: 766112 - DNA, 120 bp, Artificial Sequence
  ENSG00000225190_54 (sequence is synthesized)
acacaattcaggcagtggagagaaggccgtggggagtggctgaggagtccctcaagagaagaggttgctgttcactgatggtggagtgttttgagagtggtggaaccaggttatcccttt

SEQ ID NO: 766113 - DNA, 120 bp, Artificial Sequence
  ENSG00000225190_55 (sequence is synthesized)
tgctttgcggaggagcagcagactatgggacacttggcttttcctccccagctgttcaggaagccaacagaggtgccctgtgttctagcatagagagagggtgaggtaggggttgaaagt

SEQ ID NO: 766114 - DNA, 120 bp, Artificial Sequence
  ENSG00000225190_56 (sequence is synthesized)
gcctgtggctgctttgagactggtcacaaaaagcaggtgagactggccacctttagcaggaacagccttttttgccacactggggcagagttacatagttacaacagaggttgtgtggcc

SEQ ID NO: 766115 - DNA, 120 bp, Artificial Sequence
  ENSG00000225190_57 (sequence is synthesized)
tgcaaagcctgaagaatatactatctggccctttacagaagggctgaccctgccttggatttgctgaccctgccttagattattcaaacatccgaattgtaaatcttttttttttttttt

SEQ ID NO: 766116 - DNA, 89 bp, Artificial Sequence
  ENSG00000225190_58 (sequence is synthesized)
tattcaaacatccgaattgtaaatctttttttttttttttgggatggagtttcgctctgtcattcactggcacctctgcttcccaggtt

SEQ ID NO: 766117 - DNA, 87 bp, Artificial Sequence
  ENSG00000225190_59 (sequence is synthesized)
ttagtagagaggggttttgcttgtgatctgcctacctccgcctcccaaagtgctgggattatataaagagtggaatcaggaaaagca

SEQ ID NO: 766118 - DNA, 120 bp, Artificial Sequence
  ENSG00000225190_60 (sequence is synthesized)
aagtgctgggattatataaagagtggaatcaggaaaagcatatgaatattcaccctgagacacttatctctttggcccctaactgtctgggcttttgagcaagtagctggcactgtgcct

SEQ ID NO: 766119 - DNA, 120 bp, Artificial Sequence
  ENSG00000225190_61 (sequence is synthesized)
actccagcctgggtgacagagtgaggttctgtctcaaaaacaaaacaaaactggtatttattctctgatcgttctggaggctccttctggagaatctaaggaagaatctgttcccgcctt

SEQ ID NO: 766120 - DNA, 120 bp, Artificial Sequence
  ENSG00000225190_62 (sequence is synthesized)
tctcctgggtggcgttgcaggtgctcgtttgcattccttggcttgtagacatgtcactcctgtctcccctctgctgtcacacatgttctactgtcatacaagttcttcctctgtatctct

SEQ ID NO: 766121 - DNA, 120 bp, Artificial Sequence
  ENSG00000225190_63 (sequence is synthesized)
gtcttcacttggtgttctcctctctttgtgtatcttttctcctcctcttataaggacatcagtcatactggatgaacagcccattctactccaacatgacctcatcttaactaattactt

SEQ ID NO: 766122 - DNA, 120 bp, Artificial Sequence
  ENSG00000225190_64 (sequence is synthesized)
ctgcaaagactctatttccaaaaaaggtcacattctgaggtactggggggtagggtttcaacatgtccttttgtgggggggtcacaattcaacccacaacacaactcagcaacaaaaaga

SEQ ID NO: 766123 - DNA, 120 bp, Artificial Sequence
  ENSG00000225190_65 (sequence is synthesized)
cagccccattttaagacagacaatggatttcagtagattccaatggatttggatagatttcccaaggagagaaattggaaccctcgtacattgctggtgggaatataaaatggtgcggcc

SEQ ID NO: 766124 - DNA, 120 bp, Artificial Sequence
  ENSG00000225190_66 (sequence is synthesized)
actttggaaaacagcttggtagttcctcaagaagggaaacatagagttacacatgacccagcaagtctactcctaagtatatacccaagacaatgaaacatgtctacacaaaaacttgtg

SEQ ID NO: 766125 - DNA, 120 bp, Artificial Sequence
  ENSG00000225190_67 (sequence is synthesized)
tataagtgatcatagcagcactattcataattgacaaaaagtagaaacaacccaaatgtccatcagccgaggagtggataagccaaatgtggtggatcgagacaatggaatattatttgg

SEQ ID NO: 766126 - DNA, 120 bp, Artificial Sequence
  ENSG00000225190_68 (sequence is synthesized)
ctgtgccggagtggcgccctgaaggagctcagcaagaggctcaaccacaggaattatctcttggaatctccgcataggttcagtgttgctgacctccaacaggtaagagtgtcatgcttc

SEQ ID NO: 766127 - DNA, 120 bp, Artificial Sequence
  ENSG00000225190_69 (sequence is synthesized)
acagcagtctgtagcttttctgcagctcaggatcgcagacggggtgtatgaaggattcctcaaggccctgattgaatttgcctcccagcatgtctaccactgcgacctgtgcacccagcg

SEQ ID NO: 766128 - DNA, 120 bp, Artificial Sequence
  ENSG00000225190_70 (sequence is synthesized)
agtggccgagagaccgcatcgtcggctcggaggctgaggggctgccgcggccgggagcgcccctcgcctcgctcctcgctccgcttgacacatcatctcagagttggagcacctgacgtt

SEQ ID NO: 766129 - DNA, 120 bp, Artificial Sequence
  ENSG00000225190_71 (sequence is synthesized)
gtagctgggactacacgtgcaagccaccacatctggctatgttgttgttgtagagacagagtttcgtcctgttgcccaggctggtcacgaattcctgagctcaagtgatccacctgcctt

SEQ ID NO: 766130 - DNA, 76 bp, Artificial Sequence
  ENSG00000225327_0 (sequence is synthesized)
tccagaatatgggaaatacctgctacgagaacgcttccctgcagtgcctgacatacacactgtcagcgtcccaagt

SEQ ID NO: 766131 - DNA, 89 bp, Artificial Sequence
  ENSG00000225327_1 (sequence is synthesized)
ctctgtactatgcaagctcacatcacatgggccctccacagtcctggccatgtcatccagccctcacaggcattggcttccatgaattt

SEQ ID NO: 766132 - DNA, 120 bp, Artificial Sequence
  ENSG00000225327_2 (sequence is synthesized)
tatcattgcggtctttgtctccagagggcgccggcctccaacacgttaactttacacacttctgccaaggtcctcatccttgtcttgaagagattctccgatgtcgcaggcaacaaactt

SEQ ID NO: 766133 - DNA, 79 bp, Artificial Sequence
  ENSG00000225327_3 (sequence is synthesized)
tgtcaagaggcagggaaccaagagccctcggcgctgaagacacagacaggcgagcaacccgagttggacgagcacttgg

SEQ ID NO: 766134 - DNA, 79 bp, Artificial Sequence
  ENSG00000225327_4 (sequence is synthesized)
aacaaaacgaagcctgagttcaacgtcggaaaagtcgaaggtaccctgcctcccaacgaaccatcatcctgaacagcaa

SEQ ID NO: 766135 - DNA, 86 bp, Artificial Sequence
  ENSG00000225327_5 (sequence is synthesized)
agctccctgctaaacctctcttcgacgacccggacagtctgcaagggaggaccaggagagccaaagggaagaacaaacacagcaag

SEQ ID NO: 766136 - DNA, 120 bp, Artificial Sequence
  ENSG00000225362_0 (sequence is synthesized)
gcgcgcggagagctctggctcagagtttgcgatccgagagcgggatccgcgctccctcggtccttcctccctcccctcttgcggcctcccgctgtcatctggagccgctcctgccgcccc

SEQ ID NO: 766137 - DNA, 120 bp, Artificial Sequence
  ENSG00000225362_1 (sequence is synthesized)
ctggcggcgaccgcgggaagggccggcccccatccgcacccctgaccccggaggtcaacaacgggatggtccctgggtcccaggggaagagacatcacccagtaggagggagtacggtct

SEQ ID NO: 766138 - DNA, 120 bp, Artificial Sequence
  ENSG00000225362_2 (sequence is synthesized)
agacagaggccacgagggcgggagggggcgagagtggagagtggcccagctggccagggtcgtctaagtgagaggaaaagggagagggcggttgagaccaggccctgaattccgcgttca

SEQ ID NO: 766139 - DNA, 120 bp, Artificial Sequence
  ENSG00000225362_3 (sequence is synthesized)
tcttatcctgaggtattcagtgccgagtgtggccttggtgctaggattcaaagaggaaaggaagaaaactttccattctaaaagaaactccacgtgaggcgaagaagatgaaatatagtc

SEQ ID NO: 766140 - DNA, 120 bp, Artificial Sequence
  ENSG00000225362_4 (sequence is synthesized)
agaaaaccataccagtaggtgttaagttgataaatgatgcatacgacatcctatagaagactgtcaccaccccacctcactgatcagccctctgcctacagccacacccacagaacattc

SEQ ID NO: 766141 - DNA, 120 bp, Artificial Sequence
  ENSG00000225362_5 (sequence is synthesized)
agccatttctcctgtggttcccagcctgcagcacagcgtctgcacgtggaactctggaatgctgacctacagtctgagttcctgtgcccttgcctggggctgactctctacttgacctgt

SEQ ID NO: 766142 - DNA, 120 bp, Artificial Sequence
  ENSG00000225362_6 (sequence is synthesized)
aacccacaactgggcaagagaaaattctgcagccacagctctgaggacatgagcaaaatggtttccagacggaatgtcaaggattcccatgaagtgtcagggagtcttcaggccacactt

SEQ ID NO: 766143 - DNA, 120 bp, Artificial Sequence
  ENSG00000225362_7 (sequence is synthesized)
ttctgcttcacacttgctctcatcctctttctcaccccacatctggtcagaggagataggaaggttcttgttacctggtacaagacaacttttggaatcccagatattcagattatttcc

SEQ ID NO: 766144 - DNA, 120 bp, Artificial Sequence
  ENSG00000225362_8 (sequence is synthesized)
ccttttcctctttgcaaatgataatactcacagccaagaggcatcacccggatccgaggctgcttctccttaggacatgcagacagaaggagaaggcggggctggcagcctccagtccac

SEQ ID NO: 766145 - DNA, 120 bp, Artificial Sequence
  ENSG00000225362_9 (sequence is synthesized)
agcctccctttcttcttccggcgatgattaactaggcctagacaatggagatctacggcatacgcccagggcctcctcttctcaagcatggctgatcagtcactttcccgtctatccttc

SEQ ID NO: 766146 - DNA, 120 bp, Artificial Sequence
  ENSG00000225362_10 (sequence is synthesized)
atttattgaagccaactatgaacgactaaaggaaggatgagaaaagtcacccaaagtcaaaggggacagcgtgggagactgttctagacagaaggaaacacctttgcaaagaccctgagg

SEQ ID NO: 766147 - DNA, 120 bp, Artificial Sequence
  ENSG00000225362_11 (sequence is synthesized)
aaggcaggggactctccaggagcagaagggctgtgtggcttcagagtccacaaaagagagcagatacaggacactggctagagcaggccctggagcccgctgctgtcctggaggccttgg

SEQ ID NO: 766148 - DNA, 120 bp, Artificial Sequence
  ENSG00000225362_12 (sequence is synthesized)
ggaggcccagtgttcccagggtggaagaagtaggggacagcttgacgtagtggctgttgatcagctgatatggaagtatgtcattttattaacaattgagaaaggagtgctgtgcaattc

SEQ ID NO: 766149 - DNA, 120 bp, Artificial Sequence
  ENSG00000225362_13 (sequence is synthesized)
cattcaatgccagtgatgcttatggccgtttttatgagttctgtcattttcaaatgagcaagaggaagcctctaagggggtttaagcagggactgacgtaatcagatctgtgtttttcca

SEQ ID NO: 766150 - DNA, 120 bp, Artificial Sequence
  ENSG00000225362_14 (sequence is synthesized)
aagggagagggagaaaaagaacatttcttatttttcaaaaaaggtaatgcaaaagcatcattccacaattctcttgtaatgaaaaaaataaatgcaaacttaagcaaatccatcattctg

SEQ ID NO: 766151 - DNA, 120 bp, Artificial Sequence
  ENSG00000225362_15 (sequence is synthesized)
ttgaaggactggggcaggggacggacgcgggcatccttccatttggaacagccattccggcagcatcaggatggggcggaggcaaagcggggagtgggcgaggcaagtggtgctgtaaac

SEQ ID NO: 766152 - DNA, 120 bp, Artificial Sequence
  ENSG00000225362_16 (sequence is synthesized)
gagagcaaccttctgggagttcagggcatgtggaactggaataagagcaacgtgtgaacagattacaggaaggcaatgcaggacagctggaccctttggggggaaacttatggggaacac

SEQ ID NO: 766153 - DNA, 120 bp, Artificial Sequence
  ENSG00000225362_17 (sequence is synthesized)
agttttcttacttataagcactgagattgcctgagaggggagagatgatgcagagtgtcccaaatgtatttgacgtggaatccttttaccagcgaaacatctcttgggcctagagttctg

SEQ ID NO: 766154 - DNA, 120 bp, Artificial Sequence
  ENSG00000225362_18 (sequence is synthesized)
aaaattgcactttgaaaaacactgctctcagctcttacaaacctcgtgttttcatcctaactgtgcttcagagaattgtgtcccagcaggaaaggaaacccccgtataattccctacgtt

SEQ ID NO: 766155 - DNA, 120 bp, Artificial Sequence
  ENSG00000225362_19 (sequence is synthesized)
aggaggtaccaggatccatcacgatgcttgtaaaattgttcctttcattttcctggttgtaaacttatgcagactgtaaagtcaaggcaagcctgtgcccagcaaataataagaaaataa

SEQ ID NO: 766156 - DNA, 120 bp, Artificial Sequence
  ENSG00000225362_20 (sequence is synthesized)
gggaggcatggtaaacaaaacaaaacactttgagagttggtcaacttgctgttattttgagctgtttctaaaaatctcagggtagattccctcccctgcttgcctccttaacccagtcct

SEQ ID NO: 766157 - DNA, 120 bp, Artificial Sequence
  ENSG00000225396_0 (sequence is synthesized)
gacgagcttcgccggtgtcttcattgaagtcctgttggtccctaccggcacatcacacactcctggaagcatgatcttcactcccttccttccacctgctgacctgtctgtctttcagaa

SEQ ID NO: 766158 - DNA, 120 bp, Artificial Sequence
  ENSG00000225396_1 (sequence is synthesized)
acaggcttgcccagggaacctgctcttctgcgagggtcttggaggagccggttccagagggccctggcatgtttcatcaagtgcttcaggggaggataccgggcactcggaatctgagac

SEQ ID NO: 766159 - DNA, 120 bp, Artificial Sequence
  ENSG00000225396_2 (sequence is synthesized)
caccggagccacagacacaggcgtgaacggtgaccgagccccctctgatgctccatgcccctgctcgccccagtgtcccggtcaccgggcctgaaataaatgctggcacgcttgactgtt

SEQ ID NO: 766160 - DNA, 120 bp, Artificial Sequence
  ENSG00000225396_3 (sequence is synthesized)
ggccctcggcctctttgcaccgggcagagtgacgagcttcgccggtgtcttcattgaagtcctgttggtccctaccggcacatcacacactcctggaagcatgatcttcactcccttcct

SEQ ID NO: 766161 - DNA, 120 bp, Artificial Sequence
  ENSG00000225523_0 (sequence is synthesized)
ggtatcttaaaagaggttctttctctgggatgtggcatgagcaaaactgacaagtcaaggcaggaagatgtcgccatcacaactcattgggtttctgctgctctgggttccagcctccag

SEQ ID NO: 766162 - DNA, 120 bp, Artificial Sequence
  ENSG00000225523_1 (sequence is synthesized)
aaggagaaagtcaccatcacctgccgggccagtcagagcattggtagtagcttacactggtaccagcagaaaccagatcagtctccaaagctcctcatcaagtatgcttcccagtccatc

SEQ ID NO: 766163 - DNA, 120 bp, Artificial Sequence
  ENSG00000225523_2 (sequence is synthesized)
tcaggggtcccctcgaggttcagtggcagtggatctgggacagatttcaccctcaccatcaatagcctggaagctgaagatgctgcagcgtattactgtcatcagagtagtagtttacct

SEQ ID NO: 766164 - DNA, 120 bp, Artificial Sequence
  ENSG00000225526_0 (sequence is synthesized)
aggttccttggggcggtgtgcattcgccaggtgtataatgaggaaaaggaagtctccggaaacctcccctagcattccaggaggcgaaagctatgcactgcgcagaggctgggaaggctt

SEQ ID NO: 766165 - DNA, 120 bp, Artificial Sequence
  ENSG00000225526_1 (sequence is synthesized)
taattaaattcaaccactgtgagaaatacatctacagcttcagtgtgccccagtgctgccctctctgccagcaggacctgggctcgaggaagctggaggacgcacctgttagcatcgcta

SEQ ID NO: 766166 - DNA, 120 bp, Artificial Sequence
  ENSG00000225526_2 (sequence is synthesized)
atccatttactaatggacatcaagaaaaatgttcattcctcctcagaccaactcaggggacatttcttagagagtatgatggaaggtctgatcttcatgttggaataactaacacaaatg

SEQ ID NO: 766167 - DNA, 120 bp, Artificial Sequence
  ENSG00000225526_3 (sequence is synthesized)
gggttgtgtataattacagtgcacatggtgtccagcgagacggagaagggtgggaagagagcataagcatcccattactgcagcccaacatgtatggaatgatggagcaatgggacaagt

SEQ ID NO: 766168 - DNA, 120 bp, Artificial Sequence
  ENSG00000225526_4 (sequence is synthesized)
ggcctggctgcctcacaggtatgaagacaaccaccataactgctactcttacgcactcacgttcattaactgcgttctgatggcagaaggtagacagcaactggacaagggtgaatttac

SEQ ID NO: 766169 - DNA, 120 bp, Artificial Sequence
  ENSG00000225526_5 (sequence is synthesized)
ggagaagtacgtggtcccgcggacaaggctggcatccaagttcatcacactctaccgggcgatacgggagcatggcttctacgtcactgactgtccccagcagcaggcacaaccccctga

SEQ ID NO: 766170 - DNA, 120 bp, Artificial Sequence
  ENSG00000225526_6 (sequence is synthesized)
gggcggcggtttgtgctgagagctatgtaagcgcagcctggacgctggagggtagggtggttgctacctttaatcagtactatggatttctaaatgcatttaactgtggttaataaaagc

SEQ ID NO: 766171 - DNA, 65 bp, Artificial Sequence
  ENSG00000225526_7 (sequence is synthesized)
tatggatttctaaatgcatttaactgtggttaataaaagcgtgacaggtaggtcacctgaggttg

SEQ ID NO: 766172 - DNA, 120 bp, Artificial Sequence
  ENSG00000225526_8 (sequence is synthesized)
tttttgtagcatatgtcaccatttccactccccagtgacaagcacaaagccacctagagcacatcctgcttgtcctttggggcatctctgtcatgtgcttatagtcactcctctccatct

SEQ ID NO: 766173 - DNA, 120 bp, Artificial Sequence
  ENSG00000225526_9 (sequence is synthesized)
atgttatactgatcttactccaagcctctttcatgttgcgctttgtaatgaatttccaactgctcaacctttctgatggacaaaccgcccctcatatcttccaagagagacgactgagac

SEQ ID NO: 766174 - DNA, 120 bp, Artificial Sequence
  ENSG00000225526_10 (sequence is synthesized)
atgtgcatacagaaagtggggatgtgaagacagcaagtgactataagacgtgtgatggcccaagactgaatcaagaagcagatgcaagaatctagctgactttcaggaaattagacctta

SEQ ID NO: 766175 - DNA, 120 bp, Artificial Sequence
  ENSG00000225526_11 (sequence is synthesized)
aactttgctaccaaacactcgggagaaaaaggctatcagatagaagcgggtgaagaagctgagaaaacagaagagaagggtggctgccagctcgggactcaaaatggccatctgggcgta

SEQ ID NO: 766176 - DNA, 120 bp, Artificial Sequence
  ENSG00000225526_12 (sequence is synthesized)
gagacacagagaccctttgcgcagacgtgcgccgagggtcttgcaaagctttcgttttctttgtgtgccgacctgcccctagaagcggttttcgatgctattttaaatgatattcctaaa

SEQ ID NO: 766177 - DNA, 120 bp, Artificial Sequence
  ENSG00000225526_13 (sequence is synthesized)
atttccgaattgcttgttgcttatatatagaaatacactggatctttgtatactgacttgggattcagctccatgctaaattttgaattaattctaatggtttatttgtagttagttatc

SEQ ID NO: 766178 - DNA, 120 bp, Artificial Sequence
  ENSG00000225528_0 (sequence is synthesized)
cgcccatctgcctccccttctagcccaggtgcttctggaagggcaggattttcctctacttcatctttatgcctttaacagtgtcttgcataaaagagagacactcagtgagtatttgtg

SEQ ID NO: 766179 - DNA, 120 bp, Artificial Sequence
  ENSG00000225528_1 (sequence is synthesized)
gaaggaaggagggataggaggaggagaactcccacttgtccagatccatctgggggtttaaatcttaaccttttcttttatgattgatgcatatctgaagaagagtcagagaaaaataga

SEQ ID NO: 766180 - DNA, 120 bp, Artificial Sequence
  ENSG00000225528_2 (sequence is synthesized)
aatctcaagtcactgctgtaggatatacaggggcggaaaagttgtggcacctttctttgcccatcagaggagtcacagctgacactcctacaagacaggttaacaagaggagagtggaca

SEQ ID NO: 766181 - DNA, 120 bp, Artificial Sequence
  ENSG00000225528_3 (sequence is synthesized)
catttatttaatcaaagacttgtgtgacacagaagccttcagaaatgaagacccaagacccagggaaagccgtctatttttatgcttaggtttgtcaaaggacagacagccctgtagaaa

SEQ ID NO: 766182 - DNA, 82 bp, Artificial Sequence
  ENSG00000225528_4 (sequence is synthesized)
tatgcttaggtttgtcaaaggacagacagccctgtagaaatgggattggacaaagggggtttgatctaaggtaactgcttgc

SEQ ID NO: 766183 - DNA, 120 bp, Artificial Sequence
  ENSG00000225528_5 (sequence is synthesized)
gagcgagactctgactcaaaaagaaacctccacttactctcagaggtatctttactctccgagaccctttaaaattcttgacctttcttttacatcaggcaattggcatcactagtgcca

SEQ ID NO: 766184 - DNA, 120 bp, Artificial Sequence
  ENSG00000225528_6 (sequence is synthesized)
gtttatttttagatataaatgtatgtctgtttgaaaaataaactttacatccaaaagagaatgacttggcaatgaagtaaaactggatctaatggtaaaggctcagcccacccttcctag

SEQ ID NO: 766185 - DNA, 120 bp, Artificial Sequence
  ENSG00000225528_7 (sequence is synthesized)
atggataaaatccattttctctagccctggttcgaatgtgtcccatcacttgtgagtccagactggcaacaaaaggtgctgatctaaaagaagttatcgtccagtggcagggtctgggga

SEQ ID NO: 766186 - DNA, 120 bp, Artificial Sequence
  ENSG00000225528_8 (sequence is synthesized)
aggggcggcaggcgccatgtccagccacgaaggtggcaagaagaaggcactgaaacagcccaagaagcaggccaaggagatggacgaggaagagaaggctttcaagcagaaacaaaaaga

SEQ ID NO: 766187 - DNA, 120 bp, Artificial Sequence
  ENSG00000225528_9 (sequence is synthesized)
ggagcagaagaaactcgaggtgctaaaagcgaaggtcgtggggaaggggcctctggccacaggtggaattaagaaatctggcaaaaaataagctgttccttgtgcctaaggagacggtga

SEQ ID NO: 766188 - DNA, 120 bp, Artificial Sequence
  ENSG00000225528_10 (sequence is synthesized)
ccctttatttcatccgtatttaaacctctctattccctcctataatatcttttgccacctatagttggaattaagtgtcgtcttggagctgttgtacatttaagaataaacttttgtaaa

SEQ ID NO: 766189 - DNA, 120 bp, Artificial Sequence
  ENSG00000225556_0 (sequence is synthesized)
agaataatgcagacaactgatcactgcaagtcactctgccttggagctattggaatggctccagaacagggcactgggggccaaggcaggatttcaaccaggagggttttacagaagatg

SEQ ID NO: 766190 - DNA, 120 bp, Artificial Sequence
  ENSG00000225556_1 (sequence is synthesized)
gacttcacctgtgagggctggggttggaaccgagcaccaaagaagtggccactgtccactgatggccgtctccctcttctctgtagccctcccccacccctaagcagcccagcttcagca

SEQ ID NO: 766191 - DNA, 120 bp, Artificial Sequence
  ENSG00000225556_2 (sequence is synthesized)
gaggaggcctgggcacaggaatggattgttgctagaaacctggcttcagctggaggaagtcagaagaccgggctgatggccgcgcagacagagctgtgtttatccaggaaaagagccccc

SEQ ID NO: 766192 - DNA, 120 bp, Artificial Sequence
  ENSG00000225556_3 (sequence is synthesized)
cagactgcgccgccctttctttttctgctcaaataggggtccgcgctcccagtgggtccggagaccggggcgcggtggctgaccgcccggtgtacgccagcatcactcacctctgactcc

SEQ ID NO: 766193 - DNA, 120 bp, Artificial Sequence
  ENSG00000225556_4 (sequence is synthesized)
tctgcgctcctcgcccagccccgctccgccgagcactcccatctgagacgggatttggaccctctcggccctgcggaattcggaattccattaccccacccaccgcatgtggctcttgga

SEQ ID NO: 766194 - DNA, 120 bp, Artificial Sequence
  ENSG00000225556_5 (sequence is synthesized)
aaaagctggctataaggtgggggccgcggagcctgcggcccgttgggcgccttccggcctgttctccaagcgtcgcgccccgggcccgcccacaagcgcctgccccaacgtcctcacccc

SEQ ID NO: 766195 - DNA, 120 bp, Artificial Sequence
  ENSG00000225556_6 (sequence is synthesized)
cccacaagcgcctgccccaacgtcctcaccccggatcgcatcccgcagttcttcatcccgcctcggctcccggacccgggcggcgcagtgcccgcggcccggcggcacgtggcggggcgc

SEQ ID NO: 766196 - DNA, 80 bp, Artificial Sequence
  ENSG00000225556_7 (sequence is synthesized)
gctgcacgtctccgccccggacctgcgcctctgccgggcccccgacagcgacacggcctcgtcgccggactcgtcgccct

SEQ ID NO: 766197 - DNA, 120 bp, Artificial Sequence
  ENSG00000225556_8 (sequence is synthesized)
cccttcggctccccgcggccaggcctgggccggcgccgggtgtccaggcctcactctctgtccccagaaaaagcgagctcggccgataccagcccgcactcgccgcgccgcgccgggccg

SEQ ID NO: 766198 - DNA, 120 bp, Artificial Sequence
  ENSG00000225556_9 (sequence is synthesized)
cgccgccgctcttccacctggacttcctgtgctgccagctgcggcccacgcgcgagagcgtgctgcgcctggggccccgcggcgggcagctgcggctctccaccgaatatcaggccgggc

SEQ ID NO: 766199 - DNA, 80 bp, Artificial Sequence
  ENSG00000225556_10 (sequence is synthesized)
gaatatcaggccgggcccgggcggctgcggctgcgcctagtgagcgccgagggcctgccccggccgcggtcccgccccgg

SEQ ID NO: 766200 - DNA, 120 bp, Artificial Sequence
  ENSG00000225556_11 (sequence is synthesized)
gggagcagcagagccgcgtggtcaagtgcagcgccaaccccatcttcaacgaggatttctttttcgacgggctcggccccccggacctggccgcccgcagcctgagagccaaggtgctag

SEQ ID NO: 766201 - DNA, 120 bp, Artificial Sequence
  ENSG00000225556_12 (sequence is synthesized)
acaggggcgcgggacttcgcagggatgtgctgctgggggagtgcgagacgcccctcattgcgctgctgcccccgctgggtgggggactaggtcccgggtcatccctggcgcccacccatc

SEQ ID NO: 766202 - DNA, 120 bp, Artificial Sequence
  ENSG00000225556_13 (sequence is synthesized)
tcagcctgtagcctgagcccctggcttcctcaggacgtctccactgtgtctgcagtccacattctttccaccctgcccggcttgtatttatttttgctaataaaatgtccccttgtcctt

SEQ ID NO: 766203 - DNA, 120 bp, Artificial Sequence
  ENSG00000225614_0 (sequence is synthesized)
atgcctggggagcgcccccgaggagcgccgccccccaccatgactggagacctgcagccccgccaagttgccagcagcccggggcacccctcccagccgccactggaggacaacacccca

SEQ ID NO: 766204 - DNA, 120 bp, Artificial Sequence
  ENSG00000225614_1 (sequence is synthesized)
gctaccaggaccaccaagggtgccagggaggctggcggccaggcccaggccatggagctccccgaggcccagccaaggcaggccagggacggggagctcaagcccccatccctgagaggc

SEQ ID NO: 766205 - DNA, 120 bp, Artificial Sequence
  ENSG00000225614_2 (sequence is synthesized)
caggccccgagcagcacccctgggaagaggggcagcccccagaccccaccggggagaagccccttgcaggctccctcaaggctggcgggcagggcagagggcagccccccacagcgctac

SEQ ID NO: 766206 - DNA, 120 bp, Artificial Sequence
  ENSG00000225614_3 (sequence is synthesized)
attctgggcatcgccagctcgaggaccaagcccaccctggacgagacaccagagaacccacagctggaggctgcccagctccctgaggtggacaccccccagggccctgggactggagct

SEQ ID NO: 766207 - DNA, 120 bp, Artificial Sequence
  ENSG00000225614_4 (sequence is synthesized)
ccactcaggccgggcctcccaaggactgaggcccaacccgccgccgaagagcttggcttccacaggtgcttccaggagccaccctccagctttacctccaccaactatacctcaccaagc

SEQ ID NO: 766208 - DNA, 120 bp, Artificial Sequence
  ENSG00000225614_5 (sequence is synthesized)
gccacccccaggcccccagccccggggcccccccagagcaggggcaccagccccctccagcccggttcctatcccgaataccaggccagtggggccgactcctggcctcccgctgctgag

SEQ ID NO: 766209 - DNA, 120 bp, Artificial Sequence
  ENSG00000225614_6 (sequence is synthesized)
aatagcttcccaggtgctaatttcggggttccccccgccgagccggaacctattcccaaaggcagcaggcccggcggcagccccaggggagtttccttccagttccccttcccggcactg

SEQ ID NO: 766210 - DNA, 120 bp, Artificial Sequence
  ENSG00000225614_7 (sequence is synthesized)
catggggccagcacaaaacccttccctgcggatgtggctgggcacgcattcaccaatgggccactggtgtttgccttccatcagccccagggagcgtggccggaggaggccgtgggcacg

SEQ ID NO: 766211 - DNA, 120 bp, Artificial Sequence
  ENSG00000225614_8 (sequence is synthesized)
ggccctgcctacccgctgcccacccagcctgcgccctcacccctgccctgctaccagggccagccaggtggcctgaaccgccacagcgacctcagtggtgccctctcttcccctggagct

SEQ ID NO: 766212 - DNA, 120 bp, Artificial Sequence
  ENSG00000225614_9 (sequence is synthesized)
gctcactcggccccgagacccttctctgacagtttacacaagagcctgaccaaaatccttcccgaaagaccaccttcagcccaggatgggctggggagcacgagagggccccctagctcc

SEQ ID NO: 766213 - DNA, 120 bp, Artificial Sequence
  ENSG00000225614_10 (sequence is synthesized)
ctaccccagaggcactttccagggcaggcgtacagagccagtggggtggacaccagcccggggcctccggacaccgagctggccgccccagggcccccacccgccaggctgccccagctg

SEQ ID NO: 766214 - DNA, 120 bp, Artificial Sequence
  ENSG00000225614_11 (sequence is synthesized)
tgggaccccacagcagccccttaccccacacctcctgggggccccctggctgccaccaggagtatgttctttaacggccagcccagcccaggccagcggctctgcctcccccagagtgcc

SEQ ID NO: 766215 - DNA, 120 bp, Artificial Sequence
  ENSG00000225614_12 (sequence is synthesized)
cccctgccttggccccaagtgctcccgaccgcccggccaagtccccacggaatggagatgctgagccggctgcctttccccgcggggggccccgagtggcaggggggcagccaaggagcc

SEQ ID NO: 766216 - DNA, 120 bp, Artificial Sequence
  ENSG00000225614_13 (sequence is synthesized)
ctgggcactgctggcaagacaccgggacccagagagaagctgccagccgtgagaagcagccagggcggctccccagcactgttcacctacaacggaatgacagaccctggggctcagccc

SEQ ID NO: 766217 - DNA, 120 bp, Artificial Sequence
  ENSG00000225614_14 (sequence is synthesized)
ctgttcttcggggtggcccagccccaggtttcaccccacgggacacccagcctgcccccaccgagggtagtgggagcctcccccagcgagtccccactgccgtcaccggccaccaacacg

SEQ ID NO: 766218 - DNA, 120 bp, Artificial Sequence
  ENSG00000225614_15 (sequence is synthesized)
gccggcagcacctgctcttccctgtcgccgatgtccagcagcccagccaaccccagctcagaggaaagccagctccccggccccctcgggccctcggccttcttccacccacccactcac

SEQ ID NO: 766219 - DNA, 120 bp, Artificial Sequence
  ENSG00000225614_16 (sequence is synthesized)
ccccaggagacgggcagccccttcccgtccccggagcccccccactccctccccacccactaccagccagagccagccaaggccttcccttttcccgcagatgggctgggagccgagggt

SEQ ID NO: 766220 - DNA, 120 bp, Artificial Sequence
  ENSG00000225614_17 (sequence is synthesized)
gccttccagtgcctggaggagaccccattcccccacgagggccccgaggtgggtcggggagggctgcagggcttcccccgtgcgccgcctccgtaccccacacaccacttctccctcagc

SEQ ID NO: 766221 - DNA, 120 bp, Artificial Sequence
  ENSG00000225614_18 (sequence is synthesized)
agcgccagcctggaccagctggacgtgctgctgacctgcaggcagtgtgaccgcaactacagcagcctggcggccttcctggcccaccggcagttctgtggcctgctcctggccagggcc

SEQ ID NO: 766222 - DNA, 120 bp, Artificial Sequence
  ENSG00000225614_19 (sequence is synthesized)
aaggatggccaccagcggtctccaggcccccctgggctcccctcgccccccgctgcccccagagtccctgccgacgcacacgcgggcttgctcagccacgcgaagaccttcctgttagct

SEQ ID NO: 766223 - DNA, 120 bp, Artificial Sequence
  ENSG00000225614_20 (sequence is synthesized)
ggggacgcccaggccgagggcaaagacgaccccctgaggacaggcttcctgcccagcctggccgccacccccttcccgctccctgcctcggacctggacatggaggatgacgccaagctg

SEQ ID NO: 766224 - DNA, 120 bp, Artificial Sequence
  ENSG00000225614_21 (sequence is synthesized)
gacagcctcatcacagaggcgctcaacggcatggagtaccagtcggacaacccggagatcgacagcagcttcatcgacgtcttcgcggacgaggagccttccggccccagaggtcccagc

SEQ ID NO: 766225 - DNA, 120 bp, Artificial Sequence
  ENSG00000225614_22 (sequence is synthesized)
tccggacacccccttaagagcaaggcgggggtgactccagagagcaaagctccgcccccgctcccagcagccacgccggacccccaaaccccccgccctggggacaggggctgcccagcc

SEQ ID NO: 766226 - DNA, 120 bp, Artificial Sequence
  ENSG00000225614_23 (sequence is synthesized)
cgaggcaggcccaaaacgcgttccctgggtctggcccccaccgaggcggatgcgcccagccagggcaggcagcagaggagggggaagcagttgaagctgttccggaaggatctggactcg

SEQ ID NO: 766227 - DNA, 120 bp, Artificial Sequence
  ENSG00000225614_24 (sequence is synthesized)
gaaggatctggactcgggcggcgcagcagaggggtcggggtcgggcggcggcggcagagcctccggcctgaggccccggaggaacgacggtctcggggagcggcccccaccccgtccccg

SEQ ID NO: 766228 - DNA, 120 bp, Artificial Sequence
  ENSG00000225614_25 (sequence is synthesized)
ggtcccgagagccgccgccctccccgaggagacccgcagctcccggcgccgccggctgccccccaggaaggaccccaggaagaggaaggctcggggcggcgcctggggcaaggagctcat

SEQ ID NO: 766229 - DNA, 120 bp, Artificial Sequence
  ENSG00000225614_26 (sequence is synthesized)
gctcggggcggcgcctggggcaaggagctcattctgaagatcgtgcagcagaagaacaggctccgcgagtacgacttcgcctcggagtccgaggaggacgagcagcctccgccgcggggc

SEQ ID NO: 766230 - DNA, 120 bp, Artificial Sequence
  ENSG00000225614_27 (sequence is synthesized)
cccggcttcagaggccggcggggccgaggcgagaagaggaaggaagtggagctgacccagggtcccagagaggatgagccacagaaaccccggaaggcggcgaggcaggaagccggcggg

SEQ ID NO: 766231 - DNA, 120 bp, Artificial Sequence
  ENSG00000225614_28 (sequence is synthesized)
gcgaaccccgaggagccgggcgggtctcgcccgggccccggcaggagccctcaggcccgtggcccgtctcgaagcctggagacgggagcggccgccagggagggaggccccaagtgtgct

SEQ ID NO: 766232 - DNA, 120 bp, Artificial Sequence
  ENSG00000225614_29 (sequence is synthesized)
cccaagtgtgctgatcgcccctcagtggcccccaaggatcccctgcaggtccccaccaacaccgagacctcagaggaaacccgcccgtcgctggactttccccaggaggccaaggagcct

SEQ ID NO: 766233 - DNA, 120 bp, Artificial Sequence
  ENSG00000225614_30 (sequence is synthesized)
gaaactgccgaagagtcagccccggacagcacagaattcacagaggctttgcgttctcctccagccgcctgtgcgggagaaatgggagcaagccccggtctcctgataccagagcagccg

SEQ ID NO: 766234 - DNA, 120 bp, Artificial Sequence
  ENSG00000225614_31 (sequence is synthesized)
ccgcccagcagacatgacaccggcacccccaagccgtcgggaagcctcgccaacacggcgccccacggaagctcgccaacgccaggtgtgggcagcctgctgggtggtcctgggggcaca

SEQ ID NO: 766235 - DNA, 120 bp, Artificial Sequence
  ENSG00000225614_32 (sequence is synthesized)
caggccccagtctcccacaacagcaaggacccccctgcccgccagcctggagaatttctggcacccgtggctaacccctcaagtaccgcctgccccaaacccagtgttctgtcttcaaag

SEQ ID NO: 766236 - DNA, 120 bp, Artificial Sequence
  ENSG00000225614_33 (sequence is synthesized)
atctccagttttggctgtgaccctgctggttttaacagagaccccttgggggttccagttgccaaaaaggggcctcagccctacagcagcccccacagtgagttgttcctcggacccaaa

SEQ ID NO: 766237 - DNA, 120 bp, Artificial Sequence
  ENSG00000225614_34 (sequence is synthesized)
gacctggctggctgtttcctggaagaactgcaccccaagccctcagccagggatgccccgccggccagcagctcctgcctttgccaggacggcgaggatgccggttccctcgagccacag

SEQ ID NO: 766238 - DNA, 120 bp, Artificial Sequence
  ENSG00000225614_35 (sequence is synthesized)
ctgccaaggagcccacctggcaccgctgagacggagccaggcagggctgcatcgccaccgaccttggagtcctcatccctcttcccagacctgccggtggacagattcgacccacccctc

SEQ ID NO: 766239 - DNA, 120 bp, Artificial Sequence
  ENSG00000225614_36 (sequence is synthesized)
tatggcagcctgtctgcgaacagggactccggtctgccgttcgcatgtgccgaccctccccagaagacggtgccgtcagatccaccgtacccctcttttttgctgcttgaggaagtatcc

SEQ ID NO: 766240 - DNA, 120 bp, Artificial Sequence
  ENSG00000225614_37 (sequence is synthesized)
ccgatgctgcctagccattttcctgatctctcggggggaaaggtgctcagtaagacgtgtccccctgaacggacagtggttcccggcgccgccccatctttgcctgggaaggggagtgga

SEQ ID NO: 766241 - DNA, 120 bp, Artificial Sequence
  ENSG00000225614_38 (sequence is synthesized)
tgtagcgttgctcttatgagtcacctgtccgaggatgaactggagatccagaaattggtcaccgaattagaaagtcagctgcaaaggagcaaagacacacgtggggccccgagagagctt

SEQ ID NO: 766242 - DNA, 120 bp, Artificial Sequence
  ENSG00000225614_39 (sequence is synthesized)
gcagaagctgagtcggtgggcagggtggagctcggcacaggcacagagccaccctcccaacggcgcacctgccaggccaccgtgccccacgaggacacgttctcggcagctgacctcacg

SEQ ID NO: 766243 - DNA, 120 bp, Artificial Sequence
  ENSG00000225614_40 (sequence is synthesized)
cgcgttggagaatccactgcacatcgggagggtgcggaatcggctgtggccaccgtggaagcggttcaggggaggcctggggggacgtggccctgcccagcctccttccatccgggacat

SEQ ID NO: 766244 - DNA, 120 bp, Artificial Sequence
  ENSG00000225614_41 (sequence is synthesized)
gcagcccttctcccctgtgcccaggaagacctggtttctggggctcctttcagccccaggggagccaacttccattttcagccagtgcagaaagccggagcctccaagactggactttgc

SEQ ID NO: 766245 - DNA, 120 bp, Artificial Sequence
  ENSG00000225614_42 (sequence is synthesized)
caggcagaaggagacagcaggcccccccaagatgtctgcctgcctgagcccagcaagcagcctggcccacagctggatgccgggagtttagcaaagtgcagccccgaccaggaactttca

SEQ ID NO: 766246 - DNA, 120 bp, Artificial Sequence
  ENSG00000225614_43 (sequence is synthesized)
tttcctaagaataaggaggccgccagctcacaagaaagtgaagactccctgcggctgcttccctgtgaacagagaggagggttcctcccagagcccggcacagcagaccagccccaccga

SEQ ID NO: 766247 - DNA, 120 bp, Artificial Sequence
  ENSG00000225614_44 (sequence is synthesized)
ggggcccctgctccagaagcttttggcagccctgctgtccatctggcccctgacttggcatttcagggtgacggggctccacctctggatgccacctggccttttggtgccagtcccagc

SEQ ID NO: 766248 - DNA, 120 bp, Artificial Sequence
  ENSG00000225614_45 (sequence is synthesized)
catgctgcccagggacattctgcaggcagagcaggtgggcacctccaccccacggcagggaggcctggctttgagggtaatgagtttgcaccggcgggggcctcctcactgactgccccc

SEQ ID NO: 766249 - DNA, 120 bp, Artificial Sequence
  ENSG00000225614_46 (sequence is synthesized)
cggggcagggaggcttggttggtccctgtgccaagtcccgcctgtgtatccaacacccaccctagcaggaggtcccaggacccagctttgagcccccccatacgtcagctccagctccca

SEQ ID NO: 766250 - DNA, 120 bp, Artificial Sequence
  ENSG00000225614_47 (sequence is synthesized)
gggcctggagtggctaagagtaaagatggcatcctgggcttgcaggagctgacacctgctgcccagagccctccacgagtgaacccctcaggtctggaagggggcactgtggaaggaggg

SEQ ID NO: 766251 - DNA, 120 bp, Artificial Sequence
  ENSG00000225614_48 (sequence is synthesized)
aaggtggcctgtggccccgcccagggctccccagggggtgtgcaggtgacaactctccctgcagtggccggacatcagctggggctggaggcagatggacattggggcttgcttggccaa

SEQ ID NO: 766252 - DNA, 120 bp, Artificial Sequence
  ENSG00000225614_49 (sequence is synthesized)
gccgagaaaacccagggccaaggcacagccaaccagcttcagccagagaacggggtgagcccagggggcacggacaaccacgcctcagtcaatgccagtcccaaaacagcgctgaccggc

SEQ ID NO: 766253 - DNA, 120 bp, Artificial Sequence
  ENSG00000225614_50 (sequence is synthesized)
cccaccgagggtgcagtcctgctagagaaatgcaagggaagcagggcagccatgagccttcaggaggaggccgagcccaccccaagccccccgtcccctaatagggagtccctggcgctg

SEQ ID NO: 766254 - DNA, 120 bp, Artificial Sequence
  ENSG00000225614_51 (sequence is synthesized)
gccttgacagcagcccacagccgaagtggatctgagggccggactccagagagggcgtccagccccggcctgaacaagccactgctggccacaggggatagcccagcaccctctgtcggg

SEQ ID NO: 766255 - DNA, 120 bp, Artificial Sequence
  ENSG00000225614_52 (sequence is synthesized)
gacctggccgcctgcgccccctcacccacttcagccgcccacatgccctgcagccttgggcccctgccccgtgaagacccacttacctcgccttccagggcccaaggtgggctggggggg

SEQ ID NO: 766256 - DNA, 120 bp, Artificial Sequence
  ENSG00000225614_53 (sequence is synthesized)
cagctgccagcatctccgtcctgcagggaccctcccggcccccagcagctgctggcctgttctcctgcctgggcacctctggaagaggcagatggcgtccaagccacgacagatactggg

SEQ ID NO: 766257 - DNA, 120 bp, Artificial Sequence
  ENSG00000225614_54 (sequence is synthesized)
gctgaggattccccggtggctcccccgtctttgacaacaagcccctgcgatcccaaggaagccctggctggttgccttctccagggggagggcagccccctggaagacccttcctcctgg

SEQ ID NO: 766258 - DNA, 120 bp, Artificial Sequence
  ENSG00000225614_55 (sequence is synthesized)
cctggctccgtcagtgctgtaacctgcactcacagtggggacacccccaaagacagcactttaagaattccagaggattccagaaaagagaagctgtgggagtctcctggccgagccacc

SEQ ID NO: 766259 - DNA, 120 bp, Artificial Sequence
  ENSG00000225614_56 (sequence is synthesized)
tctcctcctctggcaggggccgtctcccccagcgtggccgtcagggctactggcctgtccagcactcccaccggagatgaggcacaggcaggcaggggactcccagggccagacccccag

SEQ ID NO: 766260 - DNA, 120 bp, Artificial Sequence
  ENSG00000225614_57 (sequence is synthesized)
agcaggggagccccgccccacaccaaccctgacaggatgcccaggggccactcctcgtattctccaagcaatactgcccgcctcggccacagggagggccaggctgtcacagctgtgccc

SEQ ID NO: 766261 - DNA, 120 bp, Artificial Sequence
  ENSG00000225614_58 (sequence is synthesized)
actgagcctcccacgctacagggtgcagggccggactcccccgcctgcctggaaggtgagatggggaccagcagcaaggagccggaggacccagggacccctgagaccgggcgctctggt

SEQ ID NO: 766262 - DNA, 120 bp, Artificial Sequence
  ENSG00000225614_59 (sequence is synthesized)
gctaccaagatgcccagggtcacctgcccttccacaggactgggcttgggaagaaccacagccccaagcagcacagccagtgacttccagtctgactccccccaaagccacagaaatgcc

SEQ ID NO: 766263 - DNA, 120 bp, Artificial Sequence
  ENSG00000225614_60 (sequence is synthesized)
tcccaccagactccccagggggaccccctcggcccccaagacctcaaacagaggtcccgtggctataaaaagaagcctgcatctacagagaacggccagtggaagggccaagctccacat

SEQ ID NO: 766264 - DNA, 120 bp, Artificial Sequence
  ENSG00000225614_61 (sequence is synthesized)
gggcctgtgacctgtgaggtctgcgcagcctccttccgctccgggccgggcctgagccggcacaaggccaggaagcaccggccacacccgggagcccccgcggagccgagcccagcggcc

SEQ ID NO: 766265 - DNA, 120 bp, Artificial Sequence
  ENSG00000225614_62 (sequence is synthesized)
ttgcctgctcagcagcctctagagcccctagcccaaaagtgccagccgcccaggaagaaaagccacagggtgtctgggaaggagagaccaaatcactcacggggagaccccagccacgtc

SEQ ID NO: 766266 - DNA, 120 bp, Artificial Sequence
  ENSG00000225614_63 (sequence is synthesized)
acccagccaccgcctgcccagggctcaaaggaggttctcagagcaccggggtccccacacagccagcagctgcaccctccaagccctactgagcatgaggtagatgtgaagactccggcc

SEQ ID NO: 766267 - DNA, 120 bp, Artificial Sequence
  ENSG00000225614_64 (sequence is synthesized)
tccaagcccagaccagaccaggccagggaagatgagctgcatcccaaacaggcagaaaaaagagaaggccggaggtggcgccgagagcccaccgtggactctcctagccactcagagggg

SEQ ID NO: 766268 - DNA, 120 bp, Artificial Sequence
  ENSG00000225614_65 (sequence is synthesized)
aagtcaaataagaaaaggggaaagctgagagggagaaggctccgggaggagagcattcttccagtctctgctgatgtgatttcagatgggcgcggctccagaccatcccctgcaatggcc

SEQ ID NO: 766269 - DNA, 120 bp, Artificial Sequence
  ENSG00000225614_66 (sequence is synthesized)
agttacgcagcctctccgagccactgcctctctgtggaaggagggcctgaggctgacggggagcagccgcctcgcttggccactctgggacctggggtgatggagggtgcagcggagact

SEQ ID NO: 766270 - DNA, 120 bp, Artificial Sequence
  ENSG00000225614_67 (sequence is synthesized)
gaccaggaggctctgtgtgcaggggagactggggcccagaagccacctggagatcggatgctgtgtccagggaggatggatggtgcagctctgggggaacagccaactgggcagaaggga

SEQ ID NO: 766271 - DNA, 120 bp, Artificial Sequence
  ENSG00000225614_68 (sequence is synthesized)
gcctcggcaagggggttctggggaccaagagagaccaaggcgttgggtgtgtgcaaagagtctgggagcgagcctgcggaggacagcagcagggcccacagccgatcagaggaaggtgtc

SEQ ID NO: 766272 - DNA, 120 bp, Artificial Sequence
  ENSG00000225614_69 (sequence is synthesized)
tgggaggagaacacgccccccttgggccccctgggttttcccgagacttccagctctccggcggacagcaccaccagcagctgcctccagggcctcccggacaacccagacacccagggt

SEQ ID NO: 766273 - DNA, 120 bp, Artificial Sequence
  ENSG00000225614_70 (sequence is synthesized)
ggagtccaggggcctgaaggccccactcctgatgcctctggctccagtgccaaggatcctccaagcttgtttgatgatgaggtctctttctcccagctcttccctccaggcggtcgcttg

SEQ ID NO: 766274 - DNA, 120 bp, Artificial Sequence
  ENSG00000225614_71 (sequence is synthesized)
actagaaagaggaacccgcatgtctacgggaagcgctgtgagaagccggtgctcccgctgccaacccagcccagctttgaggagggcggtgaccccacgctgggcccagcccgcctgccc

SEQ ID NO: 766275 - DNA, 120 bp, Artificial Sequence
  ENSG00000225614_72 (sequence is synthesized)
acggacctcagcgactccagctccctctgcctctgccatgaggacccgtgggaggacgaggatcccgcaggtctgcccgagtccttcctcctggatgggttcctcaatagcagggtgcct

SEQ ID NO: 766276 - DNA, 120 bp, Artificial Sequence
  ENSG00000225614_73 (sequence is synthesized)
ggcattgacccctgggcccccggcctcagcctgtgggccctggagcccagcagggaagctggtgcagagaagctgccctcccactgccccgaggacgatcggccggaggccattcctgag

SEQ ID NO: 766277 - DNA, 120 bp, Artificial Sequence
  ENSG00000225614_74 (sequence is synthesized)
ctgcacatggtcccagcggcttggcgaggcctggagatgccggcccctgccgatgactcctcctcttctctcggagatgtgagccccgagccccccagcctggagagagaacgctgtgac

SEQ ID NO: 766278 - DNA, 120 bp, Artificial Sequence
  ENSG00000225614_75 (sequence is synthesized)
ggtgggcttcccgggaacacccacctgctgccgctccgtgccacggactttgaggtgctcagcaccaagtttgagatgcaagacctgtgctttctgggaccctttgaagaccccgtgggt

SEQ ID NO: 766279 - DNA, 120 bp, Artificial Sequence
  ENSG00000225614_76 (sequence is synthesized)
ctccccggccccagcttcttagacttcgagggcacggcgagctcacaggggccacagagccgaaggacagaggaggctgcaggggcagggagggcccaaggcagaggccggccggccaag

SEQ ID NO: 766280 - DNA, 120 bp, Artificial Sequence
  ENSG00000225614_77 (sequence is synthesized)
ggcaggcgggcctcctacaagtgcaaagtgtgcttccagcgcttccgcagcctgggcgagctggacctgcacaagctggcccacacgcccgcgccgccgcccacctgctacatgtgcgtg

SEQ ID NO: 766281 - DNA, 120 bp, Artificial Sequence
  ENSG00000225614_78 (sequence is synthesized)
gagcgcaggtttggctcgcgggagctgctgcgggggcacctgcaggagaggcacgcgcagagcaaggccgggccctgggcgtgcggcatgtgcctgaaggaggtggccgacgtctggatg

SEQ ID NO: 766282 - DNA, 120 bp, Artificial Sequence
  ENSG00000225614_79 (sequence is synthesized)
tacaacgagcacctgcgtgagcacgcggtccgcttcgcccgcagggggcaggcgcggaggtccttgggggacctgcccggaggcctggagggcagcagcgctgtcgcccaccttctgaac

SEQ ID NO: 766283 - DNA, 120 bp, Artificial Sequence
  ENSG00000225614_80 (sequence is synthesized)
agcatcacggaacccgcgcccaaacaccacaggggcaagcgctccgccggcaaggccgccgggagcccgggagacccgtgggggcaagagggagaagccaagaaagacagcccgggcgag

SEQ ID NO: 766284 - DNA, 120 bp, Artificial Sequence
  ENSG00000225614_81 (sequence is synthesized)
cgagagggcgaaaccccgggcacgcagcacccccagcaacccagacggggccgcgaccccagacagcgcctctgccaccgccctggctgacgccggcagcccgggcccccccaggacgac

SEQ ID NO: 766285 - DNA, 120 bp, Artificial Sequence
  ENSG00000225614_82 (sequence is synthesized)
agcccgtcccccgacccctgggccggcggggagcccctcctgcaagccaccccggtgcacgaggcctgcaaggacccctcccgcgactgccaccactgcgggaagcgcttccccaagccc

SEQ ID NO: 766286 - DNA, 120 bp, Artificial Sequence
  ENSG00000225614_83 (sequence is synthesized)
ttcaagctgcagcgccacctggcggtgcacagcccgcagcgcgtctacctgtgcccccggtgcccccgggtctaccccgagcacggggagctgctggcacacctgggcggggcgcacggg

SEQ ID NO: 766287 - DNA, 120 bp, Artificial Sequence
  ENSG00000225614_84 (sequence is synthesized)
ctgctggagcggccggagctgcagcacacgccgctgtatgcctgcgagctctgcgccacggttatgcgcatcatcaagaagtccttcgcctgcagctcctgcaactacaccttcgccaag

SEQ ID NO: 766288 - DNA, 120 bp, Artificial Sequence
  ENSG00000225614_85 (sequence is synthesized)
aaggagcagttcgaccgccacatgaacaagcacctcaggggggggcggcagcccttcgcgttccgcggcgtgcggaggccgggagcgccgggacagaaggcccgggccctcgagggcaca

SEQ ID NO: 766289 - DNA, 120 bp, Artificial Sequence
  ENSG00000225614_86 (sequence is synthesized)
ctgcccagcaaacggcgcagggtggccatgcccggcagtgcccctgggcccggcgaggacaggcctcctccccggggaagcagccccatcctgagtgagggctctctcccggccctgctc

SEQ ID NO: 766290 - DNA, 120 bp, Artificial Sequence
  ENSG00000225614_87 (sequence is synthesized)
cacctgtgttcggaggtggctcccagcaccaccaagggatggcccgagaccctagagaggcctgtagaccccgtgacccacccgatcagaggttgtgagctgccatccaaccaccaggag

SEQ ID NO: 766291 - DNA, 120 bp, Artificial Sequence
  ENSG00000225614_88 (sequence is synthesized)
tgtcccccgccgtctctgtctcccttcccagctgccttggctgatggcagaggagactgcgcgctggacggagccctggagaggccagagaacgaggcttccccaggcagccccgggcct

SEQ ID NO: 766292 - DNA, 120 bp, Artificial Sequence
  ENSG00000225614_89 (sequence is synthesized)
cttctccagcaagctctccctctgggggcatctctgccgcggccgggagccagaggccaagatgcggagggaaagagggctcctctcgtgttctcagggaaacgcagggccccgggtgcc

SEQ ID NO: 766293 - DNA, 120 bp, Artificial Sequence
  ENSG00000225614_90 (sequence is synthesized)
cgtggcaggtgtgcccctgaccatttccaggaagaccacctacttcagaaagagaaggaggtgtcctcaagccacatggtgtctgagggggggccccgaggcgccttccacaagggcagc

SEQ ID NO: 766294 - DNA, 120 bp, Artificial Sequence
  ENSG00000225614_91 (sequence is synthesized)
gccaccaagcctgcgggctgccagagctcatcaaaggacaggtcggcagcatccacccccagcaaagcactcaagttcccagtgcacccaaggaaggcggtggggagcctggcacccggg

SEQ ID NO: 766295 - DNA, 120 bp, Artificial Sequence
  ENSG00000225614_92 (sequence is synthesized)
gagctggcccgtggcacagagaatgggatgaagcccgccacccccaaagccaaacccggccccagctcccagggcagtggaagccctcgccccggcaccaagacaggaggtggcagccag

SEQ ID NO: 766296 - DNA, 120 bp, Artificial Sequence
  ENSG00000225614_93 (sequence is synthesized)
ccccagccagccagcgggcagctccagagcgagacagccaccaccccagccaagcccagcttccccagccggagccctgcaccagagaggctccccgctcgagcccaagccaagagctgc

SEQ ID NO: 766297 - DNA, 120 bp, Artificial Sequence
  ENSG00000225614_94 (sequence is synthesized)
accaaggggccaagggaagctggtgagcaggggccccacgggagcctaggtcccaaggagaagggagagagcagtacgaagaggaaaaagggccaggtcccagggccagccaggagtgaa

SEQ ID NO: 766298 - DNA, 120 bp, Artificial Sequence
  ENSG00000225614_95 (sequence is synthesized)
agtgtggggagcttcgggagagccccctcagcccctgacaagcccccccggacccctcggaagcaggcaactcccagccgcgtgctcccgaccaagcccaagcccaacagccagaacaaa

SEQ ID NO: 766299 - DNA, 120 bp, Artificial Sequence
  ENSG00000225614_96 (sequence is synthesized)
cccaggccgccaccatcagagcagcggaaggcagagccgggccacacacagaggaaggacagactgggcaaggccttcccccaggggagacccctgctcaggccccccaagaggggcaca

SEQ ID NO: 766300 - DNA, 120 bp, Artificial Sequence
  ENSG00000225614_97 (sequence is synthesized)
gctgtccacggtgctgaacctgccgagccacacacccaccggacggccgaggcccagagtgacctcctcagccagctcttcgggcagagactaactggcttcaaaatccctttaaagaaa

SEQ ID NO: 766301 - DNA, 120 bp, Artificial Sequence
  ENSG00000225614_98 (sequence is synthesized)
gatgcttccgagtaatttctaggagcaagagcctgggaccggagctgggcgttcctgtctcggcctgcctccttggccagctccggctccctgagatggtccactctgtggccacttgac

SEQ ID NO: 766302 - DNA, 120 bp, Artificial Sequence
  ENSG00000225614_99 (sequence is synthesized)
ttcttgtgcaactgctcaggccttgatgtcagagctgaggtggtgatgctttgaacagggcccaggtgggcagcattccctttcttgctggaaggctgggggtgaaagacggggccactg

SEQ ID NO: 766303 - DNA, 120 bp, Artificial Sequence
  ENSG00000225614_100 (sequence is synthesized)
cagcccttttgagaccacacagctgttttcttggtaccaagtacttgaagagacagcagcccatcccctcagcccacacccctgcgccctgtgggcaccgacaccacagaagccaatgtt

SEQ ID NO: 766304 - DNA, 120 bp, Artificial Sequence
  ENSG00000225614_101 (sequence is synthesized)
tggagatttgcacaacctcccgttcccccacatggagaagggaagtaagttgaggcagccgtgggatggtggtaggttccctcttagtcttgctgctgttgctggaattccaaagtgacc

SEQ ID NO: 766305 - DNA, 120 bp, Artificial Sequence
  ENSG00000225614_102 (sequence is synthesized)
ttagaaaccacgtgggggaaggcagtgctcactacttagaagggttgcttctgagccgcctggtcccccaagagcacaacaggcctcctccctctgaccacagggtcatgcctcctccct

SEQ ID NO: 766306 - DNA, 120 bp, Artificial Sequence
  ENSG00000225614_103 (sequence is synthesized)
ctgaccacagggtcatgccagcctccatttgctctgcgggagaaaagcccatctctagcacaccttgaccccaggaaccgggttcccgtatggaactgggaagaaaccgcccctgtgcca

SEQ ID NO: 766307 - DNA, 120 bp, Artificial Sequence
  ENSG00000225614_104 (sequence is synthesized)
gctcccgcgggccctcctcgttccctcccagcctccatggccgccctctagagcctccctgctgtacggagctctgggctccgcctatttgcaatgttactctgaagtttctggtgctat

SEQ ID NO: 766308 - DNA, 120 bp, Artificial Sequence
  ENSG00000225614_105 (sequence is synthesized)
ttttgtgttgtaatgtgaatacaggcttccttgatttttttttttaatgggggtattgggtgggacagacggggtcagggaggccccaccatggcttgtcgagggcacgggcacctgcat

SEQ ID NO: 766309 - DNA, 120 bp, Artificial Sequence
  ENSG00000225614_106 (sequence is synthesized)
ggcggcgctctccctgcctcccctgccgggctgcaagcctgaggtctgtgctgccagacggggatgctcagggctggggctgcagagccgctgccctggccagggcaccctcatgcaccg

SEQ ID NO: 766310 - DNA, 120 bp, Artificial Sequence
  ENSG00000225614_107 (sequence is synthesized)
acccaacccaggcctgggacgcacgtgtcctctcacagcgtcgtgcctgtgaaggtgggtcaaagggtgagagggcttccttctcacccttctctccataagtatcttgaagatccatgg

SEQ ID NO: 766311 - DNA, 120 bp, Artificial Sequence
  ENSG00000225614_108 (sequence is synthesized)
tttgttttgctctattgtttagtttttacttgggtgcaatgtgtacgtcaaaagtttttattttgatatttgaaagagaccaaatcaggcccagaccgcctctctggaaggtgttgtagg

SEQ ID NO: 766312 - DNA, 120 bp, Artificial Sequence
  ENSG00000225614_109 (sequence is synthesized)
ccattcaaaacgcctccggagtgtcgcaaaccaagtgcggaggggccctgaggttgtactgtaaacatcatagtgacttgtcttttcaaatatattcccactattttcgcagaaaacctc

SEQ ID NO: 766313 - DNA, 80 bp, Artificial Sequence
  ENSG00000225614_110 (sequence is synthesized)
cttcccagcacccggcccagggctggagctggctgcagggctggcccgcggcgacctgggcagggtggcggctgctccct

SEQ ID NO: 766314 - DNA, 120 bp, Artificial Sequence
  ENSG00000225614_111 (sequence is synthesized)
ggtcgggatgaggacggcgcctccgctgcagagcgctggggcggcgcgggccgggagctcgttggcggcggccggcgtggcgggcggagcgggcctcggagcggagccaagaaattctca

SEQ ID NO: 766315 - DNA, 120 bp, Artificial Sequence
  ENSG00000225614_112 (sequence is synthesized)
cgggcggagcgggcctcggagcggagccaagaaattctcattcctcaggaagttgtgcggcgacccagctgaggggcccccgactccccaggctccactcaggaccatgagcgcaggctt

SEQ ID NO: 766316 - DNA, 120 bp, Artificial Sequence
  ENSG00000225614_113 (sequence is synthesized)
ggagctcattctgaagatcgtgcagcagaagaacaggcgccaccggcggctggggcggcgggcgggcaggtgcggctccctggcggcggggaggccccggcccggagctgaggaccgcag

SEQ ID NO: 766317 - DNA, 120 bp, Artificial Sequence
  ENSG00000225663_0 (sequence is synthesized)
acttccggcggggcctcccagctggaagaggcggtggcggcgggtcggggcgagaggctgaggggatctggcggtggagcgctaggatcagacgcccccgcgatgaccagctcccccgtc

SEQ ID NO: 766318 - DNA, 120 bp, Artificial Sequence
  ENSG00000225663_1 (sequence is synthesized)
tccagagtcgtgtacaacggcaagaggaccagcagcccccgctccccacccagcagcagcgagatcttcaccccagcccacgaggagaacgtccgcttcatttacgaagcctggcagggt

SEQ ID NO: 766319 - DNA, 120 bp, Artificial Sequence
  ENSG00000225663_2 (sequence is synthesized)
gtggagcgagacctgcgaggccaggtgccgggtggcgagcggggcctggtggaggagtatgtggagaaggtccctaaccccagcctgaagaccttcaagcccatcgacctgagtgacctg

SEQ ID NO: 766320 - DNA, 120 bp, Artificial Sequence
  ENSG00000225663_3 (sequence is synthesized)
aagcgccggagcacgcaggatgccaagaagtcctagagcgcccggtgcccctccccggcctccggaagatcagggtgcgaggtgtcggttccctcctgtcctgtggtcctgcccctggga

SEQ ID NO: 766321 - DNA, 120 bp, Artificial Sequence
  ENSG00000225663_4 (sequence is synthesized)
tgggggtgccttgctccagcgggctgcagatcccagcactggcgtgactgacggctgaggcctgcctctccttcccaagcccccttccttcatccttgggggtctcaggctgcccccatc

SEQ ID NO: 766322 - DNA, 120 bp, Artificial Sequence
  ENSG00000225663_5 (sequence is synthesized)
cctgacctgacctctctcctctcccctcaccctcctgcccctggccactgcaggatcaggaggggagaagaaggagcctctgctgcctcccaggctgctgggactgggctggttttgtcc

SEQ ID NO: 766323 - DNA, 120 bp, Artificial Sequence
  ENSG00000225663_6 (sequence is synthesized)
ttgaagtggtcaggatacaggacaagggcagccccaccccatccagcctgggctccccgcagacccttgctgctcccgtggcctggacacgctggggagcttctcacacctacccctacc

SEQ ID NO: 766324 - DNA, 120 bp, Artificial Sequence
  ENSG00000225663_7 (sequence is synthesized)
gtccagcctggcctcttccctgaatcagcttcaagatggcaccagctctttgggcctaggatactgccgggccccccaagggggtccccagcaaccaggcctggcctcctggtgtctgcg

SEQ ID NO: 766325 - DNA, 120 bp, Artificial Sequence
  ENSG00000225663_8 (sequence is synthesized)
gtcacagtggcccctgggcaggggcacccaggctgaccctgaggtgctgctgctgggtctgtcttggctctggggtgtgctgggagggtcaccaggtcccttttccttcctgtgccctct

SEQ ID NO: 766326 - DNA, 120 bp, Artificial Sequence
  ENSG00000225663_9 (sequence is synthesized)
gaaagctaagtgtctgtgtggctgtggagctcgagggtctgtgaataaaggcggcggcactgggcgtggcctcttggtggtctgtcaggcctctgcccctgcggcacacatgcacagcca

SEQ ID NO: 766327 - DNA, 120 bp, Artificial Sequence
  ENSG00000225663_10 (sequence is synthesized)
gttgcttgggaggatgtggggcaatcagtgggatctggggcaggagtgacaaccgaacccagcagggggatcccaggccaaaggtgtggctgcataaaggccaagtggccactggaggca

SEQ ID NO: 766328 - DNA, 120 bp, Artificial Sequence
  ENSG00000225663_11 (sequence is synthesized)
gaggatgcatggggagaagagccacgggagagggcaggctgggaggcaggtacccctaaagcagcagtcggtcagtggtgagagccagcagggggcgaggcagggggctggccagtctac

SEQ ID NO: 766329 - DNA, 120 bp, Artificial Sequence
  ENSG00000225663_12 (sequence is synthesized)
ctgttacctgagctctgcctttctctgtaacgggagcttcccagcaggcagcatgtccctgtgggaccctcaacccaaacaggcctttccctccgtgctctggtgttcgtgggctggagt

SEQ ID NO: 766330 - DNA, 120 bp, Artificial Sequence
  ENSG00000225663_13 (sequence is synthesized)
ccctggcaggaggactgggcagagagaccccagagtccaagaaaggagaggtgactttgtgagcaaactgggtgctgccgtgggtggggagcccctggccctttttggacctcactcctg

SEQ ID NO: 766331 - DNA, 120 bp, Artificial Sequence
  ENSG00000225663_14 (sequence is synthesized)
gcctgggatggggcacagagttccagggctgggagctggttttctgctctttgctggttttgcccttgagccgtgggattcttatcacgtggtgtttgagggctggaccattgacatgag

SEQ ID NO: 766332 - DNA, 120 bp, Artificial Sequence
  ENSG00000225663_15 (sequence is synthesized)
gcggaatgagccagagaggactcgaagcctcagtgctcctggccctctgtgagggctgcagccgtgtgccctggagtatctgcagccttgggcctctgggtgggcaggggagttgcttgt

SEQ ID NO: 766333 - DNA, 120 bp, Artificial Sequence
  ENSG00000225663_16 (sequence is synthesized)
gctcaaagccccctcctgggaatcctgggactcccctcccccagaacctggagttgccccctctggagcagggcaggctggagaccagccctgtcagcttccccaccttggggttgtgtg

SEQ ID NO: 766334 - DNA, 120 bp, Artificial Sequence
  ENSG00000225663_17 (sequence is synthesized)
tcctcagctggagtggggacactgtccagcctgccagtgtgagcgtctgagcctcaaaatagactccatttttccagagccgtggattcccctgggctgggaggccataaacgggcggca

SEQ ID NO: 766335 - DNA, 120 bp, Artificial Sequence
  ENSG00000225663_18 (sequence is synthesized)
gcccagggtcttggtcaccaggtcaggcccagcagcttcctccagggccaccccctctgcccaccaggggagctggagtttggttccatctccagggtactgatgtggctcatgctctag

SEQ ID NO: 766336 - DNA, 120 bp, Artificial Sequence
  ENSG00000225663_19 (sequence is synthesized)
ggaaccaggaagctggacctgggtaggtgccggggagctgggatcacctttaggaagctcatccccgttttacagaaaggaaatcaaggctcagcagaagccgtgtgcccagccctgcac

SEQ ID NO: 766337 - DNA, 120 bp, Artificial Sequence
  ENSG00000225663_20 (sequence is synthesized)
cagggagagcagggtcagttagctgaggggctgcaggccctctgctgcagtgagaggcagctggacatcagagatgctgacggccccaccagcccacgtggggaggggctctggccacag

SEQ ID NO: 766338 - DNA, 120 bp, Artificial Sequence
  ENSG00000225663_21 (sequence is synthesized)
ggctgaggcctccacgtctgagcctgagacgtggaggatcaaggccgctgagcgggcttgatcgcttcaagttgtgtgtgtgtctggctcgtctggccagctctctgctacctcgtaggg

SEQ ID NO: 766339 - DNA, 120 bp, Artificial Sequence
  ENSG00000225663_22 (sequence is synthesized)
ttgcctggagcccactggctgcctgtggctggaccccagcctgtgggggacaccctggtaggcagagggaccatgcactttgttcacatctgaagggaggaggcaggtgtgccctgcgcc

SEQ ID NO: 766340 - DNA, 71 bp, Artificial Sequence
  ENSG00000225663_23 (sequence is synthesized)
attacaagcgtgagccaccgtgcctgggctttttttttttttttgacacagcctgcagccttgacctcctg

SEQ ID NO: 766341 - DNA, 120 bp, Artificial Sequence
  ENSG00000225663_24 (sequence is synthesized)
gcctctgagtagctgggactacaagtgcatgctgccacaccaggtgtgttcatatgggtgtgtgccgcatgtgtgtgggcaggtgtgtacagacaggtgtgtgcgggcggttgtatgcat

SEQ ID NO: 766342 - DNA, 120 bp, Artificial Sequence
  ENSG00000225663_25 (sequence is synthesized)
tagaggcctagctgaggaggatgcgctgcctccgaggcgcagggaagcctggggtagggtcataggggtccctctgaccacagtcctggtcatcttgcggggaagggacaggcctgccag

SEQ ID NO: 766343 - DNA, 120 bp, Artificial Sequence
  ENSG00000225697_0 (sequence is synthesized)
gccttccggagcgtagcggcctctagctcgagcagcaggagcagcccgcaccggacaacttgcgagccatggggctggcggatgcgtcgggaccgagggacacacaggcactgctgtctg

SEQ ID NO: 766344 - DNA, 120 bp, Artificial Sequence
  ENSG00000225697_1 (sequence is synthesized)
caacacaagcaatggacctgcggaggcgagactaccacatggaacggccgctgctgaaccaggagcatttggaggagctggggcgctggggctcagcacctaggacccaccagtggcgga

SEQ ID NO: 766345 - DNA, 120 bp, Artificial Sequence
  ENSG00000225697_2 (sequence is synthesized)
cctggttgcagtgctcccgtgctcgggcctatgcccttctgctccaacacctcccggttttggtctggttaccccggtatcctgtgcgtgactggctcctgggtgacctgttatccggcc

SEQ ID NO: 766346 - DNA, 120 bp, Artificial Sequence
  ENSG00000225697_3 (sequence is synthesized)
tgagtgtggccatcatgcagcttccgcagggcttggcctacgccctcctggctggattgccccccgtgtttggcctctatagctccttctaccctgtcttcatctacttcctgtttggca

SEQ ID NO: 766347 - DNA, 120 bp, Artificial Sequence
  ENSG00000225697_4 (sequence is synthesized)
cttcccggcacatctccgtggggacctttgctgtcatgtctgtgatggtgggcagtgtgacagaatccctggccccgcaggccttgaacgactccatgatcaatgagacagccagagatg

SEQ ID NO: 766348 - DNA, 120 bp, Artificial Sequence
  ENSG00000225697_5 (sequence is synthesized)
ctgcccgggtacaggtggcctccacactcagtgtcctggttggcctcttccaggtggggctgggcctgatccacttcggcttcgtggtcacctacctgtcagaacctcttgtccgaggct

SEQ ID NO: 766349 - DNA, 120 bp, Artificial Sequence
  ENSG00000225697_6 (sequence is synthesized)
ataccacagctgcagctgtgcaggtcttcgtctcacagctcaagtatgtgtttggcctccatctgagcagccactctgggccactgtccctcatctatacagtgctggaggtctgctgga

SEQ ID NO: 766350 - DNA, 120 bp, Artificial Sequence
  ENSG00000225697_7 (sequence is synthesized)
agctgccccagagcaaggttggcaccgtggtcactgcagctgtggctggggtggtgctcgtggtggtgaagctgttgaatgacaagctgcagcagcagctgcccatgccgatacccgggg

SEQ ID NO: 766351 - DNA, 120 bp, Artificial Sequence
  ENSG00000225697_8 (sequence is synthesized)
agctgctcacgctcatcggggccacaggcatctcctatggcatgggtctaaagcacagatttgaggtagatgtcgtgggcaacatccctgcagggctggtgcccccagtggcccccaaca

SEQ ID NO: 766352 - DNA, 120 bp, Artificial Sequence
  ENSG00000225697_9 (sequence is synthesized)
cccagctgttctcaaagctcgtgggcagcgccttcaccatcgctgtggttgggtttgccattgccatctcactggggaagatcttcgccctgaggcacggctaccgggtggacagcaacc

SEQ ID NO: 766353 - DNA, 120 bp, Artificial Sequence
  ENSG00000225697_10 (sequence is synthesized)
ggagagcaccgggggcaactcgcaggttgctggagccatctcttcccttttcatcctcctcatcattgtcaaacttggggaactcttccatgacctgcccaaggcggtcctggcagccat

SEQ ID NO: 766354 - DNA, 120 bp, Artificial Sequence
  ENSG00000225697_11 (sequence is synthesized)
catcattgtgaacctgaagggcatgctgaggcagctcagcgacatgcgctccctctggaaggccaatcgggcggatctgcttatctggctggtgaccttcacggccaccatcttgctgaa

SEQ ID NO: 766355 - DNA, 120 bp, Artificial Sequence
  ENSG00000225697_12 (sequence is synthesized)
cctggaccttggcttggtggttgcggtcatcttctccctgctgctcgtggtggtccggacacagatgccccactactctgtcctggggcaggtgccagacacggatatttacagagatgt

SEQ ID NO: 766356 - DNA, 120 bp, Artificial Sequence
  ENSG00000225697_13 (sequence is synthesized)
ggcagagtactcagaggccaaggaagtccggggggtgaaggtcttccgctcctcggccaccgtgtactttgccaatgctgagttctacagtgatgcgctgaagcagaggtgtggtgtgga

SEQ ID NO: 766357 - DNA, 120 bp, Artificial Sequence
  ENSG00000225697_14 (sequence is synthesized)
tgtcgacttcctcatctcccagaagaagaaactgctcaagaagcaggagcagctgaagctgaagcaactgcagaaagaggagaagcttcggaaacaggctgcctcccccaagggcgcctc

SEQ ID NO: 766358 - DNA, 120 bp, Artificial Sequence
  ENSG00000225697_15 (sequence is synthesized)
agtttccattaatgtcaacaccagccttgaagacatgaggagcaacaacgttgaggactgcaagatgatgcaggtgagctcaggagataagatggaagatgcaacagccaatggtcaaga

SEQ ID NO: 766359 - DNA, 120 bp, Artificial Sequence
  ENSG00000225697_16 (sequence is synthesized)
agactccaaggccccagatgggtccacactgaaggccctgggcctgcctcagccagacttccacagcctcatcctggacctgggtgccctctcctttgtggacactgtgtgcctcaagag

SEQ ID NO: 766360 - DNA, 120 bp, Artificial Sequence
  ENSG00000225697_17 (sequence is synthesized)
cctgaagaatattttccatgacttccgggagattgaggtggaggtgtacatggcggcctgccacagccctgtggtcagccagcttgaggctgggcacttcttcgatgcatccatcaccaa

SEQ ID NO: 766361 - DNA, 120 bp, Artificial Sequence
  ENSG00000225697_18 (sequence is synthesized)
gaagcatctctttgcctctgtccatgatgctgtcacctttgccctccaacacccgaggcctgtccccgacagccctgtttcggtcaccagactctgaacatgctacatcctgcccaagac

SEQ ID NO: 766362 - DNA, 120 bp, Artificial Sequence
  ENSG00000225697_19 (sequence is synthesized)
tgcacctctggaggtgcagggcacccttgagaagcccctcacccctaggccgcctccaggtgctacccaggagtcccctccatgtacacacacacaactcagggaaggaggtcctgggac

SEQ ID NO: 766363 - DNA, 120 bp, Artificial Sequence
  ENSG00000225697_20 (sequence is synthesized)
tccaagttcagcgctccaggtctgggacagggcctgcatgcagtcaggctggcagtggcgcggtacagggagggaactggtgcatattttagcctcaggaataaagatttgtctgctcaa

SEQ ID NO: 766364 - DNA, 120 bp, Artificial Sequence
  ENSG00000225697_21 (sequence is synthesized)
aaagaggctttctcaccagccaaagttcaggtactgcccctgtctgagtttggacatgtggcccacagatgccagctgggggctggaatactgtaccttgatcttagggcctggaaaaat

SEQ ID NO: 766365 - DNA, 120 bp, Artificial Sequence
  ENSG00000225697_22 (sequence is synthesized)
caggtaggtaactctctggtcctaggtggaggtgtaggggaggttgggccagggatgccttcactgtgtctctctggtcttgccaccccagaccgagggacacacaggcactgctgtctg

SEQ ID NO: 766366 - DNA, 120 bp, Artificial Sequence
  ENSG00000225697_23 (sequence is synthesized)
ggtgccagcacctgcctccctgactctgtcctctcccacagctcatcggggccacaggcatctcctatggcatgggtctaaagcacagatttgaggctggtgcccccagtggcccccaac

SEQ ID NO: 766367 - DNA, 120 bp, Artificial Sequence
  ENSG00000225697_24 (sequence is synthesized)
tgagagagtaccacagggctccccgcagctttccccacatctctggggacttcaggctccttcggacccctctgttatcccctttttctgccccctcttcgtgcattctctctctccttc

SEQ ID NO: 766368 - DNA, 120 bp, Artificial Sequence
  ENSG00000225697_25 (sequence is synthesized)
ctttcccccacttcaagtgggtacttccctttccatgtgggagcctctccctctaggtgagagattgccactccaagagcaagctccttctcaggtgagagccagtccttggcttcccca

SEQ ID NO: 766369 - DNA, 120 bp, Artificial Sequence
  ENSG00000225697_26 (sequence is synthesized)
taacaggcctgagccgtctacaacctggaccctggggctggaggcccaggggcaagcttggctccaacactttccttcccttagaggggagggtctcatctgaggcctgaggcttgggaa

SEQ ID NO: 766370 - DNA, 120 bp, Artificial Sequence
  ENSG00000225697_27 (sequence is synthesized)
aggagttgcttgaggagctggacccctggtttgctggaccccttccctgagtgtgctctcagccagcagtgggctcccggggcagctggaggaggacctggggactggagagggactggg

SEQ ID NO: 766371 - DNA, 120 bp, Artificial Sequence
  ENSG00000225697_28 (sequence is synthesized)
tgggggagggagcagcctgggacctggactggtagaacactcagcactgggctgccacatctcggctggaggtatagctagtgctcatcctgcagtccctacttgggggactttgtccta

SEQ ID NO: 766372 - DNA, 120 bp, Artificial Sequence
  ENSG00000225697_29 (sequence is synthesized)
agggcagcattggtgctgcatccctgggctagcccacgagtcatccccaggcaggactagacccctgactgtaggaccacagaggcaggtgacctcaaagccctggctccaggaagatga

SEQ ID NO: 766373 - DNA, 120 bp, Artificial Sequence
  ENSG00000225697_30 (sequence is synthesized)
gagtgggtgaggcagcccaaggggcctggaacttggcagaggcctgagcagcctaaggccagccctgaccccttccctactccacagagagcctctgtgtcccgggaccagtagacacag

SEQ ID NO: 766374 - DNA, 120 bp, Artificial Sequence
  ENSG00000225697_31 (sequence is synthesized)
gtgggacagggtagatgagacagggccagcatttctagccatgcttaagggcctgtgagctcagggtttactcctggcctggccaaacctgaaccgccagcactgtccctgttcatgcag

SEQ ID NO: 766375 - DNA, 120 bp, Artificial Sequence
  ENSG00000225697_32 (sequence is synthesized)
ccataatctgagtacatttatccagaactggaagtctcctggcctctctcttaagaccagggctccagggcagggcagtgtcctctcctcttcagacctgccccgtgccgtccttacagg

SEQ ID NO: 766376 - DNA, 120 bp, Artificial Sequence
  ENSG00000225697_33 (sequence is synthesized)
cacactcagtgtcctggttggcctcttccaggtgtggaacagtcaggagtatgtgccccccaccaccacttctgctcccgccactgtcctgtctgtactcccctgagtgtctgaccatcg

SEQ ID NO: 766377 - DNA, 120 bp, Artificial Sequence
  ENSG00000225697_34 (sequence is synthesized)
tcgtcctcctcttgccgtctactcatccccctcccatcccacttgccctgcgctcctcattagcaaccccaggacccctgcctctcctgactgcccctggccgccccacaggtggggctg

SEQ ID NO: 766378 - DNA, 120 bp, Artificial Sequence
  ENSG00000225697_35 (sequence is synthesized)
gaggggggctgggagggttcttgggtattgtggggggcacagcagaaagcccctatgttggtttcttcctgcccctgacagcatctccccatagccgaaatggtgttgcctgtctctcac

SEQ ID NO: 766379 - DNA, 120 bp, Artificial Sequence
  ENSG00000225697_36 (sequence is synthesized)
ggtctaaagcacagatttgaggtagatgtcgtgggcaacatccctgcagggtgagctctggcctccatcaggtcagggagggttgggcagccaggacaggaccttgctttggcctcacag

SEQ ID NO: 766380 - DNA, 120 bp, Artificial Sequence
  ENSG00000225697_37 (sequence is synthesized)
agcttcggaaacaggcagggccccttttgtctggtgacccccatctcctgccccctgttccctgccccagcctttctcctggcccccgactcctccctcgtcctcactcctcatcccttc

SEQ ID NO: 766381 - DNA, 120 bp, Artificial Sequence
  ENSG00000225697_38 (sequence is synthesized)
ccctttctccctcatgctcccagggaccctgcttcactcccctagcaggtccgggctctaggcagcattttctctcccatcatctgaaccagtgacagtgagaaccgtcacagtcctctt

SEQ ID NO: 766382 - DNA, 120 bp, Artificial Sequence
  ENSG00000225697_39 (sequence is synthesized)
ccctttcacggctgttccaggagcttcagcctggctgctgcaggtcccacagcttctggtcctggcccacccacctgcccagcaccagggggcatcaccaggcctatgtgacatggctgt

SEQ ID NO: 766383 - DNA, 120 bp, Artificial Sequence
  ENSG00000225697_40 (sequence is synthesized)
catggcagccgggctagctgtttcccattccctgtcttccctggtgtaggctgcctcccccaagggcgcctcagtttccattaatgtcaacaccagccttgaagacatgaggagcaacaa

SEQ ID NO: 766384 - DNA, 120 bp, Artificial Sequence
  ENSG00000225697_41 (sequence is synthesized)
cgttgaggactgcaagatgatggtgagactggaggtgggaaaggaggtgacagctgtgagctgcagagatgcaggatccacatgtctcatgaggaatgccatggacccagcagctgtggg

SEQ ID NO: 766385 - DNA, 120 bp, Artificial Sequence
  ENSG00000225697_42 (sequence is synthesized)
ctcgagggtgttgcgccgatggcaggaggagtggggaggctgggtcagatattcttcagggagcgtcgtgatatgccacagaatctaggcttagattctcaggcctagatgaagaccttg

SEQ ID NO: 766386 - DNA, 120 bp, Artificial Sequence
  ENSG00000225697_43 (sequence is synthesized)
aatttgtagatcccacaagacttcccccagagtctgctcatgggtagaggaaagggatggggtatatgggagaaaatcaaggggtcaaaggcaggcgtggtggtacgcgcctgtagtccc

SEQ ID NO: 766387 - DNA, 120 bp, Artificial Sequence
  ENSG00000225697_44 (sequence is synthesized)
agctcttcgggaggctaaggcgggaaaatcatttgagcccaggagctcggggctgcagtgcgctctaatggtgcctgtgaataaccactgcattcagcctgggcaatgaagcgagacccc

SEQ ID NO: 766388 - DNA, 120 bp, Artificial Sequence
  ENSG00000225697_45 (sequence is synthesized)
gtctctaaaaaaaaaattgaggggtcaaagaggatgccaaacttaattagagactgagacagggcagggtgccgaggtgtctgcatgcgtttcatgtggatgcccgtgtctattctggcc

SEQ ID NO: 766389 - DNA, 120 bp, Artificial Sequence
  ENSG00000225697_46 (sequence is synthesized)
tgctcctgggccccctccccactcagccctggctgatgagaatgggacagggactcccttctcgtgtccctgtgcagcgtcggcccaggaggtagcagagcagtatatgcacatctgggt

SEQ ID NO: 766390 - DNA, 120 bp, Artificial Sequence
  ENSG00000225697_47 (sequence is synthesized)
gtgccctcctgcatgtccccacacatctgtcattcctgtctttgcacacctatgtgactcccgcatgtttgtgtccttatgtgtcccatgcatgctccccatctgaccttgcgtgttctc

SEQ ID NO: 766391 - DNA, 120 bp, Artificial Sequence
  ENSG00000225697_48 (sequence is synthesized)
gcgtgtctgtgtgcggccagtcctgccttcactctctcatgggtggccctggcagcatgtctggctccccagcaggtgagctcaggagataagatggaagatgcaacagccaatggtcaa

SEQ ID NO: 766392 - DNA, 120 bp, Artificial Sequence
  ENSG00000225697_49 (sequence is synthesized)
cacatctccgtgggtggggctgggcctgatccacttcggcttcgtggtcacctacctgtcagaacctcttgtccgaggctataccacagctgcagctgtgcaggtcttcgtctcacagct

SEQ ID NO: 766393 - DNA, 120 bp, Artificial Sequence
  ENSG00000225697_50 (sequence is synthesized)
atggaggcgccagcaacgggtgggggaggaaccggtgggacacagggagacagcagatgtgctgaggccacgtgggggactgagggtgggagagcaggacgtgtgggacagcatccagtc

SEQ ID NO: 766394 - DNA, 120 bp, Artificial Sequence
  ENSG00000225697_51 (sequence is synthesized)
tctgggggccacttggtggggatggagattggggatgcacaggcctagatacagtggaacagtgaccagccacttctaggaagtcttctcacacccgtactgtcccccgtcaggagctgg

SEQ ID NO: 766395 - DNA, 120 bp, Artificial Sequence
  ENSG00000225697_52 (sequence is synthesized)
ccagccaaagttcaggtactgcccctgtctgagtttggacatgtggcccacagatgccagctgggggctggaatactgtaccttgatcttagggcctggaaaaatcagaccgagggacac

SEQ ID NO: 766396 - DNA, 73 bp, Artificial Sequence
  ENSG00000225698_0 (sequence is synthesized)
gtggagtctgggggaggcttggtccagcctggaccactacatggactgggtccgccaggctccagggaagggg

SEQ ID NO: 766397 - DNA, 120 bp, Artificial Sequence
  ENSG00000225698_1 (sequence is synthesized)
tacgccgcgtctgtgaaaggcagattcaccatctcaagagatgattcaaagaactcactgtatctgcaaatgaacagcctgaaaaccgaggacacggccgtgtattactgtgctagagac

SEQ ID NO: 766398 - DNA, 78 bp, Artificial Sequence
  ENSG00000225698_2 (sequence is synthesized)
agctctgagagcggagccccagccccagaattcccaggtgttttcattggctgagctgggttttccttgttgttattt

SEQ ID NO: 766399 - DNA, 120 bp, Artificial Sequence
  ENSG00000225781_0 (sequence is synthesized)
cagggccccatactgtggatcatggcaaatctgagccagccctccgaatttgtcctcttgggcttctcctcctttggtgagctgcaggcccttctgtatggccccttcctcatgctttat

SEQ ID NO: 766400 - DNA, 120 bp, Artificial Sequence
  ENSG00000225781_1 (sequence is synthesized)
cttctcgccttcatgggaaacaccatcatcatagttatggtcatagctgacacccacctacatacacccatgtacttcttcctgggcaatttttccctgctggagatcttggtaaccatg

SEQ ID NO: 766401 - DNA, 120 bp, Artificial Sequence
  ENSG00000225781_2 (sequence is synthesized)
actgcagtgcccaggatgctctcagacctgttggtcccccacaaagtcattaccttcactggctgcatggtccagttctacttccacttttccctggggtccacctccttcctcatcctg

SEQ ID NO: 766402 - DNA, 120 bp, Artificial Sequence
  ENSG00000225781_3 (sequence is synthesized)
acagacatggcccttgatcgctttgtggccatctgccacccactgcgctatggcactctgatgagccgggctatgtgtgtccagctggctggggctgcctgggcagctcctttcctagcc

SEQ ID NO: 766403 - DNA, 120 bp, Artificial Sequence
  ENSG00000225781_4 (sequence is synthesized)
ctgtgacaatgaacctctcctgcagttgtcatgctctgacactcgcctgttggaattctgggactttctgatggccttgacctttgtcctcagctccttcctggtgaccctcatctccta

SEQ ID NO: 766404 - DNA, 120 bp, Artificial Sequence
  ENSG00000225781_5 (sequence is synthesized)
tggctacatagtgaccactgtgctgcggatcccctctgccagcagctgccagaaggctttctccacttgcgggtctcacctcacactggtcttcatcggctacagtagtaccatctttct

SEQ ID NO: 766405 - DNA, 120 bp, Artificial Sequence
  ENSG00000225781_6 (sequence is synthesized)
gtatgtcaggcctggcaaagctcactctgtgcaagtcaggaaggtcgtggccttggtgacttcagttctcaccccctttctcaatccctttatccttaccttctgcaatcagacagttaa

SEQ ID NO: 766406 - DNA, 120 bp, Artificial Sequence
  ENSG00000225781_7 (sequence is synthesized)
aacagtgctacaggggcagatgcagaggctgaaaggcctttgcaaggcacaatgatgagcccagggcccaggggaacctggcctgcctccattgagcagttctgtggggagggagacctc

SEQ ID NO: 766407 - DNA, 120 bp, Artificial Sequence
  ENSG00000225805_0 (sequence is synthesized)
gaatattatcattgcagactgaagtgcaatgctgatgaacatgcaattagatactgtgctgacttcagcatctgctgcaaactgaagatcattcaaattgatggacaaaagaagtggtga

SEQ ID NO: 766408 - DNA, 120 bp, Artificial Sequence
  ENSG00000225828_0 (sequence is synthesized)
gcgcgaccccgtctccaggcgccatggccagaggcctccagtccccgattctggcccgcgctgagtgccaggggcggcagggggcaccgttgggggttctccagtgggaggaacgtgctc

SEQ ID NO: 766409 - DNA, 120 bp, Artificial Sequence
  ENSG00000225828_1 (sequence is synthesized)
tgtgaggtcagcgcgccgcggcccgggtcacaatgctgccctcctcgacgcccgggcccgggcacgccacagagacctgcccggctccgcctggaccggagcgttctcccgcggccaggg

SEQ ID NO: 766410 - DNA, 120 bp, Artificial Sequence
  ENSG00000225828_2 (sequence is synthesized)
tccccattgaggccggagactcccgtggccttgccgccgcccccgagtcccaggacagcccggaggcggtagcgacggagcacaacccggtcaggccgcttcgtcgctgccctggatgcc

SEQ ID NO: 766411 - DNA, 120 bp, Artificial Sequence
  ENSG00000225828_3 (sequence is synthesized)
actgcctgacgctgctgcacgtgcccatcgacgtctacctcgccatgggcgggagcccccgggcccgcgccacgtgagtgcgcctgctccctgcggctccgcgggagctgggcgggaacg

SEQ ID NO: 766412 - DNA, 120 bp, Artificial Sequence
  ENSG00000225828_4 (sequence is synthesized)
aggcccccagcgggccaccacgctgaggtcgcatgcgccgagcacgagacaatgatgcacattttaaaataaaagaatgatgcacattttaataaagcacagcacaaactgttctttcca

SEQ ID NO: 766413 - DNA, 120 bp, Artificial Sequence
  ENSG00000225828_5 (sequence is synthesized)
ttcttcaattgaaggccggaggatcatatcgggttccaggagcctcttgagcaggtcctggcaatcggccgagatgctcagatgagtggggaaggacacccccttctgctgctgccacag

SEQ ID NO: 766414 - DNA, 120 bp, Artificial Sequence
  ENSG00000225828_6 (sequence is synthesized)
catcttggggatgtctgtgtcgtcaaaaggtaggctggcacagagcatgacatacaggaccacacccatgctccagacatcaccttttttgctatcgtggggaatgccctgcagcacctc

SEQ ID NO: 766415 - DNA, 120 bp, Artificial Sequence
  ENSG00000225828_7 (sequence is synthesized)
gggggcagcataggctgtactgccgcagaaggtctggctcagctcccggtgtgacttgggcaacaccttggcaaagccaaagtcagtcagcttcaggttgaagccctgcaacaaggcgtt

SEQ ID NO: 766416 - DNA, 120 bp, Artificial Sequence
  ENSG00000225828_8 (sequence is synthesized)
ctcacatttgaggtcccggtgggccacaccacagccatggcagtagcggatggcctcaaccatctgacggaagagggccttggcccggctttcaggcagtggccccccattcagcacgca

SEQ ID NO: 766417 - DNA, 120 bp, Artificial Sequence
  ENSG00000225828_9 (sequence is synthesized)
gtcaaagacatcccctccctcagcgagctccatcaccaggcagattttcccgtcggcagactccagcatctcatacacctggatgatgttcttgtggtccagggtacggacgatttggag

SEQ ID NO: 766418 - DNA, 120 bp, Artificial Sequence
  ENSG00000225828_10 (sequence is synthesized)
ctcccgagggaggaatctctggataaactctgaggaagtaaggggaggagagatgggctggcagatcagaaaggcccacctcctcacacctgtctcctgccttccaacttctgcccacct

SEQ ID NO: 766419 - DNA, 120 bp, Artificial Sequence
  ENSG00000225828_11 (sequence is synthesized)
tgtctgggtcttatttcttggctttcttaatggtcttaagtgtgtctagctgcttggacattgcaaagaatgttcacttctattatttttgtcgttagtatatcattcaaaagaagcact

SEQ ID NO: 766420 - DNA, 120 bp, Artificial Sequence
  ENSG00000225828_12 (sequence is synthesized)
ccccaccagccttgtggactgttgtgagcagtctgtgagactggatatcaaggtgctttagggacttttagacaaagccacagaatcacaaattataaggcctgatttgtccacagggtg

SEQ ID NO: 766421 - DNA, 120 bp, Artificial Sequence
  ENSG00000225828_13 (sequence is synthesized)
gtgagccagctcctcccgccactgtcccctgaccccacaattctttccatgagccctgtcttcctttttcccatctccacgggccttggcaccagcccctgttctctaccagccctggtt

SEQ ID NO: 766422 - DNA, 120 bp, Artificial Sequence
  ENSG00000225828_14 (sequence is synthesized)
gtggcctctgccagtctctgttcccctgccggaaaggaaagcctggctcaggttttgcctctgaggatccttcacctcatgccactttcatcttgcattctgggggggtgtaatgttcct

SEQ ID NO: 766423 - DNA, 120 bp, Artificial Sequence
  ENSG00000225828_15 (sequence is synthesized)
ggactcccagaacccctctgttccccactgacccactccagagctgccatcgggcttgcttggttccaggccagcgggagcagggaatgatcgaatgatcgttctaacaaacaggaggaa

SEQ ID NO: 766424 - DNA, 120 bp, Artificial Sequence
  ENSG00000225828_16 (sequence is synthesized)
aatgcttctttgacttttgagtaggtcccttccccaatggtcttgcccagctggtacccattggagagcagaaagtcctccatgctgtctagcgccgccttcctatcaccctctcagctc

SEQ ID NO: 766425 - DNA, 120 bp, Artificial Sequence
  ENSG00000225828_17 (sequence is synthesized)
atgctgcctctgagaggcagctctactccaccatcgcccttggcctgctccttttctccccaaggacttcatccgcagccgcccccagcgttagaacattctctgtctggacacagcggc

SEQ ID NO: 766426 - DNA, 120 bp, Artificial Sequence
  ENSG00000225828_18 (sequence is synthesized)
gggtggtggggagggacagggccagacatttttaaactccggtgcaattgtgatgtagatgctgtgtgacccttggccaaaatgggcagtgcccctacctgccctcactaccaccaccaa

SEQ ID NO: 766427 - DNA, 120 bp, Artificial Sequence
  ENSG00000225828_19 (sequence is synthesized)
actcagcccggattaagtcaccgccgagcccgcccccgtgccaggcattgagttgtagtcccgcctgggagggcgctccgccgcgtctgtgtggaccgggaatgcgcggctcctcggcgt

SEQ ID NO: 766428 - DNA, 120 bp, Artificial Sequence
  ENSG00000225828_20 (sequence is synthesized)
gcgaggcggcggcgcccggcgacccgggagaggcctgaccgccactccccgcgcagagcgccccggggcttggacatgagcgcccaggagcccccgcagggtcggagattccccattgag

SEQ ID NO: 766429 - DNA, 120 bp, Artificial Sequence
  ENSG00000225828_21 (sequence is synthesized)
ttccccattgaggccggagactcccgtggccttgccgccgcccccgagtcccaggacagcccggaggcggtagcgacggagcacaacccggtcagcggcccctgtcgcgcgtcaatttcc

SEQ ID NO: 766430 - DNA, 120 bp, Artificial Sequence
  ENSG00000225830_0 (sequence is synthesized)
gccacgggcctccccgcaccagcagaagtcggagtcgctgttgggggcggtgtctatggttgagctgagggcgcaggcgccacggcccgtcgagctgggttccaaggcggctggcggcgg

SEQ ID NO: 766431 - DNA, 120 bp, Artificial Sequence
  ENSG00000225830_1 (sequence is synthesized)
tagcgtctctgtttccttgtgggcgctcgcgcggccctgggtagtctgtagagaatgccaaatgagggaatcccccactcaagtcaaactcaggagcaagactgtttacagagtcaacct

SEQ ID NO: 766432 - DNA, 120 bp, Artificial Sequence
  ENSG00000225830_2 (sequence is synthesized)
gtcagtaataatgaagaaatggcaatcaagcaagaaagtggtggtgatggggaggtggaggagtacctctcctttcgttctgtgggtgacgggctgtccacctctgctgtggggtgcgca

SEQ ID NO: 766433 - DNA, 120 bp, Artificial Sequence
  ENSG00000225830_3 (sequence is synthesized)
tcagcagctccgaggagagggccagccctgctgcacatcgaccgacatcagatccaggcagtagagcctagcgcccaggcccttgagctgcagggtttgggtgtggacgtctatgaccag

SEQ ID NO: 766434 - DNA, 120 bp, Artificial Sequence
  ENSG00000225830_4 (sequence is synthesized)
gacgtgctggaacagggagtgcttcagcaggtggacaatgccatccatgaggccagccgtgcctcccagctcgttgacgtggagaaggagtatcggtcggtcctggatgacctcacgtca

SEQ ID NO: 766435 - DNA, 120 bp, Artificial Sequence
  ENSG00000225830_5 (sequence is synthesized)
tgtacgacatccctaaggcaaatcaataaaattattgaacagcttagccctcaagctgccaccagcagagacatcaacaggaaactagattctgtaaaacgacagaagtataataaggaa

SEQ ID NO: 766436 - DNA, 120 bp, Artificial Sequence
  ENSG00000225830_6 (sequence is synthesized)
caacagctaaaaaagatcactgcaaaacaaaagcatctccaggccatccttggaggagcagaggtgaaaattgaactagatcacgccagtctggaggaggatgcagagccggggccatcc

SEQ ID NO: 766437 - DNA, 120 bp, Artificial Sequence
  ENSG00000225830_7 (sequence is synthesized)
agtcttggcagcatgctcatgcctgtccaggagactgcctgggaagagctcatccgcactggccagatgacaccttttggtacccagatccctcagaaacaggagaaaaagcccagaaaa

SEQ ID NO: 766438 - DNA, 120 bp, Artificial Sequence
  ENSG00000225830_8 (sequence is synthesized)
atcatgcttaatgaagcatcaggcttcgaaaagtatttggcagatcaagcaaaactgtcttttgaaaggaagaagcaaggttgtaataaaagagcagctagaaaagctccagccccagtc

SEQ ID NO: 766439 - DNA, 120 bp, Artificial Sequence
  ENSG00000225830_9 (sequence is synthesized)
acgcctccagccccagtgcaaaataaaaacaaaccaaacaagaaagccagagttctgtccaaaaaagaggagcgtttgaaaaagcacatcaagaaactccagaagagggctttgcagttc

SEQ ID NO: 766440 - DNA, 120 bp, Artificial Sequence
  ENSG00000225830_10 (sequence is synthesized)
caggggaaagtgggattgccaaaggcaaggagaccttgggagtcagacatgaggccagaggcagagggagactctgagggtgaagagtctgagtatttccccacagaggaggaggaagag

SEQ ID NO: 766441 - DNA, 120 bp, Artificial Sequence
  ENSG00000225830_11 (sequence is synthesized)
gaggaagatgacgaggtggagggggcagaggcggacctgtctggagatggtactgactatgagctgaagcctctgcccaagggcgggaaacggcagaagaaagtgccagtgcaggagatt

SEQ ID NO: 766442 - DNA, 120 bp, Artificial Sequence
  ENSG00000225830_12 (sequence is synthesized)
gatgatgactttttcccaagttctggggaagaagctgaagctgcttctgtaggagaaggaggaggaggaggtcggaaagtgggaagataccgagatgatggagatgaagattattataag

SEQ ID NO: 766443 - DNA, 120 bp, Artificial Sequence
  ENSG00000225830_13 (sequence is synthesized)
cagcggttaaggagatggaataaactgagactgcaggacaaagagaaacgtctgaagctggaggacgattctgaggaaagtgatgctgaatttgacgaaggttttaaagtgccaggtttt

SEQ ID NO: 766444 - DNA, 120 bp, Artificial Sequence
  ENSG00000225830_14 (sequence is synthesized)
ctgttcaaaaagctttttaagtaccagcagacaggtgttaggtggctgtgggaattgcactgccagcaggcaggaggaattctgggagatgaaatgggattgggcaagaccatccagata

SEQ ID NO: 766445 - DNA, 120 bp, Artificial Sequence
  ENSG00000225830_15 (sequence is synthesized)
attgccttcttggcaggtctgagctacagcaagatcaggactcgtggttcaaattacaggtttgaggggttgggtccaactgtaattgtctgtccaacaacagtgatgcatcagtgggtg

SEQ ID NO: 766446 - DNA, 120 bp, Artificial Sequence
  ENSG00000225830_16 (sequence is synthesized)
aaggaatttcacacgtggtggcctccgttcagagtggcaattctacatgaaaccggttcctatacccacaaaaaggagaaactaattcgagatgttgctcattgtcatggaattttgatc

SEQ ID NO: 766447 - DNA, 120 bp, Artificial Sequence
  ENSG00000225830_17 (sequence is synthesized)
acatcttactcctacattcgattgatgcaggatgacattagcaggtatgactggcactatgtgatcttggacgaaggacacaaaattcgaaatccaaatgctgctgtcacccttgcttgc

SEQ ID NO: 766448 - DNA, 120 bp, Artificial Sequence
  ENSG00000225830_18 (sequence is synthesized)
aaacagtttcgcacccctcatcggatcattctgtctggctcaccgatgcaaaataacctccgagagctgtggtcgctctttgacttcatcttcccgggaaagttaggcacgttgcctgtg

SEQ ID NO: 766449 - DNA, 120 bp, Artificial Sequence
  ENSG00000225830_19 (sequence is synthesized)
tttatggagcagttctccgtccccatcaccatggggggatattcaaatgcttccccagtacaggtcaaaactgcttacaagtgtgcatgtgtcttacgagataccataaatccataccta

SEQ ID NO: 766450 - DNA, 120 bp, Artificial Sequence
  ENSG00000225830_20 (sequence is synthesized)
ctgcggagaatgaagtcagatgtcaagatgagcctttctttgccagataaaaatgaacaggtcttattttgccgtcttacagatgagcagcataaagtctaccaaaatttcgttgattcc

SEQ ID NO: 766451 - DNA, 120 bp, Artificial Sequence
  ENSG00000225830_21 (sequence is synthesized)
aaagaagtttacaggattctcaatggagagatgcagattttctccggacttatagccctaagaaaaatttgcaaccaccctgatctcttttctggaggtcccaagaatctcaaaggtctt

SEQ ID NO: 766452 - DNA, 120 bp, Artificial Sequence
  ENSG00000225830_22 (sequence is synthesized)
cctgatgatgaactagaagaagatcagtttgggtactggaaacgttctgggaaaatgattgttgttgagtctttgttgaaaatatggcacaagcagggtcagcgagtattgctgttttct

SEQ ID NO: 766453 - DNA, 120 bp, Artificial Sequence
  ENSG00000225830_23 (sequence is synthesized)
cagtcaaggcagatgctggacatacttgaagtattccttagagcccaaaagtatacctatctcaagatggatggtaccactacaatagcttcaagacagccactgattacgagatacaat

SEQ ID NO: 766454 - DNA, 120 bp, Artificial Sequence
  ENSG00000225830_24 (sequence is synthesized)
gaggacacatccatatttgtgtttcttctgaccacgcgggtgggcggcttaggtgtcaacctgacgggggcaaacagagttgtcatctatgacccagactggaacccaagcacggacacg

SEQ ID NO: 766455 - DNA, 120 bp, Artificial Sequence
  ENSG00000225830_25 (sequence is synthesized)
caggcccgggagcgagcatggagaataggccagaagaagcaagtgactgtgtacaggctcctgactgcgggcaccattgaagaaaagatctaccaccgacaaatcttcaagcagtttttg

SEQ ID NO: 766456 - DNA, 120 bp, Artificial Sequence
  ENSG00000225830_26 (sequence is synthesized)
acaaatagagtgctaaaagacccaaaacaaaggcggtttttcaaatccaatgatctctatgagctatttactctgactagtcctgatgcatcccagagcactgaaacaagtgcaattttt

SEQ ID NO: 766457 - DNA, 120 bp, Artificial Sequence
  ENSG00000225830_27 (sequence is synthesized)
gcaggaactggatcagatgttcagacacccaaatgccatctaaaaagaaggattcaaccagcctttggagcagaccatgatgttccaaaacgcaagaagttccctgcttctaacatatct

SEQ ID NO: 766458 - DNA, 120 bp, Artificial Sequence
  ENSG00000225830_28 (sequence is synthesized)
gtaaatgatgccacatcatctgaagagaaatctgaggctaaaggagctgaagtaaatgcagtaacttctaatcgaagtgatcctttgaaagatgaccctcacatgagtagtaatgtaact

SEQ ID NO: 766459 - DNA, 120 bp, Artificial Sequence
  ENSG00000225830_29 (sequence is synthesized)
agcaatgataggcttggagaagagacaaatgcagtatctggaccagaagagttgtcagtgattagtggaaatggggaatgttcaaattcttcaggaacaggcaaaacttctatgccatct

SEQ ID NO: 766460 - DNA, 120 bp, Artificial Sequence
  ENSG00000225830_30 (sequence is synthesized)
ggtgatgaaagcattgatgaaaagttaggtctttcttacaaaagagaaagacccagccaggctcaaacagaagctttttgggagaataaacaaatggaaaataatttttataagcacaag

SEQ ID NO: 766461 - DNA, 120 bp, Artificial Sequence
  ENSG00000225830_31 (sequence is synthesized)
tcaaaaacaaaacatcatagtgtggcagaagaagagaccctggagaaacatctgagaccaaagcaaaagcctaagaactctaagcattgcagagacgccaagtttgaaggaactcgaatt

SEQ ID NO: 766462 - DNA, 120 bp, Artificial Sequence
  ENSG00000225830_32 (sequence is synthesized)
ccacacctggtgaagaaaaggcgttaccagaagcaagacagtgaaaacaagagtgaggccaaggaacagagcaatgacgattatgttttggaaaagcttttcaaaaaatcagttggcgtg

SEQ ID NO: 766463 - DNA, 120 bp, Artificial Sequence
  ENSG00000225830_33 (sequence is synthesized)
cacagtgtcatgaagcacgatgccatcatggatggagccagcccagattatgtactggtggaggcagaagccaaccgagtggcccaggatgccctgaaagcactgaggctctctcgtcag

SEQ ID NO: 766464 - DNA, 120 bp, Artificial Sequence
  ENSG00000225830_34 (sequence is synthesized)
cggtgtctgggagcagtgtctggtgttcccacctggactggccacagggggatttctggtgcaccagcaggaaaaaagagtagatttggtaagaaaaggaattctaacttctctgtgcag

SEQ ID NO: 766465 - DNA, 120 bp, Artificial Sequence
  ENSG00000225830_35 (sequence is synthesized)
catccttcatcaacatctccaacagagaagtgccaggatggcatcatgaaaaaggagggaaaagataatgtccctgagcattttagtggaagagcagaagatgcagactcttcatccggg

SEQ ID NO: 766466 - DNA, 120 bp, Artificial Sequence
  ENSG00000225830_36 (sequence is synthesized)
cccctcgcttcctcctcactcttggctaaaatgagagctagaaaccacctgattctgccagagcgtttagaaagtgaaagcgggcacctgcaggaagcttctgccctgctgcccaccaca

SEQ ID NO: 766467 - DNA, 120 bp, Artificial Sequence
  ENSG00000225830_37 (sequence is synthesized)
aacacgatgaccttctggtggagatgagaaacttcatcgctttccaggcccacactgatggccaggccagcaccagggagatactgcaggagtttgaatccaagttatctgcatcacagt

SEQ ID NO: 766468 - DNA, 120 bp, Artificial Sequence
  ENSG00000225830_38 (sequence is synthesized)
cttgtgtcttccgagaactattgagaaatctgtgcactttccatagaacttctggtggtgaaggaatttggaaactcaagccagaatactgctaaacaacattgcttcctaaactttcaa

SEQ ID NO: 766469 - DNA, 120 bp, Artificial Sequence
  ENSG00000225830_39 (sequence is synthesized)
gtccctttttctaacgggcatttctgattattaatttattattaataatcatgtttgtcaatggaagttggctgcacttgatgtttgtttgcatgatgtctacctcagaattaaaacttt

SEQ ID NO: 766470 - DNA, 120 bp, Artificial Sequence
  ENSG00000225830_40 (sequence is synthesized)
aaggaagaagaaactcttctctgaaagttaaaagttttaataatgctagctaaaggagaaaatacttggattgatttttttttttttggcaatctaattatattgtaaatcaggtaccta

SEQ ID NO: 766471 - DNA, 120 bp, Artificial Sequence
  ENSG00000225830_41 (sequence is synthesized)
acagttactccttggagcacatttgttcctttacccaaaagatgctgtcagggagcacagttagaagtttgcagaacagaaatctcaatatttttttttattggtgctaaaaacaggtct

SEQ ID NO: 766472 - DNA, 120 bp, Artificial Sequence
  ENSG00000225830_42 (sequence is synthesized)
tacattcagtcagacctgttcaataagttcatcaatatctgataacagcattattttgatgcttaaactttaaacatttatatttaccatttgccacccacaaaggtcaggtttgttatt

SEQ ID NO: 766473 - DNA, 120 bp, Artificial Sequence
  ENSG00000225830_43 (sequence is synthesized)
tgttgtttgataattatattaattttcttggaaagatcctcttttcaaggtactggtaaattggtgagtatttttattagtaaagcatgaaatagtatggtaataaatgataagacatgt

SEQ ID NO: 766474 - DNA, 120 bp, Artificial Sequence
  ENSG00000225830_44 (sequence is synthesized)
atttgtggaaagctgtagggtattcagtttaccctggctttcctttaagcagagggcatctttttctctcctacagtcacaaaatgtgttatcattaaaaaaaatcaaattaaagccaaa

SEQ ID NO: 766475 - DNA, 120 bp, Artificial Sequence
  ENSG00000225830_45 (sequence is synthesized)
agtaggtacataaaaaccacacacatgcatgcacacaaacatcactgcagcccacagcagacccagccgttgttaccatgaagtgacaccactccaggcctctcttgtctgcaggctggc

SEQ ID NO: 766476 - DNA, 120 bp, Artificial Sequence
  ENSG00000225830_46 (sequence is synthesized)
aggctgtcttctctccagttgccttcgtcttgcgcctgcctttgcattccttgcgacgggctttcttgtttctgcggtttggattccagccaaggctgtttgtatctcactactgtttat

SEQ ID NO: 766477 - DNA, 120 bp, Artificial Sequence
  ENSG00000225830_47 (sequence is synthesized)
gtgtttgtggttctgtgatggtgttgctttgatcctcagtttattttcttacccatgtttttcttgtttccttctcaggatgattttatcatctcatctttgaagtgttgttttccgaaa

SEQ ID NO: 766478 - DNA, 120 bp, Artificial Sequence
  ENSG00000225830_48 (sequence is synthesized)
ttcatcgtattcctgaaatttcttcttagctgtcttagtgcagtttgtttcttggatttgtattctctggcatgctcttttcctctctctcatttttctgtagtatgcctgccctcctac

SEQ ID NO: 766479 - DNA, 120 bp, Artificial Sequence
  ENSG00000225830_49 (sequence is synthesized)
cctgctatttctttacatctctctcatgcttaacatggatagctgtgtccagatcttctgtctgctcatccatgtgactcagagaggagggttctgggcaggggggccttgccggactgc

SEQ ID NO: 766480 - DNA, 120 bp, Artificial Sequence
  ENSG00000225830_50 (sequence is synthesized)
atgagaggacatgagttttgctttctctgctctaatattttgcttaagccaagaatccttttcttagagatgttctatatgattcctgtcaggattttctagttttttttggattatagc

SEQ ID NO: 766481 - DNA, 120 bp, Artificial Sequence
  ENSG00000225830_51 (sequence is synthesized)
ttgttcatttcttttgtttttagtttggtttatatataatgagggaagaagatgattacattatttttgtcactttgccatcattgtttagaagtcatagaaagaatttttaaataggcc

SEQ ID NO: 766482 - DNA, 120 bp, Artificial Sequence
  ENSG00000225830_52 (sequence is synthesized)
aataagtcttaaacttgagtacttggcttagaagaaagtcaaaactccttcctttttgactaagtggtttgtttctggggagctcttaatttctatttttataatcattagcctataagg

SEQ ID NO: 766483 - DNA, 120 bp, Artificial Sequence
  ENSG00000225830_53 (sequence is synthesized)
aaattgtgtcttccttgttctcagggtgatctgctgaccttgttcactcatgaagcatttgggtatcatacttatagtgtctgaaacataaactgtattgagctagacaaggtatagcct

SEQ ID NO: 766484 - DNA, 120 bp, Artificial Sequence
  ENSG00000225830_54 (sequence is synthesized)
cctcttcaagtagcaaatactatcaaaagctataatgcagtaggagcaaggtggtccttgttccagtttttgtctcagttctgctgctgatgtaccatgatcttgggaaggtggtgtctc

SEQ ID NO: 766485 - DNA, 120 bp, Artificial Sequence
  ENSG00000225830_55 (sequence is synthesized)
agtgtggagatctgacacattgttaccgtgcctcctggctggagggacttggagaacaatgcagttaagtagaatggttttaacaatacagagaaatttattcatttagataaaaatctg

SEQ ID NO: 766486 - DNA, 120 bp, Artificial Sequence
  ENSG00000225830_56 (sequence is synthesized)
atttttagaactttaaaagctttgtacagtgtaaatagatttaatgtatttaacatgctttatcagcacaaataaaggattttaaaattttgtcaaaaaattaaatgttaatactatcac

SEQ ID NO: 766487 - DNA, 120 bp, Artificial Sequence
  ENSG00000225830_57 (sequence is synthesized)
cattaaaaatgttcaagcaatagtctgcctccccacccccacaccatcttgcacctgttccacagctaagtacagccctaggtttggtgtgtattctccatgcatttagagaatcacatg

SEQ ID NO: 766488 - DNA, 120 bp, Artificial Sequence
  ENSG00000225830_58 (sequence is synthesized)
acacagactgctgctataatgtcattttcccattcttcctttactaataaaatttttgagttttacctggacgtctggctgctcagcttaagactacttctcagcctctcttatagttaa

SEQ ID NO: 766489 - DNA, 120 bp, Artificial Sequence
  ENSG00000225830_59 (sequence is synthesized)
ttgtggccatatgactaagttttaaacttcccaattggccctttaaagaagcagggtatgcactctccttgacattcccctttcttgctggctgggaggccaatgggagcttcagtagtg

SEQ ID NO: 766490 - DNA, 120 bp, Artificial Sequence
  ENSG00000225830_60 (sequence is synthesized)
acctggcatctcaagagatggaagtgatgtgttgaggaaggagaagttggcctgccagtcttgaactgctctcctttgacctgttatttaagagtaaaataaaatactgacttgcttaag

SEQ ID NO: 766491 - DNA, 120 bp, Artificial Sequence
  ENSG00000225830_61 (sequence is synthesized)
ctactgtcttttgaagtctattatagcaattagtttgctttaaatatgtaatttatattaatggccttataccatccttattttgcaactaacttttcatttaatattatatgcaagaca

SEQ ID NO: 766492 - DNA, 120 bp, Artificial Sequence
  ENSG00000225830_62 (sequence is synthesized)
tttctattcctgtaagtatagctctgcctgcacagaattgttggattaatgatgtagattttaaatgtcagtggatgtagcagaattgcttgcatcaattcaccctccataaaaggaccc

SEQ ID NO: 766493 - DNA, 120 bp, Artificial Sequence
  ENSG00000225830_63 (sequence is synthesized)
atttctccaaacccttgccaacagtaagtggtatcaatatcgataggttgttttgttttgttttaaccagtctcgtgattgaaagtaccttgttttcacttgaatttccctgattacgta

SEQ ID NO: 766494 - DNA, 120 bp, Artificial Sequence
  ENSG00000225830_64 (sequence is synthesized)
caaaatcaaacatttccatgtttattggccatttgtagatctctaccgtacattgcctattagtgttatgttggcctagttttcctgtgggttgtttatcttttaggattgctcccctaa

SEQ ID NO: 766495 - DNA, 120 bp, Artificial Sequence
  ENSG00000225830_65 (sequence is synthesized)
acaaaaacaaaaaggcagttattccaatgatcaacaaatattcttttctccaccagtttaaaatgtcagctttcaactcatcacatgctaagttgtctatttctgtcctgtggatccagg

SEQ ID NO: 766496 - DNA, 120 bp, Artificial Sequence
  ENSG00000225830_66 (sequence is synthesized)
tgttggttctaccaaccacactcctcacgctgtcatttggtgctttgcattgtgttttgccattcatgggcaagttccttttcctttctccccctcttcagtgtcttatacttgggtgtt

SEQ ID NO: 766497 - DNA, 120 bp, Artificial Sequence
  ENSG00000225830_67 (sequence is synthesized)
ttctgttccagctgaatcaagaattagtttattaaattccagtaaaattgtggtgttcttttgactaggattgcatttgtttacacattaatttgagaataatagacctctttataatta

SEQ ID NO: 766498 - DNA, 120 bp, Artificial Sequence
  ENSG00000225830_68 (sequence is synthesized)
atataatgtttctgattagtgttatgataggcctcattttattaaagtcttttatattcttggatgaaattttaataactttcttcataaatgtcttgcacatttcataataggcttatt

SEQ ID NO: 766499 - DNA, 120 bp, Artificial Sequence
  ENSG00000225830_69 (sequence is synthesized)
cctaggtgttttatagatttttagttttggttgtgagtcttttaacttacataaaaatatggagaattagcatattcacatatctattttgtgatgtttatcatacggaagttttaaaat

SEQ ID NO: 766500 - DNA, 120 bp, Artificial Sequence
  ENSG00000225830_70 (sequence is synthesized)
atagtaaattcagtctttccatttttttttgtttatttaagaaccattccctagctagggtcatgaatacattcttatgaattattaatcccatatggatagctagtttccctagcacct

SEQ ID NO: 766501 - DNA, 120 bp, Artificial Sequence
  ENSG00000225830_71 (sequence is synthesized)
ttaaaaaatagtttattattttcctcctgatgtataaggccacctttaccaatttacatataatgtacggaaatgtttcttggctctgcattctgttaaattggtccatttatctaactt

SEQ ID NO: 766502 - DNA, 120 bp, Artificial Sequence
  ENSG00000225830_72 (sequence is synthesized)
tgcttagtaacccactgtttttatcattgtggtatcataattgattatcacaaatggtagaatgattgtcctcaaagtcttttctggtatatattgatataattgtatagcttttcttgg

SEQ ID NO: 766503 - DNA, 120 bp, Artificial Sequence
  ENSG00000225830_73 (sequence is synthesized)
tgtagtaaagtacacagttaaattttctaacattgaaatatcttttagattttcacttccagaatggcaatgtgaagggccctgtggacccactgtcctaggaattagctataactagtg

SEQ ID NO: 766504 - DNA, 120 bp, Artificial Sequence
  ENSG00000225830_74 (sequence is synthesized)
aaaattgtaacaaaaaataaacaccttcctctcatacagagagacacaaacacttaatgccactggaaattgtcctaaaagcatgtagaataaagtaacgcttattcaagaaaatccaaa

SEQ ID NO: 766505 - DNA, 120 bp, Artificial Sequence
  ENSG00000225830_75 (sequence is synthesized)
ttgattccaaagaagtttacaggattctcaatggagagatgcaggaggttcttcagtcattcacatctattcatctccatgaatctccccttaacttcttcaggtctttccaagttaggg

SEQ ID NO: 766506 - DNA, 120 bp, Artificial Sequence
  ENSG00000225830_76 (sequence is synthesized)
ggtctagatcacactatccaggaaagggaatgcaaactacacttggaattgtaaattttctagtagtcacattaaaaaggaaaaagagaaacagattttctccggacttatagccctaag

SEQ ID NO: 766507 - DNA, 120 bp, Artificial Sequence
  ENSG00000225830_77 (sequence is synthesized)
tctgaatgttggttttagcaatgacgtgagaacttcggagcttgcttcctcatggacgactactcagctgataaggaaacacagctaaacttgactatttataactgtatttatacagta

SEQ ID NO: 766508 - DNA, 120 bp, Artificial Sequence
  ENSG00000225830_78 (sequence is synthesized)
ataagcctatctttggatggcagagagtatatttatagtgaaatattttggggaaaagttactgagaagttgtctttttgaacaggaatatattaaatatagcatgatgctataatttta

SEQ ID NO: 766509 - DNA, 120 bp, Artificial Sequence
  ENSG00000225830_79 (sequence is synthesized)
atgcctcgaacactaagtttacatgaaataactgaccttttagagacagatgacagcatagaagcaagtgctatagtgatacaaccacctgaaaatgctacagcacctgtttctgatgag

SEQ ID NO: 766510 - DNA, 120 bp, Artificial Sequence
  ENSG00000225830_80 (sequence is synthesized)
gaatcaggagatgaagaaggtggaacaataaataatctgccaggttctttgttgcacacagctgcgtatcttattcaagatggctctgatgctgagtctgactcagatgatccctcatac

SEQ ID NO: 766511 - DNA, 120 bp, Artificial Sequence
  ENSG00000225830_81 (sequence is synthesized)
gcacctaaagatgactctcctgatgaagttccatctacgtttactgtgcagcaacctccaccatcaaggaggaggaaaatgacaaaaattctttgcaaatggaaaaaagccgacctaact

SEQ ID NO: 766512 - DNA, 120 bp, Artificial Sequence
  ENSG00000225830_82 (sequence is synthesized)
gtacaacccgtagcaggtagagttacagcaccaccaaacgatttcttcaccgtaatgagaactcccacagaaattcttgaactttttcttgatgacgaggtcattgaactcattgtcaag

SEQ ID NO: 766513 - DNA, 120 bp, Artificial Sequence
  ENSG00000225830_83 (sequence is synthesized)
tactccaacttatatgcttgcagtaaaggtgtacatcttggcttgactagctctgaattcaaatgttttctgggaattatttttctgagtggttatgtctcagttcctagaaggcgtatg

SEQ ID NO: 766514 - DNA, 120 bp, Artificial Sequence
  ENSG00000225830_84 (sequence is synthesized)
ttttgggaacaaagaacagatgtgcataatgtactggttagtgctgccatgagacgtgaccggtttgaaactatattttctaatttgcatgttgctgacaatgcaaatttggatccagtg

SEQ ID NO: 766515 - DNA, 120 bp, Artificial Sequence
  ENSG00000225830_85 (sequence is synthesized)
gacaaattttccaaattgcgacctctcataagcaaacttaatgagagatgcatgaaatttgttccaaatgaaacatatttcagctttgatgaattcatggttccttattttggtcgtcac

SEQ ID NO: 766516 - DNA, 120 bp, Artificial Sequence
  ENSG00000225830_86 (sequence is synthesized)
ggtaaaaacccaaatactaaacatgaggaatatggtgtcggtgcgtcacttgtccttcagtttagtgaggcacttacagaggcacaccctggacaataccattttgtattcaataacttt

SEQ ID NO: 766517 - DNA, 120 bp, Artificial Sequence
  ENSG00000225830_87 (sequence is synthesized)
ttcaccagtattgcacttcttgataagctcagttcaatgggacatcaggcaacaggtacagtgagaaaggatcacattgacagagttccactggaatcagatgtagctttaaagaaaaaa

SEQ ID NO: 766518 - DNA, 120 bp, Artificial Sequence
  ENSG00000225830_88 (sequence is synthesized)
gaaagaggcacatttgattatcgaattgatggcaaaggcaatattgtctgcagatggaatgataacagtgttgtcactgttgcctcatctggtgctggtatccatcccctgtgtcttgtc

SEQ ID NO: 766519 - DNA, 120 bp, Artificial Sequence
  ENSG00000225830_89 (sequence is synthesized)
agtcgttactcccagaaactgaaaaagaagatacaagttcagcagccaaacatgatcaaagtgtataaccagttcatgggaggcgtagacagagctgatgaaaacattgataagtatcgg

SEQ ID NO: 766520 - DNA, 120 bp, Artificial Sequence
  ENSG00000225830_90 (sequence is synthesized)
gcatcaatccgtggaaagaaatggtattcaagccctcttttgttctgtttcgaactggtcttacaaaatgcttggcaattgcataaaacatatgatgagaaaccagtggattttctggag

SEQ ID NO: 766521 - DNA, 120 bp, Artificial Sequence
  ENSG00000225830_91 (sequence is synthesized)
tttcgtcgacgtgtggtatgccattatctggagacccatggtcatcctccagaacctggccaaaaaggaagacctcagaagcgtaacattgactcacgttatgatggcataaatcatgtg

SEQ ID NO: 766522 - DNA, 120 bp, Artificial Sequence
  ENSG00000225830_92 (sequence is synthesized)
atagtcaaacagggaaagcaaacgcgatgcgctgaatgtcataagaacacaacttttcgatgtgaaaaatgtgatgttgccttacatgtgaagtgttccgttgaatatcacactgaatag

SEQ ID NO: 766523 - DNA, 120 bp, Artificial Sequence
  ENSG00000225830_93 (sequence is synthesized)
aggtgcgcgcgtggcggagggggaacagagaagcaggacagctctccatccttcccgtgttcagtcgtgggagacaacaagagaggtcacagcctggcgaccaaaaagtagtctgtagag

SEQ ID NO: 766524 - DNA, 120 bp, Artificial Sequence
  ENSG00000225830_94 (sequence is synthesized)
tttttgttacatagtattgcggttgtgaagacactcaattatattgaaatttttactgaatcttttctaggactaatttcatgtcttacgaaccagcagagaaattttcccttagggtat

SEQ ID NO: 766525 - DNA, 120 bp, Artificial Sequence
  ENSG00000225830_95 (sequence is synthesized)
gccagaagaggagcaagtagttttgataatgaaatgagaccttaaagaaatatttctagagcagctataataatttacataagaaatgaattgagatggctggagaagagaattgttttt

SEQ ID NO: 766526 - DNA, 120 bp, Artificial Sequence
  ENSG00000225830_96 (sequence is synthesized)
agattaaataaaaccagttaaatgagctgaagtccaaaatgagattttaggtagacatacctataggtaccagatagtaagtatttggacagcaaaacaacaaaactatcttcttttaag

SEQ ID NO: 766527 - DNA, 120 bp, Artificial Sequence
  ENSG00000225830_97 (sequence is synthesized)
agaagtgccaggtaatatagataacctttttgctttccagggtgagacttgcttgattgaatgctgtgaaaatttcacctgattctggatgtgaagaaaatggtcatctctggtgtaatg

SEQ ID NO: 766528 - DNA, 120 bp, Artificial Sequence
  ENSG00000225830_98 (sequence is synthesized)
acacctgatatttgtgttgcacgctctgatttacgatgcacattcacttgaatctaaaaggacctgctgatttcctaaagacaaagtctttaacccaagatccgtagcagcatttctgtt

SEQ ID NO: 766529 - DNA, 120 bp, Artificial Sequence
  ENSG00000225830_99 (sequence is synthesized)
ttgccattagaaggttgacacagggataggtgtgtcgctgctaggacagcctgccttgtctagagggaaagtgccagctccagagaccacaaccctctgaaataaaagtccagaaaactg

SEQ ID NO: 766530 - DNA, 120 bp, Artificial Sequence
  ENSG00000225830_100 (sequence is synthesized)
cctcctgagataagaaacatagttttatacattatgtacagtgtagcagtggttttgcctagtgttccaattttggaacgtcacataacaatggaacataataaatttttttttctcttc

SEQ ID NO: 766531 - DNA, 120 bp, Artificial Sequence
  ENSG00000225830_101 (sequence is synthesized)
tgtaccatatgttctttcctttctatttgctatcaagccattatgtacaaattaacattttaggaattacatagtagttacctgtgggccctgaaggtacttgcagcaatttgttgcaaa

SEQ ID NO: 766532 - DNA, 120 bp, Artificial Sequence
  ENSG00000225830_102 (sequence is synthesized)
aacagatactgtcaaatgaaattatagccacgtgctgttcattaaaattggatgataataagttgactaaaatgtgcattgggtatgtttgtaaactgatgaatctatatggacctgcct

SEQ ID NO: 766533 - DNA, 120 bp, Artificial Sequence
  ENSG00000225830_103 (sequence is synthesized)
cagcagactaaaagcaacacatttaaaagccatttatgttgaataatttttttgttcttagtaattttaaggtgccaaactcctaatttcttaaataagattaataggaagagttgcata

SEQ ID NO: 766534 - DNA, 120 bp, Artificial Sequence
  ENSG00000225830_104 (sequence is synthesized)
ttaaaatcaatattgggaaggattttttttcttctatgtggaaataaaaaacttttgacattttttttgagtgtcttatattgtacctgagggtataatatttttgagctgaccaaatgt

SEQ ID NO: 766535 - DNA, 120 bp, Artificial Sequence
  ENSG00000225830_105 (sequence is synthesized)
gcatctaaatattttatgtaggatgtcattctaatgtcaaaagagaagatatgggcaacaccttgatgattaagttgctatttgaagccaggtttcatgtgtaagtggccaagcattgga

SEQ ID NO: 766536 - DNA, 120 bp, Artificial Sequence
  ENSG00000225830_106 (sequence is synthesized)
gatgaccggatgctgcctgatagatgtgttcatgttgtctctaagggctggccagtctcccgtgatgaatgtaaatactgaggaacattttcagtctcgtcactcctgggatttacttaa

SEQ ID NO: 766537 - DNA, 120 bp, Artificial Sequence
  ENSG00000225830_107 (sequence is synthesized)
caagatactttaggaaggcttcttagatgcatataggaagttaaaccattacatagcttctttctgtctcttttgtataatcaatttgtagttgggagcaggatgcaaagttctttgttc

SEQ ID NO: 766538 - DNA, 120 bp, Artificial Sequence
  ENSG00000225830_108 (sequence is synthesized)
gagatgattaagtttggtctcctttatagattcagctgtcagccatgccctaaacttgtggaagaagtctacttaaaaacagcatgctctttatattttctctcaaagagcttatattat

SEQ ID NO: 766539 - DNA, 120 bp, Artificial Sequence
  ENSG00000225830_109 (sequence is synthesized)
agttttaatttttctctccattggggtaggggagagtgaagagtagtttttttatcccactaaacattatagaaagccaaactctaaagatgtgaagtgacttgatgtgattgctttaac

SEQ ID NO: 766540 - DNA, 120 bp, Artificial Sequence
  ENSG00000225830_110 (sequence is synthesized)
tggacagaggaacagccgtgtagaagttgaaatctgaatctgtagtaatatttacagaggtggttgctttgtttattgcttctcccaaatgagaattaactatggaaaggtaaataaagg

SEQ ID NO: 766541 - DNA, 120 bp, Artificial Sequence
  ENSG00000225830_111 (sequence is synthesized)
ccacttttattggcaactctttttgttttctctacagtgattctttgttaagaaacaagccaaataccatcagtgttgtactagcaaaaggaatacccaaattatagattaaattgattt

SEQ ID NO: 766542 - DNA, 120 bp, Artificial Sequence
  ENSG00000225830_112 (sequence is synthesized)
aaaaaagacaggatacttctgtgtatttgtagtaagtgatttggcagatatcctcaaggatcaagttgagtctgcatttttgtataaatgtcagattttctagcaaagatatttcacaat

SEQ ID NO: 766543 - DNA, 120 bp, Artificial Sequence
  ENSG00000225830_113 (sequence is synthesized)
agtactaaactttgcttactaaaagtatttaggattcagtgtattaacaaaactctatagtagttaatataaataatattcgttttttaaaaattagtcttaattgcacattcctggaaa

SEQ ID NO: 766544 - DNA, 120 bp, Artificial Sequence
  ENSG00000225830_114 (sequence is synthesized)
gaaagtattgtgtttttttaatctctgcaaaaacaggattttaaatattttatgtcataaaacttctgttcattttcttttgctgtatgaaaaaaattaataggattgatagagtctcca

SEQ ID NO: 766545 - DNA, 120 bp, Artificial Sequence
  ENSG00000225830_115 (sequence is synthesized)
tttttcttttatgattgcgttttagcggggccaatttaattttaaactgtagatatatttttttactgtatttgctgcattctgtggaattgaattgacagggtatagagttgtacacaa

SEQ ID NO: 766546 - DNA, 120 bp, Artificial Sequence
  ENSG00000225830_116 (sequence is synthesized)
gggagtcagaaggtacaattagccatttaagtacattttctgcaagatagtgtttaacttttaaatttctgttttgaaagtttgcccagcaagtatatttgtctatctaatttagcagtc

SEQ ID NO: 766547 - DNA, 120 bp, Artificial Sequence
  ENSG00000225830_117 (sequence is synthesized)
aaatgacaaacttcaatcttttgaccttattttcagccacactagtaaatgcaatcttgggttagtgtggcaatgccaatgtacaccaattatttgtggtcacattgtgatgcctcagtc

SEQ ID NO: 766548 - DNA, 120 bp, Artificial Sequence
  ENSG00000225830_118 (sequence is synthesized)
tcaagggatagcagaataaatttttttatgttgtatattcataaaaatctttaactgtccctaaagagtaatttttatatgcttttcaaaaattttgaaaactagattctataatatgtt

SEQ ID NO: 766549 - DNA, 120 bp, Artificial Sequence
  ENSG00000225830_119 (sequence is synthesized)
tttatttaaactatgtaattggtttacactgtttattattaggaaggtaaagcaataaaaccaaagtcagttagtggcacagctgaaacctgagctcaggcccttatattcctcatctag

SEQ ID NO: 766550 - DNA, 120 bp, Artificial Sequence
  ENSG00000225830_120 (sequence is synthesized)
caacaccagctatgtatatcatctaccagctgtgtggctagtgcttttaatctgcaagtgaatttcctttaaataccatctgagggccttcgtgtattgtgtggaaagaaagagccactc

SEQ ID NO: 766551 - DNA, 120 bp, Artificial Sequence
  ENSG00000225830_121 (sequence is synthesized)
tttgctatctttgtaactatccctagtttttggggatcctgctagagatatgacttacatgctgcctagtaagattttttttaatgtcattttcttagtgctgttcatcttcttgtaaac

SEQ ID NO: 766552 - DNA, 120 bp, Artificial Sequence
  ENSG00000225830_122 (sequence is synthesized)
acactcacatgctgtttgaaagccgtcgaagattagatttgtagatgaggaaacacccagcacattgtatgctgcctttcctgggccacacagaatctagttgtcttaaccccctctcag

SEQ ID NO: 766553 - DNA, 120 bp, Artificial Sequence
  ENSG00000225830_123 (sequence is synthesized)
gttccttttgggatcctatgctgtttaccatttctttaataatttctcaactgctcctttccgcactctccctactttagttaagttgatgagccccaagcaaaaagagttgttggaccc

SEQ ID NO: 766554 - DNA, 120 bp, Artificial Sequence
  ENSG00000225830_124 (sequence is synthesized)
atgtaggatggaggcagtgtggtgtaggagtaatacactagaataatcactgggagattttgttccccgactggaggagctggtccagttgttctgtatctcagcaaaaagaggtcaact

SEQ ID NO: 766555 - DNA, 120 bp, Artificial Sequence
  ENSG00000225830_125 (sequence is synthesized)
gactagaatgtagtgattctggaaactaattgcacatcagtttttttggagagctttttgcagtgtgtctttttcaaaagttgagattattctagtgtagccagttcatgaaccagcttt

SEQ ID NO: 766556 - DNA, 120 bp, Artificial Sequence
  ENSG00000225830_126 (sequence is synthesized)
tgttctaaatgagggtttctcgaccttgacacaattgacacttagggctaaataatttgttgctgtggggactgtcctgtgcagtatcagatattgaacagcttctctggcctctactat

SEQ ID NO: 766557 - DNA, 120 bp, Artificial Sequence
  ENSG00000225830_127 (sequence is synthesized)
tgcacttctctggttgtaacaaaaatgtctttagacattgccaaatgtcccatagggagaagaattacccctggctgagaactattggtctagatcatttccagaatcactttggaaaca

SEQ ID NO: 766558 - DNA, 120 bp, Artificial Sequence
  ENSG00000225830_128 (sequence is synthesized)
tacagttctggatttcagctctggcttgctcatttttttctagcgatgtcacctttggcaagttacctaaccattctgagcttttgtttcctaattataaagtgtgctgataatctcctt

SEQ ID NO: 766559 - DNA, 120 bp, Artificial Sequence
  ENSG00000225830_129 (sequence is synthesized)
tgtgcaagttgattgtgaggctgtgtccaaaccacctggcctggtgcctcctcagcagttggttccttaagtggtagccattattctctgattacataccacatattttcggaatttgtc

SEQ ID NO: 766560 - DNA, 120 bp, Artificial Sequence
  ENSG00000225830_130 (sequence is synthesized)
cttcttcccaaattaaatgatcttgtatctgtactacacttcatcgtgttttgatttttagttcttttctccaaggtgcatatccagtgtgtgtattataattagcaaacttaataagca

SEQ ID NO: 766561 - DNA, 120 bp, Artificial Sequence
  ENSG00000225830_131 (sequence is synthesized)
gcaaagttctcatttagagttttccttatgtaataggtaataatggaacagctagagtcaaacttctagaattgctttgcaaaatactgggagaaagttaattatgacgtatttactgag

SEQ ID NO: 766562 - DNA, 120 bp, Artificial Sequence
  ENSG00000225830_132 (sequence is synthesized)
atggggtctcactctgttgcccagtttggaatccggtggtgcaatcatggttcattgcagcctcaacctccatggctcaagcaatcctctcaccttagcctcccaagtagctaggactac

SEQ ID NO: 766563 - DNA, 66 bp, Artificial Sequence
  ENSG00000225830_133 (sequence is synthesized)
ctacaggcacgtgccaccactcctggctaaattttttttttttttctaaatgatcctcctgcctcg

SEQ ID NO: 766564 - DNA, 120 bp, Artificial Sequence
  ENSG00000225830_134 (sequence is synthesized)
atctaacctatcatcttttaattcaagtggtttttgctttagattttgtaacttgggatataatcttcataccattccctgttgttaagtgtttcttccactctccgaaaatttttttgt

SEQ ID NO: 766565 - DNA, 120 bp, Artificial Sequence
  ENSG00000225830_135 (sequence is synthesized)
atttttccttttttaactttatttttaggttatagattaaacatatcattgatggagaaagaaaaatatcaacttctgttttttgcagggggaggggttaaggttaaattatttctcttt

SEQ ID NO: 766566 - DNA, 120 bp, Artificial Sequence
  ENSG00000225830_136 (sequence is synthesized)
gacccatattccttatttaaaatcttaatagctatgatcttttcgtacctttggtaaactccctgaatcaatttctgctttgaaatattaaaaagaccttttgtattgttgagtctttaa

SEQ ID NO: 766567 - DNA, 120 bp, Artificial Sequence
  ENSG00000225830_137 (sequence is synthesized)
actgtgcttttttttgcatctgctagtaatatgacagaatcatctgttatgttctaattttgagagcagacctattattcagacttgtttatggccttaaaatttaattttttctattaa

SEQ ID NO: 766568 - DNA, 120 bp, Artificial Sequence
  ENSG00000225830_138 (sequence is synthesized)
aagataatatgatcaccaagtgacttttcaacagtataagctataggttgtggtgttctctgtcctgcttttttgatgctattcagattgaaaaaataaacattagtgccccttttttat

SEQ ID NO: 766569 - DNA, 120 bp, Artificial Sequence
  ENSG00000225830_139 (sequence is synthesized)
gttgaaaagaaaggaaatagtctctaattaccccatctatcagtttaattagaaatgtgttaatgttttgtaaagaaaaatttgtgatttttatgcctaggtgatcaaaaatgtatgacc

SEQ ID NO: 766570 - DNA, 120 bp, Artificial Sequence
  ENSG00000225830_140 (sequence is synthesized)
ttataaatataatactcatgtaaaacacacatcccgcatgtttctctgactggtactagaacctagccaaatgattaattcatgagtactttctgttatgatctgtattatccaccattt

SEQ ID NO: 766571 - DNA, 120 bp, Artificial Sequence
  ENSG00000225830_141 (sequence is synthesized)
ctgtactgtgtttcctgtgaatggccttcatgtgcctgtgcttcgctcctctccccgccgcctgacagtgtgatttatggctgttgttttccaccagtccactgtttgccctctaggagg

SEQ ID NO: 766572 - DNA, 120 bp, Artificial Sequence
  ENSG00000225830_142 (sequence is synthesized)
gattggtctcttgagcctccataataacagcagccctttcacagacatcttctaatgacaacagcactgcattcagagaaactaattcgagatgttgctcattgtcatggaattttgatc

SEQ ID NO: 766573 - DNA, 120 bp, Artificial Sequence
  ENSG00000225899_0 (sequence is synthesized)
cacactctgcctttggacgtgagagagagcgcacctttcacttgagcttcaacatgggaaagggaaatgaagaccccgatctccactgctcctccatccagtgctccactgaccagcccc

SEQ ID NO: 766574 - DNA, 120 bp, Artificial Sequence; identical to SEQ ID NO: 746838
  ENSG00000225899_1 (sequence is synthesized)

SEQ ID NO: 766575 - DNA, 120 bp, Artificial Sequence; identical to SEQ ID NO: 746839
  ENSG00000225899_2 (sequence is synthesized)

SEQ ID NO: 766576 - DNA, 120 bp, Artificial Sequence
  ENSG00000225899_3 (sequence is synthesized)
aggacagctgccaagacacagcagggaactgtccagaaaaggagtgcagcttgtcattgaataaaaaatcaagatcctccactcctgtgcacaacagtgaaatccaggagacctgtgatg

SEQ ID NO: 766577 - DNA, 120 bp, Artificial Sequence
  ENSG00000225899_4 (sequence is synthesized)
cccaccataggggacgttccagggcttgcactgggcgcagcaagcggcataggtctcgggccctaggagtccaaacaccgtcaattcgaaaaagcttggtgacctctgtgcgagctatgt

SEQ ID NO: 766578 - DNA, 120 bp, Artificial Sequence; identical to SEQ ID NO: 746842
  ENSG00000225899_5 (sequence is synthesized)

SEQ ID NO: 766579 - DNA, 120 bp, Artificial Sequence; identical to SEQ ID NO: 746843
  ENSG00000225899_6 (sequence is synthesized)

SEQ ID NO: 766580 - DNA, 120 bp, Artificial Sequence; identical to SEQ ID NO: 746844
  ENSG00000225899_7 (sequence is synthesized)

SEQ ID NO: 766581 - DNA, 120 bp, Artificial Sequence
  ENSG00000225899_8 (sequence is synthesized)
acctgaagaagtcataggaaagaaacttgagcggtatactcagaatggtgagagccctgaattttgcagaccgctaagactatagacaaattttatatttcatgttagacatttgatgcc

SEQ ID NO: 766582 - DNA, 120 bp, Artificial Sequence
  ENSG00000225899_9 (sequence is synthesized)
ttttggatgtctgatgacagtcatgcatttctatataatcagaaaaacattagaatgtaatcgtgaatttgcatattttagattgtagaaaagtaaatataaaattatgtgctccttttt

SEQ ID NO: 766583 - DNA, 67 bp, Artificial Sequence
  ENSG00000225899_10 (sequence is synthesized)
aaaagtaaatataaaattatgtgctccttttttgtttttttttttgagacagtcttgctattcctgg

SEQ ID NO: 766584 - DNA, 120 bp, Artificial Sequence
  ENSG00000225899_11 (sequence is synthesized)
gcagctgggactacaggcatgtactgctatgcctggctaattttttttttcctgtattgttagtagagacagagttttgtcactttggccaggttggcctcgaactcaggtgatctgcca

SEQ ID NO: 766585 - DNA, 120 bp, Artificial Sequence
  ENSG00000225899_12 (sequence is synthesized)
caacgtgctgggattacaggcatgagccgccttaccaagaaattgcttctcttttaatccagaaaaggttgtaggctctcactcttccagcctgaacccatggagtactaatatccacaa

SEQ ID NO: 766586 - DNA, 120 bp, Artificial Sequence
  ENSG00000225899_13 (sequence is synthesized)
taatatccacaaaccattaatagcactccctgtgggaaaatgtctatatattttgtttgatataattatagtaaaattactatgcaagctgtttacttttaatatttctacataaaattt

SEQ ID NO: 766587 - DNA, 120 bp, Artificial Sequence
  ENSG00000225899_14 (sequence is synthesized)
agtaaatggtaaatgattgtacttatttattgacctgcctcatgtttcatttcattttaaacatcctaaatttatattttattatattttatacatttcaattgattgtactatattgca

SEQ ID NO: 766588 - DNA, 120 bp, Artificial Sequence
  ENSG00000225899_15 (sequence is synthesized)
tactatattgcaggatatggagatttcatcacgtactacaatacagtgtattttgttatatttgacgtatattctacttgtattttgtactgagatcatacactatttcattatctaagt

SEQ ID NO: 766589 - DNA, 120 bp, Artificial Sequence; identical to SEQ ID NO: 746853
  ENSG00000225899_16 (sequence is synthesized)

SEQ ID NO: 766590 - DNA, 120 bp, Artificial Sequence
  ENSG00000225921_0 (sequence is synthesized)
agacggtctagcgctgcgtgggccatggtgcagctccgaccgcgagcgtctcgcgccccggcgtcggcggaggcgatggtggacgagggccagctggcctcggaggaggaggaggcggag

SEQ ID NO: 766591 - DNA, 120 bp, Artificial Sequence
  ENSG00000225921_1 (sequence is synthesized)
cacgggctgttgctcgggcagcccagcagcggcgcggccgccgagcccctggaggaagacgaggaaggggacgatgagtttgacgatgaggccccggaggagctgactttcgccagcgcc

SEQ ID NO: 766592 - DNA, 120 bp, Artificial Sequence
  ENSG00000225921_2 (sequence is synthesized)
caggcggaagcgagagaagaggagcggcgagtgcgggagaccgtgcgcagggataaaacgctcctgaaggagaagaggaagcgacgcgaggagctgttcatcgaacagaagaaaagaaaa

SEQ ID NO: 766593 - DNA, 120 bp, Artificial Sequence
  ENSG00000225921_3 (sequence is synthesized)
ctccttccagacactattttggagaagttaaccacagcttcacagactaacatcaagaaatcgccaggaaaggtgaaagaagttaatttgcaaaagaaaaatgaagactgtgaaaaagga

SEQ ID NO: 766594 - DNA, 120 bp, Artificial Sequence
  ENSG00000225921_4 (sequence is synthesized)
aatgactccaagaaagttaaagtacaaaaagtacagtctgtcagccagaataaaagctacttggccgtaaggctaaaagaccaagatctgagagattcaaggcaacaagcagcacaagcc

SEQ ID NO: 766595 - DNA, 120 bp, Artificial Sequence
  ENSG00000225921_5 (sequence is synthesized)
ttcatacataattcattatatgggccaggaaccaacaggactactgtaaataagttcctgtctcttgccaacaagaggttaccagtgaaaagagctgctgtccagtttttgaataatgct

SEQ ID NO: 766596 - DNA, 120 bp, Artificial Sequence
  ENSG00000225921_6 (sequence is synthesized)
tggggaatccaaaaaaaacaaaatgccaagaggtttaaaagacggtggatggtcagaaagatgaaaactaagaagtaaatcaatgctaaatgaagaatctgtactttgtatgtatagaat

SEQ ID NO: 766597 - DNA, 120 bp, Artificial Sequence
  ENSG00000225921_7 (sequence is synthesized)
tctaataaatcattcatagatcattttaaaggatcattataaaaatcataaacctatttgaggaagtgctcaaccacatttcattcttctggagtagaactgtgccttgcaatcctagag

SEQ ID NO: 766598 - DNA, 120 bp, Artificial Sequence
  ENSG00000225921_8 (sequence is synthesized)
gaaaaagtggtttaagaaggaattgttttctttttaatatatttaactgaattcaagccatacccacatcagcaacagcacctcttctactctccccgggttagaggggtggcaaaaatg

SEQ ID NO: 766599 - DNA, 120 bp, Artificial Sequence
  ENSG00000225921_9 (sequence is synthesized)
gcacggactaaaaggagaaatggatattccagcaaagtctctaactgcagcctgtagacaatttgctattaaagattcagtgcacaaaatatagctaacagcttttaaatttttactttt

SEQ ID NO: 766600 - DNA, 120 bp, Artificial Sequence
  ENSG00000225921_10 (sequence is synthesized)
aaccagtctggggatttgcttgcctggtgagtctcatatgccatattatgaatatgaaaataatgaagttaatttcctgttgcctttctgtgtcagccacaatatcaggtctaaccctaa

SEQ ID NO: 766601 - DNA, 120 bp, Artificial Sequence
  ENSG00000225921_11 (sequence is synthesized)
tccagggatgccagtaaactgaaggcaattttaggttgtagaactcagattaattgtagaaaccattaattttaattgctctaattttcatagtaatcataaaaagtatgcaagtaccta

SEQ ID NO: 766602 - DNA, 120 bp, Artificial Sequence
  ENSG00000225921_12 (sequence is synthesized)
atatataaactcaattgacactgtatctgtagaagtaaatttttaatggctggttaattatatcactacattttattgcaatatagtactcatttaagcacttaaaaatggaaggtgtac

SEQ ID NO: 766603 - DNA, 120 bp, Artificial Sequence
  ENSG00000225921_13 (sequence is synthesized)
aaagattaaattaagacacggtaaattgactaaatatttggtttttatataaataaaggtcataaccacaccgttgacatgtaatactgttataatacaacagttaaacttgtgagtcta

SEQ ID NO: 766604 - DNA, 120 bp, Artificial Sequence
  ENSG00000225921_14 (sequence is synthesized)
gaatctgtacttttgttcttgccacagtctctccttagctgttcactcattgcttgcagctctcgtccaaagtggatcattctttctatggcggcctgacttcctccacacaactggcgt

SEQ ID NO: 766605 - DNA, 120 bp, Artificial Sequence
  ENSG00000225921_15 (sequence is synthesized)
ctcaactgacttgaatcaacttctgtaagaaaaacagacaagtattttactaccttatggaatggagtataatgaggacacgaacatacatttcttataccattttgtacatttagtaac

SEQ ID NO: 766606 - DNA, 120 bp, Artificial Sequence
  ENSG00000225921_16 (sequence is synthesized)
tattccctaatatttcatctaaatatgcagattgttaaaaattcatttttaatatgaaactgcagctaaaagatatactttatttagctctcaagagtctaggatccagtattcagcatg

SEQ ID NO: 766607 - DNA, 120 bp, Artificial Sequence
  ENSG00000225921_17 (sequence is synthesized)
tgtttccagtcaaatatgaatggcccttagaaagccagcatgggcctggccaaggttagctggggcctattccctgtatttcatacaaataaaaactgcatccacattggtgtgtagtgg

SEQ ID NO: 766608 - DNA, 120 bp, Artificial Sequence
  ENSG00000225921_18 (sequence is synthesized)
atgcttaaagtgaactccagtaaatttcctgatttatttttacgtgaatgctaattagaaaatgtaactctattttttagttaatttgcaaaagaaaaatgaagactgtgaaaaaggaaa

SEQ ID NO: 766609 - DNA, 120 bp, Artificial Sequence
  ENSG00000225921_19 (sequence is synthesized)
tgactccaagaaagttaaagtacaaaaagtacagtctgtcaggtaatgagtcttttgtttcatttgggatgtaaaggagacctttaagagagttaaagtattggctaacatgggaaaata

SEQ ID NO: 766610 - DNA, 120 bp, Artificial Sequence
  ENSG00000225932_0 (sequence is synthesized)
agtgttactgcggtgaccgccagagcagcctcgacgctatggaggagcctggtgctacccctcagccctacctggggctggtcctggaggagctacgcagagttgtggcagcactacctg

SEQ ID NO: 766611 - DNA, 120 bp, Artificial Sequence
  ENSG00000225932_1 (sequence is synthesized)
agagtatgagaccagatgagaatccttatggttttccatcggaactggtggtatgtgcagctgttattggattttttgttgttctcctttttttgtggagaagttttagatcggttagga

SEQ ID NO: 766612 - DNA, 120 bp, Artificial Sequence
  ENSG00000225932_2 (sequence is synthesized)
gtcggctttacgtgggaagagagcaaaaacttggtgcaacgctttctggactaattgaagaaaaatgtaaactacttgaaaagtttagccttattcaaaaagagtatgaaggctatgaag

SEQ ID NO: 766613 - DNA, 120 bp, Artificial Sequence
  ENSG00000225932_3 (sequence is synthesized)
tagagtcatctttagaggatgccagctttgagaaggcggcagcagaagaagcacgaagtttggaggcaacctgtgaaaagctgaacaggtccaattctgaacttgaggatgaaatcctct

SEQ ID NO: 766614 - DNA, 120 bp, Artificial Sequence
  ENSG00000225932_4 (sequence is synthesized)
gtctagaaaaagacttaaaagaagagaaatctaaacattctcaacaagatgaattgatggcggatatttcaaaaagtatacagtctctagaagatgagtcaaaatccctcaaatcacaaa

SEQ ID NO: 766615 - DNA, 120 bp, Artificial Sequence
  ENSG00000225932_5 (sequence is synthesized)
tagctgaagccaaaatcatctgcaagacatttaaaatgagtgaagaacgacgggctatagcaataaaagatgctttgaatgaaaattctcaacttcagacaagccataaacagctttttc

SEQ ID NO: 766616 - DNA, 83 bp, Artificial Sequence
  ENSG00000225932_6 (sequence is synthesized)
cacgcagaacaagttctgaatgataaagaaaatcacatcaagaccctgactggacacttgccaatgatgaaagatcaggctgc

SEQ ID NO: 766617 - DNA, 120 bp, Artificial Sequence
  ENSG00000225932_7 (sequence is synthesized)
ccctgactggacacttgccaatgatgaaagatcaggctgctgtgcttgaagaagacacaacggatgatgataacctggaattagaagtgaacagtcaatgggaaaatggtgctaacttag

SEQ ID NO: 766618 - DNA, 120 bp, Artificial Sequence
  ENSG00000225932_8 (sequence is synthesized)
atgatcctctgaaaggagctttgaagaaactgattcatgctgctaagttaaatgtttctttaaaaagcttagaaggagaaagaaaccacattattattcagttatctgaagtggacaaaa

SEQ ID NO: 766619 - DNA, 120 bp, Artificial Sequence
  ENSG00000225932_9 (sequence is synthesized)
gttatctgaagtggacaaaacaaaggaagagcttacagagcatattaaaaatcttcagactcaacaagcatctttgcaatcagaaaacatatattttgaaagtgagaatcagaagcttca

SEQ ID NO: 766620 - DNA, 120 bp, Artificial Sequence
  ENSG00000225932_10 (sequence is synthesized)
gaggaagaagagaagctttctagagtggaagaaaagatcagccgtgccactgaagggctggagacctatagaaagctagccaaagatcttgaagaagaattggagagaactgttcatttt

SEQ ID NO: 766621 - DNA, 120 bp, Artificial Sequence
  ENSG00000225932_11 (sequence is synthesized)
tatcaaaagcaggttatttcctacgagaaaagaggacatgataattggttggcagctcggactgctgaaagaaacctcagtgatttaaggaaagaaaatgctcacaacaaacaaaaatta

SEQ ID NO: 766622 - DNA, 120 bp, Artificial Sequence
  ENSG00000225932_12 (sequence is synthesized)
actgaaacagagttgaaatttgaacttttagaaaaagatcctaatgcactcgatgtttcaaatacagcatttggcagagagcattccccatgtagtccctcaccattgggtcggccttca

SEQ ID NO: 766623 - DNA, 120 bp, Artificial Sequence
  ENSG00000225932_13 (sequence is synthesized)
tctgaaacgagagcttttccctctcctcaaactttgttggaggatccactcagactctcacctgtgcttccagggggaggaggaagaggcccaagcagcccagggaatcccctggaccat

SEQ ID NO: 766624 - DNA, 120 bp, Artificial Sequence
  ENSG00000225932_14 (sequence is synthesized)
cagattaccaatgaaagaggagaaccaagctatgacaggttaatcgatcctcacagggctccttctgacactgggtccctgtcatctccggtggaacaggaccgtaggatgatgtttcct

SEQ ID NO: 766625 - DNA, 120 bp, Artificial Sequence
  ENSG00000225932_15 (sequence is synthesized)
ccaccagggcaatcatatcctgattcaactcttcctccacaaagggaagacagattttattctaattctgaaagactgtctggaccagcagaacccagaagttttaaaatgacttctttg

SEQ ID NO: 766626 - DNA, 120 bp, Artificial Sequence
  ENSG00000225932_16 (sequence is synthesized)
gataaaatggataggtcaatgccttcagaaatggaatccagtagaaatgatgccaaagatgatcttggtaatttaaatgtgcctgattcatctctccctgctgaaaatgaagcaactggc

SEQ ID NO: 766627 - DNA, 120 bp, Artificial Sequence
  ENSG00000225932_17 (sequence is synthesized)
cctggccttattcctccacctcttgctccaatcagcggtccattgtttccagtggatacaaggggcccgttcatgagaagaggacctcctttccccccacctcctccaggaaccatgttt

SEQ ID NO: 766628 - DNA, 120 bp, Artificial Sequence
  ENSG00000225932_18 (sequence is synthesized)
ggagcttctcgaggttattttccaccaagggatttcccaggtccaccacatgctccatttgcaatgagaaacatctatccaccgaggggtttacctccttaccttcatccgagacctgga

SEQ ID NO: 766629 - DNA, 120 bp, Artificial Sequence
  ENSG00000225932_19 (sequence is synthesized)
ttttaccccaaccccacattctgaaggtagaagcgagttcccttcaggattgattccgccttcaaaggagcctgctactggacatccagaaccacagcaagaaacctgacaatattgttg

SEQ ID NO: 766630 - DNA, 120 bp, Artificial Sequence
  ENSG00000225932_20 (sequence is synthesized)
ctttcttcaaaagtaattttgactgatctcattttcagtttaagtaactgctgttacttaagtgattgcacttttctcaaattgaagtttaatggaataatagttctcaggatagtattt

SEQ ID NO: 766631 - DNA, 120 bp, Artificial Sequence
  ENSG00000225940_0 (sequence is synthesized)
atgaagaggatattttacaagcatagaaaaaggagggctccagtcttcaaagaaccagagcatgggtaccaaagcctcccagagctagttctggtcccagctcagccacttgtctgtttg

SEQ ID NO: 766632 - DNA, 120 bp, Artificial Sequence
  ENSG00000225940_1 (sequence is synthesized)
ggtgggctctttccatggagcctgagacttatgatgccaggtgcctggacaaagcttccaggtgatggtggcagtgtcccagagaagggaaagcatggcattctgggagcacagggccag

SEQ ID NO: 766633 - DNA, 120 bp, Artificial Sequence
  ENSG00000225940_2 (sequence is synthesized)
gagcacccgggtttgaatgtcagctccccgttttccagcccttggacgtgttacctgtctggacatcagcctcagaataataatagccctgagcttcaggttaaggaaatcctcttatga

SEQ ID NO: 766634 - DNA, 120 bp, Artificial Sequence
  ENSG00000225940_3 (sequence is synthesized)
caacagccaaatgaacaacttcacctgagcccttacctccaaggaagtgccacaggggaacccaaaggcccttaatcattaaaaaaaactttagagatgctggctgagccatcagtgaga

SEQ ID NO: 766635 - DNA, 120 bp, Artificial Sequence
  ENSG00000225940_4 (sequence is synthesized)
ccagacactggacttcccagtctcccttgccactagatatggacacgtgatcaagattccaccaatcagatggtctttgaatctgctagtgacaaaaagaaaggaacatgccaaatccat

SEQ ID NO: 766636 - DNA, 120 bp, Artificial Sequence
  ENSG00000225950_0 (sequence is synthesized)
atgctccctctcccctcatgctccctccccatcctcctccttttcctcctccccagtgtgccaattgagtcccaacccccaccctcaacattgcccccttttctggcccctgagtgggac

SEQ ID NO: 766637 - DNA, 120 bp, Artificial Sequence
  ENSG00000225950_1 (sequence is synthesized)
cttctctccccccgagtagtcctgtctaggggtgcccctgctgggccccctctgctcttcctgctggaggctggggcctttcgggagtcagcaggtgccccggccaaccgcagccggcgt

SEQ ID NO: 766638 - DNA, 120 bp, Artificial Sequence
  ENSG00000225950_2 (sequence is synthesized)
ggggtgagcgaaactgcaccagcgagtcgtcggggtgagctggctgtgtgcgatgcagtcagtggctgggtgacagaccgccggaccgctgtggacttgcgtgggcgcgaggtggaggtg

SEQ ID NO: 766639 - DNA, 120 bp, Artificial Sequence
  ENSG00000225950_3 (sequence is synthesized)
gggggcaggtggagggggctgccggggagtggacaggaggcactgggtatctgagtgcaaggccaagcagtcctatgtgcgggcattgaccgctgatgcccagggccgtgtgggctggcg

SEQ ID NO: 766640 - DNA, 120 bp, Artificial Sequence
  ENSG00000225950_4 (sequence is synthesized)
atggattcgaattgacactgcctgcgtctgcacactcctcagccggactggccgggcctgagacccatgcccaggaaaataacagagctggatgctgagagacctcagggatggcccagc

SEQ ID NO: 766641 - DNA, 120 bp, Artificial Sequence
  ENSG00000225950_5 (sequence is synthesized)
tgatctaaggaccccagtttgggaactcatcaaataatcacaaaatcacaattctctgattttgagctcaatctctgcaggatgggtgaaaccacatggggttttggaggttgaatagga

SEQ ID NO: 766642 - DNA, 120 bp, Artificial Sequence
  ENSG00000225950_6 (sequence is synthesized)
gttctcctggagcaacttgagggtaataatgatgatgatataataataatagccactatttactgagtgtttactgtttcttatccctaatacataactcctcagatcaactctcatgga

SEQ ID NO: 766643 - DNA, 120 bp, Artificial Sequence
  ENSG00000225950_7 (sequence is synthesized)
agctagcacccggcgggccagcgagcgtccctgcagccagcgagcaggaggaggagctgctgccgggcggagggcagccgcgggagccgaagagggcgccccaggagccagggcaggcag

SEQ ID NO: 766644 - DNA, 120 bp, Artificial Sequence
  ENSG00000225950_8 (sequence is synthesized)
ccactccaggtatgtgcagaagtcttgggcgggccctggcctgtcctgtgaggagggaacattccaggaagcagcttggggaaccagggcttcttgagtgtgggccctcagggacccggg

SEQ ID NO: 766645 - DNA, 120 bp, Artificial Sequence
  ENSG00000225950_9 (sequence is synthesized)
tgtccaggtggttgccccctccctctcctgagatgtcaggaaggagggggccacctgtgtcctccacaggggccccccgaagcctggggactcccagccccagagctccgaggcggagga

SEQ ID NO: 766646 - DNA, 120 bp, Artificial Sequence
  ENSG00000225950_10 (sequence is synthesized)
ctgaggcaagagggaagtgtcccagatatgcagccggtttcccctgaggggtctcggagtccggaacccccaacccaaatctggaggatgaggaacccggagtctgcatttcttagtatc

SEQ ID NO: 766647 - DNA, 120 bp, Artificial Sequence
  ENSG00000225968_0 (sequence is synthesized)
tctcccaaagtgctgggattacaggtgcagctgccttggcgaccatttgtcctacagtttgtccggacccaggctgtccttctgtgtgctggaatgaggcgaacatgtctttgagcccag

SEQ ID NO: 766648 - DNA, 120 bp, Artificial Sequence
  ENSG00000225968_1 (sequence is synthesized)
gagcccagcagggaggaatcctccagcctattcctcgctggtgcatcaggtcgttggcgggccctgacacacaacaggaacgtcggagcaggaggagtcagtggagccatcaggacaccc

SEQ ID NO: 766649 - DNA, 120 bp, Artificial Sequence
  ENSG00000225968_2 (sequence is synthesized)
aggcccatggggcaggaggcctcggtcaccacaggactggggcggaagacgagaggcggccggccgtgagggaggcgccctccctccccgcgcttacgtcgcgcggccatgcggtttggg

SEQ ID NO: 766650 - DNA, 120 bp, Artificial Sequence
  ENSG00000225968_3 (sequence is synthesized)
acaggacacccctgagagtgcaggcacctccccctcccgcccctccatccctctgggggctggcgcctggccccccacctggtccccctgggcaggctgaattggggctccctgcagggc

SEQ ID NO: 766651 - DNA, 120 bp, Artificial Sequence
  ENSG00000225968_4 (sequence is synthesized)
ggtcccgatggccgggcgtgggtggggcgcgctgtgggtgtgcgtggcggccgccaccctgctgcacgctggcggcctggcccgcgcagactgctggctgatcgagggcgacaagggctt

SEQ ID NO: 766652 - DNA, 120 bp, Artificial Sequence
  ENSG00000225968_5 (sequence is synthesized)
cgtgtggctggccatctgcagccagaaccaacccccctacgaggccatcccacagcagatcaacagcaccatcgtggacctgcggctcaacgagaaccgtatccgcagcgtgcagtacgc

SEQ ID NO: 766653 - DNA, 120 bp, Artificial Sequence
  ENSG00000225968_6 (sequence is synthesized)
ctcgctcagccgctttggcaacctcacgtacctcaacctcaccaagaacgagatcggctacatcgaggacggcgccttctcgggccagttcaacctgcaggtgctgcagctgggctacaa

SEQ ID NO: 766654 - DNA, 120 bp, Artificial Sequence
  ENSG00000225968_7 (sequence is synthesized)
ccggctgcgcaacctcacggagggcatgctgcgcggcctgggcaagctggagtacctgtacctgcaggccaacctcatcgaggtggtcatggccagcagcttctgggagtgtcccaacat

SEQ ID NO: 766655 - DNA, 120 bp, Artificial Sequence
  ENSG00000225968_8 (sequence is synthesized)
cgtcaacatcgacctgtccatgaaccgcatccagcagctcaacagcggcaccttcgccggcctggccaagctgtcggtgtgcgagctctacagcaaccccttctactgctcctgcgagct

SEQ ID NO: 766656 - DNA, 120 bp, Artificial Sequence
  ENSG00000225968_9 (sequence is synthesized)
gctgggcttcctgcgctggctggccgccttcaccaacgccacacagacgtacgaccgcatgcagtgcgagtcgccgcccgtctactccggctactacctcctgggccagggccgccgcgg

SEQ ID NO: 766657 - DNA, 120 bp, Artificial Sequence
  ENSG00000225968_10 (sequence is synthesized)
ccaccgcagcatcctcagcaaactgcagtcagtctgcaccgaggactcgtacgcggctgaggtggtcgggcccccacgtccagcatccgggcgctcacagccgggccgctccccgccgcc

SEQ ID NO: 766658 - DNA, 120 bp, Artificial Sequence
  ENSG00000225968_11 (sequence is synthesized)
cccgcctccgccggagcccagtgacatgccctgtgccgatgatgagtgcttctccggggacggcaccacgccactggtggccctgcccacgctggccacgcaggccgaggcccgccccct

SEQ ID NO: 766659 - DNA, 120 bp, Artificial Sequence
  ENSG00000225968_12 (sequence is synthesized)
catcaaggtcaagcagctcactcagaactcggccaccatcaccgtccagctgcccagcccgttccaccggatgtacaccctggagcatttcaacaacagcaaggcctccaccgtgtccag

SEQ ID NO: 766660 - DNA, 120 bp, Artificial Sequence
  ENSG00000225968_13 (sequence is synthesized)
gctgaccaaggcccaggaggagatccgtctgaccaacctgttcacgctcaccaactacacctactgcgtggtgtccaccagcgccgggctgcgccacaaccacacctgcctcaccatctg

SEQ ID NO: 766661 - DNA, 120 bp, Artificial Sequence
  ENSG00000225968_14 (sequence is synthesized)
cttgccccggctgcccagcccgcctggtccggtgcccagcccctccacggccacccactacatcatgaccatcctgggctgcctcttcggcatggtgctggtgctgggcgccgtctacta

SEQ ID NO: 766662 - DNA, 120 bp, Artificial Sequence
  ENSG00000225968_15 (sequence is synthesized)
ctgcctgcgcaggcggcggcgccaggaggagaagcacaagaaggccgcctcggcagccgcagctggcagcctcaagaagaccatcatcgagctcaagtacgggccagagctggaggcgcc

SEQ ID NO: 766663 - DNA, 120 bp, Artificial Sequence
  ENSG00000225968_16 (sequence is synthesized)
tggccccgctgtcccagggcccgctgctgggccccgaggccgtgacgcgcatcccttacctgcctgcggccggcgaggtggagcagtacaagctggtggagagcgcggacacccccaagg

SEQ ID NO: 766664 - DNA, 120 bp, Artificial Sequence
  ENSG00000225968_17 (sequence is synthesized)
ccagcaagggcagctacatggaggttcgaaccggggaccctccggaacgcagggactgtgagctgggccggccgggccccgacagccagagttcggtggccgagatctccaccatcgcca

SEQ ID NO: 766665 - DNA, 120 bp, Artificial Sequence
  ENSG00000225968_18 (sequence is synthesized)
aggaggtggacaaggtcaaccagatcatcaacaactgcatcgacgcgctcaagtccgagtccacctccttccagggcgtcaagtcggggcccgtgtccgtcgcggagccgccgctggtgc

SEQ ID NO: 766666 - DNA, 120 bp, Artificial Sequence
  ENSG00000225968_19 (sequence is synthesized)
tgctgtccgagccgctggccgccaagcacggcttcctggcgcccgggtacaaggacgccttcggccacagcctgcagcggcaccacagcgtggaggccgccgggccccctcgtgccagca

SEQ ID NO: 766667 - DNA, 120 bp, Artificial Sequence
  ENSG00000225968_20 (sequence is synthesized)
cctcgtccagcggctccgtgcgcagcccccgcgccttccgagccgaggccgtcggggtgcacaaggccgcggccgccgaggccaagtacatcgagaagggctcccccgcggccgacgcca

SEQ ID NO: 766668 - DNA, 120 bp, Artificial Sequence
  ENSG00000225968_21 (sequence is synthesized)
tcctcactgtgacacccgcggccgccgtgctgcgggccgaggccgagaagggtcgccagtacggcgagcaccggcactcgtaccccggctcccacccggccgagccacctgcgccccccg

SEQ ID NO: 766669 - DNA, 120 bp, Artificial Sequence
  ENSG00000225968_22 (sequence is synthesized)
ggccaccgccgccgcctccgcacgagggcctggggcgcaaggcgtccatcctggagccactcacccggccgcggccccgcgacctcgcctactcgcagctgtccccgcagtaccacagcc

SEQ ID NO: 766670 - DNA, 120 bp, Artificial Sequence
  ENSG00000225968_23 (sequence is synthesized)
tgagctactcctccagccccgagtacacctgccgggcctcccagagcatctgggagcgcttcagactgagccgccggcggcacaaggaggaagaggagttcatggccgcgggccatgccc

SEQ ID NO: 766671 - DNA, 120 bp, Artificial Sequence
  ENSG00000225968_24 (sequence is synthesized)
tgcgcaagaaggttcagttcgccaaagacgaggatctgcacgacatcctggactactggaagggcgtgtcggcccagcacaagtcctgagccccccaagaccggcgatgcccactggacc

SEQ ID NO: 766672 - DNA, 120 bp, Artificial Sequence
  ENSG00000225968_25 (sequence is synthesized)
aaaaaggatgcaggatccacccagagactcagcaccaaacccaacacacgcacgccaccacagcaactgtgacagcggggggccctgcagaggcgaggggggagcgagtggggacagaca

SEQ ID NO: 766673 - DNA, 120 bp, Artificial Sequence
  ENSG00000225968_26 (sequence is synthesized)
gcgaggggggagcgagtggggacagacaagggggacacgtcccgagctcctgtggccggtcctgggatgcgcttgtcgccccgggtggcacgtgtccacacacacacacacacacacaca

SEQ ID NO: 766674 - DNA, 120 bp, Artificial Sequence
  ENSG00000225968_27 (sequence is synthesized)
tgtcttagggatggggggtgggggtggggatttttttttcattatctttcctcttttgagtcttctctgccttttcttttcctctctatctctttactttcttccttttttaaaaaaata

SEQ ID NO: 766675 - DNA, 120 bp, Artificial Sequence
  ENSG00000225968_28 (sequence is synthesized)
taataaaagacaagttattttaaaaagacataaaatgccatccgtggggggtgtggccggcgtggccacctcggggcccctcacgtgatctcctcggtccgtggttttctgtggattctc

SEQ ID NO: 766676 - DNA, 120 bp, Artificial Sequence
  ENSG00000225968_29 (sequence is synthesized)
tgtccagtccgtctcttcattgccgcctccggagtccactgcagaggggcagagtgaatgccggcggccaagtggcctccgggacaggtcctggagccctgctggactcagggtgggtgg

SEQ ID NO: 766677 - DNA, 120 bp, Artificial Sequence
  ENSG00000225968_30 (sequence is synthesized)
aggctgtgcctgtggacggccggggtggccaggacggccaagggctgggaggcacgtcccccagcccagcccccatgtacactgtagtcgttctattgtacagaaaaaaatatttctata

SEQ ID NO: 766678 - DNA, 120 bp, Artificial Sequence
  ENSG00000225968_31 (sequence is synthesized)
tttgcaatgtttgctgtaaaatgagaaagaaaaaaagactatgtctactaaaaaaaaaaaaaaaaagactatgtctacttaaaaaaaaatctgcaaaggaaaacaaatcaaatgcttgtt

SEQ ID NO: 766679 - DNA, 120 bp, Artificial Sequence
  ENSG00000225973_0 (sequence is synthesized)
gtagctcccacccgacgtggtggcctccttgcggtttcctttcgccgtttccgaaccgagggattgctactcgcctttggcttggcggtctctgtgctcgggggtccgaaaactgctgga

SEQ ID NO: 766680 - DNA, 120 bp, Artificial Sequence
  ENSG00000225973_1 (sequence is synthesized)
aggcccccggtctctggaggggagcaggcggtagcgagtttagtgacgtggagcaggcgcagaacagtcggaggtacctgagtggttattaaaaacggtaacggtaattgtagacgtcag

SEQ ID NO: 766681 - DNA, 120 bp, Artificial Sequence
  ENSG00000225973_2 (sequence is synthesized)
tgttggtgttaacatttcagatttgaagagatttcctgggtgtggagtgtgactttccaaaaccagcttttccttgagctgtatttgttgcagcaatgtttaggagattgacttttgcac

SEQ ID NO: 766682 - DNA, 89 bp, Artificial Sequence
  ENSG00000225973_3 (sequence is synthesized)
acagtatgccaaagatcagaaggaattaaaagaaaagatgcagttggtacaagaatcagaagagaagaaaagttaatactacatggagt

SEQ ID NO: 766683 - DNA, 71 bp, Artificial Sequence
  ENSG00000225973_4 (sequence is synthesized)
aagatcaccaaaaagcaaaaaaacccacaaatacctcatggagatgaactgtaataattgcttaaagttcc

SEQ ID NO: 766684 - DNA, 120 bp, Artificial Sequence
  ENSG00000225973_5 (sequence is synthesized)
tacctcatggagatgaactgtaataattgcttaaagttccatttaattatgttaactctaatctagcaaaaacatagatgtacttaaaaataaatcatggataatgattttttaacctaa

SEQ ID NO: 766685 - DNA, 120 bp, Artificial Sequence
  ENSG00000226124_0 (sequence is synthesized)
ctccacccaggaacctagtcggcaccgcgcagggaatcccagcagcggggttctggccccagcacgcgttgcggcagcctggcgagcgtccttgcggcctccaagtgccggtgggaaaaa

SEQ ID NO: 766686 - DNA, 120 bp, Artificial Sequence
  ENSG00000226124_1 (sequence is synthesized)
tcatgtcttcttccagagtggggctccgtttggctgcctgtttactaaacgtttcagaagccggaagaaaatacattgttgagaacatagcaaaagcagctcttcttgacaaaaatggaa

SEQ ID NO: 766687 - DNA, 120 bp, Artificial Sequence
  ENSG00000226124_2 (sequence is synthesized)
agaaacatcctcaagtttcagtgctcaatatattttccgatcaagactacaagagatcagtcattacaatagcaacttctgttgataagttgggcagttctgttctggctgcctgcctag

SEQ ID NO: 766688 - DNA, 120 bp, Artificial Sequence
  ENSG00000226124_3 (sequence is synthesized)
gggagcagtggacttgattccgatttaccctctctctggtgtcacagtggaatagtgtggagtggtggccagaatggacaagcgcaaccaagcctaaaggcaagtgctgttgcgaggtcg

SEQ ID NO: 766689 - DNA, 120 bp, Artificial Sequence
  ENSG00000226124_4 (sequence is synthesized)
acatccaggaaccagaggagggcagagcaatccacagaatggatctggggtgactcatggaggaaaaccaacacacagtaccatttaattctttttaaaaagatggaaaattataccata

SEQ ID NO: 766690 - DNA, 120 bp, Artificial Sequence
  ENSG00000226124_5 (sequence is synthesized)
cccagaattactaaattctaaatagagggtatattgcatttacatttgtaaaagaatgtttccccatgtatcttttaaaaattcattttaaagatatacaataaaaagtgtttaactctg

SEQ ID NO: 766691 - DNA, 120 bp, Artificial Sequence
  ENSG00000226124_6 (sequence is synthesized)
cacgcgcggcggcgacttgggctgggcggtcgccctgccccaccgcccttcggcgctcgcaggtccgctcccctcccaaaccgcagagcggcaggcgcggccgctggttcgagagctcgg

SEQ ID NO: 766692 - DNA, 120 bp, Artificial Sequence
  ENSG00000226124_7 (sequence is synthesized)
tggttcgagagctcggccggggcagcgcagccgccggctgcccctcgctcccaggcgccacaaccccgcgccctcgccgctgctgcgtcccgcgagacctgtggggaggccgggagtcac

SEQ ID NO: 766693 - DNA, 120 bp, Artificial Sequence
  ENSG00000226124_8 (sequence is synthesized)
acctgtggggaggccgggagtcacttcgggttccctttcagcccacgtggtcctgggacactccacccaggaacctagtcggcaccgcgcagggaatcccagcagcggggttctggcccc

SEQ ID NO: 766694 - DNA, 120 bp, Artificial Sequence
  ENSG00000226124_9 (sequence is synthesized)
ttgggccttgctgaggatctggtgctgcatgttcctggctgcagcgtgtttctctttggcgaagctgacctgcctgagaagcgcagtcttgtgcagagaaggaagcagctgggctggttc

SEQ ID NO: 766695 - DNA, 120 bp, Artificial Sequence
  ENSG00000226124_10 (sequence is synthesized)
acgaggagggatttcagtgctcttcagcctgacctgggagctgccccttcccaaagatgtggtttaacaggttacaagtaaaaaggactacaacttaagaatttggaagagttggctggg

SEQ ID NO: 766696 - DNA, 120 bp, Artificial Sequence
  ENSG00000226124_11 (sequence is synthesized)
tcccctttatgagccacaccctgttaatgcaggaagagttataggggtggctgcttcttgaaatgggtgaggctctcctttctgctgttactctcacccaggcccttttaagctaacctg

SEQ ID NO: 766697 - DNA, 120 bp, Artificial Sequence
  ENSG00000226124_12 (sequence is synthesized)
cgtgatcactgatgaaaagaatgctcgtagctcctggcactggggcagggtcctggaggcccctgtctgtgaatggtgtggggtgtgtcctagggtgtgatggagacacctggagaggga

SEQ ID NO: 766698 - DNA, 120 bp, Artificial Sequence
  ENSG00000226124_13 (sequence is synthesized)
ggacttagggagagatcacttctagctggtaggaaggtctttcaatacttaaacatcagtgtagccaagttggtgcttacagctggaaatcagttctagaggaaccctggaaaaaagctg

SEQ ID NO: 766699 - DNA, 120 bp, Artificial Sequence
  ENSG00000226124_14 (sequence is synthesized)
ttctagataacggacttctagaatgcagagaccaaagactggaaaaagaaactattccttcccctggcttttatcaacttttgcctctctgtgctgctcctgccctcactccctgcccca

SEQ ID NO: 766700 - DNA, 120 bp, Artificial Sequence
  ENSG00000226124_15 (sequence is synthesized)
ccctaagggatgtgtcaggaaaaggtggaactcctctctgttgtctgtacttccaccatcctagtgtcacttatttgagtcttaattgttccattttcagactctgttggggccacaaat

SEQ ID NO: 766701 - DNA, 120 bp, Artificial Sequence
  ENSG00000226124_16 (sequence is synthesized)
taaaccatgtaaggtcacattttgatggtcagtcaataacttaagcagttaccaaaatactaggtatccaaggagcgagaggtgggcgagcataagaaacacatttctcatggcacagct

SEQ ID NO: 766702 - DNA, 120 bp, Artificial Sequence
  ENSG00000226124_17 (sequence is synthesized)
ctgccaaagccctgcagaatcatttacacataggtctttggttagtagcccctggcacagaattctgatcttaaacaaatattgtctataatcaagtagagcaatgcaattaaaaaaaaa

SEQ ID NO: 766703 - DNA, 120 bp, Artificial Sequence
  ENSG00000226124_18 (sequence is synthesized)
aagcacaggttttggggccatgctgaaatcccagccttgctatttgctggctgtgtgaccgtggttccttggtctcattatgctttggttcccgtatctataaaacggacgtaataatgt

SEQ ID NO: 766704 - DNA, 120 bp, Artificial Sequence
  ENSG00000226124_19 (sequence is synthesized)
ctccctctcattattgtgaagtcgaaatgatgtctgtaaagtgcccaacacagtactaaagggctatttttttcttccctatgaagatgagatttaataaaagtgatattacaaatgtat

SEQ ID NO: 766705 - DNA, 120 bp, Artificial Sequence
  ENSG00000226124_20 (sequence is synthesized)
ccccttcccaaagatgtggtttaacagcttgcttcagggcgttgtgacagttgtgttggaagaaaattggaatttcagccttgcagtgaggggatccgtgctgccaccagagcagctgag

SEQ ID NO: 766706 - DNA, 120 bp, Artificial Sequence
  ENSG00000226124_21 (sequence is synthesized)
tgccaatctgcgggaggcgggagtggagcgaaactgcaaactgagaaacaaactttcacatcaggtttctaattttagagcaaaaagtggaattactttaattatatgacatttaactag

SEQ ID NO: 766707 - DNA, 120 bp, Artificial Sequence
  ENSG00000226174_0 (sequence is synthesized)
gccgtagcggacgttctggagcgaggcgccggccccttgggccccctcaagccgcggtgtactccagcggccccctgtggcctctccatccgcggcggatctcagaggtgtggacaagca

SEQ ID NO: 766708 - DNA, 120 bp, Artificial Sequence
  ENSG00000226174_1 (sequence is synthesized)
gcctactagggctagagatggacagcaggaaactgtccccccgggggaagaagctggagtcgcacctctcccaagagcacaggcggcccccactgggcctgatagcagcctggggccagc

SEQ ID NO: 766709 - DNA, 120 bp, Artificial Sequence
  ENSG00000226174_2 (sequence is synthesized)
ccagtatccagagcagcgttcagcagggactgcagactcaggactgggtgtgcgagccgccggaacgcaggcgcccgggccgccgctggagcgtcagcatcgacgagcgccggcggctgg

SEQ ID NO: 766710 - DNA, 120 bp, Artificial Sequence
  ENSG00000226174_3 (sequence is synthesized)
ccacgctgggcggccgggagaggccgggcgccgccgggacccagctgcactgcagggacgtcgtgcagatggtagcccagctggtgtcggaggacgtggacaaggacgtgctccttcccc

SEQ ID NO: 766711 - DNA, 120 bp, Artificial Sequence
  ENSG00000226174_4 (sequence is synthesized)
acccgctgaggtccaccgagtccaccaacgccttccaggccttcctggcgcgcagtgcgcctttctggcataatgcgactttcgaggcctcgaggtcacccccttcctaagagccccatt

SEQ ID NO: 766712 - DNA, 120 bp, Artificial Sequence
  ENSG00000226174_5 (sequence is synthesized)
cagcccattgtctgtcttccagtgcctttccttgggggcccacggtgggggcagcctctgcgccttctttgtgccccaccagggggtcaccacccacccatgttaggaaaacaggccagg

SEQ ID NO: 766713 - DNA, 120 bp, Artificial Sequence
  ENSG00000226174_6 (sequence is synthesized)
caggacctggctccggacagcctgcagctgctgaggccttggagaccgggctaggggctatgggaggccatctaggggaggggaacactgccccgggtcagtctgagagggccctggcaa

SEQ ID NO: 766714 - DNA, 120 bp, Artificial Sequence
  ENSG00000226174_7 (sequence is synthesized)
ggcctgggtagcaggagcttgccctcggggccgctgggaggaggcctggggtacctgggcctgcctgaggtgcactggtgtcctgggaagccccagtggcaggcgctgcctggagactca

SEQ ID NO: 766715 - DNA, 120 bp, Artificial Sequence
  ENSG00000226174_8 (sequence is synthesized)
gctccttggctggcctggtctggggaactgggtatctgcctgcaccaggctgtgagatgggccaggcagagttctccagggggcggggtctcacattgggtcctgcctctgaagacccag

SEQ ID NO: 766716 - DNA, 120 bp, Artificial Sequence
  ENSG00000226174_9 (sequence is synthesized)
aagggcacacgggaccccaggggtgctgtggtggggagcagcaagcccagggacccaatgcagtgcccagcacagagggaggctgtctggaggcagagatgcctcctggcctctggacag

SEQ ID NO: 766717 - DNA, 120 bp, Artificial Sequence
  ENSG00000226174_10 (sequence is synthesized)
tccactgggtgactgcctcgtttccaggctgcagggccctcggaagggtgctgagccggggtaacgtgtcccagctgcattttggggacactaagttgcagggggactggattgggaggc

SEQ ID NO: 766718 - DNA, 120 bp, Artificial Sequence
  ENSG00000226174_11 (sequence is synthesized)
ggggcaggagagctgtgagcatgggttcccagcccggggtgggtgggggtggggaaagggccctgaactctgtgactgactgttaggggcctgactgggcttctgtggaggtggctaggt

SEQ ID NO: 766719 - DNA, 120 bp, Artificial Sequence
  ENSG00000226174_12 (sequence is synthesized)
ggaggaggctttggggcaagcggaggtgatcactcctgggctccaggtgagggcaggagctggacctgtgcggtggcctggaccaccagatacactacatgctggctgtgctgcccacct

SEQ ID NO: 766720 - DNA, 120 bp, Artificial Sequence
  ENSG00000226174_13 (sequence is synthesized)
ggcctgtaaccctccccttcccgctgctgagaagccacctgactgcactgccagccacctgctgccctgacacaggatccctggcccgagttgaatcctctgcacctgcctgtctcccct

SEQ ID NO: 766721 - DNA, 120 bp, Artificial Sequence
  ENSG00000226174_14 (sequence is synthesized)
tcttactgtaagactcagtgaagttccctcctccttcaggaagccttccaagattacacagccaggtgctccccttctctcccaagtcctctgaatgtcatttggtgcaccctagggatc

SEQ ID NO: 766722 - DNA, 120 bp, Artificial Sequence
  ENSG00000226174_15 (sequence is synthesized)
ctctgcatttctcaggagccctagggtaggtggatggagggcagatcctccaggggctagggcaggtgtccttaagggtgtggggagttttgggcagggcactgtccttaagggtgtggg

SEQ ID NO: 766723 - DNA, 120 bp, Artificial Sequence
  ENSG00000226174_16 (sequence is synthesized)
gagttttgggtcatgacccaccccctctgaggcccctgatgatgatgtggggaatgggatcctatgggcccagctgcatgccaggcaggcatccccaggtgtaaacagggcagagcggag

SEQ ID NO: 766724 - DNA, 120 bp, Artificial Sequence
  ENSG00000226174_17 (sequence is synthesized)
ctgacaggtaagcagttgccatgggggtgatgagctgggcagtcctctgttgctgagtggctttaaagaaccactcgttgttctgtgacttgggggttggctgggctcatcctgccagct

SEQ ID NO: 766725 - DNA, 120 bp, Artificial Sequence
  ENSG00000226174_18 (sequence is synthesized)
ctcctgctctcgtttgagtgtctcctgaggctgcagtcagagcgtggtggtccaggatgctggtgatgctgggatggttgccctctctgctccatgaggtctccctacagagcacctccc

SEQ ID NO: 766726 - DNA, 120 bp, Artificial Sequence
  ENSG00000226174_19 (sequence is synthesized)
ccatggtggcagcagagacaaaaccctggcctccttcaggctgaggcccagagccagtctcctggtgggtaaggtggccacagggccagctggcagcagggtattggcactgagaggcac

SEQ ID NO: 766727 - DNA, 120 bp, Artificial Sequence
  ENSG00000226174_20 (sequence is synthesized)
aggcctctccaacagaggtggtgccgggacaggggcagtgcctggagaccgcttaggttgtcacaactgggatttgtgtactagttttctgtagctgccataaaaattgccacaaattca

SEQ ID NO: 766728 - DNA, 120 bp, Artificial Sequence
  ENSG00000226174_21 (sequence is synthesized)
ctccagcaacccatacctgatccggagaatcgaggagctcaacaagacggccaatgggaacgtggaggccaaagtggtgtgcttctaccggaggcgggacatctccagcaccctcatcgc

SEQ ID NO: 766729 - DNA, 120 bp, Artificial Sequence
  ENSG00000226174_22 (sequence is synthesized)
cctggccgacaagcacgcaaccctgtcagtctgctataaggccggaccgggggcggacaacggcgaggaaggggaaatagaagaggaaatggagaacccggaaatggtggacctgcccga

SEQ ID NO: 766730 - DNA, 120 bp, Artificial Sequence
  ENSG00000226288_0 (sequence is synthesized)
ccttaggttttcccagcaccacatgtgtcaacaaatcttacgggattgcattcttctcatacatcatttgtgcattaacaggaaaaaagtctcacttgtgatgctgggtccagcttataa

SEQ ID NO: 766731 - DNA, 120 bp, Artificial Sequence
  ENSG00000226288_1 (sequence is synthesized)
ccacacaatggaaacccctgcctccttcctccttgtgggtatcccaggactgcaatcttcacatctttggctggctatctcactgagtgccatgtacatcatagccctgttaggaaacac

SEQ ID NO: 766732 - DNA, 120 bp, Artificial Sequence
  ENSG00000226288_2 (sequence is synthesized)
catcatcgtgactgcaatctggatggattccactcggcatgagcccatgtattgctttctgtgtgttctggctgctgtggacattgttatggcctcctcggtggtacccaagatggtgag

SEQ ID NO: 766733 - DNA, 120 bp, Artificial Sequence
  ENSG00000226288_3 (sequence is synthesized)
catcttctgctcaggagacagctcaatcagctttagtgcttgtttcactcagatgttttttgtccacttagccacagctgtggagacggggctgctgctgaccatggcttttgaccgcta

SEQ ID NO: 766734 - DNA, 120 bp, Artificial Sequence
  ENSG00000226288_4 (sequence is synthesized)
ttctcacgcctcaagtgatgctgggaatgagtatggccatcaccatcagagctatcatagccataactccactgagttggatggtgagtcatctacctttctgtggctccaatgtggttg

SEQ ID NO: 766735 - DNA, 120 bp, Artificial Sequence
  ENSG00000226288_5 (sequence is synthesized)
tccactcctactgtgagcacatagctttggccaggttagcatgtgctgaccccgtgcccagcagtctctacagtctgattggttcctctcttatggtgggctctgatgtggccttcattg

SEQ ID NO: 766736 - DNA, 120 bp, Artificial Sequence
  ENSG00000226288_6 (sequence is synthesized)
ctgcctcctatatcttaattctcaaggcagtatttggtctctcctcaaagactgctcagttgaaagcattaagcacatgtggctcccatgtgggggttatggctttgtactatctacctg

SEQ ID NO: 766737 - DNA, 120 bp, Artificial Sequence
  ENSG00000226288_7 (sequence is synthesized)
ggatggcatccatctatgcggcctggttggggcaggatgtagtgcccttgcacacccaagtcctgctagctgacctgtacgtgatcatcccagccaccttaaatcccatcatctatggca

SEQ ID NO: 766738 - DNA, 120 bp, Artificial Sequence
  ENSG00000226288_8 (sequence is synthesized)
tgaggaccaaacaactgcgggagagaatatggagttatctgatgcatgtcctctttgaccattccaacctgggttcatgaacacaatatctgttcagatccagccaatttcaaagatgcc

SEQ ID NO: 766739 - DNA, 120 bp, Artificial Sequence
  ENSG00000226288_9 (sequence is synthesized)
gtcattttttcctgctcctcttgaagagtcctgtacaaatccctcttcttctgagtaaaagaaatgtagactaccaggcatcaacccatcagggaaagttgaatagagaagattccaagg

SEQ ID NO: 766740 - DNA, 120 bp, Artificial Sequence
  ENSG00000226288_10 (sequence is synthesized)
taagatgaaggtgtaaaggatatccttgcataacttttcaattactagcaggaatgtgaatgaaatgtttctgattttctgagggctttctcagtggattcaatcaacttgtatctgaat

SEQ ID NO: 766741 - DNA, 120 bp, Artificial Sequence
  ENSG00000226288_11 (sequence is synthesized)
cagagacaagttttggtagagaatacacatttgattgaacttatgtttccctgctctttaggaatgtgctaggttaggctgaggaaggcacaaagcctcttcctgctcctgcctcaccaa

SEQ ID NO: 766742 - DNA, 120 bp, Artificial Sequence
  ENSG00000226288_12 (sequence is synthesized)
ctcttaaaatgaaagacaacaaagaccgctcaccattctcttcatgaacagctatgtgtccacttaggatctggggaactgagagcatgcaactctatttcttagtttttcatacttcca

SEQ ID NO: 766743 - DNA, 120 bp, Artificial Sequence
  ENSG00000226288_13 (sequence is synthesized)
aatagttatctacccttcgccattaaaaagaaaaacactagaaactttatagcttgtgcctgttgactcttttctgccaactttattcctttccacagatgatgctcaggcagaagacat

SEQ ID NO: 766744 - DNA, 120 bp, Artificial Sequence
  ENSG00000226288_14 (sequence is synthesized)
gaactttaaaacatggccccatgcacccctctagcctcttgtattttcaatccctttcaagtcccctgactctactgcctctggtttatcctctatttggagaatatgtcccttctcata

SEQ ID NO: 766745 - DNA, 120 bp, Artificial Sequence
  ENSG00000226288_15 (sequence is synthesized)
cttttgtgctcaggtgcatgccctatctccagttgaaaaactcatcttccttgccctcccctacatcctctttcccttctccgttcaacaggatgctataacagcgtcatgggaaacatc

SEQ ID NO: 766746 - DNA, 120 bp, Artificial Sequence
  ENSG00000226288_16 (sequence is synthesized)
taaccagtgaaacctggcccgagtccccaggcagaactgaggaaatgtgaactcgactttgagatatgaagtacactgtcagtgtgaatagttctaccataaagtgaagtgaaatacggt

SEQ ID NO: 766747 - DNA, 120 bp, Artificial Sequence
  ENSG00000226288_17 (sequence is synthesized)
tattagaatttagctcttgactttctggcttacttgctttgtgacttttatgagcctcagctttcatctataagatgttgatgtgatgatggcagctacttcaggaggttttgaaaactg

SEQ ID NO: 766748 - DNA, 120 bp, Artificial Sequence
  ENSG00000226288_18 (sequence is synthesized)
actgagataatctttgaaaagagcatttgttatgatgcctggcacttagtgaactttcacaaatcctacctatcatggttttttgtttgtttgtttgttttcctttcaggatacacttta

SEQ ID NO: 766749 - DNA, 120 bp, Artificial Sequence
  ENSG00000226288_19 (sequence is synthesized)
tactcttagtctaacttttaggtatcctctgaaaacttgaagaaacagactcttcagccagtaagcatctgcctcctcctgctatctggaaatccccaggggccagagcacaaagataaa

SEQ ID NO: 766750 - DNA, 120 bp, Artificial Sequence
  ENSG00000226288_20 (sequence is synthesized)
ccagtctcttgaggagtagcaatgtttggttgctgggtagaggccaaaggaaggtgggtgtccagggacaaggcaggatgattgagtatccagagggaaaagagggccccaatgagaagt

SEQ ID NO: 766751 - DNA, 120 bp, Artificial Sequence
  ENSG00000226288_21 (sequence is synthesized)
ctttggaaaggacaatatgactctccattgtttgttcgtatttgattgtgtttgcacttcctgctcctccgaaggtatcctgtattaacccctcttcttttgcgtgaaagaaatgtggac

SEQ ID NO: 766752 - DNA, 120 bp, Artificial Sequence
  ENSG00000226288_22 (sequence is synthesized)
tatgaggcatggactcattggagaaagttaaacagagaaaactctcagactgtgggtaactgacttgggcattagtgttgggctgatggagtctgaaggccagatcaccccagaatagaa

SEQ ID NO: 766753 - DNA, 120 bp, Artificial Sequence
  ENSG00000226288_23 (sequence is synthesized)
aatataagcctttactcttcctatacagggctgtctaggtgtggtgggtattactgataccaagaatgtatgaaaatgatatttggataggaaaggtgggagagagaatgggacatataa

SEQ ID NO: 766754 - DNA, 120 bp, Artificial Sequence
  ENSG00000226288_24 (sequence is synthesized)
ttaattgaaagcagagaggaaggggtaggtatgatattggcatggtggagagacagttttatgggactaagaacagttatgaggaaaaaaacccagtagtagggctgattgggtgcatgt

SEQ ID NO: 766755 - DNA, 120 bp, Artificial Sequence
  ENSG00000226288_25 (sequence is synthesized)
ttggctgaagaggggaagtatccaggtaggaagaaagggttatcataaacagaaaggcttgattcaaatgcatatgccttagttcttttacctttaagacattttcattttgaattatgt

SEQ ID NO: 766756 - DNA, 120 bp, Artificial Sequence
  ENSG00000226288_26 (sequence is synthesized)
attcctcactcttttaatagaaatgaaacattctcccatatcttatgatttgtgaatcatgagttgttgaaattaagggacttttctgtgctagttttaagtaattggctctccaggtct

SEQ ID NO: 766757 - DNA, 120 bp, Artificial Sequence
  ENSG00000226288_27 (sequence is synthesized)
ggcactggtgtctgtatcttaacctcagtagtgcctatgtaggtgtgttcatgtgttcacataataaatatttatcaggctatctatctgagatttgtgcatttcccattatattcatag

SEQ ID NO: 766758 - DNA, 120 bp, Artificial Sequence
  ENSG00000226288_28 (sequence is synthesized)
tgttttaaaaagttaatgaaaaatcagggagcaggcagttgtgttaaatgttttggagatgtcaagtaaaacaaaaggaaaaagagttactggactggcaacagatgcttgatggagatc

SEQ ID NO: 766759 - DNA, 120 bp, Artificial Sequence
  ENSG00000226288_29 (sequence is synthesized)
aacgttaatcttagccaaacaatgttcagtatcaataggctgattgaaataaatatttgtagaaagaaacaactaaccaaaccgagtgtcctgttctttgcaaagactgacaatgtaaat

SEQ ID NO: 766760 - DNA, 120 bp, Artificial Sequence
  ENSG00000226288_30 (sequence is synthesized)
ctccagcaacgctaattgagaagaaacgtaaatggagattaaaaagaaaaacactctcaagggcatgaaaggtatgcccaattagagcttccagggctgaggcctcagcatcagctgagg

SEQ ID NO: 766761 - DNA, 120 bp, Artificial Sequence
  ENSG00000226288_31 (sequence is synthesized)
ctgcctcttgaagaaaggtgaatttaaacagggcagccaggggaggaacattctggatcagaggtgagtggggaagaggctgtttggattctcaagctttatgcagccctttatgcaata

SEQ ID NO: 766762 - DNA, 120 bp, Artificial Sequence
  ENSG00000226288_32 (sequence is synthesized)
atgcacaagtctgagtttgttgcatccagaacacatgcggcaatctcaagcataccctgattttttctttcactcttcactaccgttctacttcaaaagctttcccttgtcttctcatga

SEQ ID NO: 766763 - DNA, 120 bp, Artificial Sequence
  ENSG00000226288_33 (sequence is synthesized)
tctatcactgaagatgtctcacccagtagctacacagcaaggtttttataatctgattatgatgtggatatcactaatttattcaatctgtgccatgatatagtatttcttaagctcagg

SEQ ID NO: 766764 - DNA, 120 bp, Artificial Sequence
  ENSG00000226288_34 (sequence is synthesized)
gattttatttttggtttgtttcatatagatcacagtctgtaatcatgtctccaaaacttgattttttaaataaaactcctgaggactttaccacagctgctggtggtacctaactatgga

SEQ ID NO: 766765 - DNA, 120 bp, Artificial Sequence
  ENSG00000226288_35 (sequence is synthesized)
gcccatcagtgctaggctctgtaggaggtgaactgaaggagcaaatgtatgtcccaggattaggattgagaacctgacgaatgctcacctaatgcttggctaagagagaaaatgtgtacc

SEQ ID NO: 766766 - DNA, 120 bp, Artificial Sequence
  ENSG00000226288_36 (sequence is synthesized)
acagcagatgggatcaaggcacagaattccattaatctgatttattccactactcagagaggagccagaaccctgacaagaggtaaaaagaggtagcttgagacagtatccaagggtaag

SEQ ID NO: 766767 - DNA, 120 bp, Artificial Sequence
  ENSG00000226288_37 (sequence is synthesized)
gatatggtaacttctcacgatgaaagtcctttttttcaggagaggcacaggaagcgatagttaaagcaggctggtcttgaggcttggcaaatgagcacctttcatttaagattgcgtgaa

SEQ ID NO: 766768 - DNA, 120 bp, Artificial Sequence
  ENSG00000226288_38 (sequence is synthesized)
cacctaagaaacagttcttgagcgatatatgactactgttatgtcaaaacaaatcacacagttgctgtggtgactcattaggctgagcccttgagatacaatactagggtgatgagggtt

SEQ ID NO: 766769 - DNA, 120 bp, Artificial Sequence
  ENSG00000226288_39 (sequence is synthesized)
ttaggaaggagatcaattgtatttaatatggtctggtctacacttgagattctaagtccaggtctgagacaaaggcatatgcccacgtcctaaggaaagaaaattatctgagaacaatag

SEQ ID NO: 766770 - DNA, 120 bp, Artificial Sequence
  ENSG00000226288_40 (sequence is synthesized)
aaaaaatatttgaagcactaatttagcctggaaaaaatatttttcatacccacctccactctatccttaatctgaattcagtttggcaagagttgttttatggcagcagaaatgtgagct

SEQ ID NO: 766771 - DNA, 120 bp, Artificial Sequence
  ENSG00000226288_41 (sequence is synthesized)
atgcttggctttcttattagagatgggttgtaggaaaaactaaggaaaactttttcacaagtgtgatgaagaaaaaaaaatagcaacaaagcaaacaaaaaatcctaaacttgagaattg

SEQ ID NO: 766772 - DNA, 120 bp, Artificial Sequence
  ENSG00000226288_42 (sequence is synthesized)
acctataatggaacagatagtgggctcttatcatagtccaatgaggagaaacttgttgtgcacagccactgggtgagacatcttcagtggcaactcatgggaggacaagagaaattcttc

SEQ ID NO: 766773 - DNA, 120 bp, Artificial Sequence
  ENSG00000226288_43 (sequence is synthesized)
aggcaatgcaggatgagctgctttttactttgtaaatgtggtcttcaaatcacatacacccatttaaggatgttatttggagcaatctagaagtatagaatcaggcagggaaaaccgtct

SEQ ID NO: 766774 - DNA, 120 bp, Artificial Sequence
  ENSG00000226288_44 (sequence is synthesized)
tctgttttactatattatagctatattttattgaacacctatgtaccaagcattacactaagcacttttacatagcttatcacttaaatctcaaaatatctctgtgaagtattattaact

SEQ ID NO: 766775 - DNA, 120 bp, Artificial Sequence
  ENSG00000226288_45 (sequence is synthesized)
ctaatgggtgaagaagttgaggcttggagagttacataatttgactgatgcaaaatggctagcaagcgatagagtagggttttcagtctaggagtatgaatctagaaccgatgctttttg

SEQ ID NO: 766776 - DNA, 120 bp, Artificial Sequence
  ENSG00000226288_46 (sequence is synthesized)
ccactttgctatcctgccctttgatgatgtgggaccaataacatattttgagtagggtacacaaaagtatgcaggatttgtacgctctattctgatgaaatagaatctaggggttccatg

SEQ ID NO: 766777 - DNA, 120 bp, Artificial Sequence
  ENSG00000226288_47 (sequence is synthesized)
aagaagattaaccaatgtctccaaaagctaggtgataacatcagaggaaggagcctccccttgtaaggagtcttctcagatggcagggaaaatgtgcctatgaccaaacaccatatgaat

SEQ ID NO: 766778 - DNA, 120 bp, Artificial Sequence
  ENSG00000226288_48 (sequence is synthesized)
atgaaatcatggaaaccaatcatcctaaggagagagtaactaaacagctatcacacaggaatagaatggtagttaatgctgacttctttatattcaggtttccccacttagattgttaca

SEQ ID NO: 766779 - DNA, 120 bp, Artificial Sequence
  ENSG00000226288_49 (sequence is synthesized)
tattatatgatatggtaacacctgaatgaggcaatggagggtgaatacatcaataaacagagatgaacaagtggtagagctcagctgctggctgtgcacagcagtagctatctttgtctc

SEQ ID NO: 766780 - DNA, 120 bp, Artificial Sequence
  ENSG00000226288_50 (sequence is synthesized)
atcaaacgtggccaagtgaaacccctaaccttgttttatccatagttgtcttgttgactatttatgttgggctggatggacacctgggagtcatagcttaaacccaaaacttaccacaca

SEQ ID NO: 766781 - DNA, 120 bp, Artificial Sequence
  ENSG00000226288_51 (sequence is synthesized)
cgtactacatgatcttggctagaatatttaatctaagttatacaaactgtgttgtatggaatggatgtttgtcttatattacaaatggagaaatacactcagattatgaatactacactt

SEQ ID NO: 766782 - DNA, 120 bp, Artificial Sequence
  ENSG00000226288_52 (sequence is synthesized)
ttaacatagtactggcacatactgtgttaataataaagtgcttaactttctaaaggataaagctttcttgtttggaacatcttggttatcaggaagagggagttagttgtattaaagaac

SEQ ID NO: 766783 - DNA, 120 bp, Artificial Sequence
  ENSG00000226288_53 (sequence is synthesized)
cataacaacttattggggagggggggtcatctataaggtaaccctaagattttccttgtagtaatttaatctattaactgaaccaaagtgaataggatccagggtaaatttagagaaggt

SEQ ID NO: 766784 - DNA, 120 bp, Artificial Sequence
  ENSG00000226321_0 (sequence is synthesized)
ctggccatactgtcttacccacagggcaagagcaactgggtgcccaggctcgggacacaagactgcagagccaggtgccacacaggtgtggggcccgtggaccaaggaagaccctggcca

SEQ ID NO: 766785 - DNA, 120 bp, Artificial Sequence
  ENSG00000226321_1 (sequence is synthesized)
gttggaggagaactgccaggtagcaaagcccagacttctctggggtcctgcgctctgggctgcaatgagctctgcctccagtgagcctggcaatggggacgcctcccaacagcccctact

SEQ ID NO: 766786 - DNA, 120 bp, Artificial Sequence
  ENSG00000226321_2 (sequence is synthesized)
ggggctggacaccgtgatccagagactggaggacaccatcctgagtcccacagccagcagggaagaccgggcgctgaccgtgcgtggggaaggccggcaggcctcgcccacccccgtgcc

SEQ ID NO: 766787 - DNA, 120 bp, Artificial Sequence
  ENSG00000226321_3 (sequence is synthesized)
cacccgcatccgtgagatcgtggccggcagcctgagtgaggagccaccccaagcaggggtacaggagccgacagccactgtggcccgagtgcaagaggagaacgagctcctgcaggagga

SEQ ID NO: 766788 - DNA, 120 bp, Artificial Sequence
  ENSG00000226321_4 (sequence is synthesized)
gctgacccggctgggggacctgctggcccaggccagcgccgagcgagatgagctggccagcaggtgccgtgtggtcagcgagcagctgcaggcccggctggagaccaccgaggctcagct

SEQ ID NO: 766789 - DNA, 120 bp, Artificial Sequence
  ENSG00000226321_5 (sequence is synthesized)
gcggaggtcagagctggagcacagcgtggatctggaggaggcccttggccgtctggaggctgccgaggagaggagcaccggcctctgtcaggtgaacgcgctcctgcgggagcagctgga

SEQ ID NO: 766790 - DNA, 120 bp, Artificial Sequence
  ENSG00000226321_6 (sequence is synthesized)
acatatgaagaaggccaatgacgcgctgggccgggagctggccgggatgacgggcagcgtgcagcgcctgcagggcgagctggagctgaggcgctgggcccagagacagacccggtcagg

SEQ ID NO: 766791 - DNA, 120 bp, Artificial Sequence
  ENSG00000226321_7 (sequence is synthesized)
gggcctggggcagccccgggacctcctcctcctgtggagacaggccgtggtgctggggacagacctggccgagctgcgtgtagccactgagaggggcctcgctgacctgcaggcagacac

SEQ ID NO: 766792 - DNA, 120 bp, Artificial Sequence
  ENSG00000226321_8 (sequence is synthesized)
ggccaggacagcccgccgcctgcacaccgcctgcctgaacctcgactccaacctgcggctgtcggccagcagcacggccagcaccctggggcagcagcttcgggacaaggctggggagat

SEQ ID NO: 766793 - DNA, 120 bp, Artificial Sequence
  ENSG00000226321_9 (sequence is synthesized)
gctgcagctgcagggccgctgggacgcagagaaggtggcgctccaggccagactctcggagcaaaccctgctggtggagaagcttacagagcagaatgagcagaaggcgaagaccatcgc

SEQ ID NO: 766794 - DNA, 120 bp, Artificial Sequence
  ENSG00000226321_10 (sequence is synthesized)
tgccctcagaaccgacctgcagaacctggtggcccaggaggacgcccggtgcctggagctggcaggtagcagcatcactgaattgggggagccacggcgcccactgaggagcccccaacg

SEQ ID NO: 766795 - DNA, 120 bp, Artificial Sequence
  ENSG00000226321_11 (sequence is synthesized)
tgccacatccccccatcaaggggcgtccccaccacacatctgctccccagccaccctggaccccgcactgcaggccatgcgggcagccatagagaggcggtggcggcgggaacaggagct

SEQ ID NO: 766796 - DNA, 120 bp, Artificial Sequence
  ENSG00000226321_12 (sequence is synthesized)
gtgcctgcagctgaagtcctcccaggcactggtggccagtctccaggagcagctgtccgaaagccggcgggagctgtgggccgcacagaagctccagcaggagcgggctcgggagcaggc

SEQ ID NO: 766797 - DNA, 120 bp, Artificial Sequence
  ENSG00000226321_13 (sequence is synthesized)
acgggaacgagaggctcttcggggccagctggaggcccagaggctcgaggtgcagcagtgccgggcatcctgcaagctcctggggagggagaaggctgctctggagatggtggtggagga

SEQ ID NO: 766798 - DNA, 120 bp, Artificial Sequence
  ENSG00000226321_14 (sequence is synthesized)
gctgaaagggaaggcagatgctgcagatgcggagaagcaggggctggaggccgaggctgcagagctgcagagaagcctcctgctgcaggcagagcggagggaggagctggctctgcggag

SEQ ID NO: 766799 - DNA, 120 bp, Artificial Sequence
  ENSG00000226321_15 (sequence is synthesized)
ggagcggagctgcagggcactggagaccagtcaaggccgcctgcagcagctggaggagaaggtctccgggctcagagaggagctggcatcggtccgggaggcactgagcacagcacagct

SEQ ID NO: 766800 - DNA, 120 bp, Artificial Sequence
  ENSG00000226321_16 (sequence is synthesized)
gcagcgggatgtcgtggagagtgagagggagggactgcgcagcgccctggcgcgggccgagtgcagcaatgcggacctggagcttcttgtgaggcggctgaagtcggagggagtggagca

SEQ ID NO: 766801 - DNA, 120 bp, Artificial Sequence
  ENSG00000226321_17 (sequence is synthesized)
aagggactccctggccgcaatggccgccttgatggaggggttggctcaggacaaaagtgccctgaaccacctggctctccagctggagcaggagcgggaccagctgcgggaacagcggaa

SEQ ID NO: 766802 - DNA, 120 bp, Artificial Sequence
  ENSG00000226321_18 (sequence is synthesized)
gactctggagcaggaacgggcccgggccggggagcagctggcacaggcggagcagcagctggcgctggagcgggcagagcgcaggggcctgcagcaggcctgcggacgcctggagcagcg

SEQ ID NO: 766803 - DNA, 120 bp, Artificial Sequence
  ENSG00000226321_19 (sequence is synthesized)
gcaggagcagctggaggggcaggcagccctgctggggcgagagaaggcccagctccaggagcaggtgggccaggtcacatgccagaaacaggccctggaggagcagctggctcagagcct

SEQ ID NO: 766804 - DNA, 120 bp, Artificial Sequence
  ENSG00000226321_20 (sequence is synthesized)
gcaggaccaggaggcccagatgggcactctgcagcaagccctgcaaggaaaggatgctctgtctgaggagcgggcccagctgctggccaagcaggaggccttggagaggcagggccggct

SEQ ID NO: 766805 - DNA, 120 bp, Artificial Sequence
  ENSG00000226321_21 (sequence is synthesized)
cgcagctgaagaggcagctgatctcagggtggagagggactccctggagagcagcctccttgaggcccaacagctggccacaaagctgcaggagcagctggaggaggaagcccggagcgc

SEQ ID NO: 766806 - DNA, 120 bp, Artificial Sequence
  ENSG00000226321_22 (sequence is synthesized)
acaggtggcacagcaggagcgggaggcacagcgggccctggagagccaggcgttggcccaccgagaggccctggcacagctccaaagggagaaggagaccctgagcctgaccctggcaga

SEQ ID NO: 766807 - DNA, 120 bp, Artificial Sequence
  ENSG00000226321_23 (sequence is synthesized)
ggagaaggaggtagccagatgccagctggagcaggagaaggagctggtgacaaaaagtgcagctgagagggaggctctgaagggggaaattcagagcctgaagcaggagcgggacgagag

SEQ ID NO: 766808 - DNA, 120 bp, Artificial Sequence
  ENSG00000226321_24 (sequence is synthesized)
ccttctccaactggagcacaagatgcaacaggtgatggccctgtccctgaaagaaacagagcggagccttctgagtgaggagctctccagggccaggaggacgctagagcgggtacagca

SEQ ID NO: 766809 - DNA, 120 bp, Artificial Sequence
  ENSG00000226321_25 (sequence is synthesized)
ggaggcacagagccagcaggagcaagcgcaggccaccatcagtgccacgactgaggagctgaaggccctccaggcccagtttgaggatgccatcacagcccatcagagggagaccacggc

SEQ ID NO: 766810 - DNA, 120 bp, Artificial Sequence
  ENSG00000226321_26 (sequence is synthesized)
cctacgcgagagcctccaggacctagcggctgagcggggcgatgtggagagagaggctgagaggctgcgggcacagctgaccgtggcccaggagggactggccgcactgcgccaggagct

SEQ ID NO: 766811 - DNA, 120 bp, Artificial Sequence
  ENSG00000226321_27 (sequence is synthesized)
gcagggcgtcgaggagagccgggaggggctgcacagggaggcccaggaggcccgccgggcgctgagtgacgaggcccgcgagaaggacgtactgttgcttttcaacagcgagctgcgggc

SEQ ID NO: 766812 - DNA, 120 bp, Artificial Sequence
  ENSG00000226321_28 (sequence is synthesized)
caccatctgcagggccgaacaggagaaggccagttttaagcggtccaaggaggagaaggagcagaagctgctcatcctggaggaggcccaggcggcgttgcagcaggaggccagtgcact

SEQ ID NO: 766813 - DNA, 120 bp, Artificial Sequence
  ENSG00000226321_29 (sequence is synthesized)
gcgggcccacctgtgggagctggagcaggcagggggggacgcccgtcaggagctccgggaactccacagacaggtgaggacactgaaggccgagaaccagaggaggagtggagaggccca

SEQ ID NO: 766814 - DNA, 120 bp, Artificial Sequence
  ENSG00000226321_30 (sequence is synthesized)
tgagctgcaggcgcagtgctcgcaggaggtgctggagctgcggaggcaggcagccaaggcagaggccaagcacgagggtgcccggaaggaggtcctgggattgcagaggaagttggcaga

SEQ ID NO: 766815 - DNA, 120 bp, Artificial Sequence
  ENSG00000226321_31 (sequence is synthesized)
ggtggaggccgcaggggaggcccatggacagcggctccaggagcacctccgtgagagccggggggctgagcagaccctccgagcagagctgcacagtgtcaccaggaagctgcaggaagc

SEQ ID NO: 766816 - DNA, 120 bp, Artificial Sequence
  ENSG00000226321_32 (sequence is synthesized)
cagtggtgtggctgatgctctccaggctcgcctggaccaggcctgtcaccgaatccacagcctggagcaggagctggcccaggctgagggtgcaaggcaggatgcggaggcccagctggg

SEQ ID NO: 766817 - DNA, 120 bp, Artificial Sequence
  ENSG00000226321_33 (sequence is synthesized)
ccggctgtgctccacgctccgccgtggcctggggctccagagacagagcccgtgggcctccccggagcagcctggttcccccaccaaaggctccgacagctcccaggctctccctgggca

SEQ ID NO: 766818 - DNA, 120 bp, Artificial Sequence
  ENSG00000226321_34 (sequence is synthesized)
acagggtaccagccccccagccaggccccactcgcccctccgatggccctcgcccacacccggaggccgcagctcagagctcatggatgtggccaccgtgcaggacatcctgcgggactt

SEQ ID NO: 766819 - DNA, 120 bp, Artificial Sequence
  ENSG00000226321_35 (sequence is synthesized)
tgtgcagaagctccgggaagcccagcgggagcgggatgactcccgcatccagatggcgaccctgagcagccggctgagcgaggcagagtgcaggtgtgcccgggcccagagccgcgtggg

SEQ ID NO: 766820 - DNA, 120 bp, Artificial Sequence
  ENSG00000226321_36 (sequence is synthesized)
gcagctgcagaaagccctggctgaggcggaagaaggccagcgccgggtggagggcgcgctgagcagcgcccgggcagcacgtgccctgcagaaggaggcgctccgcaggctggagttgga

SEQ ID NO: 766821 - DNA, 120 bp, Artificial Sequence
  ENSG00000226321_37 (sequence is synthesized)
gcacctggcgagcgtgcgtgcggcaggccaggagaagcggcggctgcaggagcaactggaaacgctgcgccaggctcttgaagagagcaggaggcacagccaaggtctggccaagcaggg

SEQ ID NO: 766822 - DNA, 120 bp, Artificial Sequence
  ENSG00000226321_38 (sequence is synthesized)
gaagctgctggaagaacagctcaccaacttggagcacaggtgccagaaggctgaggtatcgctggagcccctgcgacagatggagcaagagacactgaagagggaggaggatgtggcgag

SEQ ID NO: 766823 - DNA, 120 bp, Artificial Sequence
  ENSG00000226321_39 (sequence is synthesized)
gctgggggctgagaaggagcagctggaccagtctctgaacagcctgcaccaggaggtggacggagccctgaggcaaaatcagcagctgcaggcccagatgacagagatggagcaggccca

SEQ ID NO: 766824 - DNA, 120 bp, Artificial Sequence
  ENSG00000226321_40 (sequence is synthesized)
cacccagcggctccaggacctgacagctcagcaccagcgggacctggccacagaggcagagcgtctccatggggcccggccgcaggccacgcaggccctggagtcccaagaatggaccca

SEQ ID NO: 766825 - DNA, 120 bp, Artificial Sequence
  ENSG00000226321_41 (sequence is synthesized)
ccagcagcaggtaaaggtgctggaagagcaggtggccagcctgaaggagcaactggaccaggaagtgcagtggcggcaacaggcccacctcggccaggccttccagacaggacacgccca

SEQ ID NO: 766826 - DNA, 120 bp, Artificial Sequence
  ENSG00000226321_42 (sequence is synthesized)
aagggactgaagctcccagcacaggggaggcgcccagcgtggctgcagaggaagggaacgcaccgcaggtgggaggggcccagctgatttctcagcgtcacagtgaaaggcacccgtgat

SEQ ID NO: 766827 - DNA, 120 bp, Artificial Sequence
  ENSG00000226321_43 (sequence is synthesized)
gagacagctcgctctcggcagtttcaggaccctccttgccctggctgctcatggggaacatttgaaatgcatgtgggggcctccgaattttgaattttaataaatagttgaatcagcgta

SEQ ID NO: 766828 - DNA, 120 bp, Artificial Sequence
  ENSG00000226321_44 (sequence is synthesized)
gcccagcacaagggctgcatgtggccacaccttaggcaggtccaaccgcctacccacccatccatccatccatccatccaaccatccgtccactcacccacccacctatctgttcatcca

SEQ ID NO: 766829 - DNA, 120 bp, Artificial Sequence
  ENSG00000226321_45 (sequence is synthesized)
gccatctgtccattcattcacccatccatccacccatccacttgcccatccatccatccttccacccagctacccatccatccatccatctctccatccatccctccatctgtccattca

SEQ ID NO: 766830 - DNA, 120 bp, Artificial Sequence
  ENSG00000226321_46 (sequence is synthesized)
tccctccatctgtccattcatacacccacctacccatccatccacccatccaaccacccacccattcacccatccatctgtccattcattcacccatccatccatttatccatccatcca

SEQ ID NO: 766831 - DNA, 120 bp, Artificial Sequence
  ENSG00000226321_47 (sequence is synthesized)
ggcaaggtggggtccctgcagtgcactttgaggcacgtcaggaaggtgtggcccctcgcctgtcctcccagtggcaaaggtggaggtagcccgcagggaccctcaggactgtctgcgcgg

SEQ ID NO: 766832 - DNA, 120 bp, Artificial Sequence
  ENSG00000226372_0 (sequence is synthesized)
gcttacctactgccttctccgaccgtccgtcctcggggcaggcgtgctctcttccctgagcttttaggggttggcttttccagttccagatcagctacagcaaacatcgttcgagatgtc

SEQ ID NO: 766833 - DNA, 120 bp, Artificial Sequence
  ENSG00000226372_1 (sequence is synthesized)
ccaccaagagggcagcacaggtggcttaccagacttagtgactgaaagcctgttcagcagcccagaggagcagtctggagtagcagcggtgacggcggcctcctcagacattgaaatggc

SEQ ID NO: 766834 - DNA, 120 bp, Artificial Sequence
  ENSG00000226372_2 (sequence is synthesized)
agccacagagccatcgaccggagatggtggtgataccagggatggtggtttcctgaacgatgccagcacagaaaatcaaaacacagactcagaaagttcaagtgaagacgtcgaacttga

SEQ ID NO: 766835 - DNA, 120 bp, Artificial Sequence
  ENSG00000226372_3 (sequence is synthesized)
aagcatgggtgaaggtttatttggttacccgttagtgggagaggagacagaaagggaggaggaagaagaagagatggaggaggaaggggaggaggaagaacagcctcggatgtgtccacg

SEQ ID NO: 766836 - DNA, 120 bp, Artificial Sequence
  ENSG00000226372_4 (sequence is synthesized)
atgcggtggcaccaaccatgatcagtgtttgttagacgaggatcaggcgttggaggagtggatttcctcagagacatctgccctgccccgatctcgctggcaagtccttactgctcttcg

SEQ ID NO: 766837 - DNA, 120 bp, Artificial Sequence
  ENSG00000226372_5 (sequence is synthesized)
ccagcggcagctgggttcaagtgcccgctttgtatatgaggcctgtggggcaagaacctttgtgcagcgtttccgcctgcagtatcttcttggaagccatgccggttctgtcagtaccat

SEQ ID NO: 766838 - DNA, 120 bp, Artificial Sequence
  ENSG00000226372_6 (sequence is synthesized)
acactttaaccagcgtggcacccgactggccagtagcggtgatgacttaagggtgatagtgtgggactgggtgcggcagaagccagtactgaactttgagagtggtcacgatattaatgt

SEQ ID NO: 766839 - DNA, 120 bp, Artificial Sequence
  ENSG00000226372_7 (sequence is synthesized)
catccaggctaagttctttcctaactgtggtgattccactctggccatgtgtggccatgatggacaggtacgggtagcagaactaattaatgcatcatattgcgagaatactaagcgtgt

SEQ ID NO: 766840 - DNA, 120 bp, Artificial Sequence
  ENSG00000226372_8 (sequence is synthesized)
ggccaagcacaggggacctgcccacgagttggctctggagccagactctccttataagttcctcacttcaggtgaagatgccgttgtgttcaccattgacctcaggcaagaccggccagc

SEQ ID NO: 766841 - DNA, 120 bp, Artificial Sequence
  ENSG00000226372_9 (sequence is synthesized)
ttcaaaagttgtggtaacaagagaaaatgataagaaagtcggactgtatacaatctctatgaatcctgccaatatttaccaatttgcagtgggtggacatgatcagtttgtaaggattta

SEQ ID NO: 766842 - DNA, 120 bp, Artificial Sequence
  ENSG00000226372_10 (sequence is synthesized)
tgaccagaggagaattgataagaaagaaaacaatggagtactcaagaaattcactcctcatcatctggtttattgtgatttcccaacaaacatcacctgcgttgtgtacagccacgatgg

SEQ ID NO: 766843 - DNA, 120 bp, Artificial Sequence
  ENSG00000226372_11 (sequence is synthesized)
cacagagctcctggccagctacaatgatgaagatatttacctcttcaactcctctctcagtgatggtgctcaatatgttaagagatataaggggcacagaaataatgacacaatcaaatg

SEQ ID NO: 766844 - DNA, 120 bp, Artificial Sequence
  ENSG00000226372_12 (sequence is synthesized)
tgttaatttctatggcccccggagtgagtttgtcgtgagcggtagtgattgtgggcacgtcttcttctgggagaaatcatcctcccagatcatccagttcatggagggggacagaggaga

SEQ ID NO: 766845 - DNA, 120 bp, Artificial Sequence
  ENSG00000226372_13 (sequence is synthesized)
tatagtaaactgtcttgaaccccacccttacctacctgtgttggcgaccagtggcctagatcagcatgtcaggatctggacacccacagctaaaactgccactgagcttactgggttaaa

SEQ ID NO: 766846 - DNA, 120 bp, Artificial Sequence
  ENSG00000226372_14 (sequence is synthesized)
tgttacagagagctcatcaacccggctggagagatcatggagctgagttcccagatgaagaagagttggatgagtcttccagcacctcagatacatccgaggaggagggccaagatcgag

SEQ ID NO: 766847 - DNA, 120 bp, Artificial Sequence
  ENSG00000226372_15 (sequence is synthesized)
tgcagtgcataccatcctgaaggcctcatatccagtccagctagatgccacctaagtacactggactttaaaattcagtttgactaatttagaattgtcaattgattaacagatttgctt

SEQ ID NO: 766848 - DNA, 120 bp, Artificial Sequence
  ENSG00000226372_16 (sequence is synthesized)
tttgtcttctgtttttgttaccccttatatgagtgcatacacaacttatttatgcctcttttcctttgttcccttataattgacctctaaaattgcataattttgttgaaaaaattaatg

SEQ ID NO: 766849 - DNA, 120 bp, Artificial Sequence
  ENSG00000226372_17 (sequence is synthesized)
gccttattagatgtatctactcatttcagacattctgaaagctattactttttagttttttcattttttaccaatttattttgaagataaagttcttcagttgagttgaaaatttcataa

SEQ ID NO: 766850 - DNA, 120 bp, Artificial Sequence
  ENSG00000226372_18 (sequence is synthesized)
acgtgtttattctttagaggtaaaataaggcaaaccatagttctttgaatactgacacacacatacacacagtctcagaaaaggaaaagagaagtagtgtgtagattaattcctaacact

SEQ ID NO: 766851 - DNA, 120 bp, Artificial Sequence
  ENSG00000226372_19 (sequence is synthesized)
tggccacacacacacacagcttcaaaagttgtagtaacaagagagaagaataagaaagtgggactgtatacaatctctatgaatcctgccaatatttaccaattcgcagtgggtggacat

SEQ ID NO: 766852 - DNA, 120 bp, Artificial Sequence
  ENSG00000226372_20 (sequence is synthesized)
gatcggtttttaaggatttatgaccagaggagaattgatgagaaagaaaacaatggagtactcaagaaattcactcttcatcatctggttaattgtgattttccaacaaacatcacctgc

SEQ ID NO: 766853 - DNA, 120 bp, Artificial Sequence
  ENSG00000226372_21 (sequence is synthesized)
attgtgtacagccacgatggcacagagctcctggccagctatgcacacacacatacacacagagccttagaaaaggaaaacaagaagtagtgtgtagatgaattcctaaccagataattc

SEQ ID NO: 766854 - DNA, 120 bp, Artificial Sequence
  ENSG00000226372_22 (sequence is synthesized)
atctcctcagagcaaataacttgggattatccacattttctgaatcaatatgttaataatattgattaatttgagcacactgaagctggtaagaactaaattaaatttaatcacatgaca

SEQ ID NO: 766855 - DNA, 120 bp, Artificial Sequence
  ENSG00000226372_23 (sequence is synthesized)
ttgtttactctatgcattaaatgttcttgaagttttatggttgggaactcccacaggattacattccaggaagtcctcctggcgcaagcatctcctataagataccagataggaatataa

SEQ ID NO: 766856 - DNA, 120 bp, Artificial Sequence
  ENSG00000226372_24 (sequence is synthesized)
aaatctctcatatttgaaaacatttattttaattaacttttaagaataagttgcaataaaaattgtttatacttacacataaccatttgatacagttggtagaaaaatcctatttaacat

SEQ ID NO: 766857 - DNA, 120 bp, Artificial Sequence
  ENSG00000226372_25 (sequence is synthesized)
ccatgcattgcttaaaatttagctgttttatgagtttgttttgaaaattgttgcaataaaaattgtttatacttacaagtgatgtagttggtagaaaaatcctatttgacatccatgcat

SEQ ID NO: 766858 - DNA, 120 bp, Artificial Sequence
  ENSG00000226372_26 (sequence is synthesized)
tgcttaaaatttagctgttttatgagtttgttttaaaaattgttgcagtaaaaattgtttatacttacaagtgatgtagttggtagaaaaatcctatttgacatccatggattgcttaaa

SEQ ID NO: 766859 - DNA, 120 bp, Artificial Sequence
  ENSG00000226372_27 (sequence is synthesized)
taaagttctctcagctgtcctcgagtttaaattgttttaaaaattgtcttaagctttacttaatataaatttaagttactagatgttaaattactgttcaataaaaatattcatttttat

SEQ ID NO: 766860 - DNA, 66 bp, Artificial Sequence
  ENSG00000226430_0 (sequence is synthesized)
acacacacacacagacacacacacggtttcataggtaaagatttcttccctgacattctattacat

SEQ ID NO: 766861 - DNA, 76 bp, Artificial Sequence
  ENSG00000226430_1 (sequence is synthesized)
ggccactgtcccaacccggttacactcatattacatgtgtctatcagcctgaggagtaatttgattcaggtgttct

SEQ ID NO: 766862 - DNA, 120 bp, Artificial Sequence
  ENSG00000226430_2 (sequence is synthesized)
tgctgatatttgattggtttatcgcacacctgatgggtgggtggggtgttcgcggttggagggggtgagttatataagggctgatgcggccagagagctggtcatttgaagactctctcg

SEQ ID NO: 766863 - DNA, 120 bp, Artificial Sequence
  ENSG00000226430_3 (sequence is synthesized)
ccagcagaaaaaccttgtgatccttgttgcgggcgacatggaagacgactcactctatttgggaggtgactggcagttcaatcacttttcaaaactcacatcttctcggctagatgcagc

SEQ ID NO: 766864 - DNA, 83 bp, Artificial Sequence
  ENSG00000226430_4 (sequence is synthesized)
ctcactctatttgggaggtgactggcagttcaatcacttttcaaaactcacatcttctcggcttctgaaaagtcaccactctc

SEQ ID NO: 766865 - DNA, 79 bp, Artificial Sequence
  ENSG00000226430_5 (sequence is synthesized)
ataggaaataccttctatgtgaacgtttccctgcagtgcctgacatacacactgccgctttccaactacatgctgtccc

SEQ ID NO: 766866 - DNA, 120 bp, Artificial Sequence
  ENSG00000226430_6 (sequence is synthesized)
ctgacatacacactgccgctttccaactacatgctgtcccgggaggactctcaaacgtgtcatcttcacaagtgctgcatgttctgtactatgcaagctcacatcacatgggccctccac

SEQ ID NO: 766867 - DNA, 120 bp, Artificial Sequence
  ENSG00000226430_7 (sequence is synthesized)
ccacagtcctggccatgtcatccagccctcacaggtattggctgctggcttccatagaggtgagcaggaggatgcccatgaatttctcatgtttactgtggatgccatgaaaaaggcatg

SEQ ID NO: 766868 - DNA, 67 bp, Artificial Sequence
  ENSG00000226430_8 (sequence is synthesized)
agcgtattggagatctcaaatcaagtatctccactgccacggcgtttcagacacagcaagctttgga

SEQ ID NO: 766869 - DNA, 120 bp, Artificial Sequence
  ENSG00000226430_9 (sequence is synthesized)
caatggagagaatgcctatcattgtggtctttgtctccagaaggcgcctgcctccaagacgttaactttacccacttctgccaaggtcctcattcttgtattgaagagattctccgatgt

SEQ ID NO: 766870 - DNA, 60 bp, Artificial Sequence
  ENSG00000226430_10 (sequence is synthesized)
agagattctccgatgtcacaggcaacaaacttgccaagaatgtgcaatatcctaagtgcc

SEQ ID NO: 766871 - DNA, 69 bp, Artificial Sequence
  ENSG00000226430_11 (sequence is synthesized)
tgattcatcaatcaaaatacaagtgtggtatgaaaccgacagatcaggagtccatgaacactggcacac

SEQ ID NO: 766872 - DNA, 86 bp, Artificial Sequence
  ENSG00000226430_12 (sequence is synthesized)
acgaaaccgacagtctgcaagggagcaccaggagatccaaagggaataacaaacacagcaagagatctctgcttgtgtgccagtga

SEQ ID NO: 766873 - DNA, 120 bp, Artificial Sequence
  ENSG00000226479_0 (sequence is synthesized)
actcccgcctccatgttcccggagtcgcctggaagcgtccgcccaaggtcgcgggccgcttggggagtcagcagcgcgccaggccccttcgggccccacacgcattaggtgccttcttga

SEQ ID NO: 766874 - DNA, 120 bp, Artificial Sequence
  ENSG00000226479_1 (sequence is synthesized)
ttgatgggtacggagtgaacgcgggcggcggcgggaccgaggcagcgcccagtttgtaaccgccgcgccgcccgtgcccgcgcgcgccacaccccagcgcgcttccggccgggccacgtg

SEQ ID NO: 766875 - DNA, 120 bp, Artificial Sequence
  ENSG00000226479_2 (sequence is synthesized)
cgcgtgcacgtgttccggcctctccgcttcgccgctccgaacctcctcctggtcgtcccggcattcgtccacgcggagccggcttgggcggggcccgggaggcggcggccggagaagccg

SEQ ID NO: 766876 - DNA, 120 bp, Artificial Sequence
  ENSG00000226479_3 (sequence is synthesized)
cggagacgcgagcgccgagcgtcgcgagggagcaggcccgggcaggcaagcggcggcctccgccatgaaccccaggggcctgttccaggacttcaaccccagtaagtttctcatctacac

SEQ ID NO: 766877 - DNA, 120 bp, Artificial Sequence
  ENSG00000226479_4 (sequence is synthesized)
ctgcctgctgctcttctcggtgctgctgcccctccgcctggacggcatcatccaatggagctactgggccgtctttgcccccatatggctgtggaagcttctagtcgtcgcaggcgcctc

SEQ ID NO: 766878 - DNA, 120 bp, Artificial Sequence
  ENSG00000226479_5 (sequence is synthesized)
cgtgggcgcgggcgtttgggcccgcaaccctcgctaccgcaccgagggagaggcctgtgtggagttcaaagccatgctgatcgctgtgggcatccacctgctgctgctcatgttcgaagt

SEQ ID NO: 766879 - DNA, 120 bp, Artificial Sequence
  ENSG00000226479_6 (sequence is synthesized)
cctggtctgcgacagggtggagaggggcacccacttctggctgctggtcttcatgcctctcttcttcgtgtcccccgtgtccgtggctgcctgcgtctggggctttcgacacgataggtc

SEQ ID NO: 766880 - DNA, 120 bp, Artificial Sequence
  ENSG00000226479_7 (sequence is synthesized)
gctggagctggagatcctgtgctcggtcaacatcctgcagttcatcttcatcgccctaaagctggacaggattattcactggccgtggctggtggtgtttgtgcccctgtggatcctcat

SEQ ID NO: 766881 - DNA, 120 bp, Artificial Sequence
  ENSG00000226479_8 (sequence is synthesized)
gtcgttcctttgcctggtcgtcctctattacatcgtctggtccctcctgttcctgcggtccctggatgtggttgccgagcagcggagaacacacgtgaccatggctatcagttggataac

SEQ ID NO: 766882 - DNA, 120 bp, Artificial Sequence
  ENSG00000226479_9 (sequence is synthesized)
gattgtcgtgcctctgctcacttttgaggtcctgctggttcacagattggatggccacaatacattctcctacgtctccatatttgtccccctttggctttccttactaactttaatggc

SEQ ID NO: 766883 - DNA, 120 bp, Artificial Sequence
  ENSG00000226479_10 (sequence is synthesized)
cacaacatttaggcgaaaggggggcaatcattggtggtttggcattcgcagagacttctgtcagtttctgcttgaaattttcccatttttaagagaatatgggaacatttcatatgatct

SEQ ID NO: 766884 - DNA, 120 bp, Artificial Sequence
  ENSG00000226479_11 (sequence is synthesized)
ccatcacgaagatagtgaagatgctgaagaaacatcagttccagaagctccgaaaattgctccaatatttggaaagaaggccagagtagttataacccagagccctgggaaatacgttcc

SEQ ID NO: 766885 - DNA, 120 bp, Artificial Sequence
  ENSG00000226479_12 (sequence is synthesized)
cccccctcccaagttaaatattgatatgccagattaaactcctagagaggacccaggcacacacagactccacttggccttcgcctcttgttcattcatcccaaacctggaaatggaaac

SEQ ID NO: 766886 - DNA, 120 bp, Artificial Sequence
  ENSG00000226479_13 (sequence is synthesized)
aggcttcaaacactcgtctcacgccgtgtttgagatcaccgcctcatcagtatgcatcatagatggaggtggtttcagtatgtgggtgtgtgtgatgtgtacctgggtaagagacttgct

SEQ ID NO: 766887 - DNA, 120 bp, Artificial Sequence
  ENSG00000226479_14 (sequence is synthesized)
ttccaggttcgcactttcaggtgtagctgggggcagtaagtcgaattgttttagtaggtcctcaaaaggaataaccacacagctgtttgtttaaatgctactgtacctatcaaaactatt

SEQ ID NO: 766888 - DNA, 120 bp, Artificial Sequence
  ENSG00000226479_15 (sequence is synthesized)
gtttaaaaagtatttttatacactgctaatctaaaattgtatttcagattgtgcctgtcataacaatagcaaatgtaaaaagttctctttcccaccacttgtttataaacctcatagttg

SEQ ID NO: 766889 - DNA, 120 bp, Artificial Sequence
  ENSG00000226479_16 (sequence is synthesized)
atatttttagtgttcctactgttaaaatactctctccttgggctttgctgatactggtctttaatattctgataggtgaatttttctaatggaatgaacccatgcatatatagtatttat

SEQ ID NO: 766890 - DNA, 120 bp, Artificial Sequence
  ENSG00000226479_17 (sequence is synthesized)
atgaatattttagcagtgtaatatgttgaattctagttctctgcattaccattattacgttaaagtattttttaaagcttaggtgtgaagatatgtgtctattgcagatgtccttgaaaa

SEQ ID NO: 766891 - DNA, 120 bp, Artificial Sequence
  ENSG00000226479_18 (sequence is synthesized)
ctgcataaaacagtatgtgcctggtgtggatcttaccaaagtactaggcatgaatgtagggactgcaaatcccatgggtcttaatatttaggtgttagtaaccaaggtctctggtagtac

SEQ ID NO: 766892 - DNA, 120 bp, Artificial Sequence
  ENSG00000226479_19 (sequence is synthesized)
ccgttagtagaggaagaggccactgcccttgggaacttgtgacaggctctagtgtggtaccaggccataaagtgacactgttatttagcaacttgaatttttccacacaggtagtaactg

SEQ ID NO: 766893 - DNA, 120 bp, Artificial Sequence
  ENSG00000226479_20 (sequence is synthesized)
tgtggaaataagcaacaagtggtttgtccatttctaagaatcttaaactattagttggctgtagtgtgaagcattacttgtcattggaaagatggagagagtggccttaaccggaagtgg

SEQ ID NO: 766894 - DNA, 120 bp, Artificial Sequence
  ENSG00000226479_21 (sequence is synthesized)
tcagtagaagcaggtgtcattttaagggccaaactttaatctgtcagcaatagggaaacaactgttcaaattatctttgtagataagaacagtgtttcttttttcttttcttttgttttt

SEQ ID NO: 766895 - DNA, 120 bp, Artificial Sequence
  ENSG00000226479_22 (sequence is synthesized)
gattacaggcgggaaccactgcacccggcaggtacagtgtttctttaggtgctggtggtacaccagggaatcagggcagaagctggatcctgcaagagtaatgtttgagaacaaataaat

SEQ ID NO: 766896 - DNA, 120 bp, Artificial Sequence
  ENSG00000226479_23 (sequence is synthesized)
actttcgaaaggaggtcgaaacaaaaaggagtgtaggtgttattactgcagagaagactgaatggagtccacttttcttattagtaacttactaaaaatgatctcaaatgggctccacac

SEQ ID NO: 766897 - DNA, 120 bp, Artificial Sequence
  ENSG00000226479_24 (sequence is synthesized)
actttgccctggccatgaggcaaacttgttgggtttggagaaaaacacataaccctaaattcactatttttgccctatataaaacattaaaataacatgctctgtacacatgctgtcaac

SEQ ID NO: 766898 - DNA, 120 bp, Artificial Sequence
  ENSG00000226479_25 (sequence is synthesized)
aaaagccagctctaggaacctgagtgccagaatgcctgagggagctacagctgggcttagttggctgggattgagctcgctgtctgagggagctcgctctgtctctctcacactggcagt

SEQ ID NO: 766899 - DNA, 120 bp, Artificial Sequence
  ENSG00000226479_26 (sequence is synthesized)
ttacaccagccggcagccctgagcagcagtgggtgtaactttttataaataaggattcattgattcattcatattctcaatatttcttgaagacctaccccgagccaagcatggtgccag

SEQ ID NO: 766900 - DNA, 120 bp, Artificial Sequence
  ENSG00000226479_27 (sequence is synthesized)
gcagtggggatgcagtggagagcaaacagccctgcccatgcaaagtgtcctgtacggtgagaagtgtgagctgcacccacaaagggaaagagcccagtgcagcttttgcaaaatgcaggg

SEQ ID NO: 766901 - DNA, 120 bp, Artificial Sequence
  ENSG00000226479_28 (sequence is synthesized)
aaggatgctgctagcctcagggtgacctagaactttaagctcatctttgttttcaggagcccagtgcctcccctccacccctaaagaatatctcaaagacgtggattttcatttcagtaa

SEQ ID NO: 766902 - DNA, 120 bp, Artificial Sequence
  ENSG00000226479_29 (sequence is synthesized)
gatttaggggtgcatgggcaggcagtgctggaggaactgggaggcaggtttggaggctgcagtgggaccactggcccctcctggctacagtttcaggccaggagcttgttggcacctggt

SEQ ID NO: 766903 - DNA, 120 bp, Artificial Sequence
  ENSG00000226479_30 (sequence is synthesized)
gcaaactcccaaacctgaggggtccccacaaccccccagcccatcttaacttcctcttcccccaagctatctggtgttggaaagccagcatctagtgtggaaacaagctttctcaccagg

SEQ ID NO: 766904 - DNA, 120 bp, Artificial Sequence
  ENSG00000226479_31 (sequence is synthesized)
taggccatccgctgtcaggaccattaggtaaaaacagaagtgacaggttgtaggaagtcgttcgatctgtgaggctgcgagcacttcagtgcctgggatttacctaactgccatgaaaca

SEQ ID NO: 766905 - DNA, 120 bp, Artificial Sequence
  ENSG00000226479_32 (sequence is synthesized)
ctgattatccagcattcagcatgtgtcagattctgtaactatttctcctgtgatgtatcagtcagcttttgctgcaaaacagcatcagaaatctcagtggtctacaactagattcccatt

SEQ ID NO: 766906 - DNA, 120 bp, Artificial Sequence
  ENSG00000226479_33 (sequence is synthesized)
cttgggtagtctacaagttggcttctaggttatgctccaggctgggggtctgatcacgtctgctccacaacatgtcccgtattctgggtccctggttgaagcagcagcttaccttgggcc

SEQ ID NO: 766907 - DNA, 120 bp, Artificial Sequence
  ENSG00000226479_34 (sequence is synthesized)
gtgttctttctcatggcagaagcacaggaggccaagccctaccttgcaagcacaaatacagcccctgctcactttctgttggccacaacacatggccatgcctgacctctgtggggtgag

SEQ ID NO: 766908 - DNA, 120 bp, Artificial Sequence
  ENSG00000226479_35 (sequence is synthesized)
gcagtgcatggccaaggaacaagcacagtccacacagggggctgtcactccgtgacctcagtattacaaaatggttctcaaggagtcgcaaaatgtgtggcagatcatccatgatttgtt

SEQ ID NO: 766909 - DNA, 120 bp, Artificial Sequence
  ENSG00000226479_36 (sequence is synthesized)
tcccgtgtgctttacgaatatcctgaaatttttaaaagctgtttccattagaagggatctgttggggatttgaggtgagatgagaaagaccctgcattccagcccctcagttagcagtgg

SEQ ID NO: 766910 - DNA, 120 bp, Artificial Sequence
  ENSG00000226479_37 (sequence is synthesized)
tgaggccggagtactccacacgggacagttttaggaaagtgctggaatccaaagtttctccggagggctatgcaaggcgctttggaaaggcgaagcctgggcgcagggagcccagccatg

SEQ ID NO: 766911 - DNA, 120 bp, Artificial Sequence
  ENSG00000226479_38 (sequence is synthesized)
taggtagaagcagcagacggtgagggaggccatccccacctggccctgccagggccctgactcagtgaaggaagctgttgggatacaggtcattcagccgggcaggaaagatgggatgaa

SEQ ID NO: 766912 - DNA, 120 bp, Artificial Sequence
  ENSG00000226479_39 (sequence is synthesized)
gcccagcaagttcacagggatccgggaagttgtgtggctggaaacccaggcagggctgcaccacagggaccatttgctggagatgcagcacttgccacagccaccaccactgacagcatg

SEQ ID NO: 766913 - DNA, 120 bp, Artificial Sequence
  ENSG00000226479_40 (sequence is synthesized)
acacccacaaaaagggagcctccagctgcacccctgctgctgcgagtacttcctcagctgtctgccatgagcttaaggttaagtaccaggagggaggatatgattgggcaaacctcaggc

SEQ ID NO: 766914 - DNA, 120 bp, Artificial Sequence
  ENSG00000226479_41 (sequence is synthesized)
atgtgttcattctgtagcttccagaacatgcgaggagagagcatctggctcctttgtctcgaggaggagggggcaggactctgccagaactcactcgataaaagattttcccaaaaggaa

SEQ ID NO: 766915 - DNA, 120 bp, Artificial Sequence
  ENSG00000226479_42 (sequence is synthesized)
gggtgttcagatgacaaaagtccactacaccactttccttggctatctgatgcacccccatcttcccatgcgcgcacctcagaaatcaggctcccacctgacataacacaaccatgcctc

SEQ ID NO: 766916 - DNA, 120 bp, Artificial Sequence
  ENSG00000226479_43 (sequence is synthesized)
acaaaaagacagtggtttatcccttccctaggagaaaagagaggcaatgccaagctgcttcatcaactgttaatacttcttccagcccgcaacccaggatatctgcaggtgtctctccct

SEQ ID NO: 766917 - DNA, 120 bp, Artificial Sequence
  ENSG00000226479_44 (sequence is synthesized)
ctggtttggtcatggctctctctgttctagaatgtatgggttaaagtcggctgccacaccatgccctcggcagtgtggtccaaggacccctgagggtcctcaaggtccttcctttcccaa

SEQ ID NO: 766918 - DNA, 120 bp, Artificial Sequence
  ENSG00000226479_45 (sequence is synthesized)
ccccacgtggttttcttcagtcaggataccatactgcaacagaccgaaggcggaagcagctatgaggatgcagcagccttctgttaagccaggctttaaggatctgcaaaaatgtaaaac

SEQ ID NO: 766919 - DNA, 120 bp, Artificial Sequence
  ENSG00000226479_46 (sequence is synthesized)
gatgccactcctactgatgaaatatattgttttggaaaatataggtttaaaaatttttttaaggtaacatgtaatggatgtatagtcttcaaatggatgaataaatgtttttcagagtta

SEQ ID NO: 766920 - DNA, 120 bp, Artificial Sequence
  ENSG00000226490_0 (sequence is synthesized)
atggcctcctcttgtcctgggacccccagcccagcaggtctgccccctccttctgtagccactccaggcgagacacttggtcccgcggcgcccccggagcccgccttcccggacatctac

SEQ ID NO: 766921 - DNA, 120 bp, Artificial Sequence
  ENSG00000226490_1 (sequence is synthesized)
ggcggggacgcgcagctctgggaggcgcatttccgcggcatcgggcgcgcctaccgcgcgctgggcaagcaggacgacttcgccatccgcgtgctcaccgagaacttcacgctgcccttc

SEQ ID NO: 766922 - DNA, 120 bp, Artificial Sequence
  ENSG00000226490_2 (sequence is synthesized)
cttcgacttcctgctgcgcggccccggagcttcgcccccagcgctgctgcggcccctgcacgccacggcccaggcagcgatgcgcaagcggcgcctggagcggctggccctgagctgcgc

SEQ ID NO: 766923 - DNA, 120 bp, Artificial Sequence
  ENSG00000226490_3 (sequence is synthesized)
tcctgctgctgcccggccccgccgccgccttcccggagcccgaggccagcgcttccagcgacggcacccccaggctggcccaggccccgccgctgccccgagagcgaacagaataaataa

SEQ ID NO: 766924 - DNA, 120 bp, Artificial Sequence
  ENSG00000226490_4 (sequence is synthesized)
gcccctccccgtctcctgggcagcctagtaaacagaagcctgtctcccgggctgctggcatggcctcctcttgtcctgggacccccagcccagcaggtctgccccctccttctgtagcca

SEQ ID NO: 766925 - DNA, 120 bp, Artificial Sequence
  ENSG00000226650_0 (sequence is synthesized)
ggatttgaaacttggcggttaaagctccggctgggacagggcggcgggagaccccgggtgaacggggaagggacatttagtttgagacggtgctgagataggatcatgaaggaagaggtg

SEQ ID NO: 766926 - DNA, 120 bp, Artificial Sequence
  ENSG00000226650_1 (sequence is synthesized)
aagggaattcctgtaagagtggcactgcgttgtcgccctctggtccccaaagagattagcgagggctgccagatgtgcctttccttcgtgcccggggagactcaggtggtggttggtact

SEQ ID NO: 766927 - DNA, 120 bp, Artificial Sequence
  ENSG00000226650_2 (sequence is synthesized)
gataaatccttcacctacgattttgtgtttgacccctgtactgagcaggaagaagtcttcaataaagcagtagcgccgctcataaaaggcatatttaaaggatataatgcaacggtcctg

SEQ ID NO: 766928 - DNA, 120 bp, Artificial Sequence
  ENSG00000226650_3 (sequence is synthesized)
gcctatgggcagactggctctggaaaaacctattcaatgggaggtgcatacactgcggagcaggagaatgaaccaacagttggcattattcctagggtaatacaactgctcttcaaagaa

SEQ ID NO: 766929 - DNA, 120 bp, Artificial Sequence
  ENSG00000226650_4 (sequence is synthesized)
attgataaaaagagtgactttgaatttactctgaaagtgtcttacttagagatttacaatgaagaaattttggatcttctatgcccatctcgtgagaaagctcaaataaatatacgggag

SEQ ID NO: 766930 - DNA, 120 bp, Artificial Sequence
  ENSG00000226650_5 (sequence is synthesized)
gatcctaaggaaggcataaagattgtgggactcactgagaagactgttttagttgccttggatactgtttcctgtttggagcagggcaacaactctaggactgtggcctccacagctatg

SEQ ID NO: 766931 - DNA, 120 bp, Artificial Sequence
  ENSG00000226650_6 (sequence is synthesized)
aactcccagtcgtcccgatctcatgccatctttacaatctccatagagcaaagaaagaaaagtgacaagaattgcagctttcgctccaagctgcatcttgtagatctcgctggatcagaa

SEQ ID NO: 766932 - DNA, 120 bp, Artificial Sequence
  ENSG00000226650_7 (sequence is synthesized)
agacagaagaaaaccaaggctgaaggggatcgtctaaaagagggtattaatattaaccgaggcctcctatgcttgggaaatgtaatcagtgctcttggagatgacaaaaagggtagcttt

SEQ ID NO: 766933 - DNA, 120 bp, Artificial Sequence
  ENSG00000226650_8 (sequence is synthesized)
gtgccctacagagattccaagttaactcgactgctgcaagattctctaggaggtaacagccacactcttatgatagcctgtgtgagtcctgctgactccaatctagaggaaacattaagt

SEQ ID NO: 766934 - DNA, 120 bp, Artificial Sequence
  ENSG00000226650_9 (sequence is synthesized)
acccttcgctatgctgacagagcaagaaaaatcaagaacaaacctattgttaatattgatccccacacagctgaacttaatcatctaaagcaacaggtacaacagctacaagtcttgttg

SEQ ID NO: 766935 - DNA, 120 bp, Artificial Sequence
  ENSG00000226650_10 (sequence is synthesized)
ctacaagcccatggaggtaccctgcctggatctataaatgcagaaccatcagagaatctacaatccctgatggagaagaatcagtccctggtagaggagaatgaaaaattaagtcgttgt

SEQ ID NO: 766936 - DNA, 120 bp, Artificial Sequence
  ENSG00000226650_11 (sequence is synthesized)
ctgagcaaggcagctggtcagacagcccagatgttggagaggatcattttgacagagcaagtgaatgaaaaactgaacgccaagctagaagagctcaggcagcatgtggcctgcaagctg

SEQ ID NO: 766937 - DNA, 120 bp, Artificial Sequence
  ENSG00000226650_12 (sequence is synthesized)
gatcttcaaaagctagtggagactttggaagaccaggaattgaaagaaaatgtagagataatttgtaacctgcagcaactgattacccagttatcagatgaaactgttgcttgcacggct

SEQ ID NO: 766938 - DNA, 120 bp, Artificial Sequence
  ENSG00000226650_13 (sequence is synthesized)
gcagccattgatactgcggtagaagaagaagctcaagtggaaaccagtccagagacaagcaggtcttctgacgcttttaccactcagcatgctctccatcaagctcagatgtctaaggag

SEQ ID NO: 766939 - DNA, 120 bp, Artificial Sequence
  ENSG00000226650_14 (sequence is synthesized)
gtggttgagttgaataacgcccttgcactgaaagaggccctagttaggaagatgactcagaacgacaaccaactacagcccattcagtttcaataccaggataacataaaaaatctagaa

SEQ ID NO: 766940 - DNA, 120 bp, Artificial Sequence
  ENSG00000226650_15 (sequence is synthesized)
ttagaagtcatcaatctgcaaaaggaaaaggaagaattggttcgtgaacttcagacagcaaagaagaatgtcaaccaagccaagctgagtgagcaccgccacaaacttctccaggagctg

SEQ ID NO: 766941 - DNA, 120 bp, Artificial Sequence
  ENSG00000226650_16 (sequence is synthesized)
gagggtcaaatagctgatctgaagaagaaactgaatgagcagtccaaacttctgaaactaaaggaatccacagagcgtactgtctccaagctgaaccaagagatatggatgatgaaaaac

SEQ ID NO: 766942 - DNA, 120 bp, Artificial Sequence
  ENSG00000226650_17 (sequence is synthesized)
cagcgggtacagttaatgcgtcaaatgaaagaggatgctgagaagtttagacaatggaagcagaaaaaagacaaagaagtaatacagttgaaagaacgagaccgtaagaggcaatatgag

SEQ ID NO: 766943 - DNA, 120 bp, Artificial Sequence
  ENSG00000226650_18 (sequence is synthesized)
cagctgccaacaagcgactcaaggatgctctccagaaacaacgagaggtcacagataagcggaaagagactcagagccatggaaaggaaggtattgcagctcgagtgaggaattggcttg

SEQ ID NO: 766944 - DNA, 120 bp, Artificial Sequence
  ENSG00000226650_19 (sequence is synthesized)
gaaatgaaattgaggttatggtcagtactgaggaagccaaacgccatctgaatgacctccttgaagacagaaagatcctggctcaggatgtggttcaactcaaagaaaaaaaggaatctc

SEQ ID NO: 766945 - DNA, 120 bp, Artificial Sequence
  ENSG00000226650_20 (sequence is synthesized)
gggagaatccacctcctaaactccggaagtgtacattctccctttctgaggtgcatggtcaagttttggagtcagaagattgtattacaaaacagattgaaagcctagagactgaaatgg

SEQ ID NO: 766946 - DNA, 120 bp, Artificial Sequence
  ENSG00000226650_21 (sequence is synthesized)
aactcaggagtgctcagattgctgacctacagcagaagctgctggatgcagaaagtgaagataggccaaaacaatgctgggagaatattgccaccattctggaagccaagtgtgccctga

SEQ ID NO: 766947 - DNA, 120 bp, Artificial Sequence
  ENSG00000226650_22 (sequence is synthesized)
aatatttgattggagagctggtctcctccaaaatacatgtcaccaaacttgaaaacagcctgagacagagcaaggccagctgtgctgacatgcagaagatgctatttgaggaacaaaatc

SEQ ID NO: 766948 - DNA, 120 bp, Artificial Sequence
  ENSG00000226650_23 (sequence is synthesized)
atttttctgagatagagacagagttacaagctgagctggtcagaatggagcaacagcaccaagagaaggtgctataccttgtcagccagctgcaggaaagccaaatggcagagaagcagt

SEQ ID NO: 766949 - DNA, 120 bp, Artificial Sequence
  ENSG00000226650_24 (sequence is synthesized)
tagagaaatcagccagtgaaaaggaacaacagctggtgagcacactgcagtgtcaggatgaagaacttgagaagatgcgagaagtgtgtgagcaaaatcagcagcttctccaagagaatg

SEQ ID NO: 766950 - DNA, 120 bp, Artificial Sequence
  ENSG00000226650_25 (sequence is synthesized)
aaatcatcaagcagaaactgatcctcctccaggtagccagcagacagaaacatcttcctaatgatacccttctatctccagactcttcttttgaatatatcccacctaagccaaaacctt

SEQ ID NO: 766951 - DNA, 120 bp, Artificial Sequence
  ENSG00000226650_26 (sequence is synthesized)
ctcgtgttaaagaaaagtttctggagcaaagcatggacatcgaggatctaaaatattgttcagagcattctgtgaatgagcatgaagatggtgatggtgatggcgacagtgatgaggggg

SEQ ID NO: 766952 - DNA, 120 bp, Artificial Sequence
  ENSG00000226650_27 (sequence is synthesized)
atgatgaggaatggaagccaacaaaattagtcaaggtgtccaggaagaacatccaagggtgttcctgcaagggctggtgtgggaacaagcagtgtgggtgcaggaagcaaaagtcagact

SEQ ID NO: 766953 - DNA, 120 bp, Artificial Sequence
  ENSG00000226650_28 (sequence is synthesized)
gtggtgtggactgtagctgtgaccccacaaagtgtcggaaccgccagcaaggcaaggatagcttgggcactgttgaacagacccaggattccgaaggctccttcaaactggaggatccta

SEQ ID NO: 766954 - DNA, 120 bp, Artificial Sequence
  ENSG00000226650_29 (sequence is synthesized)
ccgaggtgaccccaggattgagcttctttaaccctgtctgtgccacccccaatagcaagatcctgaaagagatgtgtgacatggagcaggtgctgtcaaagaagactgctccagctccct

SEQ ID NO: 766955 - DNA, 120 bp, Artificial Sequence
  ENSG00000226650_30 (sequence is synthesized)
ccccttttgacctcccagagtcgaaacatggagcaacagaataccaacaaaataagcctccagggaagaaaaagaaacgagctctggctagcaacaccagcttcttctctggctgctccc

SEQ ID NO: 766956 - DNA, 120 bp, Artificial Sequence
  ENSG00000226650_31 (sequence is synthesized)
ctatcgaagaagaggcccactgaagttggagtcatcatctctacccccaatctggcttgggagatgctttccagttgcagccagaaggggttttttaaatgacttctctggatttcaggt

SEQ ID NO: 766957 - DNA, 120 bp, Artificial Sequence
  ENSG00000226650_32 (sequence is synthesized)
ttcttgccgttgaaaaaaaggaacaaagcattactaaaaagaaggtaacctttgttggatgttgtccctcagtctccatccccagactactgctctctgctctctagaaggctgctaaac

SEQ ID NO: 766958 - DNA, 120 bp, Artificial Sequence
  ENSG00000226650_33 (sequence is synthesized)
cacctgctgaagagagaaccaacagactttcctaatgactcatcaggaaccagtcctcagtatgatcaagttccttcttatttgtgagcagttcaggctatctcctgatggggatgaggc

SEQ ID NO: 766959 - DNA, 120 bp, Artificial Sequence
  ENSG00000226650_34 (sequence is synthesized)
caaggctttcttatcttttggttgtctctgcttaatggaggagcctggcctaggatggaggtctggctcagatctttcactccacctcgggaatggggttgtgatctttcctgtcctgac

SEQ ID NO: 766960 - DNA, 120 bp, Artificial Sequence
  ENSG00000226650_35 (sequence is synthesized)
cccctctgaattgtaagtgtttcaatagtactcttgattgtatgccatgttgttgaagtaaatgaattatttttaaatgttaagtaaataaaccttagcccatctactgttaaaaaaaaa

SEQ ID NO: 766961 - DNA, 120 bp, Artificial Sequence
  ENSG00000226660_0 (sequence is synthesized)
aaaatgcccctcctttcctccacaggaccagatgcctgagctaggaaaggcctcattcctgctgtgatcctgccatggatacctggctcgtatgctgggcaatttttagtctcttgaaag

SEQ ID NO: 766962 - DNA, 120 bp, Artificial Sequence
  ENSG00000226660_1 (sequence is synthesized)
ggaagtgatcttgcgctgtgtccccatctctaatcacttatacttctattggtacagacaaatcttggggcagaaagtcgagtttctggtttccttttataataatgaaatctcagagaa

SEQ ID NO: 766963 - DNA, 120 bp, Artificial Sequence
  ENSG00000226660_2 (sequence is synthesized)
gtctgaaatattcgatgatcaattctcagttgaaaggcctgatggatcaaatttcactctgaagatccggtccacaaagctggaggactcagccatgtacttctgtgccagcagtgaagc

SEQ ID NO: 766964 - DNA, 120 bp, Artificial Sequence
  ENSG00000226690_0 (sequence is synthesized)
atgattcctccatgtgaaaatgccccccacataatataccatgagtctcagagaggcacaagagatagggatattgcaaagaggctgcaatatccttcacgacaggatctcaactccaaa

SEQ ID NO: 766965 - DNA, 120 bp, Artificial Sequence
  ENSG00000226690_1 (sequence is synthesized)
tggaaaaaaagtgttctgcaacctccacaatgtaaaatgaaagttaatgtatgggaaataaagcctcctgattttagctacaaactgtatacatctttgagaattccagaaagatcatca

SEQ ID NO: 766966 - DNA, 120 bp, Artificial Sequence
  ENSG00000226690_2 (sequence is synthesized)
aaaccaattaaggaagaaaaaaggaggaaaaaaatcagttttccagaaacaatgcttcacttgcccagcataaggaatcatcctaaggaggttacagctcctaaatttataactacattt

SEQ ID NO: 766967 - DNA, 120 bp, Artificial Sequence
  ENSG00000226690_3 (sequence is synthesized)
tatccaaggggtgtatatgtcaatcccaaaccacatgactttcgacagtaccaacctggtttaccaaactttgagacaacttatgaaaaggacccctttggattaaaatttaaatcacaa

SEQ ID NO: 766968 - DNA, 120 bp, Artificial Sequence
  ENSG00000226690_4 (sequence is synthesized)
cacttaagtacagtacatgggtaccagttaccgaaagatgataaacagaagactagtacagaaagatttatcacccacaagcattgtgaatgcacctgggattcaaaactaattttgacg

SEQ ID NO: 766969 - DNA, 120 bp, Artificial Sequence
  ENSG00000226690_5 (sequence is synthesized)
aaagccccatggcctgttagatctgcttcatatacaagacatagaaggcagcgtgatgcatacagtgcatttatggatcgtgtggaagaaaagtttacaaagatatgcaagagcagatag

SEQ ID NO: 766970 - DNA, 120 bp, Artificial Sequence
  ENSG00000226690_6 (sequence is synthesized)
catggagcttttcattttctacaaaggttttctcgagacagcatcagttagatttgagacaaggaaaaacacactttgattaaggttttgggatttctcaaagacaaagaacagaagtcg

SEQ ID NO: 766971 - DNA, 120 bp, Artificial Sequence
  ENSG00000226690_7 (sequence is synthesized)
atctcatattttgcacagtccaaattatcatactaaagctaaagaagataaacggtgttgatgttttaactcattgctgattggtttctagctgctacaaatctttcattctgagaatat

SEQ ID NO: 766972 - DNA, 120 bp, Artificial Sequence
  ENSG00000226690_8 (sequence is synthesized)
tcacgcctgtaatcccagccctttggaagcctgaggcgggaggatcatgaggtcagcagttcgagaccagcctgaacaacatgatgaaacctcgtctttactaaaactacaaaaaaaaaa

SEQ ID NO: 766973 - DNA, 82 bp, Artificial Sequence
  ENSG00000226690_9 (sequence is synthesized)
tcgagaccagcctgaacaacatgatgaaacctcgtctttactaaaactacaaaaaaaaaaaaaaattagctggtcgcggtgg

SEQ ID NO: 766974 - DNA, 74 bp, Artificial Sequence
  ENSG00000226690_10 (sequence is synthesized)
tccatgagaggaccagaaatggcagcagacatacatttcttcaacaaattgctgtatgtttctcttattatttt

SEQ ID NO: 766975 - DNA, 120 bp, Artificial Sequence
  ENSG00000226690_11 (sequence is synthesized)
atttcttcaacaaattgctgtatgtttctcttattattttgagtctggagtgtctcctgaagaaatacaaagagactaacttcatgagtgcaatttaacatatctctaagaagtatccat

SEQ ID NO: 766976 - DNA, 120 bp, Artificial Sequence
  ENSG00000226690_12 (sequence is synthesized)
tacagaaatctgcactctcccagaggcatgagaaagtgctaaaacaacaaatgaaagttgcataatttgaaattcccttgttaccacagggatcagaatccaatcataaggcttttgatt

SEQ ID NO: 766977 - DNA, 120 bp, Artificial Sequence
  ENSG00000226690_13 (sequence is synthesized)
tagtttgtgaaagttagatcttgcaactatgagtggaaatgctgataatgtgctttctgttaatgtccaaagttaaagatgctctagtctcaggtaaagctaatgtgagacaaacaacaa

SEQ ID NO: 766978 - DNA, 120 bp, Artificial Sequence
  ENSG00000226690_14 (sequence is synthesized)
caacccagatgagcaaaacttaaatatactttagcttcttttgtaaagcaaaggataatgttaaactgttagtctctcttggctttacagaaaagatttgctgagatatattactctaaa

SEQ ID NO: 766979 - DNA, 120 bp, Artificial Sequence
  ENSG00000226690_15 (sequence is synthesized)
ttcaaatgtaccaacctggtttaccaaactttgagacaacttatgaaaaggacccctttggattaaaatttaaatcacaacacttaagtacagtacatgggtaccagttaccgaaagatg

SEQ ID NO: 766980 - DNA, 120 bp, Artificial Sequence
  ENSG00000226690_16 (sequence is synthesized)
gttcgtccatccaaactcctttcccttcttctccccttttattaagtactctactgtcatcaagggttagtaatgatctcagatgctctaagaaatctttggagacattctcaagcttca

SEQ ID NO: 766981 - DNA, 120 bp, Artificial Sequence
  ENSG00000226690_17 (sequence is synthesized)
gagaccttcctctcactaatttctcatgagagtaaccgtcaggacaaatcacttggcatttagcaccttatctcgtgatgtattcttatagtaccaacctggtttaccaaactttgagac

SEQ ID NO: 766982 - DNA, 120 bp, Artificial Sequence
  ENSG00000226690_18 (sequence is synthesized)
aaggtgttggtgtccagaggagaaatggaagaaacaggggcaaaaagctcagatagctgatggaccaaaacagcatagggcttcctgaactctggcctgaatgttcatctcccgtgcatt

SEQ ID NO: 766983 - DNA, 120 bp, Artificial Sequence
  ENSG00000226690_19 (sequence is synthesized)
gatgctctagtctcagttttttctaatacactttaagaagcttctctgagacactcaagtatatcaaaagagagaagatctccaagtaacagaaataataaatgtccttcttaaagaaca

SEQ ID NO: 766984 - DNA, 120 bp, Artificial Sequence
  ENSG00000226690_20 (sequence is synthesized)
ggcagttctttgtgtttattctgggaaggacccctatggaagggcctgttagtaggagttactacttcctcattgtttttggggaatcatactgcagtgaaacgttccaaagcagatgtt

SEQ ID NO: 766985 - DNA, 120 bp, Artificial Sequence
  ENSG00000226690_21 (sequence is synthesized)
tcagaccaagagacaaatgttaaatcaaatgcaagaacagcccatatgcaaacaataatcctttttccccaggagataaccttagagatgcctccagcctagactggaggaaaaatagtc

SEQ ID NO: 766986 - DNA, 120 bp, Artificial Sequence
  ENSG00000226690_22 (sequence is synthesized)
cagcagcagcagaactggagttgaaacgagactaacttcatgagtgcaatttaacatatctctaagaagtatccatttgtgtatatggagatcaaaacatttctgcttctgtcatgtatt

SEQ ID NO: 766987 - DNA, 120 bp, Artificial Sequence
  ENSG00000226690_23 (sequence is synthesized)
tacaggcctgctatctgtcatgtgatgcgacactagagtcaggctgaaatcggtattttgttgctgcaaagagctgtttgttttgtcagtcttaagatctctgttttaatgttaacgctg

SEQ ID NO: 766988 - DNA, 120 bp, Artificial Sequence
  ENSG00000226690_24 (sequence is synthesized)
taaaggatgactgttatgctgtgtgggaaagtagtagttaaaaatcaaatatttttactttaaaaaatagagaacaaggtagcaaccagaattgaagtcactgaaatataaatggggcac

SEQ ID NO: 766989 - DNA, 120 bp, Artificial Sequence
  ENSG00000226690_25 (sequence is synthesized)
tttcccagaggatgtcatccaaagacaaaaaaataggaaagtttaattcatgacacagtgaagttcttctacggtttaaattgttcctagaaatagattttattttcaggaatcatagga

SEQ ID NO: 766990 - DNA, 120 bp, Artificial Sequence
  ENSG00000226690_26 (sequence is synthesized)
aagaagaaaaagaaaagaaaagaaaaagagtatatgtatgagctttgtgttcacatatacaaggtggcataggttgaaataatcaacatttatttagtatgtttatggcatattgaaatc

SEQ ID NO: 766991 - DNA, 120 bp, Artificial Sequence
  ENSG00000226690_27 (sequence is synthesized)
aatcaacatttatttagtatgtttatggcatattgaaatcaatatttgaatcttcatttttcagttttttctaatacactttaagaagcttctctgagacactcaagtatatcaaaagag

SEQ ID NO: 766992 - DNA, 120 bp, Artificial Sequence
  ENSG00000226690_28 (sequence is synthesized)
agaagatctccaagtaacagaaataataaatgtccttcttaaagaacaccaggcttggagaatttatagttccaactagaaggaaaggtctgtcttttaacatgttaaaataattttcta

SEQ ID NO: 766993 - DNA, 120 bp, Artificial Sequence
  ENSG00000226690_29 (sequence is synthesized)
aatttttgtttaaatattttgagggaaagaaaacaaatgacttgaaacttctttgcttctgatcaagatttgatgattataattgaaaattaataaaaggggagggtaggatttaatgct

SEQ ID NO: 766994 - DNA, 120 bp, Artificial Sequence
  ENSG00000226690_30 (sequence is synthesized)
attgccagttttatcaaatggattatcctatcacctttccaatttcactatgaaaactactgaaataaaggcaagtacgtatttaatagcattgttgacataagcaacattaagtggaaa

SEQ ID NO: 766995 - DNA, 120 bp, Artificial Sequence
  ENSG00000226742_0 (sequence is synthesized)
atacgggaatcgcggagcttagctgtcgccacctcgcgccgggtccgcgcggcccacgggaccccccactgacgcccccggccagcggtccacatggacgtgcggggccctgaagccccc

SEQ ID NO: 766996 - DNA, 120 bp, Artificial Sequence
  ENSG00000226742_1 (sequence is synthesized)
ggcgggcgcgcgctgcgggacgcggcagaaaatctatttcaggaacttcaggaacattttcaagctctgacggcaacattaaacctcagaatggaagaaatgggaaatcgcattgaggac

SEQ ID NO: 766997 - DNA, 120 bp, Artificial Sequence
  ENSG00000226742_2 (sequence is synthesized)
ctgtatttggagatggggcctctacagaagtcattaaggttacatcggtcctgagggtggggccctcatccaacaggattcgtctttctgagaagagacgcaaggggctcgcctgctctc

SEQ ID NO: 766998 - DNA, 120 bp, Artificial Sequence
  ENSG00000226742_3 (sequence is synthesized)
ccctccgtgcctgcaccagagaaggaggccatcggcaagccaaggagagccctccccagaaatcacacggaccagcaccttgatctgggacttccagaaaacagaactgtgaaaagacaa

SEQ ID NO: 766999 - DNA, 120 bp, Artificial Sequence
  ENSG00000226742_4 (sequence is synthesized)
gtttctgttgtttaaaccacccaatctgaagtattttgttatggcagtcctgggcagactaatacaatatgcaacacatttacaataaatatacaataaacttacaaatgtggaatgtaa

SEQ ID NO: 767000 - DNA, 120 bp, Artificial Sequence
  ENSG00000226742_5 (sequence is synthesized)
ccagagagccactagtatatccaacttgattaaagcaccacagtgccacagacgaggcaaggcttggcagccatgcaggcctaggtttcaaattcttatcctctgttgctggctgtaacc

SEQ ID NO: 767001 - DNA, 120 bp, Artificial Sequence
  ENSG00000226742_6 (sequence is synthesized)
tggggaaatctaagctttagttttcttctctgccaaatatctacctggtaagtggttgtaaggatttaagaaaattgcttgcaaagcacttaagtcagggcaaggtagacagcaggtaca

SEQ ID NO: 767002 - DNA, 120 bp, Artificial Sequence
  ENSG00000226742_7 (sequence is synthesized)
taatgagataaacttgaaatacagagtccaaatcattatgatttcaactgtactgcagccacaaagcaccagtgagaacgttattaaaatcaggggtgaacatacttaatacacctgata

SEQ ID NO: 767003 - DNA, 120 bp, Artificial Sequence
  ENSG00000226742_8 (sequence is synthesized)
ttaacaaatgctgtgattctttcggactggtagattatcatggagtatctttttgttgtctggtagtagtagttgcatgtgccatgggaggcggagtctctgaggacatcctggctgtgc

SEQ ID NO: 767004 - DNA, 120 bp, Artificial Sequence
  ENSG00000226742_9 (sequence is synthesized)
atcatggagtatctttttgttgtctggtagtagtaggtaatagtttacttaggatttcccagtatttacttctgtgcttttatgtggcttcctgatgtgttaattacccctcacctatag

SEQ ID NO: 767005 - DNA, 120 bp, Artificial Sequence
  ENSG00000226742_10 (sequence is synthesized)
gagctcatgctacacaattaaatatattccttaaatattgtgtgcttgcaacttttgattttgtaaatgggttcccacaggacaaaaatgagtcttaaacataaaattaaaccatatgaa

SEQ ID NO: 767006 - DNA, 87 bp, Artificial Sequence
  ENSG00000226742_11 (sequence is synthesized)
gacaaaaatgagtcttaaacataaaattaaaccatatgaatgttagttttttagttaatttcagctgggtggtagtctagatcgctt

SEQ ID NO: 767007 - DNA, 120 bp, Artificial Sequence
  ENSG00000226742_12 (sequence is synthesized)
cactgcactccagcctgggggaagagcaagaccctacaaacaaaaaagagttaattccattatatttatttttacatacccagagtttgactaaaatataccagacaatctcctgtcccc

SEQ ID NO: 767008 - DNA, 120 bp, Artificial Sequence
  ENSG00000226742_13 (sequence is synthesized)
aaatccatgtccaagcaaggggagccacgttttctaagctcacagtttaaaggttaaagagacacactgaggaaaactcagggaaagaagctgatttgcatggacactaggcctgtcgtt

SEQ ID NO: 767009 - DNA, 120 bp, Artificial Sequence
  ENSG00000226761_0 (sequence is synthesized)
atgataacttttctgcccatcattttttccattctaatagtggttacatttgtgattggaaattttgctaatggcttcatagcattggtaaattccattgagtggttcaagagacaaaag

SEQ ID NO: 767010 - DNA, 120 bp, Artificial Sequence
  ENSG00000226761_1 (sequence is synthesized)
atctcttttgctgaccaaattctcactgctctggcagtctccagagttggtttactctgggtattagtattaaattggtatgcaactgagttgaatccagcttttaacagtatagaagta

SEQ ID NO: 767011 - DNA, 120 bp, Artificial Sequence
  ENSG00000226761_2 (sequence is synthesized)
agaattactgcttacaatgtctgggcagtaatcaaccatttcagcaactggcttgctactagcctcagcatattttatttgctcaagattgccaatttctccaaccttatttttcttcac

SEQ ID NO: 767012 - DNA, 120 bp, Artificial Sequence
  ENSG00000226761_3 (sequence is synthesized)
cagattatatggacaaaagaatatgaaggaaacatgacttggaagatcaaactgaggagtgcaatgtacctttcaaatacaacggtaaccatcctagcaaacttagttcccttcactctg

SEQ ID NO: 767013 - DNA, 120 bp, Artificial Sequence
  ENSG00000226761_4 (sequence is synthesized)
accctgatatcttttctgctgttaatctgttctctgtgtaaacatctcaaaaagatgcagctccatggcaaaggatctcaagatcccagcatgaaggtccacataaaagctttgcaaact

SEQ ID NO: 767014 - DNA, 120 bp, Artificial Sequence
  ENSG00000226761_5 (sequence is synthesized)
gtgacctccttcctcttgttatgtgccatttactttctgtccataatcatgtcagtttggagttttgagagtctggaaaacaaacctgtcttcatgttctgcgaagctattgcattcagc

SEQ ID NO: 767015 - DNA, 120 bp, Artificial Sequence
  ENSG00000226761_6 (sequence is synthesized)
tatccttcaacccacccattcatcctgatttggggaaacaagaagctaaagcagacttttctttcagttttgtggcatgtgaggtactgggtgaaaggagagaagccttcatcttcatag

SEQ ID NO: 767016 - DNA, 120 bp, Artificial Sequence
  ENSG00000226763_0 (sequence is synthesized)
gacttccaggaccacaagcccttttgcgcccaccatgtcttcacctaagagatcttcaaagcccagtatgtctctggcacccagtggatcctccatgcccactgcggatcccaagcctcc

SEQ ID NO: 767017 - DNA, 120 bp, Artificial Sequence
  ENSG00000226763_1 (sequence is synthesized)
tgcctccttgaagtccaccaaatcagcaacacccaacagatccttagtgcccaccaaaccagcgacatcccgtaactcagtcatgagcccaagcagttccaagtccaccaaatcgaccag

SEQ ID NO: 767018 - DNA, 120 bp, Artificial Sequence
  ENSG00000226763_2 (sequence is synthesized)
tacaaaaagagccccttctaaccggcccagcagcaggtcccgagtccgcagcaaagcaagaacacccagcagggtgagcaccgacaccaggaccagcaaagccagcaaggccagcgacgt

SEQ ID NO: 767019 - DNA, 120 bp, Artificial Sequence
  ENSG00000226763_3 (sequence is synthesized)
gagatgccaccagcggaggggcacacacagccggggtaggacacctggcagaaggggaagccgcagctccaagaggtcacccagcagggccagcactcctggcaggataagaactcatgg

SEQ ID NO: 767020 - DNA, 120 bp, Artificial Sequence
  ENSG00000226763_4 (sequence is synthesized)
tgccagaccaggcatggccagcagggtgagaactcccacttcacagcaaaaagggagccggggaaagagttacggccggcctagaaccagcaacagggaaaggagtgacagccagcctag

SEQ ID NO: 767021 - DNA, 120 bp, Artificial Sequence
  ENSG00000226763_5 (sequence is synthesized)
aaatctgagcaagaagagttaccgcccaccaggaggctcaggtatagggaggagttccgagctggctgtaactcccagtacagccaagtgtcaaaccccgactggaattccctccaagga

SEQ ID NO: 767022 - DNA, 120 bp, Artificial Sequence
  ENSG00000226763_6 (sequence is synthesized)
gaagagtgacaacccatctccatcctcatcaaggaaggtgaagagctacggtcagatgatcatccccagtagggaaaagagttacagccccactgaaatgtccagcagggtcaagagtta

SEQ ID NO: 767023 - DNA, 120 bp, Artificial Sequence
  ENSG00000226763_7 (sequence is synthesized)
taaccaggccagcacccgcagcaggccgcaaagtcacagccaatctagaagccccagaaggtcaagaagtggcagtcagaagaggacgcacagcagagtgagaagtcacagttggaagag

SEQ ID NO: 767024 - DNA, 120 bp, Artificial Sequence
  ENSG00000226763_8 (sequence is synthesized)
aaaccatagcagggcaagaagtcgcacccggaagggaattctgagccagatgggaagacacagccagtctagaagccacagcaaggggaaaagtcaaaaccaatctagaacccccagaag

SEQ ID NO: 767025 - DNA, 120 bp, Artificial Sequence
  ENSG00000226763_9 (sequence is synthesized)
aggaagaagtcacaactggtctagaaaccccagcaaggaaagaagtcatagccattccagaagctccagcaaagagagagatcacaggggatctagcagccccaggaaggagagtggtcg

SEQ ID NO: 767026 - DNA, 120 bp, Artificial Sequence
  ENSG00000226763_10 (sequence is synthesized)
gaagccccaacaagcagagagatcacagccgatctagaagtcccaacaaggcgagagatcgcagccgatctagaagtccctacaaggcgagagatcgcagccgatctagaagtcccaaca

SEQ ID NO: 767027 - DNA, 120 bp, Artificial Sequence
  ENSG00000226763_11 (sequence is synthesized)
aggcgagagattgcagccgatctagaagtccctacaaggcgagagatcgcagccgatctagaagtcccaacaaggcaagagatcatagccgatctagaagtcccaacaaggcgagagatc

SEQ ID NO: 767028 - DNA, 120 bp, Artificial Sequence
  ENSG00000226763_12 (sequence is synthesized)
gcagccgatctagaagccccagcaaggaaagagatcacagccaacttggaagccccagcaaagagagagatcacagacgatctagaagccccagcaaggagagacagtgcagacaatcta

SEQ ID NO: 767029 - DNA, 120 bp, Artificial Sequence
  ENSG00000226763_13 (sequence is synthesized)
gaagctccagcaaagagagagatcacagacgatctagaagccccagcaaggagagacagcgcagacaatctagaagccccaacaaggagagagatcgcagccaatctagaagccccagcg

SEQ ID NO: 767030 - DNA, 120 bp, Artificial Sequence
  ENSG00000226763_14 (sequence is synthesized)
aggagagagagcacagacaatccagaagccccagcaaagagagagatcgcagacgatggagaagccccagcaaggagagagagcgcagacaatctagaagctccagcgaggagagagatc

SEQ ID NO: 767031 - DNA, 120 bp, Artificial Sequence
  ENSG00000226763_15 (sequence is synthesized)
acagccgatctagaagccccaataagcagagtggttacagtcgacctagagcctccagcaaggagaaagctcatagccgatctagaacccccagcaaagaaggaaatcatagccaatcta

SEQ ID NO: 767032 - DNA, 120 bp, Artificial Sequence
  ENSG00000226763_16 (sequence is synthesized)
gaacctctagcaaggagagcgaccccagtcaatctacagtccccagaagtcccgactggaagagatcccctactaggacaagcagtctcagtcagaatagaacccctagcaagacaagca

SEQ ID NO: 767033 - DNA, 120 bp, Artificial Sequence
  ENSG00000226763_17 (sequence is synthesized)
gccactccccatcaacatttcccagtgggggccaaaccctaagccaggatgacagtcaagccgacgccaccacctctaaggccaccttacctggggaaaggtcttcatcatcttcttcca

SEQ ID NO: 767034 - DNA, 120 bp, Artificial Sequence
  ENSG00000226763_18 (sequence is synthesized)
agctggcgtagcccccagtctcagctggctcacgggtctctgtcatgaccgggggaggggacaggagacaggagcagagcagcagctgagcagcgtccctccccggccagctctccacag

SEQ ID NO: 767035 - DNA, 120 bp, Artificial Sequence
  ENSG00000226763_19 (sequence is synthesized)
ccacacctccggccacaagttctctaatacaggatgttggcaggtagagagggatgctggatagggggaaaggaaagacctgtgatgattcaataaatttttacatagcacccatcccca

SEQ ID NO: 767036 - DNA, 120 bp, Artificial Sequence
  ENSG00000226763_20 (sequence is synthesized)
aacctgtaggcagcgcttgagggtagcgggatagcagctgcaagcgcgcgtgggaggcgggggctctgggcggaacaaaaatcacaggatgtcagaggatgtttcccgggaagaactggg

SEQ ID NO: 767037 - DNA, 120 bp, Artificial Sequence
  ENSG00000226763_21 (sequence is synthesized)
ataaaggaagggtcccagcaccatggaggacccgaaccctgaagagaacatgaagcagcaggattcacccaaggagagaagtccccagagcccaggaggcaacatctttggcctgtgaca

SEQ ID NO: 767038 - DNA, 120 bp, Artificial Sequence
  ENSG00000226784_0 (sequence is synthesized)
atggccgcctacaaactggtgctgatccggcacggcgagagcacatggaacctggagaaccgcttcagctgctggtacgacgccgatctgagcccggcgggccacgaggaggcgaagcgc

SEQ ID NO: 767039 - DNA, 120 bp, Artificial Sequence
  ENSG00000226784_1 (sequence is synthesized)
ggcgggcaggcgctacgagatgctggctatgagtttgacatctgcctcacctcagtgcagaagagagtgatccggaccctctggacagtgctagatgccattgatcagatgtggctgcca

SEQ ID NO: 767040 - DNA, 120 bp, Artificial Sequence
  ENSG00000226784_2 (sequence is synthesized)
gtggtgaggacttggcgcctcaatgagcggcactatgggggtctaaccggtctcaataaagcagaaactgctgcaaagcatggtgaggcccaggtgaagatctggaggcgctcctatgat

SEQ ID NO: 767041 - DNA, 120 bp, Artificial Sequence
  ENSG00000226784_3 (sequence is synthesized)
gtcccaccacctccgatggagcccgaccatcctttctacagcaacatcagtaaggatcgcaggtatgcagacctcacagaagatcagctaccctcctatgagagtccgaaggatactatt

SEQ ID NO: 767042 - DNA, 120 bp, Artificial Sequence
  ENSG00000226784_4 (sequence is synthesized)
gccagagctctgcccttctggaatgaagaaatagttccccagatcaaggaggggaaacgtgtactgattgcagcccatggcaacagcctccagggcattgccaagcatgtggagggtctc

SEQ ID NO: 767043 - DNA, 120 bp, Artificial Sequence
  ENSG00000226784_5 (sequence is synthesized)
tctgaagaggctatcatggagctgaacctgccgactggtattcccatcgtctatgaattggacaagaacttgaagcctatcaagcccatgcagtttctgggggatgaagagacggtgtgc

SEQ ID NO: 767044 - DNA, 120 bp, Artificial Sequence
  ENSG00000226784_6 (sequence is synthesized)
aaagccatagaagctgtggctgcccagggcaaggccaagaagtgaaggccagcggggaggatactgtccccaggagcaccctccctgctggtcttgtccctctgcccctcccacctgcac

SEQ ID NO: 767045 - DNA, 120 bp, Artificial Sequence
  ENSG00000226784_7 (sequence is synthesized)
gaccacatctgtagacatcttgagttgtagctgcagatggggaccagtggctcccattttcattttagccattttgtcgcctgcacccactcccttcatacaatctagtcagaatagcag

SEQ ID NO: 767046 - DNA, 120 bp, Artificial Sequence
  ENSG00000226784_8 (sequence is synthesized)
ttctagagcacaggttctcagtctaagctgtggaaaagctccccttatccaacagagtttaaaagtagtgacttgggtttttgtgagtgctttgtttactaaggactttggggaggaaca

SEQ ID NO: 767047 - DNA, 120 bp, Artificial Sequence
  ENSG00000226784_9 (sequence is synthesized)
tgctaagccacgaccaatgaggagaagcaacagagcctgtctgtccccatgagcagagtctgtcctctgctcttctgcagtcaggccactgcctgggggctctagtcattccagtggaag

SEQ ID NO: 767048 - DNA, 120 bp, Artificial Sequence
  ENSG00000226784_10 (sequence is synthesized)
atgaatgtaatctgcatggtgatgtgacaactgtttcctccttgaccccagaggatctggctctaggttgggatcaatcctgaatttcgttatgtgttatatttacttttattaaaaaag

SEQ ID NO: 767049 - DNA, 120 bp, Artificial Sequence
  ENSG00000226784_11 (sequence is synthesized)
tatagtatatattaataatacaaaacaataacccttctggggtttcttgtggcggttgaaatagtcccacatgtggtcatcagaaaataagccattcctcataccaatataggatcagct

SEQ ID NO: 767050 - DNA, 120 bp, Artificial Sequence
  ENSG00000226784_12 (sequence is synthesized)
ccttgacctctgaggggcaggagtgcttcctggtgtgtgtattagaatcccttcctgccttgtttcatggcagtgaaatgcctcttggtcctgtccaagtgtgtctttcactgatttctg

SEQ ID NO: 767051 - DNA, 120 bp, Artificial Sequence
  ENSG00000226784_13 (sequence is synthesized)
aatcatgttctagttgcttgaccctgccacatgggcccagtgttcatctgagcataactgtactaaatccttttaccagatcagtataataaaggagtgatgtgcaattaaaaaaaaaaa

SEQ ID NO: 767052 - DNA, 120 bp, Artificial Sequence
  ENSG00000226792_0 (sequence is synthesized)
atgttcagaaagatccactccatctttaactccagcccacagagaaagacggcggccgagagccccttctacgaaggagccagccccgcagtgaagctgattcgaagcagttccatgtat

SEQ ID NO: 767053 - DNA, 120 bp, Artificial Sequence
  ENSG00000226792_1 (sequence is synthesized)
gtggtcggggaccacggggagaaattcagcgagtccttaaagaagtacaaaagcaccagtagcatggacaccagcctgtactacctgcggcaggaggaggaccgggcgtggatgtattcg

SEQ ID NO: 767054 - DNA, 120 bp, Artificial Sequence
  ENSG00000226792_2 (sequence is synthesized)
cgcacccaggactgcctgcagtacctgcaggagctgctggccttgcgcaaaaaatatctcagcagcttcagtgatctgaagccccaccgcacccaggggatttcctcaacctcctccaaa

SEQ ID NO: 767055 - DNA, 120 bp, Artificial Sequence
  ENSG00000226792_3 (sequence is synthesized)
tcctccaagggagggaaaaagactcctgtccggtctactcccaaagaaataaagaaagcaaccccaaagaaatactcgcagttcagtgctgatgtggccgaggccattgccttctttgac

SEQ ID NO: 767056 - DNA, 120 bp, Artificial Sequence
  ENSG00000226792_4 (sequence is synthesized)
tccatcattgcagagctggatacagagagacgaccccgggctgctgaggccagcctgccaaatgaagatgtggactttgacgtggccaccagctccagggagcacagcttgcattctaac

SEQ ID NO: 767057 - DNA, 120 bp, Artificial Sequence
  ENSG00000226792_5 (sequence is synthesized)
tggatcctgcgggcaccgcgcagacactccgaggatatcgctgcccacactgtgcatactgtagacggccagtttcgaaggagcaccgagcacaggaccgtgggcactcagaggagactc

SEQ ID NO: 767058 - DNA, 120 bp, Artificial Sequence
  ENSG00000226792_6 (sequence is synthesized)
gagaggcaccccatttatttgcccaaggctgtggaaggggccttcaacacctggaaatttaagcccaaagcctgcaaaaaagacctggggagctccagacagatccttttcaacttctca

SEQ ID NO: 767059 - DNA, 120 bp, Artificial Sequence
  ENSG00000226792_7 (sequence is synthesized)
ggagaagatatggagtgggatgcagagctctttgcgttggagccccagttgtctcctggggaggactactatgagacagagaaccccaaaggacagtggctgcttcgagaaagactttgg

SEQ ID NO: 767060 - DNA, 120 bp, Artificial Sequence
  ENSG00000226792_8 (sequence is synthesized)
gagcggacggtgccctgactccatctggattccttgacgtgtctcagactgggtccctgagaagctgtccgctttcagcgcagcatgaggtatttggtagagttgaaaatgccaattgta

SEQ ID NO: 767061 - DNA, 120 bp, Artificial Sequence
  ENSG00000226792_9 (sequence is synthesized)
acacagtcaacccactcagcacactgcctgctggtgccgtgccagtgccaaacagacctgtggcttcccaggggacaggtctcaggacactctcagagcttgagtttctctgcgtgggct

SEQ ID NO: 767062 - DNA, 120 bp, Artificial Sequence
  ENSG00000226792_10 (sequence is synthesized)
gatgaccagggacttacagcctggctggtcttcaagagctgaaggaatggaaggtcttgagtggagtgtctgggctcactcccctgacctcacctggcctggtcctcattctccacgtgt

SEQ ID NO: 767063 - DNA, 120 bp, Artificial Sequence
  ENSG00000226792_11 (sequence is synthesized)
ctgtccaggtggctgctagcaatgtgctcagtaccagaaatgaactcacctgtagatttctgggccaaagcttcaaagaggtagctcctctttctatgaggctcagagacatgctggatc

SEQ ID NO: 767064 - DNA, 120 bp, Artificial Sequence
  ENSG00000226792_12 (sequence is synthesized)
ttgccgtcttgtgtgcagaatgcagttgagaaagcagctccttttgctctcttttcagagttttccagaaactcctgctgcattaagctaagatgaggctaatgccctggcaatggggtg

SEQ ID NO: 767065 - DNA, 120 bp, Artificial Sequence
  ENSG00000226792_13 (sequence is synthesized)
agggaaggggtatgtcacgagcctgcctgggggccacactgtttcctcaggccccaaaactcagctccccttcacataggcaattgacaagagaagaagggagatggggtgattcttttc

SEQ ID NO: 767066 - DNA, 120 bp, Artificial Sequence
  ENSG00000226792_14 (sequence is synthesized)
tttttcttctaattcttacccagaaaaatctttttaaatatccatggaaccagtttatgacaggccacacctttccctttccccagttaagagaacaatcagaatcattacgttcttttg

SEQ ID NO: 767067 - DNA, 120 bp, Artificial Sequence
  ENSG00000226792_15 (sequence is synthesized)
gtatagaaaggatttctgtattttaggaactatctgaatcagaattacatttaaaatatattctttgtatttctaaatactttttacatttttgcaatagttgtacccattcaagcttga

SEQ ID NO: 767068 - DNA, 120 bp, Artificial Sequence
  ENSG00000226792_16 (sequence is synthesized)
gaaccactggtttggagaatatactgaaatttatctattctcacttctttttttggcattttcttgtaaaccagtctgtgcatgtataagggtctttgggcagaaggaagggagagagac

SEQ ID NO: 767069 - DNA, 120 bp, Artificial Sequence
  ENSG00000226792_17 (sequence is synthesized)
aaaaaacagaaaacaaaacaaaacaaagaaaaccacaatcatttgaattaagccaaggatgttctaggctaaggtcaggctaagaactgaacagaggcttcctttctgccatgcctgtgg

SEQ ID NO: 767070 - DNA, 120 bp, Artificial Sequence
  ENSG00000226792_18 (sequence is synthesized)
gatgatattcttattgttccattttttaggaagaaccttttgtttatgtgaacctgatcatatgaatctaagaatatgtaactcttacaaataaaaaacagctagtaattatattgcatt

SEQ ID NO: 767071 - DNA, 120 bp, Artificial Sequence
  ENSG00000226792_19 (sequence is synthesized)
cttagaaattttatctcaacatgttttcagaatgaaaccatactagaaatgttttaatacctctctttattatttttcgagtgccaatgtcaatgtttggaaagtttctttcattttgtt

SEQ ID NO: 767072 - DNA, 120 bp, Artificial Sequence
  ENSG00000226792_20 (sequence is synthesized)
gcttgtactaacccagctatagccagaagcttgactggaaagtaaatgtttaggagatttgttttataaactgcattaaagcactgccatttatcaccacagatcttttattttccctaa

SEQ ID NO: 767073 - DNA, 120 bp, Artificial Sequence
  ENSG00000226792_21 (sequence is synthesized)
atgtggccttgtttgaagcctcatctataaaagttcattgttggggataaactcaggataaaggtgtctttactctgcctcttatcaaactacagtttatcatagatccaccctgaaatt

SEQ ID NO: 767074 - DNA, 120 bp, Artificial Sequence
  ENSG00000226792_22 (sequence is synthesized)
atgtggtgaagatactgtgtacattttgtttttaaagataagaaaaaataaacatgactgcgaggatgtttggagtcctgattttttaaaaagcatttattgcttatggcacatgaagct

SEQ ID NO: 767075 - DNA, 120 bp, Artificial Sequence
  ENSG00000226792_23 (sequence is synthesized)
gtgccgtcttattttgctttgttttgtatgttttttgtctttcatgagactatacacagcctgaaaaattccatgattgggaaacagaaggttgtcttgtctttggggatcatttttagg

SEQ ID NO: 767076 - DNA, 120 bp, Artificial Sequence
  ENSG00000226792_24 (sequence is synthesized)
tgtttgaagttggtgataaacccaaggatctgtgctctgcctggggaatcttgagatggtgtctggtggggtttgagataaatgaaatctgaaacaataaaagtcaattcagaaaaccca

SEQ ID NO: 767077 - DNA, 60 bp, Artificial Sequence
  ENSG00000226792_25 (sequence is synthesized)
cgtcagtgactgtctagggggcttccgaggtgatcgcttgggccagagttccaggggctc

SEQ ID NO: 767078 - DNA, 80 bp, Artificial Sequence
  ENSG00000226792_26 (sequence is synthesized)
tgttcttttgctcttctcatttaagagctgtgacactcaccgtgaaggtctgcagcttcattgttgaagtcagtgagact

SEQ ID NO: 767079 - DNA, 120 bp, Artificial Sequence
  ENSG00000226792_27 (sequence is synthesized)
cgtgaaggtctgcagcttcattgttgaagtcagtgagactacgaacccactggagggaaccaactccagacacaacagtgcactgggtctgacccttgggaagaatccagcacgagaaag

SEQ ID NO: 767080 - DNA, 120 bp, Artificial Sequence
  ENSG00000226887_0 (sequence is synthesized)
tcttggtcttctggcctggcggcgatcgtcggccagtttatccctcggagttgcactggcagacacgccgctactttgtagcgggtttcgggcgggccacgcgtgcggcgacaggaaccc

SEQ ID NO: 767081 - DNA, 120 bp, Artificial Sequence
  ENSG00000226887_1 (sequence is synthesized)
aaccccggccgaccttgggctccaggaattcgttgtctacgtctgcggaggtgcggcagcctcagttttaagcgcaggaaggcaatagaggctgtgctctgaacctttccctcacgatga

SEQ ID NO: 767082 - DNA, 120 bp, Artificial Sequence
  ENSG00000226887_2 (sequence is synthesized)
tcttctgcctgttgaccatcctggtgtctttcccatgtggccctgtatggttggcatggttcctgtctttaggacttgtgatcaagtatatctgaaagtttttagaagaaaagatgtgtt

SEQ ID NO: 767083 - DNA, 120 bp, Artificial Sequence
  ENSG00000226887_3 (sequence is synthesized)
gtaacctccctggaaaaagaagagaccttatgaagtactgctaaccacctacatagtcatcaaaataaaattcctgaatttgtacaagccacaggaagctagattgagatcattatatga

SEQ ID NO: 767084 - DNA, 120 bp, Artificial Sequence
  ENSG00000226887_4 (sequence is synthesized)
caactggaaggccaaggctatgggttacctcaaattgaggaattttggcacctactcacaggctccatgagcagatgaagtagacagctttactcagtatctcagaccaagaacttcatc

SEQ ID NO: 767085 - DNA, 120 bp, Artificial Sequence
  ENSG00000226887_5 (sequence is synthesized)
tccatctccaactagctgaaacatcttccctcctcaacctggaaaattctctgacttagaaatttaaacaaaaccctcccctttcattgaatctccattgtctggagtttgcttgtttta

SEQ ID NO: 767086 - DNA, 120 bp, Artificial Sequence
  ENSG00000226887_6 (sequence is synthesized)
atctagcctgttcctccactatgggctccctttcaaactatgccctgcttcaactaacccttactgcttttttgacaattctagtacaacctcagcacctgcttgctccagttttccgga

SEQ ID NO: 767087 - DNA, 120 bp, Artificial Sequence
  ENSG00000226887_7 (sequence is synthesized)
cactatctatcttgactaatcagtctaattgctggttatgtgaacatctagataatgcagaacaacccgaactagtttttgttcctgccagtgcaagcacctggtggacctattctggac

SEQ ID NO: 767088 - DNA, 120 bp, Artificial Sequence
  ENSG00000226887_8 (sequence is synthesized)
aatggatgtatgaaagggtgtggtatccacaagcagaagtacagaatcactctacttcctcctatcgtaaagtgacttggcactgggaagcctccatggaagctcaaggtctatcctttg

SEQ ID NO: 767089 - DNA, 120 bp, Artificial Sequence
  ENSG00000226887_9 (sequence is synthesized)
ctcaagtaaggttattggagggaaatttttctctttgcgtagaaaataaaaatggcagtggacccttcctaggtaatatacctaaacaatactgtaatcaaatactatggtttgattcta

SEQ ID NO: 767090 - DNA, 120 bp, Artificial Sequence
  ENSG00000226887_10 (sequence is synthesized)
cagatggcaccttcatgccctctatagatgttacaaatgaatccaggaacgatgatgatgatacaagtgtttgcctaggcactagacaatgttcctggtttgcaggttgcacaaaccgga

SEQ ID NO: 767091 - DNA, 120 bp, Artificial Sequence
  ENSG00000226887_11 (sequence is synthesized)
ctctatagctgccaaaaccaaaccaaaggccttctgtaccagctatttcgcaacctattttgctcttatggcctgacagaggcacatgggaaatggagatgtgcagatgccagcataact

SEQ ID NO: 767092 - DNA, 120 bp, Artificial Sequence
  ENSG00000226887_12 (sequence is synthesized)
aatgacaaaggtcatgatggacaccggacccccacctggtggctcacaggttccaatctgaccttgtctgtgaacaactctggcctcttttttttgtgcggcaatggggtgtacaaaggg

SEQ ID NO: 767093 - DNA, 120 bp, Artificial Sequence
  ENSG00000226887_13 (sequence is synthesized)
tttccacctaaatggtctgggcgatgtggacttgggtatcttgtaccttccctcaccagatacctcaccttaaatgctagccaaattacaaacctgagatccttcattcataaagtaaca

SEQ ID NO: 767094 - DNA, 120 bp, Artificial Sequence
  ENSG00000226887_14 (sequence is synthesized)
ccgcatagatgcacccaaggagacacagacaatccacctctgtattgcaaccccaaggacaattcaacaataagggccctttttccaagtttgggaacttatgatttagaaaaggcaatt

SEQ ID NO: 767095 - DNA, 120 bp, Artificial Sequence
  ENSG00000226887_15 (sequence is synthesized)
ctaaacatttccaaagcaatggaacaggaattcagtgccactaagcagaccttggaagcacaccaatcaaaagttagcagtttagcctctgcatcccgaaaggatcatgtcttggatata

SEQ ID NO: 767096 - DNA, 120 bp, Artificial Sequence
  ENSG00000226887_16 (sequence is synthesized)
ccgaccacccaacgacaaacggcttgtggaactgttggcaaacagtgttgcctctatataaattattcggaagaaataaagtctaatatacagcgtctccacgaagcatccgagaacctg

SEQ ID NO: 767097 - DNA, 120 bp, Artificial Sequence
  ENSG00000226887_17 (sequence is synthesized)
aagaatgtaccgttacttgattggcaaggcatatttgcaaaagtgggagactggttcagatcatggggctatgtgcttttaattgttcttttctgcttattcatctttgttttaatctat

SEQ ID NO: 767098 - DNA, 120 bp, Artificial Sequence
  ENSG00000226887_18 (sequence is synthesized)
gttcgtgtctttcgcaaatctcgcagatcccttaactcccaacctctgaacctagccttatctccacagcaatcagcacagctccttgtcagtgaaacttcatgtcaagtttcaaatagg

SEQ ID NO: 767099 - DNA, 120 bp, Artificial Sequence
  ENSG00000226887_19 (sequence is synthesized)
gcaatgaagggactaacaacccatcaatatgacacaagtctactttgagaatatctgaacaaacagcagctgcagacaaaaagccttagctaaactttgatgagtaaagcaggtcttacc

SEQ ID NO: 767100 - DNA, 120 bp, Artificial Sequence
  ENSG00000226887_20 (sequence is synthesized)
gagaattcagctgccaaaaccctcctctgagtgttcctcttataagggcacttagcactaggacctcccaaggtattgtaaataagccttatcagaactttttgtagtttcattctgaag

SEQ ID NO: 767101 - DNA, 120 bp, Artificial Sequence
  ENSG00000226887_21 (sequence is synthesized)
ccttaagacacacaccataaagctgatctgtaaacccttaccccttgctgttcagagagctactctttgtagtgttcttgcatgcatatataataaatgttttttctattgatctgttaa

SEQ ID NO: 767102 - DNA, 120 bp, Artificial Sequence
  ENSG00000226887_22 (sequence is synthesized)
caagcccccaaacactggaactaagttgggggcaggatagtttctcccaacagcactttgtaggcttctggatagaccaaagagtgtgtttgaatagataagggaattttgttcccttga

SEQ ID NO: 767103 - DNA, 120 bp, Artificial Sequence
  ENSG00000226887_23 (sequence is synthesized)
ttttggttgaaggtagaagaatccaatgtacacatacacaaaactatgtccttaaatttgtctcaaagaataaatattgggtagtcatcagaattgactgaaaacttactttagggagaa

SEQ ID NO: 767104 - DNA, 120 bp, Artificial Sequence
  ENSG00000226887_24 (sequence is synthesized)
agccacaaataatttaggctggtatgatctgagctttcctgatttcccatgggcattttagtggtctaatggaatattagtctgatatgcattttagccatcttatgaaatgggccgcag

SEQ ID NO: 767105 - DNA, 120 bp, Artificial Sequence
  ENSG00000226887_25 (sequence is synthesized)
gtggaagtaggatgcagggagtgttgaggtggcatctattatatcaaatgcttcactctgcccagtcctctggtgagttccttacatgcatctttctagttaatcctctcggtgttcata

SEQ ID NO: 767106 - DNA, 120 bp, Artificial Sequence
  ENSG00000226887_26 (sequence is synthesized)
ttttacagattaatcaactcaaagggtagatagcttgctaaagattatactattactgaaaaatagcaagatgcagaacagcatacctagtatgttactcttttttttttttttttgagg

SEQ ID NO: 767107 - DNA, 63 bp, Artificial Sequence
  ENSG00000226887_27 (sequence is synthesized)
gcatacctagtatgttactcttttttttttttttttgaggcagagtctggcccttgggttcat

SEQ ID NO: 767108 - DNA, 89 bp, Artificial Sequence
  ENSG00000226887_28 (sequence is synthesized)
tcctatcgtatgttactttttattttaaaaaaggggaaatgatatgtatatgtgtatgtatttgcaaataaaacaggaaaagccattca

SEQ ID NO: 767109 - DNA, 120 bp, Artificial Sequence
  ENSG00000226887_29 (sequence is synthesized)
aatcacccagctcggagcacctggccagtgggaccggtgggttcctggtgcctgaatccggctgtccgctctgcggtgccccgccccgccccaacccaggatcttcccagccccgctccg

SEQ ID NO: 767110 - DNA, 120 bp, Artificial Sequence
  ENSG00000226887_30 (sequence is synthesized)
cacagggtagaaggcagaggtacagaataccacaggacatgtcagaacgtgggcgtgaaacgggcccaagggaccacgggtgaaggtctaggactcttccagcagcctgagcgccagcag

SEQ ID NO: 767111 - DNA, 120 bp, Artificial Sequence
  ENSG00000226941_0 (sequence is synthesized)
cagggtagctccagctgtccctcccgcagttggccctgtggtgttccgaagccggttacgtacgcctgagggccaggcgaacctcaggctctttgtcctactaaaaagcgcagcacaatg

SEQ ID NO: 767112 - DNA, 120 bp, Artificial Sequence
  ENSG00000226941_1 (sequence is synthesized)
aagcagatcatcctggcaagcttttcattggtggcctcaatagagaaaccaatgagaagatgcttaaagcagtatttgggaaacatggtcccatatcagaagttcttttgataaaggatc

SEQ ID NO: 767113 - DNA, 120 bp, Artificial Sequence
  ENSG00000226941_2 (sequence is synthesized)
aaaggatcgaaccagcaaatccagaggctttgcatttattacttttgagaaccctgcagatgctaagaatgctgcgaaagatatgaatggaacgtctttgcatggaaaagcaataaaagt

SEQ ID NO: 767114 - DNA, 73 bp, Artificial Sequence
  ENSG00000226941_3 (sequence is synthesized)
gaccaccagcttcttagtggaggaacaagagggtggcttccctcacatgaagggcacctggatgatggtggat

SEQ ID NO: 767115 - DNA, 120 bp, Artificial Sequence
  ENSG00000226941_4 (sequence is synthesized)
ggatacactcctgatctcaagatgagttattctaggggactcattccagttaaaagaggtccatcttcaagaagtggaggtcctcctccgaaaaaatctgctccttctgctgtggcaaga

SEQ ID NO: 767116 - DNA, 80 bp, Artificial Sequence
  ENSG00000226941_5 (sequence is synthesized)
tccagttaaaagaggtccatcttcaagaagtggaggtcctcctccgaaaaaatctgctccttctccatgtcacaaagaag

SEQ ID NO: 767117 - DNA, 120 bp, Artificial Sequence
  ENSG00000226941_6 (sequence is synthesized)
tcctggagaaatgatcgcatgtcaacaagacatgatggttatgcaactaacgatggaaatcatccaagttgccaagaaacgagggattatgctccaccatctagaggctatgcataccgt

SEQ ID NO: 767118 - DNA, 120 bp, Artificial Sequence; identical to SEQ ID NO: 562623
  ENSG00000226941_7 (sequence is synthesized)

SEQ ID NO: 767119 - DNA, 120 bp, Artificial Sequence; identical to SEQ ID NO: 562624
  ENSG00000226941_8 (sequence is synthesized)

SEQ ID NO: 767120 - DNA, 80 bp, Artificial Sequence; identical to SEQ ID NO: 562625
  ENSG00000226941_9 (sequence is synthesized)

SEQ ID NO: 767121 - DNA, 120 bp, Artificial Sequence
  ENSG00000226941_10 (sequence is synthesized)
tagagatgcacttcagagatacgggacctctcatggtgcaccacctgcaagagggcctcggatgtcttatggtggaagcacctgccacgcatatagtaatacacgagatagatatggcag

SEQ ID NO: 767122 - DNA, 120 bp, Artificial Sequence; identical to SEQ ID NO: 562627
  ENSG00000226941_11 (sequence is synthesized)

SEQ ID NO: 767123 - DNA, 120 bp, Artificial Sequence; identical to SEQ ID NO: 562628
  ENSG00000226941_12 (sequence is synthesized)

SEQ ID NO: 767124 - DNA, 120 bp, Artificial Sequence; identical to SEQ ID NO: 562629
  ENSG00000226941_13 (sequence is synthesized)

SEQ ID NO: 767125 - DNA, 120 bp, Artificial Sequence; identical to SEQ ID NO: 562630
  ENSG00000226941_14 (sequence is synthesized)

SEQ ID NO: 767126 - DNA, 120 bp, Artificial Sequence
  ENSG00000226979_0 (sequence is synthesized)
ccaggggctccgcacagcaggtgaggctctcctgccccatctccttgggctgcccgtgcttcgtgctttggactaccgcccagcagtgtcctgccctctgcctgggcctcggtccctcct

SEQ ID NO: 767127 - DNA, 120 bp, Artificial Sequence
  ENSG00000226979_1 (sequence is synthesized)
gcacctgctgcctggatccccggcctgcctgggcctgggccttggttctccccatgacaccacctgaacgtctcttcctcccaagggtgtgtggcaccaccctacacctcctccttctgg

SEQ ID NO: 767128 - DNA, 120 bp, Artificial Sequence
  ENSG00000226979_2 (sequence is synthesized)
ggctgctgctggttctgctgcctggggcccaggggctccctggtgttggcctcacaccttcagctgcccagactgcccgtcagcaccccaagatgcatcttgcccacagcaccctcaaac

SEQ ID NO: 767129 - DNA, 120 bp, Artificial Sequence
  ENSG00000226979_3 (sequence is synthesized)
ctgctgctcacctcattggagaccccagcaagcagaactcactgctctggagagcaaacacggaccgtgccttcctccaggatggtttctccttgagcaacaattctctcctggtcccca

SEQ ID NO: 767130 - DNA, 120 bp, Artificial Sequence
  ENSG00000226979_4 (sequence is synthesized)
ccagtggcatctacttcgtctactcccaggtggtcttctctgggaaagcctactctcccaaggccacctcctccccactctacctggcccatgaggtccagctcttctcctcccagtacc

SEQ ID NO: 767131 - DNA, 120 bp, Artificial Sequence
  ENSG00000226979_5 (sequence is synthesized)
agggagaccagctatccacccacacagatggcatcccccacctagtcctcagccctagtactgtcttctttggagccttcgctctgtagaacttggaaaaatccagaaagaaaaaataat

SEQ ID NO: 767132 - DNA, 120 bp, Artificial Sequence
  ENSG00000226979_6 (sequence is synthesized)
tgatttcaagaccttctccccattctgcctccattctgaccatttcaggggtcgtcaccacctctcctttggccattccaacagctcaagtcttccctgatcaagtcaccggagctttca

SEQ ID NO: 767133 - DNA, 120 bp, Artificial Sequence
  ENSG00000226979_7 (sequence is synthesized)
aagaaggaattctaggcatcccaggggaccacacctccctgaaccatccctgatgtctgtctggctgaggatttcaagcctgcctaggaattcccagcccaaagctgttggtctgtccca

SEQ ID NO: 767134 - DNA, 120 bp, Artificial Sequence
  ENSG00000226979_8 (sequence is synthesized)
ccagctaggtggggcctagatccacacacagaggaagagcaggcacatggaggagcttgggggatgactagaggcagggaggggactatttatgaaggcaaaaaaattaaattatttatt

SEQ ID NO: 767135 - DNA, 120 bp, Artificial Sequence
  ENSG00000226979_9 (sequence is synthesized)
tatggaggatggagagaggggaataatagaagaacatccaaggagaaacagagacaggcccaagagatgaagagtgagagggcatgcgcacaaggctgaccaagagagaaagaagtaggc

SEQ ID NO: 767136 - DNA, 120 bp, Artificial Sequence
  ENSG00000226979_10 (sequence is synthesized)
atgagggatcacagggccccagaaggcagggaaaggctctgaaagccagctgccgaccagagccccacacggaggcatctgcaccctcgatgaagcccaataaacctcttttctctgaaa

SEQ ID NO: 767137 - DNA, 120 bp, Artificial Sequence
  ENSG00000226979_11 (sequence is synthesized)
tcccagcccacgattcccctgacccgactccctttcccagaactcagtcgcctgaacccccagcctgtggttctctcctaggcctcagcctttcctgcctttgactgaaacagcagtatc

SEQ ID NO: 767138 - DNA, 120 bp, Artificial Sequence
  ENSG00000226979_12 (sequence is synthesized)
ttctaagccctgggggcttccccgggccccagccccgacctagaacccgcccgctgcctgccacgctgccactgccgcttcctctataaagggacctgagcgtccgggcccaggggctcc

SEQ ID NO: 767139 - DNA, 120 bp, Artificial Sequence
  ENSG00000226979_13 (sequence is synthesized)
gttctgctgcctggggcccaggtgaggcagcaggagaatgggggctgctggggtggctcagccaaaccttgagccctagagcccccctcaactctgttctcccctaggggctccctggtg

SEQ ID NO: 767140 - DNA, 120 bp, Artificial Sequence
  ENSG00000227051_0 (sequence is synthesized)
cgcgctcggggccctccgcctagtagagatctggagccagaagcccagagacagccgagtgcgccgtgcggtctccggacgctcgctgctcagcccgatccccgccaactgtgcaggcgg

SEQ ID NO: 767141 - DNA, 120 bp, Artificial Sequence
  ENSG00000227051_1 (sequence is synthesized)
ctgacccgcagcggcagcggcagcagcgaggactcgagcgctggctgcagcgacaccatggatctctcctttatggccgcgcagctgcccatgatggggggagctttcatggactcgccc

SEQ ID NO: 767142 - DNA, 120 bp, Artificial Sequence
  ENSG00000227051_2 (sequence is synthesized)
aacgaggacttcagcaccgagtactccctgtttaactcctctgccaatgtccacgcggctgccaatggccagggccagccggaagatcctcctcggtcctccaacgacgccgtcttgcta

SEQ ID NO: 767143 - DNA, 120 bp, Artificial Sequence
  ENSG00000227051_3 (sequence is synthesized)
tggattgccatcatagctacgctggggaacatcgtggtggtgggcgtggtgtatgccttcaccttctgaggacggcacaccctgcaccaccatggggtgaggcttggcacgtagctctga

SEQ ID NO: 767144 - DNA, 120 bp, Artificial Sequence
  ENSG00000227051_4 (sequence is synthesized)
cttgctgtcggcctttggcttctcctgtgttctagaaccaggagttttgaccaggggcggcggccgtccttctggaatttctccccagcagccctgatttcaaatatcccatgttgtggt

SEQ ID NO: 767145 - DNA, 120 bp, Artificial Sequence
  ENSG00000227051_5 (sequence is synthesized)
caagctgagtcagaagacatggaagtatgggcctcctgcccctagaggcatgacggggcaaggccttcagagggcagattggggatccttgaaactacattccaggaacatgggaccaga

SEQ ID NO: 767146 - DNA, 120 bp, Artificial Sequence
  ENSG00000227051_6 (sequence is synthesized)
tgagacagctagttaagtttaaaacatagacatgatttgatgatcgcttgctggtggtaaataatcactcgtgtgtcttgtttttatgcaaacttatcgaacctagggcgtggggtgctg

SEQ ID NO: 767147 - DNA, 120 bp, Artificial Sequence
  ENSG00000227051_7 (sequence is synthesized)
gggcaagagcagccctcagaacttcagtgttcctgacccaattctggtttcacattcagtcccttggccatctagtagggccattggatgttcctagtttgactttgaaatggcaccttt

SEQ ID NO: 767148 - DNA, 120 bp, Artificial Sequence
  ENSG00000227051_8 (sequence is synthesized)
gccaccagacacctggtcccttccaagacccaagtgcattgggagacccagggatggggggttactggtaataggtggggtttctgggggtgttgttggtggtttttatctcctggtcgg

SEQ ID NO: 767149 - DNA, 120 bp, Artificial Sequence
  ENSG00000227051_9 (sequence is synthesized)
actttctcttctttttaagaagaggagaggatgtctttaagagctagatgtgccaggcagtggactcttcaggccacccacgtgagaatgctgtttcttctctgaggaatcgtggaattt

SEQ ID NO: 767150 - DNA, 120 bp, Artificial Sequence
  ENSG00000227051_10 (sequence is synthesized)
taaagatgaacaagattcacatccactgaattattcaacggatgggtcagaaaggggggtgatttgcctgtggtcaccaggcaggtttgtggaggagtcggaacagaaagatgtgtcctc

SEQ ID NO: 767151 - DNA, 120 bp, Artificial Sequence
  ENSG00000227051_11 (sequence is synthesized)
actctcagctcactgagctctctgccccaactaagcacttccctgaggaggttgctgagaagctgccctcaggagaatgtccaggcatcttgaaggtgggtgcgagattggcaggctgct

SEQ ID NO: 767152 - DNA, 120 bp, Artificial Sequence
  ENSG00000227051_12 (sequence is synthesized)
cagatacccgtcctttacattcagtgtggataccgtgcattctcctgaagctgtgaaagtgcttctgcccaagccacttccttaaattctgaaatatcagcatctggggtcctggcaagc

SEQ ID NO: 767153 - DNA, 120 bp, Artificial Sequence
  ENSG00000227051_13 (sequence is synthesized)
aaggaagcttccaagtaaaaaccagagagaagggcacacttttctttcttcattaggaaatcttattgcacaggaaccacccccacccccaccccccacaccttcccaaggcagcatccc

SEQ ID NO: 767154 - DNA, 120 bp, Artificial Sequence
  ENSG00000227051_14 (sequence is synthesized)
agtgcagatagagtgggaaaggtcccagaagggggctcactcacctctaggcccagagaggctttctcctcactttatacactgcaaaaacagaagaattgtgtcaataacaccctctgt

SEQ ID NO: 767155 - DNA, 120 bp, Artificial Sequence
  ENSG00000227051_15 (sequence is synthesized)
agtggagaaacttaaaaagctggttaggaagctctcgtgtatatttagagacaattacaagaaagctggacttgccgctgtggtctcaggagaaatgagtgttcttgatgacaggcaaag

SEQ ID NO: 767156 - DNA, 120 bp, Artificial Sequence
  ENSG00000227051_16 (sequence is synthesized)
ggacatcttagttgtccagaagcggcactcttccctggaagccgccatgttaataggattactagcctggctccagacagtgcctgctcatggctgccagttcttaccgatcacatctgt

SEQ ID NO: 767157 - DNA, 120 bp, Artificial Sequence
  ENSG00000227051_17 (sequence is synthesized)
cactgccaccgtatatcatctgccagtgcatcagcttaaggggaggtcacgagtgcaaaagaacctgacccttgacaatgagggagaagggacatggaccacctgtctggaattcctgga

SEQ ID NO: 767158 - DNA, 120 bp, Artificial Sequence
  ENSG00000227051_18 (sequence is synthesized)
atcactggcagggtggaggctgggctggggagttagccgcggtgtgcgtgaatggctctgtctccagcaagtctctctccatcaaaccccaggtctgccccataagcaagatctttaaca

SEQ ID NO: 767159 - DNA, 120 bp, Artificial Sequence
  ENSG00000227051_19 (sequence is synthesized)
gatggatgtctccatgagaaaacccaaggcgagaagcccagagccatggcggggttgcttgacgtcctcatggagtcactctgccccacatgctcaaatcttccctctggccccacatcc

SEQ ID NO: 767160 - DNA, 120 bp, Artificial Sequence
  ENSG00000227051_20 (sequence is synthesized)
ctaggagggcctgacccctgtaaagatacaggaggcagctccctggcctccaaatggcccatggagatggcagtcgggagacagggttctgtgtttgctgcggtgaagggaggagaaggc

SEQ ID NO: 767161 - DNA, 120 bp, Artificial Sequence
  ENSG00000227051_21 (sequence is synthesized)
aggaggaaaaaggatggcttctagccctgaagaggactccagcatcccaggcaccgggtgcttctggctgcagttttccctatggaggcccctcagcctccagccctaacataaatgtcg

SEQ ID NO: 767162 - DNA, 120 bp, Artificial Sequence
  ENSG00000227051_22 (sequence is synthesized)
gttaaattcagttttcaagcctctctcccttttcagtgtcagagcagtagatggtccagggcattggaggcctcgaccactctgcattgcagattacagtgacttcctcggggttgcccc

SEQ ID NO: 767163 - DNA, 120 bp, Artificial Sequence
  ENSG00000227051_23 (sequence is synthesized)
atcttggtctcctgtggtttcttcatcagctttttttttaccagcatctctcaaataacaatgaagatagatatgcccattagtgtctgattaaggagcaaaggctggatttctggccac

SEQ ID NO: 767164 - DNA, 120 bp, Artificial Sequence
  ENSG00000227051_24 (sequence is synthesized)
agcgagctgcactctccctcctgcctcagccggggtccgtcttagcagtttggaaaggggaaaaagatgccggtcctcactgcttaagttttgtgtccaggtgccactagacttgcatgc

SEQ ID NO: 767165 - DNA, 120 bp, Artificial Sequence
  ENSG00000227051_25 (sequence is synthesized)
acactaactccttacaatcaccacacagcatcatcgccccagtgcacagatgaggaaccagaggctcagaggagtgaagttgccttcctgaggtcacacagcatgaaagtgatgagctag

SEQ ID NO: 767166 - DNA, 120 bp, Artificial Sequence
  ENSG00000227051_26 (sequence is synthesized)
gatttgaatctgggaagttgggctctagagccagactgtactgccttctgccacactgtactgccttctgtgactgggtggcacctccagggcacatttacacaaggccctgaatctgca

SEQ ID NO: 767167 - DNA, 120 bp, Artificial Sequence
  ENSG00000227051_27 (sequence is synthesized)
gaggctgtttctcaagatgcccgtcatggtgtggcctgggccagctctggcttccacaggtccctgactgtcctcagagtggaacatgctcaacctcccgcccactgctctctctctgcc

SEQ ID NO: 767168 - DNA, 120 bp, Artificial Sequence
  ENSG00000227051_28 (sequence is synthesized)
cagatttcaggggtgccggtccccaaggcctgcccccttctttaagactgaactcaagtctccttggaaggccccggtgaagctcccagagactggttttcttgggatgcaggcagaagg

SEQ ID NO: 767169 - DNA, 120 bp, Artificial Sequence
  ENSG00000227051_29 (sequence is synthesized)
ggaccctccctggccaacacccaggagcccagcagaagcacccacacgtagaaagaggctcactacagccagaagtgcagagtcagagtcctgggaccatcttgttctgcaaggtgaccc

SEQ ID NO: 767170 - DNA, 120 bp, Artificial Sequence
  ENSG00000227051_30 (sequence is synthesized)
caggctccccaggacaggggagagggatcgtcctcattcagactctagctggggcctctgtactggcttctccctgggtggggttgcctgttacatagctgtgcctcagagaaagggtcc

SEQ ID NO: 767171 - DNA, 120 bp, Artificial Sequence
  ENSG00000227051_31 (sequence is synthesized)
tgcttacccctctgtgtgcccctccattgctcctctacaagcaattaggtgattcaaaagagcaacttaggctgggtgcagtgactcacacccgtaatcccggcactttgggaggccgag

SEQ ID NO: 767172 - DNA, 120 bp, Artificial Sequence
  ENSG00000227051_32 (sequence is synthesized)
agaaaaaaaaaaagagcaacttactgctttgtgaggttgtgagtggccaccactgaaggtctttgagaagaggccagacgccgctgtagccaggcctgtcttaagaggacttgtgcttcc

SEQ ID NO: 767173 - DNA, 120 bp, Artificial Sequence
  ENSG00000227051_33 (sequence is synthesized)
agggacccaggcaggatgatggcgcagctcttcctactccaagccaatgctgtccttcccctttcccatgaaatcaaggtcaagaggcaaataagactccctgctccactctacccccca

SEQ ID NO: 767174 - DNA, 120 bp, Artificial Sequence
  ENSG00000227051_34 (sequence is synthesized)
gagagaaatgattctcgctcctttcagatcccccaggatctgagggagaaaggatgggaggaggggcagcagcatttcgctggaaaggcagcagatgcttttccagccccggttcagctg

SEQ ID NO: 767175 - DNA, 120 bp, Artificial Sequence
  ENSG00000227051_35 (sequence is synthesized)
gaaggcttggaggctggccagaccactctggcgtctcctgaagtgggtccctggagaccgaagaggctcagtggagtctgtctgttgtcagcactgctgcctgatccctgcaagacaaat

SEQ ID NO: 767176 - DNA, 120 bp, Artificial Sequence
  ENSG00000227051_36 (sequence is synthesized)
ggcactttccttcttcagaagcatcatctgccttcattattagcagtaatattattcccagttattattcttaccggtgccagttttgcacatctttttgttgctctatttgtgtctcat

SEQ ID NO: 767177 - DNA, 120 bp, Artificial Sequence
  ENSG00000227051_37 (sequence is synthesized)
ttacttctcaaattgcccctgggggcaggaatgaggatgcagagagatgcacgttaattactgtcgcatttttctgtggagaaaactgaggccagggctgaacgctcacagctaaggagc

SEQ ID NO: 767178 - DNA, 120 bp, Artificial Sequence
  ENSG00000227051_38 (sequence is synthesized)
tgtgattcagacccagttctgtcagctctagaggcaccctgcatcatgcccaccagggtgatccccctgggatggaccatctcgggatatgaggcctcggaggctggggttgagatttgg

SEQ ID NO: 767179 - DNA, 120 bp, Artificial Sequence
  ENSG00000227051_39 (sequence is synthesized)
tcctgaagagcttatagccagattgccacattcaagtgtaagtccaggaaaggggcaggcggcagtgcacagggatttatcagttccagaacctcacagtgataagaggctttagagagc

SEQ ID NO: 767180 - DNA, 120 bp, Artificial Sequence
  ENSG00000227051_40 (sequence is synthesized)
atctaatcgagacctttaatttttcggggagagcagctgaggccgtgtggaaaattagtggagagctgacaagtgtctgggctcctggcccaggggtccgtggtccagcacgttgtgcgt

SEQ ID NO: 767181 - DNA, 120 bp, Artificial Sequence
  ENSG00000227051_41 (sequence is synthesized)
tcagtgggaagcaaagggcttgcccgggattacctgccccagccccgaggtgggttgtgctccctgcagctgccatcggcccgctttgcttcgtcctggcagatgcccagtgattgtccc

SEQ ID NO: 767182 - DNA, 120 bp, Artificial Sequence
  ENSG00000227051_42 (sequence is synthesized)
cgagcaagtgccagggttgggctgagctgctatgacagggaggcccagggagttctgctcagggagccaaagggaacagccagatcctgaatgttctatgttcacctgccccagccccac

SEQ ID NO: 767183 - DNA, 120 bp, Artificial Sequence
  ENSG00000227051_43 (sequence is synthesized)
ccaccctggcccactccacaggcccctgaccatggtcactcacggagagggatggaggagaaggtggttgaactgagtactgagaacccagaggacagagcccacagcttccaagcagga

SEQ ID NO: 767184 - DNA, 120 bp, Artificial Sequence
  ENSG00000227051_44 (sequence is synthesized)
aaagggacctctctgaaaaatctggataaccagaattatcacagcaccttctcattcccagcgcgtccttctgagctcagaccttgagcatttactgggtttctttttgaggaagaggga

SEQ ID NO: 767185 - DNA, 120 bp, Artificial Sequence
  ENSG00000227051_45 (sequence is synthesized)
aagtgacaaaggacaaaacaatgcaaatcttcatgactgaagacgatcaaagactccctggagcgagaaaacagttactgccagaagcagaatggaagagccaaaaagtacacaaaatgg

SEQ ID NO: 767186 - DNA, 120 bp, Artificial Sequence
  ENSG00000227051_46 (sequence is synthesized)
acgccataaattctgaaataaaagtgtatgatgtgttctgagtcactgtagaagtcatgcatttattatcaagatagaaaagagcagagaatgacgtggacattggtcctcggagaggct

SEQ ID NO: 767187 - DNA, 120 bp, Artificial Sequence
  ENSG00000227051_47 (sequence is synthesized)
gcgtaggtggtgcggtccccgggggattctggatgctggtcttttgaccgtggcggcagcctcgcgcctgcccggatggctccatccagacatttggcaaggctgtcatctgctcttggg

SEQ ID NO: 767188 - DNA, 120 bp, Artificial Sequence
  ENSG00000227051_48 (sequence is synthesized)
tcctttttcaagctgatttcctgcctccccaagaggaggtttgagccccattctgccttggaaataaatcctgacagatgtgcacagcatatttgcagggaatttgcaggcctcgattat

SEQ ID NO: 767189 - DNA, 120 bp, Artificial Sequence
  ENSG00000227051_49 (sequence is synthesized)
tgggggaatcagagcccattccacaccgagccccatccacgtggctgagcaacacccctgtgtcccctgtatctgtctcactggctgtctttctcccagtttcttaaagaaccacaccat

SEQ ID NO: 767190 - DNA, 120 bp, Artificial Sequence
  ENSG00000227051_50 (sequence is synthesized)
tactgcgtttgccgttcgaagcgttgtcccaacaatgcagatggttctgacaagggctctatatgctggcagaagggagcttccaaccttttaacttgaggaaaatgaatctctgagagg

SEQ ID NO: 767191 - DNA, 120 bp, Artificial Sequence
  ENSG00000227051_51 (sequence is synthesized)
cttgagagtgttgccaggtggagcttttcaggagacaggggtcttgagcccaggacacctaactatcgagttttcactaggagacttagtggtggctttcatgaggccagtcgttctcaa

SEQ ID NO: 767192 - DNA, 120 bp, Artificial Sequence
  ENSG00000227051_52 (sequence is synthesized)
ggaagggctgggggccatcagcaatgtctggagacatttttgattctcacagcttggtggggactgctattggtatctcatgggtggaggccagggatgccaccgaacatcctacaatgc

SEQ ID NO: 767193 - DNA, 120 bp, Artificial Sequence
  ENSG00000227051_53 (sequence is synthesized)
acagggcagccccccacaaataagaattatccagccccaaaatgccaatagtgccgaggtcaggggaccctgtgctggccatcctatctctgattctgaaactatgcatgctttccactt

SEQ ID NO: 767194 - DNA, 120 bp, Artificial Sequence
  ENSG00000227051_54 (sequence is synthesized)
ttccccatttgtgagtcattgagtaaattaaagctcttctgagcagcagcagtgatcatggtcactgccctgcgttcaaataatgcgagctgaggacagtgatctgcaactcccagcatg

SEQ ID NO: 767195 - DNA, 120 bp, Artificial Sequence
  ENSG00000227051_55 (sequence is synthesized)
tcatgtggtctcttagaaatccatgtgactgtttccaccatcttgggcatttgtggggacccccagactggagggagaaagccctacaaagtggatgggagtgtggggctgaacttttcc

SEQ ID NO: 767196 - DNA, 120 bp, Artificial Sequence
  ENSG00000227051_56 (sequence is synthesized)
ctacccttaactttgtgtctctgggacctccagggacctggcccctcaccaatgcatatgaagagtatgcttggggaagagcttaggaatggggtgggcatgggagtgctgggtagcagc

SEQ ID NO: 767197 - DNA, 120 bp, Artificial Sequence
  ENSG00000227051_57 (sequence is synthesized)
ctttgagcaaatctgcatcttctcttatttctgacctttttccacgtgcccagtcctatttctgccagttgaaggcatactaatattctttatactatttaatcttttgcagaaacctta

SEQ ID NO: 767198 - DNA, 120 bp, Artificial Sequence
  ENSG00000227051_58 (sequence is synthesized)
ctattataacttgctactctccagataccaattcttcatgccgagagcatcggaaatgtttttgtgtcttactgatgttttcatgatcaacttgtaaatgtaagcagttgacttcataaa

SEQ ID NO: 767199 - DNA, 120 bp, Artificial Sequence
  ENSG00000227051_59 (sequence is synthesized)
aggtattttaactattcttggagtcctttgctacccaagcacctggtttcaccatgcgatcactgacttctctacagtgaagactctttcttaataaaggatttcgctgtgctcttttga

SEQ ID NO: 767200 - DNA, 120 bp, Artificial Sequence
  ENSG00000227051_60 (sequence is synthesized)
ttaaaaatatctaaccttaaaagacgtaaaaatgtatctgtgaaatctcactttgttagcgttgctgctgttgtcattttctattatgataactgaaaagagaaaagaagaaaacatgaa

SEQ ID NO: 767201 - DNA, 120 bp, Artificial Sequence
  ENSG00000227051_61 (sequence is synthesized)
gatctctcctttatggccgcgcagaacaaagacaaatcccggatttctccatcagtctgtgaccctagagaagacccagagctggctccagggaagggctgcgtttggcctgggagactg

SEQ ID NO: 767202 - DNA, 120 bp, Artificial Sequence
  ENSG00000227057_0 (sequence is synthesized)
gagttttcaagccgactgtgtggcagctgagaggagttttgcacgtggatcgccgttcgggtgggcgagatggagacagcccccaagccgggcaaggatgtcccgcccaagaaagacaaa

SEQ ID NO: 767203 - DNA, 120 bp, Artificial Sequence
  ENSG00000227057_1 (sequence is synthesized)
cttcagaccaagagaaagaaaccgcggcgatactgggaggaagagaccgttccgaccacagccggagcctctccagggcctcctcgtaacaagaagaatcgggagctccgtcctcagaga

SEQ ID NO: 767204 - DNA, 120 bp, Artificial Sequence
  ENSG00000227057_2 (sequence is synthesized)
ccaaaaaatgcttacatcttaaagaagtctcggatctctaagaagcctcaggtcccgaagaaaccccgagaatggaagaacccggagtcccagcgcggcttgtccgggacccaagatcca

SEQ ID NO: 767205 - DNA, 120 bp, Artificial Sequence
  ENSG00000227057_3 (sequence is synthesized)
ttcccaggccccgcccccgtccctgtggaagtggtccagaagttctgtcgcattgacaaatcccgaaagctaccacattctaaagccaaaactcgaagccgacttgaggtggctgaagct

SEQ ID NO: 767206 - DNA, 120 bp, Artificial Sequence
  ENSG00000227057_4 (sequence is synthesized)
gaggaagaggaaacaagtatcaaagctgctcgttctgagctgctgcttgctgaagaacctgggtttctggaaggggaggatggggaagacacagcaaagatatgccaggctgacattgtg

SEQ ID NO: 767207 - DNA, 120 bp, Artificial Sequence
  ENSG00000227057_5 (sequence is synthesized)
gaggctgtggacattgcaagtgcagccaagcactttgacttgaatctgcggcagtttggaccctacagactaaactactctcgaactggaagacacctggcttttggagggcgccgaggt

SEQ ID NO: 767208 - DNA, 120 bp, Artificial Sequence
  ENSG00000227057_6 (sequence is synthesized)
catgtggctgcccttgattgggtaacaaagaagcttatgtgcgagatcaacgtcatggaggcggtgcgggacatccggtttctccattctgaggcactgcttgctgttgctcagaaccgc

SEQ ID NO: 767209 - DNA, 120 bp, Artificial Sequence
  ENSG00000227057_7 (sequence is synthesized)
tggctccacatctatgacaatcagggcattgagctccactgtatccgccgctgtgaccgagtaacacggcttgagttcctgcccttccacttcctcctggctacagcttcagaaacaggg

SEQ ID NO: 767210 - DNA, 120 bp, Artificial Sequence
  ENSG00000227057_8 (sequence is synthesized)
aagattgtggcagctctgaatgctcgagctgggcggctcgatgttatgagtcagaacccttacaatgccgtcatccatctcggacacagcaatggtactgtgtctttatggagtccagct

SEQ ID NO: 767211 - DNA, 120 bp, Artificial Sequence
  ENSG00000227057_9 (sequence is synthesized)
atgaaggagccactggcaaagattctctgtcatcgtggtggggtccgggctgtggcagtagattctacaggcacgtacatggccacctctggcctagaccaccagctgaagatctttgac

SEQ ID NO: 767212 - DNA, 120 bp, Artificial Sequence
  ENSG00000227057_10 (sequence is synthesized)
ttgcgagggacgtaccagcctctgagcactcggaccctgccccatggagcagggcacctggccttctcccagaggggactgctggtggcgggaatgggtgacgttgtcaacatctgggca

SEQ ID NO: 767213 - DNA, 120 bp, Artificial Sequence
  ENSG00000227057_11 (sequence is synthesized)
gggcagggcaaggccagcccaccctcccttgaacagccctacctcacccaccggctctcaggccctgtgcatggccttcagttctgcccctttgaagatgtgctgggggtggggcacact

SEQ ID NO: 767214 - DNA, 120 bp, Artificial Sequence
  ENSG00000227057_12 (sequence is synthesized)
gggggcatcaccagcatgctggtccctggggccggtgagcccaacttcgatggcctggagagtaatccatacagaagccggaagcagcgccaggagtgggaggtgaaggccctgctagag

SEQ ID NO: 767215 - DNA, 120 bp, Artificial Sequence
  ENSG00000227057_13 (sequence is synthesized)
aaggtacctgcagagcttatttgtctggacccacgagccctggccgaggtggatgtcatctccctggagcagggaaagaaggagcagatagagaggctgggctatgacccgcaggctaag

SEQ ID NO: 767216 - DNA, 120 bp, Artificial Sequence
  ENSG00000227057_14 (sequence is synthesized)
gctcccttccagccaaagccaaagcagaagggccgcagctccacggcaagcctggtgaagaggaagaggaaggtcatggatgaggaacacagggacaaggtccggcagagccttcagcag

SEQ ID NO: 767217 - DNA, 120 bp, Artificial Sequence
  ENSG00000227057_15 (sequence is synthesized)
cagcatcataaggaggcgaaggccaagcccacgggggcccggccatctgccctggacagatttgtgcgctgagccagactccagggttgcctgggaacagtctctccccaagatcacctg

SEQ ID NO: 767218 - DNA, 120 bp, Artificial Sequence
  ENSG00000227057_16 (sequence is synthesized)
tagggaaatgagtgttccctggaacaaggaggtgggggcagtgtggccccttccccaactgggggtggacagctgtctcctggggtgggttggtattaaagaggaaagcgattttttgga

SEQ ID NO: 767219 - DNA, 120 bp, Artificial Sequence
  ENSG00000227057_17 (sequence is synthesized)
ctgccttttgggactgtcttttctcgtttttatgttggtatacttgcttcatattgggaagctttactgccatcctaacccttgctttcaggtttctggaaggggaggatggggaagaca

SEQ ID NO: 767220 - DNA, 120 bp, Artificial Sequence
  ENSG00000227057_18 (sequence is synthesized)
cggaccctgccccatggagcagggcacctggccttctcccagaggggactgctggtggcgggaatgggtgacgttgtcaacatctgggcagggcagggggccggtgagcccaacttcgat

SEQ ID NO: 767221 - DNA, 120 bp, Artificial Sequence
  ENSG00000227057_19 (sequence is synthesized)
cttgaagtgaatgaactctgggtggaagtttgggccagagacatccaggaactgggggcttagttgggctggagctgttggactgaggttcttccttatggctccatgcttctccctccc

SEQ ID NO: 767222 - DNA, 120 bp, Artificial Sequence
  ENSG00000227057_20 (sequence is synthesized)
ggctgtggacattgcaagtgcagccaaggtgagcctgaggaggtaaaggagccaagggattgattggtggtgcaggacaatagaggaatgggggctagaagaaggcgttactgcagggca

SEQ ID NO: 767223 - DNA, 120 bp, Artificial Sequence
  ENSG00000227057_21 (sequence is synthesized)
ctacagctgtgagtggccatggagctcaggaactggttggaagcccttgggatgaccacctctcctttaggaccccagcagagggaatacagagggcaatcaggactgggtcattctctc

SEQ ID NO: 767224 - DNA, 120 bp, Artificial Sequence
  ENSG00000227057_22 (sequence is synthesized)
tccacaggctgcaccctcctgcttgtgcctctgcccttgtcagcctgccacttctcactctgtgcctgtgtcctccccgtctccggtccccaggacaaggtccggcagagccttcagcag

SEQ ID NO: 767225 - DNA, 120 bp, Artificial Sequence
  ENSG00000227059_0 (sequence is synthesized)
gtgcgccggcgctgaagcgggtcccggaggagtggccacgacccagcacaggatgcagagcttcctgactctgctgaaggagcatgaggacacctgtgcacccccggcggagctggtgac

SEQ ID NO: 767226 - DNA, 120 bp, Artificial Sequence
  ENSG00000227059_1 (sequence is synthesized)
ccttgcgggcagactgtgccgggacttccaggatgaccttgcccaactgcagcctttggtcacagccattctggacagccagctccgcctgcatctcctggacaacgcagatgtggccct

SEQ ID NO: 767227 - DNA, 120 bp, Artificial Sequence
  ENSG00000227059_2 (sequence is synthesized)
ggcgtgcgcccgtgtcctggaccagcaggagcagcagcaggcggcttgccgcctcctggaggggtgccaggtgccgggaggcagccaggagttagtgcagctctggaacgacatccacta

SEQ ID NO: 767228 - DNA, 120 bp, Artificial Sequence
  ENSG00000227059_3 (sequence is synthesized)
ccgtctggtcatgaggaggctgggcgtggctgcgctcaccccggtgcagaagttccgctgcaggaagaggaaccccccgcccccctccctctgcccagaggggctgaagagccggaactt

SEQ ID NO: 767229 - DNA, 120 bp, Artificial Sequence
  ENSG00000227059_4 (sequence is synthesized)
ccccagagaggttcgtgagaagctgcacaatttcgctgtgggggtgaacaccaaccccagcaaggctgagagggagaacttggcattggagacgagcttgacccctgagcaggtgtacaa

SEQ ID NO: 767230 - DNA, 120 bp, Artificial Sequence
  ENSG00000227059_5 (sequence is synthesized)
ctggtttgccaattaccggcgccgccaaagagcccttccccagcacatgaagccagcccagcaggccacagctgaagaccctggtgcgagggagaggggtcctgacctcctgcagccctc

SEQ ID NO: 767231 - DNA, 120 bp, Artificial Sequence
  ENSG00000227059_6 (sequence is synthesized)
aggcaacccccgtgttgactctgggtttgtggacaggcctcagtggtcagaggaacgtgaggaaaaggggcctccacagtccccacagaccacccaaggaccatgggagccactggcctt

SEQ ID NO: 767232 - DNA, 120 bp, Artificial Sequence
  ENSG00000227059_7 (sequence is synthesized)
ctgggcacaagcagtggacggacagagctacgggtgggcagcttcctggtgacacagcccccactgcaagctcctgaattcatcctcacccagagccctccagagctggccccagcccca

SEQ ID NO: 767233 - DNA, 120 bp, Artificial Sequence
  ENSG00000227059_8 (sequence is synthesized)
tctgccttccccggccctgtgtctgccatggagctgagccaggccctgccctccagccaggtgcagtgttctgatagccaggcctctggtgatgccttctggggagccaggatgctcctt

SEQ ID NO: 767234 - DNA, 120 bp, Artificial Sequence
  ENSG00000227059_9 (sequence is synthesized)
gagttttcagggagcagcctgggctgagctatccccaggagccagacagcaccccaggaggagcgggtgtggatggtctgcctggtcaacacaaggagttacagagctttatcctgaata

SEQ ID NO: 767235 - DNA, 120 bp, Artificial Sequence
  ENSG00000227059_10 (sequence is synthesized)
caaaatgaaggtccccagagttcccctgggggctctgctgaaaagcagagattctttcccactgccatgtttgaatagtttggttagcaattccctgtagtagagaaagcatttgagaaa

SEQ ID NO: 767236 - DNA, 120 bp, Artificial Sequence
  ENSG00000227059_11 (sequence is synthesized)
tgttcgtgagatcagaagtcaaaggtgggtctgtcccactcacgcagcactggatcagtcgggctccggggcactcgtgcagagaaggccattctagagaggggagtgttctgctgctgg

SEQ ID NO: 767237 - DNA, 120 bp, Artificial Sequence
  ENSG00000227059_12 (sequence is synthesized)
ctgccttgccgtctgcccgtgcacacagccagacttttccaccaagttaactgagtgaggtatgaggagtgttctgagatttctgtgtgtaggggcttctcccttgagtactgggaggca

SEQ ID NO: 767238 - DNA, 120 bp, Artificial Sequence
  ENSG00000227059_13 (sequence is synthesized)
aacctgtctgcgaatggcctaggcagggcagagtagggtggattttccctccaggttgtaattcactgtgtctatgacacaaatgttgtagtcaattaaagtttaatgttttgaactccc

SEQ ID NO: 767239 - DNA, 120 bp, Artificial Sequence
  ENSG00000227059_14 (sequence is synthesized)
accccgcaccgcacaccccagaaaccccaggtcgtccgggactcctcggacccgcagatgccacggacaccagatcccccacggacccctcagctcccccggactccgcggtcgcatcgg

SEQ ID NO: 767240 - DNA, 120 bp, Artificial Sequence
  ENSG00000227059_15 (sequence is synthesized)
gggctgaggggcgccggcccccgggacgccttgtgggcggggcctcgcgggattggctgcgagcctggatactttgtagcacccgcaccttctgtgctgcccagcgcctcctcgccagcc

SEQ ID NO: 767241 - DNA, 120 bp, Artificial Sequence
  ENSG00000227059_16 (sequence is synthesized)
cttctgtgctgcccagcgcctcctcgccagccccgggtgcgcgccaagcacgtgcgccggcgctgaagcgggtcccggagggtgaggggcgcgcgggcaggggggtccgggaggatgagg

SEQ ID NO: 767242 - DNA, 120 bp, Artificial Sequence
  ENSG00000227059_17 (sequence is synthesized)
gggggcgggggtcccagagggtgaggggcgcgcaggcggggggggtcctggaggataaggggcgcggaggcggggggtcccggaaggtgaggggcgctagggcaggagtccctgagggta

SEQ ID NO: 767243 - DNA, 120 bp, Artificial Sequence
  ENSG00000227059_18 (sequence is synthesized)
tgagggtaaggggggccccggagggtgaggggtgcgggggccggggtggggctgagggtggagcctcccaggctggagccccaggcaggaatttcggcctccgcagggagcagcgtgcca

SEQ ID NO: 767244 - DNA, 120 bp, Artificial Sequence
  ENSG00000227059_19 (sequence is synthesized)
gaaaggtaggggggctgggggccatgggcgggggtcccgccaaagtcaggaagccaagcagagccacctcccgcgacccttcccctccattcagctggagccgggtgcccctcagggcac

SEQ ID NO: 767245 - DNA, 120 bp, Artificial Sequence
  ENSG00000227059_20 (sequence is synthesized)
cgggcggacaggccaaggtaccccacaggaacctttttccttcctgaagtggcaggaaccccgcccctcccagagccggtgggggtcggcgttgcaggaaacccaggcctgggagcctcc

SEQ ID NO: 767246 - DNA, 120 bp, Artificial Sequence
  ENSG00000227059_21 (sequence is synthesized)
tctgccctcctccaaggcccctgcaggctctgttcccccaagggaccccaggtccagggcctcctgcccactgtggcagctggaaactcagagccccgagtcaggacccgggtgagatgg

SEQ ID NO: 767247 - DNA, 120 bp, Artificial Sequence
  ENSG00000227059_22 (sequence is synthesized)
cgctagagcccgggaacgggtggagtagacgaggtcgcgtccccttggcgggcgcacggcagaaagaacccctcgccagggagcgcgcagcctacctggttcttcgcggctgtgaggatt

SEQ ID NO: 767248 - DNA, 120 bp, Artificial Sequence
  ENSG00000227059_23 (sequence is synthesized)
tacaaaccttttggaaagcagtttggcaacacctactaccctgcccctacttctgtgaataaaagtgtattccgcagaagtaagatcgattggggagggttttctgttgggaaaagcagt

SEQ ID NO: 767249 - DNA, 120 bp, Artificial Sequence
  ENSG00000227059_24 (sequence is synthesized)
cactggcagctgcctgaatgtccttaggtgaggcaccgttagaacaagtaaaggttcctcctgtgtggatgcaggaccaagcgtgtgattgcaaagtgtgtctttgacattgtttggatt

SEQ ID NO: 767250 - DNA, 120 bp, Artificial Sequence
  ENSG00000227059_25 (sequence is synthesized)
aagtattggcgtgagcagtttctgctgttaaaacaagtgcatgtatgtgggttcagatgaaaggccttggcatccactggtgacccctgcacacaaggtccctaccctactgagcccaga

SEQ ID NO: 767251 - DNA, 120 bp, Artificial Sequence
  ENSG00000227059_26 (sequence is synthesized)
gcagtggaggagctgttgcagacagtacccagcccagtgcttggtgcacagccgtgttcgttaaggactaaagtatttgggggattagaaggaaattctagagggtgtatgctatggtgc

SEQ ID NO: 767252 - DNA, 120 bp, Artificial Sequence
  ENSG00000227059_27 (sequence is synthesized)
tgccctctctcgggatgtgtgaggtcttattcctactctacaagtgtccacggcacaagagccgtgcatcacctgctttgcagagtgggttgggcgattgactgacagaaaggacgtggt

SEQ ID NO: 767253 - DNA, 120 bp, Artificial Sequence
  ENSG00000227124_0 (sequence is synthesized)
cttgtagctgggccagcctggggcttggttctatgtccctgcgggtcggtgcgagggcgaagaggaacccgtgggcccgggggatcccggggggccggaccagtgttccccagttgtggg

SEQ ID NO: 767254 - DNA, 120 bp, Artificial Sequence
  ENSG00000227124_1 (sequence is synthesized)
agcagacgcgtgggcgcatcgcgggcgggcagggcctgaagtgcagctatgtttccagtgttctctggctgtttccaagagctacaagaaaagaataaatctctggagttggtgtccttt

SEQ ID NO: 767255 - DNA, 120 bp, Artificial Sequence
  ENSG00000227124_2 (sequence is synthesized)
gaggaggtagctgtgcacttcacctgggaggagtggcaggacctggatgatgctcagaggaccctgtacagggacgtgatgctggagacctacagcagcctggtatcattggggcattac

SEQ ID NO: 767256 - DNA, 120 bp, Artificial Sequence
  ENSG00000227124_3 (sequence is synthesized)
attaccaaacctgagatgatcttcaagctagagcaaggagcagagccatggatagtagaagaaaccccaaacctgagactttcagctgtccagatcattgatgaccttattgaaaggagc

SEQ ID NO: 767257 - DNA, 120 bp, Artificial Sequence
  ENSG00000227124_4 (sequence is synthesized)
catgaaagtcatgatagatttttctggcaaattgtaatcaccaacagcaacacatcaactcaggagagagttgaattaggaaaaacatttaatttgaactcaaaccatgttttaaatctg

SEQ ID NO: 767258 - DNA, 120 bp, Artificial Sequence
  ENSG00000227124_5 (sequence is synthesized)
attataaataatggaaacagttcaggaatgaagcctgggcagtttaatgattgccagaacatgcttttccctattaagcctggggagacacagtctggagagaaacctcatgtctgtgat

SEQ ID NO: 767259 - DNA, 120 bp, Artificial Sequence
  ENSG00000227124_6 (sequence is synthesized)
ataaccaggagatcccacagacatcatgaacatcttactcagcatcacaagattcaaactctgctgcagacttttcaatgtaatgaacaagggaaaaccttcaacacggaggcaatgttc

SEQ ID NO: 767260 - DNA, 120 bp, Artificial Sequence
  ENSG00000227124_7 (sequence is synthesized)
tttatacataagagggttcatatagtacagacctttggtaaatataatgaatatgagaaagcctgtaataactcagctgttattgtccaagtgataactcaggtaggacagccaacttgc

SEQ ID NO: 767261 - DNA, 120 bp, Artificial Sequence
  ENSG00000227124_8 (sequence is synthesized)
tgtagaaagtctgacttcactaaacatcagcagacacacacaggagagaaaccctatgaatgtgttgaatgtgagaaaccctccattagcaaatcagaccttatgctacagtgcaagatg

SEQ ID NO: 767262 - DNA, 120 bp, Artificial Sequence
  ENSG00000227124_9 (sequence is synthesized)
cctactgaggaaaaaccttatgcctgtaactggtgtgaaaaattgttcagctataagtccagcctcattatccatcagagaattcacacaggggaaaagccctatggatgcaatgaatgt

SEQ ID NO: 767263 - DNA, 120 bp, Artificial Sequence
  ENSG00000227124_10 (sequence is synthesized)
ggtaaaacctttcgccgtaagtcattcctcactttacatgagagaactcacacaggggataaaccctacaaatgtattgaatgtggaaaaacttttcactgtaagtcacttctcacttta

SEQ ID NO: 767264 - DNA, 120 bp, Artificial Sequence
  ENSG00000227124_11 (sequence is synthesized)
catcacagaactcactcaggggaaaagccctatcagtgtagtgaatgtggaaaaacctttagccagaagtcatacctcacaatacatcatagaactcacacaggggaaaagccctatgca

SEQ ID NO: 767265 - DNA, 120 bp, Artificial Sequence
  ENSG00000227124_12 (sequence is synthesized)
tgtgaccattgtgaagaagcatttagccataagtcaaggcttactgtccatcagagaacacacacaggggaaaaaccgtatgaatgtaatgagtgtggaaaaccctttatcaataagtca

SEQ ID NO: 767266 - DNA, 120 bp, Artificial Sequence
  ENSG00000227124_13 (sequence is synthesized)
aacctcaggttacatcagagaactcacacaggggaaaaaccctatgaatgcaatgaatgtgggaaaacgtttcaccgtaagtcattcctcactatccatcaatggactcacacaggggaa

SEQ ID NO: 767267 - DNA, 120 bp, Artificial Sequence
  ENSG00000227124_14 (sequence is synthesized)
aaaccctacgaatgcaatgaatgtgggaaaacctttcgctgtaagtcattcctcactgtccatcagagaactcatgctggggaaaaaccatacgcatgtaacgaatgtggaaaaacatat

SEQ ID NO: 767268 - DNA, 120 bp, Artificial Sequence
  ENSG00000227124_15 (sequence is synthesized)
agccacaagtcataccttacagtacatcacagaactcacacaggggaaaaaccctatgaatgtaatgaatgtggaaaatcctttcactgtaagtcattcctaactatacatcagagaact

SEQ ID NO: 767269 - DNA, 120 bp, Artificial Sequence
  ENSG00000227124_16 (sequence is synthesized)
tcacacaggggaaagaccctatgaatgtaatgaatgtggaaaaacctttcgtcagaagtcaaatctcagcacccatcagggaactcacacaggagagaaaccttacgtatgtaatgaatg

SEQ ID NO: 767270 - DNA, 120 bp, Artificial Sequence
  ENSG00000227124_17 (sequence is synthesized)
tggaaaaacctttcatcgcaagtcattcctcaccatacaccagagaactcacacggggaaaaaccgtatggatgtaatgaatgtggaaaaactttttgtcagaaatcataccttattata

SEQ ID NO: 767271 - DNA, 120 bp, Artificial Sequence
  ENSG00000227124_18 (sequence is synthesized)
catcagagaactcacaccggggaaaagccctatgaatgtaatgaatgtggaaaatcctttcatcagaaggcaaatcttcagaagcatcaaggtattcacacgggggagaaaccctatgaa

SEQ ID NO: 767272 - DNA, 120 bp, Artificial Sequence
  ENSG00000227124_19 (sequence is synthesized)
tgtagcaaatgtggaaaaaccttgtcagaagtcagtcctcactgtacatcatagaacccataccggagaaaaaccttatgaatgtaatgagtgtgggaaaaccttttgtcacaagtcaaa

SEQ ID NO: 767273 - DNA, 120 bp, Artificial Sequence
  ENSG00000227124_20 (sequence is synthesized)
cctcagtacgcatcaggggactcactcaggagagaaaccctatgaatgtgatgaatgtaggaaaactttttacgataagacagttctcaccatacatcagagaactcacacaggtgagaa

SEQ ID NO: 767274 - DNA, 120 bp, Artificial Sequence
  ENSG00000227124_21 (sequence is synthesized)
gccatttgaatgtaaagaatgtaggaaaaccttctcccagaagtcaaaactctttgtacatcacagaactcacacaggggaaaaaccctttagatgtaatgaatgtaggaaaactttctc

SEQ ID NO: 767275 - DNA, 120 bp, Artificial Sequence
  ENSG00000227124_22 (sequence is synthesized)
ccagaagtcaggcctcagtatacatcagagaacacacacaggagaaaaaccttatgaatgtaaggaatgtgggaaaaccttttgccagaagtcacacctcagcaggcatcaacaaaccca

SEQ ID NO: 767276 - DNA, 120 bp, Artificial Sequence
  ENSG00000227124_23 (sequence is synthesized)
tataggagagaaatctgacgtagctgaggcaggctatgtgttccctcaaaatcactcttttttcccttgaacacacaacctacacctctctggctactattacagatttctccatgctca

SEQ ID NO: 767277 - DNA, 120 bp, Artificial Sequence
  ENSG00000227124_24 (sequence is synthesized)
gtctaggagaatatggacacaaatggtgaccattacctcctggcctaccaacaagaaggtcttaaccatgctgtaacagaagtcctatcatgcaggctttgttgttcccatttttacagc

SEQ ID NO: 767278 - DNA, 120 bp, Artificial Sequence
  ENSG00000227124_25 (sequence is synthesized)
acactttgcactttaatgtcacagatatggctgttttcctagaagctcatataccaacctctgccagcttcaaacatttcttctgcaacttcctcacctctcttctcctccatagaattg

SEQ ID NO: 767279 - DNA, 120 bp, Artificial Sequence
  ENSG00000227124_26 (sequence is synthesized)
aagagagttagggcctttctcaggattaggctttgtctcaagggaatgttggggctggtttgatcttctatgtggaccactcagactttctctgtgtcagtaaaaagcctgttttgtttt

SEQ ID NO: 767280 - DNA, 120 bp, Artificial Sequence
  ENSG00000227124_27 (sequence is synthesized)
ttaaaaatcattcatgtgttctctggagtagcacctataacatccttcaagaactttttctttgcattcacaacttgagtagctgatgcaagaagcttagctttggcctgtcttagcttc

SEQ ID NO: 767281 - DNA, 120 bp, Artificial Sequence
  ENSG00000227124_28 (sequence is synthesized)
caacatgctttcttcactaagctcgatgatttctaccttttgatttgaagtgacaggtgtgcacacttcttttcaattgaacacatggtggccactgcagagtgaagtggcctaatttca

SEQ ID NO: 767282 - DNA, 120 bp, Artificial Sequence
  ENSG00000227124_29 (sequence is synthesized)
ttgttgtatcttggggaatggggagctagaagagagaaacagagacagggaaatgactagtcaatgaagcagtcaaacacaacatttttccatcacgtttgctatcttccatagagttcc

SEQ ID NO: 767283 - DNA, 120 bp, Artificial Sequence
  ENSG00000227124_30 (sequence is synthesized)
agcacgctgagacaattccattagtaacatcagaaatcactgatcacagatcataacagatgtgataactaaaatctttgaaagattgggattgccaaaagatgtgacagagatgtgaag

SEQ ID NO: 767284 - DNA, 120 bp, Artificial Sequence
  ENSG00000227124_31 (sequence is synthesized)
tgagcccatggtgttggaaaaatggtgctggtcaggcttgctgagcacttcgtggccacaaatctttaatttgttaaaaaggtgatgttgccaagcaaaataaagtgaagctcaaagtga

SEQ ID NO: 767285 - DNA, 120 bp, Artificial Sequence
  ENSG00000227124_32 (sequence is synthesized)
acgtatgggacctcagatatttcaaacatgatgtgtccaagtctgtatcacttctggccatcatattgttcttttatttttccaaatttcacatcaccagtaacaaactagctgtgatca

SEQ ID NO: 767286 - DNA, 120 bp, Artificial Sequence
  ENSG00000227124_33 (sequence is synthesized)
tggcagatagcctggaaataaaactcccctttttaccctttgcacagcaaattgacatcaaatcctgtttctactttttttttttttaactattgcttccctattctgtattctcactgc

SEQ ID NO: 767287 - DNA, 120 bp, Artificial Sequence
  ENSG00000227124_34 (sequence is synthesized)
tccatctcctgatgtaggaggtcatctgttttcctcttttcctctcctctgactcttaagccctttcccattctctttctcaggaatggctgttaaaatgccaatatggtcttgtaactt

SEQ ID NO: 767288 - DNA, 120 bp, Artificial Sequence
  ENSG00000227124_35 (sequence is synthesized)
tcctgtacttagtgaacctccttatttacaccctgtttgtgaagtggctgtgttcaccctgggtggacacggaatgtttttgtcatgtacaaagagaattttatgctgcctgtgtacagt

SEQ ID NO: 767289 - DNA, 120 bp, Artificial Sequence
  ENSG00000227124_36 (sequence is synthesized)
tattaatttgtaagtacactcagctttttgtatctgtaggtttaatatctgtgtatgtaagcaaacttggatgcaaaatatttgaaataaaatcagatgcttgcatctgtagtgaacata

SEQ ID NO: 767290 - DNA, 69 bp, Artificial Sequence
  ENSG00000227124_37 (sequence is synthesized)
tgggttgcccgcgagggagatggggtactggatgatggtcttcagccttaagggtacttcagtcttaac

SEQ ID NO: 767291 - DNA, 120 bp, Artificial Sequence
  ENSG00000227124_38 (sequence is synthesized)
ggatgatggtcttcagccttaagggtacttcagtcttaaccgtgtgttataaggtttgaaagggagggttccctatgaataagaagcgcacttgaaagaacagccctctggtctaacctc

SEQ ID NO: 767292 - DNA, 120 bp, Artificial Sequence
  ENSG00000227124_39 (sequence is synthesized)
gataagctaccttaatgaaggacgacacatccctccagagatgataaaagactttttgtcttttctgatttaagaaaactttatctcgtaagctacctatagtttacaaaaattcagtaa

SEQ ID NO: 767293 - DNA, 120 bp, Artificial Sequence
  ENSG00000227124_40 (sequence is synthesized)
agtataattttttgaacaaagatggaagcattcattttgtctccctacttgattcctccaaaatttggaaaccatttgtgagtattcttctatttttactcaataaatatctgtttctct

SEQ ID NO: 767294 - DNA, 120 bp, Artificial Sequence
  ENSG00000227124_41 (sequence is synthesized)
tcataaacagaataccattgaaaaccttggttatattattaaggctttgactgaaatatcatatttaagaatgtgcataaaatgcctggcttccagtgcttccagcctgacagtgaatga

SEQ ID NO: 767295 - DNA, 120 bp, Artificial Sequence
  ENSG00000227124_42 (sequence is synthesized)
gtaaaaattgtcacttcctggcaggcccaaaaactttaagattgtaagtaaaatctaaaacctcccttgctttggcctcaagaggtttttaaacctgaactttctgtaaattaatgtaga

SEQ ID NO: 767296 - DNA, 120 bp, Artificial Sequence
  ENSG00000227124_43 (sequence is synthesized)
cattcttttcaagttcttgttatctacatgtagattatactagatcctgaattttcctaatgtatttctcctaatttggcaacaactctccaactaaaggcaaaagctgctctgttacta

SEQ ID NO: 767297 - DNA, 120 bp, Artificial Sequence
  ENSG00000227124_44 (sequence is synthesized)
aagccctatgagctgaaactagataaattttaaagaataaacttgtgcctgatgtatggatcacagaaagagtgcaccaaaccaactgatgtcatgaccaaagacattcaaactacaaag

SEQ ID NO: 767298 - DNA, 120 bp, Artificial Sequence
  ENSG00000227124_45 (sequence is synthesized)
caggagaagttaatgttttcatgccgattttcccaggtcattagaacagattttcccaggtcattagaacaagactccacgtgatgagatttttacccctcctcctccttaatgctacat

SEQ ID NO: 767299 - DNA, 120 bp, Artificial Sequence
  ENSG00000227124_46 (sequence is synthesized)
ttttcacttggcagaataatgatgtgaatgaaaattcacaatcaatagcttctgctcataagtatcctttggttaaatgagaaaatgactgtgttattgtcaatactatatgctgtacct

SEQ ID NO: 767300 - DNA, 120 bp, Artificial Sequence
  ENSG00000227124_47 (sequence is synthesized)
ggataaatttctctatgaaattagaaatttatagacacaaaagaagaagacaggccatgtggttacaccatctcacctgattccttgtgatcatttgatttattcaattagttgtctgta

SEQ ID NO: 767301 - DNA, 120 bp, Artificial Sequence
  ENSG00000227124_48 (sequence is synthesized)
agcctaggttaatggctcaaagccattatgcaaactagaattgtcctattactatttacttcataatttccctttttaaactgtgtatccattacttaagttttttttcaaaagtacaac

SEQ ID NO: 767302 - DNA, 120 bp, Artificial Sequence
  ENSG00000227124_49 (sequence is synthesized)
tcctaacagaataataccagtacagcactttaagatgatagcaaaagactacagaacagacaaaatcgaacttaataatgaactccaggtagacttagcctgaaaactactcccttcaaa

SEQ ID NO: 767303 - DNA, 120 bp, Artificial Sequence
  ENSG00000227124_50 (sequence is synthesized)
tttcccttgttgctccaaatatgcctaaaaggattttgacactgactcttaggtgccaattaccccctgcctcaatgtgggatgagaacaaaaaccaaaataggtccatcctagcaccaa

SEQ ID NO: 767304 - DNA, 120 bp, Artificial Sequence
  ENSG00000227124_51 (sequence is synthesized)
gggccatcaaaaccaaacttaaagatgattgatcagtgatgcttttggaaaaagatctggagcacaaaagggaaacgtgaaagttgtctgaatcaaaatggagtcactagtaataagaaa

SEQ ID NO: 767305 - DNA, 120 bp, Artificial Sequence
  ENSG00000227124_52 (sequence is synthesized)
actctgacagctcgagctggggaaggccatgaagagagcattctcatgcgtgtatgcctgatgatgaaaaagattctacaaaaattacaaccttgcacaaagtccgtgacaacgttatac

SEQ ID NO: 767306 - DNA, 73 bp, Artificial Sequence
  ENSG00000227124_53 (sequence is synthesized)
ggcgaggcctgagggagccggttaccaacccgcatgacgctcagtttgcccatctgtcccagtgcgaacacac

SEQ ID NO: 767307 - DNA, 80 bp, Artificial Sequence
  ENSG00000227124_54 (sequence is synthesized)
gaaacgcgtgcgcctcgagtcttaaactgggcgtttgtattagttgggtttcccggtgtctctttagcaagtgaagtttc

SEQ ID NO: 767308 - DNA, 120 bp, Artificial Sequence
  ENSG00000227124_55 (sequence is synthesized)
tggtcactaagtcctggaacgagttgtgtgagccccttgaggcattcatccagtgctgtttcggagaactagttattgaaaaacaacagacaatggcaaaaacaagttgtcctttttgta

SEQ ID NO: 767309 - DNA, 120 bp, Artificial Sequence
  ENSG00000227124_56 (sequence is synthesized)
ttccttgagcccagtcaggaagggctttcatgaccgggcctcctgacaaacaacttgttacaaaaagagctcggttcccagactgcgccgaagtttcatgggacctctcctcgtctgtgc

SEQ ID NO: 767310 - DNA, 120 bp, Artificial Sequence
  ENSG00000227124_57 (sequence is synthesized)
acggactactggtcaattctggagcccaggctgttgcttcctggtctgttgatgaatcctccatagtctggcgagtgtaaaacaaaaaatatatatatatgtgtgtatatatatatacac

SEQ ID NO: 767311 - DNA, 120 bp, Artificial Sequence; identical to SEQ ID NO: 745358
  ENSG00000227151_0 (sequence is synthesized)

SEQ ID NO: 767312 - DNA, 120 bp, Artificial Sequence; identical to SEQ ID NO: 745359
  ENSG00000227151_1 (sequence is synthesized)

SEQ ID NO: 767313 - DNA, 120 bp, Artificial Sequence; identical to SEQ ID NO: 745360
  ENSG00000227151_2 (sequence is synthesized)

SEQ ID NO: 767314 - DNA, 120 bp, Artificial Sequence; identical to SEQ ID NO: 745361
  ENSG00000227151_3 (sequence is synthesized)

SEQ ID NO: 767315 - DNA, 120 bp, Artificial Sequence; identical to SEQ ID NO: 745362
  ENSG00000227151_4 (sequence is synthesized)

SEQ ID NO: 767316 - DNA, 120 bp, Artificial Sequence; identical to SEQ ID NO: 745363
  ENSG00000227151_5 (sequence is synthesized)

SEQ ID NO: 767317 - DNA, 120 bp, Artificial Sequence; identical to SEQ ID NO: 745364
  ENSG00000227151_6 (sequence is synthesized)

SEQ ID NO: 767318 - DNA, 120 bp, Artificial Sequence; identical to SEQ ID NO: 745365
  ENSG00000227151_7 (sequence is synthesized)

SEQ ID NO: 767319 - DNA, 120 bp, Artificial Sequence; identical to SEQ ID NO: 745366
  ENSG00000227151_8 (sequence is synthesized)

SEQ ID NO: 767320 - DNA, 120 bp, Artificial Sequence; identical to SEQ ID NO: 745367
  ENSG00000227151_9 (sequence is synthesized)

SEQ ID NO: 767321 - DNA, 120 bp, Artificial Sequence; identical to SEQ ID NO: 745368
  ENSG00000227151_10 (sequence is synthesized)

SEQ ID NO: 767322 - DNA, 120 bp, Artificial Sequence; identical to SEQ ID NO: 745369
  ENSG00000227151_11 (sequence is synthesized)

SEQ ID NO: 767323 - DNA, 120 bp, Artificial Sequence; identical to SEQ ID NO: 745370
  ENSG00000227151_12 (sequence is synthesized)

SEQ ID NO: 767324 - DNA, 120 bp, Artificial Sequence; identical to SEQ ID NO: 745371
  ENSG00000227151_13 (sequence is synthesized)

SEQ ID NO: 767325 - DNA, 120 bp, Artificial Sequence; identical to SEQ ID NO: 745372
  ENSG00000227151_14 (sequence is synthesized)

SEQ ID NO: 767326 - DNA, 120 bp, Artificial Sequence
  ENSG00000227191_0 (sequence is synthesized)
ataaacaacttgatgcagatgtttcccccaagcccactatttttcttccttcgattgctgaaacaaaactccagaaggctggaacatacctttgtcttcttgagaaatttttcccagata

SEQ ID NO: 767327 - DNA, 120 bp, Artificial Sequence
  ENSG00000227191_1 (sequence is synthesized)
ttattaagatacattggcaagaaaagaagagcaacacgattctgggatcccaggaggggaacaccatgaagactaacgacacatacatgaaatttagctggttaacggtgccagaagagt

SEQ ID NO: 767328 - DNA, 120 bp, Artificial Sequence
  ENSG00000227191_2 (sequence is synthesized)
cactggacaaagaacacagatgtatcgtcagacatgagaataataaaaacggaattgatcaagaaattatctttcctccaataaagacagatgtcaccacagtggatcccaaatacaatt

SEQ ID NO: 767329 - DNA, 120 bp, Artificial Sequence
  ENSG00000227191_3 (sequence is synthesized)
attcaaaggatgcaaatgatgtcatcacaatggatcccaaagacaattggtcaaaagatgcaaatgatacactactgctgcagctcacaaacacctctgcatattacacgtacctcctcc

SEQ ID NO: 767330 - DNA, 120 bp, Artificial Sequence
  ENSG00000227191_4 (sequence is synthesized)
agaacggctttctgctgcaatggagagaaatcataacagacggtggcacaaggaggccatcttttcctcatcggttattgtccctagaagcgtcttctgaggatctagttgggctttctt

SEQ ID NO: 767331 - DNA, 120 bp, Artificial Sequence
  ENSG00000227191_5 (sequence is synthesized)
tctgggtttgggccatttcagttctcatgtgtgtactattctatcattattgtataatggttttcaaaccagtgggcacacagagaacctcactctgtaataacaatgaggaatagccat

SEQ ID NO: 767332 - DNA, 120 bp, Artificial Sequence
  ENSG00000227191_6 (sequence is synthesized)
ggcgatctccagcaccaatctctccatgttttccacagctcctccagccaacccaaatagcgcctgctatagtgtagacagcctgcggcttctagccttgtccctctcttagtgttcttt

SEQ ID NO: 767333 - DNA, 120 bp, Artificial Sequence
  ENSG00000227191_7 (sequence is synthesized)
aatcagataactgcctggaagcctttcattttacacgccctgaagcagtcttctttgctagttgaattatgtggtgtgtttttccgtaataagcaaaataaatttaaaaaaatgaaaagt

SEQ ID NO: 767334 - DNA, 120 bp, Artificial Sequence
  ENSG00000227234_0 (sequence is synthesized)
accaggagggtatgcatagggagggcaagagctctgggccactgcgaagattcaaaagctccaaaaacctactgtagacatcgaagaaccaatatatacaatgggccaacaatccagtgt

SEQ ID NO: 767335 - DNA, 120 bp, Artificial Sequence
  ENSG00000227234_1 (sequence is synthesized)
cctgctcctaaaaaaatgaaaacatctgagtcctcgaccatactagtggttcgctacaggaggaacgtgaaaagaacatctccagaggaactgctgaatgaccacgcccgagagaacaga

SEQ ID NO: 767336 - DNA, 120 bp, Artificial Sequence
  ENSG00000227234_2 (sequence is synthesized)
atcaaccccgaccaaatggaggaggaggaattcatagaaataacgactgaaagacctaaaaagtagcaagaagctacatccctcaaacttcggcaatgaaaataaagtttgagaagctga

SEQ ID NO: 767337 - DNA, 120 bp, Artificial Sequence
  ENSG00000227268_0 (sequence is synthesized)
gcagggcagggcagggggcggtaggagggggcagagcggtagctctgggtgcgagcgcagagtccccaagccgcaggctctactgagcatgcccagtgtagctgcctggggcttgctcgg

SEQ ID NO: 767338 - DNA, 120 bp, Artificial Sequence
  ENSG00000227268_1 (sequence is synthesized)
gccggttcccagccgccagcctgcagctgcacttgctgcggcttttgcagcaacgcgaggcgaggataacgagctaagcctcggcctctgcccagaaacccagccggaggcagggtaggc

SEQ ID NO: 767339 - DNA, 120 bp, Artificial Sequence
  ENSG00000227268_2 (sequence is synthesized)
tgttgtggggcgggggtggaggactgatgatgaaagctgagatgggtgcgttgagcagtgtcactgactcgagtctgaggttacctgtgcacaggtgaaaaggaccaggtgaccacgctg

SEQ ID NO: 767340 - DNA, 120 bp, Artificial Sequence
  ENSG00000227268_3 (sequence is synthesized)
ctcagtgtagagggaaatgcagggacggtccctgcaaggggaataccctccccccttgcctctacccctagatttccgcggcgtggactgcattcgctctttccttttgcaccgctgtcg

SEQ ID NO: 767341 - DNA, 120 bp, Artificial Sequence
  ENSG00000227268_4 (sequence is synthesized)
gatcacaatcgttcgcagagatttgactgtaacagcctttgcctagagattcccccttcccccaaatctgtgtcctcatggtgtcagtcttagcacaaagagcaacctgctattgtgtcg

SEQ ID NO: 767342 - DNA, 120 bp, Artificial Sequence
  ENSG00000227268_5 (sequence is synthesized)
ccagcgtgtatcacctcatccggctcccttgcagcgccccacctctcgcttccccggtaactcggctcgtttgccctaaaaatgaaagctctcagccgagcgtgctgaacgtgaacacat

SEQ ID NO: 767343 - DNA, 120 bp, Artificial Sequence
  ENSG00000227268_6 (sequence is synthesized)
agccgttgaatttcaagggcccaaagggcacctatctaaatgaactgaaagaggatccctgtgagtgggacgcaccccgcaggcctctcctgcgcccgctccggtgcccccaagagagtc

SEQ ID NO: 767344 - DNA, 120 bp, Artificial Sequence
  ENSG00000227268_7 (sequence is synthesized)
gagcatctttcccctcgggctccaggtcggttcgcggcgtcggagtcaagctcggttctcagagaccacctagccccgcccccccttggccgccgtgaaaacccggcaggatggatcgcc

SEQ ID NO: 767345 - DNA, 120 bp, Artificial Sequence
  ENSG00000227268_8 (sequence is synthesized)
cggggccaggctccgcgcgccccggccggaccgtgcacgtttggggttaccgggttgagtggaaagtacggaacggtaggaagctgcagcccagcgagtgggcggggcgaggagacctag

SEQ ID NO: 767346 - DNA, 120 bp, Artificial Sequence
  ENSG00000227268_9 (sequence is synthesized)
gagggttcaaaaggaggtggaaggatacacgggccacagtcggaactactttccgaaggaggtcacgtgtgtccctagttggggaactttccaaattcccactccccagtgatagctccg

SEQ ID NO: 767347 - DNA, 120 bp, Artificial Sequence
  ENSG00000227268_10 (sequence is synthesized)
gaggcaagtcgtcttcttcctttgctcggggtgctcttgcctggtgcaggcagcggaaccccaacccttcctgcgccgcggcggaaacaggggctcggaccagcctcccgaaggagcgct

SEQ ID NO: 767348 - DNA, 120 bp, Artificial Sequence
  ENSG00000227268_11 (sequence is synthesized)
gtcggggctggcgcttggggaactggttacacaagcacccacatccaaacacgtgcccccgcctccccgcctgctggctgccgccgattcttacagaacgcggggagagagtccccaaac

SEQ ID NO: 767349 - DNA, 120 bp, Artificial Sequence
  ENSG00000227268_12 (sequence is synthesized)
tggtgccactcctcgcctgctaccctaagagcaagccaaaggactgagacctgagactcactccttgctctacatcgacctattctgcgccttcccaaacgtgggaaaaggagctgggcg

SEQ ID NO: 767350 - DNA, 120 bp, Artificial Sequence
  ENSG00000227268_13 (sequence is synthesized)
ctagggctctcgggcctctccatcgctgatgccctgccgcttagggtgaacccttttggttctgtgcttgagggtatctcctgctgcagcccagagcgtgcattctccgatgttgcaaca

SEQ ID NO: 767351 - DNA, 120 bp, Artificial Sequence
  ENSG00000227268_14 (sequence is synthesized)
aacgtccagtcactacccctgagctggtgagcgcgccccacctactgtggactcagccaagtgacttatctggtctgagaacctagtcaatggccgtcagcccagaacaaacctgtcaag

SEQ ID NO: 767352 - DNA, 120 bp, Artificial Sequence
  ENSG00000227268_15 (sequence is synthesized)
tctgtttacagccccgattgggctgacctgtcaccgtgagagagctgattcggaaatgctgagagttggatcgcactcctaccccgcaccccacccgtcaaggatctacaaagcaagtag

SEQ ID NO: 767353 - DNA, 120 bp, Artificial Sequence
  ENSG00000227268_16 (sequence is synthesized)
tcgacccgcttaaagagaatgagcatcaacaccagtctgggaatttattgttttttcatttcccttaggaagtagaactacagacgacaatttgagtcaaaaaatatctaacgagaccta

SEQ ID NO: 767354 - DNA, 120 bp, Artificial Sequence
  ENSG00000227268_17 (sequence is synthesized)
agcaaagtctaaagagggtttatgctgtatttgagaaagagtactgtatatgtgcacatcatagttgcaggcaacctctgaagactagaaacctcaagagacctagcgcagaaagccaca

SEQ ID NO: 767355 - DNA, 120 bp, Artificial Sequence
  ENSG00000227268_18 (sequence is synthesized)
ggccattacctaactccgggactactaattaaacctgggatatttacagtgttcttagagacctctgaggctccataaaactttgcacttatatacagcatttaagatagctgtgcagga

SEQ ID NO: 767356 - DNA, 120 bp, Artificial Sequence
  ENSG00000227268_19 (sequence is synthesized)
gttaacaacctgctgaagcttcagtgttgatatttattgaagactggttttgtgcatagttctggtcagcttgggaaaggcaaggaccacagtggaaaaggaaatggaaagcaaccggaa

SEQ ID NO: 767357 - DNA, 120 bp, Artificial Sequence
  ENSG00000227268_20 (sequence is synthesized)
aagagtaagagaaaggcctccagttgatttccagagatgcagatactgtccacacagcctagcgtgaactacagatttcattattgtataaataaccaaagataaggagttcctgatgtc

SEQ ID NO: 767358 - DNA, 120 bp, Artificial Sequence
  ENSG00000227268_21 (sequence is synthesized)
taggtgttctactagattgcatggtaaaaaccagagctgtgtttaattatcaattactgcgtggtagaaaaagggaaaatgaagatgaacttttaaaaggggagtagattagggaggggt

SEQ ID NO: 767359 - DNA, 120 bp, Artificial Sequence
  ENSG00000227268_22 (sequence is synthesized)
aaaatgtctcacatttgtttcttagattgctgatcttgtctccagagtccctgttattagcactgcccttctctgtccctcccctggagcctaccctaagtgacaattagtctcatagca

SEQ ID NO: 767360 - DNA, 120 bp, Artificial Sequence
  ENSG00000227268_23 (sequence is synthesized)
tctgagaatctctgaaatctgctttcatggaagcaaatgaaacaagggtgcattcctgtcctggtgcgacagaatcctcttggattccatggcacagagttactctggagcagagataat

SEQ ID NO: 767361 - DNA, 120 bp, Artificial Sequence
  ENSG00000227268_24 (sequence is synthesized)
ctgcatcaccagcactaaagtgctagaatatgagaccagcctccaagtacttccatccggctgaagaaagaaaatgggaaatgggttttactgcttctctaaacatcaggtccctctact

SEQ ID NO: 767362 - DNA, 120 bp, Artificial Sequence
  ENSG00000227268_25 (sequence is synthesized)
tctctctagtggtgaatgaaaggatcatcaatgttggcagatatttggccagcccaacagcaacatcaggtggttattaggagttggtgaataaaatcctccttctgttcctagtgttaa

SEQ ID NO: 767363 - DNA, 120 bp, Artificial Sequence
  ENSG00000227268_26 (sequence is synthesized)
gttgtttctgaaagaaatactgatgcatccttttccaattttttgtttttcttttcctttctacccaaatggctggccctatctaaactaaagaaagtttcaaaaatagtacttttttaa

SEQ ID NO: 767364 - DNA, 120 bp, Artificial Sequence
  ENSG00000227268_27 (sequence is synthesized)
taaagaaagtttcaaaaatagtacttttttaaagttcagttgaaaatacctgcttggctgtatagatattacaatacactggtctccaagcacttcagttctttttttttttttcttttt

SEQ ID NO: 767365 - DNA, 120 bp, Artificial Sequence
  ENSG00000227268_28 (sequence is synthesized)
ccgcgcccggccatacttagttctttacctgtctggattcagaaccagaataccatagggagaagtagaagcttgtaacaaagggacaattatataaagcttcagggtgactatgtagat

SEQ ID NO: 767366 - DNA, 120 bp, Artificial Sequence
  ENSG00000227268_29 (sequence is synthesized)
tgattagtaagcatggtaaactagctttaattatcgcttctaacagctgattccaaaactctattgttactacaccaaaataatgtcgaaagaaaatttctttcttattttctttgataa

SEQ ID NO: 767367 - DNA, 120 bp, Artificial Sequence
  ENSG00000227268_30 (sequence is synthesized)
gcgaaatgaccagcaacttgatgtggatgatataaatacttgatgtgctctttgtaggtcatctgctaagatgtcttttgtgtaaacactctgatctctatagtgcctttctcatctccc

SEQ ID NO: 767368 - DNA, 120 bp, Artificial Sequence
  ENSG00000227268_31 (sequence is synthesized)
atacgctgacctttcaaaaagggatctaactcaatagctttaatttttaaacaatcttctgtatttctgtctgtttaactactgttttctaaataatacagaatataaaaacataataat

SEQ ID NO: 767369 - DNA, 120 bp, Artificial Sequence
  ENSG00000227268_32 (sequence is synthesized)
cattggattgaatgtaaacccattgttccaagggtctgaggttttccccttatttcatttatcctaataacaaacattattgttctttcaataaagataattttaagacattctccaaaa

SEQ ID NO: 767370 - DNA, 120 bp, Artificial Sequence
  ENSG00000227345_0 (sequence is synthesized)
tcggcactttgggaggccaaggcaggcgctgagaaggaggcgcagtccatctctctcagggttagtgaatgaggctctccgcccgggccggcccggggacagtgcgctgctggtcccagc

SEQ ID NO: 767371 - DNA, 120 bp, Artificial Sequence
  ENSG00000227345_1 (sequence is synthesized)
cgctgctggtcccagcatgaatgcgggccccggctgtgaaccctgcaccaagcgaccccgctggggcgccgctacaacttcgccggctgcttcggacgcccggagctttcccagcaggca

SEQ ID NO: 767372 - DNA, 120 bp, Artificial Sequence
  ENSG00000227345_2 (sequence is synthesized)
gaggcgcgtcctcgaccccaaggacgctcacgtgcagttcagggtcccaccgtcctcgccagcctgcgtcccagggcgggcgggacagcacagaggcagcgccacctcgcttgttttcaa

SEQ ID NO: 767373 - DNA, 120 bp, Artificial Sequence
  ENSG00000227345_3 (sequence is synthesized)
acaaaagactattaccagttggatggacactaaaggaatcaagacagcggaatcagaaagtttggatagtaaagaaaacaacaatacaagaatagaatccatgatgagttctgtacaaaa

SEQ ID NO: 767374 - DNA, 120 bp, Artificial Sequence
  ENSG00000227345_4 (sequence is synthesized)
agataacttttaccaacataatgtagaaaaattagaaaatgtttctcagctaagtcttgataagtcacccactgaaaaaagtacacagtatttgaaccagcatcagactgcagcaatgtg

SEQ ID NO: 767375 - DNA, 120 bp, Artificial Sequence
  ENSG00000227345_5 (sequence is synthesized)
taagtggcaaaatgaagggaaacacacggagcagcttttggaaagtgaacctcaaacagtaaccctggtaccagagcagtttagtaatgctaacattgatcggtcacctcaaaatgatga

SEQ ID NO: 767376 - DNA, 120 bp, Artificial Sequence
  ENSG00000227345_6 (sequence is synthesized)
tcacagtgacacagatagtgaagagaatagagacaatcaacagtttctcacaactgtaaagcttgcaaatgcaaagcagactacagaagatgaacaggccagagaagccaaaagccacca

SEQ ID NO: 767377 - DNA, 120 bp, Artificial Sequence
  ENSG00000227345_7 (sequence is synthesized)
gaagtgcagcaagtcttgcgatcctggggaagactgtgcaagttgtcagcaagatgagatagatgtggtgccagagagtccattgtcagatgttggctctgaggatgttggtactgggcc

SEQ ID NO: 767378 - DNA, 120 bp, Artificial Sequence
  ENSG00000227345_8 (sequence is synthesized)
aaaaaatgacaacaaattgactagacaagaaagttgcctaggaaattctcctccatttgagaaggaaagtgaacccgagtcaccgatggatgtggataattctaaaaatagttgtcaaga

SEQ ID NO: 767379 - DNA, 120 bp, Artificial Sequence
  ENSG00000227345_9 (sequence is synthesized)
ctcagaagcagatgaggagacaagtccaggttttgatgaacaagaagatggtagttcctcccaaacagcaaataaaccttcaaggttccaagcaagagacgctgacattgaatttaggaa

SEQ ID NO: 767380 - DNA, 120 bp, Artificial Sequence
  ENSG00000227345_10 (sequence is synthesized)
acggtactctactaagggcggtgaagttagattacatttccaatttgaaggaggagagagtcgcactggaatgaatgatttaaatgctaaactacctggaaatatttctagcctgaatgt

SEQ ID NO: 767381 - DNA, 120 bp, Artificial Sequence
  ENSG00000227345_11 (sequence is synthesized)
agaatgcagaaattctaagcaacatggaaaaaaggattctaaaatcacagatcatttcatgagactgcccaaagcagaggacagaagaaaagaacagtgggaaaccaaacatcaaagaac

SEQ ID NO: 767382 - DNA, 120 bp, Artificial Sequence
  ENSG00000227345_12 (sequence is synthesized)
agaaaggaagatccctaaatacgttccacctcacctttctccagataagaagtggcttggaactcccattgaggagatgagaagaatgcctcggtgtgggatccggctgcctctcttgag

SEQ ID NO: 767383 - DNA, 120 bp, Artificial Sequence
  ENSG00000227345_13 (sequence is synthesized)
accatctgccaatcacacagtaactattcgggtagatcttttgcgagcaggagaagttcctaaaccttttccaacacattataaagatttgtgggataacaagcatgttaaaatgccttg

SEQ ID NO: 767384 - DNA, 120 bp, Artificial Sequence
  ENSG00000227345_14 (sequence is synthesized)
ttcagaacaaaatttgtacccagtggaagatgagaatggtgagcgaactgcggggagccggtgggagctcattcagactgcacttctcaacaaatttacacgaccccaaaacttgaagga

SEQ ID NO: 767385 - DNA, 120 bp, Artificial Sequence
  ENSG00000227345_15 (sequence is synthesized)
tgctattctgaaatacaatgtggcatattctaagaaatgggactttacagctttgatcgatttctgggataaggtacttgaagaagcagaagctcaacatttatatcagtccatcttgcc

SEQ ID NO: 767386 - DNA, 120 bp, Artificial Sequence
  ENSG00000227345_16 (sequence is synthesized)
tgatatggtgaaaattgcactctgtctgccaaatatttgcacccagccaataccactcctgaaacagaagatgaatcattccatcacaatgtcgcaggaacagattgccagtcttttagc

SEQ ID NO: 767387 - DNA, 120 bp, Artificial Sequence
  ENSG00000227345_17 (sequence is synthesized)
ggagtattctagttacccagacattaacttcaatcgattgtttgagggacgttcatcaaggaaaccggagaaacttaaaacgctcttctgctactttagaagagtcacagagaaaaaacc

SEQ ID NO: 767388 - DNA, 120 bp, Artificial Sequence
  ENSG00000227345_18 (sequence is synthesized)
tactgggttggtgacatttacaagacagagtcttgaagattttccagaatgggaaagatgtgaaaaacccttgacacgattgcatgtcacttacgaaggtaccatagaagaaaatggcca

SEQ ID NO: 767389 - DNA, 120 bp, Artificial Sequence
  ENSG00000227345_19 (sequence is synthesized)
aggcatgctacaggtggattttgcaaatcgttttgttggaggtggtgtaaccagtgcaggacttgtgcaagaagaaatccgctttttaatcaatcctgagttgattatttcacggctctt

SEQ ID NO: 767390 - DNA, 120 bp, Artificial Sequence
  ENSG00000227345_20 (sequence is synthesized)
cactgaggtgctggatcacaatgaatgtctaattatcacaggtactgagcagtacagtgaatacacaggctatgctgagacatatcgttggtcccggagccacgaagatgggagtgaaag

SEQ ID NO: 767391 - DNA, 120 bp, Artificial Sequence
  ENSG00000227345_21 (sequence is synthesized)
ggacgactggcagcggcgctgcactgagatcgttgccatcgatgctcttcacttcagacgctacctcgatcagtttgtgcctgagaaaatgagacgcgagctgaacaaggcttactgtgg

SEQ ID NO: 767392 - DNA, 120 bp, Artificial Sequence
  ENSG00000227345_22 (sequence is synthesized)
atttctccgtcctggagtttcttcagagaatctttctgcagtggccacaggaaactggggctgtggtgcctttgggggtgatgccaggttaaaagccttaatacagatattggcagctgc

SEQ ID NO: 767393 - DNA, 120 bp, Artificial Sequence
  ENSG00000227345_23 (sequence is synthesized)
tgcagctgagcgagatgtggtttatttcacctttggggactcagaattgatgagagacatttacagcatgcacattttccttactgaaaggaaactcactgttggagatgtgtataagct

SEQ ID NO: 767394 - DNA, 120 bp, Artificial Sequence
  ENSG00000227345_24 (sequence is synthesized)
gttgctacgatactacaatgaagaatgcagaaactgttccacccctggaccagacatcaagctttatccattcatataccatgctgtcgagtcctgtgcagagaccgctgaccattcagg

SEQ ID NO: 767395 - DNA, 120 bp, Artificial Sequence
  ENSG00000227345_25 (sequence is synthesized)
gcaaaggacagggacctgaggagccgagcgaatagcatctcctcccacctcccaccagagacgtcctgtttgagctgtcaggtgtaatatatgaattgacttaagttaatataaatgtgt

SEQ ID NO: 767396 - DNA, 120 bp, Artificial Sequence
  ENSG00000227345_26 (sequence is synthesized)
acataatccacatttgtagtcaaggacgcaatctcttccacacatgtgcagttgtcagttggtacatctaaactccctccatcctgactcacgtggacttagatatgttttgtttctatt

SEQ ID NO: 767397 - DNA, 120 bp, Artificial Sequence
  ENSG00000227345_27 (sequence is synthesized)
ttcttctatttcagtttttcattctttgatgtttatttcttttgtccatcagatctcttgtgaaatcccatggaaggttgtgctcagcctgtcgggtctctttcttcctgcccatatatt

SEQ ID NO: 767398 - DNA, 120 bp, Artificial Sequence
  ENSG00000227345_28 (sequence is synthesized)
ataccagttgcttctgcagcccgcagatgccagcgatgccaggaaacaagttgaaatccaggaatctctttaactgattttgctaaaaatctccctgtgagccttccactcaactcttaa

SEQ ID NO: 767399 - DNA, 120 bp, Artificial Sequence
  ENSG00000227345_29 (sequence is synthesized)
tatgcttgcattgtttaagtttttaaattctgaaaattaataattagggtttttttcatatgtgttgcataatgcaaacctcctaggttaaaatagtttctttatttaagatagaataat

SEQ ID NO: 767400 - DNA, 120 bp, Artificial Sequence
  ENSG00000227345_30 (sequence is synthesized)
ttccagaaattgtacttttgaggtatcatttttatctgtaatggtttgtctgtcttttttcctctgatcagtatttttttataccagttttggagactggctgagatgaaaggaaatgtg

SEQ ID NO: 767401 - DNA, 120 bp, Artificial Sequence
  ENSG00000227345_31 (sequence is synthesized)
gaataaaaggaggttttcctgatgtggtgtaaagaaaacagattcaagagaattgaagattttttttgtttcttggtacttttttctttttaaattaggactaatgtttcttttgtggtg

SEQ ID NO: 767402 - DNA, 120 bp, Artificial Sequence
  ENSG00000227345_32 (sequence is synthesized)
cttgaggcatattcatataaccaaagtttgagaactgggaacttcatgctgatttgtacatattgaagtttctctggtattcaaaggttatatagtgaatgaattttcattaataaatca

SEQ ID NO: 767403 - DNA, 120 bp, Artificial Sequence
  ENSG00000227345_33 (sequence is synthesized)
ctttgtcagaaactcccatatcatctatattttatatatgtatatataaacgtatgctctttaagtgtgtctatatgtgagcacataaaatctaaataaaattggactggtgggaaacaa

SEQ ID NO: 767404 - DNA, 120 bp, Artificial Sequence
  ENSG00000227345_34 (sequence is synthesized)
cggtggtgggaaagtgaacgaatcccgaatcaaagcggcgcattgaggcaggtggggtgccagtggaagagggaaggcaggcgagtgtttacggcctgacttgggaggccggcggatcag

SEQ ID NO: 767405 - DNA, 120 bp, Artificial Sequence
  ENSG00000227345_35 (sequence is synthesized)
ggtagtttttcctagtagtttataattgggatcctattagttcttgaaatatctgctattttcatttctgtttgtttgaagtggaaaaataaattgggacctgtattagtttaagggatt

SEQ ID NO: 767406 - DNA, 120 bp, Artificial Sequence
  ENSG00000227345_36 (sequence is synthesized)
ttatgtgcttagcattcaaacaaataaatattagaatttatcatttcttagtctcttccttgcataatcccaggtttttctctccctttctccctctttgtttttccctctattttggcc

SEQ ID NO: 767407 - DNA, 120 bp, Artificial Sequence
  ENSG00000227345_37 (sequence is synthesized)
atattatatacctctaagaaggaaaaaacactcaggacagggagtttagtaggagacatgacccacaaggctggtacacctaaggataaatgagaaattaacttgaccttccaggaaagg

SEQ ID NO: 767408 - DNA, 120 bp, Artificial Sequence
  ENSG00000227345_38 (sequence is synthesized)
ctgagaatttgaaccacaagccctaagctttgagtgtgcagccttaccaccagtgtggtccacaaaggcctgccacaaaggattaattcagatggtatcaggctgatagtgttcccagac

SEQ ID NO: 767409 - DNA, 120 bp, Artificial Sequence
  ENSG00000227345_39 (sequence is synthesized)
gacagcagaagcagatgcacatcttctctgggaaaattcacctctagtctagacctatgaacctactgggttggtgacatttacaagacagagtcttgaagattttccagaatgggaaag

SEQ ID NO: 767410 - DNA, 120 bp, Artificial Sequence
  ENSG00000227471_0 (sequence is synthesized)
ctttgggtccacaccacctttaagagctacaacgatcaccacgacagtctgcggcttcattcttgaagtcagcgacaccacaaacccaccagaagggagaaactccagacacatctgaag

SEQ ID NO: 767411 - DNA, 120 bp, Artificial Sequence
  ENSG00000227471_1 (sequence is synthesized)
aactccagacacatctgaaggaacaaactccagacacaacatctttaacagctgtaacacacactgtgaaggtccacggcttcattcttgaagccagcgagaccacgaaccctctggaag

SEQ ID NO: 767412 - DNA, 120 bp, Artificial Sequence
  ENSG00000227471_2 (sequence is synthesized)
gaaccaactctggacacagcaggacgtgagacttctacctgctcactcagaatcatttccgcaccaaccatggccacgtttgtggagctcagtacaaaagccaagatgcccattgtgggc

SEQ ID NO: 767413 - DNA, 120 bp, Artificial Sequence
  ENSG00000227471_3 (sequence is synthesized)
ctgggcacttggaggtctcttctcggcaaagtgaaagaagcggtgaaggtggccattgatgcagaatatcgccacattgactgtgcctatttctatgagaatcaacatgaggtgggagaa

SEQ ID NO: 767414 - DNA, 120 bp, Artificial Sequence
  ENSG00000227471_4 (sequence is synthesized)
gccatccaagagaagatccaagagaaggctgtgatgcgggaggacctgttcatcgtcagcaaggtgtggcccactttctttgagagaccccttgtgaggaaagcctttgagaagaccctc

SEQ ID NO: 767415 - DNA, 120 bp, Artificial Sequence
  ENSG00000227471_5 (sequence is synthesized)
aaggacctgaagctgagctatctggacgtctatcttattcactggccacagggattcaagactggggatgactttttccccaaagatgataaaggtaatatgatcagtggaaaaggaacg

SEQ ID NO: 767416 - DNA, 120 bp, Artificial Sequence
  ENSG00000227471_6 (sequence is synthesized)
ggagctggtggacgaggggctggtgaaagcccttggggtctcaaatttcaaccacttccagatcgagaggctcttgaacaaacctggactgaaatataaaccagtgactaaccaggttga

SEQ ID NO: 767417 - DNA, 120 bp, Artificial Sequence
  ENSG00000227471_7 (sequence is synthesized)
gtgtcacccatacctcacgcaggagaaactgatccagtactgccactccaagggcatcaccgttacggcctacagccccctgggctctccggatagaccttgggccaaacctgaggaccc

SEQ ID NO: 767418 - DNA, 120 bp, Artificial Sequence
  ENSG00000227471_8 (sequence is synthesized)
ttccctgctggaggatcccaagattaaggagattgctgcaaagcacaaaaaaaccacagcccaggttctgatccgtttccatatccagaggaatgtgacagtgatccccaagtctatgac

SEQ ID NO: 767419 - DNA, 120 bp, Artificial Sequence
  ENSG00000227471_9 (sequence is synthesized)
accagcacacattgttgagaacattcaggtctttgactttaaattgagtgatgaggagatggcaaccatactcagcttcaacagaaactggagggcctttgacttcaaggaattctctca

SEQ ID NO: 767420 - DNA, 120 bp, Artificial Sequence
  ENSG00000227471_10 (sequence is synthesized)
tttggaggactttcccttcgatgcagaatattgaggttgaatctcctggtgagattacacaggggattctctttcttcgctgaagtgtgactgtctccactcaagaactattttagccaa

SEQ ID NO: 767421 - DNA, 120 bp, Artificial Sequence
  ENSG00000227471_11 (sequence is synthesized)
gcttatctgagatcacagtgaactttgtcctgttgtagaccagaatggaggtgctgttttagacatgtatttctgtatgttcaactaggataagaatatcacagaaaagcatggcctgaa

SEQ ID NO: 767422 - DNA, 120 bp, Artificial Sequence
  ENSG00000227471_12 (sequence is synthesized)
taagcaaatgacaattttttccacttatctgatctgatcaaatgtctgttaagcaccagaaactctgccaacactgaggatgtaaagataaataataaaaaataatgactttaaccaaca

SEQ ID NO: 767423 - DNA, 120 bp, Artificial Sequence
  ENSG00000227471_13 (sequence is synthesized)
atggtcttacaaatggaaccccaagtgaactcaactaacaacttccaccaaggacccctggaccaacccgttggccctttgactggcctaaagagttcccttctgaaggacactacaagt

SEQ ID NO: 767424 - DNA, 120 bp, Artificial Sequence
  ENSG00000227471_14 (sequence is synthesized)
agacagacagctggcttacagggccacctgaagacgttccagggctccacaggccactgtcttctggaggggaacggatcgactgccggtgcgcccagccaaattcaactcctgagtcct

SEQ ID NO: 767425 - DNA, 120 bp, Artificial Sequence
  ENSG00000227471_15 (sequence is synthesized)
cagtctctagtcccgggaaggtttcaccgagctgccctactccttgtaccccttctagctggccttagcatagctacgtcagcagctattggcacgactgccctgattcaaggagaaact

SEQ ID NO: 767426 - DNA, 120 bp, Artificial Sequence
  ENSG00000227471_16 (sequence is synthesized)
caatcagcactctgtaaaatggaacaatctgcaggatgtgggcaaataatggaataaaagctggccaccccagtcagcagcagcagggaaccgctcagatacccttccacaccgtggaaa

SEQ ID NO: 767427 - DNA, 120 bp, Artificial Sequence
  ENSG00000227471_17 (sequence is synthesized)
ttcactggccacagggattcaaggtttgagtgactccctttctcagcctctagtttctgagctgttgcaggaattcagggacccccaacagagagactggctgaagccatggcagaagaa

SEQ ID NO: 767428 - DNA, 120 bp, Artificial Sequence
  ENSG00000227471_18 (sequence is synthesized)
tgaagatttcatgaacatttatcacttccccaatcagtacttttgtgatttcctatgcctgtctttacttaaatctcttaatcccatcatcttcgtaagctgaggatgaatgtcgcctca

SEQ ID NO: 767429 - DNA, 78 bp, Artificial Sequence
  ENSG00000227471_19 (sequence is synthesized)
ccctgagaaagagaatgcgctcctaggggtaggcctctaaaatggctgctctggggacggctgtcttttacagttgta

SEQ ID NO: 767430 - DNA, 120 bp, Artificial Sequence
  ENSG00000227471_20 (sequence is synthesized)
gctcctaggggtaggcctctaaaatggctgctctggggacggctgtcttttacagttgtagataagggatgaaataagccccggactcctgttgtgctcccaggcttattaggacgagga

SEQ ID NO: 767431 - DNA, 61 bp, Artificial Sequence
  ENSG00000227471_21 (sequence is synthesized)
cccacctaataaattttggtcagaccgattgtgtgctctcaaaccctgtctcctgataaga

SEQ ID NO: 767432 - DNA, 62 bp, Artificial Sequence
  ENSG00000227471_22 (sequence is synthesized)
taggtcatctctgtgatccacaccctatttgtatactccctccccttttgaaaatcactaat

SEQ ID NO: 767433 - DNA, 120 bp, Artificial Sequence
  ENSG00000227500_0 (sequence is synthesized)
aagacttggcgaagcgctgcgctcgcgcccggatccctcaggcggctgcaggcttcagcctgcgctggttggtgaaacagagatgtcagaaaaggagaacaacttcccgccactgcccaa

SEQ ID NO: 767434 - DNA, 120 bp, Artificial Sequence
  ENSG00000227500_1 (sequence is synthesized)
gttcatccctgtgaagccctgcttctaccagaacttctccgacgagatcccagtggagcaccaggtcctggtgaagaggatctaccggctgtggatgttttactgcgccaccctcggcgt

SEQ ID NO: 767435 - DNA, 120 bp, Artificial Sequence
  ENSG00000227500_2 (sequence is synthesized)
caacctcattgcctgcctggcctggtggatcggcggaggctcggggaccaacttcggcctggccttcgtgtggctgctcctgttcacgccttgcggctacgtgtgctggttccggcctgt

SEQ ID NO: 767436 - DNA, 120 bp, Artificial Sequence
  ENSG00000227500_3 (sequence is synthesized)
ctacaaggccttccgagccgacagctcctttaatttcatggcgtttttcttcatcttcggagcccagtttgtcctgaccgtcatccaggcgattggcttctccggctggggcgcgtgcgg

SEQ ID NO: 767437 - DNA, 120 bp, Artificial Sequence
  ENSG00000227500_4 (sequence is synthesized)
ctggctgtcggcaattggattcttccagtacagcccgggcgctgccgtggtcatgctgcttccagccatcatgttctccgtgtcggctgccatgatggccatcgcgatcatgaaggtgca

SEQ ID NO: 767438 - DNA, 120 bp, Artificial Sequence
  ENSG00000227500_5 (sequence is synthesized)
caggatctaccgaggggctggcggaagcttccagaaggcacagacggagtggaacacgggcacttggcggaacccaccgtcgagggaggcccagtacaacaacttctcaggcaacagcct

SEQ ID NO: 767439 - DNA, 120 bp, Artificial Sequence
  ENSG00000227500_6 (sequence is synthesized)
gcccgagtaccccactgtgcccagctacccgggcagtggccagtggccttagagggagcctgccctgcccccaccgcccaccacctcctccccttcattcctgctgctacccctggtccc

SEQ ID NO: 767440 - DNA, 120 bp, Artificial Sequence
  ENSG00000227500_7 (sequence is synthesized)
gagggctgggagtacctggggccccatccccccagctgggatggtggaagccggtggtggccacggaccgcccccctcctgccagggccacagaacccgtgttcatctcatccgagagcg

SEQ ID NO: 767441 - DNA, 120 bp, Artificial Sequence
  ENSG00000227500_8 (sequence is synthesized)
gagttcctcacaagcactccccagcagcccttggcctctgccgtccacaggacgccctcttgctcccggaaacgtgtggtcacccgccgtccactgcacggctggtacggccttgtcttc

SEQ ID NO: 767442 - DNA, 120 bp, Artificial Sequence
  ENSG00000227500_9 (sequence is synthesized)
aggtctcgaggcctgactccgggggacaggtggcagcaggtcggccgccctcccgtcctcccagagctgctggcgctgaggtcagagcgggtctgatggggagctccgtctcaccggcca

SEQ ID NO: 767443 - DNA, 120 bp, Artificial Sequence
  ENSG00000227500_10 (sequence is synthesized)
gtcctcgctgtccccgccatcccctgatctgtgcggctccagcctcgccccctccccacgtgcaccatacctggggagttcctggtccagggtatcctggggccaccctccctgcctcca

SEQ ID NO: 767444 - DNA, 120 bp, Artificial Sequence
  ENSG00000227500_11 (sequence is synthesized)
aaacagggatccctggcaggctgtctttccacgcccctgagttcagagtcggggacccaggccaggtcgggagcacagccgctccccaaacccagcaaaccggcagagagccggtttccc

SEQ ID NO: 767445 - DNA, 120 bp, Artificial Sequence
  ENSG00000227500_12 (sequence is synthesized)
cagcaaaccggcagagagccggtttcccagcagccggagccctgcaggagaggcctttgtgttttgttttgttttgttttttctcttttgagacaagagtttcactctgtcgcccaggct

SEQ ID NO: 767446 - DNA, 77 bp, Artificial Sequence
  ENSG00000227500_13 (sequence is synthesized)
tgtcagccaccgcgcccagcctggagtggccttttatgagaggggacccgtcaaatctgtgccttatggaggggtcc

SEQ ID NO: 767447 - DNA, 120 bp, Artificial Sequence
  ENSG00000227500_14 (sequence is synthesized)
gagaggggacccgtcaaatctgtgccttatggaggggtccggcagcggccacaattgtcttgtcccctcaccccccaactccccctggaacacctctcccaggcaagacattttcacagc

SEQ ID NO: 767448 - DNA, 120 bp, Artificial Sequence
  ENSG00000227500_15 (sequence is synthesized)
accattcacaacggttgggccaaaaagaaacttttccttcatcatttcctgcactcgctgaccacaactttggacaccccaggctgccacccctccccacccgttcacccccaggatgct

SEQ ID NO: 767449 - DNA, 120 bp, Artificial Sequence
  ENSG00000227500_16 (sequence is synthesized)
gttgctgtaggacgcctgctgccctggagccctccccaggatgtgagccagtcccctcgctggtacggaatgccgctgggtgcccggaggcggccatggtgtctcgatggacggcagcca

SEQ ID NO: 767450 - DNA, 120 bp, Artificial Sequence
  ENSG00000227500_17 (sequence is synthesized)
ggatggagcacccatgggtctcacggccatgcttcagggtcttcaggtcctgcccccggccagtctgccaagaggcacccccttccccagcctctcgcctgcactgatgcagacaaaatc

SEQ ID NO: 767451 - DNA, 120 bp, Artificial Sequence
  ENSG00000227500_18 (sequence is synthesized)
tcacctggcaggcccaacccccccccacccctcccccgccgtgtgtggcccctcgccgcatcgttggggttttgttatgtgaaaatatcctggaaataaatacatgtttctgcacttaga

SEQ ID NO: 767452 - DNA, 120 bp, Artificial Sequence
  ENSG00000227500_19 (sequence is synthesized)
actgcatctccggttctgtgctttgttgaacgcgtgagcttcgggcagcgctggggccgcttcagcgtgacctccaaggccactggcctggagttccactggctgctggtcccccatctg

SEQ ID NO: 767453 - DNA, 120 bp, Artificial Sequence
  ENSG00000227500_20 (sequence is synthesized)
tggggcgccccggcggctgaggcgtggaccaggcagtgcatgtcgaggagtagcacccacagctgcgcggctgcgaaatgatccagagacacatccctgtctgcgggaggagccgtccat

SEQ ID NO: 767454 - DNA, 120 bp, Artificial Sequence
  ENSG00000227500_21 (sequence is synthesized)
accagcggggatgtgtagtccaggctggcagttcaggatcacccggctggagtcattttaagatcatctgcggcttagccccagcaccatctgaggcagtactgtctgctagaaataact

SEQ ID NO: 767455 - DNA, 120 bp, Artificial Sequence
  ENSG00000227500_22 (sequence is synthesized)
agacttggcgaagcgctgcgctcgcgcccggatccctcaggtaagcgcgcggccccgaggtctcgggttctccaggctcagacttccccagagggggagtaggggctgacatggggggtc

SEQ ID NO: 767456 - DNA, 120 bp, Artificial Sequence
  ENSG00000227500_23 (sequence is synthesized)
gagtaggggctgacatggggggtctcggcggtgaggggcgccggccgtttgtggggagaaaacggggggcccaggccagcctcgcgcgcgtctcgggcgggccggtgggcgacgcgggga

SEQ ID NO: 767457 - DNA, 120 bp, Artificial Sequence
  ENSG00000227500_24 (sequence is synthesized)
gcgcgcgcggcgctggcctgggggaagcctcaggaccgcgctcccccgggcctagcgcctttctgcgcgtgtgcgcccttatggtcggtgcgggagaccccgtatcctccagctgcttcc

SEQ ID NO: 767458 - DNA, 120 bp, Artificial Sequence
  ENSG00000227500_25 (sequence is synthesized)
ggtggcccttcctcaggtcatgtcccgcagtcccctgcctctgaaccgcgctctcgcgagtttccgtagccttcgcgtccttcctccccagctctgattcgcctttatgtggagattccc

SEQ ID NO: 767459 - DNA, 120 bp, Artificial Sequence
  ENSG00000227500_26 (sequence is synthesized)
ctaggccttggtacatccccagaattgaccatcgttcctcatcgttacctagagtatgagtttttcaggtttttgtatcacaggcccccagttatctcccacacactaccccgaggaccg

SEQ ID NO: 767460 - DNA, 120 bp, Artificial Sequence
  ENSG00000227500_27 (sequence is synthesized)
aggttccccgctgtcttgcagagaaggcctccttgtagggtggccagaaacagaggatcgactccgtggaaacaaggacggctgggtgcagttcctcaccctataaccccagcactttgg

SEQ ID NO: 767461 - DNA, 86 bp, Artificial Sequence
  ENSG00000227500_28 (sequence is synthesized)
gaggtccggagttcgagaccagcctgtctaacatggtgaaactccatctctgcgcgcctgtaaaaccagctactggggaggccaag

SEQ ID NO: 767462 - DNA, 120 bp, Artificial Sequence
  ENSG00000227500_29 (sequence is synthesized)
accattgtactccaggctgagcaagctagcaagactcactctccaaaaaaaagaaaaaaagatttttttttaataagccaggcatggtgacacatgtctgtggtcccagctacttgggag

SEQ ID NO: 767463 - DNA, 77 bp, Artificial Sequence
  ENSG00000227500_30 (sequence is synthesized)
gctgaggcaggaggattgcttgagccccggaggttgaggctgcagtgaactgtgatggcacaataaataaataaaat

SEQ ID NO: 767464 - DNA, 90 bp, Artificial Sequence
  ENSG00000227500_31 (sequence is synthesized)
accctgtctctactaaaaataaaaaaaagccaggcatggtggtggacgcctgtggtcccggctactcccaatcaggaggcagagcttgca

SEQ ID NO: 767465 - DNA, 68 bp, Artificial Sequence
  ENSG00000227500_32 (sequence is synthesized)
actccgtctcaaaaaaaaaaaaaaattgtgtgtgtgtgtgtgtgtgtgtaaagaaacaagctaggcag

SEQ ID NO: 767466 - DNA, 90 bp, Artificial Sequence
  ENSG00000227500_33 (sequence is synthesized)
cgcctgtaatcccagcactttggggggcctaggcaggtatatcacatatggtgaaatcccacctctactaaaaatataaaaaattagcca

SEQ ID NO: 767467 - DNA, 120 bp, Artificial Sequence
  ENSG00000227500_34 (sequence is synthesized)
gttaagacaaaaatctcaaaatgactgttttctgcctcctgggtctcaaaggcaggtgcaatgcccagaggctggtcctgcacagagggacccagggcgtgctggccttcccagtgtccc

SEQ ID NO: 767468 - DNA, 120 bp, Artificial Sequence
  ENSG00000227500_35 (sequence is synthesized)
actggtggctgatctaagcagtgctttccctcgtttttttattttgagacagaatcttgctctgtcccccaggctggagagcaacggcacgatctcggctcactgcagcctcccgcttca

SEQ ID NO: 767469 - DNA, 74 bp, Artificial Sequence
  ENSG00000227500_36 (sequence is synthesized)
gcaacggcacgatctcggctcactgcagcctcccgcttcagcctcccagatagctgggattacaggcatgcgcc

SEQ ID NO: 767470 - DNA, 120 bp, Artificial Sequence
  ENSG00000227500_37 (sequence is synthesized)
cgcctcggcctcccaaagtgctgggacgacaggcgtaagcctctgcgcccggcctcctcattgtttctaatggtccctcagtgcccaccgggtgatggtggcagattttccatccgcatt

SEQ ID NO: 767471 - DNA, 120 bp, Artificial Sequence
  ENSG00000227500_38 (sequence is synthesized)
tccgcattgctcccggacatgcggatgtaggtttcagcagttcccatcattagacacagttgccgtaggctgggttcttagtagcaggctcagtggggcctttgagtctttccatggctg

SEQ ID NO: 767472 - DNA, 120 bp, Artificial Sequence
  ENSG00000227500_39 (sequence is synthesized)
gtgcccgccggactcactgagggaaactaatggggaagcactggtctccattccctgcacgcacagcccactgctgcgatggtgaagggataaggttgtgttcacgcgtcgaagtttgtg

SEQ ID NO: 767473 - DNA, 120 bp, Artificial Sequence
  ENSG00000227500_40 (sequence is synthesized)
tccactgcacacgcggctcactgctgcgatggtggagggataaggtcgtattcacgcgttgaagttggtgcctctcagtatcgctttatgtttgttggccacttggtcgtccttgtatga

SEQ ID NO: 767474 - DNA, 120 bp, Artificial Sequence
  ENSG00000227500_41 (sequence is synthesized)
gctgtccactccttgttgattggccagagctctttacatggggaggaccatgggccggaccatgggccctcatccagcaggtgtgcaggcacccacgcactctcttgtcccttgcagcgg

SEQ ID NO: 767475 - DNA, 120 bp, Artificial Sequence
  ENSG00000227500_42 (sequence is synthesized)
cggttgctaagacttggcgaagcgctgcgctcgcgcccggatccctcaggcggctgcaggcttcagcctgcgctggttggtgaaacagagatgtcaggcgcccagggacacttcctcagg

SEQ ID NO: 767476 - DNA, 120 bp, Artificial Sequence
  ENSG00000227500_43 (sequence is synthesized)
cagtgctggctgagcagaagctcctggggggctcccagtgccacgctgagtgccccaaaggctgtgttcccatcttgatccctggaacctaaaaggagaacaacttcccgccactgccca

SEQ ID NO: 767477 - DNA, 120 bp, Artificial Sequence
  ENSG00000227500_44 (sequence is synthesized)
cccagctactcaggaggccaaagcaggagaatcactgcttgaggccaggagttcagactggcctgggcaacatagggagaaaccatctctccagaaaaaaaaaaagaggaaggaatgacc

SEQ ID NO: 767478 - DNA, 120 bp, Artificial Sequence
  ENSG00000227500_45 (sequence is synthesized)
ggacgcggcggggggtaccgcgtgtgcgtgcatatcacgccccgtgcatgtgtgtgcataagctccccggacacatccgggggtgtgggtcctgcgggctgcctgtgcaccagggagggg

SEQ ID NO: 767479 - DNA, 120 bp, Artificial Sequence
  ENSG00000227500_46 (sequence is synthesized)
agtcagcaggagagagactgtacgtcgtgcctgcctttaagttccctgaattttaaaccctgtggtttcatcacctgttaagacaaaaatctcaaaatgactgttttctgcctcctgggt

SEQ ID NO: 767480 - DNA, 120 bp, Artificial Sequence
  ENSG00000227500_47 (sequence is synthesized)
gcttccaggtgttccgcggggtgctggaggagcagtgccgctggctggaccccgacacgtaggcgccgccctcctgcctccggacccttcccgctcccggccgtggggcgcccctcctgg

SEQ ID NO: 767481 - DNA, 120 bp, Artificial Sequence
  ENSG00000227500_48 (sequence is synthesized)
acttccgggcctcgatttcttccgcacaagcctgaccgtggatttcagggacacataccgcctccagcggggagcacgggtgctgccttccgtgcggatcgagctttcctggactcggtc

SEQ ID NO: 767482 - DNA, 120 bp, Artificial Sequence
  ENSG00000227500_49 (sequence is synthesized)
ggtccgggattgtacgcgctctcctagggaggggtctgagctcaccctggcagcgcccgcgtcctcgccagcgcccgcgtcctcgccagcacccagccatggttcgcgattgtaggcact

SEQ ID NO: 767483 - DNA, 120 bp, Artificial Sequence
  ENSG00000227507_0 (sequence is synthesized)
cagtctcaatgggggcactggggctggagggcaggggtgggaggctccaggggaggggttccctcctgctagctgtggcaggagccacttctctggtgaccttgttgctggcggtgccta

SEQ ID NO: 767484 - DNA, 120 bp, Artificial Sequence
  ENSG00000227507_1 (sequence is synthesized)
tcactgtcctggctgtgctggccttagtgccccaggatcagggaggactggtaacggagacggccgaccccggggcacaggcccagcaaggactggggtttcagaagctgccagaggagg

SEQ ID NO: 767485 - DNA, 120 bp, Artificial Sequence
  ENSG00000227507_2 (sequence is synthesized)
agccagaaacagatctcagccccgggctcccagctgcccacctcataggcgctccgctgaaggggcaggggctaggctgggagacgacgaaggaacaggcgtttctgacgagcgggacgc

SEQ ID NO: 767486 - DNA, 120 bp, Artificial Sequence
  ENSG00000227507_3 (sequence is synthesized)
attacctctactgtctcgtcggctaccggggccgggcgccccctggcggcggggacccccagggccgctcggtcacgctgcgcagctctctgtaccgggcggggggcgcctacgggccgg

SEQ ID NO: 767487 - DNA, 120 bp, Artificial Sequence
  ENSG00000227507_4 (sequence is synthesized)
tgctgctcgagggcgccgagacggtgactccagtgctggacccggccaggagacaagggtacgggcctctctggtacacgagcgtggggttcggcggcctggtgcagctccggaggggcg

SEQ ID NO: 767488 - DNA, 120 bp, Artificial Sequence
  ENSG00000227507_5 (sequence is synthesized)
agagggtgtacgtcaacatcagtcaccccgatatggtggacttcgcgagagggaagaccttctttggggccgtgatggtggggtgagggaatatgagtgcgtggtgcgagtgcgtgaata

SEQ ID NO: 767489 - DNA, 120 bp, Artificial Sequence
  ENSG00000227507_6 (sequence is synthesized)
ttgggggcccggacgcccaggaccccatggcagtgggaaaaatgtaggagactgtttggaaattgattttgaacctgatgaaaataaagaatggaaagcttcagtgctgccgataaagat

SEQ ID NO: 767490 - DNA, 120 bp, Artificial Sequence
  ENSG00000227507_7 (sequence is synthesized)
ggccttagtgccccaggatcagggaggactggtgagtggctgcaacaggccctggtggagagttgtatcttgcggatgcttggctccctctggttgtgcctgtggtcttttgccccctct

SEQ ID NO: 767491 - DNA, 120 bp, Artificial Sequence
  ENSG00000227507_8 (sequence is synthesized)
ggctcagctggctcggctgtccctggtggggatgtcttgtctctttgctgactctctttccatgttcctgtgatgttgtgcttgtgtcccgacataagccccttgtgtctcctctcctct

SEQ ID NO: 767492 - DNA, 120 bp, Artificial Sequence
  ENSG00000227507_9 (sequence is synthesized)
tcccgaggtacatctgtttctccgcccaagtacctatgccttgcttgttctcccttctaaggaggtgtgtgttggggatggtgctggtaggagaaaccccaggcctgcagcttgggtcca

SEQ ID NO: 767493 - DNA, 120 bp, Artificial Sequence
  ENSG00000227507_10 (sequence is synthesized)
ctttcagaggggtaggggtgacatgagctgaatctgaactctgggcactgtgaccccacccaaccaggtaacggagacggccgaccccggggcacaggcccagcaaggactgggtaagag

SEQ ID NO: 767494 - DNA, 120 bp, Artificial Sequence
  ENSG00000227507_11 (sequence is synthesized)
ctcttcctctaggaatccaggctccccatccctgcgccctgttctctcaagggtagcctgcatgggtggctgccctgcccccaatcgtggactctttgccccttccagggtttcagaagc

SEQ ID NO: 767495 - DNA, 120 bp, Artificial Sequence
  ENSG00000227729_0 (sequence is synthesized)
agtcttcactctagctcggagcgcatctatggtgctttagacgaccattcttcgtttcactaccaaagacatgtcggaatgcatttaggaccagcatctatagctgctggcatttttttc

SEQ ID NO: 767496 - DNA, 120 bp, Artificial Sequence
  ENSG00000227729_1 (sequence is synthesized)
aaatagactgagctacattgaaaaggcagaccattatataacttgtgaagattaaatagtcagttatttttgtcatttcttctagcttacttacaaggtgaattaatgagcattctctcc

SEQ ID NO: 767497 - DNA, 120 bp, Artificial Sequence
  ENSG00000227729_2 (sequence is synthesized)
aaatgaagacatcacagcctcattcctaacacagaaagttatttatttcaaatacagtttcggtgggtaaataaggtggcgcattccttctacagaggacacacctaggagagcaagata

SEQ ID NO: 767498 - DNA, 120 bp, Artificial Sequence
  ENSG00000227729_3 (sequence is synthesized)
cgtcccagtgaaacacagcttcgtcaccaacttcagtcaactctttggcaacatcacatcagcccatcaacttaacaggctaaaaatgccactttttggctggatgaaatggcccaaaaa

SEQ ID NO: 767499 - DNA, 120 bp, Artificial Sequence
  ENSG00000227729_4 (sequence is synthesized)
cgattcctacaaacccacacactatcctggctcagacatagtgacaaagactctgcttcgggaattaaaatggcacctaaaggagcgagagagattaatacaagaaatcgaaaatgaaca

SEQ ID NO: 767500 - DNA, 120 bp, Artificial Sequence
  ENSG00000227729_5 (sequence is synthesized)
ctcacaagttcaaccttgccaaactggaactattctcagcagatttcgagaagttttggcagaaaatgatgtactgccatgggaaatagtctacatcttcaagcaagttctgaaagactt

SEQ ID NO: 767501 - DNA, 120 bp, Artificial Sequence
  ENSG00000227729_6 (sequence is synthesized)
cctaagcagctctgacagagggagtgagcaagaggacctggaggactcagggagcatggactgctctgctccttctgtgatccaaggtgacagctccaagagggcagacaaagatgaaat

SEQ ID NO: 767502 - DNA, 120 bp, Artificial Sequence
  ENSG00000227729_7 (sequence is synthesized)
acccaccatttccagttacgtagacaaaaacacaaaggacaggttcccagtgttctcacacagaatatggaacctaccatattatcacccatctagttaagttacttacaactagagggg

SEQ ID NO: 767503 - DNA, 120 bp, Artificial Sequence
  ENSG00000227729_8 (sequence is synthesized)
tttttatgaacaccttagaactcctaatattaagaataagaaaaagtgatgtgacttcaagtttttctttgttacaaggtcagtatcctgtggatgtagcctatgttttaaatagtgttc

SEQ ID NO: 767504 - DNA, 120 bp, Artificial Sequence
  ENSG00000227729_9 (sequence is synthesized)
tttttttaaccactctaaacatgctatgttttcattgaatagtatgcttttaactaaaatgtttcctaagtattttgaaaaaatgtttgcagtattttcttatacctcaaacccacctca

SEQ ID NO: 767505 - DNA, 120 bp, Artificial Sequence
  ENSG00000227729_10 (sequence is synthesized)
caggaactaaagcaactttagtatgaagtctgacaaattctgtacaaaacttagatattaaccttgacttttattctacaatgaagctacatatagaattaaataaattattaatacgaa

SEQ ID NO: 767506 - DNA, 120 bp, Artificial Sequence
  ENSG00000227868_0 (sequence is synthesized)
acatttgcccctccttccagaccctggcagccaccattctactctttgcctctatgaatttgactattgtagatagctcatgagtctccatgggatacttgcctccgcaggcaccatagg

SEQ ID NO: 767507 - DNA, 120 bp, Artificial Sequence
  ENSG00000227868_1 (sequence is synthesized)
agcagtggcagcttggctgatgagctataagccagccttgtttgggttcctattccttctgctgttgcttagcaactggttggtcaagtatgaacacaagctcaccctcccagagcccca

SEQ ID NO: 767508 - DNA, 120 bp, Artificial Sequence
  ENSG00000227868_2 (sequence is synthesized)
gtgaaatgaagatgaaggtcctagaaaatcagatgttcatcatatggaataaaatgaatcaccacgggcggtcaagcagacatcggaattttcccatgaaaaaacacagaatgaggaggc

SEQ ID NO: 767509 - DNA, 120 bp, Artificial Sequence
  ENSG00000227868_3 (sequence is synthesized)
atgagtcaatttgccccaccctgtctgactgtacttcgagttcccccagctaatgaggccgaggcgggctggcctctgccgatgttaccttttacctcagtaaaacccagtcacagccta

SEQ ID NO: 767510 - DNA, 120 bp, Artificial Sequence
  ENSG00000227877_0 (sequence is synthesized)
agaccagtgagcctcctgatccaccaagaccatatggtgtttttcataaaagagagagatcattcccttgactttggacttcgcttattgaacccctggacagaatcaaggttgctaaga

SEQ ID NO: 767511 - DNA, 120 bp, Artificial Sequence
  ENSG00000227877_1 (sequence is synthesized)
gaccacctgtgctgaatacactttgttctggcaagagcagaaaactgagaagccgtgttacctaccactacctgggattaattcagggagcgggataattctggatatgactggtaaaaa

SEQ ID NO: 767512 - DNA, 120 bp, Artificial Sequence
  ENSG00000227877_2 (sequence is synthesized)
ctggatattaatttctactactactcccaaaagtctagaagatgaaattgtgggaagacttctaaaaattttgtttgttatctttgttgacttaatttctattatatatgttgtgataac

SEQ ID NO: 767513 - DNA, 120 bp, Artificial Sequence
  ENSG00000227877_3 (sequence is synthesized)
cttcctttccatgtacatttcaaactgaattacagtgaataaaaatttgtattttaacttgttgagtgactcacattttatgacattgccaatttattctagaagccaacaggacactgc

SEQ ID NO: 767514 - DNA, 120 bp, Artificial Sequence
  ENSG00000227877_4 (sequence is synthesized)
aatacaaacaacattgtgtattgtttagttctttatggtttatgaaacattcacatatactgaagtgaatttttttccccaaaaacatctatcctactgagtcatgaaacttctagattt

SEQ ID NO: 767515 - DNA, 66 bp, Artificial Sequence
  ENSG00000227877_5 (sequence is synthesized)
taggcggatcccttgagtgcaggagttcgatacgggcctgagcaacctgaagaaatcccatctcta

SEQ ID NO: 767516 - DNA, 69 bp, Artificial Sequence
  ENSG00000227877_6 (sequence is synthesized)
tcattcccttgactttggacttcgcttattgaacccctggacaataccgcaacctccgcctcctgggtt

SEQ ID NO: 767517 - DNA, 120 bp, Artificial Sequence
  ENSG00000227877_7 (sequence is synthesized)
gcctcctgatccaccaagaccatatggtgtttttcataaaagagagagatcattcccttgactttggacttcgcttattgaacccctggacagctggagtgcagtggcaccatctcggct

SEQ ID NO: 767518 - DNA, 62 bp, Artificial Sequence
  ENSG00000227877_8 (sequence is synthesized)
cgggcagagacgctcctcacttcctagacaggatgacggccgggaagacaatactcctacct

SEQ ID NO: 767519 - DNA, 120 bp, Artificial Sequence
  ENSG00000227877_9 (sequence is synthesized)
aatccctcatgggtactgagggatgactgtacttaaaaaataggcacacaatctcatgagttatggtcacttacatacgaaggcttttctggttgtaattgttgttttgtcatgaagata

SEQ ID NO: 767520 - DNA, 84 bp, Artificial Sequence
  ENSG00000227877_10 (sequence is synthesized)
gggaattacttctttaaaaagtgtggtgaatgtttgccccaccaggaaaatcctagaatttagcttaatctttctgtccaatgt

SEQ ID NO: 767521 - DNA, 120 bp, Artificial Sequence
  ENSG00000227877_11 (sequence is synthesized)
ggaaaatcctagaatttagcttaatctttctgtccaatgttcagttttaagctctacaattctgggataaacagaaattaaagtgtcatattttcaaaagttcactcttagacatctcct

SEQ ID NO: 767522 - DNA, 120 bp, Artificial Sequence
  ENSG00000227877_12 (sequence is synthesized)
tccaatctagttttgaaaacaattttagaagtttttctgtgtaggctccctgcccctccacttcctacactacctcactgtccagtaaaactttttgctatgatttgacacaggaatcaa

SEQ ID NO: 767523 - DNA, 120 bp, Artificial Sequence
  ENSG00000227877_13 (sequence is synthesized)
aaaaatactttttaaagtattagaacctcaattctaccaccaacagggtggcttaaaacaacagaaatttattgtgtcatttatggagaccagaagaccaagattaaggtatcggcagga

SEQ ID NO: 767524 - DNA, 120 bp, Artificial Sequence
  ENSG00000227877_14 (sequence is synthesized)
ccatggcccctctgaaggctctgggggagggtctttctttgcctcttccttgcttctctggtggttgcccacagtccttggtattccttggcttgtggacacgtcactccaatatctatt

SEQ ID NO: 767525 - DNA, 120 bp, Artificial Sequence
  ENSG00000227877_15 (sequence is synthesized)
tcctttgtcacatgatgtctccctatgtgcctgactatgtccccatttcccacttctcacaaggactcaggtcattggattagggcccaccctaatccagcatgatctcattttgattat

SEQ ID NO: 767526 - DNA, 120 bp, Artificial Sequence
  ENSG00000227877_16 (sequence is synthesized)
ttgggcttgaaaatgtctctaggggatgcagttcaacccacaacagctaataagtggtgggcctggtgttctgaacactcatcagtcagctgcagagtggagtgtccatgccccagggac

SEQ ID NO: 767527 - DNA, 120 bp, Artificial Sequence
  ENSG00000227877_17 (sequence is synthesized)
actccattttctaatttgtttgtaaaaatgatacaaaatactaaaacataatacagttggccctccagatccatgggttccatatccatggattcaaccaaccacagattgaaaatattt

SEQ ID NO: 767528 - DNA, 120 bp, Artificial Sequence
  ENSG00000227877_18 (sequence is synthesized)
tgaaaaaactatgtatctctattgcatatgtacagactttttttcttgtcattgttttgtatacaatacagcataacagctatttacatagcacttatattgtattaggtattataagta

SEQ ID NO: 767529 - DNA, 120 bp, Artificial Sequence
  ENSG00000227877_19 (sequence is synthesized)
acgtatggagatgatttacagcatatgggaggatatgtgtagtttatatgtaaatactatgccatttatatcagggacttgagcatttatggattttggtatccatggttactgtatctg

SEQ ID NO: 767530 - DNA, 120 bp, Artificial Sequence
  ENSG00000227877_20 (sequence is synthesized)
tcttatttcagtctctctcttactctatttggagagagttgaaggtacccctgggagccacagactgaagaaacacaagctggagtttgaggtttctggagagaaggaaaatcactttgc

SEQ ID NO: 767531 - DNA, 120 bp, Artificial Sequence
  ENSG00000227877_21 (sequence is synthesized)
aaacccgtgtattatttttgctccttgttgctgaaacacaggcaaaaggaattgttgcatgcagggaaaattctaggtgtttcttttgctaatgattattgtataatttggggcaagtaa

SEQ ID NO: 767532 - DNA, 120 bp, Artificial Sequence
  ENSG00000227877_22 (sequence is synthesized)
ttcccttctctaggaatggagcaatttattacagaaattatcaagatagctcaaaatgggagtagacaacactggcagagtactcatttctttccccttctctttttcttattctctctt

SEQ ID NO: 767533 - DNA, 120 bp, Artificial Sequence
  ENSG00000228049_0 (sequence is synthesized)
atgaacgcccctccagccttcgagtcgttcttgctcttcgagggcgagaagatcaccattaacaaggacaccaaggtacccaaggcctgcttattcaccatcaacaaagaagaccacaca

SEQ ID NO: 767534 - DNA, 120 bp, Artificial Sequence
  ENSG00000228049_1 (sequence is synthesized)
tgcagaccacgccggactacagcccccaggaagcctttaccaacgccatcaccgacctcatcagtgagctgtccctgctggaggagcgcttccggacgtgcctgcttccccttcgccttc

SEQ ID NO: 767535 - DNA, 120 bp, Artificial Sequence
  ENSG00000228049_2 (sequence is synthesized)
aggggcagacggggtgggctggacactggcccgtgtgcccaggcctgggacagccctggcctgtttcttcggaggtcctcagggagaggcggcggtgatggaagaacagggacttccacc

SEQ ID NO: 767536 - DNA, 120 bp, Artificial Sequence
  ENSG00000228049_3 (sequence is synthesized)
acaggctccaggacatgtggactgaggggctgtggagtctgggcctgtggctcccgtctgccccatgggacttctgtagtgctgcagggtccctcgggtgctgtgggccagatccgggcg

SEQ ID NO: 767537 - DNA, 120 bp, Artificial Sequence
  ENSG00000228049_4 (sequence is synthesized)
gggacctactgtcctttgggggtgctcttctacgtcccttgtcggtgattggcaaggcctggtccttccaggcctctgggaggcagctcaccccagggtggcccacacctgttcctagca

SEQ ID NO: 767538 - DNA, 120 bp, Artificial Sequence
  ENSG00000228049_5 (sequence is synthesized)
aggcagctcaccccagggtggcccacacctgttcctagcagggcgcctgggaatctagaacagtttagaggggaaagagccacagcaaagaaaagccgaggcagggtgatcacgaggtca

SEQ ID NO: 767539 - DNA, 120 bp, Artificial Sequence
  ENSG00000228049_6 (sequence is synthesized)
gtaacagagcaggactccatctcagtcaatcaatcaatcaatcaatctcagcggttgaactacccttgacatggttcagctctgtatccacacccaaatctcatgtcaaattgtaattcc

SEQ ID NO: 767540 - DNA, 120 bp, Artificial Sequence
  ENSG00000228049_7 (sequence is synthesized)
cagtgttgtgggagggacctggtgggaggtgattggctcatgggggccgacttcccccttgctgttctcgtgatattgagtgagcgcttgtgggatctggttgtttaaaagcgtgcagcc

SEQ ID NO: 767541 - DNA, 83 bp, Artificial Sequence
  ENSG00000228049_8 (sequence is synthesized)
tgagcgcttgtgggatctggttgtttaaaagcgtgcagccctcccacttcactctctctgtctctcctgctccaacatggcca

SEQ ID NO: 767542 - DNA, 62 bp, Artificial Sequence
  ENSG00000228049_9 (sequence is synthesized)
aattacccagtttctcagccattctgcttgtttgactatgtcctttctattcatctctattt

SEQ ID NO: 767543 - DNA, 120 bp, Artificial Sequence
  ENSG00000228049_10 (sequence is synthesized)
ccattctgcttgtttgactatgtcctttctattcatctctatttcctgggaggtgtttatccaagtgcaataggaggtattggtgaccgcacagtcccctcagtgttctgctagtaaata

SEQ ID NO: 767544 - DNA, 88 bp, Artificial Sequence
  ENSG00000228049_11 (sequence is synthesized)
tgctagtaaatagttgaaggttgatcattgatcttctgcgttttcagtctggcatggaaaagcccctgtgcaactggtaaagatatca

SEQ ID NO: 767545 - DNA, 120 bp, Artificial Sequence
  ENSG00000228049_12 (sequence is synthesized)
ttgacgtccatttaccagtcttccctggcaagattcttctgaattgtgctgccttggccaaaagaggtatgggaggggctgggcgcagtggcttgtgcctgtaatcccaacattttggga

SEQ ID NO: 767546 - DNA, 87 bp, Artificial Sequence
  ENSG00000228049_13 (sequence is synthesized)
tggatcgacatggtgacatcccatctctactaaaaatacaataagttagctgggtttggtgttgggtgcctgtaatcccagctactc

SEQ ID NO: 767547 - DNA, 73 bp, Artificial Sequence
  ENSG00000228049_14 (sequence is synthesized)
atacaataagttagctgggtttggtgcgcttgaacctgggaggaggaggtggcagtgagctgagatcgtgcca

SEQ ID NO: 767548 - DNA, 120 bp, Artificial Sequence
  ENSG00000228075_0 (sequence is synthesized)
aggcggttgctgccgcgtcttccacaacctccgcggtctggagctggcctcccccaccgccgccccaaccaccggccccgccgccatcaccaccaccgtcacctccgccgctgcctcctt

SEQ ID NO: 767549 - DNA, 120 bp, Artificial Sequence
  ENSG00000228075_1 (sequence is synthesized)
ggggccctcctccttcaccgcccccttagccacctctacacattctaggctttctgtcctggagaagaagctataatcggtttccttgtgggcccggtgcgcagccatggcggacggtgg

SEQ ID NO: 767550 - DNA, 120 bp, Artificial Sequence
  ENSG00000228075_2 (sequence is synthesized)
ggcggcagcggcggtgcgggcccggcctcgacccgggccagcgggggcggcggccccatcaacccggcctcgttgccccctggcgaccctcagctcatcgctatcatcgtggggcagctc

SEQ ID NO: 767551 - DNA, 120 bp, Artificial Sequence
  ENSG00000228075_3 (sequence is synthesized)
gctcaagagcaggggcctttttgacagcttccgccgggactgcaaggctgacgtggacaccaagccagcttaccaaaacctgagccagaaagcggataattttgtgtcgacacatctgga

SEQ ID NO: 767552 - DNA, 120 bp, Artificial Sequence
  ENSG00000228075_4 (sequence is synthesized)
caagcaggaatggaatcctccagcaaacgacaaccaactgcacgatggtctgaggcagagtgtggttcagtcagggaggtcagaagctggagtggacaggattagttctcaggtggtgga

SEQ ID NO: 767553 - DNA, 120 bp, Artificial Sequence
  ENSG00000228075_5 (sequence is synthesized)
tccaaaactaaaccacatcttcaggccacaaatagaacaaataattcatgaattcctggtggcccagaaagaagcagctgtgccagcactccctccagagccagaaggccaggaccctcc

SEQ ID NO: 767554 - DNA, 120 bp, Artificial Sequence
  ENSG00000228075_6 (sequence is synthesized)
agctccgtctcaggacacttcctaagaatatgcctgacagcttttgaaagcgctatttaatttttggtgaagaaatggattcggttacataagagtgcagtttcagattgaagataagcc

SEQ ID NO: 767555 - DNA, 120 bp, Artificial Sequence
  ENSG00000228075_7 (sequence is synthesized)
aagttcatcactgagctcaagatttccacctcgaccatgagcagtgaccagattgaaagggaagcaagttcgccagagagaaagttgaccgtggcaccctcctgcattgcgctgccattt

SEQ ID NO: 767556 - DNA, 120 bp, Artificial Sequence
  ENSG00000228075_8 (sequence is synthesized)
ggccagcctttccaagggcatgacaccaaacacacactacagagagggaaacactaccgcgacccaggattgtcctgaaacagacatctatacttgaacatggagactgcacatggattt

SEQ ID NO: 767557 - DNA, 120 bp, Artificial Sequence
  ENSG00000228075_9 (sequence is synthesized)
tagggtttgtgctctgagataaacgaaagctacagcgagagaacataaccaatcccaaagacaatttcaaagaacaatgacagtaaaggttaactgggaggaatatttgacagtacttat

SEQ ID NO: 767558 - DNA, 120 bp, Artificial Sequence
  ENSG00000228075_10 (sequence is synthesized)
ttgatattgtctctcagagttgcaaactagattgtacacaacattagtgtcagatagctttgaagttgtgaccttcttgtacatgaatcttctagccagtttcctttcctttgtaagaga

SEQ ID NO: 767559 - DNA, 120 bp, Artificial Sequence
  ENSG00000228075_11 (sequence is synthesized)
taacaaagcatgaaaccctagaatgagtgagaagttcagacattaggtataaggaaactcatttgcagactctctgtccaagaatgcttcctgtcttgcaggggctagtgagtcttgggt

SEQ ID NO: 767560 - DNA, 120 bp, Artificial Sequence
  ENSG00000228075_12 (sequence is synthesized)
gtgtttatgttatgctcacatttgtgttttatttgaaaagtggatggtcaataaatggcttatctttcaactgcaacaacaaaaaagaaatgcagatttacatccttttcctctttaagc

SEQ ID NO: 767561 - DNA, 120 bp, Artificial Sequence
  ENSG00000228075_13 (sequence is synthesized)
tgctgccccgtacactgtcatttctcatatgacaaccatgcccatgactatcctggacaccctgtgttccctctgctcactgtgaagggaatgccctcaaccactcctaccctcctttaa

SEQ ID NO: 767562 - DNA, 120 bp, Artificial Sequence
  ENSG00000228075_14 (sequence is synthesized)
gactcagctcctgaggagccacacatcgtctaagcaggagtgacagactccttcctctgtgctcccatagatctcataagggatgaccacacttactatagtagctaggtctgacgaagc

SEQ ID NO: 767563 - DNA, 120 bp, Artificial Sequence
  ENSG00000228075_15 (sequence is synthesized)
acttgctctattgctctacagctggcagtgtactaaacgcttaacttcgcttaccgtagtaagtcctcatgatctaattgaagaaatcgtatctttattcccatttttattcccatttat

SEQ ID NO: 767564 - DNA, 120 bp, Artificial Sequence
  ENSG00000228075_16 (sequence is synthesized)
aaatgtagaaaccaaagctcagacactgcctaagtggtggggctggggctgagcctgtattgagcacagagccctcacttttaacccttttaaccatgcttttagccacaccacctcacc

SEQ ID NO: 767565 - DNA, 120 bp, Artificial Sequence
  ENSG00000228075_17 (sequence is synthesized)
acagtgaactgtctttgcttacagatctgtcatccccacttaaatgtgagcttcctccagggcagggatttgctttgttcatttcttttccttaaccccaggacctagcacatcacagga

SEQ ID NO: 767566 - DNA, 120 bp, Artificial Sequence
  ENSG00000228075_18 (sequence is synthesized)
gctcagcaatttgtagaaagaaaccagttctggatttgtcttttccaacatttaatttctcagatggcagtatttatcatctaaaaagtgaacaaaaattaattttgcatctagtgtcta

SEQ ID NO: 767567 - DNA, 120 bp, Artificial Sequence
  ENSG00000228075_19 (sequence is synthesized)
catgtctaagcaagaaagagctttcttatccctggaggtattttatctgtaatgtttacctatgagctattttaaatgattcttcaaaatttagagtccagaaggtagaagaccatgtcc

SEQ ID NO: 767568 - DNA, 120 bp, Artificial Sequence
  ENSG00000228075_20 (sequence is synthesized)
tttctgaaaatgtcccttcctttcccaggtaccaggctctttttaaaattagcttctgaatatgaacaacccagctctttaaagtttaatgtcccagccattttaattgtttctttcgaa

SEQ ID NO: 767569 - DNA, 120 bp, Artificial Sequence
  ENSG00000228075_21 (sequence is synthesized)
gtacaaaagagcagctgggccacatcggcactaatcacttgccaactttcctttttacaaaaacagctaagctctttctgagatttaaaatcactccatctgagaccccagcttggcacc

SEQ ID NO: 767570 - DNA, 120 bp, Artificial Sequence
  ENSG00000228075_22 (sequence is synthesized)
tatctttgcactaacataaaaggaacctaatttctgcttttaagaaatgtgttgcggaagtgatttttggtttggggtttgttctccttcttctttttaaaaataacgtaataaagtgta

SEQ ID NO: 767571 - DNA, 120 bp, Artificial Sequence
  ENSG00000228075_23 (sequence is synthesized)
atacaacttttaaagttttttttttcctttaccagttctctattctccttttctacttgaattgtcctgagacaggttgccagataaaatacaggttgctcagcaaatgtgaatttcaga

SEQ ID NO: 767572 - DNA, 120 bp, Artificial Sequence
  ENSG00000228075_24 (sequence is synthesized)
gaaacaacagatactctcctagggcatggaccgtgcaatatttgaaacatacttgtattaaaaagttatttgttgtttatttgaaattcaaatttactggggccccatgctttagtttgc

SEQ ID NO: 767573 - DNA, 120 bp, Artificial Sequence
  ENSG00000228075_25 (sequence is synthesized)
caaatctgccaaccatagcctgaatgcttcccgttcccaccatgagtttggcaaatggaaaatgctaacctatgcgatggacactgctgtattctgaaaatgaatatgtaaataaatcaa

SEQ ID NO: 767574 - DNA, 120 bp, Artificial Sequence
  ENSG00000228075_26 (sequence is synthesized)
actaccgtgacttgagagagctcattacgtgcgtgcgtgcatgcctgcccactggtccctgctaaataattcccttcttgcaatccagaaggataaataaatgtaatttctggaattcta

SEQ ID NO: 767575 - DNA, 120 bp, Artificial Sequence
  ENSG00000228083_0 (sequence is synthesized)
agaaaacctacaacccaaggttcagtgttacccctcatcaaccagcccagcagcatcttcgggattcccaatggcattgccctttgctttaatgatggccctggtggtgctcagctgcaa

SEQ ID NO: 767576 - DNA, 120 bp, Artificial Sequence
  ENSG00000228083_1 (sequence is synthesized)
gtcaagctgctctctgggctgtaatctgtctcaaacccacagcctgaataacaggaggactttgatgctcatggcacaaatgaggagaatctctcctttctcctgcctgaaggacagaca

SEQ ID NO: 767577 - DNA, 120 bp, Artificial Sequence
  ENSG00000228083_2 (sequence is synthesized)
tgactttgaatttccccaggaggaatttgatggcaaccagttccagaaagctcaagccatctctgtcctccatgagatgatgcagcagaccttcaatctcttcagcacaaagaactcatc

SEQ ID NO: 767578 - DNA, 120 bp, Artificial Sequence
  ENSG00000228083_3 (sequence is synthesized)
tgctgcttgggatgagaccctcctagaaaaattctacattgaacttttccagcaaatgaatgacctggaagcctgtgtgatacaggaggttggggtggaagagactcccctgatgaatga

SEQ ID NO: 767579 - DNA, 120 bp, Artificial Sequence
  ENSG00000228083_4 (sequence is synthesized)
ggttgtcagagcagaaatcatgagatccctctctttttcaacaaacttgcaaaaaagattaaggaggaaggattgaaaactggttcatcatggaaatgattctcattgactaatacatca

SEQ ID NO: 767580 - DNA, 120 bp, Artificial Sequence
  ENSG00000228083_5 (sequence is synthesized)
tggttcatcatggaaatgattctcattgactaatacatcatctcacactttcatgagttcttccatttcaaagactcacttctcctataaccaccacaagttgaatcaaaattttcaaat

SEQ ID NO: 767581 - DNA, 120 bp, Artificial Sequence
  ENSG00000228083_6 (sequence is synthesized)
gttttcaggagtgtaaagaagcatcatgtatacctgtgcaggcactagtcctttacagatgaccatgctgatgtctcctttcatctatttatttaaatatttatttatttaactattttt

SEQ ID NO: 767582 - DNA, 120 bp, Artificial Sequence
  ENSG00000228198_0 (sequence is synthesized)
cgctggttttgtggtactaggtaaaaagcatacacatcatggcaagggagaattcgaccttcaactccgacttcatcctcctgggaatcttcaatcacagccccacccacaccttcctct

SEQ ID NO: 767583 - DNA, 120 bp, Artificial Sequence
  ENSG00000228198_1 (sequence is synthesized)
tctttctggtcctggccatcttttcagtggccttcatgggaaactctgtcatggttctcctcatctacctggacacccagctccacacccccatgtacctcctcctcagccaactgtccc

SEQ ID NO: 767584 - DNA, 120 bp, Artificial Sequence
  ENSG00000228198_2 (sequence is synthesized)
tcatggacctcatgctcatctgcaccaccgtacccaagatggccttcaactacctgtctggcagcaagtccatttctatggctggttgtgccacacaaattttcttctatacatcactgc

SEQ ID NO: 767585 - DNA, 120 bp, Artificial Sequence
  ENSG00000228198_3 (sequence is synthesized)
ttggctctgagtgctttcttttggctgttatggcttatgaccgctacactgccatttgccaccctctaagatacaccaatctcatgagccctaaaatttgtggacttatgactgcctttt

SEQ ID NO: 767586 - DNA, 120 bp, Artificial Sequence
  ENSG00000228198_4 (sequence is synthesized)
ccctccctactaatcctctcatgcagtgacacatcaatatttgaaaagattcttttcatctgctgtatagtaatgattgttttccctgttgcaatcatcattgcttcctatgctcgagtt

SEQ ID NO: 767587 - DNA, 120 bp, Artificial Sequence
  ENSG00000228198_5 (sequence is synthesized)
atcctggctgtcattcacatgggatctggagagggtcgtcgcaaagcttttactacttgttcctctcacctcttggtggtgggaatgtactatggagcagctttgttcatgtacatacgg

SEQ ID NO: 767588 - DNA, 120 bp, Artificial Sequence
  ENSG00000228198_6 (sequence is synthesized)
cccacatctgatcgctccccaacacaggacaagatggtgtctgtattctacaccatcctcactcccatgttgaatcccctcatctacagcctccgcaacaaggaggtgaccagagcattc

SEQ ID NO: 767589 - DNA, 120 bp, Artificial Sequence
  ENSG00000228198_7 (sequence is synthesized)
atgaagatcttaggaaagggcaagtctggagagtgagttacctaataaacttcatgttttgctgtgtgctaaatcctttttttaaatggtcctatttttccattaagccttgaaaatggg

SEQ ID NO: 767590 - DNA, 120 bp, Artificial Sequence
  ENSG00000228198_8 (sequence is synthesized)
tcattgtgtacataaatctgcaatgacatatttatgtgcacctatataatttatttcagataaactattataactatttattattttatattcatttctgctatgaccacaatgtaagtc

SEQ ID NO: 767591 - DNA, 120 bp, Artificial Sequence
  ENSG00000228198_9 (sequence is synthesized)
tgtaagtcatttccaataagaatattaaagttttaaaaattatttttaatttccataggtttttggagaacaggtagtgtttggttttatgaataagttctttagtgatgatttctgaga

SEQ ID NO: 767592 - DNA, 120 bp, Artificial Sequence
  ENSG00000228198_10 (sequence is synthesized)
cacccatcacccaagcagtattcactgtacccaatgtgtagtcttttatcacttgtcattccccgtatttccctcatgtccccaaagtccagtgtatcattcttatgactttttgtctca

SEQ ID NO: 767593 - DNA, 87 bp, Artificial Sequence
  ENSG00000228198_11 (sequence is synthesized)
cccaaagtccagtgtatcattcttatgactttttgtctcatagtttagtttcaacatatgaatgtgaacgtatgatgtttggttttt

SEQ ID NO: 767594 - DNA, 120 bp, Artificial Sequence
  ENSG00000228198_12 (sequence is synthesized)
catcccagttgctgtgaatgccattattttgtattttttatgactgagtagtattccatggtatgtgtgtatatagatatatatatatatacgtatatatatacacacacacatatatat

SEQ ID NO: 767595 - DNA, 120 bp, Artificial Sequence
  ENSG00000228198_13 (sequence is synthesized)
atgggcatttggactggttccatatttttgcaattgcaaattgtgctgctttatacatgcatgtgcaggtatcttttttgtataataacttcttttcctctgtgtagttagtagtggtat

SEQ ID NO: 767596 - DNA, 120 bp, Artificial Sequence
  ENSG00000228198_14 (sequence is synthesized)
tgctagatcaaaaggtagatccacttttagttctttaaggaatgttcacactgttttttacagtggttgaactagtttgcattcccaccagcagtgtaaaagttcccttttgaccgcatc

SEQ ID NO: 767597 - DNA, 87 bp, Artificial Sequence
  ENSG00000228198_15 (sequence is synthesized)
attcccaccagcagtgtaaaagttcccttttgaccgcatccacaccagcatctattattgtttgattgattatggccattcttgcag

SEQ ID NO: 767598 - DNA, 120 bp, Artificial Sequence
  ENSG00000228198_16 (sequence is synthesized)
atgcttgttggctatttatatatatttatatatctccttttgagaattgtctattcatgtcctaggcccactttttgatgggatcatttgttttcttcttgctgatttgtttgagttctt

SEQ ID NO: 767599 - DNA, 120 bp, Artificial Sequence
  ENSG00000228198_17 (sequence is synthesized)
tgtagattctggaaattaatcccttctcagatgtataaattgtgaagattttctcccactctatgggttgtctatttactctgctgaccgttccttttgcagtgcaaaaggtctttagtt

SEQ ID NO: 767600 - DNA, 120 bp, Artificial Sequence
  ENSG00000228198_18 (sequence is synthesized)
taattagttcccagctatttatctttgtttttattgcattagtttttgggttcttgctcatgaaacccttgcctaagccaatgtctacaaggatttctctgatgttatcttctggaatct

SEQ ID NO: 767601 - DNA, 120 bp, Artificial Sequence
  ENSG00000228198_19 (sequence is synthesized)
atcttgagttgatttttgtataaggtgagcgatgaggatccagtttcattcttctacatgtggcctgtcagttagcccagcaccatttgttgaatatggtgttctttcccccacttcatg

SEQ ID NO: 767602 - DNA, 120 bp, Artificial Sequence
  ENSG00000228198_20 (sequence is synthesized)
atttgttgaatatggtgttctttcccccacttcatgtttttgtttgtgttgttgaagatcagatggctgtaagtattttggtttatttctgggttctctattctgttttgtctgtctatg

SEQ ID NO: 767603 - DNA, 120 bp, Artificial Sequence
  ENSG00000228198_21 (sequence is synthesized)
tttggtgactatggctttatagtataatttgaagttgggtatgtggtgcctccagatttgttctttttgcttattcttgctatggctatgcaggacttttttattccatatgaattttag

SEQ ID NO: 767604 - DNA, 120 bp, Artificial Sequence
  ENSG00000228198_22 (sequence is synthesized)
ggacttttttattccatatgaattttaggattgttctttctagttctgttaagaaggatggtgatattttagtgggaattgcattgaatttgtaaattgcttttggcagcatggtcattt

SEQ ID NO: 767605 - DNA, 120 bp, Artificial Sequence
  ENSG00000228198_23 (sequence is synthesized)
ttacaatattgtttctacccatccatgagtatgggatgtatttccatttatttgtgttgtcaatgatttttttcagcagtgttttgtatttttccttgtagaagtctttcacatccttgg

SEQ ID NO: 767606 - DNA, 120 bp, Artificial Sequence
  ENSG00000228198_24 (sequence is synthesized)
ttaggtatactccttaatattttgtgttgttgttgttatattatttgcttctgtcatgaaagggttgagttcttgatttgattctcagctggttgccattagtatatagcagagctactg

SEQ ID NO: 767607 - DNA, 120 bp, Artificial Sequence
  ENSG00000228198_25 (sequence is synthesized)
atttgtgtacattaattgtgtgtcctgaaactgttgaatttatttaccagttctaggagctttttagatgagccgttagggttttctatgtattccatcgtatcatcagcaaacagcgac

SEQ ID NO: 767608 - DNA, 68 bp, Artificial Sequence
  ENSG00000228198_26 (sequence is synthesized)
taccatcagtattatcttgaacagacatggtgaaagtggacatccttgtcttgttccagttctcaggg

SEQ ID NO: 767609 - DNA, 120 bp, Artificial Sequence
  ENSG00000228198_27 (sequence is synthesized)
gttccagttctcagggggaatgctttccaattttcccctttcagtataatgtttgctgtggatttctcatagaaggctttgattaccttaacgtcacctctatgtcccttcgtgttgatt

SEQ ID NO: 767610 - DNA, 120 bp, Artificial Sequence
  ENSG00000228198_28 (sequence is synthesized)
gattaccttaacgtcacctctatgtcccttcgtgttgattttgcttagaattttaattgtaaagggatgtgggatttcatcaaatgctttttctctgtctattgagatgatcatgtgatt

SEQ ID NO: 767611 - DNA, 120 bp, Artificial Sequence
  ENSG00000228198_29 (sequence is synthesized)
gacttatgtatcttaaaccatccctacatccctggtatgaaactcacttaattatgggtggattagcttttcgatatgctgtgggattcagttctctagtattatgttgaggatttttgc

SEQ ID NO: 767612 - DNA, 120 bp, Artificial Sequence
  ENSG00000228198_30 (sequence is synthesized)
atgttcatcagggatattggtctgtagtctgtagttttctttttttgttatgtctttcactggttttggtattagggtgacagtggctccacagaatgatttacaaaggattccctcttt

SEQ ID NO: 767613 - DNA, 76 bp, Artificial Sequence
  ENSG00000228198_31 (sequence is synthesized)
gtgacagtggctccacagaatgatttacaaaggattccctctttatcctttggaatagtgtcaataggattggtat

SEQ ID NO: 767614 - DNA, 120 bp, Artificial Sequence
  ENSG00000228198_32 (sequence is synthesized)
tttcagtcatgctgcttgttactggtctgatcagagattctatatcttccttttttaatccaggagggttgtatagttccaggaatttggttatctcttccaggttttttagtttatctg

SEQ ID NO: 767615 - DNA, 120 bp, Artificial Sequence
  ENSG00000228198_33 (sequence is synthesized)
cacaaaggtgttcatagtagccttgattaatcatttgtatttctatggaatcaattgtaatatctcccttttcatttctaattgtgtttatttgcatcttctctattcttttttggttaa

SEQ ID NO: 767616 - DNA, 76 bp, Artificial Sequence
  ENSG00000228198_34 (sequence is synthesized)
attgtgtttatttgcatcttctctattcttttttggttaatcttgctaatggtctatcaactttattcgtcttttt

SEQ ID NO: 767617 - DNA, 120 bp, Artificial Sequence
  ENSG00000228198_35 (sequence is synthesized)
ttgggtttggattgttcttgtttctcctgttctgtgaggtgcgacctaagattatctctttgtgctgtctcagactttttgatgtaggcatctaatggaatgaactttcctcttagcact

SEQ ID NO: 767618 - DNA, 120 bp, Artificial Sequence
  ENSG00000228198_36 (sequence is synthesized)
ttagcactgcttttgctgtatcccagaagttttgctaggttttgtcactattatcatccagttcaaagaatttttaaatttccctcttgattgcaatgttgtcccaataatcatccagga

SEQ ID NO: 767619 - DNA, 120 bp, Artificial Sequence
  ENSG00000228198_37 (sequence is synthesized)
atccaggagcaggttatttaatttccatgtatttgcaaggttttgagggttccttttggagttgattttcaattttattctactgtggtctgagacagtacttgatataattttgatttt

SEQ ID NO: 767620 - DNA, 120 bp, Artificial Sequence
  ENSG00000228198_38 (sequence is synthesized)
cttaaattcactgagacttgttttttggcctatcatatggtctatcttggagaatgttctgtgtactgatgaatagaatatatactctgcagttgcttagtagaatgttctgtaaatatc

SEQ ID NO: 767621 - DNA, 120 bp, Artificial Sequence
  ENSG00000228198_39 (sequence is synthesized)
tgttaatcccatttcttgtagcatatagtttaagtgcattgtttctttttttactttctgtcttaaagacctgtctagtgctctcagtggagtattgaagtcccccactattattgcatt

SEQ ID NO: 767622 - DNA, 120 bp, Artificial Sequence
  ENSG00000228198_40 (sequence is synthesized)
atattttggattgtaatattttcctgttagactagcccttttatcattacaaaatgtccctctttgtctttttttaactgctcttgctttaaagtttgtttttttctaatataagaatat

SEQ ID NO: 767623 - DNA, 120 bp, Artificial Sequence
  ENSG00000228198_41 (sequence is synthesized)
ctattcctgcttgcttttggtgtcaatttgcatggaatatgttctttcacccctttaacttaagtttatgtgagtccttatgtgtttggtgagtttcctgaagatgcacaaacttggttg

SEQ ID NO: 767624 - DNA, 120 bp, Artificial Sequence
  ENSG00000228198_42 (sequence is synthesized)
attcttatccattctgccattctgtattttttaagtggaacatttaggccactaacatcaatgtcggaattgagatgtgaggtactattctatacatcgtgctatttgttacctgaatat

SEQ ID NO: 767625 - DNA, 120 bp, Artificial Sequence
  ENSG00000228198_43 (sequence is synthesized)
atatctgaagtttttttgtttgttttcattatgttattgttatataggtcctgtaatatttatgctttaaggaggctctatttggtgtattccaagaatttgtttcaaggtttagagctc

SEQ ID NO: 767626 - DNA, 120 bp, Artificial Sequence
  ENSG00000228198_44 (sequence is synthesized)
ctttcagcagttcttgttgtgcaggcttgatagtgttgaattctctcagcatttgtttgtctgaaaaagatggtgcctttccttcatttctgaagcatagcttcgctggatacaaaattc

SEQ ID NO: 767627 - DNA, 120 bp, Artificial Sequence
  ENSG00000228198_45 (sequence is synthesized)
ttagctaataattattttatttaaggaggctgatgatagggcgccaatcccttctagcttgtagggcttctgctaataaatctgctaataaatctgctatcaatgtgataggtttttctt

SEQ ID NO: 767628 - DNA, 120 bp, Artificial Sequence
  ENSG00000228198_46 (sequence is synthesized)
tacaggttacctgatgcttttctctcacggctgacattttttcctttgccttgactttagataacttgttatgtacctagggaatgatctttttgtcatgaatttcccaggtgttctttg

SEQ ID NO: 767629 - DNA, 120 bp, Artificial Sequence
  ENSG00000228198_47 (sequence is synthesized)
agcttcttgagtttggatgtttagatccagcaaggctggtagtaattttcctctattattccttcaaatatattttccagacttttagatttctcttcttcctcaagaacaccaattatt

SEQ ID NO: 767630 - DNA, 120 bp, Artificial Sequence
  ENSG00000228198_48 (sequence is synthesized)
cttaggtccggacatttgacatagtatcaaacttcttggaggctttgtttttaggttttttttcttgtcttgaatgaactgggttaatttgaaagccttgtcttcaagctccgaggttct

SEQ ID NO: 767631 - DNA, 120 bp, Artificial Sequence
  ENSG00000228198_49 (sequence is synthesized)
ttcttctgctcgttggattttattggtgagaatttccagtgcatttcacatttctctaagtgtgtccttgatttttagaagttgtgagtgtttttatttatgctgtttatttcactgaag

SEQ ID NO: 767632 - DNA, 120 bp, Artificial Sequence
  ENSG00000228198_50 (sequence is synthesized)
aatttttcttttattttctgtatcatgatttttatttctttacattagacttcacttttctttggtgcctctttgattagcttaataattggcaatactttttctggcaattcagagatt

SEQ ID NO: 767633 - DNA, 120 bp, Artificial Sequence
  ENSG00000228198_51 (sequence is synthesized)
tcctcttcgtttggatccattggtggtgaactggtgtgatcttttgggggtattacagaaccttgttttatcatattacagaatttttttttctggttccttcttatttgggtagactat

SEQ ID NO: 767634 - DNA, 120 bp, Artificial Sequence
  ENSG00000228198_52 (sequence is synthesized)
gtcagagggaagacctgggattcaagttctgctgttcagtgtcttttgtcccactgagtgctccctcgatgtggtgttctcattcccctaggaatgaggcttcctgagagccaaactgta

SEQ ID NO: 767635 - DNA, 120 bp, Artificial Sequence
  ENSG00000228198_53 (sequence is synthesized)
gtggctgtctagccacacagtggagctaccaggttccatactggtacttgggagtgtctgcaaagatcctgtaatatgatctgtcttcaggtcttgcagccatggataccagttcctgct

SEQ ID NO: 767636 - DNA, 120 bp, Artificial Sequence
  ENSG00000228198_54 (sequence is synthesized)
ccagtcgatgtagcaggggagtgaaaggaactctgctagggtctttggttgtgtttttgtttattgtgctgcttgttttgttggccttcagccaggaggtagtgctttccagagtgcatc

SEQ ID NO: 767637 - DNA, 120 bp, Artificial Sequence
  ENSG00000228198_55 (sequence is synthesized)
agcggcccttagggaggatgcaaacttgccctagggacacctggtcaagtattcaggtttctcaggtgatgggtgaggccatagaggtaacaagagattatgacgtttgtcttcagctac

SEQ ID NO: 767638 - DNA, 120 bp, Artificial Sequence
  ENSG00000228198_56 (sequence is synthesized)
caaggtggatagagaaagaccaccaggtcagggtagggatggctgtgtctgagttcagcctcttcttgggtggggcttgctgctgctgctgctgtggcagatgggggtgtggtttccagt

SEQ ID NO: 767639 - DNA, 120 bp, Artificial Sequence
  ENSG00000228198_57 (sequence is synthesized)
ccattggagttatattcctagggagattatggctgcctctgctgcaacacataggtcaccagaaaagtgggagaaagccggcagtcaccagcttcactcagcatccacacagcccacagt

SEQ ID NO: 767640 - DNA, 120 bp, Artificial Sequence
  ENSG00000228198_58 (sequence is synthesized)
cctaaaggccagtcgtgctcccaccgtgcccacacaacagcaccaagtctatttccaggcagctggtgaccagggctgagaatttgccccagaccatgagcctctctgttgagaaagcaa

SEQ ID NO: 767641 - DNA, 120 bp, Artificial Sequence
  ENSG00000228198_59 (sequence is synthesized)
acagactcacaggttttcattgtctcagggagcctgcagtggtgatccagttccttcaaaggatctgtggattctctcagctttcctggtatgttactgcagtagttcttggcacaaaat

SEQ ID NO: 767642 - DNA, 120 bp, Artificial Sequence
  ENSG00000228198_60 (sequence is synthesized)
ctgcagtagttcttggcacaaaatttcacaatgtgagtttccatacggtattctgtgtcaggcctctgagcccaagttaagccatcatatcccttgtgacctgcacgtatacatccagat

SEQ ID NO: 767643 - DNA, 82 bp, Artificial Sequence
  ENSG00000228198_61 (sequence is synthesized)
aggttctttgtaatctccccaactgtgtactttgtgagatccaccacctgcccccaaaacattgctcctaactccactgcct

SEQ ID NO: 767644 - DNA, 120 bp, Artificial Sequence
  ENSG00000228198_62 (sequence is synthesized)
gtttggtggtctcttcacatggacacttgagacactctgtccatctgagtgggagctgcaagctagtcctgcctcctatccaccatcttaatcctagtcaggacattaaagttttctgtt

SEQ ID NO: 767645 - DNA, 120 bp, Artificial Sequence
  ENSG00000228198_63 (sequence is synthesized)
aagttttctgtttattcagtatcataaatgttgaagtatgcaccaaggtagcaaacaaatcttcttttcccagggtataaactcaaaattttattgagactcttgaaactcactttggag

SEQ ID NO: 767646 - DNA, 120 bp, Artificial Sequence
  ENSG00000228198_64 (sequence is synthesized)
taaaagttaatacactggacttttacatttttagtctgtattttatagtcatttttattttggggggactcttggagatgctgctgtgacttcaacccaggtgacatcttaacatttgat

SEQ ID NO: 767647 - DNA, 120 bp, Artificial Sequence
  ENSG00000228198_65 (sequence is synthesized)
ctctaattacttccatcacaaaaagttaacttttattatgggatcccagatccaaatttctttcaagttgttaaaattcatctaagcttcacacactgatccaacagagaaattgtttca

SEQ ID NO: 767648 - DNA, 120 bp, Artificial Sequence
  ENSG00000228198_66 (sequence is synthesized)
ttatttaaattctcagtggatagataatttacatgtgcccctaaactgcacaatgatacttaaacattttattaataattacaggacttatattgaaatttagaatataagtaaatgttt

SEQ ID NO: 767649 - DNA, 120 bp, Artificial Sequence
  ENSG00000228198_67 (sequence is synthesized)
atataagtaaatgtttctgaattttcaaatgtaagtatatttttacataatagtaatttttttttttttttaattacagagtctcgctctggggcccaggctggagtgcggtggtgcgat

SEQ ID NO: 767650 - DNA, 120 bp, Artificial Sequence
  ENSG00000228198_68 (sequence is synthesized)
agcctcccaagtagctgagactacaggggcctgctaatctctcagggcccatgcgaaatctatctcaatcaaaagtgcattattcttagaagcagatattacaaaatttaatttcctaat

SEQ ID NO: 767651 - DNA, 120 bp, Artificial Sequence
  ENSG00000228198_69 (sequence is synthesized)
ccatgcgaaatctatctcaatcaaaagtgcattattcttagaagcagatattacaaaatttaatttcctaatttggccaagtggcatgggctgagctaatttttgtatttttcagtagag

SEQ ID NO: 767652 - DNA, 120 bp, Artificial Sequence
  ENSG00000228198_70 (sequence is synthesized)
tattgctgtcacattccctataaggaaaatcatttaatcttagttgcacaggctttatttatattattgattcacaagagaatcaaatttttctaaaattggtcaattgttttagcattt

SEQ ID NO: 767653 - DNA, 120 bp, Artificial Sequence
  ENSG00000228198_71 (sequence is synthesized)
ctgctctttgaataggattagagtttatggaacaatgtaaaatcctataatatatttccagtctttgaagtccttttaaagaaaatcatgtccagcatatagattaagtggtcaaataga

SEQ ID NO: 767654 - DNA, 120 bp, Artificial Sequence
  ENSG00000228198_72 (sequence is synthesized)
tatttccacagtggctcaaagtaatacataaagagaataacatttagactttattacatgactacagtacatgtgccttaccttgaaataaatagtgaaactgtacatgaaacaagaagt

SEQ ID NO: 767655 - DNA, 120 bp, Artificial Sequence
  ENSG00000228198_73 (sequence is synthesized)
caagaagtatactaatagccatcaaatattttaaatattaattcataatgctatacattaatgactctagaatatgcatcacaaccatttatatattaggtagaaagaaagaaagaaaat

SEQ ID NO: 767656 - DNA, 120 bp, Artificial Sequence
  ENSG00000228198_74 (sequence is synthesized)
atccttatctttttaacaattaagcaaaatgcataattaattatagttatcttaaatcacttggccaaataaggaaaataaattttgtaaaacctgcttctaaatataatgtacttttta

SEQ ID NO: 767657 - DNA, 120 bp, Artificial Sequence
  ENSG00000228198_75 (sequence is synthesized)
ttaagatagattcatttatatccacagatctatggttatactgaagtatagataatttaattcaggccaaaaactgatttttaaaaactcatatggtttctaaattatccaaattatttt

SEQ ID NO: 767658 - DNA, 120 bp, Artificial Sequence
  ENSG00000228198_76 (sequence is synthesized)
ctaacttagtttttttttctttttcttggtctggtattaaagaagcattttccaaaagttattgttttataattttaaacataatttttttctaagttaattgaaattactgataaggaa

SEQ ID NO: 767659 - DNA, 120 bp, Artificial Sequence
  ENSG00000228198_77 (sequence is synthesized)
aatgaataaagacactatttaaatttatgctggctatgaaaaacagaaaccaggctcctgtctttgtttccagtctcacctactttcagcagacaggacaatatttattctacagagtgt

SEQ ID NO: 767660 - DNA, 120 bp, Artificial Sequence
  ENSG00000228198_78 (sequence is synthesized)
tgttttacaacatcctatgtgaactcatttctcttttgaactcactgttactaataatttaacatgtttttacatcattttgttttattcatattataaaggattatatatctgttgtgg

SEQ ID NO: 767661 - DNA, 120 bp, Artificial Sequence
  ENSG00000228253_0 (sequence is synthesized)
aacacaaactaccacctacctccctcaccaaagcccataaaaataaaaaattataacaaaccctgagaaccaaaatgaacgaaaatctgttcgcttcattcattgcccccacaatcctag

SEQ ID NO: 767662 - DNA, 120 bp, Artificial Sequence
  ENSG00000228278_0 (sequence is synthesized)
agcactgcctggctccacgtgcctcctggtctcagtatggcgctgtcctgggttcttacagtcctgagcctcctacctctgctggaagcccagatcccattgtgtgccaacctagtaccg

SEQ ID NO: 767663 - DNA, 120 bp, Artificial Sequence
  ENSG00000228278_1 (sequence is synthesized)
gtgcccatcaccaacgccaccctggaccggatcactggcaagtggttttatatcgcatcggcctttcgaaacgaggagtacaataagtcggttcaggagatccaagcaaccttcttttac

SEQ ID NO: 767664 - DNA, 120 bp, Artificial Sequence
  ENSG00000228278_2 (sequence is synthesized)
tttacccccaacaagacagaggacacgatctttctcagagagtaccagacccgccagaaccagtgcttctataactccagttacctgaatgtccagcgggagaatgggaccgtctccaga

SEQ ID NO: 767665 - DNA, 120 bp, Artificial Sequence
  ENSG00000228278_3 (sequence is synthesized)
ggacaccaagaccttgatgtttggttcctacctggacgatgagaagaactgggggctgtctttctatgctgacaagccagagacgaccaaggagcaactgggagagttctacgaagctct

SEQ ID NO: 767666 - DNA, 120 bp, Artificial Sequence
  ENSG00000228278_4 (sequence is synthesized)
cgactgcttgtgcattcccaggtcagatgtcatgtacaccgactggaaaaaggataagtgtgagccactggagaagcagcacgagaaggagaggaaacaggaggagggggaatcctagca

SEQ ID NO: 767667 - DNA, 120 bp, Artificial Sequence
  ENSG00000228278_5 (sequence is synthesized)
ggacacagccttggatcaggacagagacttgggggccatcctgcccctccaacccgacatgtgtacctcagctttttccctcacttgcatcaataaagcttctgtgtttggaacagctaa

SEQ ID NO: 767668 - DNA, 120 bp, Artificial Sequence
  ENSG00000228300_0 (sequence is synthesized)
atggggccgcgcgtgctgcagccgccgctgctgctgctcctgctggcgctgctgctggcggcgctgccgtgcggtgccgaagaggcctcgccgctgcgccccgcgcaggtcacgttgtcg

SEQ ID NO: 767669 - DNA, 120 bp, Artificial Sequence
  ENSG00000228300_1 (sequence is synthesized)
ccgcgcaggtcacgttgtcgccgccgccggccgtgacgaacgggagccagccgggcgcgccacacaacagcacgcacacgcgtccgccgggggcgtcgggctcggcgctgacgcgctcct

SEQ ID NO: 767670 - DNA, 120 bp, Artificial Sequence
  ENSG00000228300_2 (sequence is synthesized)
tctacgtgatcctgggcttctgcggcctgaccgcgctctacttcctgatccgggcgtttaggttgaagaagcctcagcggaggcgatacggcctcctcgccaacactgaggaccccacgg

SEQ ID NO: 767671 - DNA, 120 bp, Artificial Sequence
  ENSG00000228300_3 (sequence is synthesized)
cggtgtttgagtcccggaatctgagatgatgctgagccagggaggcggcccttccagcagccatgagggaaggacaggagatggggcccaccccagtgcccagcaaccccctgctccacc

SEQ ID NO: 767672 - DNA, 120 bp, Artificial Sequence
  ENSG00000228300_4 (sequence is synthesized)
gctcattcccctgctggccccggggctggtctcacccagtgccaacccgagagctccttttggaacctgcacagcccgccgacctgttgccacctgcacccaccgctggaccatgcagcc

SEQ ID NO: 767673 - DNA, 120 bp, Artificial Sequence
  ENSG00000228300_5 (sequence is synthesized)
tcgcctcctggatgctgtcccagcctggccgagggtcccaggtgaagactggagggaccccaacagccaccgcccaggacgctgaggctcccttgcctgactgtgacttgtgcctctctc

SEQ ID NO: 767674 - DNA, 120 bp, Artificial Sequence
  ENSG00000228300_6 (sequence is synthesized)
ctgcccccgtggggacatggcagcccagagccaaggctgggtgggcaggtgacccaaggaacctttctgggaacaccttctcgccgggctgggaacaataaatgcagccatgtctctgca

SEQ ID NO: 767675 - DNA, 120 bp, Artificial Sequence
  ENSG00000228300_7 (sequence is synthesized)
acccgctctccagcctgcgcctggggttggaggtgcccagcgcgccgcctcttaactcgggggtgacgctgcccgtttcccaggttgaagaagcctcagcggaggcgatacggcctcctc

SEQ ID NO: 767676 - DNA, 120 bp, Artificial Sequence
  ENSG00000228300_8 (sequence is synthesized)
ccaggtggggccactgaagccggagcatgccgggcaggggtcaggccctggcggggcgagggggcctccttggctccttgtcgccggatgcccgtcctcgttctcatcttcccgcctgcc

SEQ ID NO: 767677 - DNA, 120 bp, Artificial Sequence
  ENSG00000228300_9 (sequence is synthesized)
gccaggcctttccgtggggtcccgatattttcctttctgcttctacccactgaagctggttcgtcgccagggtcggccacgtgcccgccttgggtgctcccacagcccgggaggtgcagc

SEQ ID NO: 767678 - DNA, 120 bp, Artificial Sequence
  ENSG00000228300_10 (sequence is synthesized)
tgcgtccccagaccctcgcgggggtctccagctgtaggcagcccctgggcaggaggggcttctgcgtgttcaggccaccccggcttccctggcctgtggctccagtctcctctgggctcc

SEQ ID NO: 767679 - DNA, 120 bp, Artificial Sequence
  ENSG00000228300_11 (sequence is synthesized)
gggagagacacagcgaggaccttatccctccccatcaccaccctggcaaagtcaagccgctttttattttttataagtttttattgtagcgatggggtctcgccatgttacccgcgctgg

SEQ ID NO: 767680 - DNA, 120 bp, Artificial Sequence
  ENSG00000228300_12 (sequence is synthesized)
tctgaactcctgggctcaagtgatcctttttcgttggcctcccaaagtgctggcattatagatgttgaagaagcctcagcggaggcgatacggcctcctcgccaacactgaggaccccac

SEQ ID NO: 767681 - DNA, 120 bp, Artificial Sequence
  ENSG00000228300_13 (sequence is synthesized)
catgctgctttttatgggccctgtgcagagcctcccctgtgctccacacctcttcctgtggaagcacctgctgcgcgctctcccctgcctgtatgccgcgccctccctgcctcccgggct

SEQ ID NO: 767682 - DNA, 120 bp, Artificial Sequence
  ENSG00000228300_14 (sequence is synthesized)
cgtgcctctcctggggtcctggcgcaggggagatgggagggcctggtagggcacatgtcttcttactgtcatcgccatgggagtgaatggtaatcacttggcgattaggacatgaaagaa

SEQ ID NO: 767683 - DNA, 120 bp, Artificial Sequence
  ENSG00000228300_15 (sequence is synthesized)
gcaggcacagcaaaaccagggaggtctgcagcagggctcggggctccagtagaggacggcaatgagagtcctgagggaaggaggaggcagggttggcggggaggggccactgactatgcc

SEQ ID NO: 767684 - DNA, 120 bp, Artificial Sequence
  ENSG00000228325_0 (sequence is synthesized)
gaggaactgctcagttaggacccagatggaaccatggaagccccagcacagcttcttcttcctcctgctactctggctcccagataccaccggagaaattgtaatgacacagtctccagc

SEQ ID NO: 767685 - DNA, 120 bp, Artificial Sequence
  ENSG00000228325_1 (sequence is synthesized)
aagagccaccctctcctgcagggccagtcagagtgttagcagcagctacttatcctggtaccagcagaaacctgggcaggctcccaggctcctcatctatggtgcatccaccagggccac

SEQ ID NO: 767686 - DNA, 84 bp, Artificial Sequence
  ENSG00000228325_2 (sequence is synthesized)
ctcccaggctcctcatctatggtgcatccaccagggccactggcatcccagccaggttcagtggcagtgggtctgggacagact

SEQ ID NO: 767687 - DNA, 120 bp, Artificial Sequence
  ENSG00000228474_0 (sequence is synthesized)
acttcgggcttgttcgctggtggcgtcggagccgagccggactggtcaggtcagaggcacgcaggggccgtcccacgggccagccccgccgtggccgtggccgtggctggcccgtggggc

SEQ ID NO: 767688 - DNA, 120 bp, Artificial Sequence
  ENSG00000228474_1 (sequence is synthesized)
gaggacgggttcttgcgagggcgaggagtgcgccagcccgcagctcagcccctctcttctccgcaggatgatcacggacgtgcagctcgccatcttcgccaacatgctgggcgtgtcgct

SEQ ID NO: 767689 - DNA, 120 bp, Artificial Sequence
  ENSG00000228474_2 (sequence is synthesized)
cccagggttccaggacatagtctgaggcaagatggagggtatgaggggccttcacacttcacttcatcccttctacccatcacaacatacaaagcaactacacctggatttttccaaaca

SEQ ID NO: 767690 - DNA, 120 bp, Artificial Sequence
  ENSG00000228474_3 (sequence is synthesized)
acttttatttcctcagagtcttccttaatcctatggaacaagaagctgccactgaatagggcccagtataggggcttgcttttctactccctccccccaatataaaaatatagacttttt

SEQ ID NO: 767691 - DNA, 120 bp, Artificial Sequence
  ENSG00000228486_0 (sequence is synthesized)
atcagaagactggcttctccatgatggtttatggactaaggcaaagatgagcagagccatggccctcttctttgttctctgctggatccaagatgaaattgtgctccaagtgttttccaa

SEQ ID NO: 767692 - DNA, 120 bp, Artificial Sequence
  ENSG00000228486_1 (sequence is synthesized)
ggttccgtatgacccatcatttgatgaaacaagaacagcagtcagatccattacaaagagagacacacaaaaaagctattcccaacagaagagcttgaacaatgctgcatttgcatcagg

SEQ ID NO: 767693 - DNA, 120 bp, Artificial Sequence
  ENSG00000228486_2 (sequence is synthesized)
ttcaaatgagcgagaggaacatttggctaaaatatttgatgaaattctactgcaggtgtttccaaagtttccgtatgacccatcatttaacgaagcaacagcagtcagatccattacaaa

SEQ ID NO: 767694 - DNA, 120 bp, Artificial Sequence
  ENSG00000228486_3 (sequence is synthesized)
gacagacatgagaaaaggaaccagcattgcttggaattctcctaaaccagaatatttccttggcagtgtggacaaaattcctgataaagatcacctttcagaggagaagaattttaaaga

SEQ ID NO: 767695 - DNA, 120 bp, Artificial Sequence
  ENSG00000228486_4 (sequence is synthesized)
ggcagcttctgcacttcctgcagaggaacaccatcatcgccgccgtctcaggggtggccatcctcatggccatcgtgctgttgctgcttgggttggcctcatacatcaggaagaaacagc

SEQ ID NO: 767696 - DNA, 120 bp, Artificial Sequence
  ENSG00000228486_5 (sequence is synthesized)
catcatctcctctggcaaacacgacatataatatttttataatggatggaaagacatggtggcacaattctgaagaaaaaaatttcacaaaacttgcaaaaaaacagaaacagttgaaga

SEQ ID NO: 767697 - DNA, 120 bp, Artificial Sequence
  ENSG00000228486_6 (sequence is synthesized)
gcagctcctgtgtctaagccaggtcgtggggccgtcaaaccaggacttgaaaccacaatgcgaggacattctccatctgcgcaccacagggaggcaattccatttctgcccgggaggtgt

SEQ ID NO: 767698 - DNA, 120 bp, Artificial Sequence
  ENSG00000228486_7 (sequence is synthesized)
attctacaaaaacgtctgcttcccatcccaatttgaatggaccaagaaaaactgctttaccataggacacttgtggcaatatggcaccgatggctggcgtcggtgaacccgacagactat

SEQ ID NO: 767699 - DNA, 120 bp, Artificial Sequence
  ENSG00000228486_8 (sequence is synthesized)
atcagaagactggcttctccatgatggtttatggactaaggcaaagatgagcagagccatggccctcttctttgttctctgctggatccaaggctattcccaacagaagagcttgaacaa

SEQ ID NO: 767700 - DNA, 65 bp, Artificial Sequence
  ENSG00000228486_9 (sequence is synthesized)
gcagagccatggccctcttctttgttctctgctggatccaagagtcgggggtctccctatgtttg

SEQ ID NO: 767701 - DNA, 120 bp, Artificial Sequence
  ENSG00000228486_10 (sequence is synthesized)
gggcggcagaaagtggagctgggctggtgtgcgcgcggccggagtctgtggagctggaaattcaccggtccaggaagacgtctttcccgcgtcccagcaccggtccagaaagacgtcttt

SEQ ID NO: 767702 - DNA, 120 bp, Artificial Sequence
  ENSG00000228486_11 (sequence is synthesized)
cccgcgtcccagcacctcgggccacgctccttcgtgagagcgccctctccaaggaggccggccctggatatttcacccaaaatatttattttttctttttttctagaccgttaggttccg

SEQ ID NO: 767703 - DNA, 87 bp, Artificial Sequence
  ENSG00000228486_12 (sequence is synthesized)
gcgtgtgccaccacgcctggctaatttactaaactaataaattactaaattagtaagttactagtaaattagtaattactaaaatat

SEQ ID NO: 767704 - DNA, 120 bp, Artificial Sequence
  ENSG00000228486_13 (sequence is synthesized)
agattattttcttttttcttttttgagacagagtctcgcccggttgctcaggctgaagtgtagtggtgtgatcttggcttactgcagcttccacctcccaggtgcaagtgattctcctgc

SEQ ID NO: 767705 - DNA, 120 bp, Artificial Sequence
  ENSG00000228486_14 (sequence is synthesized)
acaggtgtgagccaccgtgcccggccctatataactctttgtgcaagtttttacccctaaaagatatctgccatctcagccatggaacagacactgtaagaacatgaaggctcaagggca

SEQ ID NO: 767706 - DNA, 120 bp, Artificial Sequence
  ENSG00000228486_15 (sequence is synthesized)
agtacaaggttctccctctgtcacccagagctggagtgcggtggcataatcacagctaattgcagcctcaacattccaggcccaaggatcctcccttcagccttccagagtcgggggtct

SEQ ID NO: 767707 - DNA, 120 bp, Artificial Sequence
  ENSG00000228486_16 (sequence is synthesized)
tcaaaaaatcctgatgaaggtttggctaaaatctttggtgagttaccccactccctgtggaacctcaggctggatttgaagagttgcgtgcatggtcctcattgtctcccaggtaacctg

SEQ ID NO: 767708 - DNA, 120 bp, Artificial Sequence
  ENSG00000228486_17 (sequence is synthesized)
ttcccgctgctgtgaagggaaggcaggtgctcttccttgaggctagaatctgtctacgtgtcacagtctcaggaaattaagcaaaacagatgataaacacctcaaaaggaccctactgag

SEQ ID NO: 767709 - DNA, 71 bp, Artificial Sequence
  ENSG00000228486_18 (sequence is synthesized)
aggctcaagcttcacgcccagagtcgggggtctccctatgtttcccaggctggcctcgaactcctgacctc

SEQ ID NO: 767710 - DNA, 120 bp, Artificial Sequence
  ENSG00000228486_19 (sequence is synthesized)
gttttcctaatagcatgaacagcccccccgtcagctcctaccccttggtctctgacctgttcctcctccgaggtgacctctatcctgaattttgaaaacatattagtattgcctgtttct

SEQ ID NO: 767711 - DNA, 90 bp, Artificial Sequence
  ENSG00000228486_20 (sequence is synthesized)
gcccaaggatcctcccttcagccttccagacccagctaattttttaaatttctgtagaaatagggatctcactatgttgcccaggctggt

SEQ ID NO: 767712 - DNA, 120 bp, Artificial Sequence
  ENSG00000228486_21 (sequence is synthesized)
attcagtggtttttagtatactcatagagttgtgaagcatcactatctaattttatttaatttttaattttttaattttttgagatggagtgtcgctctctcacccaggctggagtgcag

SEQ ID NO: 767713 - DNA, 88 bp, Artificial Sequence
  ENSG00000228486_22 (sequence is synthesized)
ggctcactcttgtaactccttgagctcaggagtttgtgacaggcctaggcaacatcatgagagcctgtctgtataaaaaattttaaaa

SEQ ID NO: 767714 - DNA, 120 bp, Artificial Sequence
  ENSG00000228486_23 (sequence is synthesized)
tgagctcaggagtttgtgacaggcctaggcaacatcatgagagcctgtctgtataaaaaattttaaaattagccatgcatggtgatgcgtgcgtgtggtcccagctactagggaggctga

SEQ ID NO: 767715 - DNA, 120 bp, Artificial Sequence
  ENSG00000228486_24 (sequence is synthesized)
tcgaggctgcagtaagccgtgatcacaccactgcactcaagcttgggcaacagagtgggatcctgtctcaaaaaaaaaaaattagtaataactttataggatataatatataataaaatt

SEQ ID NO: 767716 - DNA, 66 bp, Artificial Sequence
  ENSG00000228486_25 (sequence is synthesized)
gcagagccatggccctcttctttgttctctgctggatcctggatcctcctgcctcagcttcctgag

SEQ ID NO: 767717 - DNA, 72 bp, Artificial Sequence
  ENSG00000228486_26 (sequence is synthesized)
agagagtacttgtacttggctgtacaacgtgtgtgcttcaccctgaattatgaagagttccctaatcaatga

SEQ ID NO: 767718 - DNA, 120 bp, Artificial Sequence
  ENSG00000228486_27 (sequence is synthesized)
aaggaagatttaccaaacccatccaaagctgccccgcccccacttccagctcttggaggtctcccatctggagctgggggctccagcctgctttgaagtcttccgggatcacctttcaga

SEQ ID NO: 767719 - DNA, 120 bp, Artificial Sequence
  ENSG00000228486_28 (sequence is synthesized)
agagagacacacaaaaaaactatgtgaaaatgagcttagcccctggtgttgtgttggaacttcagatgcttgcagacacttcatgaatgctctgtgacactcagaataggctattcccaa

SEQ ID NO: 767720 - DNA, 120 bp, Artificial Sequence
  ENSG00000228486_29 (sequence is synthesized)
ggaacatttggctaaaatatttgacacttaaggaaacttttatcaggtcattgactaacttcagagataagaaaacagaaaattcagcactttcacacaacaagaagtacgcactttgca

SEQ ID NO: 767721 - DNA, 120 bp, Artificial Sequence
  ENSG00000228486_30 (sequence is synthesized)
aaactagtttggaaaagttacaaaaagatggcttcagccttcaataagcaaaaatcaacaatcactgaaagagaggattagatttccagagttatcaaaatgtaatacacagaatgtcca

SEQ ID NO: 767722 - DNA, 120 bp, Artificial Sequence
  ENSG00000228486_31 (sequence is synthesized)
tctctcaacgtaaaattataaaacatacaaagaaacaggaaaggatggctcattcacaggaaaaaggaatttggcagaacttgttcctgaggaaacctgggaattaaaattattacacaa

SEQ ID NO: 767723 - DNA, 120 bp, Artificial Sequence
  ENSG00000228486_32 (sequence is synthesized)
tatttaccagtcatttggaatttggacattttctgtcctgtggttgtggtgagggtgtgggttttgtgttgttttatatattctttgttattttttattctagtttttgtttttgttttg

SEQ ID NO: 767724 - DNA, 120 bp, Artificial Sequence
  ENSG00000228486_33 (sequence is synthesized)
gaaggtattttagagaaataagatttctgtggttaccatgacctgctgttacagattacatggtaccctctcttcatatgttgaagtcctagccaccccgccgaacctcagaatgtgact

SEQ ID NO: 767725 - DNA, 120 bp, Artificial Sequence
  ENSG00000228486_34 (sequence is synthesized)
gtatttggagatagggtctttacagaggaaatcaagttaaaatgaagtcattagggcaggccctaatccgatatgatcctgtgttcttagaagaggaaatgtggactcaggtgtgtatgg

SEQ ID NO: 767726 - DNA, 120 bp, Artificial Sequence
  ENSG00000228486_35 (sequence is synthesized)
agggaagatgtcttgcaagcccaaggagaagatggccatctgagcccacgtcctggaacagagacttccctcacagcctcagaaagaaccagccctgctgacgtcttgatctcagacctc

SEQ ID NO: 767727 - DNA, 120 bp, Artificial Sequence
  ENSG00000228486_36 (sequence is synthesized)
aagaaatgatcaaacacaaaccatcaaacataaaagacgccttcagattcttcaaagaaccttagatcacctttcagaggagaagaattttaaagaatcctgtctgttcgacagggattt

SEQ ID NO: 767728 - DNA, 63 bp, Artificial Sequence
  ENSG00000228486_37 (sequence is synthesized)
cagaatgtcctttcttttcgaagcggagtaatattccattatcacctttcagaggagaagaat

SEQ ID NO: 767729 - DNA, 120 bp, Artificial Sequence
  ENSG00000228486_38 (sequence is synthesized)
gagccacggcacctggcctgaattttcctcaaattcaaaaaatcctgatgaaggtttggctaaaatctttgatgaaattgtgctccaagtgttttccaaggttccgtatgacccatcatt

SEQ ID NO: 767730 - DNA, 120 bp, Artificial Sequence
  ENSG00000228486_39 (sequence is synthesized)
tagctgggaccacaggtgcacaccaccacgcccagatgaaattgtgctccaagtgttttccaaggttccgtatgacccatcatttgatgaaacaagaacagcagtcagatccattacaaa

SEQ ID NO: 767731 - DNA, 120 bp, Artificial Sequence
  ENSG00000228486_40 (sequence is synthesized)
tgtgagccaccgcacctggccacaagagagtacttgtacttggctgtacaacgtgtgtgcttcaccctgaattatgaagagttccctaatcaatgatcacctttcagaggagaagaattt

SEQ ID NO: 767732 - DNA, 120 bp, Artificial Sequence
  ENSG00000228486_41 (sequence is synthesized)
tgcagatgaagtcattggttacgctttcagcatttgcaaactcaggatggagattttagaccctcttcaacctccaggtttcctctttgcaaaggccagcagcagaagcaaaagagatgg

SEQ ID NO: 767733 - DNA, 120 bp, Artificial Sequence
  ENSG00000228486_42 (sequence is synthesized)
gcagagccatggccctcttctttgttctctgctggatccaagatcacctttcagaggagaagaattttaaagaatcctgtctgttcgacagggatttaagagagcagttaactactatag

SEQ ID NO: 767734 - DNA, 120 bp, Artificial Sequence
  ENSG00000228486_43 (sequence is synthesized)
ggaaatagtgacacgtgagtaacaaaatgggcgtatcaattggtctatgctatttttggtgttataattttacctaatataataagcagcaacactttgttagtgagacgggctttcacc

SEQ ID NO: 767735 - DNA, 61 bp, Artificial Sequence
  ENSG00000228486_44 (sequence is synthesized)
tgtgatgtcttgattgatcataggatttttctggctattctagctacttccaattcgcttc

SEQ ID NO: 767736 - DNA, 120 bp, Artificial Sequence
  ENSG00000228486_45 (sequence is synthesized)
aggatttttctggctattctagctacttccaattcgcttcagccaatttagttgaagttttatcacttgtgacttcagagtcctggttaatatcctgttgccctcaggacatgcaggatg

SEQ ID NO: 767737 - DNA, 120 bp, Artificial Sequence
  ENSG00000228486_46 (sequence is synthesized)
gaggaaggcaccagggagccgagggaagtgagcagagaggcagtcacttcagggccaccagcatagcccccgtcactgtccacagacacaggcccttccccttctcatggttgagcaggc

SEQ ID NO: 767738 - DNA, 120 bp, Artificial Sequence
  ENSG00000228486_47 (sequence is synthesized)
caagggagcagatctctcgacacccgatgggcctctattccgttccggcagctgtccgtgtcaggagcgctgggcttgctcctccccacgggagccatcacagaggcctcgggcagtctg

SEQ ID NO: 767739 - DNA, 120 bp, Artificial Sequence
  ENSG00000228486_48 (sequence is synthesized)
atgcatgagcagatgcagatgaaattgtgctccaagtgttttccaaggttccgtatgacccatcatttgatgaaacaagaacagcagtcagatccattacaaagagagacacacaaaaaa

SEQ ID NO: 767740 - DNA, 79 bp, Artificial Sequence
  ENSG00000228486_49 (sequence is synthesized)
agtactaaactaataaattactaaattaagtcgggggtctccctatgtttcccaggctggcctcgaactcctgacctca

SEQ ID NO: 767741 - DNA, 120 bp, Artificial Sequence
  ENSG00000228486_50 (sequence is synthesized)
gagaggaacatttggctaaaatatttgatagacacttaaggaaacttttatcaggtcattgactaacttcagagataagaaaacagaaaattcagcactttcacacaacaagaagtacgc

SEQ ID NO: 767742 - DNA, 120 bp, Artificial Sequence
  ENSG00000228486_51 (sequence is synthesized)
gcactgagtatcatgagatttggggtcatatatctttagtgggcggtgtttgctgccccaaatgtctcatgccattaaaatgttctggaaatgatttaggtagttggagtttccttccca

SEQ ID NO: 767743 - DNA, 120 bp, Artificial Sequence
  ENSG00000228486_52 (sequence is synthesized)
aagacaaggcatttacagcatgatgtccaatatccattgagtttgtgtcatgcattcattgtattcatagtctgctttaggtacttagcaaaatattgctgatattaacatgcctttgtt

SEQ ID NO: 767744 - DNA, 120 bp, Artificial Sequence
  ENSG00000228517_0 (sequence is synthesized)
accagaatctttcccgccttatctaagtcctctcaggccagacttggtgggaggttcctaggattcgctccctgcccttcccaccttagggtgtcctctgagacagactcttatttcctc

SEQ ID NO: 767745 - DNA, 120 bp, Artificial Sequence
  ENSG00000228567_0 (sequence is synthesized)
tccatgcaggacctcccagccctgaagacaaacatcagtgacagacatcagtggcagaatggcctcccggtatgtggcagtgggaatgatcttatcacagaccgtggtgggagtcctggg

SEQ ID NO: 767746 - DNA, 120 bp, Artificial Sequence
  ENSG00000228567_1 (sequence is synthesized)
gagcttctctgttcttctccattatctctccttttactgcactgggtgcaggttaaggtccacagatttgattgttaagcacctgattgtagccaacttcttagctctccgctgtaaagg

SEQ ID NO: 767747 - DNA, 120 bp, Artificial Sequence
  ENSG00000228567_2 (sequence is synthesized)
agtcccccagacaatggcagcttttggggttagatattttctcaatgctcttgggtgcaaacttgttttctatctccatagagtgggcaggggagtgtccattggcaccacctgcctctt

SEQ ID NO: 767748 - DNA, 120 bp, Artificial Sequence
  ENSG00000228567_3 (sequence is synthesized)
gagtgtcttccaggtgatcacggtcagctccaggaaatccaggtgggcaaaacttaaagagaaagcccccaagcatgttggcttttctgttctcctgtgctggatcgtgtgcatgttggt

SEQ ID NO: 767749 - DNA, 120 bp, Artificial Sequence
  ENSG00000228567_4 (sequence is synthesized)
ggcaacaacaaaatcgcacagacactgcgtgcaatgttgttatcattccctgatgtgttgtgtctggggctcatgctctgggtcagcagctccatggtttgcatactgcacaggcacaag

SEQ ID NO: 767750 - DNA, 120 bp, Artificial Sequence
  ENSG00000228567_5 (sequence is synthesized)
cagcgggtccagcacattgataggagcaatctctcccccagagcctccccagagaacagagctacgcagagcatcctcatcctggtgagcacctttgtgtcttcttacactctctcctgc

SEQ ID NO: 767751 - DNA, 120 bp, Artificial Sequence
  ENSG00000228567_6 (sequence is synthesized)
cttttccaagtttgtatggctcttttggataatcccaatagtttactggtgaacacttcagccttaatgagtgtatgtttcccaactctcagcccctttgttctcatgagctgtgacccc

SEQ ID NO: 767752 - DNA, 120 bp, Artificial Sequence
  ENSG00000228567_7 (sequence is synthesized)
agtgtatacaggttttgttttgcctggaaaagatgacaagatctcctaacctcatcataaacatgtacattgtatatatttgctcatggttcaattgatgacttactcttctgtgccgca

SEQ ID NO: 767753 - DNA, 120 bp, Artificial Sequence; identical to SEQ ID NO: 664654
  ENSG00000228570_0 (sequence is synthesized)

SEQ ID NO: 767754 - DNA, 120 bp, Artificial Sequence; identical to SEQ ID NO: 664655
  ENSG00000228570_1 (sequence is synthesized)

SEQ ID NO: 767755 - DNA, 120 bp, Artificial Sequence; identical to SEQ ID NO: 664656
  ENSG00000228570_2 (sequence is synthesized)

SEQ ID NO: 767756 - DNA, 120 bp, Artificial Sequence; identical to SEQ ID NO: 664657
  ENSG00000228570_3 (sequence is synthesized)

SEQ ID NO: 767757 - DNA, 120 bp, Artificial Sequence; identical to SEQ ID NO: 690602
  ENSG00000228570_4 (sequence is synthesized)

SEQ ID NO: 767758 - DNA, 120 bp, Artificial Sequence; identical to SEQ ID NO: 690603
  ENSG00000228570_5 (sequence is synthesized)

SEQ ID NO: 767759 - DNA, 120 bp, Artificial Sequence; identical to SEQ ID NO: 690604
  ENSG00000228570_6 (sequence is synthesized)

SEQ ID NO: 767760 - DNA, 120 bp, Artificial Sequence; identical to SEQ ID NO: 690605
  ENSG00000228570_7 (sequence is synthesized)

SEQ ID NO: 767761 - DNA, 120 bp, Artificial Sequence
  ENSG00000228570_8 (sequence is synthesized)
gcagcccgagtggggccggggcttccaacgtctttgtccagatgaggacagaggtggggcctgtgaaggccgctcaggcgcagaccttggtcctaactcaggcccccctcgtctggcagg

SEQ ID NO: 767762 - DNA, 120 bp, Artificial Sequence; identical to SEQ ID NO: 664663
  ENSG00000228570_9 (sequence is synthesized)

SEQ ID NO: 767763 - DNA, 120 bp, Artificial Sequence; identical to SEQ ID NO: 690608
  ENSG00000228570_10 (sequence is synthesized)

SEQ ID NO: 767764 - DNA, 120 bp, Artificial Sequence; identical to SEQ ID NO: 664665
  ENSG00000228570_11 (sequence is synthesized)

SEQ ID NO: 767765 - DNA, 120 bp, Artificial Sequence; identical to SEQ ID NO: 690610
  ENSG00000228570_12 (sequence is synthesized)

SEQ ID NO: 767766 - DNA, 120 bp, Artificial Sequence; identical to SEQ ID NO: 690611
  ENSG00000228570_13 (sequence is synthesized)

SEQ ID NO: 767767 - DNA, 120 bp, Artificial Sequence
  ENSG00000228570_14 (sequence is synthesized)
agtgtaccttcccagcaaggccggccccaaggcccagactgcctgcctgccaccacccagaccccagaggccagtgaccaaggcccgccggccaccaccccagccccaccggcgagcaga

SEQ ID NO: 767768 - DNA, 120 bp, Artificial Sequence; identical to SEQ ID NO: 690613
  ENSG00000228570_15 (sequence is synthesized)

SEQ ID NO: 767769 - DNA, 120 bp, Artificial Sequence; identical to SEQ ID NO: 690614
  ENSG00000228570_16 (sequence is synthesized)

SEQ ID NO: 767770 - DNA, 120 bp, Artificial Sequence; identical to SEQ ID NO: 690615
  ENSG00000228570_17 (sequence is synthesized)

SEQ ID NO: 767771 - DNA, 120 bp, Artificial Sequence
  ENSG00000228570_18 (sequence is synthesized)
ggaaggactcacccttgcccagctagtggagaagcgcctcccacccttgaaggagaaacagcattcgagggcagcccctagtcgtggcacagcccggttggactcaagttcttctaagtt

SEQ ID NO: 767772 - DNA, 120 bp, Artificial Sequence
  ENSG00000228570_19 (sequence is synthesized)
tgcagctggccaaggagcagagagagacgtccctgacccccaagaaggggttggcatggaaacctgcccaccccagacgactgcccgggactctcagggacgaggcagagcacacactgg

SEQ ID NO: 767773 - DNA, 120 bp, Artificial Sequence
  ENSG00000228570_20 (sequence is synthesized)
catggccaggtccgaagactctgttgtgcttttgggatgtcaggattcccctgggctgagggctgcccggccaacctctcctccccaggaccacagacccacctgccctggcgtgggtac

SEQ ID NO: 767774 - DNA, 120 bp, Artificial Sequence; identical to SEQ ID NO: 690619
  ENSG00000228570_21 (sequence is synthesized)

SEQ ID NO: 767775 - DNA, 120 bp, Artificial Sequence; identical to SEQ ID NO: 690620
  ENSG00000228570_22 (sequence is synthesized)

SEQ ID NO: 767776 - DNA, 120 bp, Artificial Sequence
  ENSG00000228570_23 (sequence is synthesized)
agcaccttctcctgccaacaaggccaagaagcaacctctctttggaagcctgtcccctgctgaaaagacaccccaccgagggcctgggctcagggtctctggggagcaatccctgacttg

SEQ ID NO: 767777 - DNA, 120 bp, Artificial Sequence; identical to SEQ ID NO: 690622
  ENSG00000228570_24 (sequence is synthesized)

SEQ ID NO: 767778 - DNA, 120 bp, Artificial Sequence; identical to SEQ ID NO: 690623
  ENSG00000228570_25 (sequence is synthesized)

SEQ ID NO: 767779 - DNA, 120 bp, Artificial Sequence
  ENSG00000228570_26 (sequence is synthesized)
ctgaatggggagggcaggaagggagggtctggggggaaggggctggggagtgggggtgggaagcagtgtgttgggggcctcgtgtgtaagtgtgaataaatgtagttgtcttggaaaatg

SEQ ID NO: 767780 - DNA, 120 bp, Artificial Sequence
  ENSG00000228570_27 (sequence is synthesized)
gctcggcttcttggggagccactctggagtgggaagatgcaggttcagagggagtaggatggacaggagccagggaggggagtcagcatgcaagctgtggtgaggcccaacgggaggccc

SEQ ID NO: 767781 - DNA, 120 bp, Artificial Sequence
  ENSG00000228570_28 (sequence is synthesized)
ggcagagccacaccctctctctttgacataaagcccagctgcctcaggcttccctacctgccgcctaagtgccctggtctccaccaccctgggccctgctcacacctggggcagtgccag

SEQ ID NO: 767782 - DNA, 80 bp, Artificial Sequence
  ENSG00000228594_0 (sequence is synthesized)
ccccgacgccgccgggctgggagccgacccccgacgcgccctggtgcccctacaaggtgctgcccgagggccccgaggcg

SEQ ID NO: 767783 - DNA, 80 bp, Artificial Sequence
  ENSG00000228594_1 (sequence is synthesized)
ctgtgcttccgcagccccgcgcgcggcttccgctgccaggctccgggctgcgtgctgcacgccccggccggccgctccct

SEQ ID NO: 767784 - DNA, 120 bp, Artificial Sequence
  ENSG00000228594_2 (sequence is synthesized)
cctgcgcaaccgcagcgtcctcctgcagtggcgcctggccccggccgccgcgcgccgcgtgcgcgccttcgcgctcaactgctcgtggcgcggcgcctacacgcgcttcccgtgcgagcg

SEQ ID NO: 767785 - DNA, 120 bp, Artificial Sequence
  ENSG00000228594_3 (sequence is synthesized)
tgcgagcgcgtgctcctcggggcctcctgccgcgactacctgctgcccgacgtgcacgacagcgtcctctaccgcctgtgcctgcagccgctgccgctgcgcgctgggcccgccgccgcc

SEQ ID NO: 767786 - DNA, 120 bp, Artificial Sequence
  ENSG00000228594_4 (sequence is synthesized)
gcgccagagacccccgagccggccgagtgcgtggagttcaccgccgagccggccggcatgcaggacatcgtggtggccatgacggcggtgggcggctccatctgcgtcatgctggtggtc

SEQ ID NO: 767787 - DNA, 120 bp, Artificial Sequence
  ENSG00000228594_5 (sequence is synthesized)
atctgcctgctggtggcctacatcaccgagaacctcatgcgcccggccctcgcgcgccccggcctgcgcagacacccctgaagcgcgaggccgcccgcccatctttgcgccacctgcctg

SEQ ID NO: 767788 - DNA, 120 bp, Artificial Sequence
  ENSG00000228594_6 (sequence is synthesized)
agggcgcctgagctcccaggtcctccgcccgctctcctctcctcattcctgctgcctccttaagatccccgcggaggaggacctgccggcgacggctccggcactttggcatcatcacac

SEQ ID NO: 767789 - DNA, 120 bp, Artificial Sequence
  ENSG00000228594_7 (sequence is synthesized)
ggctctccccgctctccgcaggcctttatagaggcggccagggcatggagccccttccagcaagagccatgggcactccggctcaccccgcacctccatcctgtgccgaattgtcccaga

SEQ ID NO: 767790 - DNA, 120 bp, Artificial Sequence
  ENSG00000228594_8 (sequence is synthesized)
cagaccgtcgccattgctcggtcactgtgctttgcaggcctggggcgcagctctccaagcctgtcctgccccgccccaccccactgggcttaggttagcttcgtgccttagtatctcggg

SEQ ID NO: 767791 - DNA, 120 bp, Artificial Sequence
  ENSG00000228594_9 (sequence is synthesized)
cccactgcaggagccaacaccctctgctgtccagggggggtctgtggccctaagattggccggcctctccatgcatctggccagcgtccccttggagacaccttcaccctcaagcgctgc

SEQ ID NO: 767792 - DNA, 120 bp, Artificial Sequence
  ENSG00000228594_10 (sequence is synthesized)
agaagcatgaggtgagggcctgcagcgctctgtaccgtttagggtgttggaccagccgggagcctggcaggcctggcccagcggccagggtgagtgttctcagaccccgggcagctggtg

SEQ ID NO: 767793 - DNA, 120 bp, Artificial Sequence
  ENSG00000228594_11 (sequence is synthesized)
gttctccagggccaggtaccccttttgtgtgtgcgacctctgactaggtccctgtgggaatggggcagatggcggccatcaccactgggtcccagggcagaagcttagataccggccttg

SEQ ID NO: 767794 - DNA, 120 bp, Artificial Sequence
  ENSG00000228594_12 (sequence is synthesized)
agcagcccgaccttccaccgctgcctggatcccaagcctcagccgacccaggggaccttggtggcaacggtgtgactgacagcaccacccctagcctttgcatgcccaggggtcgagagc

SEQ ID NO: 767795 - DNA, 120 bp, Artificial Sequence
  ENSG00000228594_13 (sequence is synthesized)
cagtatccggcccagacaatgccacccgccatggaagaaaagctgaccctgcccacctgctgcagacccgggccccgggccgaggttgctttctgtgacgaccgcctggtgacgctggac

SEQ ID NO: 767796 - DNA, 120 bp, Artificial Sequence
  ENSG00000228594_14 (sequence is synthesized)
accaggagggttatggcactgccctcccctcctggagcccctggcactgaccacctggacttgacctgactcctggtcactggccaaacacccatcctcaccccagccaccccgggccct

SEQ ID NO: 767797 - DNA, 120 bp, Artificial Sequence
  ENSG00000228594_15 (sequence is synthesized)
ggctggtgccgtgtgacacctgtagcccacctgtgtgtctttgctccgcccacccctgcgtggcgccggtcaggcgcaaacctggcgccagtgtctaaatgtccatcattctcagaccaa

SEQ ID NO: 767798 - DNA, 120 bp, Artificial Sequence
  ENSG00000228607_0 (sequence is synthesized)
ctgacccactcgtgctccttttctttctgcatctgtggtgggagtgactatggcctggagtttccgtgcaaaagtccagctcggggggctacttctctccctccttggctgggtctgctc

SEQ ID NO: 767799 - DNA, 120 bp, Artificial Sequence
  ENSG00000228607_1 (sequence is synthesized)
ctgtgttaccaccatcctgccccagtggaagactcttaatctggaactgaacgagatggagacctggatcatggggatttgggaggtctgcgtggatcgagaggaagtcgccactgtgtg

SEQ ID NO: 767800 - DNA, 120 bp, Artificial Sequence
  ENSG00000228607_2 (sequence is synthesized)
caaggcctttgaatccttcttgtctctgccccaggagctccaggtagcccgcatcctcatggtagcctcccatgggctgggcctattggggcttttgctctgcagctttgggtctgaatg

SEQ ID NO: 767801 - DNA, 120 bp, Artificial Sequence
  ENSG00000228607_3 (sequence is synthesized)
aggcggcttggtctcctgggaaggactttggaggcatccgcttcagccactaccctccttccagtctcctgggtggcccatgccacaatccaagacttctgggatgacagcatccctgac

SEQ ID NO: 767802 - DNA, 120 bp, Artificial Sequence
  ENSG00000228607_4 (sequence is synthesized)
atcatacctcggtgggagtttggaggtgccctctacttgggctgggctgctggtattttcctggctcttggtgggctactcctcatcttctcggcctgcctgggaaaagaagatgtgcct

SEQ ID NO: 767803 - DNA, 120 bp, Artificial Sequence
  ENSG00000228607_5 (sequence is synthesized)
tttcctttgatggctggtcccacagtccccctatcctgtgctccagtggaggagtcagatggctccttccacctcatgctaagacctaggaacctggtcatctaggactggcttctgcca

SEQ ID NO: 767804 - DNA, 120 bp, Artificial Sequence
  ENSG00000228672_0 (sequence is synthesized)
cacggcgtccggccccaccatgctgaccgcgctcgccccgccagccctgcctgggatcccgaggcagctgcccacggcccccgcgcggcgccaggactcctccggttcgtcaggctccta

SEQ ID NO: 767805 - DNA, 120 bp, Artificial Sequence
  ENSG00000228672_1 (sequence is synthesized)
cctactacacggctccaggttctccggagcccccggacgttgggccggacgcgaaaggcccagcgaattggccctgggtggctcctgggcggggggcgggcgcgcagcctcgcctgtccg

SEQ ID NO: 767806 - DNA, 120 bp, Artificial Sequence
  ENSG00000228672_2 (sequence is synthesized)
tcagcgcccagaatagccgccagcggcacgggcccggctcgggtttcccgcgaggcccaggttccggcccacggccaccccagccccagctgcgcacgctgccgtcgggggagatggaag

SEQ ID NO: 767807 - DNA, 120 bp, Artificial Sequence
  ENSG00000228672_3 (sequence is synthesized)
tcatcttcggcgtcggacccctgttcggctgctccggcgcagacgatcgcgaggcgcaacaacagttcacggagccggccttcatcagccccttgccgccggggccagcgtctcccgccg

SEQ ID NO: 767808 - DNA, 120 bp, Artificial Sequence
  ENSG00000228672_4 (sequence is synthesized)
cggtcccacgccagtcccaggtccccgatggtggctcccgctgggccacctacctagagctgcggccccgtgggccaagtcctgccgccccagcgcagttcgagtgtgtggaggtggctc

SEQ ID NO: 767809 - DNA, 120 bp, Artificial Sequence
  ENSG00000228672_5 (sequence is synthesized)
cgagtgtgtggaggtggctctggaggagggcgccgcgcccgccaggccccggacagtgcccaagcgtcagatcgagctgcgcccccggccccagagtcccccaagggcggccggcgcgcc

SEQ ID NO: 767810 - DNA, 120 bp, Artificial Sequence
  ENSG00000228672_6 (sequence is synthesized)
gcaccggttccctggacgagtcgctgggccccctgcaggccgccgcgggcttcgtgcagacggcgttggccagaaaactgagccccgaggccccggccccgagcagcgccaccttcgggt

SEQ ID NO: 767811 - DNA, 120 bp, Artificial Sequence
  ENSG00000228672_7 (sequence is synthesized)
ccacggggcggtcggaacctgagacccgggaaacggcccgcagcacccacgtggtcctggagaaggctaagtctcggccacttcgcgtacgagataattcggcccccgccaaggccccga

SEQ ID NO: 767812 - DNA, 120 bp, Artificial Sequence
  ENSG00000228672_8 (sequence is synthesized)
ggccgtggcccagcctccgcgagcgcgcgattcggcgcgacaagcctgcgcccgggacggagccgctgggtcctgttagttccagcatcttccttcagtcagaggagaagatccaggagg

SEQ ID NO: 767813 - DNA, 120 bp, Artificial Sequence
  ENSG00000228672_9 (sequence is synthesized)
cgcggaagactcggttcccgcgagaggcgccggatcgaactgttcagagggcacggagtccgccttttgagtgtaggatcccctcggaggttccgagtagggctgtgaggccaaggagcc

SEQ ID NO: 767814 - DNA, 120 bp, Artificial Sequence
  ENSG00000228672_10 (sequence is synthesized)
cgtccccgccacggcagactccaaatggggctgtacggggtcctcgctgcccgtcgccccagaacctgtccccgtgggatcggactactcggagggtgagtagcccattgttccctgaag

SEQ ID NO: 767815 - DNA, 120 bp, Artificial Sequence
  ENSG00000228672_11 (sequence is synthesized)
cctcctccgagtgggaaaatcaaaatcctgccgtcgaggaaactgtcagcaggagaagcccttcccctccgatcctttcccagtggaatcagtgtgttgctggggaaaggagcccgtccc

SEQ ID NO: 767816 - DNA, 120 bp, Artificial Sequence
  ENSG00000228672_12 (sequence is synthesized)
tcgaagccccttccctgtgggagattccacattcggcagtcgcggatgcggtggagccacgtagcagcccgtccccgccggccttcttcccgtgggaggctccagatcgtcctattggaa

SEQ ID NO: 767817 - DNA, 120 bp, Artificial Sequence
  ENSG00000228672_13 (sequence is synthesized)
cttggggcccatctccccaagagacatgggatcccatggggccgggctcatcgatagcatttactcaggaagctcagaatgggttaactcaggaggagttggcaccgcctacaccgtccg

SEQ ID NO: 767818 - DNA, 120 bp, Artificial Sequence
  ENSG00000228672_14 (sequence is synthesized)
cacccggcactccagaaccaacagagatgcagagtccatccacgcgggaaatttcagatcttgcctttggagggagtcagcagtccccagaggtagcagcacccgagccgcccggcagcc

SEQ ID NO: 767819 - DNA, 120 bp, Artificial Sequence
  ENSG00000228672_15 (sequence is synthesized)
accctgtgggcaccctggacgcggataagtgcccggaagtcttgggtcctggagaggcggcctcgggacgcccgcgcatggccattccgcggcctcgagacgtgcgcaagttggtgaaga

SEQ ID NO: 767820 - DNA, 120 bp, Artificial Sequence
  ENSG00000228672_16 (sequence is synthesized)
ccacgtacgcgccaggcttcccggcaggagcacaaggctctgggctgcctgcgcctcctgccgacccctgcggggaggagggcggcgaatccaagacgcaagagccgccagcactggggc

SEQ ID NO: 767821 - DNA, 120 bp, Artificial Sequence
  ENSG00000228672_17 (sequence is synthesized)
cccccgccccggctcactacacttccgttttcatcaaggattttctaccggtggtgccgcacccctacgagcctcctgaaccgtccttcgacacggtcgcccgggacgcctcacagccca

SEQ ID NO: 767822 - DNA, 120 bp, Artificial Sequence
  ENSG00000228672_18 (sequence is synthesized)
ggccctggccttgggtcgccggcccgaggtaacctcgcgagtgcgagcgcgcggccctggaggagagaacagggatgtagaggcccagcgcctggtccccgacggcgacggtcggaccag

SEQ ID NO: 767823 - DNA, 120 bp, Artificial Sequence
  ENSG00000228672_19 (sequence is synthesized)
ccctctaggcggcgcccgcagctcatcccagcgctcccccgtagggccagcaggggtccgatcgccccgccccggctcccctcagatgcaagccagcccgagccctgggatagcacccaa

SEQ ID NO: 767824 - DNA, 120 bp, Artificial Sequence
  ENSG00000228672_20 (sequence is synthesized)
gatagcacccaaaccgaagacaccacctacggcccccgagcccgcggctgccgtccaggcgccactcccgcgggagcccctggcgttggcgggcaggacggccccagcccagccccgcgc

SEQ ID NO: 767825 - DNA, 120 bp, Artificial Sequence
  ENSG00000228672_21 (sequence is synthesized)
tcccacggaccggtccccgcaaagcccctcccagggagcgcgcaggcagcccggggccgcgcccctggggaaggtcttggtggaccccgagagcggccgctactactttgtggaggcgcc

SEQ ID NO: 767826 - DNA, 120 bp, Artificial Sequence
  ENSG00000228672_22 (sequence is synthesized)
gcggcagcctcggctgcgggtgctcttcgaccctgagagtgggcagtacgtggaggtgttgctgccgccctcgtctcccgggccgccccaccgcgtctacacccctctggccctggggct

SEQ ID NO: 767827 - DNA, 120 bp, Artificial Sequence
  ENSG00000228672_23 (sequence is synthesized)
cggcctctacccgcccgcctatgggcctatacccagcctctctctgccaccgtccccgggcccgcaggccctcggcagcccccagctaccctgggtctctgaggcagggcccctggacgg

SEQ ID NO: 767828 - DNA, 120 bp, Artificial Sequence
  ENSG00000228672_24 (sequence is synthesized)
gacctactacctgccggtgagcgggacccccaaccccgcacctcctctgctcctctgtgcgccgccctccagctcaggtcccacccagcccggcaagggttcattgttcccgctgtgagg

SEQ ID NO: 767829 - DNA, 120 bp, Artificial Sequence
  ENSG00000228672_25 (sequence is synthesized)
ccccgggccgatccccatggagttggagcccttggatgcctgggaggttctggcatccaagcccctaccctcctctccttccgtcgcctctgtctttaacccatcccagtcagtcgtcgg

SEQ ID NO: 767830 - DNA, 120 bp, Artificial Sequence
  ENSG00000228672_26 (sequence is synthesized)
acaggaagtgatcttcagagaatgaatctgagccccgaggctggtggagctggagtcacccaggaagtggctgcctacttcctcccccaacaaaattatgtatccctttcccaggcattc

SEQ ID NO: 767831 - DNA, 120 bp, Artificial Sequence
  ENSG00000228672_27 (sequence is synthesized)
ccagggcgtggtgtggtgtggtgtgtgggtgtgtgtatatgtgtatatgcgggcaagcaaatagggaaagtgaggcatccctgggcttgtccccaggagccgatcagaggaggtgctgtg

SEQ ID NO: 767832 - DNA, 120 bp, Artificial Sequence
  ENSG00000228672_28 (sequence is synthesized)
gctgccgtggggcagcaggaacgggagcagcaggagacagggcggggaactgtctgccctccctgatggtgggcccagctgaggtgaggctggccagtgcccctggtgaggtggcaggaa

SEQ ID NO: 767833 - DNA, 120 bp, Artificial Sequence
  ENSG00000228672_29 (sequence is synthesized)
ggactctggctgtcgagtctgctcttaggaagaggagctgagctttggccctggaggttactggggggaaagtggccagtacagcccaggccaggctggctccgagaaagagctaaggcg

SEQ ID NO: 767834 - DNA, 120 bp, Artificial Sequence
  ENSG00000228672_30 (sequence is synthesized)
ggggacagcaggtggaggcaaagcaaggaatacagggagggcctgggttgggggttagcctggaacttggggtgggaagatggggagcctggccctcagagctgagctgactcatttttg

SEQ ID NO: 767835 - DNA, 120 bp, Artificial Sequence
  ENSG00000228672_31 (sequence is synthesized)
ggccaggggtggggcttcagtcccccaccccctacatcgggagtaggtgaaatggtcatcaggaagctctgagaagagggagggttgggctcttgtcccacaggagcctcttgacccctc

SEQ ID NO: 767836 - DNA, 120 bp, Artificial Sequence
  ENSG00000228672_32 (sequence is synthesized)
tgtgtggccagaaggtgggttagggccagcagtagaagcgatacccctggtggagtatccagagggatctgaagctcttggcaggttccactccccagtaacagatgtggcaacaatggc

SEQ ID NO: 767837 - DNA, 120 bp, Artificial Sequence
  ENSG00000228672_33 (sequence is synthesized)
cagagaggggctggccctacagaccagtcacagcaagggacagggcccagagcctgcacttcagttgccctgagattccaggagcctctgagggagatgaggggggtctgcatgaggtgg

SEQ ID NO: 767838 - DNA, 120 bp, Artificial Sequence
  ENSG00000228672_34 (sequence is synthesized)
gaggtggtgtgcgtgggggtctgtatatagttctgaaccggaaatggctggcccttgccagcctggtgtgtgatgtgatgagtttgggaaggacagtttccatgagaagcagtggcaggg

SEQ ID NO: 767839 - DNA, 120 bp, Artificial Sequence
  ENSG00000228672_35 (sequence is synthesized)
atggggatggatgccttcgttgttccaggcctgtcagggggcccaggtccctagcagtccctgccctctgccctggactggaagctgactaggagagctacgaatcagaacaactggcca

SEQ ID NO: 767840 - DNA, 120 bp, Artificial Sequence
  ENSG00000228672_36 (sequence is synthesized)
ttttctagctggagatgccagctccgatggcatggagggccctggggccaccccaggtgtctttacctcatcctggtgtgtaataaatcactgaccatggagccatcatggctgaaataa

SEQ ID NO: 767841 - DNA, 120 bp, Artificial Sequence
  ENSG00000228696_0 (sequence is synthesized)
gcctgtcgtggtttagctgaactgagctgaaatcctaaaggccgcggagtcggcggtgttgtaggtagcggtaccttgagtggcaacagaattcgattaaattacaatgggaaacatttt

SEQ ID NO: 767842 - DNA, 120 bp, Artificial Sequence
  ENSG00000228696_1 (sequence is synthesized)
tgaaaagctctttaaaagtctacttgggaaaaaaaagatgcggattcttatattgagtttggatacagctggaaaaaccaccatcttgtataaattgaagctgggggagactgtgcctgc

SEQ ID NO: 767843 - DNA, 120 bp, Artificial Sequence
  ENSG00000228696_2 (sequence is synthesized)
cgtccctacagtaggtttctgtgtggagacagtagaatataaaaataacaccttcgctgtctgggatgttggcagccacttcaaaatcagacctctgtggcagcattttttccagaacac

SEQ ID NO: 767844 - DNA, 120 bp, Artificial Sequence
  ENSG00000228696_3 (sequence is synthesized)
gcacacatcaaggctcacttgccagcggggtgctgccaataaaatgtagtcacgtggaatttggaatgtggaaaggaggtagaagtcatcctttcctcccccatagcagcaggtgtgcag

SEQ ID NO: 767845 - DNA, 120 bp, Artificial Sequence
  ENSG00000228696_4 (sequence is synthesized)
gctctggtggtcagctggactccatactcccccaccagtcaccagcctggggaccgtggggctgcaaggacctcagcagcggtttcccaagtttcctgacttcttccatcctctggaaat

SEQ ID NO: 767846 - DNA, 120 bp, Artificial Sequence
  ENSG00000228696_5 (sequence is synthesized)
cagctgtggtaaagtagcctgaaagccagtggtgcaaccccatccccacaaccttcaccacctctagcacctccagtgataagcactaattgcctatatacaacccttttttgtttgaaa

SEQ ID NO: 767847 - DNA, 120 bp, Artificial Sequence
  ENSG00000228696_6 (sequence is synthesized)
tgatgccactgctgtctgagggctcctctggctcaacaatcagctcagtgcttgtgtagttcttccgggcttgtaacaccttcatgaacgctccttctggattccctaccgatgcttctt

SEQ ID NO: 767848 - DNA, 120 bp, Artificial Sequence
  ENSG00000228696_7 (sequence is synthesized)
aaaagagctatcagcttcccagtttgcacaattcatcaagaaattatgcggggtcactggcacaaatgatgaggcatctcctggaagcttaacttcttatccatcccatctcttggacag

SEQ ID NO: 767849 - DNA, 120 bp, Artificial Sequence
  ENSG00000228696_8 (sequence is synthesized)
aaagttcagcatgttaacctaacataaaacacagcaagaatcttgttgcctgaactattttaaattaaggagccagatctttttagtgaggctatcctgacaagacttgacctaaacttt

SEQ ID NO: 767850 - DNA, 120 bp, Artificial Sequence
  ENSG00000228696_9 (sequence is synthesized)
ctgacaagacttgacctaaactttgtttttattggtcataacagtccaattatattattggccaattttgtccaatggacaagaaaaaagcaaagttgccaggtgcggtggctcacgcct

SEQ ID NO: 767851 - DNA, 66 bp, Artificial Sequence
  ENSG00000228696_10 (sequence is synthesized)
gaggcagaggttgtagtttcaaaaacaaaaaaaggaagaaaagaaaaagaaaaaagaaaagtcaac

SEQ ID NO: 767852 - DNA, 120 bp, Artificial Sequence
  ENSG00000228696_11 (sequence is synthesized)
aaaaaaaggaagaaaagaaaaagaaaaaagaaaagtcaacgacaccattatcttgtcaagatcaaatggttttattattgtggcagaagcgagaaaattttgtttattaaaaaaaaaaaa

SEQ ID NO: 767853 - DNA, 120 bp, Artificial Sequence
  ENSG00000228696_12 (sequence is synthesized)
ttggcccagtgccctctgttgaaacatcctaggctttttctttccactcctattacaactgatctgatttggccccttcacacttcactcctagattttgctagacctttctattttgtc

SEQ ID NO: 767854 - DNA, 120 bp, Artificial Sequence; identical to SEQ ID NO: 673247
  ENSG00000228696_13 (sequence is synthesized)

SEQ ID NO: 767855 - DNA, 120 bp, Artificial Sequence
  ENSG00000228696_14 (sequence is synthesized)
ttactttgaatgttctatattggctgtgatctttgtactaactgctattatggagaatgtgttggcatcgcagaaaaggaggctaagaaaatggatgtgtacatctgtaatgattgtaaa

SEQ ID NO: 767856 - DNA, 120 bp, Artificial Sequence
  ENSG00000228696_15 (sequence is synthesized)
tgggcacaagagggcagcagtgaggaattgtactgtatctgcagaacacctgcagtcacagtgagttctaataagagcatcacatttaataatttaggaagccaaattgctctgactggt

SEQ ID NO: 767857 - DNA, 120 bp, Artificial Sequence
  ENSG00000228696_16 (sequence is synthesized)
tacttatttactttaaaataaaaagcagattttttctacatttgttatacacttacattacaaattccttttcatttttttttctctttttccctttttacctacccttcaaaatttatc

SEQ ID NO: 767858 - DNA, 120 bp, Artificial Sequence
  ENSG00000228696_17 (sequence is synthesized)
ttgcttcatagtgaatgtttgagacacattggggaaaatgtggtttaatggtagatttgattcttcaatatgtaacatagaaattaatgagattaaactagcttgacttgtttggacttt

SEQ ID NO: 767859 - DNA, 120 bp, Artificial Sequence
  ENSG00000228696_18 (sequence is synthesized)
atcagtgtttgaaatggtgctttattataggttagaaaaacactaatttgggtataagctttgagactctgttattaccttataggattttgaactcccacatggtacagtactagttga

SEQ ID NO: 767860 - DNA, 120 bp, Artificial Sequence
  ENSG00000228696_19 (sequence is synthesized)
gctttaaaatcaattgaatgtttcatatttatctttaaattggttctccaaaattacagtgttcttataaatttttttactgcttgttcttaacatcaaaaatactaaattaatgtactg

SEQ ID NO: 767861 - DNA, 120 bp, Artificial Sequence
  ENSG00000228696_20 (sequence is synthesized)
gaatgtcgatcttgaaagtattaaaaccacaatactaaaactattttatatcccagggtttagcaaattttcaggtgcatgctttattataagtaacatcatcccatctgttttgaactc

SEQ ID NO: 767862 - DNA, 120 bp, Artificial Sequence
  ENSG00000228696_21 (sequence is synthesized)
acatttccatttcggatcttgcagattttttattggccatgatcggtgtcagaattggtaccatgggtgctgcattggcatcttgcagagtgaggcagagctcattgatgagtatgtctg

SEQ ID NO: 767863 - DNA, 120 bp, Artificial Sequence
  ENSG00000228696_22 (sequence is synthesized)
tccacagtgccagtcaacagaggatgtcatgacagtgctcacaccactaacagagaaggatgatgaggagttgaagagggtgctccgttccttacagatgagagcccctctgtgtgcagc

SEQ ID NO: 767864 - DNA, 120 bp, Artificial Sequence
  ENSG00000228696_23 (sequence is synthesized)
atttgaaaatgaaatcagctggcataattttggaagcatttctaggatttcaagtttccaatgttaggatttcaagtttccaatcttagagtgattatttactgactctcagctagtcta

SEQ ID NO: 767865 - DNA, 120 bp, Artificial Sequence
  ENSG00000228696_24 (sequence is synthesized)
gtgaagggcttgacaaacttcagtccttcacataccagtgtcatgagctttaccatatccccacaccacctcagcttatctaacactcagataatctaacgtgactcacttctttataca

SEQ ID NO: 767866 - DNA, 120 bp, Artificial Sequence
  ENSG00000228696_25 (sequence is synthesized)
ttttatttttaaagaaacttcctctcactcccatggattgagaaacagtatgattagattatagttattattttccttatgaaagacagaaaggtggctgggtacgggggctcacacctg

SEQ ID NO: 767867 - DNA, 61 bp, Artificial Sequence
  ENSG00000228696_26 (sequence is synthesized)
cgtctctactaaaaatacaaaaaactagtcgggtgtggtggcgagcagaggttgcagtgag

SEQ ID NO: 767868 - DNA, 120 bp, Artificial Sequence; identical to SEQ ID NO: 673248
  ENSG00000228696_27 (sequence is synthesized)

SEQ ID NO: 767869 - DNA, 120 bp, Artificial Sequence
  ENSG00000228696_28 (sequence is synthesized)
tcactgcaacgtcctcttcccaagctcaggttcgtgagccacacatctccccacaccaagctcctccatacaagacctcggactgcatcacgtaaatgctttttcaggggcaaaatctag

SEQ ID NO: 767870 - DNA, 120 bp, Artificial Sequence
  ENSG00000228696_29 (sequence is synthesized)
ttcgcgaagagcatcccctccatggcagaaatctgaaaatgcccctggggagacacatgcacaagacagttcgtgagccacacatctccccacaccaagctcctccatacaagacctcgg

SEQ ID NO: 767871 - DNA, 120 bp, Artificial Sequence
  ENSG00000228696_30 (sequence is synthesized)
tctccccacaccaagctcctccatacaagacctcggactgcatcacgtaaatgctttttcaggggcaaaatctagagaatctgaaatggtgagcctttttcctttttttttttttttttt

SEQ ID NO: 767872 - DNA, 120 bp, Artificial Sequence
  ENSG00000228696_31 (sequence is synthesized)
accatgcccagctgtgagcctgtatcttaatcaaagtcctgagaataaccttgaagaagactcccttgcaatgagcaacaacagaagaagcaagggacctggaatctggcagacctgggt

SEQ ID NO: 767873 - DNA, 120 bp, Artificial Sequence
  ENSG00000228696_32 (sequence is synthesized)
ttgaattctggctctgtcactttctggtgaagtgacttgagtaatgaacatgagcctttctgggtagcgtttacagcacaaagcaatttgaggaataaatgaaagagcacgtgtctagtg

SEQ ID NO: 767874 - DNA, 120 bp, Artificial Sequence
  ENSG00000228696_33 (sequence is synthesized)
atcatgtcacaccagcactgaccggtgagcataaaccctggggatgcccagagctggtacagccaggagctccagaagcgtgggattctcagagggaagtggagctcactgctctacagg

SEQ ID NO: 767875 - DNA, 120 bp, Artificial Sequence
  ENSG00000228696_34 (sequence is synthesized)
tcctattcaagttagaaagtaagacacaatgcgcacaaagccaaattgtcatcattcagctcctattacaggggaactaagagctgcattgaaaattatttgcaaagcttgtaagtggtt

SEQ ID NO: 767876 - DNA, 120 bp, Artificial Sequence
  ENSG00000228696_35 (sequence is synthesized)
ctgccacttattagccatgtgaaccttagcaaattacctagcgtctctgagtttcaacttcctcatctacaaaatagaaatgataataataaccgcatcgcaagagttgttggaaaaatg

SEQ ID NO: 767877 - DNA, 120 bp, Artificial Sequence
  ENSG00000228696_36 (sequence is synthesized)
aaaatgaggtatcataggaggtaacatgtatggagcatttaccataggccaagcactgttctaagaacttcggacatgttatctcacttgtataagtacttaggtgcctacaacataaac

SEQ ID NO: 767878 - DNA, 120 bp, Artificial Sequence
  ENSG00000228696_37 (sequence is synthesized)
agcacctggtaaattaagtattgaaaaaatgctatggggcagaggatgaaatgctaagcttctgtgagaagagaagacagcttgttacacaggtgaaaagaacaagctgcagctgagaga

SEQ ID NO: 767879 - DNA, 120 bp, Artificial Sequence
  ENSG00000228696_38 (sequence is synthesized)
agaaaagtataagagttgctaggtgtgacaatctcaagacttttcaaccactacaaatttaaacagccaccctaaatcaccccaaaggacagactcgagttgttctttttgtctttaatg

SEQ ID NO: 767880 - DNA, 120 bp, Artificial Sequence
  ENSG00000228696_39 (sequence is synthesized)
tttgcgcctctccgaatcagagaagaagctgccaggattccagtacataccaaaacatgatgacaataccctcaactgtgcaaacttttgtgcatctaccgctatgtaaaggaagctgat

SEQ ID NO: 767881 - DNA, 120 bp, Artificial Sequence
  ENSG00000228696_40 (sequence is synthesized)
gtcagtagactggggggaacagtaaggcatgtttgtgaccgaagctcaatttgccatcacagtgtggccacacctacctcactaatattctaatagtgggataaataattcaatagggat

SEQ ID NO: 767882 - DNA, 120 bp, Artificial Sequence
  ENSG00000228696_41 (sequence is synthesized)
aaagcctggattttcctcttattctctcttagtgcttacattcttggcatgatatcgatgtgccatagacaagccaatatgtgagtgtactctatctgaataaagtatagcctttctaca

SEQ ID NO: 767883 - DNA, 120 bp, Artificial Sequence
  ENSG00000228716_0 (sequence is synthesized)
agtcccagacagaacctactatgtgcggcggcagctggggcgggaaggcgggagctgggggcgctgggggcgctgcggccgctgcggccgctgcagccgctgcagcgccagggtccacct

SEQ ID NO: 767884 - DNA, 120 bp, Artificial Sequence
  ENSG00000228716_1 (sequence is synthesized)
ggtcggctgcacctgtggaggaggaggtggatttcaggcttcccgtagactggaagaatcggctcaaaaccgcttgcctcgcaggggctgagctggaggcagcgaggccgcccgacgcag

SEQ ID NO: 767885 - DNA, 120 bp, Artificial Sequence
  ENSG00000228716_2 (sequence is synthesized)
gcttccggcgagacatggcagggcaaggatggcagcccggcggcagggcctggcgaggagcgcgagcccgcggccgcagttcccaggcgtctgcgggcgcgagcacgccgcgaccctgcg

SEQ ID NO: 767886 - DNA, 120 bp, Artificial Sequence
  ENSG00000228716_3 (sequence is synthesized)
tgcgccggggcgggggggcggggcctcgcctgcacaaatggggacgaggggggcggggcggccacaatttcgcgccaaacttgaccgcgcgttctgctgtaacgagcgggctcggaggtc

SEQ ID NO: 767887 - DNA, 120 bp, Artificial Sequence
  ENSG00000228716_4 (sequence is synthesized)
ctcccgctgctgtcatggttggttcgctaaactgcatcgtcgctgtgtcccagaacatgggcatcggcaagaacggggacctgccctggccaccgctcaggaatgaattcagatatttcc

SEQ ID NO: 767888 - DNA, 120 bp, Artificial Sequence
  ENSG00000228716_5 (sequence is synthesized)
agagaatgaccacaacctcttcagtagaaggtaaacagaatctggtgattatgggtaagaagacctggttctccattcctgagaagaatcgacctttaaagggtagaattaatttagttc

SEQ ID NO: 767889 - DNA, 120 bp, Artificial Sequence
  ENSG00000228716_6 (sequence is synthesized)
tcagcagagaactcaaggaacctccacaaggagctcattttctttccagaagtctagatgatgccttaaaacttactgaacaaccagaattagcaaataaagtagacatggtctggatag

SEQ ID NO: 767890 - DNA, 120 bp, Artificial Sequence
  ENSG00000228716_7 (sequence is synthesized)
ttggtggcagttctgtttataaggaagccatgaatcacccaggccatcttaaactatttgtgacaaggatcatgcaagactttgaaagtgacacgttttttccagaaattgatttggaga

SEQ ID NO: 767891 - DNA, 120 bp, Artificial Sequence
  ENSG00000228716_8 (sequence is synthesized)
aatataaacttctgccagaatacccaggtgttctctctgatgtccaggaggagaaaggcattaagtacaaatttgaagtatatgagaagaatgattaatatgaaggtgttttctagttta

SEQ ID NO: 767892 - DNA, 120 bp, Artificial Sequence
  ENSG00000228716_9 (sequence is synthesized)
agttgttccccctccctctgaaaaaagtatgtatttttacattagaaaaggttttttgttgactttagatctataattatttctaagcaactagtttttattccccactactcttgtctc

SEQ ID NO: 767893 - DNA, 120 bp, Artificial Sequence
  ENSG00000228716_10 (sequence is synthesized)
tatcagataccatttatgagacattcttgctataactaagtgcttctccaagaccccaactgagtccccagcacctgctacagtgagctgccattccacacccatcacatgtggcactct

SEQ ID NO: 767894 - DNA, 120 bp, Artificial Sequence
  ENSG00000228716_11 (sequence is synthesized)
tgccagtccttgacattgtcgggcttttcacatgttggtaatatttattaaagatgaagatccacatacccttcaactgagcagtttcactagtggaaataccaaaagcttcctacgtgt

SEQ ID NO: 767895 - DNA, 120 bp, Artificial Sequence
  ENSG00000228716_12 (sequence is synthesized)
atatccagaggtttgtagataaatgttgccaccttgtttgtaacagtgaaaaattgaaaacaacctggaagtccagtgatgggaaaatgagtatgtttctgtcttagattggggaaccca

SEQ ID NO: 767896 - DNA, 120 bp, Artificial Sequence
  ENSG00000228716_13 (sequence is synthesized)
aagcagattgcaagactgaaatttcagtgaaagcagtgtatttgctaggtcataccagaaatcatcaattgaggtacggagaaactgaactgagaaggtaagaaaagcaatttaaagtca

SEQ ID NO: 767897 - DNA, 120 bp, Artificial Sequence
  ENSG00000228716_14 (sequence is synthesized)
gcgagcaggttctcattgataacaagctccatactgctgagatacagggaaatggaggggggaaagctggagtattgatcccgcccccctccttggttgtcagctccctgtcctgtgtgt

SEQ ID NO: 767898 - DNA, 120 bp, Artificial Sequence
  ENSG00000228716_15 (sequence is synthesized)
gggcggaacatagtccagctgctctatagcaagtctcaggtgtttgcagtaagaagctgctggcatgcacgggaacagtgaatgccaaacacttaaagcaattcgatgtttaagtatgta

SEQ ID NO: 767899 - DNA, 70 bp, Artificial Sequence
  ENSG00000228716_16 (sequence is synthesized)
caggctagcatgcaatggtgtgacctcggcttactgcaacctccgcccaggtgcgcgccaccacgcccgg

SEQ ID NO: 767900 - DNA, 77 bp, Artificial Sequence
  ENSG00000228716_17 (sequence is synthesized)
gctgagccaccacacccggcacatcttcattctttttatgtagtaaaaagtataaggccacacatggtttatttgaa

SEQ ID NO: 767901 - DNA, 120 bp, Artificial Sequence
  ENSG00000228716_18 (sequence is synthesized)
atgtagtaaaaagtataaggccacacatggtttatttgaagtattttataatttaaaaaaatacagaagcaggaaaaccaattataagttcaagtgagggatgatggttgcttgaaccaa

SEQ ID NO: 767902 - DNA, 120 bp, Artificial Sequence
  ENSG00000228716_19 (sequence is synthesized)
agggttgcatgtagtaagaaattgtgatttaagatatattttaaagttataagtagcaggatattctgatggagtttgactttggttttgggcccagggagtttcagatgcctttgagaa

SEQ ID NO: 767903 - DNA, 73 bp, Artificial Sequence
  ENSG00000228716_20 (sequence is synthesized)
tttggttttgggcccagggagtttcagatgcctttgagaaatgaatgaagtagagagaaaataaaagaaaaac

SEQ ID NO: 767904 - DNA, 120 bp, Artificial Sequence
  ENSG00000228716_21 (sequence is synthesized)
ggcaaagccccatctctacaaaaaacacaaaaattagctgggcattgtggcgcacacctgtattcccatctagtcaggaagctgagatggaagaattaattgagcccacgagttcaaggc

SEQ ID NO: 767905 - DNA, 120 bp, Artificial Sequence
  ENSG00000228716_22 (sequence is synthesized)
tgcagtgagtcgtgattgtgccactgcactccagccggggtgacagaagagaccttgtctcgaaaaggaatctgaaaacaatggaaccatgccttcataattctagaaagttattttcaa

SEQ ID NO: 767906 - DNA, 120 bp, Artificial Sequence
  ENSG00000228716_23 (sequence is synthesized)
ctgataaatctatattcacccaaataatcaagggtgaaggtaaaataatacatttttagacaagcaaagactcaggggttacctccatgtgccctttttagggaagctgttggagaaaat

SEQ ID NO: 767907 - DNA, 120 bp, Artificial Sequence
  ENSG00000228716_24 (sequence is synthesized)
actccagcaaaatgaaggagtacacaaaccagagaatgacatgaatccagcaaataggatccaacacaggcaatattccagctatggagctagctttaaaaaggaacagtaaaaatatta

SEQ ID NO: 767908 - DNA, 120 bp, Artificial Sequence
  ENSG00000228716_25 (sequence is synthesized)
tagtcccagctactcaggaggctcagcagcaggacgacttgagcccaagagttccagaccagcctggccaccttagtgagatcccttctcttaaaaataataacttattgccagatttgg

SEQ ID NO: 767909 - DNA, 120 bp, Artificial Sequence
  ENSG00000228716_26 (sequence is synthesized)
tccagaccagcctggccaccttagtgagatcccttctcttaaaaataataacttattgccagatttggggcatttggaaagaagttcattgaagataaagcaaaagtaaaaaaaaaaaaa

SEQ ID NO: 767910 - DNA, 120 bp, Artificial Sequence
  ENSG00000228716_27 (sequence is synthesized)
tctagggcagaaagaagtacaggataggaagagcataatacactgtttttctcaacaaggagcagtatgtacacagtcataatgatgtgactgcttagcccctaaatatggtaactactc

SEQ ID NO: 767911 - DNA, 120 bp, Artificial Sequence
  ENSG00000228716_28 (sequence is synthesized)
tgggacaatatgggaggaaaagtgaagattgtgatggtgtaagagctaaatcctcatctgtcatatccagaaatcactatataatatataataatgaaatgactaagttatgtgaggaaa

SEQ ID NO: 767912 - DNA, 120 bp, Artificial Sequence
  ENSG00000228716_29 (sequence is synthesized)
aaaacagaagacattgctaaaagagttaaaagtcattgctctggagaattaggagggatggggcaggggactgttaggatgcattataaactgaaaagcctttttaaaattttatgtatt

SEQ ID NO: 767913 - DNA, 120 bp, Artificial Sequence
  ENSG00000228716_30 (sequence is synthesized)
aatatatgcattcacttgaaaaactaaaaaaaaacaataatttggaaaaacccatgaaggtaactaacggaaggaaaaactaagagaatgaaaagtatttgcctctggaaagaacaactg

SEQ ID NO: 767914 - DNA, 120 bp, Artificial Sequence
  ENSG00000228716_31 (sequence is synthesized)
gcaggactgttgttttcattgtaagacttttggagccatttaattgtacttaaccattttcatctatttctttaataagaacaattccatcttaataaagagttacacttgttaataagt

SEQ ID NO: 767915 - DNA, 120 bp, Artificial Sequence
  ENSG00000228716_32 (sequence is synthesized)
agcagagaactcaagtaagtaccttaacataaattcaccacaagaaaatcatgtctcatagtggagatcagtatatgataaaatgaaattgtataaaaggagctattgatgaagctgctt

SEQ ID NO: 767916 - DNA, 120 bp, Artificial Sequence
  ENSG00000228716_33 (sequence is synthesized)
gttacattaaacattaaatagctcactgtggtatcagatttgcaagttatcttgaaccatcattcagtaggcccaaatataaattatacagtgtaatcaataacctgtagtttcacataa

SEQ ID NO: 767917 - DNA, 120 bp, Artificial Sequence
  ENSG00000228716_34 (sequence is synthesized)
agtcaaaacaactattttttgggacttgctaaaattaagtgatgatcccctttctggacccaaccctaaatgcaataaaatgtgaattttaggatgggctgaaatgggtcataatcttct

SEQ ID NO: 767918 - DNA, 120 bp, Artificial Sequence
  ENSG00000228727_0 (sequence is synthesized)
ggagggaccagcccgggctgcaccagtgggagtggctccacccttcccacctcagagccatggggagccagggctctggcggggtgcccttggtgcaggctccctacacagtcctgctgc

SEQ ID NO: 767919 - DNA, 120 bp, Artificial Sequence
  ENSG00000228727_1 (sequence is synthesized)
tgccgctggggacaagccgccaagacccaggggcccagagcttcttcctttggctacgcaggatgcaggctctggagagagaacaggatgccctgtggcagggtctggagctgctacagc

SEQ ID NO: 767920 - DNA, 120 bp, Artificial Sequence
  ENSG00000228727_2 (sequence is synthesized)
atggccaggcctggtttgaagaccatctgagggaggcacagcgacagcagctgcatctaggggcccttggtgagaattttctaacagatttacactcagagcctggtcgccccccgttag

SEQ ID NO: 767921 - DNA, 120 bp, Artificial Sequence
  ENSG00000228727_3 (sequence is synthesized)
tagttcctgcaccacccaggattcaaaggaaagacgaagggagcagaacttgtggcagcaacaggagttgtcaaggcagcagaaaggagtcacccagccaaaggaggagatggctcagcg

SEQ ID NO: 767922 - DNA, 120 bp, Artificial Sequence
  ENSG00000228727_4 (sequence is synthesized)
gggctgcaccaaggggccaagaggccctacccgtgtctaaaccctcctctcactcccctaagcctggtgaaagagtcagaagccccaggctcctttttctgtttcttaactcaacagcta

SEQ ID NO: 767923 - DNA, 120 bp, Artificial Sequence
  ENSG00000228727_5 (sequence is synthesized)
aaaaatggctccaggtagtgagtcaatgaagttcagacatgttggtgtaaagtttctcctctgctcctgaaaacttcatcttcttggtgtctcatgtcctcattctcccctatatgacat

SEQ ID NO: 767924 - DNA, 120 bp, Artificial Sequence
  ENSG00000228727_6 (sequence is synthesized)
gcaaaaacgatctttctttgaaatccctctgggaagaagcatgtttattgaaactgtccttcagccttaaatacaaaaataaaactgaaactgctccagaaagcagctttctccaaaaat

SEQ ID NO: 767925 - DNA, 120 bp, Artificial Sequence
  ENSG00000228727_7 (sequence is synthesized)
agacacagcctgagaccactctggagaggggagagttaatggtcagggatcatgagttggaggcagcatcgtaatgacaggatgccaccaagtgttaagttggtgttcattgttggggct

SEQ ID NO: 767926 - DNA, 120 bp, Artificial Sequence
  ENSG00000228727_8 (sequence is synthesized)
ggaggaagctggtctgcattccattcagagggatttggatcactccatggagatgagggtgtggcctggattattccaatggggcagggatggacagggaggctccatgaagagtagtga

SEQ ID NO: 767927 - DNA, 120 bp, Artificial Sequence
  ENSG00000228727_9 (sequence is synthesized)
gtactgggacgaggggatccagatgagagggatggcctgtggtgacaggaatagagtggcagacgacctcaggttttcaccatgttgtcagcctccaactcctcctctagaattttctaa

SEQ ID NO: 767928 - DNA, 83 bp, Artificial Sequence
  ENSG00000228836_0 (sequence is synthesized)
gtggggaggcgccacaacttcactgccattttgtgaggtgccgccgtctctcctccagcaaggtcaggacttcaggactatcc

SEQ ID NO: 767929 - DNA, 120 bp, Artificial Sequence
  ENSG00000228836_1 (sequence is synthesized)
tgaaactgtgtttaaacgtcccagggaatgtgacagtccttcgtatcagaaaaggcagaggatggccctgttggcaaggaaacaaggagcaggagacagccttattgcaggctctgccat

SEQ ID NO: 767930 - DNA, 120 bp, Artificial Sequence
  ENSG00000228836_2 (sequence is synthesized)
gtccaaagaaaagaagcttatgacaggacatgctattccacccagccaattggattctcagattgatgacttcactggtttcagcaaagatgggatgatgcagaaacctggtagcaatgc

SEQ ID NO: 767931 - DNA, 120 bp, Artificial Sequence
  ENSG00000228836_3 (sequence is synthesized)
acctgtgggaggaaacgttaccagcagtttctctggagatgacctagaatgcagagaaacagcctcctctcccaaaagccaacgagaaattaatgctgatataaaacgtaaattagtgaa

SEQ ID NO: 767932 - DNA, 87 bp, Artificial Sequence
  ENSG00000228836_4 (sequence is synthesized)
aaactgaaacgtatgatttgagaatacttgtccctggaggattatcacaccccaaatgcataatctcgttaatgattgaggagagaa

SEQ ID NO: 767933 - DNA, 120 bp, Artificial Sequence
  ENSG00000228836_5 (sequence is synthesized)
caccccaaatgcataatctcgttaatgattgaggagagaaaaggatcagattgctgttttctacaatggagcaggatattgctgaagtctcctggcatatgttaccgaatcaactggcct

SEQ ID NO: 767934 - DNA, 120 bp, Artificial Sequence
  ENSG00000228836_6 (sequence is synthesized)
tccagaggctaagaaatttctgttagtaaaagatgttctttttcccaaagcgttttatttgaaaggataacttgtgttttggttattttgtattcccacctgtgctggtagatattatta

SEQ ID NO: 767935 - DNA, 120 bp, Artificial Sequence
  ENSG00000228836_7 (sequence is synthesized)
acccattaggtaaatactattacagtcgtggtttctgcagcagctcacactgatgtagctggcgtttataactaccttctttcgctacccgtttcgcattccctttgccctgagatagca

SEQ ID NO: 767936 - DNA, 120 bp, Artificial Sequence
  ENSG00000228836_8 (sequence is synthesized)
tgtcagttggtcatgatgcttggcctggcaggatgactcaaaccttcattacggaagagtctgaaccattagatatcctgcctggatggggttgctgtgattttccattaactctaatcg

SEQ ID NO: 767937 - DNA, 120 bp, Artificial Sequence
  ENSG00000228927_0 (sequence is synthesized)
ggcccttcgcgcgcagtcccttagggggcgcctggaagcccggcgcatgcgccctgagggctcgctgacctaccgggtgccagagaggctgcggcagggtttctgtggcgtgggtcgggc

SEQ ID NO: 767938 - DNA, 80 bp, Artificial Sequence
  ENSG00000228927_1 (sequence is synthesized)
ctgcggcatgtgcgagtgccaaggagggcaccgccttcaggatggaggctgtacaggagggggcggccggggtggagagt

SEQ ID NO: 767939 - DNA, 120 bp, Artificial Sequence; identical to SEQ ID NO: 553818
  ENSG00000228927_2 (sequence is synthesized)

SEQ ID NO: 767940 - DNA, 120 bp, Artificial Sequence
  ENSG00000228927_3 (sequence is synthesized)
gctgagctacatggtcagcctggaggtggaagaagagaagcatcctgttcatctctgcaagatcatgttgttctttcggagtaacccctacttccagaataaagtgattaccaaggaata

SEQ ID NO: 767941 - DNA, 120 bp, Artificial Sequence
  ENSG00000228927_4 (sequence is synthesized)
gaataaagtgattaccaaggaatatctggtgaacatcacagaatacagggcttctcattccactccaattgagtggtatccggattatgaagtggaggcgtatcgccgcagacaccacaa

SEQ ID NO: 767942 - DNA, 120 bp, Artificial Sequence; identical to SEQ ID NO: 553821
  ENSG00000228927_5 (sequence is synthesized)

SEQ ID NO: 767943 - DNA, 120 bp, Artificial Sequence; identical to SEQ ID NO: 553822
  ENSG00000228927_6 (sequence is synthesized)

SEQ ID NO: 767944 - DNA, 120 bp, Artificial Sequence
  ENSG00000228927_7 (sequence is synthesized)
ggcagtactcagcatggtcttatgcacaggaactaaaggaaaaagagatcgagtcacaaaaattcaggaagagggggtaaatgtggattgtatggaatgaaaaataaacattctcaagga

SEQ ID NO: 767945 - DNA, 75 bp, Artificial Sequence; identical to SEQ ID NO: 553824
  ENSG00000228927_8 (sequence is synthesized)

SEQ ID NO: 767946 - DNA, 120 bp, Artificial Sequence; identical to SEQ ID NO: 553825
  ENSG00000228927_9 (sequence is synthesized)

SEQ ID NO: 767947 - DNA, 120 bp, Artificial Sequence; identical to SEQ ID NO: 553826
  ENSG00000228927_10 (sequence is synthesized)

SEQ ID NO: 767948 - DNA, 120 bp, Artificial Sequence; identical to SEQ ID NO: 553827
  ENSG00000228927_11 (sequence is synthesized)

SEQ ID NO: 767949 - DNA, 120 bp, Artificial Sequence; identical to SEQ ID NO: 553828
  ENSG00000228927_12 (sequence is synthesized)

SEQ ID NO: 767950 - DNA, 120 bp, Artificial Sequence; identical to SEQ ID NO: 553829
  ENSG00000228927_13 (sequence is synthesized)

SEQ ID NO: 767951 - DNA, 120 bp, Artificial Sequence; identical to SEQ ID NO: 553830
  ENSG00000228927_14 (sequence is synthesized)

SEQ ID NO: 767952 - DNA, 120 bp, Artificial Sequence
  ENSG00000229117_0 (sequence is synthesized)
acccggcgctccattaaatagccgtagacggaacttcgcctttctctcggccttagcgccatttttttggaaacctctgcgccatgagagccaagtggaggaagaagcgaatgcgcaggc

SEQ ID NO: 767953 - DNA, 120 bp, Artificial Sequence
  ENSG00000229117_1 (sequence is synthesized)
gagcagaaacatggaatgccagacgctggggatgctggtacaagttgtgggactgcatgctactgtctagagcttgtctcaatggatctagaacttcatcgccctctgatcgccgatcac

SEQ ID NO: 767954 - DNA, 69 bp, Artificial Sequence
  ENSG00000229117_2 (sequence is synthesized)
tcacctctgagacccaccttgctcataaacaaaatgcccatgttggtcctctgccctggacctgtgaca

SEQ ID NO: 767955 - DNA, 120 bp, Artificial Sequence
  ENSG00000229117_3 (sequence is synthesized)
ctctcggccttagcgccatttttttgggtgagtgttttttggttcctgcgttgggattccgtgtacaatccatagacatctgacctcggcacttagcatcatcacagcaaactaactgta

SEQ ID NO: 767956 - DNA, 120 bp, Artificial Sequence
  ENSG00000229117_4 (sequence is synthesized)
tttttatggttccatcgggtgggggttttctgtcattagagtttgccctgtcactacctgtgctatggagggtatcaaagctataaaggcaacagcccgggttacgtggtgtggtttgca

SEQ ID NO: 767957 - DNA, 120 bp, Artificial Sequence
  ENSG00000229117_5 (sequence is synthesized)
ctgcgccatgagagccaaggtgagcggttcctggtagtaagcttgggaggtaggagttggcgagtagtagcgaggagacgaaggcaagtccgccatacctcctgaactactgggtttcaa

SEQ ID NO: 767958 - DNA, 120 bp, Artificial Sequence
  ENSG00000229117_6 (sequence is synthesized)
gggtgcccaagagctggtgggagagagaaggtagtttgtgagagagctagcggttaagtgctatgggtagagagggtgggcttagaaaagggtggaattctgatcttatgttgggagggt

SEQ ID NO: 767959 - DNA, 120 bp, Artificial Sequence
  ENSG00000229117_7 (sequence is synthesized)
cccttttttttttttttttttttaattatctgctgcttgtgatcggttgctagtggaggaagaagcgaatgcgcaggctgaagcgcaaaagaagaaagatgaggcagaggtccaagtaaa

SEQ ID NO: 767960 - DNA, 120 bp, Artificial Sequence
  ENSG00000229117_8 (sequence is synthesized)
tctctcggccttagcgccatttttttggaaacctctgcgccatgagagccaaggtgagcggttcctggtagtaagcttgggagtggaggaagaagcgaatgcgcaggctgaagcgcaaaa

SEQ ID NO: 767961 - DNA, 120 bp, Artificial Sequence
  ENSG00000229183_0 (sequence is synthesized)
tcagaatgtggctcagggcagccacaatcttatcaggagcttctctgtttgggatcaggggaaccggtgactttcagaggccgataaggcgggacccaacttgtatataaggggcagctc

SEQ ID NO: 767962 - DNA, 120 bp, Artificial Sequence
  ENSG00000229183_1 (sequence is synthesized)
atgctgctgctctgcaccttcctcccatcttgccttctccctcgagttgggacccgggaagaaccatgaagtggctgctgctgctgggtctggtggcgctctctgagtgcatcatgtaca

SEQ ID NO: 767963 - DNA, 120 bp, Artificial Sequence
  ENSG00000229183_2 (sequence is synthesized)
aggtccccctcatcagaaagaagtccttgaggcgcaccctgtccgagcgtggcctgctgaaggacttcctgaagaagcacaacctcaacccagccagaaagtacttcccccagtgggagg

SEQ ID NO: 767964 - DNA, 120 bp, Artificial Sequence
  ENSG00000229183_3 (sequence is synthesized)
ctcccaccctggtagatgaacagcccctggagaactacctggatatggagtacttcggcactatcggcatcggaactcctgcccaggatttcaccgtcgtctttgacaccggctcctcca

SEQ ID NO: 767965 - DNA, 120 bp, Artificial Sequence
  ENSG00000229183_4 (sequence is synthesized)
acctgtgggtgccctcagtctactgctccagtcttgcctgcaccaaccacaaccgcttcaaccctgaggattcttccacctaccagtccaccagcgagacagtctccatcacctacggca

SEQ ID NO: 767966 - DNA, 120 bp, Artificial Sequence
  ENSG00000229183_5 (sequence is synthesized)
ccggcagcatgacaggcatcctcggatacgacactgtccaggttggaggcatctctgacaccaatcagatcttcggcctgagcgagacggaacctggctccttcctgtattatgctccct

SEQ ID NO: 767967 - DNA, 120 bp, Artificial Sequence
  ENSG00000229183_6 (sequence is synthesized)
tcgatggcatcctggggctggcctaccccagcatttcctcctccggggccacacccgtctttgacaacatctggaaccagggcctggtttctcaggacctcttctctgtctacctcagcg

SEQ ID NO: 767968 - DNA, 120 bp, Artificial Sequence
  ENSG00000229183_7 (sequence is synthesized)
aactgggtgcctgttaccgtcgagggttactggcagatcaccgtggacagcatcaccatgaacggagaggccatcgcctgcgctgagggctgccaggccattgttgacaccggcacctct

SEQ ID NO: 767969 - DNA, 120 bp, Artificial Sequence
  ENSG00000229183_8 (sequence is synthesized)
ctgctgaccggcccaaccagccccattgccaacatccagagcgacatcggagccagcgagaactcagatggcgacatggtggtcagctgctcagccatcagcagcctgcccgacatcgtc

SEQ ID NO: 767970 - DNA, 120 bp, Artificial Sequence
  ENSG00000229183_9 (sequence is synthesized)
ttcaccatcaatggagtccagtaccccgtgccacccagtgcctacatcctgcagagcgaggggagctgcatcagtggcttccagggcatgaacctccccaccgaatctggagagctttgg

SEQ ID NO: 767971 - DNA, 120 bp, Artificial Sequence
  ENSG00000229183_10 (sequence is synthesized)
atcctgggtgatgtcttcatccgccagtactttaccgtcttcgacagggcaaacaaccaggtcggcctggcccccgtggcttaagcctaagtctcttcagccacctcccaggaagatctg

SEQ ID NO: 767972 - DNA, 120 bp, Artificial Sequence
  ENSG00000229183_11 (sequence is synthesized)
gcctctgtcctgtgcccactttagatgtatctaattctcctgactgttcttcccaggggagtgtggaggtcttggccctgttccctgtcctaccaataacgtagaataaaaacataaccc

SEQ ID NO: 767973 - DNA, 120 bp, Artificial Sequence
  ENSG00000229183_12 (sequence is synthesized)
actgaaacaggttttgtggagctgcttctctttgctggtctttttccttcacattactggggttagaacgccagggcagggatgaaaatgaccacatccatttggatggcacccaacata

SEQ ID NO: 767974 - DNA, 120 bp, Artificial Sequence
  ENSG00000229183_13 (sequence is synthesized)
gtgaccccagcagctgacacttcatgatggagccaagaagacagagaggcttcgggggttgtgctggaagcatcataaaaagacctgggggtcaaaatactgggctaattgtcttctcat

SEQ ID NO: 767975 - DNA, 120 bp, Artificial Sequence
  ENSG00000229183_14 (sequence is synthesized)
tcaacctaaaaggcctgtgttcttccaaacgtagttccaccactcccccgctgtatgaccttgggcaggtggcctcacctccctcaggctcagtgtcctcatggtaagtggaaataacag

SEQ ID NO: 767976 - DNA, 120 bp, Artificial Sequence
  ENSG00000229183_15 (sequence is synthesized)
tgacagtgcccactgcataggcactggcctaagaggaaaagaaaccacattagtcacaccgcaggacagccctagaaagtgcccaatcaagggtagccctgaggaggcaacagcagatgg

SEQ ID NO: 767977 - DNA, 120 bp, Artificial Sequence
  ENSG00000229183_16 (sequence is synthesized)
tcacacaaatggacgaacaaaaaaattcatgtcttctcccctcactttccacagcgatgaccagagtggcagcgtggtgatctttggtggcattgactcttcttactacactggaagtct

SEQ ID NO: 767978 - DNA, 120 bp, Artificial Sequence
  ENSG00000229183_17 (sequence is synthesized)
gaactgggtgcctgttaccgtcgagggttactggcagatcaccgtggacaggtgagactgccatgaacgggcagcatccaggcctgggccccagatcccatttccttatggattcatagc

SEQ ID NO: 767979 - DNA, 120 bp, Artificial Sequence
  ENSG00000229183_18 (sequence is synthesized)
caatcagctttccagaatccccccaggaacagctggcacaggggaacacactccagggggaaggtggaagttggccaagccagagacccctagaaagacacctccctgcaggaggaggga

SEQ ID NO: 767980 - DNA, 120 bp, Artificial Sequence
  ENSG00000229183_19 (sequence is synthesized)
agagctgtctaggaagccaagactctgcaagggtgagatagccactgtcctcctagtcacggaggcaggaccatccaccagcatccctggggagagctgggggacccacctgtccacgca

SEQ ID NO: 767981 - DNA, 120 bp, Artificial Sequence
  ENSG00000229183_20 (sequence is synthesized)
tctgacaatttaaggggccggtgaaccagcacacgctcctgccactcgaggaaacatgtcactttccgtctagaagtggggcaaaatggctaagaaattgtgtgaagtcacttcattcca

SEQ ID NO: 767982 - DNA, 120 bp, Artificial Sequence
  ENSG00000229183_21 (sequence is synthesized)
ccctccccttcagggcctccccggtctcccttgcagcttcatttccacgctcttcttccccagctagcctgctagcgtgctcagtggtgtgggttttcccaagaatgaacaatttcccag

SEQ ID NO: 767983 - DNA, 120 bp, Artificial Sequence
  ENSG00000229183_22 (sequence is synthesized)
gacagagactttcagtactaaaactgggaccagcccaggcaaaccaggacacatggatcacctcatgtctgcccagccatgctagaatttcaccagttcctccaacacctgccccagccc

SEQ ID NO: 767984 - DNA, 120 bp, Artificial Sequence
  ENSG00000229183_23 (sequence is synthesized)
tctggtctctgtacctccccgcataccatcccctgatgatgtcctccttctctcttcacctgcctggcattccagggtgtctgttcccctggctgctcccctccaccacctctcaccctg

SEQ ID NO: 767985 - DNA, 120 bp, Artificial Sequence
  ENSG00000229183_24 (sequence is synthesized)
gaccctgtttttgttccctgcctcatgcctgactgatcatcttgcccttctgccaacataacttatcttgccagctaggcagggagctccctgcagcctggaactgtgaggctgtcttgt

SEQ ID NO: 767986 - DNA, 120 bp, Artificial Sequence
  ENSG00000229183_25 (sequence is synthesized)
ttcacttggcatttcccatgcctggcagagagtaggcacttgggaaatatttgttgggcaaatgaatgcgggacgaatgagtgcgtgaacgagaggaacagaaatttcacgcattggcca

SEQ ID NO: 767987 - DNA, 120 bp, Artificial Sequence
  ENSG00000229183_26 (sequence is synthesized)
atggatgggtggggaagaaatgtctgggctcacctcctagttcctccttggagagaagtacccctgagagctcagggagcttaacttgcttcttgccctcagcatcaccatgaacggaga

SEQ ID NO: 767988 - DNA, 120 bp, Artificial Sequence
  ENSG00000229183_27 (sequence is synthesized)
ttctaacttttctcaccctcactctttccagatggtggtcagctgctcagccatcagcagcctgcccgacatcgtcttcaccatcaatggagtccagtaccccgtgccacccagtgccta

SEQ ID NO: 767989 - DNA, 120 bp, Artificial Sequence
  ENSG00000229183_28 (sequence is synthesized)
catcctgcaggtgaggaggctctggaccatccactagaggggttcacacagaatgtggacacagagttcccctctgcagacggaaagtacacttccacgagctgaagccagcaggcagag

SEQ ID NO: 767990 - DNA, 120 bp, Artificial Sequence
  ENSG00000229183_29 (sequence is synthesized)
gcagacgaacatctgccctagacagcctccagagaaaaagaatatattaaaaacaaatgcaggaataagaactcggatacagccccctaagggaacaagtgaagcaaaggttaatggagt

SEQ ID NO: 767991 - DNA, 120 bp, Artificial Sequence
  ENSG00000229183_30 (sequence is synthesized)
gaaaagaggattctatttggacccctgggtccaagtcctgggtctgaattactagcccattgattctgagcaagctacagctcatctcaccctcagttttctcatccaaaaagtagagat

SEQ ID NO: 767992 - DNA, 120 bp, Artificial Sequence
  ENSG00000229183_31 (sequence is synthesized)
ggcagctttccccaccctcagagtgcggttaggtcaaccaagtgagactgatcacatcagagctaccaagggttgggcaaatggaaatcctaatttccataggctggggcttctgacact

SEQ ID NO: 767993 - DNA, 120 bp, Artificial Sequence
  ENSG00000229183_32 (sequence is synthesized)
tctaccatctctaccaagtagcaaatctttagctatacgagccacaagaaaactctttcccttctgttatcataacgtcaggtggaaaactaattttgccagtggactcatgttactcaa

SEQ ID NO: 767994 - DNA, 120 bp, Artificial Sequence
  ENSG00000229183_33 (sequence is synthesized)
caagaagcactgatgcctgggctcccccactgattctgattacattaggagagggcaaggcctgagcaatgggatggggctgcgggggttcaaagctccccaggtgatgtgcagacaagg

SEQ ID NO: 767995 - DNA, 120 bp, Artificial Sequence
  ENSG00000229183_34 (sequence is synthesized)
tcgcagcccagtgacttagtgaggcaagagggctaatagctcatctggtttgcctctgaccggatcagaataataatgagaaaaggctatggcggcagggttttcaaactccttcctagc

SEQ ID NO: 767996 - DNA, 120 bp, Artificial Sequence
  ENSG00000229183_35 (sequence is synthesized)
agctgaattctccctaagccccttagcaccaatgctgatgtcagggttcgtgtgcctgccagaaacaccagataatgtccagtaatgcgtagaaaccagtcgttcagtggacggcttcta

SEQ ID NO: 767997 - DNA, 120 bp, Artificial Sequence
  ENSG00000229183_36 (sequence is synthesized)
caggccgactccaggccaagaacagccgagtccctggacactgagccaggaagctcctccttgcacgtgccttacagctggaccagggcgccctggatgtttatcacccagcgcctatca

SEQ ID NO: 767998 - DNA, 120 bp, Artificial Sequence
  ENSG00000229183_37 (sequence is synthesized)
cccacgggcttcaaacagttcccacctcaagcctgctggagccactcaacaggcatttattgagcacctactacgtgccaagcactgggctcaggtgctccagggggtaaagggatgagt

SEQ ID NO: 767999 - DNA, 120 bp, Artificial Sequence
  ENSG00000229183_38 (sequence is synthesized)
tgcaggctgccgctgcatccccccatcaggcacccccaaaataagcttattccagcaagatgagtcttggtgatcacagaagtaacctgattgggggtgcggggtgggggagaagcagca

SEQ ID NO: 768000 - DNA, 120 bp, Artificial Sequence
  ENSG00000229183_39 (sequence is synthesized)
gagatgtcacagacattgctagctcgggtggcagtgagtaaaagggtggggtgccaggagccataacccagactcagctccacccaagcagaatgttatggagtgtggggagagtcagta

SEQ ID NO: 768001 - DNA, 120 bp, Artificial Sequence
  ENSG00000229183_40 (sequence is synthesized)
ggtcttggaggacgggcctgggctctgtggctccaggcagtgacccagagtctgccccctagatgtcagtggcccagggcaggcaggaaagctcacagtcagagttcattcattcattcg

SEQ ID NO: 768002 - DNA, 120 bp, Artificial Sequence
  ENSG00000229183_41 (sequence is synthesized)
ttcactcgttcatgcaatgttaatttctctgagcgcctcattctatttcagggcctgtgctgggctcagggggagacagcagtgagcaaactcatagcctaggagacaaacacagtcatc

SEQ ID NO: 768003 - DNA, 120 bp, Artificial Sequence
  ENSG00000229292_0 (sequence is synthesized)
agctggaggccaggggagaaactccagaaggagagacatttgccatggctgagcacttcaaacagatcattagatgtcctgtctgtctaaaagatcttgaagaagccgtgcaactgaaat

SEQ ID NO: 768004 - DNA, 120 bp, Artificial Sequence
  ENSG00000229292_1 (sequence is synthesized)
gtggatatgcctgctgcctccagtgcctcaattcactccagaaggagcccgatggggaaggtttactgtgccgtttctgctctgtggtctctcagaaggatgacatcaagcccaagtaca

SEQ ID NO: 768005 - DNA, 120 bp, Artificial Sequence
  ENSG00000229292_2 (sequence is synthesized)
agctgagggcgctggtttccatcatcaaggaactagagcccaagctgaaatctgttctaacaatgaacccaaggatgaggaagtttcaagtggatatgaccttcgatgtggacacagcca

SEQ ID NO: 768006 - DNA, 120 bp, Artificial Sequence; identical to SEQ ID NO: 765529
  ENSG00000229292_3 (sequence is synthesized)

SEQ ID NO: 768007 - DNA, 120 bp, Artificial Sequence
  ENSG00000229292_4 (sequence is synthesized)
aaggaatctgtcaaccgacaggggaagattgagctttcttcagaacacggcttcttgactgtgggttgcagagaaggaaaggtctttgctgccagcactgtgcctatgactcctctctgg

SEQ ID NO: 768008 - DNA, 120 bp, Artificial Sequence
  ENSG00000229292_5 (sequence is synthesized)
gtgagtccccagttgcacagagtggggattttcctggatgtaggtatgaggtccattgccttttacaatgttagtgatgggtgccatatcaacacattcatcgagattcctgtttgcgag

SEQ ID NO: 768009 - DNA, 120 bp, Artificial Sequence
  ENSG00000229292_6 (sequence is synthesized)
ccctggcgtccattttttgctcataaacgtggaagtcaagatgatcagagcatcctgagtatctgttctgtgatcaatccatccactgccagtgccccagtttcttctgagggaaagtaa

SEQ ID NO: 768010 - DNA, 120 bp, Artificial Sequence
  ENSG00000229314_0 (sequence is synthesized)
gcccatagtttattataaaggtgactgcaccctgcagccaccagcactgcctggctccacgtgcctcctggtctcagtatggcgctgtcctgggttcttacagtcctgagcctcctacct

SEQ ID NO: 768011 - DNA, 120 bp, Artificial Sequence
  ENSG00000229314_1 (sequence is synthesized)
ctgctggaagcccagatcccattgtgtgccaacctagtaccggtgcccatcaccaacgccaccctggaccggatcactggcaagtggttttatatcgcatcggcctttcgaaacgaggag

SEQ ID NO: 768012 - DNA, 120 bp, Artificial Sequence
  ENSG00000229314_2 (sequence is synthesized)
tacaataagtcggttcaggagatccaagcaaccttcttttacttcacccccaacaagacagaggacacgatctttctcagagagtaccagacccgacaggaccagtgcatctataacacc

SEQ ID NO: 768013 - DNA, 120 bp, Artificial Sequence
  ENSG00000229314_3 (sequence is synthesized)
tcagggacaccaagacctacatgcttgcttttgacgtgaacgatgagaagaactgggggctgtctgtctatgctgacaagccagagacgaccaaggagcaactgggagagttctacgaag

SEQ ID NO: 768014 - DNA, 120 bp, Artificial Sequence
  ENSG00000229314_4 (sequence is synthesized)
ctctcgactgcttgcgcattcccaagtcagatgtcgtgtacaccgattggaaaaaggataagtgtgagccactggagaagcagcacgagaaggagaggaaacaggaggagggggaatcct

SEQ ID NO: 768015 - DNA, 120 bp, Artificial Sequence
  ENSG00000229314_5 (sequence is synthesized)
agcaggacacagccttggatcaggacagagacttgggggccatcctgcccctccaacccgacatgtgtacctcagctttttccctcacttgcatcaataaagcttctgtgtttggaacag

SEQ ID NO: 768016 - DNA, 120 bp, Artificial Sequence
  ENSG00000229314_6 (sequence is synthesized)
gtgtacaccgattggaaaaaggtaaacgcaagggattggacagtgcccaccttgtccatggcccaacttgggcagccccagaggcccagagcaggagagctgccaggcaaggctgcacag

SEQ ID NO: 768017 - DNA, 120 bp, Artificial Sequence
  ENSG00000229415_0 (sequence is synthesized)
gggagctgtgggcaggagaggaaggaaagcagctctctcagctagcgagggggtcagggactgggccaagctcagaagcggggagaagagcgagacagagatgctctgagcaggggagac

SEQ ID NO: 768018 - DNA, 120 bp, Artificial Sequence
  ENSG00000229415_1 (sequence is synthesized)
agggatcccgggctgctgccgctaccaacaagggtacacactgcggtcctcaaggccaggaggggggtgggggcagggaatgcctcagccaacagggcagcggctcggccctgctgctgg

SEQ ID NO: 768019 - DNA, 120 bp, Artificial Sequence
  ENSG00000229415_2 (sequence is synthesized)
cccggtgggaagtagcctggggccccgcgactgaaatccgagccaggcctgggcagtctccgctagaaacgctctgggcgcgcactcctggagacgcggaggcccgggcgctccagacca

SEQ ID NO: 768020 - DNA, 120 bp, Artificial Sequence
  ENSG00000229415_3 (sequence is synthesized)
gtgtccttgtaggaggcttcttcacgaagcttagagtttggcctttcatagggaaagacttgctcgggagcaagtctaagggattttaagggattttaaatcttcctgggccagggctag

SEQ ID NO: 768021 - DNA, 120 bp, Artificial Sequence
  ENSG00000229415_4 (sequence is synthesized)
ggagctctagtgacagtgtcttggtctggaatccaactctccaattttgaggccgcagggaggaattctgagactttagaggccgcacagccttcagcgcgctcaccgcgtccaggcgtc

SEQ ID NO: 768022 - DNA, 120 bp, Artificial Sequence
  ENSG00000229415_5 (sequence is synthesized)
agtgaggggctatctcgaggcgcgagtgcacaaaaggtagcgcgagtctcttctcaggcgatccagataagaggaaatgagagccgggttttctgacttccaactcattagggaccaggt

SEQ ID NO: 768023 - DNA, 120 bp, Artificial Sequence
  ENSG00000229415_6 (sequence is synthesized)
ctgagggagagggaaaagcggatacccacctgtgtcgctgtttgcgtgccaagtccaggaacagtccatacagccctgctgcatcccacgacgctgtcacaaagcaggagttcatccgag

SEQ ID NO: 768024 - DNA, 120 bp, Artificial Sequence
  ENSG00000229415_7 (sequence is synthesized)
gccaagatgttaattattcatactgcatgactgaggattttggaggcagagagagattcatctgcaatatttggaacaccaatggaggtctacgtcaacacagaatttatacagcagctg

SEQ ID NO: 768025 - DNA, 120 bp, Artificial Sequence
  ENSG00000229415_8 (sequence is synthesized)
gtgctagtcagagctaatgacagaatttcagtttaataaaaagacccccaactgagcacaccatcttgaaaaaagtatacttatcaaacagctttcaatcagttcaagagagacacctta

SEQ ID NO: 768026 - DNA, 120 bp, Artificial Sequence
  ENSG00000229415_9 (sequence is synthesized)
attggggagaggaagaattgcagagtagtttgtaatcatgccaattccagatcaataactgcatgtctgttctttggtagaaatagcttttgctttatattaagtaatcacatatatatt

SEQ ID NO: 768027 - DNA, 120 bp, Artificial Sequence
  ENSG00000229415_10 (sequence is synthesized)
ctctctatttggataaggaaaccttcgctttatttgacaatgtataatgatatactcttctaattcacctctgtgtcttcacaataaacatgagtaaaatttagacaagtgatggtaaag

SEQ ID NO: 768028 - DNA, 120 bp, Artificial Sequence
  ENSG00000229415_11 (sequence is synthesized)
attatcaggatttgaaaacccagtatcagaatctaccactttgtatggagaaactgaggcccagaaattgatgtccagaatgctttgctcttagccactgtactattatggcatatttta

SEQ ID NO: 768029 - DNA, 120 bp, Artificial Sequence
  ENSG00000229415_12 (sequence is synthesized)
tctttatgtattgcatcatttcatggattcaagtttatcaatgtcctttgacaagtttaaaaatctgtctgctaaaatctatccaatacattaaggaaaagtcccacttggcacatctcc

SEQ ID NO: 768030 - DNA, 120 bp, Artificial Sequence
  ENSG00000229415_13 (sequence is synthesized)
agccttgcctcaggtccccgacgaatcctgcccttaatctgtgggggtggtaggtggcactggtttgaagagcttactggatctccctcagtgctgggctcccctgtgggcctcgtctgc

SEQ ID NO: 768031 - DNA, 120 bp, Artificial Sequence
  ENSG00000229415_14 (sequence is synthesized)
aaaactcatctttatttgccttcttcccactgaagaacaggcctgagggagagggaaaagcggatacccacctgtgtcgctgtttgcgtgccaagtccaggaacagtccatacagccctg

SEQ ID NO: 768032 - DNA, 120 bp, Artificial Sequence
  ENSG00000229415_15 (sequence is synthesized)
agtagggacgctgactttgttcttgggcagattctcttcctgtggagtatccagcctgtttgcctagttttcctgttcttctggggtctgatctctatctgttttactgcagtccagtta

SEQ ID NO: 768033 - DNA, 120 bp, Artificial Sequence
  ENSG00000229415_16 (sequence is synthesized)
ccaaagtggtataagtaaaattgaaagaattctaaataccttttccccccacgttagctgcctcacgttaatgtggtcttacggtctgcaaataagtgttttgatgatttggcgactgca

SEQ ID NO: 768034 - DNA, 120 bp, Artificial Sequence
  ENSG00000229415_17 (sequence is synthesized)
gttacccatactagctctcctaccactcactactgacagttaattattatcgaatatccacccacccagggtgagttataagttataccaggtgttttggttaataatactaatgcaatt

SEQ ID NO: 768035 - DNA, 120 bp, Artificial Sequence
  ENSG00000229415_18 (sequence is synthesized)
ataccaggtgttttggttaataatactaatgcaattaatttactgtttactctctcatcttaaagtaatcagctggtaaaataagattgattgggttggccaggtgcggtggctcacgcc

SEQ ID NO: 768036 - DNA, 120 bp, Artificial Sequence
  ENSG00000229415_19 (sequence is synthesized)
cagggactgggccaagctcagaagcggggagaagagcgagacagagatgctctgagcaggggagacagggatcccgggctgctgccgctaccaacaaggggaggaattctgagactttag

SEQ ID NO: 768037 - DNA, 120 bp, Artificial Sequence
  ENSG00000229415_20 (sequence is synthesized)
tattaaaagtaccccatggatggacctccaaatgagtttagggtaattgcgcttaaaatattaggaccaaagtacatttattttatagatggaggaggggaggagacgagtggggaccag

SEQ ID NO: 768038 - DNA, 120 bp, Artificial Sequence
  ENSG00000229415_21 (sequence is synthesized)
cttgacatccagtcttcacctggacatatggaaagaacaaatgtgcgatctgctcgttccctctgaaggtctctgttacgtatttcctcctctcctccagagcataataaccaatgactg

SEQ ID NO: 768039 - DNA, 120 bp, Artificial Sequence
  ENSG00000229415_22 (sequence is synthesized)
ctctcagaaaggtactgtgaccaccacttgcttggctctccaacttcctcccccatttccctcttgactcctgtttgccataacaccttctgtcccctagccttgcctcaggtccccgac

SEQ ID NO: 768040 - DNA, 120 bp, Artificial Sequence
  ENSG00000229415_23 (sequence is synthesized)
gaatcctgcccttaatctgtgggggtggtaggtggcactggtttgaagagcttactggatctccctcagtgagtcagcctggagttgtgtttgaaaaccacaggccctgactgtggctgt

SEQ ID NO: 768041 - DNA, 120 bp, Artificial Sequence
  ENSG00000229415_24 (sequence is synthesized)
cagacctcccagacaccacctgctgctgcctatcatcatcttcaggtgctgggctcccctgtgggcctcgtctgcccgccctctgctgcagctgtcccatgggcgcccgccctctctgac

SEQ ID NO: 768042 - DNA, 120 bp, Artificial Sequence
  ENSG00000229415_25 (sequence is synthesized)
accacaagagagcccatctagattccaggaaaaaactcatctttatttgccttcttcccactgaaggtaaaagcaacattaataaccacaacaaatacttagtgagtgcttactattatt

SEQ ID NO: 768043 - DNA, 120 bp, Artificial Sequence
  ENSG00000229415_26 (sequence is synthesized)
catttaattgttggcccttccatccctggccatgatgagagacatgccatagcttactcctaaagagacctgaggacacacgtgcacaaacatattgggcatatcatcaatggcatcaaa

SEQ ID NO: 768044 - DNA, 120 bp, Artificial Sequence
  ENSG00000229453_0 (sequence is synthesized)
atgaaggggatctgctcagacgccatccttgttctagctacctccatgtggatggcctttgcaattgacttcccccttcctatggcctctgaaagaggtcagctagacaaaacaatagtt

SEQ ID NO: 768045 - DNA, 120 bp, Artificial Sequence
  ENSG00000229453_1 (sequence is synthesized)
tacagtagtgactgccatctgtgctccaaaattctatttgaagggcttaacataactaaactgtatgatggacaatgtgaaaactcttgaacgtacgacaaagaattataaaacctactg

SEQ ID NO: 768046 - DNA, 120 bp, Artificial Sequence
  ENSG00000229453_2 (sequence is synthesized)
aatctccagattgccaagtgaaacacaatggttgcctcttcaaatatatcccctttaattactaatggttggatcaaactcgttgatttatgtcttcaataaatgattcttagcagaaaa

SEQ ID NO: 768047 - DNA, 120 bp, Artificial Sequence
  ENSG00000229474_0 (sequence is synthesized)
gaaaggacagcaacagtcaggtggtttaccttccagaggctggcaatgctgtttcactggaggacacggctaagaaggaagtccaccagcctgccaagatgaattgccttgaagggccag

SEQ ID NO: 768048 - DNA, 120 bp, Artificial Sequence
  ENSG00000229474_1 (sequence is synthesized)
gtaagacctgtggccccttggcttctgaggaggagctggtgtctgcctgccagttggaaaaagaagaagagaatgaaggggaggaggaggaagaggaggaggacgaggaggatctggacc

SEQ ID NO: 768049 - DNA, 120 bp, Artificial Sequence
  ENSG00000229474_2 (sequence is synthesized)
cagatctggacccagacctagaggaggaagagaatgatcttggggatccagctgtacttggtgctgtccacaacacccagagagctctgcttagctcccctggagtcaaggcccctggta

SEQ ID NO: 768050 - DNA, 120 bp, Artificial Sequence
  ENSG00000229474_3 (sequence is synthesized)
tgctgggaatgtcacttgcctccttgcattttctgtggcagaccttggactacctgtcgcccatccctttctggcctacatttcccagcaccagctctccagcacagcactttggacctc

SEQ ID NO: 768051 - DNA, 120 bp, Artificial Sequence
  ENSG00000229474_4 (sequence is synthesized)
ggctgccctcaccagacccaactctcttctgcagcctgctgacctcgtggccccctaggttcagtcatctgacccagctccaccctcggcaccaacgaatcttgcagcagcagcagcata

SEQ ID NO: 768052 - DNA, 120 bp, Artificial Sequence
  ENSG00000229474_5 (sequence is synthesized)
gtcaaacaccaagtcccccagccaagaagccttggtctcagcagccagacccctatgctaacctcatgaccagaaaagagaaggactgggtgataaaagtgcagatggtgcagctgcaga

SEQ ID NO: 768053 - DNA, 120 bp, Artificial Sequence
  ENSG00000229474_6 (sequence is synthesized)
gtgcaaaaccccgcctggatgactactattaccaggaatattaccagaagctagagaagaagcaggcagacgaagagctacttggacgaagaaaccgggttgagtccctcaagctggtaa

SEQ ID NO: 768054 - DNA, 120 bp, Artificial Sequence
  ENSG00000229474_7 (sequence is synthesized)
cgccttacattccgaaggcagaggcttatgagtccgtggtccgaatcgagggttccctgggccaggtagctgtgtcgacatgcttcagccctcgccgagctattgatgcggtaccccatg

SEQ ID NO: 768055 - DNA, 120 bp, Artificial Sequence
  ENSG00000229474_8 (sequence is synthesized)
gcagtcagaggcttcgggtattataccggattgagaagatgttccttcagttactagaaatagaggaaggctggaagtataggcctccaccgccctgcttttctgagcagcaaagcaacc

SEQ ID NO: 768056 - DNA, 120 bp, Artificial Sequence
  ENSG00000229474_9 (sequence is synthesized)
aggttgagaagctcttccagaccttaaagacccaggagcagaacaacctggaagaggcagcagatggcttcctgcaggtgctctctgtgaggaaggggaaggccctggtggcccggctgc

SEQ ID NO: 768057 - DNA, 120 bp, Artificial Sequence
  ENSG00000229474_10 (sequence is synthesized)
tccccttcctgccccaggatcaggctgttaccattcttttggctatcacccaccatctgcccctcctggtccggagggatgtggctgatcaggccctacaaatgttattcaaacctctgg

SEQ ID NO: 768058 - DNA, 120 bp, Artificial Sequence
  ENSG00000229474_11 (sequence is synthesized)
gcaaatgtattagtcacttgaccctccacgaactcctccaaggacttcagggattaacgctgttgccacctggctcctcagagcggccagtcaccgtggtgcttcagaatcagtttggaa

SEQ ID NO: 768059 - DNA, 120 bp, Artificial Sequence
  ENSG00000229474_12 (sequence is synthesized)
tatctttgctctatgccctgctgagccatggggagcaactggtatcgctgcattcttccctagaggaacccaacagtgaccatacagcttggacagacatggtggttctgattgcctggg

SEQ ID NO: 768060 - DNA, 120 bp, Artificial Sequence
  ENSG00000229474_13 (sequence is synthesized)
agatagcccaaatgcctacagcctctctggcagaacccctagctttccccagcaacctacttcccctgttctgtcaccacgtggacaaacaattggttcagcagctggaggccaggatgg

SEQ ID NO: 768061 - DNA, 120 bp, Artificial Sequence
  ENSG00000229474_14 (sequence is synthesized)
agtttgcctggatttactgatctgtttgttctggaatacgtgtatgtgggaagttgaatcatcagacactagctacatagactatgtttacagggatccagagagtctgaagacatttct

SEQ ID NO: 768062 - DNA, 120 bp, Artificial Sequence
  ENSG00000229474_15 (sequence is synthesized)
tatgcctttatatattggagaacccttccccattttcatatcctttcttcaaaaatctaaatgatgtgcctaaaaataagacatggcataataaggtataattaaagagataatagaatg

SEQ ID NO: 768063 - DNA, 120 bp, Artificial Sequence
  ENSG00000229474_16 (sequence is synthesized)
gaaaggacagcaacagtcaggtggtttaccttccagaggctggcaatgctgtttcactggaggacacggctaagaaggaagtccaccagcctgccaagatgaattgccttgaaggagagg

SEQ ID NO: 768064 - DNA, 120 bp, Artificial Sequence
  ENSG00000229474_17 (sequence is synthesized)
gagagggatcctggcccagctgactttgaatctgagggagggccaagctgccactgccctggatgttggaacacctggtcttgctgcttcctcccaccacctcaaaaacacagaccttgg

SEQ ID NO: 768065 - DNA, 120 bp, Artificial Sequence
  ENSG00000229474_18 (sequence is synthesized)
gtacatcggcgccctccgatctggggtgcgcgccccagcttgggacaccgggcgctcattctaggacttcaggctggaggcacattaaggctgccccctcgctttgcagactggccccag

SEQ ID NO: 768066 - DNA, 120 bp, Artificial Sequence
  ENSG00000229474_19 (sequence is synthesized)
agatgctaagtgacttgctaatggtgccccagccagttaactgctcggacctgcatttttcattcgagaaaacggaaacccagaagattaagatctttgaatgctacctagcagaaggag

SEQ ID NO: 768067 - DNA, 120 bp, Artificial Sequence
  ENSG00000229474_20 (sequence is synthesized)
aacttctgtttataactacagcttgggaattccctgcagggtttctccattctctgggtttaccttccagaggctggcaatgctgtttcactggaggacacggctaagaaggaagtccac

SEQ ID NO: 768068 - DNA, 120 bp, Artificial Sequence
  ENSG00000229474_21 (sequence is synthesized)
cagcctgccaagatgaattgccttgaaggtatcaacaagtgggccgtgatgttatataaaatgccccagcatgcagaggttgctggtctgtttcacatatgggattggatgtccagagtc

SEQ ID NO: 768069 - DNA, 120 bp, Artificial Sequence
  ENSG00000229474_22 (sequence is synthesized)
actggaagttattccaaattcttccacttgctaattatatcataatgggtgactgaaaggtcactcttctgggctttatttttctcaccaacctagtaaaattatcaacaacaacccagg

SEQ ID NO: 768070 - DNA, 120 bp, Artificial Sequence
  ENSG00000229474_23 (sequence is synthesized)
acagcctcatattactgttaaatgaacatatgcacgtaaagtatatggcacacagtagggttaaattgcagtgagtcagggcaggtggaacttgttcaaagaggcaatagaaagggcgtt

SEQ ID NO: 768071 - DNA, 120 bp, Artificial Sequence
  ENSG00000229474_24 (sequence is synthesized)
gggtggggcagagcagatggaaaaggctgtgctagaacttaatgaaggaattgaagaggggatgtgaaagtgaaggtgtttggtatctgccgggttccttttgtttgctttttaaatttt

SEQ ID NO: 768072 - DNA, 90 bp, Artificial Sequence
  ENSG00000229474_25 (sequence is synthesized)
ctcaaactcctgggcccaaatgatcttcccgccttgagccaccacacctggctcaggttccatttgacttactgggggatggttcggggc

SEQ ID NO: 768073 - DNA, 120 bp, Artificial Sequence
  ENSG00000229474_26 (sequence is synthesized)
gagttaaacccacagaacaggaggcgttatgttcaaaggtggtgctggagatggcttatgaacagaagtgctattgagtagcagcctctctagacaagactcacagctgagccccatctt

SEQ ID NO: 768074 - DNA, 120 bp, Artificial Sequence
  ENSG00000229474_27 (sequence is synthesized)
ccatggcagaagggaatgggagagggttgtcctgaactgtctgtggctcacaggctgtcactaaacattcctcttctcttttctacccttttctaagacaagttctggattaacactttc

SEQ ID NO: 768075 - DNA, 120 bp, Artificial Sequence
  ENSG00000229474_28 (sequence is synthesized)
tttttaagccttgaacttgagttagggactctctccttccctctttctcctgtctcccacttcatttctgatgctgttctcgccttaaaaccaggtcctagcagagctgtgcatcgccca

SEQ ID NO: 768076 - DNA, 120 bp, Artificial Sequence
  ENSG00000229474_29 (sequence is synthesized)
caggcggtggccctgctactagcgttaaaggtgagtcacgtttgcctgatcctgggcccctctgtctcagtagtccattcctggtatttattcccctggatcccataactagtggagaag

SEQ ID NO: 768077 - DNA, 120 bp, Artificial Sequence
  ENSG00000229474_30 (sequence is synthesized)
gacaaggactcctatgtagatatgaggtgatttcagaacttccttcaacctactactaaggtacagtagtccatggtttcactttctgccatttcagttacccttggtcaactatagtct

SEQ ID NO: 768078 - DNA, 79 bp, Artificial Sequence
  ENSG00000229474_31 (sequence is synthesized)
ctgttctatttttattgttcatttcttattgtgtctaattcttaaattaaactggccaggggcagtggcttatgtctgt

SEQ ID NO: 768079 - DNA, 85 bp, Artificial Sequence
  ENSG00000229474_32 (sequence is synthesized)
actgttctatttttattgttcatttcttattgtgtctaattcttaaattaaactggccaggggcagttgctagaggccaggactt

SEQ ID NO: 768080 - DNA, 120 bp, Artificial Sequence
  ENSG00000229474_33 (sequence is synthesized)
ctggtgatgtcggttgggaagtacttctcttcctgcttctagcctgtgcctcatttctgtccctttgtgggacagctccctagagccgagctgggagggtgggtgtttatggcagtctga

SEQ ID NO: 768081 - DNA, 120 bp, Artificial Sequence
  ENSG00000229474_34 (sequence is synthesized)
gaccccagggtctctctcctcaagaccatggccaagaattctctaaccatcttgctgggaggattccatggctgttttagggtgccatgtcatccttactgactgaggatggtgcctctt

SEQ ID NO: 768082 - DNA, 120 bp, Artificial Sequence
  ENSG00000229474_35 (sequence is synthesized)
ggcctctttcttgtctcaggtttaccttccagaggctggcaatgctgtttcactggaggacacggctaagaaggaagtccaccagcctgccaagatgaattgccttgaagagagctctgc

SEQ ID NO: 768083 - DNA, 120 bp, Artificial Sequence
  ENSG00000229474_36 (sequence is synthesized)
caagtactgaggaagaggttggatagagaaagtagtagcagtgttgtagctgttctgctttttttctatagtgccctagagtttcggtttcttctaggaggcagtataacatagtaccta

SEQ ID NO: 768084 - DNA, 120 bp, Artificial Sequence
  ENSG00000229474_37 (sequence is synthesized)
aggggacaagctttagattttaaaaagacctacgtttgaattctggctgtatcacttactagcaatataactttagggcaagttctttcacttctcacttctcttagtttgtttctttat

SEQ ID NO: 768085 - DNA, 120 bp, Artificial Sequence
  ENSG00000229474_38 (sequence is synthesized)
ctacaaactagggatgatggtattaacccctcatagttcttaagattaaataggaagggaaatgtgtaaagcactaagcattgcttggcacgtaccaaacatgcaaatgttacctctgaa

SEQ ID NO: 768086 - DNA, 120 bp, Artificial Sequence
  ENSG00000229474_39 (sequence is synthesized)
tagtagtaacggaaagataataagaaaccttggccctgagtctgtttcttaagcaaatctatttgcttatatttatatttatgctctctaggacagacatggtggttctgattgcctggg

SEQ ID NO: 768087 - DNA, 120 bp, Artificial Sequence
  ENSG00000229544_0 (sequence is synthesized)
ggaaagctaccgccaagccacagccgaaggcaagcccgagcggcgccatccccaaccccgcgccgccgaccgccggcccgtgggcgacgggcatgctggcatggcaggacggcggggcca

SEQ ID NO: 768088 - DNA, 120 bp, Artificial Sequence
  ENSG00000229544_1 (sequence is synthesized)
aggcggctccctcccaccacaagatttctttctctgtcctggacatcctggacccacagaaattcacccgcgcagcgctccctgccgtgcgcccggctccccgggaagccaggaaaagtt

SEQ ID NO: 768089 - DNA, 120 bp, Artificial Sequence
  ENSG00000229544_2 (sequence is synthesized)
tggcggaggtcgaagcggggaaagatgccagctccagggaccctgtccgacagctggagacccctgatgctgcgggcccaggcgccggccaggcgtcccccctggagggttccgaggcgg

SEQ ID NO: 768090 - DNA, 120 bp, Artificial Sequence
  ENSG00000229544_3 (sequence is synthesized)
aagaggaggaggatgcggaggatccgaggaggccgcggctgcgggagcgggctgcgcgcttgctgccgggcctagcgcgctcacctgacgccccggccggggcattggcgtctggggagc

SEQ ID NO: 768091 - DNA, 120 bp, Artificial Sequence
  ENSG00000229544_4 (sequence is synthesized)
tcccccccgggatcccccggctccccgcgtcccaggcgccggcgcctggagcccaactgcgccaagccgcggcgcgcgcgcaccgccttcacctacgagcagctggtggccttggagaac

SEQ ID NO: 768092 - DNA, 120 bp, Artificial Sequence
  ENSG00000229544_5 (sequence is synthesized)
tcacctacgagcagctggtggccttggagaacaagttccgggccacgcgctacctgtcagtgtgcgagcgcctgaacctcgcgctgtctctcagcctcaccgagacgcaggtcaaaatct

SEQ ID NO: 768093 - DNA, 120 bp, Artificial Sequence
  ENSG00000229544_6 (sequence is synthesized)
caaaatctggttccagaatcgcaggaccaagtggaagaagcagaacccgggtgccgacggcgcggcgcaggtggggggtggcgcgccccagccaggggcggcggggggcggcggcggcgg

SEQ ID NO: 768094 - DNA, 120 bp, Artificial Sequence
  ENSG00000229544_7 (sequence is synthesized)
ggggcagtcctggccctcccggcaccggcgctctgcacttccagactttcccctcctactccgcggccaatgtcctcttcccgtccgccgcctccttcccgctgacggctgccgcccccg

SEQ ID NO: 768095 - DNA, 120 bp, Artificial Sequence
  ENSG00000229544_8 (sequence is synthesized)
ggagccctttcgcgccgttccttgggccttcctacctgacccccttctacgccccgcgtctatgaatccggagccccctggcccctctttcgcgggattcacgagggattggcatcgtcg

SEQ ID NO: 768096 - DNA, 120 bp, Artificial Sequence
  ENSG00000229544_9 (sequence is synthesized)
tgtgccctcggctcctccaccgggggtgcaggtgcgcgggtgtcagcgcacccctgcccgccgcgcgcacccgcgatcctcgcgggccaccaaggggtcagggatctgccgtccttcaaa

SEQ ID NO: 768097 - DNA, 120 bp, Artificial Sequence
  ENSG00000229544_10 (sequence is synthesized)
gtgtccggggacggaggctgacctcaagccttgccgtttctggaccttgctgttcactttgggtcaggtttaattcagttcaggggctagtttttgagggtctgggtgttcggcgcgggg

SEQ ID NO: 768098 - DNA, 120 bp, Artificial Sequence
  ENSG00000229544_11 (sequence is synthesized)
ctaaccaagatgccaggagggaaatacagggagcagagacgccctggctgccagctgctggcggctaggatggaacctttaaaggtgctggctcatcagagggtgagaaacagtctctgt

SEQ ID NO: 768099 - DNA, 120 bp, Artificial Sequence
  ENSG00000229544_12 (sequence is synthesized)
tcacaactgacagcttcccctcctcgtgctcgatggttcagcccaaacccagagagttcttccaaatcctgaacgaggctggggagagcttggtcctggagcacagacggccgctctgaa

SEQ ID NO: 768100 - DNA, 120 bp, Artificial Sequence
  ENSG00000229544_13 (sequence is synthesized)
cccaggctattcctgagagagggggtaccttggtttttggagtaggccagaagtttgtggtaggaaaggtgactgatttgcagctagactcacctgctaaagtagacacgggtctgttgc

SEQ ID NO: 768101 - DNA, 120 bp, Artificial Sequence
  ENSG00000229544_14 (sequence is synthesized)
actgcaggttttgagaacagcctggaccaaaccacacagtgaccccaaaggcataaaaatgataatgaaggcagcgatggctcaactaatatcatgaagtctatgcatgaggctgcctac

SEQ ID NO: 768102 - DNA, 120 bp, Artificial Sequence
  ENSG00000229544_15 (sequence is synthesized)
tttgatttgcagtagttgatactttaaaacttcagtcctggcttatctgcctgtcccagggattcctgggctcccaatagtgagccaggatggggaagagctagctccatcagcacacac

SEQ ID NO: 768103 - DNA, 120 bp, Artificial Sequence
  ENSG00000229544_16 (sequence is synthesized)
tacatgtggacagttggactggactgttttttaaaagcacaaactcaacatttttagatcttcgtctaggattctgacttgaaaacaattcttgttacaaacagactctttatggtggtg

SEQ ID NO: 768104 - DNA, 120 bp, Artificial Sequence
  ENSG00000229544_17 (sequence is synthesized)
aacaagcagagattgtaagggcccatgaaagcaatacttgggtgtgaagagccgtcatattcctaatggattcacctccaggaatctgatacatggacatgcattttaactgctgctttt

SEQ ID NO: 768105 - DNA, 120 bp, Artificial Sequence
  ENSG00000229544_18 (sequence is synthesized)
attacctcccttaaaaaattagttctgtgaaattcccttgccacttttgcttggaatacatttcctttagttttctacctaatataatcttgtagcccacgtctcagaaacccagaggtc

SEQ ID NO: 768106 - DNA, 120 bp, Artificial Sequence
  ENSG00000229544_19 (sequence is synthesized)
cccagttgtgtcatgtatgtttcattctcacttttgattacttgaggccagccgagatctgtgtggataccatattccttgctattttttggtagcctgtgctactaacaatcaaattta

SEQ ID NO: 768107 - DNA, 120 bp, Artificial Sequence
  ENSG00000229544_20 (sequence is synthesized)
atggtcaatggcttcaaagtaaagcaccctgtttggtattatggattacattccatgactatgatcttgaaatatctagttctgttatcaggaatgatagaaaatattccccatttctcc

SEQ ID NO: 768108 - DNA, 120 bp, Artificial Sequence
  ENSG00000229544_21 (sequence is synthesized)
taaattaagtgaagacttcatggttcatgtgactctcataatatttgatagtatgtattatttaattacttaatatccactaattagactcttttccttctaaagaagaatgtcccccaa

SEQ ID NO: 768109 - DNA, 120 bp, Artificial Sequence
  ENSG00000229544_22 (sequence is synthesized)
acaacacattgtaactttctaaaagacagttggtgccagatgagattaaaaatgcagttactctactagataatattcaccttacacttcggtaaacactcctttaataactatttgttg

SEQ ID NO: 768110 - DNA, 120 bp, Artificial Sequence
  ENSG00000229544_23 (sequence is synthesized)
gtttctcaaaagcaatatcccatattaaacagacaattcaaatgtgacaattcctctgtaacaaagaagctgaattctgtaataaatgggaaacatttcattccagtcttctcaggtacc

SEQ ID NO: 768111 - DNA, 120 bp, Artificial Sequence
  ENSG00000229544_24 (sequence is synthesized)
agaatcatggacttcagtagaagagagggaatagggagagaggtgggaggctgatctgttcgtggcccagcacggtgctgtaattcctgacccttctggtttccacagatcattgcagag

SEQ ID NO: 768112 - DNA, 120 bp, Artificial Sequence
  ENSG00000229544_25 (sequence is synthesized)
taatgcttgaagcgtgtgactttggacttctgctgctttaaaaggcccagtggctttccaaccaaatccttagactcaatctattggtgtgtttgtctaataaattctttttgtagtaaa

SEQ ID NO: 768113 - DNA, 120 bp, Artificial Sequence
  ENSG00000229549_0 (sequence is synthesized)
ggcccttcgcgcgcagtcccttagggggcgcctggaagcccggcgcatgcgccctgagggctcgctgacctactgggtgccagagaggctgcggcagggtttctgtggcgtgggtcgggc

SEQ ID NO: 768114 - DNA, 80 bp, Artificial Sequence; identical to SEQ ID NO: 767938
  ENSG00000229549_1 (sequence is synthesized)

SEQ ID NO: 768115 - DNA, 120 bp, Artificial Sequence; identical to SEQ ID NO: 553818
  ENSG00000229549_2 (sequence is synthesized)

SEQ ID NO: 768116 - DNA, 120 bp, Artificial Sequence; identical to SEQ ID NO: 767940
  ENSG00000229549_3 (sequence is synthesized)

SEQ ID NO: 768117 - DNA, 120 bp, Artificial Sequence
  ENSG00000229549_4 (sequence is synthesized)
gaataaagtgattaccaaggaatatctggtgaacatcacagaatacagggcttctcattccactccaattgagtggtatctggattatgaagtggaggcctatcgccgcagacaccacaa

SEQ ID NO: 768118 - DNA, 120 bp, Artificial Sequence; identical to SEQ ID NO: 553821
  ENSG00000229549_5 (sequence is synthesized)

SEQ ID NO: 768119 - DNA, 120 bp, Artificial Sequence; identical to SEQ ID NO: 553822
  ENSG00000229549_6 (sequence is synthesized)

SEQ ID NO: 768120 - DNA, 120 bp, Artificial Sequence; identical to SEQ ID NO: 767944
  ENSG00000229549_7 (sequence is synthesized)

SEQ ID NO: 768121 - DNA, 75 bp, Artificial Sequence; identical to SEQ ID NO: 553824
  ENSG00000229549_8 (sequence is synthesized)

SEQ ID NO: 768122 - DNA, 120 bp, Artificial Sequence; identical to SEQ ID NO: 553825
  ENSG00000229549_9 (sequence is synthesized)

SEQ ID NO: 768123 - DNA, 120 bp, Artificial Sequence; identical to SEQ ID NO: 553826
  ENSG00000229549_10 (sequence is synthesized)

SEQ ID NO: 768124 - DNA, 120 bp, Artificial Sequence; identical to SEQ ID NO: 553827
  ENSG00000229549_11 (sequence is synthesized)

SEQ ID NO: 768125 - DNA, 120 bp, Artificial Sequence
  ENSG00000229549_12 (sequence is synthesized)
ggcacttgattccacggctgtcaaccccaccggcagtcatcccgccaaccccatgagattgggctccctgaatgtgcgtcctggtcatccttgccccaaaccacaaaggactgtttagat

SEQ ID NO: 768126 - DNA, 120 bp, Artificial Sequence; identical to SEQ ID NO: 553829
  ENSG00000229549_13 (sequence is synthesized)

SEQ ID NO: 768127 - DNA, 120 bp, Artificial Sequence; identical to SEQ ID NO: 553830
  ENSG00000229549_14 (sequence is synthesized)

SEQ ID NO: 768128 - DNA, 120 bp, Artificial Sequence
  ENSG00000229571_0 (sequence is synthesized)
acccaaagtcttcaagcctggagtacctgcctggttcttcctgaggtctgagcaccttctagactacatccagatctgttttccctgcagattcatgaagatgagcatccggactccacc

SEQ ID NO: 768129 - DNA, 120 bp, Artificial Sequence
  ENSG00000229571_1 (sequence is synthesized)
cagactcctggagctggcggggcggagcgtgctgagggaccaagccttggccatgtccaccctggaggagctgcccacagaacttttccccccactgttcatggaggccttcagcaggag

SEQ ID NO: 768130 - DNA, 120 bp, Artificial Sequence
  ENSG00000229571_2 (sequence is synthesized)
acgctgtgaggccctgaagctgatggtacaggcctggcccttccgccgcctccctctgaggcctctgataaagatgccttgtctggagaccttccaagctgtgctcaatgggcttgatgc

SEQ ID NO: 768131 - DNA, 120 bp, Artificial Sequence
  ENSG00000229571_3 (sequence is synthesized)
acttcaagtgctggatttacaggatgtctgtgagaacttctggatggtttggtctgaagctatggcccgtgggtgcttcctcaatgccaagaggaacaaaaaaccagtgcaggactgtcc

SEQ ID NO: 768132 - DNA, 120 bp, Artificial Sequence
  ENSG00000229571_4 (sequence is synthesized)
tgccaagaggaacaaaaaaccagtgcaggactgtccaaggatgagaggacggcagcccttgactgtgttcgtagaactttggctcaagaacaggactctggatgaacacctcacctgcct

SEQ ID NO: 768133 - DNA, 120 bp, Artificial Sequence; identical to SEQ ID NO: 742357
  ENSG00000229571_5 (sequence is synthesized)

SEQ ID NO: 768134 - DNA, 120 bp, Artificial Sequence; identical to SEQ ID NO: 742358
  ENSG00000229571_6 (sequence is synthesized)

SEQ ID NO: 768135 - DNA, 120 bp, Artificial Sequence; identical to SEQ ID NO: 742374
  ENSG00000229571_7 (sequence is synthesized)

SEQ ID NO: 768136 - DNA, 120 bp, Artificial Sequence; identical to SEQ ID NO: 742375
  ENSG00000229571_8 (sequence is synthesized)

SEQ ID NO: 768137 - DNA, 120 bp, Artificial Sequence
  ENSG00000229571_9 (sequence is synthesized)
tgcagccacccttgagtacctggatttagatgactgtggcatcatagactcccaagtcaacgccatcctgcctgccctgagccgctgctttgagctcaacaccttcagcttctgtggaaa

SEQ ID NO: 768138 - DNA, 120 bp, Artificial Sequence
  ENSG00000229571_10 (sequence is synthesized)
tcccatctccatggccaccctggagaacctgctgagccacacaatcatactcaaaaacttatgcctggagctgtatcctgccccacgggagagttatggtgctgatggtactctctgctg

SEQ ID NO: 768139 - DNA, 120 bp, Artificial Sequence
  ENSG00000229571_11 (sequence is synthesized)
gagcagatttactcagattagggctgagctgatgaagagagttagggacttaaggcaccccaagaggatcttgttcggtactgactactgccctgactgtggcaacaggtcattttatga

SEQ ID NO: 768140 - DNA, 120 bp, Artificial Sequence; identical to SEQ ID NO: 742379
  ENSG00000229571_12 (sequence is synthesized)

SEQ ID NO: 768141 - DNA, 120 bp, Artificial Sequence
  ENSG00000229571_13 (sequence is synthesized)
agaacccatcgtttcacacatgggctctgaaagtgggaaaggaatgctgatcaagcaggggcaggacttgggggaaatgttgccatggattcgatgggactttgggaacgtgtatcctgt

SEQ ID NO: 768142 - DNA, 120 bp, Artificial Sequence; identical to SEQ ID NO: 742381
  ENSG00000229571_14 (sequence is synthesized)

SEQ ID NO: 768143 - DNA, 120 bp, Artificial Sequence
  ENSG00000229637_0 (sequence is synthesized)
taaaacccgaaagatggagcctcaggttcgcgctctgcgttgcgggtgctggaaccgagattcaaaaagagcttccggaggttccatacaagtaaatccgaaaaaaagtgtgtgtggggg

SEQ ID NO: 768144 - DNA, 120 bp, Artificial Sequence
  ENSG00000229637_1 (sequence is synthesized)
ggtccacaccactaattattatggcgaggaagataaagaagacatggacagaaggcggatggctctgcggcctggctcccgcagaccgaccgccttcttcttccattcgagatggctcgt

SEQ ID NO: 768145 - DNA, 120 bp, Artificial Sequence
  ENSG00000229637_2 (sequence is synthesized)
gggtctctcgggggctggaccaatacatctgccgatgccctggccgaatggcaggcgacatcgggtcctggacccccacacgcagctcagtacccacgaggccccaggccgctggaagcc

SEQ ID NO: 768146 - DNA, 120 bp, Artificial Sequence
  ENSG00000229637_3 (sequence is synthesized)
tgtagctccgcggacgatgaaagcctgcccgcaggttctcctggagtggtgagcctctgtcggaagggggcgcccacgtctttttaatggtcctaacacaccagtggaataaatctctaa

SEQ ID NO: 768147 - DNA, 120 bp, Artificial Sequence
  ENSG00000229637_4 (sequence is synthesized)
gagctttctcccctcttccctggagagcgactgttcgggagggtgagaatggtataaatttcaaaaacaacgaaaccttcttttgccccctccgcagcagtcgcctccgggctttattgc

SEQ ID NO: 768148 - DNA, 120 bp, Artificial Sequence; identical to SEQ ID NO: 745358
  ENSG00000229665_0 (sequence is synthesized)

SEQ ID NO: 768149 - DNA, 120 bp, Artificial Sequence; identical to SEQ ID NO: 745359
  ENSG00000229665_1 (sequence is synthesized)

SEQ ID NO: 768150 - DNA, 120 bp, Artificial Sequence; identical to SEQ ID NO: 745360
  ENSG00000229665_2 (sequence is synthesized)

SEQ ID NO: 768151 - DNA, 120 bp, Artificial Sequence; identical to SEQ ID NO: 745361
  ENSG00000229665_3 (sequence is synthesized)

SEQ ID NO: 768152 - DNA, 120 bp, Artificial Sequence; identical to SEQ ID NO: 745362
  ENSG00000229665_4 (sequence is synthesized)

SEQ ID NO: 768153 - DNA, 120 bp, Artificial Sequence; identical to SEQ ID NO: 745363
  ENSG00000229665_5 (sequence is synthesized)

SEQ ID NO: 768154 - DNA, 120 bp, Artificial Sequence; identical to SEQ ID NO: 745364
  ENSG00000229665_6 (sequence is synthesized)

SEQ ID NO: 768155 - DNA, 120 bp, Artificial Sequence; identical to SEQ ID NO: 745365
  ENSG00000229665_7 (sequence is synthesized)

SEQ ID NO: 768156 - DNA, 120 bp, Artificial Sequence; identical to SEQ ID NO: 745366
  ENSG00000229665_8 (sequence is synthesized)

SEQ ID NO: 768157 - DNA, 120 bp, Artificial Sequence; identical to SEQ ID NO: 745367
  ENSG00000229665_9 (sequence is synthesized)

SEQ ID NO: 768158 - DNA, 120 bp, Artificial Sequence; identical to SEQ ID NO: 745368
  ENSG00000229665_10 (sequence is synthesized)

SEQ ID NO: 768159 - DNA, 120 bp, Artificial Sequence; identical to SEQ ID NO: 745369
  ENSG00000229665_11 (sequence is synthesized)

SEQ ID NO: 768160 - DNA, 120 bp, Artificial Sequence; identical to SEQ ID NO: 745370
  ENSG00000229665_12 (sequence is synthesized)

SEQ ID NO: 768161 - DNA, 120 bp, Artificial Sequence; identical to SEQ ID NO: 745371
  ENSG00000229665_13 (sequence is synthesized)

SEQ ID NO: 768162 - DNA, 120 bp, Artificial Sequence; identical to SEQ ID NO: 745372
  ENSG00000229665_14 (sequence is synthesized)

SEQ ID NO: 768163 - DNA, 120 bp, Artificial Sequence
  ENSG00000229674_0 (sequence is synthesized)
cagtgggtggcaataagcactggtaccttgagaggctcaggccagcaggaaaatcaagctgtgccaattggggcaaaacccagcaattcctcatggctggaaacaaaatgttctgtaggc

SEQ ID NO: 768164 - DNA, 120 bp, Artificial Sequence
  ENSG00000229674_1 (sequence is synthesized)
ctaggagacaacgcctttcccattccagaagagcagagctgcagtttcctgtcagccacttggaacgctgcctgcgagaaagtcagcatgcccggcacctgagctcaaccacacctgttt

SEQ ID NO: 768165 - DNA, 120 bp, Artificial Sequence
  ENSG00000229674_2 (sequence is synthesized)
cagctgcaggctgtgcatcaccccagaacacgtgaagagggcactgcaaaaggatgagcagctcagatggatcttggagttggaagatgacacccactctcaagtagaagaaatgcccca

SEQ ID NO: 768166 - DNA, 120 bp, Artificial Sequence
  ENSG00000229674_3 (sequence is synthesized)
atctgaggaggaagaggaggaggaggaggagaaggaggaggagatggtggtgctggtggtgatggggggaaggaggaggaggaggagaagaaggaggaggaaggattcctgagtttcgga

SEQ ID NO: 768167 - DNA, 120 bp, Artificial Sequence
  ENSG00000229674_4 (sequence is synthesized)
gccatgcgggacttcatcagcaacctcctccagatgccaaaattcccatagatgaaagaccccaggttgcttccatctgcccaagctattaaactgtgtaaatgcatgacagtgctcctg

SEQ ID NO: 768168 - DNA, 120 bp, Artificial Sequence
  ENSG00000229676_0 (sequence is synthesized)
gtctttgtctctcgctgcagtcggagtatggtctagtgttcgctgttctgcgtcctctggtcctagaggcccatcctctgtggccctgtgacctgcaggtattgggagatccacagctaa

SEQ ID NO: 768169 - DNA, 76 bp, Artificial Sequence
  ENSG00000229676_1 (sequence is synthesized)
tggccctgtgacctgcaggtattgggagatccacagctaagacgctaggaccccctggaagcctagaaacgggagt

SEQ ID NO: 768170 - DNA, 120 bp, Artificial Sequence
  ENSG00000229676_2 (sequence is synthesized)
tgtgatgttagagaactacagaaacctggtcttcgtgggtattgctgcctctaagccagacctgatcacctgtctggagcaaggaaaagaaccttggaatgtgaagagacatgagatggt

SEQ ID NO: 768171 - DNA, 120 bp, Artificial Sequence
  ENSG00000229676_3 (sequence is synthesized)
agctgaacccccagttgtatgttcttattttgcccgagacctttggccaaagcagggcaaaaaaaattatttccaaaaagtgatactgagaagatataaaaaatgtggatgtgaaaattt

SEQ ID NO: 768172 - DNA, 120 bp, Artificial Sequence
  ENSG00000229676_4 (sequence is synthesized)
acagttaagaaaatactgtaaaagcatggatgagtgtaaggtgcacaaagaatgttacaatggacttaaccagtgtttgacgactacccagaacaaaatatttcaatgtgacaaatatgt

SEQ ID NO: 768173 - DNA, 120 bp, Artificial Sequence
  ENSG00000229676_5 (sequence is synthesized)
gaaagtctttcataaattttcaaattcaaacagacatacgataagacatactggaaagaaatctttcaaatgtaaagaatgtgaaaagtcattttgcatgctttcacacttagctcaaca

SEQ ID NO: 768174 - DNA, 90 bp, Artificial Sequence
  ENSG00000229676_6 (sequence is synthesized)
agaaaccctacaaatgtaaagaatgtgggaaagcctataatgagacctcaaacctttctacacataaaagcgaagagtgtggaaaagcct

SEQ ID NO: 768175 - DNA, 62 bp, Artificial Sequence
  ENSG00000229676_7 (sequence is synthesized)
cggagtgtggcaaagcttttaaccaatctgcaaaccttactacacataagagaattcatact

SEQ ID NO: 768176 - DNA, 73 bp, Artificial Sequence
  ENSG00000229676_8 (sequence is synthesized)
agcttttagccagtcctcaacccttactgcacataagataattcatgctggagagaaaccttacaaatgtgaa

SEQ ID NO: 768177 - DNA, 84 bp, Artificial Sequence
  ENSG00000229676_9 (sequence is synthesized)
gcttttaaacaatcctcaacccttactacacataagagaattcatgctggagagaaattctacaaatgtgaagtatgtagcaaa

SEQ ID NO: 768178 - DNA, 120 bp, Artificial Sequence
  ENSG00000229676_10 (sequence is synthesized)
ttaaacaatcctcaacccttactacacataagagaattcatgctggagagaaattctacaaatgtgaagtatgtagcaaagcctttagccggttctcacaccttactacacataagagaa

SEQ ID NO: 768179 - DNA, 120 bp, Artificial Sequence
  ENSG00000229676_11 (sequence is synthesized)
tgaagaatgtggcaaagcctttaacaactcctctattcttaacagacataagatgattcatactggagagaaactctacaaacctgaaagttgtaacaatgcttgtgacaacattgcaaa

SEQ ID NO: 768180 - DNA, 120 bp, Artificial Sequence
  ENSG00000229676_12 (sequence is synthesized)
gatttccaaatataaaagaaattgtgctggtgagaaataatagaaatatgaatgtgacaaagcctttaaatggttatcacactggattgtaggtaaggtaattcattctggagaaaactt

SEQ ID NO: 768181 - DNA, 120 bp, Artificial Sequence
  ENSG00000229676_13 (sequence is synthesized)
ctacaagtgtgaatgaacagtgtggcaaaacttacacaatgctcaaaccttattgcacaggaaagcctttatacttgagaacaaatgtacaaatataaagaaagtaaaaaagtgattaat

SEQ ID NO: 768182 - DNA, 120 bp, Artificial Sequence
  ENSG00000229676_14 (sequence is synthesized)
aaaagtgcaattactgtcaaaagagttcaaaaaataagcatttaaagtgctgaagaggatttattttgaagacaaacattacaaatataaacgaagttgtggtaactttacttgtaacac

SEQ ID NO: 768183 - DNA, 120 bp, Artificial Sequence
  ENSG00000229676_15 (sequence is synthesized)
agatcttgttgtattcattctgtattagagcaaaccctgaggcaattgctcaaactttgttcaacatcagagaatttatatcgaagaaaaaccctgtaaatgtaataaatttagaaaaaa

SEQ ID NO: 768184 - DNA, 120 bp, Artificial Sequence
  ENSG00000229676_16 (sequence is synthesized)
agaaaaaccctgtaaatgtaataaatttagaaaaaaacatttattcaaaaactacaggttagaaaattccagagagttcatattaaaatatttttgcatatacagtaaatagaaaaaaat

SEQ ID NO: 768185 - DNA, 120 bp, Artificial Sequence
  ENSG00000229676_17 (sequence is synthesized)
aatttatgttagaaatatataaggcaatgacacttcagactttacactgaatcagagttctgagtttagaaagtaatccaaaactaaacttggcagaaaaattatttgtttataacttta

SEQ ID NO: 768186 - DNA, 120 bp, Artificial Sequence
  ENSG00000229676_18 (sequence is synthesized)
aaagagtagaagattttttggagagttacaagtatacttttttttagaaagattacagattttttttaaaagtaaataactctcaaattacttcatacaaataatgttgtaattaactca

SEQ ID NO: 768187 - DNA, 120 bp, Artificial Sequence
  ENSG00000229676_19 (sequence is synthesized)
aaattacttcatacaaataatgttgtaattaactcaaattacttcgtgttaatgttgtaattaactctcaaattacttcatgctaaggaaattagtttttctttttcttcttcttttttt

SEQ ID NO: 768188 - DNA, 120 bp, Artificial Sequence
  ENSG00000229676_20 (sequence is synthesized)
gccatgttggccaggctggtctcgaactcgagactttaggtgatccgcccagcttggcctcccgcaatgctgcaattacaggtgttagccactgcgcctgcctgatgttgtttctttatt

SEQ ID NO: 768189 - DNA, 120 bp, Artificial Sequence
  ENSG00000229676_21 (sequence is synthesized)
ttagccactgcgcctgcctgatgttgtttctttattcctattgtattcatatgtgaaagcatgtgaccaaaagatatgaggattattttttattaggtgagcatttatgacctcttctat

SEQ ID NO: 768190 - DNA, 120 bp, Artificial Sequence
  ENSG00000229676_22 (sequence is synthesized)
gaaagagtaaggacattaaaatgcatgatgaaaatctaagtaaagaggttctttgtgattcacttacagtactgagtgatgcatgaggtaggtgttctgagtaatattctgcattatatt

SEQ ID NO: 768191 - DNA, 120 bp, Artificial Sequence
  ENSG00000229676_23 (sequence is synthesized)
tcttaattcaacatttttaacagtttaaatattgtgcattcaatcaagtcacattattccacttactttaacctagtccaccttactcaagggtgtaggtaaaaggtggtaacaaggccg

SEQ ID NO: 768192 - DNA, 120 bp, Artificial Sequence
  ENSG00000229676_24 (sequence is synthesized)
cactccgtcctgggtgacaaagtgagactccctctcaaaaaataaataagtaaataaaataaatggtggtaacaatacactatttggtaaaagaatgcactaacatctgtagtactaatc

SEQ ID NO: 768193 - DNA, 120 bp, Artificial Sequence
  ENSG00000229676_25 (sequence is synthesized)
ttttttccagtggctttaaactgcaaataaggaatgttgtttctgtaggtaaaatttttatttattttttcccatttaaatttacttttgttagttttttcaggcatataatatttatgt

SEQ ID NO: 768194 - DNA, 120 bp, Artificial Sequence
  ENSG00000229676_26 (sequence is synthesized)
tatatatggcatattctgataagaggcatacaatatgtaataatcacattagggtaaatgaggtatccatcacctttagaatttattttttgtattatgaacagttcaattgtacagttt

SEQ ID NO: 768195 - DNA, 120 bp, Artificial Sequence
  ENSG00000229676_27 (sequence is synthesized)
acagttcaattgtacagttttagtttttttaaaatatacgattgttattgactacagggttatttttataataaaaattatatacaagtataaaatttacacatttctgagtcctgaata

SEQ ID NO: 768196 - DNA, 120 bp, Artificial Sequence
  ENSG00000229769_0 (sequence is synthesized)
aatttgcccacagcagggctgggagacacaagatcctgccctggagctgaaatgggcaccaggctcttcttctatgtggccctttgtctgctgtgggcaggacacagggatgctggaatc

SEQ ID NO: 768197 - DNA, 120 bp, Artificial Sequence
  ENSG00000229769_1 (sequence is synthesized)
aaggcaggtgaccttgatgtgtcaccagacttggagccacagctatatgttctggtatcgacaagacctgggacatgggctgaggctgatctattactcagcagctgctgatattacaga

SEQ ID NO: 768198 - DNA, 120 bp, Artificial Sequence
  ENSG00000229769_2 (sequence is synthesized)
taaaggagaagtccccgatggctacgttgtctccagatccaagacagagaatttccccctcactctggagtcagctacccgctcccagacatctgtgtatttctgcgccagcagtgagtc

SEQ ID NO: 768199 - DNA, 84 bp, Artificial Sequence
  ENSG00000229809_0 (sequence is synthesized)
agaagatcgcttcagcccgggaggtcgagtctgcagtgagctaggatcgcactgctgggccacagagcaagaccctgtctcaaa

SEQ ID NO: 768200 - DNA, 120 bp, Artificial Sequence
  ENSG00000229809_1 (sequence is synthesized)
aagaccctgtctcaaaacaaacaaaaaataaattcatgtatgttagcaacaattactatttaatttaaaacttccccattccgattccatcctcaccaagcacgttccttcgcctgcagc

SEQ ID NO: 768201 - DNA, 120 bp, Artificial Sequence
  ENSG00000229809_2 (sequence is synthesized)
ttcggtctagagcctgagcgagccgagctgcggatgccaggggctgggtggactccgcagctaagctactgtaaaacacgcacctgcttctaccgcgggtgtacacatggtttgccaggg

SEQ ID NO: 768202 - DNA, 120 bp, Artificial Sequence
  ENSG00000229809_3 (sequence is synthesized)
tgtgcgcgtcttcccaaggggtctggggaccaaattccagctcccgccatcgggaggcacggtaagagaccgtaggggacacaatcccgagcaccgcagatgccgaggtctccgctgcgc

SEQ ID NO: 768203 - DNA, 120 bp, Artificial Sequence
  ENSG00000229809_4 (sequence is synthesized)
tccagtctgtcaacagaggcttcaggaccgcggggtcccttcaaatgccccgccagtcccaggccaatcaccgcgcagcttcttccgggatcgtcgccaatcatcggccgttgcgtattg

SEQ ID NO: 768204 - DNA, 120 bp, Artificial Sequence
  ENSG00000229809_5 (sequence is synthesized)
cgggtacagaggggtaagtgaagcttcgggcccttacatctttcttgaaggcaagaagcctctcctctacttcccagacaccccgcctcccccactagaaaaagcagccgaagcggcttt

SEQ ID NO: 768205 - DNA, 120 bp, Artificial Sequence
  ENSG00000229809_6 (sequence is synthesized)
atttaagggcaagtgggacgatgaggccagagaagtcagaaaggctccatatttgatatggtcaaataatggcgcccttaagagcagcctgtgacaattgaagggtggtcgccatatttt

SEQ ID NO: 768206 - DNA, 120 bp, Artificial Sequence
  ENSG00000229809_7 (sequence is synthesized)
cagaaggcaccttccgggtcccttaacccgggtgtctatgtccaagcggccatgaagtgaataaacactgaggaattatatttgtccctatcagaatcctcgaatccctagcagccagtc

SEQ ID NO: 768207 - DNA, 120 bp, Artificial Sequence
  ENSG00000229809_8 (sequence is synthesized)
cctgctacttcggttgcctcggctgcgttcggacgccacggctgggcggggccgcccttcctgtggacaacgacagctgaggccgggagcggggaggcggcggctccagggacctggcgg

SEQ ID NO: 768208 - DNA, 120 bp, Artificial Sequence
  ENSG00000229809_9 (sequence is synthesized)
cgatcggggctgcgaggccccatggcgccgcccccagccccgctcctggcgccgaggcccggggagacccggcctggttgcaggaagcccgggactgtgagcttcgcggacgtggccgtg

SEQ ID NO: 768209 - DNA, 120 bp, Artificial Sequence
  ENSG00000229809_10 (sequence is synthesized)
ccaggccccaaaccagccctcatctcttggatggaacaggagagtgaggcttggagccccgccgcccaggatcctgagaagggggaaagactgggaggagctcggagaggagatgtccca

SEQ ID NO: 768210 - DNA, 120 bp, Artificial Sequence
  ENSG00000229809_11 (sequence is synthesized)
aacaggaaggaagaggaaccggaggaagtcccaagagccaaagggcctagaaaggctcctgtgaaggagagtcctgaagtgctggtggaacgcaaccctgacccagctattagcgtggcc

SEQ ID NO: 768211 - DNA, 120 bp, Artificial Sequence
  ENSG00000229809_12 (sequence is synthesized)
ccggcacgggcacagccacccaaaaatgctgcctgggacccgaccacaggagcacagcccccggcacccatacccagcatggatgctcaggccggccagcggcgccacgtgtgcacggac

SEQ ID NO: 768212 - DNA, 120 bp, Artificial Sequence
  ENSG00000229809_13 (sequence is synthesized)
tgcggccgccgcttcacctacccctcactgctggtcagccacaggcgcatgcactcgggggagcggcctttcccctgccccgagtgtggcatgcgcttcaagaggaagttcgcagtggaa

SEQ ID NO: 768213 - DNA, 120 bp, Artificial Sequence
  ENSG00000229809_14 (sequence is synthesized)
gcgcaccagtggatccaccgctcctgctccggggggcggcggggccggaggcctgggatccgggctgtgcctcgggcccccgtccgaggtgaccgggacccgcctgtgctcttccggcac

SEQ ID NO: 768214 - DNA, 120 bp, Artificial Sequence
  ENSG00000229809_15 (sequence is synthesized)
tacccagacatcttcgaggagtgcggctgagcggcaccgcaggctggagttgagcctgaccttggcacgaaggactgacggatccctgaggtgggccactgagtcggggactccggaact

SEQ ID NO: 768215 - DNA, 120 bp, Artificial Sequence
  ENSG00000229809_16 (sequence is synthesized)
gaaattcatgccctgggctttcctcaaggatccctcaagtttccaacttgtaaaaagaaaagtgcctgtaaagattcgaatagattagacttgccacccatctccccagtcttttgttta

SEQ ID NO: 768216 - DNA, 120 bp, Artificial Sequence
  ENSG00000229809_17 (sequence is synthesized)
aaaaaaaaaaaaaaaaagaagagagtgagaccctggactcatttcaaagtgttatctgaagatcaggtgcaacagagacctttatatcatctcaggaactagccactccttatctatttc

SEQ ID NO: 768217 - DNA, 120 bp, Artificial Sequence
  ENSG00000229809_18 (sequence is synthesized)
cttatctatttcagatgcagatgctgagggggaccagggcctggggaggggacctacatggagggcgtggtcaaaccctggctaattgtcatcagcaggggacccagacactggagtgga

SEQ ID NO: 768218 - DNA, 120 bp, Artificial Sequence
  ENSG00000229809_19 (sequence is synthesized)
tgggagtagaatagatgcaggtggcacaaatccagcctctgttgggagaccaaggagggaggatcgtttgagtccaggagttcagaccagcctgagcaacaggctatctagcgatatcta

SEQ ID NO: 768219 - DNA, 120 bp, Artificial Sequence
  ENSG00000229809_20 (sequence is synthesized)
ggggctgtctgcggcccgcgcagagggctctgtaccgggacgtgatgcaggagacctacggccacctgggcgcgctcggcccccacttccagcatccctaaagaaattcaactgtgttgg

SEQ ID NO: 768220 - DNA, 85 bp, Artificial Sequence
  ENSG00000229809_21 (sequence is synthesized)
agaggagtaaagaaggcagacctggtacaaagttttcagaacatgggacagcggtcctgtgaggactgggagcccagtccaacca

SEQ ID NO: 768221 - DNA, 120 bp, Artificial Sequence
  ENSG00000229809_22 (sequence is synthesized)
tgagagccccgggtccgagccccctcctccttcaccgggttcacaggggagatgatgtagaagggccgagaggactgtgagccctaatcccgcactcttgcaccaacaccagcagccacc

SEQ ID NO: 768222 - DNA, 120 bp, Artificial Sequence
  ENSG00000229809_23 (sequence is synthesized)
tcccgttcccagggcttcaggtaccccctcgggagtgttttcacccgcatccatttcattcaggcagcagcactgcagccccttccaggttgagtataagctccgagggggtgccctcag

SEQ ID NO: 768223 - DNA, 120 bp, Artificial Sequence
  ENSG00000229833_0 (sequence is synthesized)
ggctttgggcggaactggctttgttgaccgggagaaacgagatgggggtgaagctggagatatttcggatgataatctacctcactttccctgtggctatgttctgggtttccaatcagg

SEQ ID NO: 768224 - DNA, 120 bp, Artificial Sequence
  ENSG00000229833_1 (sequence is synthesized)
ccgagtggtttgaggacgatgtcatacagcgcaagagggagctgtggccacctgagaagcttcaagagatagaggaattcaaagagaggttacggaagcggcgggaggagaagctccttc

SEQ ID NO: 768225 - DNA, 120 bp, Artificial Sequence
  ENSG00000229833_2 (sequence is synthesized)
atacatatactcagttccttgttattcatttaagtgttttattcttttatcagtttttgggggccgagtgagacccaggatgcctcaggccctcagggggcttgtgtcgggggctggggg

SEQ ID NO: 768226 - DNA, 120 bp, Artificial Sequence
  ENSG00000229833_3 (sequence is synthesized)
ctgctgttccgacggaagccgagagcggtcgggtcctgaggggtgagcaggggttggggactgagggtcccagctcgtttctgtgctccgtcctgtggatgaagaggggtcagccagggg

SEQ ID NO: 768227 - DNA, 120 bp, Artificial Sequence
  ENSG00000229833_4 (sequence is synthesized)
gagggctcaagggcagtgccggccacaggtggcgaacaatggagagagggtgcaggtagccaccgtgtcccacctcattgtgagcactggtctatgtttaccctcaatatctgccattta

SEQ ID NO: 768228 - DNA, 120 bp, Artificial Sequence
  ENSG00000229833_5 (sequence is synthesized)
ctaatgtctgcctcccataagccgaccctgccctgatgtggggctctggaggcctttggctcgtgtcccatttgtgacttttccttacagagggagctgtggccacctgagaaggtaagt

SEQ ID NO: 768229 - DNA, 120 bp, Artificial Sequence
  ENSG00000229833_6 (sequence is synthesized)
atgagtaaggaaccgagagcagaggagtagatggtttccttattgccttctcctggaagagtgaagcggatcccacgcggacccctttcttcaagagatagaggaattcaaagagaggtt

SEQ ID NO: 768230 - DNA, 120 bp, Artificial Sequence
  ENSG00000229833_7 (sequence is synthesized)
ggctttgttgaccgggagaaacgagatgggggtgaagctggagatatttcgggtcagtggacacaggagtgggttgggaggctgggcaggggatcttcctggatctgaagatgaggttgg

SEQ ID NO: 768231 - DNA, 120 bp, Artificial Sequence
  ENSG00000229833_8 (sequence is synthesized)
aaatggggggacttcaaaggaagagggagctccaaggagaaagctcttaagatttgagaggaacctttctggttggaaatccaggagaggggacgctgggctgggggggttctcggattt

SEQ ID NO: 768232 - DNA, 120 bp, Artificial Sequence
  ENSG00000229833_9 (sequence is synthesized)
gggcttctgggtttgggggctgtgagagggctggtccgaggaaggacctcagagaggggtgagctgagaagggggctctaaagaaggaagacttaagatcctgggggagctctcgggctc

SEQ ID NO: 768233 - DNA, 120 bp, Artificial Sequence
  ENSG00000229833_10 (sequence is synthesized)
gtggtgggtgggtgtctatgacagggagattcctagacttcgagaagtggagttgaagagtgacgcctcctgggtttgggggtgctcccgggatcttaagtggggatgggtaatgaggtc

SEQ ID NO: 768234 - DNA, 120 bp, Artificial Sequence
  ENSG00000229833_11 (sequence is synthesized)
tcgaggagatgcttttgattgtagctggggcgtctgtgtgtctgtctgtgtttgagaggaagactccagctcagagggaactttcaggaatgaggcctcctggattataggagttaggtt

SEQ ID NO: 768235 - DNA, 120 bp, Artificial Sequence
  ENSG00000229833_12 (sequence is synthesized)
ttagggtgcgaggtttctgtacccttggtgggagttctgggattcttgggtcggccgtaacgaggcgcttctggactctgcagtaggatgggtcccccaggctctgaggagcctctgcac

SEQ ID NO: 768236 - DNA, 120 bp, Artificial Sequence
  ENSG00000229833_13 (sequence is synthesized)
agggatggaggaggctggattcttgtatccgggatgggttttagatgaaaattttaggccaggcgcagtggctcatgcttgtaatcccagggcatgggaggctgaggtgggtagatcact

SEQ ID NO: 768237 - DNA, 88 bp, Artificial Sequence
  ENSG00000229833_14 (sequence is synthesized)
ccaacatggcgaaaccccatgtctacagcgcctataattccagctgcttgggaggctgagggagaagaatcacttgaacccaggaggt

SEQ ID NO: 768238 - DNA, 90 bp, Artificial Sequence
  ENSG00000229833_15 (sequence is synthesized)
gaaacattttactctcagccatgagtaaggaaccgagagcagaggagtagatggtttccttattgccttctcctggaagagtgaagcgga

SEQ ID NO: 768239 - DNA, 120 bp, Artificial Sequence
  ENSG00000229833_16 (sequence is synthesized)
atggtttccttattgccttctcctggaagagtgaagcggatcccacgcggacccctttgtaattggcagggggcttccagtgaagacactgaaccctgaagccgtggtctggggcagggt

SEQ ID NO: 768240 - DNA, 120 bp, Artificial Sequence
  ENSG00000229833_17 (sequence is synthesized)
ggtgggagaggtgggcgggggggggtggtcccggctctgaggtgtgtgcccctccccccttcctgtcccacccgcttctccacccctagcttcaagagatagaggaattcaaagagaggt

SEQ ID NO: 768241 - DNA, 120 bp, Artificial Sequence
  ENSG00000229859_0 (sequence is synthesized)
accttcctcccgtcttgccttctccctcgagttgggacccgggaagaaccatgaagtggctgctgctgctgggtctggtggcactctctgagtgcatcatgtacaaggtccccctcatca

SEQ ID NO: 768242 - DNA, 120 bp, Artificial Sequence
  ENSG00000229859_1 (sequence is synthesized)
gaaagaagtccttgaggcgcaccctgtccgagcgtggcctgctgaaggacttcctgaagaagcacaacctcaacccagccagaaagtacttcccccagtggaaggctcccaccctggtag

SEQ ID NO: 768243 - DNA, 120 bp, Artificial Sequence
  ENSG00000229859_2 (sequence is synthesized)
atgaacagcccctggagaactacctggatatggagtacttcggcactatcggcatcggaactcctgcccaggatttcaccgtcgtctttgacaccggctcctccaacctgtgggtgccct

SEQ ID NO: 768244 - DNA, 120 bp, Artificial Sequence
  ENSG00000229859_3 (sequence is synthesized)
cagtctactgctccagtcttgcctgcaccaaccacaaccgcttcaaccctgaggattcttccacctaccagtccaccagcgagacagtctccatcacctacggcaccggcagcatgacag

SEQ ID NO: 768245 - DNA, 120 bp, Artificial Sequence
  ENSG00000229859_4 (sequence is synthesized)
gcatcctcggatacgacactgtccaggttggaggcatctctgacaccaatcagatcttcggcctgagcgagacggaacctggctccttcctgtattatgctcccttcgatggcatcctgg

SEQ ID NO: 768246 - DNA, 120 bp, Artificial Sequence
  ENSG00000229859_5 (sequence is synthesized)
ggctggcctaccccagcatttcctcctccggggccacacccgtctttgacaacatctggaaccagggcctggtttctcaggacctcttctctgtctacctcagcgccgatgaccagagtg

SEQ ID NO: 768247 - DNA, 120 bp, Artificial Sequence; identical to SEQ ID NO: 767968
  ENSG00000229859_6 (sequence is synthesized)

SEQ ID NO: 768248 - DNA, 120 bp, Artificial Sequence; identical to SEQ ID NO: 767969
  ENSG00000229859_7 (sequence is synthesized)

SEQ ID NO: 768249 - DNA, 120 bp, Artificial Sequence; identical to SEQ ID NO: 767970
  ENSG00000229859_8 (sequence is synthesized)

SEQ ID NO: 768250 - DNA, 120 bp, Artificial Sequence; identical to SEQ ID NO: 767971
  ENSG00000229859_9 (sequence is synthesized)

SEQ ID NO: 768251 - DNA, 120 bp, Artificial Sequence; identical to SEQ ID NO: 767972
  ENSG00000229859_10 (sequence is synthesized)

SEQ ID NO: 768252 - DNA, 120 bp, Artificial Sequence
  ENSG00000229859_11 (sequence is synthesized)
actgaaacaggttttgtggagctgcttctctttgctggtctttttccttcacattactggggttagaacaccagggcagggatgaaaatgaccacatccatttggatggcacccaacata

SEQ ID NO: 768253 - DNA, 120 bp, Artificial Sequence; identical to SEQ ID NO: 767974
  ENSG00000229859_12 (sequence is synthesized)

SEQ ID NO: 768254 - DNA, 120 bp, Artificial Sequence
  ENSG00000229859_13 (sequence is synthesized)
agtcacgaaatctccacaagccctccctgccactttcggggcatggcaggggtcaaaggcctggggtctggggtctgctttgcgtttgttcatcagaaacacaaacacacagtgaccatc

SEQ ID NO: 768255 - DNA, 120 bp, Artificial Sequence
  ENSG00000229859_14 (sequence is synthesized)
tgttctccagcaaaatctcaccctgagtcatagactgtagccatctggagatcagctgccatggttacctccagcagaggaaccagcattccagcagacagtccctctgccctcctcccg

SEQ ID NO: 768256 - DNA, 120 bp, Artificial Sequence
  ENSG00000229859_15 (sequence is synthesized)
ggctgataccctggaagccaagtcctgcatgagatgaaccagggtggctctgggcctgaggctggcatccagagctcagtgaacatgacccgatggtgaacatcatctcggtttccccac

SEQ ID NO: 768257 - DNA, 79 bp, Artificial Sequence
  ENSG00000229859_16 (sequence is synthesized)
acagcaagcagaccagtgtggcgggaacagagccggcagggggaaaatgctgccactaacaagaaaaatactggttgat

SEQ ID NO: 768258 - DNA, 61 bp, Artificial Sequence
  ENSG00000229859_17 (sequence is synthesized)
actaaaaatacaaaaatttgccgggcatgatggcacaaggaggctgcagtgagccgaggtc

SEQ ID NO: 768259 - DNA, 120 bp, Artificial Sequence
  ENSG00000229859_18 (sequence is synthesized)
tgagccgaggtcgcgccactgcactcccgcctggacaacagagtgagacttgtctcaaaaaaaaagaataaaaattctggcaatgccctttctcaaaacctgctgtacacatctagacgt

SEQ ID NO: 768260 - DNA, 120 bp, Artificial Sequence
  ENSG00000229859_19 (sequence is synthesized)
tgctgtacacatctagacgtagaaataagaaaactggacaggtttccatctttaagtggcttgcttagcttctgataaacaatttaaggcacaagcacttaagctgtaacttgcccggtg

SEQ ID NO: 768261 - DNA, 120 bp, Artificial Sequence
  ENSG00000229859_20 (sequence is synthesized)
ctagaaggttccaccgccatcctctgagaacatgcgctgtacggatgggaagactgtgacagacaagacaatggctaaagagggaacagcagattgttaggtgcttgtggtgcttaacag

SEQ ID NO: 768262 - DNA, 120 bp, Artificial Sequence
  ENSG00000229859_21 (sequence is synthesized)
agagcagagggtaaattgggggagcaatcagggaagacttcaaggaggaagggacgccagggctgggatttgaaggatgaagacagtggctgggaagagaaagataagaactgtgaggaa

SEQ ID NO: 768263 - DNA, 120 bp, Artificial Sequence
  ENSG00000229859_22 (sequence is synthesized)
tccatccccatggcaccctcccccctccccatggtgcaaagttatagtggaaagtgcctcagctggaaagatctcagaatgtggcttagggcagccacaatcttatcaggagcttctctg

SEQ ID NO: 768264 - DNA, 120 bp, Artificial Sequence
  ENSG00000229859_23 (sequence is synthesized)
tttgggatcaggggaaccggtgactttcagaggccgataaggcgggacccaacttgtatataaggggcagctcatgctgctgctctgcaccttcctcccgtcttgccttctccctcgagt

SEQ ID NO: 768265 - DNA, 120 bp, Artificial Sequence
  ENSG00000229859_24 (sequence is synthesized)
tgggacccgggaagaaccatgaagtggctgctgctgctgggtctggtggcactctctgagtgcatcatgtacaagtgagtccgggtggtgtgggtgtgaagacgctgcctcccacatcac

SEQ ID NO: 768266 - DNA, 120 bp, Artificial Sequence
  ENSG00000229859_25 (sequence is synthesized)
ctttctttcctcccgtgtcttccttcttcccttttttctccctctctattcagctgtctccatcccccttttccgcctctctctctgcctttttgggaggcagccctgcagacatggtta

SEQ ID NO: 768267 - DNA, 120 bp, Artificial Sequence
  ENSG00000229859_26 (sequence is synthesized)
aaactcgggcccagcctgactgtggttcccagctccagccctagtcagcttaacttctttgcattatggggcagaagtgggagcttctcccttccttccatcttcctctcttagatcagc

SEQ ID NO: 768268 - DNA, 120 bp, Artificial Sequence
  ENSG00000229859_27 (sequence is synthesized)
tggttaagagtccagcctgggtttggctcccagctccagcactagtcaacttaacttctttgcattgttgggcagaagagggggcgtctcctttccttccttcttcctctcttagaccag

SEQ ID NO: 768269 - DNA, 120 bp, Artificial Sequence; identical to SEQ ID NO: 767999
  ENSG00000229859_28 (sequence is synthesized)

SEQ ID NO: 768270 - DNA, 120 bp, Artificial Sequence; identical to SEQ ID NO: 768000
  ENSG00000229859_29 (sequence is synthesized)

SEQ ID NO: 768271 - DNA, 120 bp, Artificial Sequence
  ENSG00000229859_30 (sequence is synthesized)
atgaacagcccctggagaactacctggatgtgagtgtgcgggcaagtggtggggccagctctgaggacttggcccgcaggaaagagggtgtcccaggggtcttggaggacgggcctgggc

SEQ ID NO: 768272 - DNA, 120 bp, Artificial Sequence
  ENSG00000229859_31 (sequence is synthesized)
acccagagtctgccccctagatgtcagtggcccagggcaggcaggaaagctcacagtcagagttcattcattcattcgttcactcgttcatgcaatgttaatttctctgagcgcctcatt

SEQ ID NO: 768273 - DNA, 120 bp, Artificial Sequence
  ENSG00000229859_32 (sequence is synthesized)
ctatttcagggcctgtgctgggctcagggggagacagcagtgagcaaactcatagcctaggagacaaacacagtcatcaaggggtctcgcaaagcaatgaaaggaacaggcagcaggagg

SEQ ID NO: 768274 - DNA, 120 bp, Artificial Sequence
  ENSG00000229859_33 (sequence is synthesized)
actacagagtgacggtgtcacactgcgagagtctgccacttgggcagggagcctccctggagccacgcaggaagagcggcagtttccaagacaacaagacagaactccgcatagcctgat

SEQ ID NO: 768275 - DNA, 120 bp, Artificial Sequence; identical to SEQ ID NO: 767998
  ENSG00000229859_34 (sequence is synthesized)

SEQ ID NO: 768276 - DNA, 120 bp, Artificial Sequence
  ENSG00000229859_35 (sequence is synthesized)
gtttttgttccctgcctcatgcctgactgatcatcttgcccttctgccaacataacttatcttgccagctaggcagggagctccctgcagcctggaactgtgaggctgtcttgtttcact

SEQ ID NO: 768277 - DNA, 120 bp, Artificial Sequence
  ENSG00000229859_36 (sequence is synthesized)
tggcatttcccatgcctggcagagagtaggcacttgggaaatatttgttgggcaaatgaatgcgggacgaatgagtgcgtgaacgagaggaacagaaatttcacgcattggccaatggat

SEQ ID NO: 768278 - DNA, 120 bp, Artificial Sequence
  ENSG00000229859_37 (sequence is synthesized)
gggtggggaagaaatgtctgggctcacctcctagttcctccttggagagaagtacccctgagagctcagggagcttaacttgcttcttgccctcagcatcaccatgaacggagaggccat

SEQ ID NO: 768279 - DNA, 120 bp, Artificial Sequence; identical to SEQ ID NO: 767975
  ENSG00000229859_38 (sequence is synthesized)

SEQ ID NO: 768280 - DNA, 120 bp, Artificial Sequence; identical to SEQ ID NO: 767976
  ENSG00000229859_39 (sequence is synthesized)

SEQ ID NO: 768281 - DNA, 120 bp, Artificial Sequence; identical to SEQ ID NO: 767977
  ENSG00000229859_40 (sequence is synthesized)

SEQ ID NO: 768282 - DNA, 120 bp, Artificial Sequence
  ENSG00000229894_0 (sequence is synthesized)
ggccgcaaacgcgggcggacctgaagctggtttcatggcagcctcaaagaaggcagttttggggccattggtgggggcagtggaccaaggcaccagttccacgcgctttttggttttcaa

SEQ ID NO: 768283 - DNA, 120 bp, Artificial Sequence
  ENSG00000229894_1 (sequence is synthesized)
ttcaagaacagctgaactacttagtcatcatcaagtggaaataaaacaagagttcccaagagaaggatgggtggaacaggaccctaaggaaattctacattctgtctatgagtgtataga

SEQ ID NO: 768284 - DNA, 120 bp, Artificial Sequence
  ENSG00000229894_2 (sequence is synthesized)
gaaaacatgtgagaaacttggacagctcaatattggtatttccaacataaaagctattggtgtcagcaaccagagggaaaccaccgtagtctgggacaagataactggagagcctctcta

SEQ ID NO: 768285 - DNA, 120 bp, Artificial Sequence
  ENSG00000229894_3 (sequence is synthesized)
caatgctgtggtgtggcttgatctaagaacacagtctaccgttgagagtcttagtaaaagaattccaggaaataataactttgtcaagtccaagacaggccttccacttagcacttactt

SEQ ID NO: 768286 - DNA, 120 bp, Artificial Sequence
  ENSG00000229894_4 (sequence is synthesized)
cagtgcagtgaaacttcgctggctcctcgacaatgtgagaaaagttcaaaaggccgttgaagaaaaacgagctctttttgggactattgattcatggcttatttggagtttgacaggagg

SEQ ID NO: 768287 - DNA, 120 bp, Artificial Sequence
  ENSG00000229894_5 (sequence is synthesized)
cgtcaatggaggtgtccactgtacagatgtaacaaatgcaagtaggactatgcttttcaacattcattctttggaatgggataaacaactctgtgaattttttggaattccaatggaaat

SEQ ID NO: 768288 - DNA, 120 bp, Artificial Sequence
  ENSG00000229894_6 (sequence is synthesized)
tcttccacatgttcggagttcttctgagatctatggcctaatgaaagcgggggccttggaaggtgtgccaatatctgggtgtttaggggaccagtctgctgcactggtgggacaaatgtg

SEQ ID NO: 768289 - DNA, 120 bp, Artificial Sequence
  ENSG00000229894_7 (sequence is synthesized)
agtgtgtattttctgatcatggccttctcaccacagtggcttacaaacttggcagagacaaaccggtatattacgctttggaaggttctgtagctatagctggtgctgttattcgctggc

SEQ ID NO: 768290 - DNA, 120 bp, Artificial Sequence
  ENSG00000229894_8 (sequence is synthesized)
taagagacaatcttggaattataaagacctcagaagaaattgaaaaacttgctaaagaagtaggtacttcttatggctgctacttcgtcccagcattttcggggttatatgcaccttatt

SEQ ID NO: 768291 - DNA, 120 bp, Artificial Sequence
  ENSG00000229894_9 (sequence is synthesized)
gggagcccagcgcaagagggataatctgtggactcactcaattcacgaataaatgccatattgcttttgctgcattagaagctgtttgtttccaaactcgagagattttggatgccatga

SEQ ID NO: 768292 - DNA, 120 bp, Artificial Sequence
  ENSG00000229894_10 (sequence is synthesized)
atcgagactgtggaattccactcagtcatttgcaggttgatggaggaatgaccagcaacaaaattcttatgcagctacaagcagacattctgtatattccagtagtgaagcccttgatgc

SEQ ID NO: 768293 - DNA, 120 bp, Artificial Sequence
  ENSG00000229894_11 (sequence is synthesized)
ccgaaaccactgcactgggtgctgccatggcggcaggggctgcagaaggagtcgacgtatggagtcttgaacctgaggatttgtccgccgtcacgatggagcggtttgaacctcagatta

SEQ ID NO: 768294 - DNA, 120 bp, Artificial Sequence
  ENSG00000229894_12 (sequence is synthesized)
atgctgaggaaagtgaaattcgttattctacatggaagaaagctgtgatgaagtcaatgggttgggttacaactcaatctccagaaggtggtgaccctagtgtcttctgtagtctgccct

SEQ ID NO: 768295 - DNA, 120 bp, Artificial Sequence
  ENSG00000229894_13 (sequence is synthesized)
tgggcttttttatagtgagtagcatggcaatgttaatcggagcaaggtacatctcaggtattccataaaacctaccaactcatggattcccaagatgcgagctttttacataatgaaaga

SEQ ID NO: 768296 - DNA, 120 bp, Artificial Sequence
  ENSG00000229894_14 (sequence is synthesized)
acaacccagcaattgtctcttaatgcgatgacactattcatagactttgattttatttataagccacttgctgcgtgaccctccaagtagacctgtggcttaaaataaagaaaatgcagc

SEQ ID NO: 768297 - DNA, 120 bp, Artificial Sequence
  ENSG00000229924_0 (sequence is synthesized)
gggcccttccagaagcaacccaggagccctgagacctgcaggggtgtgtgcaccctgaccctgaggcatagccctgcacctgcagccagctggcctagggctgcaaacatggcgtgcggt

SEQ ID NO: 768298 - DNA, 77 bp, Artificial Sequence
  ENSG00000229924_1 (sequence is synthesized)
ttcacggtggtttccaagcgcctcctggagaagaaaacacatgagggtgtggtcaggggaagatggatcatggccgt

SEQ ID NO: 768299 - DNA, 120 bp, Artificial Sequence
  ENSG00000229924_2 (sequence is synthesized)
ccgtgactgcatgtcaaggagaatctccttgatgacactgaggcccacgtcgagatagagtaaatatggtccaattaaaaggtgaccagaggcagtataaaaggccgcctggaaagtaga

SEQ ID NO: 768300 - DNA, 120 bp, Artificial Sequence
  ENSG00000229924_3 (sequence is synthesized)
ggtccctctctgccccttcctccgtcttcctggatgctgcatcgcttccagcggggctgctccagcacctgcccatctcagcgccagccggggaaagaaagtagacgtgtaatttcaggt

SEQ ID NO: 768301 - DNA, 77 bp, Artificial Sequence
  ENSG00000229924_4 (sequence is synthesized)
aacccccaggagacgaagatgatggcatgtcgtgaccccaaacctggggcgccccagttgggccaagggctcccccg

SEQ ID NO: 768302 - DNA, 87 bp, Artificial Sequence
  ENSG00000229924_5 (sequence is synthesized)
tccacacaaccagtaagaggccgcgtgtggaccctgtcctcgctgatcgctcagctaccgaaatgtctgacaggggctccgctctga

SEQ ID NO: 768303 - DNA, 71 bp, Artificial Sequence
  ENSG00000229924_6 (sequence is synthesized)
acggcctgctccaggccatcagccagccgccacacatagcttgggtctaggctccaatctcagcttcgggc

SEQ ID NO: 768304 - DNA, 69 bp, Artificial Sequence
  ENSG00000229924_7 (sequence is synthesized)
gggaggtgagctgggggccccggagtatctccaacctccgccggcagcccaggtgtccagcgtcgaccg

SEQ ID NO: 768305 - DNA, 70 bp, Artificial Sequence
  ENSG00000229924_8 (sequence is synthesized)
agccttcctcgctcagagccctcatgtctcagagaagtctgaggttccccgtgttcgtgtcccaccgatc

SEQ ID NO: 768306 - DNA, 70 bp, Artificial Sequence
  ENSG00000229924_9 (sequence is synthesized)
ctgcctcattgaattctggtgagggacattgtagttcgcatggttctccggaaacgcgccaggaaaagct

SEQ ID NO: 768307 - DNA, 89 bp, Artificial Sequence
  ENSG00000229924_10 (sequence is synthesized)
atgcagggatctgcctcattgaattctggtgagggacattgtagttcgcatggttctccggaaacgcgccaggaaaagcttccgtgcca

SEQ ID NO: 768308 - DNA, 61 bp, Artificial Sequence
  ENSG00000229924_11 (sequence is synthesized)
gcgtgctgtgcataggtgtgttgaatttgtttggaagtgaataaaattctcaaaaagatga

SEQ ID NO: 768309 - DNA, 120 bp, Artificial Sequence
  ENSG00000229937_0 (sequence is synthesized)
acttccgttccagcctcagcggcagctggatcgctcgacggagtgcctctggtagttggccaagacgccgaatatcaaaatcttcagcggcagctcccaccaggacttatcccagaaaat

SEQ ID NO: 768310 - DNA, 120 bp, Artificial Sequence
  ENSG00000229937_1 (sequence is synthesized)
tgctgaccgcctgggcctggagctaggcaaggtggtgactaagaaattcagcaaccaggagacctgcgtggaaattgatgagagtgtgcgtggagaggatgtctacatcgttcagagtgg

SEQ ID NO: 768311 - DNA, 120 bp, Artificial Sequence
  ENSG00000229937_2 (sequence is synthesized)
ttgtggcgaaatcaacgacagtctaatggagcttttgatcatgattaatgcctgcaagattgcttcagctagccgagttactgcagtcatcccatgcttcccttatgcccgacaggataa

SEQ ID NO: 768312 - DNA, 120 bp, Artificial Sequence
  ENSG00000229937_3 (sequence is synthesized)
gaaggataagagccggtccccaatctctgccaagcttgttgcaaatatgctctctatagcaggtgcggatcatatcatcaccatggacctacatgcttctcaaattcagggcttttttga

SEQ ID NO: 768313 - DNA, 120 bp, Artificial Sequence
  ENSG00000229937_4 (sequence is synthesized)
gacctccattgcagaccagttgaatgtggactttgctttgattcataaagaacggaagaaggccaatgaagtggactgcatagtgctagtgggagatgtgaatgatcgtgtggctatcct

SEQ ID NO: 768314 - DNA, 120 bp, Artificial Sequence
  ENSG00000229937_5 (sequence is synthesized)
tgtagatgacatggcagacacttgtgttacaatctgcctcgcagctgacaaacttctctcagctggagcaaccagagtttatgctatcttgactcatggaatcttttctggcccagccat

SEQ ID NO: 768315 - DNA, 120 bp, Artificial Sequence
  ENSG00000229937_6 (sequence is synthesized)
ttctcgcatcaacactgcatgctttgaagcagtggtagtcaccaataccatacctcaagatgagaagatgaagcattgctccaaaatacgagtaattgacatctccatgatccttgcaga

SEQ ID NO: 768316 - DNA, 120 bp, Artificial Sequence
  ENSG00000229937_7 (sequence is synthesized)
agccataaggagaactcataatggggaatctgtttcctacctgttcagccatgttcctttataacagaataacttctaggttatgctattttaaaataaaataagattaataaaaacaaa

SEQ ID NO: 768317 - DNA, 120 bp, Artificial Sequence
  ENSG00000229972_0 (sequence is synthesized)
tggctctgcatccccagtaaaactgtgcctgcaacacgtgggatccagtaagtaggagagtcctcacagggaagaagggaaagaaattcctaggatgctggggtgagggtaccccagaag

SEQ ID NO: 768318 - DNA, 120 bp, Artificial Sequence
  ENSG00000229972_1 (sequence is synthesized)
aatgaccaggcagcaggcttgaagagcagctacccagattacacagtggtgcagcggtccatgaaaaaagcagagttgacggattatccaagttttggtggaaagtttgggataaattag

SEQ ID NO: 768319 - DNA, 120 bp, Artificial Sequence
  ENSG00000229972_2 (sequence is synthesized)
tacaaaccatggcaatcaagagctccaggaaaaacagacaggaaatgcatgaaaggctatgtcacagcaatatgccatgttgctaagccatggacaggatataatcacaatgatggaagc

SEQ ID NO: 768320 - DNA, 120 bp, Artificial Sequence
  ENSG00000229972_3 (sequence is synthesized)
cctgaatgcttattgaaccaaaaactgtgatgctataatcatatagagaggagagcagaaggatgggaacaggtaaatcttcacttcatgaaaagaagtcaagaggatcttctttttcct

SEQ ID NO: 768321 - DNA, 89 bp, Artificial Sequence
  ENSG00000229972_4 (sequence is synthesized)
tcacttcatgaaaagaagtcaagaggatcttctttttccttgatgttctgaagctacaagatgacttccaataccatgttgaataggag

SEQ ID NO: 768322 - DNA, 120 bp, Artificial Sequence
  ENSG00000229972_5 (sequence is synthesized)
ttgtcctgcgctttattttgttgagagttgcccaaggaagtcaacaggagagccagatcaggaaacagcaaccagagggagatgatcacctgaaccactgctccaaaccatgggcagtaa

SEQ ID NO: 768323 - DNA, 120 bp, Artificial Sequence
  ENSG00000229972_6 (sequence is synthesized)
atgctgtaaaggtggtccagatgaagatgcagtagaaagacagaggcggcagaagttgcttcttgcacaactgcatcacagaaaaagggtgaaggcagctgggcagatccaggcctggtg

SEQ ID NO: 768324 - DNA, 120 bp, Artificial Sequence
  ENSG00000229972_7 (sequence is synthesized)
gcgtggggtcctggtgcgcaggaccctgctggttgctgccctcagggcctggatgattcagtgctggtggaggacgttggtgcagagacggatccgtcagcggcggcaggccctgttgag

SEQ ID NO: 768325 - DNA, 120 bp, Artificial Sequence
  ENSG00000229972_8 (sequence is synthesized)
ggtctacgtcatccaggagcaggcgacggtcaagctccagtcctgcatccgcatgtggcagtgccggcaatgttaccgccaaatgtgcaatgctctctgcttgttccaggtcccagagag

SEQ ID NO: 768326 - DNA, 120 bp, Artificial Sequence
  ENSG00000229972_9 (sequence is synthesized)
cagccttgccttccagactgatggctttttacaggtccaatatgcaatcccttcaaagcagccagagttccacattgaaatcctatcaatctgaaaggcctggggcatggagaacaggct

SEQ ID NO: 768327 - DNA, 120 bp, Artificial Sequence
  ENSG00000229972_10 (sequence is synthesized)
aaccagagggagatgatcacctgaaccactgctccaaaccatgggcagtaaatgctgtaaaggtggtccagatgaagatgcagtagaaagacagaggcggcagaagggcctggatgattc

SEQ ID NO: 768328 - DNA, 120 bp, Artificial Sequence
  ENSG00000229972_11 (sequence is synthesized)
gatcattgactctttgatcccagagttcttagaatggagatccatctctggctcagcattgccctcttatcccctcaagccctccctctccttggtgaactgagtaaggtatggagatag

SEQ ID NO: 768329 - DNA, 120 bp, Artificial Sequence
  ENSG00000229972_12 (sequence is synthesized)
tccacctttcctgcccctgccaagatcaggaaacagcaaccagagggagatgatcacctgaaccactgctccaaaccatgggcagtaaatgctgtgtaagactcaggcacacaaactccc

SEQ ID NO: 768330 - DNA, 120 bp, Artificial Sequence
  ENSG00000229972_13 (sequence is synthesized)
ccaggggtgggagttgtcccatggcccaggaaagcaccaggccacttcttaggacccaggcaaagaatggggaactgggcctgtggggactttgcagtcaggctggtcctcacccatgct

SEQ ID NO: 768331 - DNA, 120 bp, Artificial Sequence
  ENSG00000229972_14 (sequence is synthesized)
cccccacacccatattccgattgcagaaaggtggtccagatgaagatgcagtagaaagacagaggcggcagaaggtaggtggggcccaggagggtgagagaattgcagatcattgactct

SEQ ID NO: 768332 - DNA, 86 bp, Artificial Sequence
  ENSG00000229972_15 (sequence is synthesized)
atgaactgctggattcagtttgcaagtactttgttaaggatttttgcataaatgtttgtcaaggatattgacctaaagttttgttg

SEQ ID NO: 768333 - DNA, 120 bp, Artificial Sequence
  ENSG00000230031_0 (sequence is synthesized)
ctactaccggcctcccctggctgttaaaagcagatggtggctgaggtttgttcaatgcccgctgcctctgctgtgaagaagccatttgatctcaggagcaagatgggcaagtggtgccac

SEQ ID NO: 768334 - DNA, 120 bp, Artificial Sequence
  ENSG00000230031_1 (sequence is synthesized)
agcaagatgggcaagtggtgccaccaccgcttcccctgctgcagggggagcggcacgagcaatgtgggcacttctggagaccatgacgactcctttatgaagacactcaggagcaagatg

SEQ ID NO: 768335 - DNA, 74 bp, Artificial Sequence
  ENSG00000230031_2 (sequence is synthesized)
gtgctgacttggggagactacgacgacagcgccttcatggagccgaggtaccacgtccgtcgagaagatctgga

SEQ ID NO: 768336 - DNA, 80 bp, Artificial Sequence
  ENSG00000230031_3 (sequence is synthesized)
cagaaaggatctcatcgtcatgctcagggacactgacatgaacaagagggacaagcaaaagaagtagtacaactcctgct

SEQ ID NO: 768337 - DNA, 120 bp, Artificial Sequence
  ENSG00000230031_4 (sequence is synthesized)
gaagtagtacaactcctgctggacagacgatgtcaacttaacgtccttgacaacaaaaaaaggacagctctgataaaggccgtacaatgccaggaagatgaatgtgtgttaatgttgctg

SEQ ID NO: 768338 - DNA, 120 bp, Artificial Sequence
  ENSG00000230031_5 (sequence is synthesized)
caatgccaggaagatgaatgtgtgttaatgttgctggaacatggcgctgatggaaatattcaagatgagtatggaaataccgctctacactatgctatctacaatgaagataaattaatg

SEQ ID NO: 768339 - DNA, 120 bp, Artificial Sequence
  ENSG00000230031_6 (sequence is synthesized)
cacaccacttttgcttggcgtacatgaacaaaaacaggaagtggtgaaatttttaatcaagaaaaaagctaatttaaatgcacttgatagatatggaagaactgccctcatacttgctgt

SEQ ID NO: 768340 - DNA, 69 bp, Artificial Sequence
  ENSG00000230031_7 (sequence is synthesized)
aaatgcacttgatagatatggtcttctacttgagcaaaatgttgatgtatcttctcaagatctatctgg

SEQ ID NO: 768341 - DNA, 120 bp, Artificial Sequence
  ENSG00000230031_8 (sequence is synthesized)
tgtgggattaccagaaaacctgactaatggtgccagtgctggcaatggtgatgatggattaattccacaaaggaagagcagaaaacctgaaaatcagcaatttcctgacactgagaatga

SEQ ID NO: 768342 - DNA, 120 bp, Artificial Sequence
  ENSG00000230031_9 (sequence is synthesized)
acagtgacgaacaaaatgatacccagaaacaactttctgaagaacagaacactggaatatcacaagatgagattctgactaataaacaaaagcagatagaagtggctgaaaaggaaatga

SEQ ID NO: 768343 - DNA, 120 bp, Artificial Sequence
  ENSG00000230031_10 (sequence is synthesized)
tagtcataagaaagaagaagatctcttgcgtgaaaacagcatgttgcgggaagaaattgccaagctaagactggaactagatgaaacaaaacatcagaaccagctaagggaaaataaaat

SEQ ID NO: 768344 - DNA, 120 bp, Artificial Sequence
  ENSG00000230031_11 (sequence is synthesized)
taagggaaaataaaattttggaggaaattgaaagtgtaaaagaaaaacttctaaagactatacaactgaatgaagaagcattaacgaaaaccagtatttaagtacagtggacagcttagg

SEQ ID NO: 768345 - DNA, 120 bp, Artificial Sequence
  ENSG00000230054_0 (sequence is synthesized)
gccctttcctcctcccaccgcgcaccaaaacatggggtccaagatcttctgttgttgccgcaagaccagcgaggggtcttccaccactgttggcttccacaatccaagaatgttcgaaca

SEQ ID NO: 768346 - DNA, 120 bp, Artificial Sequence
  ENSG00000230054_1 (sequence is synthesized)
cttaggaggccatgagcattctagccggcggcacccacgtggtccctgcggctgcacagctgctgggcttccatgaggaagagggcagtggacaagagtcatgaagactgattcagaaac

SEQ ID NO: 768347 - DNA, 120 bp, Artificial Sequence
  ENSG00000230054_2 (sequence is synthesized)
tcccctgcaggaggagaagacgtctgagccatccctgtgccaccaccaagagtcactccagcttctgaaaaagccaccgtgggggggagccgcctccaattaaagtccttggtcacatca

SEQ ID NO: 768348 - DNA, 120 bp, Artificial Sequence
  ENSG00000230054_3 (sequence is synthesized)
ggtgctgtggggtccctagagacctgaaactcacagcccagtggggacagcccaagggcccttttctttggctcctgcttccctctagaggcggacactgtgctgtaccaaaaagacatc

SEQ ID NO: 768349 - DNA, 120 bp, Artificial Sequence
  ENSG00000230062_0 (sequence is synthesized)
atggcatggacacaacactccggatggttaggactgcctgtcagcacagagctcctcaaatttcacacaagacaggctgttctcacatttcaatgcactcacctggagggcttaccacaa

SEQ ID NO: 768350 - DNA, 120 bp, Artificial Sequence
  ENSG00000230062_1 (sequence is synthesized)
caaagatggccggacccctgcccagagtttcagattctttgttttctgccatggaattggccaaaatgtcagacatgacaaagcttcaccaagctgtggctgcaggagactacagcttag

SEQ ID NO: 768351 - DNA, 120 bp, Artificial Sequence
  ENSG00000230062_2 (sequence is synthesized)
tgaagaagattttgaagaaaggtctctgtgacccaaactacaaagatgtagactggaatgaccggaccccacttcactgggctgcaatcaaagggcaaatggaggtgatacggctcctga

SEQ ID NO: 768352 - DNA, 120 bp, Artificial Sequence
  ENSG00000230062_3 (sequence is synthesized)
tagaatatggagccaggccctgcctggttactagtgtgggctggaccccagctcattttgcagcagaagcaggccatctgaatatactcaaaactctccatgcattgcacgctgccatcg

SEQ ID NO: 768353 - DNA, 120 bp, Artificial Sequence
  ENSG00000230062_4 (sequence is synthesized)
acgcccctgacttctttggagacacaccgaagaggattgcacagatctatggacagaaagcctgtgtggcatttctggaaaaggcagagcccgagtgccaggaccaccgttgcgctgccc

SEQ ID NO: 768354 - DNA, 120 bp, Artificial Sequence
  ENSG00000230062_5 (sequence is synthesized)
cgtgatgaagactgggatgccaagaaaagggagctggagctgtctcttccttccctaaatcaaaacatgaataaaaagaataagaaaagtcgaggccccaccaggcccagcaataccaag

SEQ ID NO: 768355 - DNA, 120 bp, Artificial Sequence
  ENSG00000230062_6 (sequence is synthesized)
gggaggagagtatgagaactcaaccttatgttttctggcaaggaactttccctggtgccagaaatgaggctgttaggcatggtggcctttccatgactttactcatagacccttacccac

SEQ ID NO: 768356 - DNA, 120 bp, Artificial Sequence
  ENSG00000230062_7 (sequence is synthesized)
ctggcttctgcccatggacctgtcattaggtgctgtccacatgggctgttgtttcctggctagcacctactgtgtacaataattaccgggaaaggacaaaacctgcttgcattttgtcat

SEQ ID NO: 768357 - DNA, 120 bp, Artificial Sequence
  ENSG00000230062_8 (sequence is synthesized)
cagtggtttgcacagtcagcatcttttgacccctgccccccaacaataatagaatttcaggagacaaggaaactctggcatgaattaacttcatccctgataacgatcgagagataatgt

SEQ ID NO: 768358 - DNA, 120 bp, Artificial Sequence
  ENSG00000230062_9 (sequence is synthesized)
aaaataatgaacatgtgattataggtctactttttcaactgtaaatttgggaaaattaaattcagatcagataattccaataaaaaattgcatccaaattgagatgcaaaatacacatta

SEQ ID NO: 768359 - DNA, 120 bp, Artificial Sequence
  ENSG00000230062_10 (sequence is synthesized)
gatttcaaacacttagtacaaaaatataaaatgtctccttaataatacttaatattgattccacattgaaatgataatattttggatattgcgttgaataagatatattaccaaaatgaa

SEQ ID NO: 768360 - DNA, 120 bp, Artificial Sequence
  ENSG00000230062_11 (sequence is synthesized)
cgcctgacttctttagtagtttgtatttgcaagatctaagatcatggtaaacattaggtcctaaaatcttggggaaggacaacatgtccttcctctgacttgttagcaatcaaattgagt

SEQ ID NO: 768361 - DNA, 120 bp, Artificial Sequence
  ENSG00000230062_12 (sequence is synthesized)
aggttttaaatgtctgttaattggaagggtttgttatttcattttcagccaaaggagagaggtgcattttaagtatcagaattagatcagctttgagtttgtactaaatttggaatgtaa

SEQ ID NO: 768362 - DNA, 120 bp, Artificial Sequence
  ENSG00000230062_13 (sequence is synthesized)
tagattttcataaattacgtgtgcctttttggaaatgtcaactgtctttatgtctgcttgtaaaagtttcaaaatatgtttttctctcaaaaaggcaacgttatttcatttgcttgaata

SEQ ID NO: 768363 - DNA, 120 bp, Artificial Sequence
  ENSG00000230062_14 (sequence is synthesized)
ttatgataggaacgcttactgatattacttgatagttttatatagccttggaactttaacatataatatagcagtattaatcatgatagttgtacttctttgaaacattaaatttgagga

SEQ ID NO: 768364 - DNA, 120 bp, Artificial Sequence
  ENSG00000230062_15 (sequence is synthesized)
aactaatctatgtaattgtctccacttcttcacctctcacccacgcttcagacttcttccctgatccccatactgaatcagctgtcactcaagtcattagggagctcctcacgctaaatc

SEQ ID NO: 768365 - DNA, 120 bp, Artificial Sequence
  ENSG00000230062_16 (sequence is synthesized)
aattgcctcttctcaattcacatcttacctccacttaattcggtatttaatattcctgaaactcttctcccttgttttatctgatgctattctcttttagtttttcttctacttctctga

SEQ ID NO: 768366 - DNA, 120 bp, Artificial Sequence
  ENSG00000230062_17 (sequence is synthesized)
taattccttatgacttttaaaatgtgctttttctaagaataaatcttatgatatgttcttgcgtgccttttaaatgctgacattccttagggtcctgcccttggctgtcctctactgact

SEQ ID NO: 768367 - DNA, 120 bp, Artificial Sequence
  ENSG00000230062_18 (sequence is synthesized)
ctctctaagtaatcccagcccctccctagtgaccagggatcaacatgaaatatgatcccagcataactgaaatgcaggaggggtgcttgcctccaaatagtggggagtgctattaccaag

SEQ ID NO: 768368 - DNA, 120 bp, Artificial Sequence
  ENSG00000230062_19 (sequence is synthesized)
aacaataaaggtcagtcacatcacgtgtgagtcatttctacttattatcagctcccactaagaacttccctgacagagcgtttagggagaagaatcctgaattaaggggggattaacctg

SEQ ID NO: 768369 - DNA, 120 bp, Artificial Sequence
  ENSG00000230062_20 (sequence is synthesized)
gatcttgaaagctagctggctaatgaaggagggagaaaaactgttgatttagagtgaaggcaccaacttggaaatgtgcataggttgtgtgtatatgtgagaaggtgagggatagtggag

SEQ ID NO: 768370 - DNA, 120 bp, Artificial Sequence
  ENSG00000230062_21 (sequence is synthesized)
tgcagggatgagtggcctggctaggcagagcattcacactagagaggaatggagcataaggtcaggtgacggggtgggtgaccacagtgaactaggcaagcagaagagtgtgagctcatc

SEQ ID NO: 768371 - DNA, 120 bp, Artificial Sequence
  ENSG00000230062_22 (sequence is synthesized)
aggggagtcacaagctgaaacagatgcattagcaatttatttgtgtagtagaggagttggcagtggtactgcgtgggattgaagactgctagactttaggcaaggggatcacttaaggaa

SEQ ID NO: 768372 - DNA, 120 bp, Artificial Sequence
  ENSG00000230062_23 (sequence is synthesized)
tttcttattgattcacattttgagtaagttggctcctgggctaggtgatgaagataaaggatataagagaacttcaaaagaagcctagaccatatgtgatcattttctgaatatcctagg

SEQ ID NO: 768373 - DNA, 120 bp, Artificial Sequence
  ENSG00000230062_24 (sequence is synthesized)
gaatgttgtgaaacaattcagcttttgattcagccccccaagtgataaacctctcatttagcaaatatttttgagttctactatgtgtatgtcattgagttagacactaaaaacaaccta

SEQ ID NO: 768374 - DNA, 120 bp, Artificial Sequence
  ENSG00000230062_25 (sequence is synthesized)
aaataaaccagatacagtgctggacatcaagaaggttaactgtgtgggagacgaaataacttgtttacataaataacactaatacaagacagagagtgactaggcagaggaaagacatgg

SEQ ID NO: 768375 - DNA, 120 bp, Artificial Sequence
  ENSG00000230062_26 (sequence is synthesized)
tgtggtctgaagattgaaaggtcacttccagcttagggtgagggactagtgagtttgctgtcctttgaatgaactgtgcttttaataatggtttgcacttaaaatgctatttgccttccc

SEQ ID NO: 768376 - DNA, 120 bp, Artificial Sequence
  ENSG00000230062_27 (sequence is synthesized)
tataccattatctatcctcttaaattccatttgtcctcatattggttcaaaagtgacttttccaagtacctttaagcaagtcacatactcaccattggcctcatacaaaactgtatatgt

SEQ ID NO: 768377 - DNA, 120 bp, Artificial Sequence
  ENSG00000230062_28 (sequence is synthesized)
gtgtatttcccattgtctatgtgtgtataatgctctatttatttatccatccatgtatccatttacaattatatgtatttttacagaatccatacatacgtataatacatatgtgattgt

SEQ ID NO: 768378 - DNA, 120 bp, Artificial Sequence
  ENSG00000230062_29 (sequence is synthesized)
gagtgattctcattttgttccttatatgtttctgtacttttaaattttatacaaggaacacacatcacttttatgattatgaaaaataaaactaaaaataaacgaaaacagtctcgcaat

SEQ ID NO: 768379 - DNA, 120 bp, Artificial Sequence
  ENSG00000230099_0 (sequence is synthesized)
ttcagctctgcaggacaggtagagactccaggatcatccactgagcactggacataaggaaggctgcatggggaggacacaggacagtgacatcacaggatacccctcctattaggaaaa

SEQ ID NO: 768380 - DNA, 120 bp, Artificial Sequence
  ENSG00000230099_1 (sequence is synthesized)
tcaaggcccagaattcactcggctcttccccaggaggaccaagccctgaatcaggtgcagtgctgcctgccccactgtgccatgggccctgggctcctctgctgggcgctgctttgtctc

SEQ ID NO: 768381 - DNA, 120 bp, Artificial Sequence
  ENSG00000230099_2 (sequence is synthesized)
gacagcaagtgactctgagatgctcttctcagtctgggcacaacactgtgtcctggtaccaacaggccctgggtcaggggccccagtttatctttcagtattatagggaggaagagaatg

SEQ ID NO: 768382 - DNA, 120 bp, Artificial Sequence
  ENSG00000230099_3 (sequence is synthesized)
gcagaggaaacttccctcctagattctcaggtctccagttccctaattatagctctgagctgaatgtgaacgccttggagctggacgactcggccctgtatctctgtgccagcagcttgg

SEQ ID NO: 768383 - DNA, 120 bp, Artificial Sequence
  ENSG00000230124_0 (sequence is synthesized)
actgcccctcgactcctgttccgttggaggggcctgaggcgagcctgagcgcgctgttggccggagggaagccggaggagaccgggtcgactgggcagagcggcagagggtcgaggagcc

SEQ ID NO: 768384 - DNA, 120 bp, Artificial Sequence
  ENSG00000230124_1 (sequence is synthesized)
tgctctgcacgcccagggagtagaagtgggcagggagcagggtcacgtgagggagcgcgccgcgactgagcttgggtccgactggagctcaggctcgcgacccagactggtgggccaggc

SEQ ID NO: 768385 - DNA, 120 bp, Artificial Sequence
  ENSG00000230124_2 (sequence is synthesized)
ctccaagccggccttacacccaatccaaggaggacagaccggacacagagggacggagcgagcaaggagacatggcttcatcattcctgcccgcgggggccatcaccggcgacagcggtg

SEQ ID NO: 768386 - DNA, 120 bp, Artificial Sequence
  ENSG00000230124_3 (sequence is synthesized)
gagagctgagctcaggggacgactccggggaggtggagttcccccatagccctgagatcgaggagaccagttgcctggccgagctgtttgagaaggctgccgcgcacctgcaaggcctga

SEQ ID NO: 768387 - DNA, 120 bp, Artificial Sequence
  ENSG00000230124_4 (sequence is synthesized)
ttcaggtggccagcagggagcagctcttgtacctgtatgccaggtacaaacaggtcaaagttggaaattgtaatactcctaaaccaagcttctttgattttgaaggaaagcaaaaatggg

SEQ ID NO: 768388 - DNA, 120 bp, Artificial Sequence
  ENSG00000230124_5 (sequence is synthesized)
agataccagagaagaaaggaaaagaagcaaatacaggttttggtgggccagttattagttctctatatcatgaagaaaccatcagggaagaagacaaaaatatatttgattactgcaggg

SEQ ID NO: 768389 - DNA, 120 bp, Artificial Sequence
  ENSG00000230124_6 (sequence is synthesized)
aaaacaacattgaccatataaccaaagccatcaaatcgaaaaatgtggatgtgaatgtgaaagatgaagagggtagggctctacttcactgggcctgtgatcgaggacataaggaactag

SEQ ID NO: 768390 - DNA, 120 bp, Artificial Sequence
  ENSG00000230124_7 (sequence is synthesized)
tcacagtgttgctgcaacatagagctgacattaactgtcaggacaatgaaggccaaacagctctacattatgcctctgcctgtgagtttctggatattgtagagctgctgctccagtctg

SEQ ID NO: 768391 - DNA, 120 bp, Artificial Sequence
  ENSG00000230124_8 (sequence is synthesized)
gtgctgaccccactctccgagaccaggatggctgcctgccagaggaggtgacaggctgcaaaacagtttctttggtgctgcagcggcacacaactggcaaggcttaatcaaaagactgga

SEQ ID NO: 768392 - DNA, 120 bp, Artificial Sequence
  ENSG00000230124_9 (sequence is synthesized)
aaactgcagtctgtaatagcataaggcttccattatgaaagaaaactacaaaaataatacttcttttccacccgtctttggtatgtattggctaataaaatcagttctgtggaactggga

SEQ ID NO: 768393 - DNA, 120 bp, Artificial Sequence
  ENSG00000230124_10 (sequence is synthesized)
gggctgtttggaggcgcttggggcgcacaatctggggcaggcggaaccttagtcctcagcctcgcgtttcccgcgactccgctctcaccgctacactaccacacaaacggcctccttccc

SEQ ID NO: 768394 - DNA, 120 bp, Artificial Sequence
  ENSG00000230124_11 (sequence is synthesized)
ccacccccgggggcccatcccggtggcgggctccggagctcgggactgctaatttcagcgaaacgattaaaagacgcccctacagctgacggcactttctctcctccggcagggaaggac

SEQ ID NO: 768395 - DNA, 120 bp, Artificial Sequence
  ENSG00000230124_12 (sequence is synthesized)
gcagggaaggacgtccagcgtagcgtcgcccgcgcttccccgccggcgcagagcaggcctcacagaatcgcacgccgctggcacgcacgccgccccgcccccacggcccagcgccagccg

SEQ ID NO: 768396 - DNA, 120 bp, Artificial Sequence
  ENSG00000230124_13 (sequence is synthesized)
ccgactgcggagcttccatttgttctcctgattttgctcattttacagcccacagcctgtcttgtggaataaatgatacaagcaattgaagaaggcacactgtgcaccaaggggacgact

SEQ ID NO: 768397 - DNA, 120 bp, Artificial Sequence
  ENSG00000230124_14 (sequence is synthesized)
caggcaatctgcagcggtggtccagggctactcagctcagcctcagtcacctgcaatgaaaaccacctcttgccatcagagtcaatgatatagatgggacacttaaaaaccaaaacaggt

SEQ ID NO: 768398 - DNA, 120 bp, Artificial Sequence
  ENSG00000230124_15 (sequence is synthesized)
tcatattctctggtttgtaggaaagaattcatatcttcacagcaaaaataaaaaaggagggggcatgtttttaatatcaaactggccatcaaagtgttcactgacctttaataactgatc

SEQ ID NO: 768399 - DNA, 120 bp, Artificial Sequence
  ENSG00000230124_16 (sequence is synthesized)
ttttcattttgaaatatagggttcaataaggatggtccagaaatcacttttattttactcaagggctgtgaggcctctaccttaggagtctcagttctggtgagagcagtgttttgggag

SEQ ID NO: 768400 - DNA, 120 bp, Artificial Sequence
  ENSG00000230124_17 (sequence is synthesized)
gcattgtgtgagacacaccagttggagcaaagttcccaaaggccaagggggcctatcacagtcaccttgtgctaccaaagcactgagcagccaagcccctaagcagaacagcaggggaga

SEQ ID NO: 768401 - DNA, 120 bp, Artificial Sequence
  ENSG00000230124_18 (sequence is synthesized)
gacccaacaagccagtgtccctagagctctaggccattaccccctgtgctgtgttctgagatgagtctgctctcccactgcttccccagggaaacaatgccctagtgtggtctcacagcc

SEQ ID NO: 768402 - DNA, 120 bp, Artificial Sequence
  ENSG00000230124_19 (sequence is synthesized)
ttctaggaatcagcggaggacttccattgaaaataatggaaattcacattggcgtactttcgatccttaaaaggaacacacatgaccaggaaagatgcccaaggatggcagctgccttgc

SEQ ID NO: 768403 - DNA, 120 bp, Artificial Sequence
  ENSG00000230124_20 (sequence is synthesized)
aaacaagaaacacctgcaaagactaaattcccaggtcccagaaggatggacaaatgtttggtgttgacttcaacagcccagatgagattgactttcccaatcctgccaagaagcctaaaa

SEQ ID NO: 768404 - DNA, 120 bp, Artificial Sequence
  ENSG00000230124_21 (sequence is synthesized)
gaagaccttccacatttgagaactcagtacctgagaacagttatgattctttgcaaacaacctgaggattcataacatgcatcctctgcagagctctccttctcctgcttgctgctgccc

SEQ ID NO: 768405 - DNA, 120 bp, Artificial Sequence
  ENSG00000230124_22 (sequence is synthesized)
cggctcctcttgacgctcttatagaactgcccccagcggtgccgccctgcatccttcttcaggcgtttctctttggcccttctgttctgaaaccaaacctgccacacaagcacaagggac

SEQ ID NO: 768406 - DNA, 120 bp, Artificial Sequence
  ENSG00000230124_23 (sequence is synthesized)
atactcagggggcgtccaccacaaacccaaagcccccaggaccccctaggcgggcggctggaagcagactgaagcctgaatggagcacaggtctgggagtgcgatgcgccccaccccctc

SEQ ID NO: 768407 - DNA, 120 bp, Artificial Sequence
  ENSG00000230124_24 (sequence is synthesized)
tccccaggtgggcctcagaactctgtcttcagttctggcaaaagccctggggtcaagccctgagcccaaccacccgtgagctgatgtcactcaggataccttccacccctgtcccgggcc

SEQ ID NO: 768408 - DNA, 120 bp, Artificial Sequence
  ENSG00000230124_25 (sequence is synthesized)
tgggatccccggagggcacaggagtgctggcatctcacctgtacgaccctcatgtccaggcctgtctctgaggacagctgctccctcacgtgccgggcaggcttgggggagttcttgtat

SEQ ID NO: 768409 - DNA, 120 bp, Artificial Sequence
  ENSG00000230124_26 (sequence is synthesized)
gcattctttaatgtctccagctgcttggctgtgatggtggtccggggccgcttagctccagcctctgagtcatctgcaaggaaaaaccactgcttactggcttcggcctatctgcagcag

SEQ ID NO: 768410 - DNA, 120 bp, Artificial Sequence
  ENSG00000230124_27 (sequence is synthesized)
ctgcgcctcctcccacaccctcccttccatcctttctgcacctaagcctgcctgctgtaggcaggacagcgcgaggcacaggggacatcagagtggagaggtccccactctcatggcact

SEQ ID NO: 768411 - DNA, 120 bp, Artificial Sequence
  ENSG00000230124_28 (sequence is synthesized)
gactcctgcaccacgggccttcccaagccactgaaaagtgaggacagcagtcctttctctgctcagctccctgcctcaaccctcccctgccagcccagctgcacagaagtctcatcagat

SEQ ID NO: 768412 - DNA, 120 bp, Artificial Sequence
  ENSG00000230124_29 (sequence is synthesized)
tgaatgtacccaattccacacgtccctgtcatgacaaacactctgctcacacatcctcatgagttcttgccagagctgtgaaggtgaacagccaggttgaagtcatgttcaaagtcgccc

SEQ ID NO: 768413 - DNA, 120 bp, Artificial Sequence
  ENSG00000230124_30 (sequence is synthesized)
cagatgccctcccctctgtctcatcaggagtctcccatttccccacagccatgtcacctttgccctggcgtcgctgggctcacagccaggggtgagcttgcacacccaacagtgtctaag

SEQ ID NO: 768414 - DNA, 120 bp, Artificial Sequence
  ENSG00000230124_31 (sequence is synthesized)
caggtttctaaactataggtcagaacccactcgtgggctgtaaagtcaccttagtggatcaaaactaaaacaggaaatcagatgaagagaatgggatggaatggcaagatcatttcatta

SEQ ID NO: 768415 - DNA, 120 bp, Artificial Sequence
  ENSG00000230124_32 (sequence is synthesized)
aactttagtttttattgtataaatatgtgtactgagatgaaatgtaaaatgagttttactgtggattgtagtcaaaattttttgagaaaactagtctaaggaatgttctgggcaacacac

SEQ ID NO: 768416 - DNA, 120 bp, Artificial Sequence
  ENSG00000230124_33 (sequence is synthesized)
tgactgatcaacacaaagtcctagacagattttgagtgaacaagctcaagttcctgttagttaaagtctggtttgttccattcaaagtcaggtacagagagaggcgcgtgcgtgtgttcg

SEQ ID NO: 768417 - DNA, 120 bp, Artificial Sequence
  ENSG00000230124_34 (sequence is synthesized)
gaagcacaggtgaatgtaaaggtttgtttcctctcccagcacttaggcatactgcccttttctccacagtgcccctggaggacacacggaataaagtcagcagctggcctgggcagctct

SEQ ID NO: 768418 - DNA, 120 bp, Artificial Sequence
  ENSG00000230124_35 (sequence is synthesized)
gctctctgtgcttgctcacctgtgtgccccagaaggtgtctctgtgacattcctgacttcctctctgtcttttctcctttctttccattcaagaaaaccctctcttagaaacaatagtag

SEQ ID NO: 768419 - DNA, 120 bp, Artificial Sequence
  ENSG00000230124_36 (sequence is synthesized)
ccaacatgtgttagcacctaccatgtgctggtgttgactaaggactttatatgcattcggtcctcacaatctacaaggctctccctggagtcagcagacctggcttcagtgttcttgatg

SEQ ID NO: 768420 - DNA, 120 bp, Artificial Sequence
  ENSG00000230124_37 (sequence is synthesized)
agtgagtgacttgggccagtaactcacttcccccttggaagtccagagggcaacacggcctgccctgatcttgggaggcactagaggaatgaagcagctgtgcagccaggacatgtgtgt

SEQ ID NO: 768421 - DNA, 120 bp, Artificial Sequence
  ENSG00000230124_38 (sequence is synthesized)
acacagtgaggggggacacacccgtgccttcccttctcctcgggctgttttcttctctcacgtggccactgtcatcccggaactactgtggcccaactccctccctgaagccctgaaccc

SEQ ID NO: 768422 - DNA, 120 bp, Artificial Sequence
  ENSG00000230124_39 (sequence is synthesized)
gaagggtagggattccggagcccctgccacagagactacactacttagagagtcattccaaaagacaaaggggaacctccaaaatgccttccttttcattctgaggagtctgtcccttct

SEQ ID NO: 768423 - DNA, 120 bp, Artificial Sequence
  ENSG00000230124_40 (sequence is synthesized)
gtgcatatttatagtctacacgggagtgtctgatgcaactttgaattatgcaaatgggaaatagtgcacttgtgtacaatctttatattaaaaaatgtgaaataatgcaatcaccaaaaa

SEQ ID NO: 768424 - DNA, 120 bp, Artificial Sequence
  ENSG00000230124_41 (sequence is synthesized)
gatgtctccacatcacaaatggaaactacatgctgacaacatttaccctgaaagctttcaagctgagaaagggcttggtttagttgattgggaagcaagcaggcccatatggtcagggaa

SEQ ID NO: 768425 - DNA, 120 bp, Artificial Sequence
  ENSG00000230124_42 (sequence is synthesized)
gctgaggaccactcttagacatctgtacaaaatccttctggtctatctggaagagaggttcaatatcaaaggacttggtttctgtctgtattcaataagctcttcactggggacaaagaa

SEQ ID NO: 768426 - DNA, 120 bp, Artificial Sequence
  ENSG00000230124_43 (sequence is synthesized)
gctgcaacatagagctgacattaactgtcaggtaccagctcagccacaatgggctagaacgccaagcgggctgttggggtgcctgattccatgcctaggctcttggacagctttggacca

SEQ ID NO: 768427 - DNA, 120 bp, Artificial Sequence
  ENSG00000230124_44 (sequence is synthesized)
accaaccattcgtagaaggaagggtccttagggtctctggccccatcacttcatgtgataggcaatgccttctcaccctttcctactctgctgatctcatttaagagaatgggaggccag

SEQ ID NO: 768428 - DNA, 120 bp, Artificial Sequence
  ENSG00000230124_45 (sequence is synthesized)
aagaagcaaacacagcttcccagagggacaggaataaattccagctggctaaattccagtttgcacatggagagcttcctgatggtagatgggtgcacaaggtgggtgggagctgcagca

SEQ ID NO: 768429 - DNA, 120 bp, Artificial Sequence
  ENSG00000230124_46 (sequence is synthesized)
ccattcaggacagcgtttcccacagcagtgcagtctgtcgcaggagtggcaactcgtaaagcgggggttggccttgctctggcctcaggcttagtgatttgctactgcaaacctgcacaa

SEQ ID NO: 768430 - DNA, 120 bp, Artificial Sequence
  ENSG00000230124_47 (sequence is synthesized)
cggggagtccctgcaccaccactggccagagagttctggctttctgaccatgggactgcagcccaaggcatggcaggtgtccagccagcaatccagagagatgcagcccaagaaccactt

SEQ ID NO: 768431 - DNA, 120 bp, Artificial Sequence
  ENSG00000230124_48 (sequence is synthesized)
agaaccctttggacaattttagggctgctccctaaattactcttcccaaccaaggtaggccaaaaaaaaattgctggttcctggaaatgaccaaaactgtcctccaattgagtcagctag

SEQ ID NO: 768432 - DNA, 120 bp, Artificial Sequence
  ENSG00000230124_49 (sequence is synthesized)
gacagcagagaaagctttcagaggggtagacttgcaagctcatctaaaccaactccttcaaaacagactccaaatatttcaccctacaagggatggggaactctggaagactggcatcag

SEQ ID NO: 768433 - DNA, 120 bp, Artificial Sequence
  ENSG00000230124_50 (sequence is synthesized)
ccgatatggctgaacagactgcaggtttggaatccaaatgtgtctacaaatgttcactgattgattgtcattttgttctccccacattttagttttgctcattttacagcccacagcctg

SEQ ID NO: 768434 - DNA, 120 bp, Artificial Sequence
  ENSG00000230124_51 (sequence is synthesized)
tgagctgtccccaaggcctcacgggccctgtgttctcagaggaggctgccctctagggctcagctgacctctgggctgaactagagtcctcccagggcatcgttgtcctggcaggcaact

SEQ ID NO: 768435 - DNA, 120 bp, Artificial Sequence
  ENSG00000230124_52 (sequence is synthesized)
tgttccatcctctgtcccacaaacttccttttctatttccacctgggcctctgcaccaatccctaaataaggcctccccagactagacttcaacaccccatcccttctgaggcctgcccc

SEQ ID NO: 768436 - DNA, 120 bp, Artificial Sequence
  ENSG00000230124_53 (sequence is synthesized)
ccattccccttatgaaaaaacatggtggggggagctcatgctctttaaagggagcaggaagatgaaggctccactccattgtcaaatggccatgagttagccttttccctatacctgtca

SEQ ID NO: 768437 - DNA, 120 bp, Artificial Sequence
  ENSG00000230124_54 (sequence is synthesized)
tcccaaatgaccagggccctctgcgggagccacacgctccctgtgggaacgatcatgccttccaggtatacaaatgtgccaggctttccccaagcacatccacagttggttgtgttcatt

SEQ ID NO: 768438 - DNA, 120 bp, Artificial Sequence
  ENSG00000230124_55 (sequence is synthesized)
gatccccacaacgcagtgagatgggcaaagatatggtattcctcttgggaatactggggctcaagagaagtgaatcgatttgacagagctgcactggaaaccaggtctctgatcgccagt

SEQ ID NO: 768439 - DNA, 120 bp, Artificial Sequence
  ENSG00000230124_56 (sequence is synthesized)
tgagtactcttccctttccccctccgcagaagaccttccacatttgagaactcagtacctgagaacagttatgattctttgcaaacaacctgaggattcataacatgcagtaatttacaa

SEQ ID NO: 768440 - DNA, 87 bp, Artificial Sequence
  ENSG00000230124_57 (sequence is synthesized)
gtgtagctgagacactaatttttgtatcttttgtacagatagggtctctctgtgttcctcagggtggtctcaaactcctggcctcaa

SEQ ID NO: 768441 - DNA, 120 bp, Artificial Sequence
  ENSG00000230124_58 (sequence is synthesized)
ccactaatttttgtatcttttgtacagatagggtctctctgtgttcctcagggtggtctcaaactcctggcctcaagcagttttcaggcctcttaaagtgctgagattacaggtgtgagc

SEQ ID NO: 768442 - DNA, 120 bp, Artificial Sequence
  ENSG00000230124_59 (sequence is synthesized)
gctcccaacattttccctgtaagccccaaaagctccatctggggaattcactgacttttactattatataaggaaagtagatagttgacataggaagagaaatgaaataaaaaatgagtt

SEQ ID NO: 768443 - DNA, 120 bp, Artificial Sequence; identical to SEQ ID NO: 611458
  ENSG00000230178_0 (sequence is synthesized)

SEQ ID NO: 768444 - DNA, 120 bp, Artificial Sequence
  ENSG00000230178_1 (sequence is synthesized)
ctatgtggcaagcattactggaaacatcctcattgtgttttctgtgaccactgaccctcacttacactcccccatgtactttctactggccagtctctccttcattgacttaggagcctg

SEQ ID NO: 768445 - DNA, 86 bp, Artificial Sequence; identical to SEQ ID NO: 611460
  ENSG00000230178_2 (sequence is synthesized)

SEQ ID NO: 768446 - DNA, 120 bp, Artificial Sequence; identical to SEQ ID NO: 611461
  ENSG00000230178_3 (sequence is synthesized)

SEQ ID NO: 768447 - DNA, 120 bp, Artificial Sequence; identical to SEQ ID NO: 611462
  ENSG00000230178_4 (sequence is synthesized)

SEQ ID NO: 768448 - DNA, 120 bp, Artificial Sequence; identical to SEQ ID NO: 611463
  ENSG00000230178_5 (sequence is synthesized)

SEQ ID NO: 768449 - DNA, 120 bp, Artificial Sequence; identical to SEQ ID NO: 611464
  ENSG00000230178_6 (sequence is synthesized)

SEQ ID NO: 768450 - DNA, 120 bp, Artificial Sequence
  ENSG00000230178_7 (sequence is synthesized)
tctatacattcaggaataaggagatgaaggcagcaataaagagagtatgcaaacagctagtgatttacaagaggatctcataaatgatataataagcccttctcattaaacatgatatgg

SEQ ID NO: 768451 - DNA, 120 bp, Artificial Sequence
  ENSG00000230257_0 (sequence is synthesized)
ctgcctcgtgttgtctgttggcacactctcaagagtttgaacggatacaagaatctttcatctggtgccgaaacccgggaggggctccggtcttcgtcccccgtggacctacccctccgc

SEQ ID NO: 768452 - DNA, 120 bp, Artificial Sequence
  ENSG00000230257_1 (sequence is synthesized)
cccagaaagcaggccacagcagccggacaaaggaagctcctcagcctccagttgcttctctgtgcatgcacatcagtcactgatctcacctactggggccctgcaggccatggggccaca

SEQ ID NO: 768453 - DNA, 120 bp, Artificial Sequence
  ENSG00000230257_2 (sequence is synthesized)
atgaaggccactggcccacacaatgcccaaacccaggtaaacccacgaggccatgccccctctgcggaggaccccactggaagttggactgtgagcggcccctgcaaggaccacccccat

SEQ ID NO: 768454 - DNA, 120 bp, Artificial Sequence
  ENSG00000230257_3 (sequence is synthesized)
cccttcctgagccaatcaaaccctcctactcggatctcgtcagccttgccgctgaagactgatagtgccttggaacagacaccccagcaactaccatcgcttcatctgagccaagggtaa

SEQ ID NO: 768455 - DNA, 120 bp, Artificial Sequence
  ENSG00000230257_4 (sequence is synthesized)
tcacctactggcccagtcccaaggcgcaaggccacttgtgccagcagtgtgagtcagcaagatagcagaagcaggaagagagccggccagaagacacctactctgactgggagacacgta

SEQ ID NO: 768456 - DNA, 120 bp, Artificial Sequence
  ENSG00000230257_5 (sequence is synthesized)
cccctgaagattgagaaagaggccatccagggagtgaagatggaatgagaagaacagagaaacaatgacagagtccttacaaacaccatgatacaagaaggcaatggggatatgttatcc

SEQ ID NO: 768457 - DNA, 120 bp, Artificial Sequence
  ENSG00000230257_6 (sequence is synthesized)
actgctgagtatgaagaactaattggagaaggaagccgttgtatagcagatgcagagcagcagcaaaaatggtaatgaaaatagaagataaattagaaaatttggaaaaacccaaacaga

SEQ ID NO: 768458 - DNA, 120 bp, Artificial Sequence
  ENSG00000230257_7 (sequence is synthesized)
tcagccatattgaagggaaaaagaaaaacaaaacaaagtgggagggcagaaatgtagaacggtatacactcttttaaccccaaggatgaatgtagccaagaacacagtggggacttagga

SEQ ID NO: 768459 - DNA, 120 bp, Artificial Sequence
  ENSG00000230257_8 (sequence is synthesized)
gtctcagcacagagcattctctactccctactgctcaggcaaagaactccttcatcatgcagaaccaaaactggtgtagagtcttaaatgacctgggtatctctacgcagaagaaagcgc

SEQ ID NO: 768460 - DNA, 120 bp, Artificial Sequence
  ENSG00000230257_9 (sequence is synthesized)
tttccatgtaaaaggattaacttgaacctgggtgctcaagggacaccctaggctgcttatcccactgattctgatctgactgtgttaagtaataaatcatgtggttacatattcacatta

SEQ ID NO: 768461 - DNA, 120 bp, Artificial Sequence
  ENSG00000230268_0 (sequence is synthesized)
atgctctcctccccactcagggtggctgtggtgtgtgtgagcaacatcaacaggagcatggaggcccacagcatcctcaggagaaaagggctaagtgtccggtctttcggaactgaatct

SEQ ID NO: 768462 - DNA, 120 bp, Artificial Sequence
  ENSG00000230268_1 (sequence is synthesized)
catgtgaggctaccaggacgaagacccaatcatcctgtagtttacgattttgcaacaacatataaggagatgtacaatgacctcctcaggaaagatagagaatgctacacccacaatgga

SEQ ID NO: 768463 - DNA, 120 bp, Artificial Sequence
  ENSG00000230268_2 (sequence is synthesized)
tatgacacagtggtggaagatctgtgttccagagaacagcagacctttcagcctgtgcacgtgatcaacatggacatcaaagataccctggaaggtgccatcctgggagctttcctcatc

SEQ ID NO: 768464 - DNA, 120 bp, Artificial Sequence
  ENSG00000230268_3 (sequence is synthesized)
tgtgagatttgccagtgcctgcagcagtccgacgacatggaagacagtctggaggagctgctgttgcaaatggaggagaaggcaggaaaaagctttcttcacaccgtctgcttctactga

SEQ ID NO: 768465 - DNA, 120 bp, Artificial Sequence
  ENSG00000230301_0 (sequence is synthesized)
atgttcctttacctttgcttcatttttcagaggacatgcagtgaggagatggaagaggaaaatgcaacattgctgacagagtttgttctcacaggatttttacatcaacctgactgtaaa

SEQ ID NO: 768466 - DNA, 120 bp, Artificial Sequence
  ENSG00000230301_1 (sequence is synthesized)
ataccgctcttcctggcattcttggtaatatatctcatcaccatcatggggaatcttggtctaattgttctcatctggaaagaccctcaccttcatatcccaatgtacttattccttggg

SEQ ID NO: 768467 - DNA, 120 bp, Artificial Sequence
  ENSG00000230301_2 (sequence is synthesized)
agtttagcctttgtggatgcttcgttatcatccacagtgactccgaagatgctgatcaacttcttagctaagagtaagatgatatctctctctgaatgcatggtacaatttttttccctt

SEQ ID NO: 768468 - DNA, 120 bp, Artificial Sequence
  ENSG00000230301_3 (sequence is synthesized)
gtaaccactgtaaccacagaatgttttctcttggcaacaatggcatatgatcgctatgtagccatttgcaaagctttactttatccagtcattatgaccaatgaactatgcattcagcta

SEQ ID NO: 768469 - DNA, 120 bp, Artificial Sequence
  ENSG00000230301_4 (sequence is synthesized)
ggtggccttcttcatgctttaatccatgaagctttttcattcagattaaccttctgtaattccaacataatacaacacttttactgtgacattatcccattgttaaagatttcctgtact

SEQ ID NO: 768470 - DNA, 120 bp, Artificial Sequence
  ENSG00000230301_5 (sequence is synthesized)
gattcctctattaactttctaatggtttttattttcgcaggttctgttcaagtttttaccattggaactattcttatatcttatacaattatcctctttacaatcttagaaaagaagtct

SEQ ID NO: 768471 - DNA, 120 bp, Artificial Sequence
  ENSG00000230301_6 (sequence is synthesized)
atcaaagggatacgaaaagctgtctccacctgtggggctcatctcttatctgtatctttatactatggccccctcaccttcaaatatctgggctctgcatctccgcaagcagatgaccaa

SEQ ID NO: 768472 - DNA, 120 bp, Artificial Sequence
  ENSG00000230301_7 (sequence is synthesized)
gatatgatggagtctctattttacactgtcatagttcctttattaaatcccatgatctacagcctgagaaacaagcaagtaatagcttcattcacaaaaatgttcaaaagcaatgtttag

SEQ ID NO: 768473 - DNA, 120 bp, Artificial Sequence
  ENSG00000230358_0 (sequence is synthesized)
atggacagaacggagactaggttccgtaagaggggacagattacgggaaagatcacgaccagccgtcaactgcacccccagaatgagcagagtccccagcggagcacctcggggtacccc

SEQ ID NO: 768474 - DNA, 75 bp, Artificial Sequence
  ENSG00000230358_1 (sequence is synthesized)
tggctggaaaaggaagaaggagtggtcagatgaatctgaggaggagccggagaaggagctcgcccctgagcctga

SEQ ID NO: 768475 - DNA, 120 bp, Artificial Sequence
  ENSG00000230358_2 (sequence is synthesized)
tcgcccctgagcctgaggagacctgggtagtggagacgctgtgtgggcttaagatgaagctgaagcaacagcgagtgtcacccatcctccctgagcaccacaaggacttcaacagtcagc

SEQ ID NO: 768476 - DNA, 120 bp, Artificial Sequence
  ENSG00000230358_3 (sequence is synthesized)
gacttcaacagtcagcttgcccctggggtagatcccagccccccgcataggtccttttgctggaaaaggaagagggagtggtgggacgaatctgaggagtcgttggaggaggagccacgg

SEQ ID NO: 768477 - DNA, 120 bp, Artificial Sequence
  ENSG00000230358_4 (sequence is synthesized)
aaggtgctcgcccctgagcctgaggagatctgggtggcggagatgctgtgtggcctcaagatgaagctgaagcgacggcgagtgttgctcgtgctccctgagcaccacgaggccttcaac

SEQ ID NO: 768478 - DNA, 120 bp, Artificial Sequence
  ENSG00000230358_5 (sequence is synthesized)
gaggaggacgacgaggactccaaacaaaacatcttccacttcctgtatgggaagacccgctctcgcatacccttgctccgtaagcgttggttccagttaggccgttccatgaacccgagg

SEQ ID NO: 768479 - DNA, 120 bp, Artificial Sequence
  ENSG00000230358_6 (sequence is synthesized)
gccaggaagaaccgctctcgcatacccttgctccgtaagcgtcggttccagttaggccgttccatgaacccgagggccaggaagtaccgctctcgcatacccttggtccgtaagcgtcgg

SEQ ID NO: 768480 - DNA, 120 bp, Artificial Sequence
  ENSG00000230358_7 (sequence is synthesized)
ttccagttacgccgttgcatgaacccgagggccaggaagaaccgctctcagatagtcctgttccagaaacttcggttccagttcttctgttccatgagcggcagggcttgggtttccccg

SEQ ID NO: 768481 - DNA, 81 bp, Artificial Sequence
  ENSG00000230358_8 (sequence is synthesized)
gttcttctgttccatgagcggcagggcttgggtttccccggaggagttggaacgagatcgcgctcacctttcctagagctc

SEQ ID NO: 768482 - DNA, 120 bp, Artificial Sequence
  ENSG00000230453_0 (sequence is synthesized)
gggggatctcgaatttggagctgggtgggggtggaaaggccacgaggagccgcggcgtctcaggagcgggtggtgggcatctgagaagtcgccaccatgaggaagctcctcagttttggg

SEQ ID NO: 768483 - DNA, 120 bp, Artificial Sequence
  ENSG00000230453_1 (sequence is synthesized)
agacgcctgggccaggcgctcctgagctccatggaccaagagtatgcgggtcgggggtaccacattcgggactgggaactgcggaagatccacagggcggccatcaagggcgacgccgca

SEQ ID NO: 768484 - DNA, 120 bp, Artificial Sequence
  ENSG00000230453_2 (sequence is synthesized)
gaggtggagcactgcctgacgcgcaggttccgggacttggacgtccgcgacagaaaagacaggactgttctacatttggcctgtgcccatggccgtgtgcaagtggtcactctcttgctg

SEQ ID NO: 768485 - DNA, 120 bp, Artificial Sequence
  ENSG00000230453_3 (sequence is synthesized)
gacagaaaatgccagatcaacatctgtgacagactaaacaggacacctttaatgaaggctgtacactgccaggaagaggcttgtgccattattctcctgaaacgtggcgccaatccaaac

SEQ ID NO: 768486 - DNA, 120 bp, Artificial Sequence
  ENSG00000230453_4 (sequence is synthesized)
attaaggatatctacggcaacactgctctccattatgccgtgtataatgaggggacttcactggcagaaagactgctttcccaccatgcaaatattgaagcactaaacaaggagggaaac

SEQ ID NO: 768487 - DNA, 120 bp, Artificial Sequence
  ENSG00000230453_5 (sequence is synthesized)
actccacttttgtttgctataaattccaggagacagcatatggtggaatttttattgaagaaccaggcaaatatacatgccgttgacaatttcaaaagaacagccctcatacttgcagta

SEQ ID NO: 768488 - DNA, 120 bp, Artificial Sequence
  ENSG00000230453_6 (sequence is synthesized)
cagcataacttgtcaagtatcgtcaccctcctgcttcaacaaaatatacatatctcttctcaagacatgtttggccaaactgccgaggattatgctttttgttgtgatttgagaagcatc

SEQ ID NO: 768489 - DNA, 120 bp, Artificial Sequence
  ENSG00000230453_7 (sequence is synthesized)
caacaacaaattttggaacataaaaataagatgcttaaaaatcatcttcgaaatgacaatcaagaaacagcagctatgaagcctgaaaatttgaaaaaaagaaaaaaaagaaaaaaattg

SEQ ID NO: 768490 - DNA, 120 bp, Artificial Sequence
  ENSG00000230453_8 (sequence is synthesized)
aaaaaaagaaaagaaggtgcaaaagcagaacacaacttaaaagtggcttcagaggaaaagcaagaaaggcttgaaagaagtgaaaataaacagccgcaggattctcaaagttatggaaaa

SEQ ID NO: 768491 - DNA, 120 bp, Artificial Sequence
  ENSG00000230453_9 (sequence is synthesized)
aagaaggatgagatgtttggaaattttatgttgaagagagacattgccatgctcaaagaggaattatatgcaataaaaaatgacagtctcagaaaggaaaagaaatatattcaggaaatt

SEQ ID NO: 768492 - DNA, 120 bp, Artificial Sequence
  ENSG00000230453_10 (sequence is synthesized)
aaaagtattacagaaataaatgctaactttgaaaagagtgtaagactcaatgaagaaatgataacaaaaaaagtggcccagtattcgcaacagcttaatgatctgaaagctgagaatgca

SEQ ID NO: 768493 - DNA, 120 bp, Artificial Sequence
  ENSG00000230453_11 (sequence is synthesized)
aggctgaattcaaaattggagaaggaaaaacacaacaaagaaagactagaagctgaagttgaatccctccattctaacttggccactgctataaatgagtacaatgaaattttggaaaga

SEQ ID NO: 768494 - DNA, 120 bp, Artificial Sequence
  ENSG00000230453_12 (sequence is synthesized)
aaagacctagaactagttttatggagagcagatgatgtttctagacatgaaacaatgggttctaatatttctcaactaacagataagaatgagttgcttactgaacaggtccataaagct

SEQ ID NO: 768495 - DNA, 120 bp, Artificial Sequence
  ENSG00000230453_13 (sequence is synthesized)
cgggtgaagttcaataccttaaaaggtaagctccgtgagacaagagatgctctcagggaaaagacattggctttagaaagtgtacagctggacctaaagcaagcgcagcatcgaataaag

SEQ ID NO: 768496 - DNA, 120 bp, Artificial Sequence
  ENSG00000230453_14 (sequence is synthesized)
gaaatgaagcagatgcatccaaatggggaagctaaagaaagtcaatccattggaaagcagaactcttcagaggagagaatacgtcaacgagaacttgaaaatctcttgcttgaacgacaa

SEQ ID NO: 768497 - DNA, 120 bp, Artificial Sequence
  ENSG00000230453_15 (sequence is synthesized)
cagagactgtcttgagaatggaaaggaagatcttctagaagaaagaaataaggaattaatgaatgaatataattatttaaaagaaaaactgcttcagtatgaaaaagaaaaagcagaaag

SEQ ID NO: 768498 - DNA, 120 bp, Artificial Sequence
  ENSG00000230453_16 (sequence is synthesized)
agaagtgattgtgagagaatttcaagaagaactggtcgatcatcttaaaaaattttcaatgtcagagtctccactggaaggtacatcacattgtcatattaatttggatgagacatggac

SEQ ID NO: 768499 - DNA, 120 bp, Artificial Sequence
  ENSG00000230453_17 (sequence is synthesized)
ttcaaagaagaaattatttcaagtagaaattcaacctgaagaaaaacatgaagaattcagaaaagtttttgaattaatatcattactgaactatactgcggatcaaataagaaagaaaaa

SEQ ID NO: 768500 - DNA, 120 bp, Artificial Sequence
  ENSG00000230453_18 (sequence is synthesized)
tcgtgaattagaagaagaggcaactggatataagaaatgcctagaaatgacaataaatatgttaaatgcatttgcaaatgaagacttcagttgccatggagacttaaatacagaccaact

SEQ ID NO: 768501 - DNA, 120 bp, Artificial Sequence
  ENSG00000230453_19 (sequence is synthesized)
gaaaatggatattctgtttaagaagctaaaacagaagtttgatgatcttatggccgagaaggaagctgtatcttcaaaatgtgtcaatttggccaaagacaatgaagttcttcatcagga

SEQ ID NO: 768502 - DNA, 120 bp, Artificial Sequence
  ENSG00000230453_20 (sequence is synthesized)
gttattatctatgggaaaagtacaagagaaatgtgaaaaacttgagaaggataaaaagatgttggaagaaaaagtattaaatcttaagacacatatggaaaaagatatggtagaacttgg

SEQ ID NO: 768503 - DNA, 120 bp, Artificial Sequence
  ENSG00000230453_21 (sequence is synthesized)
taaagtacaagaatataaatcggagctggatgaaagggcaatgcaggcaatagaaaaattagaagaaatccatttacagaaacaagcagaatatgaaaaacaattagagcagttaaacaa

SEQ ID NO: 768504 - DNA, 120 bp, Artificial Sequence
  ENSG00000230453_22 (sequence is synthesized)
acttaaagatgtggaatgtaaattctccaaaatgaaaacagcttatgaagatgttacaactgaattagaagagtataaggaagcctttgcagtagcattgaaagctaacagttccatgtc

SEQ ID NO: 768505 - DNA, 120 bp, Artificial Sequence
  ENSG00000230453_23 (sequence is synthesized)
ctttgcagtagcattgaaagctaacagttccatgtcagaaaaaataacgaaatcggataagaaaatagctgtgatcagcaccaagctctttatggagaaagagcggatggaatattttct

SEQ ID NO: 768506 - DNA, 120 bp, Artificial Sequence
  ENSG00000230453_24 (sequence is synthesized)
cagcactcttcctatgaggccagacccagagttaccttgtgttgaaaatcttaatagtatagaactcaacagaaaatatattcccaaaatggccataagaattcctacttcaaacccaca

SEQ ID NO: 768507 - DNA, 120 bp, Artificial Sequence
  ENSG00000230453_25 (sequence is synthesized)
aacccacagacttcaaataactgcaagaactccttgactgagcttttgctgcgttgggcccttgctcctatctactttcttctctagaatccactggtaagccacatctaatgaagagaa

SEQ ID NO: 768508 - DNA, 120 bp, Artificial Sequence
  ENSG00000230453_26 (sequence is synthesized)
taaccataaaatcttaaggaaaagttgtatgatttaaaagatcataaaactttattactgggctatttacatgaaattttaattgtttctcataaaatataaaacatcacaatctttact

SEQ ID NO: 768509 - DNA, 76 bp, Artificial Sequence
  ENSG00000230453_27 (sequence is synthesized)
ttttaaatgaaccagtgttattgagtttgacctactcaaattgcctgaatgtcagctgtttaaacagccaaacaac

SEQ ID NO: 768510 - DNA, 120 bp, Artificial Sequence
  ENSG00000230453_28 (sequence is synthesized)
caaattgcctgaatgtcagctgtttaaacagccaaacaaccaagtcatcattgatactgtagtaaaggtcatctttgcattttacactttttattaccatatatagtaggagacttaaag

SEQ ID NO: 768511 - DNA, 120 bp, Artificial Sequence
  ENSG00000230453_29 (sequence is synthesized)
agtatctgccaggtttgtccatactagtgttatgattttctttttgtagttcaatagtattttgtgtggagatactttgaagctctgtaaatatctggttactcctcaaaacccactaga

SEQ ID NO: 768512 - DNA, 73 bp, Artificial Sequence
  ENSG00000230453_30 (sequence is synthesized)
actcctcatattactgtgatggttgccagatgattatttttcttattttcttctttgttctacatggagaaat

SEQ ID NO: 768513 - DNA, 120 bp, Artificial Sequence
  ENSG00000230453_31 (sequence is synthesized)
ttttaagcttcagcctctttttaacatattcaaaattgctctttgaatcactgattcaaaatgaaaggcaacaaacatatggtaattaacttataattgttttaaaagtgtattcttttc

SEQ ID NO: 768514 - DNA, 120 bp, Artificial Sequence
  ENSG00000230453_32 (sequence is synthesized)
aagaatgaaagttttaaaacacaaggagcaagttcaaaagtctcgctctatcaccagtctggagtccagtggcatgatctcagattactgcagccttcacctcccaggttcaagcaattc

SEQ ID NO: 768515 - DNA, 82 bp, Artificial Sequence
  ENSG00000230453_33 (sequence is synthesized)
aacaggcacatgcgaccatgcccagaaacagcagctatgaagcctgaaaatttgaaaaaaagaaaaaaaagaaaaaaattga

SEQ ID NO: 768516 - DNA, 120 bp, Artificial Sequence
  ENSG00000230453_34 (sequence is synthesized)
cttcaaacccacagacttcaaataactgcaagaactccttgactgaggttagttatatgaccatttctcttttgggtttcatttctctaatataattcttgtttataatttggtgaaata

SEQ ID NO: 768517 - DNA, 74 bp, Artificial Sequence
  ENSG00000230453_35 (sequence is synthesized)
ctgagttgttctgttgacttatgcatgttaagtaaagattataattagctgtgttaacacagaaaggaaatgga

SEQ ID NO: 768518 - DNA, 120 bp, Artificial Sequence
  ENSG00000230453_36 (sequence is synthesized)
tattaattaaatttaggtttattttagtaataaagtgtaaatagcaaatggcattccttttcattgttgggttagtagatactacattcagtatctttttcttacacacatctaatgaaa

SEQ ID NO: 768519 - DNA, 120 bp, Artificial Sequence
  ENSG00000230453_37 (sequence is synthesized)
tgaaaacaaaaactttcacagtgaagagtatacttatgcatcattaattcatcatgttccatagcttaaaaaattcccaagaagtggatccatctcttttttactgattctgcaatttct

SEQ ID NO: 768520 - DNA, 81 bp, Artificial Sequence
  ENSG00000230453_38 (sequence is synthesized)
aaaaacaaaagcatcaattggcttacatctgttctcaggaaaagttccagaaatttcaccatgaaataaaaacacccatgt

SEQ ID NO: 768521 - DNA, 120 bp, Artificial Sequence
  ENSG00000230453_39 (sequence is synthesized)
gtaattcttgtcaggttactcagccttgtctctcaccacttactgcattctgccctttgctctagcaccaaagtggacagagtagaactccgcagggctctttgttacctcaggatcttt

SEQ ID NO: 768522 - DNA, 120 bp, Artificial Sequence
  ENSG00000230453_40 (sequence is synthesized)
gccttcgcctcttccctctttctggcaagattttcctcatccttcagtcatcaacctatgtatcccctccaccagaaagcccatgatattgacacaaaagtgggatagatgtcccttctg

SEQ ID NO: 768523 - DNA, 120 bp, Artificial Sequence
  ENSG00000230453_41 (sequence is synthesized)
tgtgttccagtagtgccccgctgtatacctgtcatgatatctatgactctatatggacattacctgccggtcttttaggttatagcatatgactattgggaggtggaccatgccatcttc

SEQ ID NO: 768524 - DNA, 120 bp, Artificial Sequence
  ENSG00000230453_42 (sequence is synthesized)
atcttgtaattccagtgctggctctagtaccttagcacgtggctgttgagtgcatgaatgaagaatgaaaaagctgtgatatttaaccacaattagaattagtgccatgtgtaaatgatt

SEQ ID NO: 768525 - DNA, 120 bp, Artificial Sequence
  ENSG00000230453_43 (sequence is synthesized)
taatagtaatcttgtattgtaattgcacgtacatatttctcattcttattaactctgataatgttctcaactctacattttaaacttacacttcgttaactgaaatgttttaggtaaaga

SEQ ID NO: 768526 - DNA, 120 bp, Artificial Sequence
  ENSG00000230453_44 (sequence is synthesized)
aggaataatgccattcaatgtttacaatgacatgaaccattgtaggttttgagatattgcactacatttcctgaaaacccctctcgctctcctaggactgttctacatttggcctgtgcc

SEQ ID NO: 768527 - DNA, 120 bp, Artificial Sequence
  ENSG00000230453_45 (sequence is synthesized)
catggccgtgtgcaagtggtcactctcttgctggacagaaaatgccagatcaacatctgtgacagactaaacaggacacctttaatgaaggagggaaacactccacttttgtttgctata

SEQ ID NO: 768528 - DNA, 120 bp, Artificial Sequence
  ENSG00000230453_46 (sequence is synthesized)
tggtggaatttttattgaagaaccaggcaaatatacatgccgttgacaatttcaaaaggtgcaatagtttttgttttctgttttcttttttcctaaaaacctgagtgttctagagtggta

SEQ ID NO: 768529 - DNA, 120 bp, Artificial Sequence
  ENSG00000230453_47 (sequence is synthesized)
acagtcgctcaagtcagaaatgttaataagattaaacttataattattggcatatagtaaaaaataacatgaataatcaggtagaaaagaagttatttggactaagcaacataaaaaaca

SEQ ID NO: 768530 - DNA, 120 bp, Artificial Sequence
  ENSG00000230453_48 (sequence is synthesized)
gtatatagtaggattcatcttctcttatagactgttatttgtaatttgatgtttttgtcctgtaatcttatattagctaaaggggttttgtattttattaattttatgaagtgtagactt

SEQ ID NO: 768531 - DNA, 120 bp, Artificial Sequence
  ENSG00000230453_49 (sequence is synthesized)
gacaatcaagaagcagcagccatgaagaatgaaagttttaaaacacaaggagcaagttcaaaaggtaggacacctgagtgaactttgtagagtttatgagcagttcaaatttactagtgc

SEQ ID NO: 768532 - DNA, 120 bp, Artificial Sequence
  ENSG00000230510_0 (sequence is synthesized)
atccctccgcgccccgctccacacctacgggcccgcgaatctctcgtccccaccctgcacaggaattgggtttgccgccgggcgcgcgcgcgctcgctcccgtcgccggactactttccc

SEQ ID NO: 768533 - DNA, 120 bp, Artificial Sequence
  ENSG00000230510_1 (sequence is synthesized)
tcgccgcgcgccccgcctcccgggcccacttcactttcttcggcggaggggcacagctcggcggtgcgtgacgcgtccctctgtgagccgcgtcactattgggcctggcccatggcggaa

SEQ ID NO: 768534 - DNA, 120 bp, Artificial Sequence
  ENSG00000230510_2 (sequence is synthesized)
atgagagcttggcgcccattggtccgaccttccctgcaatgcgtcaaactggggcgagccactgcaaggtggtggtgggtggtcaaggtgaagccccacgacaaggatgccaaaatgaaa

SEQ ID NO: 768535 - DNA, 120 bp, Artificial Sequence
  ENSG00000230510_3 (sequence is synthesized)
taccaggagtgcaacaagatcgtgaagcagaaggcctttgagcgggccatcgcaggcgacgagcacaagcgctccgtggtggactcgctggacatcgagagcatgaccatcgagggtgag

SEQ ID NO: 768536 - DNA, 120 bp, Artificial Sequence
  ENSG00000230510_4 (sequence is synthesized)
tacagcggacccaagcttgaggacgacaaagtgacaatcaccttcatgaaggggctcatgcagtggtacaaggaccagaagaaactgcaccagaaatgcgcctaccagggtcttgctcta

SEQ ID NO: 768537 - DNA, 73 bp, Artificial Sequence
  ENSG00000230510_5 (sequence is synthesized)
gaaactgcaccagaaatgcgcctaccagggtcttgctctatcacccaggctgaccacgtgatcctcccacctc

SEQ ID NO: 768538 - DNA, 84 bp, Artificial Sequence
  ENSG00000230510_6 (sequence is synthesized)
ccacacctggctaatttttttatttttatagagatgggtctccctatgttgcgcaggctgatttcaggggattacaggcgtgag

SEQ ID NO: 768539 - DNA, 120 bp, Artificial Sequence
  ENSG00000230510_7 (sequence is synthesized)
ctgtgtagcccaggctggactcaaactacagggctcaaggcattcttcatctcagcctcttgagtaggtttgactacagtcatgtgccactgtgcccaactacctttgtccgggttccta

SEQ ID NO: 768540 - DNA, 120 bp, Artificial Sequence
  ENSG00000230510_8 (sequence is synthesized)
ggaattctccagaaggcagaatgagtacaaagaaaacacaggcaagtttctgttaaagagttacctgtggccacagttcctctggaagtttaacatagagttaccatatactatgctatc

SEQ ID NO: 768541 - DNA, 120 bp, Artificial Sequence
  ENSG00000230510_9 (sequence is synthesized)
gccatccccaaattcatatgttgaagtcttaactcccagcacctctgaatgtgactgtatttggagatgggggtctttaaagaggtaattaaggtaaaatgaggccgggtgctttggtgg

SEQ ID NO: 768542 - DNA, 77 bp, Artificial Sequence
  ENSG00000230510_10 (sequence is synthesized)
cctatctctactaaaaatacaaaatttgcctggcgtggcggcatatgcctgtgtagggaggaggaggttgcagtgag

SEQ ID NO: 768543 - DNA, 120 bp, Artificial Sequence
  ENSG00000230510_11 (sequence is synthesized)
gggcaacaagagcgaaactttggttcaaaaacaaacaaaaaaaaagtaaaatgaggtcccatgtgtgggcccttaatccaacctgactggtgtctttatgagaaaaggggaccaggacac

SEQ ID NO: 768544 - DNA, 120 bp, Artificial Sequence
  ENSG00000230510_12 (sequence is synthesized)
agccccatgcagagggaagaccatgtgaggatacagggagaagacggccgtctgcacagccaaggagagaggcctcaggagacaccaacctatccaacaccttgattttggacttctggc

SEQ ID NO: 768545 - DNA, 120 bp, Artificial Sequence
  ENSG00000230510_13 (sequence is synthesized)
ctccagaattgtgaaaaagttaatttctgtcattgaagccacccattctgtgatagtttgttacagcagtcctcagcgcgtagaatacgatgccatttgtatggcagacagtctcattgt

SEQ ID NO: 768546 - DNA, 120 bp, Artificial Sequence
  ENSG00000230510_14 (sequence is synthesized)
agcgccccgtgggcttgcagcagcagcagcccctgcagagggccctgagcggtggctgtggggacctatgcggcatgggggcaggtgggcgtggcggggagaggcgcggcagagcggctt

SEQ ID NO: 768547 - DNA, 120 bp, Artificial Sequence
  ENSG00000230510_15 (sequence is synthesized)
agggccagctccgtagggaaaaagtgtggcttggcctttccccttcgtgtccccagccccaacaccgtgcctggcacgcggcggcggctgttatttgttgaatgactgacggtcggaatg

SEQ ID NO: 768548 - DNA, 120 bp, Artificial Sequence
  ENSG00000230510_16 (sequence is synthesized)
ctgggatttcagacaaaaatcaggaatcatcaccagccaagactgtgttcagaccacgtgacgtcttccaggcaccaggaagaaatacgaccaacctccgtaacaaatgagagaaacttc

SEQ ID NO: 768549 - DNA, 120 bp, Artificial Sequence
  ENSG00000230510_17 (sequence is synthesized)
acctgactgtgttttgtgcatttggtttatgagtcgttttaaaaacgtgtacttttactgctgcgttcaggttttcagccatagaatattctagaaaaaaatagtgataacatttatttc

SEQ ID NO: 768550 - DNA, 120 bp, Artificial Sequence
  ENSG00000230510_18 (sequence is synthesized)
accgctataaccctgaatgtgtagctgtgttttttaaaaaaacatttttttacaattgtagaatatgtaacatgcctccagaaacgtgccctaaacacaaatatataatttggcaaataa

SEQ ID NO: 768551 - DNA, 120 bp, Artificial Sequence
  ENSG00000230510_19 (sequence is synthesized)
ctcccagaagcccctcatgtgctctggccatctcaaatccctccctgccccagggataaataacatcctgttttgtgataaacgctgccttttctatacacgtgtatgcttattaacaaa

SEQ ID NO: 768552 - DNA, 120 bp, Artificial Sequence
  ENSG00000230510_20 (sequence is synthesized)
ctatgaatttctccacacggtagatttgattatgtttgaatcttacatgaatgtaatcctattggtggattgtttttaatgtatgtgtgtgtgtgtttcagaaaaaatacattaagaaaa

SEQ ID NO: 768553 - DNA, 120 bp, Artificial Sequence
  ENSG00000230510_21 (sequence is synthesized)
ggcactgagcaaaatgacaggagaagggcagccacaacagccaacaccaaacaggagtcgtggtcattatggattggcagtaatccctcccaatattcagatacaataaactatctctac

SEQ ID NO: 768554 - DNA, 120 bp, Artificial Sequence
  ENSG00000230510_22 (sequence is synthesized)
gcaatgcgtcaaactggggcgagccactgcaaggtggtggtgggtaagtctgaactctgtggccgcgtggggctttgaggagtaacgaggcgaagggggaaacggcgtcgccgttagaga

SEQ ID NO: 768555 - DNA, 120 bp, Artificial Sequence
  ENSG00000230510_23 (sequence is synthesized)
agcaaatacgtcgtttctgtggccaggaggtggtaaaaaggctggcgacaaatgcagaagggctttctcggctctcccctttaaccgacggacgatggttcaatccaaaatgctagggtt

SEQ ID NO: 768556 - DNA, 120 bp, Artificial Sequence
  ENSG00000230510_24 (sequence is synthesized)
tagaagctccgcccctaactgggcctttggaggtggcggggtctccaaggtgccacctaacgctcagaggttccgccctccgtggtcttgtctctgcgtcctaagacgcactcagccggt

SEQ ID NO: 768557 - DNA, 120 bp, Artificial Sequence
  ENSG00000230510_25 (sequence is synthesized)
gggcgggacccctgggcccgcttcattcttgatccgctcagggtctgtgaaattaggaccatcccaggacagcctgtgggaacggggtattcattcagtcattcgtgctataagcatcaa

SEQ ID NO: 768558 - DNA, 120 bp, Artificial Sequence
  ENSG00000230510_26 (sequence is synthesized)
ttaggcgcctgctgtatgcagggacctgagcttggctgggctggggagaccatactccccaaccagcctctccagacagacgacctctttccttattccagtgttccagccataggagga

SEQ ID NO: 768559 - DNA, 120 bp, Artificial Sequence
  ENSG00000230510_27 (sequence is synthesized)
aaaagaactgaaactttgtttataggagctcagaaaatgatcacccctgccccctcccccgtttaggataggagctgacagtctcctgcgtgtcccctccccaccatgttgatggttaag

SEQ ID NO: 768560 - DNA, 120 bp, Artificial Sequence
  ENSG00000230510_28 (sequence is synthesized)
agatgggcaaacgagtcaggctggaccaatcattatgctccacctggaacagaatggagactgaaccaatgagagtccttccctggggtttggatctgcagcctgggcacaagaagcctt

SEQ ID NO: 768561 - DNA, 120 bp, Artificial Sequence
  ENSG00000230510_29 (sequence is synthesized)
ttccttttgggtgggtccttcccatagattctgactatggtcattttcccactctgccccctatcttgaggaacaaagtgtctagagaagaagagaaaaataaaactgacacagtggaga

SEQ ID NO: 768562 - DNA, 120 bp, Artificial Sequence
  ENSG00000230510_30 (sequence is synthesized)
gagaggtaaagaagatggccgggcgcggtggctcatgcctttaatcctaacacttgttactcagtctcaaatctcatgttaaaatgtgatcaccaatgttggaggtggggcctggtggga

SEQ ID NO: 768563 - DNA, 120 bp, Artificial Sequence
  ENSG00000230510_31 (sequence is synthesized)
tttgggtcataggggtggatccctcatgaatgacttggtgctgtcctcacggtaacaagtgagttcttattctgttagttcacacaagatctgtattttttttgagacggagtcttgctc

SEQ ID NO: 768564 - DNA, 76 bp, Artificial Sequence
  ENSG00000230510_32 (sequence is synthesized)
ctggtctcaaactcaatcacaagaatacaaccatcaggagtgcctcaagggagaaatatcctctgagaatagccac

SEQ ID NO: 768565 - DNA, 120 bp, Artificial Sequence
  ENSG00000230510_33 (sequence is synthesized)
ggagtgcctcaagggagaaatatcctctgagaatagccacagacaaagtggggaggtgggactaccatccccagccctggaaactctctctactctataacttggccaaaggagatgcca

SEQ ID NO: 768566 - DNA, 120 bp, Artificial Sequence
  ENSG00000230510_34 (sequence is synthesized)
aatcagagtggctgttcgttagcaccatgctgtgggaggtttcttccatagctcccctgggaatgaacccctagccagctttcctatgctactgggatatcccctttgggacctccccca

SEQ ID NO: 768567 - DNA, 120 bp, Artificial Sequence
  ENSG00000230510_35 (sequence is synthesized)
ttcgggatgggagacgctctgatctttaatagagccaaggcaaacctggttttaaggtgccactgagtgctaaaaaggaggcagcaacctagcagaaaaaaagaaaccaacaggtcaatt

SEQ ID NO: 768568 - DNA, 120 bp, Artificial Sequence
  ENSG00000230510_36 (sequence is synthesized)
acgaagaatctgtaagcaaatggagccagtaaaagccaaaacaagccagacggagaaggctggaataagtgactaatccttcagtgcaaaggcatagatgtacattaacaacaaaccaaa

SEQ ID NO: 768569 - DNA, 120 bp, Artificial Sequence
  ENSG00000230510_37 (sequence is synthesized)
gcaaacagggaaccatgagctccccaaatggaccaagtaagggaccagtgactaaacctaacaagacagtaatatgtgagctttctaagaattcaaaatggcatttttaaggaaactcag

SEQ ID NO: 768570 - DNA, 120 bp, Artificial Sequence
  ENSG00000230510_38 (sequence is synthesized)
tgaattccaagacgacatagaaaagcaacgcagaaatttatcagtgaaatttaacaaagagattgaaataataatttaaaaaaaacccaaacaaatcttagaactgagaaatacatttgc

SEQ ID NO: 768571 - DNA, 120 bp, Artificial Sequence
  ENSG00000230510_39 (sequence is synthesized)
tgaactgaaaagttcattagaggttctcaacagcagagtgggtcaagcagaggaaacaatcagtgaacttggagacgggctgtttgtaaatacatacagaagaaaaaagaaaaaagaatg

SEQ ID NO: 768572 - DNA, 120 bp, Artificial Sequence
  ENSG00000230510_40 (sequence is synthesized)
aaaggaatggaaatcacctacgaaatatagaagacaaaatctaagaattattggtgttcaagagggagctgaggaggagcaaggggatagaaaggatattcaaagaaacaatggaagaca

SEQ ID NO: 768573 - DNA, 120 bp, Artificial Sequence
  ENSG00000230510_41 (sequence is synthesized)
ttcaaaaattgcaaatatccaggtacagaaaggccagagaacaccaaatagatttgattaccccaaggcatataataatcaaactctcaaaggtcaagaacaaagagaggatcctagaaa

SEQ ID NO: 768574 - DNA, 120 bp, Artificial Sequence
  ENSG00000230510_42 (sequence is synthesized)
cagtaagagaaaagaaggaaataacacttaaaagagctctaatttacctggccacagacttctcaatcaaaaccatgaaggccatacaagaatactgtatcaagcaaagctattattcaa

SEQ ID NO: 768575 - DNA, 120 bp, Artificial Sequence
  ENSG00000230510_43 (sequence is synthesized)
atatgaagaagagataaagtttttcccaaataaaagcagagagaattcaccactaccagatctgtattataagaaatgctctcttgaagaaagacagttccagagagttcctcaatccgg

SEQ ID NO: 768576 - DNA, 120 bp, Artificial Sequence; identical to SEQ ID NO: 707084
  ENSG00000230522_0 (sequence is synthesized)

SEQ ID NO: 768577 - DNA, 120 bp, Artificial Sequence; identical to SEQ ID NO: 707085
  ENSG00000230522_1 (sequence is synthesized)

SEQ ID NO: 768578 - DNA, 120 bp, Artificial Sequence; identical to SEQ ID NO: 707086
  ENSG00000230522_2 (sequence is synthesized)

SEQ ID NO: 768579 - DNA, 120 bp, Artificial Sequence
  ENSG00000230522_3 (sequence is synthesized)
ggacagagctggtgctgagcgtgtgcgcagcccgcttgagcccacccctgggcggtttccagctgtggcaggggggccaaccccaggaatgggttgtcagctcccaccgcccctctctgg

SEQ ID NO: 768580 - DNA, 120 bp, Artificial Sequence
  ENSG00000230522_4 (sequence is synthesized)
ccaattggtgactcctgcagatatccggagacaggccaggagggtgaagaaagccagggagagactggccaaggccttgcaggcagacaggctggccaggcgggcagaaatgctgacagg

SEQ ID NO: 768581 - DNA, 120 bp, Artificial Sequence
  ENSG00000230522_5 (sequence is synthesized)
tggatgaagctcagtcttgggctttcggtccctttcttttaatgcccatcctcattcctactctgaattgtcacacttttcccttccccaccagttctttaataaaagtatttgaaaggc

SEQ ID NO: 768582 - DNA, 76 bp, Artificial Sequence; identical to SEQ ID NO: 766130
  ENSG00000230549_0 (sequence is synthesized)

SEQ ID NO: 768583 - DNA, 85 bp, Artificial Sequence
  ENSG00000230549_1 (sequence is synthesized)
cccgggagcactctcaaacatgtcagcgtcccaagttgggccctccacagtcctggccatgtcatccagccctcacaggcattgg

SEQ ID NO: 768584 - DNA, 82 bp, Artificial Sequence
  ENSG00000230549_2 (sequence is synthesized)
atgccatgaaaaaggcatgccttcccggccacaagcaggtagatcatcactgcctggagatctcaaatcaagtgtctccact

SEQ ID NO: 768585 - DNA, 120 bp, Artificial Sequence; identical to SEQ ID NO: 766132
  ENSG00000230549_3 (sequence is synthesized)

SEQ ID NO: 768586 - DNA, 86 bp, Artificial Sequence
  ENSG00000230549_4 (sequence is synthesized)
gctggtccacgctgggtggagttgtcacgacggacattacttctcctatgtcaaagctcaagaagtgtctgtagcatcatttctgt

SEQ ID NO: 768587 - DNA, 79 bp, Artificial Sequence; identical to SEQ ID NO: 766133
  ENSG00000230549_5 (sequence is synthesized)

SEQ ID NO: 768588 - DNA, 79 bp, Artificial Sequence; identical to SEQ ID NO: 766134
  ENSG00000230549_6 (sequence is synthesized)

SEQ ID NO: 768589 - DNA, 86 bp, Artificial Sequence; identical to SEQ ID NO: 766135
  ENSG00000230549_7 (sequence is synthesized)

SEQ ID NO: 768590 - DNA, 120 bp, Artificial Sequence
  ENSG00000230561_0 (sequence is synthesized)
atgatgcctgttgacgtctgtcccagggacaggggatcccagtgggtctggcttgagatgggacaatgctatagcaagaaatctgtggtcccagagtctgacacctcagagagaagcagc

SEQ ID NO: 768591 - DNA, 120 bp, Artificial Sequence
  ENSG00000230561_1 (sequence is synthesized)
atgacgtctggaagttcagagtcagatataccacaagaaaacaaagtatcgaaagcgtccctggatactggacagatggcgtttaccttggcccaacttgagtccttggagatttgcctg

SEQ ID NO: 768592 - DNA, 120 bp, Artificial Sequence
  ENSG00000230561_2 (sequence is synthesized)
aaagaagcagaagaaaaggctaaagctttatctgaacagctttcagtctctgaaggaacaaaatcaaaactgcttgaacaagtatcccggctggaggaaaaactggaggctgtggaccac

SEQ ID NO: 768593 - DNA, 120 bp, Artificial Sequence
  ENSG00000230561_3 (sequence is synthesized)
aaggaagccagtgggggaccatatgaaaaaatggttcttgtgaaagaccagtgcatccagaaattgcaagctgaagtaaaagcttcccaggagcaacttatagcccagaaactaaagcat

SEQ ID NO: 768594 - DNA, 120 bp, Artificial Sequence
  ENSG00000230561_4 (sequence is synthesized)
tatatgaaggaaagccagcccctagagaagacagcttgctggaagggttctgtggaggtctcccacctgtggaagaaggtgatagaaaaattagcctgataatggaactgtcaacccagg

SEQ ID NO: 768595 - DNA, 120 bp, Artificial Sequence
  ENSG00000230561_5 (sequence is synthesized)
tttcccttcagactgagagaattactcagctgaaagaagttttggaggaaaaggaaaggaagattcagcagctggaagctgagcggagtccccatcctccccaagaggtcaaggaccctc

SEQ ID NO: 768596 - DNA, 120 bp, Artificial Sequence
  ENSG00000230561_6 (sequence is synthesized)
caggatgtttaccagaagccccagttttctctactcatgacatcccacctgtggtctctgatgagaatttgtagattcccaataagaaaacaataaaagtttattaagtgtcatccaggt

SEQ ID NO: 768597 - DNA, 120 bp, Artificial Sequence
  ENSG00000230561_7 (sequence is synthesized)
aaagtctgataccaaatagtctcctaggtgacaaactcaagttcaagttcatgtgtttgaatgtatactatcatgttcgtattggaaggaaacaaaaaaaaggaaatgttcaagagcaaa

SEQ ID NO: 768598 - DNA, 64 bp, Artificial Sequence
  ENSG00000230561_8 (sequence is synthesized)
actgctgtgctagcagtcagcgagactctgtgtgcgtaggaccctccgagccagtgagatgaaa

SEQ ID NO: 768599 - DNA, 120 bp, Artificial Sequence
  ENSG00000230561_9 (sequence is synthesized)
ctgttcctattcggccatcttggctcctgcatctccacattgaagtttcatgctggtgtgtctgacttggtggagtctaagtcacataactacaccttggctgcgaagaatgcttgggaa

SEQ ID NO: 768600 - DNA, 120 bp, Artificial Sequence
  ENSG00000230561_10 (sequence is synthesized)
gctcctggcttttaactttggaagataggatttatgagatgggaaattatccaaacagagaacgacactgggcagtcaaaacagcttgccaaatggccagtgcagaggtcaagttgaatg

SEQ ID NO: 768601 - DNA, 120 bp, Artificial Sequence
  ENSG00000230561_11 (sequence is synthesized)
aggtacaatggtgttctcattttacagatgggaaaactgaggtgcactgagtagctacagttggctgtactatgctctcttctccaatatttttgccatgcctcttagaagcattttgat

SEQ ID NO: 768602 - DNA, 120 bp, Artificial Sequence
  ENSG00000230561_12 (sequence is synthesized)
ggttcccaaacataattattggatgaatgaatgaacaagaagatgactatggaggatacttgggatctggctagcaacaagtatatttcccattgttagaggtagttgggtcagaaatta

SEQ ID NO: 768603 - DNA, 120 bp, Artificial Sequence
  ENSG00000230561_13 (sequence is synthesized)
gatcagtgcttctcagcatttctctgttcaatgcatactttttggtggcacccataaagaaatcaaaaggggaatatccctttttagcaagaagtatttagaaaatctaaaagaactctt

SEQ ID NO: 768604 - DNA, 120 bp, Artificial Sequence
  ENSG00000230601_0 (sequence is synthesized)
agacagccttctgtctactctgccagctgcaggaaacagcccagcccagtgaactgggctcaaactcaagactggctgattcaacaaggcacccctgcagacaaagctggcagagtagaa

SEQ ID NO: 768605 - DNA, 120 bp, Artificial Sequence
  ENSG00000230601_1 (sequence is synthesized)
gtttcaactcctttccatggcagcccaccaaaacctgatcttgaagatcttctgtttatgctgcagggactgtcaggagccctatgccatcaatgactccaaggttcccagtcaaaccca

SEQ ID NO: 768606 - DNA, 120 bp, Artificial Sequence
  ENSG00000230601_2 (sequence is synthesized)
gatccagacaaaaaagagcacttcctccagcagcagtgagtttgaggatctgaatgcatatgcttcccaaagaaatttttacaagagaaacttaaaccgctactgccaggagcactggcc

SEQ ID NO: 768607 - DNA, 120 bp, Artificial Sequence
  ENSG00000230601_3 (sequence is synthesized)
attccagccatgcctcactgggaggccctgagcattctagccggcggctgcacagctgctggggcatctccatgaggaagagggcggtggacaggagtcatgaagactaattcggaaact

SEQ ID NO: 768608 - DNA, 120 bp, Artificial Sequence
  ENSG00000230601_4 (sequence is synthesized)
cccctgaaggaggagaagacatctgagccatccttgtgccaccaagcaagagtcactccagctcctaaaaagccaccatgggaagagctgcctccaattaaagttcttgattgcaccaga

SEQ ID NO: 768609 - DNA, 120 bp, Artificial Sequence
  ENSG00000230626_0 (sequence is synthesized)
atgctggcccggaggaagccgatgctgccggcgctcaccatcaaccctaccatcgccgagggcccgtccccaaccagcgagggcgcctccgaggcaaacctggtggacctgcagaagaag

SEQ ID NO: 768610 - DNA, 120 bp, Artificial Sequence
  ENSG00000230626_1 (sequence is synthesized)
ctggaggagctggaacttgacgagcagcagaagcggctggaagcctttctcacccagaaagccaaggtcggcgaactcaaagacgatgacttcgaaaggacctcagagctggacgcgggc

SEQ ID NO: 768611 - DNA, 120 bp, Artificial Sequence
  ENSG00000230626_2 (sequence is synthesized)
aacggcggggtggtcaccaaagtccagcacagaccctcgggcctcatcatggccaggaagctgatccaccttgagatcaagccggccatccggaaccagatcatccgcgagcaccaggtc

SEQ ID NO: 768612 - DNA, 120 bp, Artificial Sequence
  ENSG00000230626_3 (sequence is synthesized)
ctgcacgagtgcaactcaccgtacatcgtgggcttctacggggccttctactgtgacagggagatcagcatctgcatggagcacatggatggcggctccctggaccaggggctgaaagag

SEQ ID NO: 768613 - DNA, 120 bp, Artificial Sequence
  ENSG00000230626_4 (sequence is synthesized)
gccaagaggattcccgaggacatcctggggaaagtcagcattgcggttctccggggcttggcgtacctccgagagaagcaccagatcatgcaccgaaatgtgaagccctccaacatcctc

SEQ ID NO: 768614 - DNA, 120 bp, Artificial Sequence
  ENSG00000230626_5 (sequence is synthesized)
atggccaactccttcgtgggcacgcgctcctacatggctccggagcggttgcagggcacacattactcggtgcagtcggtcatctggagcatggacctgtccctggtggagctggccatc

SEQ ID NO: 768615 - DNA, 120 bp, Artificial Sequence
  ENSG00000230626_6 (sequence is synthesized)
gaaaggtaccccatccccccgcccgacgccaaggagctggaggccatctttggccagcccgtggtcgacagggaagaaggagagcctcacagcatctcctcttggccagggtcccccggg

SEQ ID NO: 768616 - DNA, 120 bp, Artificial Sequence
  ENSG00000230626_7 (sequence is synthesized)
cgccccaacagcggttacgggatggacagcctgcccgccatggccatcttcgaactgctggactatattgtgaaagagccgcctcctaagctgcccaacggtgtgttcacccccgacttc

SEQ ID NO: 768617 - DNA, 120 bp, Artificial Sequence
  ENSG00000230626_8 (sequence is synthesized)
caggagtttgtcaataaatgcctcatcaaaaacccaacggagcgggcggacctaaagatgctcacaaaccacgccttcatcaagcggtccgaggcttgccttctctcaaaccatcaggca

SEQ ID NO: 768618 - DNA, 120 bp, Artificial Sequence
  ENSG00000230626_9 (sequence is synthesized)
aaacataccctgatgaacacatcaaattcagcatcaaagtggacgcttacaactttaatgctcactacgaattaacctcaaaatagctacgtaaataaaattagcaggattatcagagaa

SEQ ID NO: 768619 - DNA, 120 bp, Artificial Sequence
  ENSG00000230657_0 (sequence is synthesized)
gcacagagttgggagtgactccagagcctccagcgagatgctgctgattctgctgtcagtggccctgctggccctgagctcagctgagagttcaagtgaagatgtcagccaggaagaatc

SEQ ID NO: 768620 - DNA, 120 bp, Artificial Sequence
  ENSG00000230657_1 (sequence is synthesized)
tgaagatgtcagccaggaagaatctctcttcctaatatcaggaaagccagaaggacgacgcccacaaggaggaaaccagccccaacgtcccccacctcctccaggaaagccacaaggacc

SEQ ID NO: 768621 - DNA, 120 bp, Artificial Sequence
  ENSG00000230657_2 (sequence is synthesized)
ccaaggtcccccacctcctccaggaaagccagaaggacgacccccacaaggaggcaaccagtcccaaggtcccccacctcatccaggaaagccagaaagaccacccccacaaggaggaaa

SEQ ID NO: 768622 - DNA, 120 bp, Artificial Sequence
  ENSG00000230657_3 (sequence is synthesized)
cccccacctcctccaggaaagccagaaagaccacccccacaaggaggtaaccagtcccaaggtcccccacctcatccaggaaagccagaaggaccacccccacaggaaggaaacaagtcc

SEQ ID NO: 768623 - DNA, 120 bp, Artificial Sequence
  ENSG00000230657_4 (sequence is synthesized)
ctccaggaaagccacaaggaccaccccaacaagaaggcaacaagcctcaaggtcccccacctcctggaaagccacaaggcccacccccagcaggaggcaatccccagcagcctcaggcac

SEQ ID NO: 768624 - DNA, 120 bp, Artificial Sequence
  ENSG00000230657_5 (sequence is synthesized)
cagcagcctcaggcacctcctgctggaaagccccaggggccacctccacctcctcaagggggcaggccacccagacctgcccagggacaacagcctccccagtaatctaggattcaatga

SEQ ID NO: 768625 - DNA, 120 bp, Artificial Sequence
  ENSG00000230657_6 (sequence is synthesized)
caggaagtgaataagaagatatcagtgaattcaaataattcaattgctacaaatgccgtgacattggaacaaggtcatcatagctctaactttaatataccaataaaataatcagcttgc

SEQ ID NO: 768626 - DNA, 120 bp, Artificial Sequence
  ENSG00000230667_0 (sequence is synthesized)
atggtctggttcttggacttccctaacagcatggcccctaaacgccagtctccactcccacttcaaaagaagaaaccaagaccacctcctgctctgggactggaggagacatcggcctct

SEQ ID NO: 768627 - DNA, 120 bp, Artificial Sequence
  ENSG00000230667_1 (sequence is synthesized)
gcaggcttgccgaagaagggagaaaaagaacagcaagaagcaattgaacacattgatgaagtacaaaatgaaatagacagacttaatgaacaagacagtgaggagattttgaaagtagaa

SEQ ID NO: 768628 - DNA, 120 bp, Artificial Sequence
  ENSG00000230667_2 (sequence is synthesized)
cagaaatataacaaactccgccaaccattttttcagaagaggtcagaattgatcgccaaaatcccaaattttggggtaacaacatttgtcaaccatccacaagtgtcttcactgcttggg

SEQ ID NO: 768629 - DNA, 120 bp, Artificial Sequence
  ENSG00000230667_3 (sequence is synthesized)
ggttacagaatagatttttattttgatgaaaatccttactttgaaaataaagttttctccaaagaatttcatctgaatgagagtggtgatccatcttcaaagtccaccaaaatcaaatgg

SEQ ID NO: 768630 - DNA, 120 bp, Artificial Sequence
  ENSG00000230667_4 (sequence is synthesized)
aaatctggaaaggatgtgacgaaacgttcaagtcaaacgcagaataaagccagcaggaagaggcagcatgaggaaccagagagcttctttacctggtttactgatcattctgatgcaggt

SEQ ID NO: 768631 - DNA, 120 bp, Artificial Sequence
  ENSG00000230667_5 (sequence is synthesized)
gctgatgagttagaagaggtcatcaaagatgatatttggccaaacccattacagtattacttggttcctgatatggatgatgaagaaggaggagaagatgatgatgatgatgatgatgat

SEQ ID NO: 768632 - DNA, 120 bp, Artificial Sequence
  ENSG00000230667_6 (sequence is synthesized)
ggtgatgaaggggaggaagaattagaagatattgatgaaggggatgaggatgaaggtgaagaagatgaagatgatgatgaaggggaggaaggagaggaggatgaaggagaagatgactaa

SEQ ID NO: 768633 - DNA, 120 bp, Artificial Sequence
  ENSG00000230778_0 (sequence is synthesized)
atgctcaaacccaaggacctgtgcccccgagcggggacgcgcaccttcctggaggccatgcaggcgggcaaagtgcacttggcccgcttcgtgttggatgcgctggaccgcagcatcatc

SEQ ID NO: 768634 - DNA, 120 bp, Artificial Sequence
  ENSG00000230778_1 (sequence is synthesized)
gactgccgcgcggagcagggccgtacgccgctcatggtggccgtggggctgccggaccccgcgctgcgcgcgcgcttcgtgcggctgctgctcgagcagggtgctgcagtgaacctgcga

SEQ ID NO: 768635 - DNA, 120 bp, Artificial Sequence
  ENSG00000230778_2 (sequence is synthesized)
gacgagcgcggccgcaccgcactcagcctggcgtgcgagcgaggccacctggacgccgtgcagctgctggtgcagttcagcggtgaccccgaggcggccgactctgcgggcaacagcccg

SEQ ID NO: 768636 - DNA, 120 bp, Artificial Sequence
  ENSG00000230778_3 (sequence is synthesized)
gtgatgtgggcggcggcctgcggccacggggcggtgctcgagttcctggtgcggtccttccgccgcctaggcctgcgcctcgaccgcaccaaccgtgcggggctcaccgcgctgcaactg

SEQ ID NO: 768637 - DNA, 80 bp, Artificial Sequence
  ENSG00000230778_4 (sequence is synthesized)
gccgccgctgcggcccggggctccaactccgatagtccccctggccgcccggcccccgcggccagccccgagcatcgacg

SEQ ID NO: 768638 - DNA, 120 bp, Artificial Sequence
  ENSG00000230778_5 (sequence is synthesized)
tttgcgcgagcggcgggcggccacggcggcgaggctggctcagcgggcaagaattcgggccggcaccgggcgcagggcagcgaacggcccgagctgggtcggagcatgagcctggctcta

SEQ ID NO: 768639 - DNA, 120 bp, Artificial Sequence
  ENSG00000230778_6 (sequence is synthesized)
ggtgcggtaaccgaggaggaggctgcccgcctgcgggctggggccctgatggccctaccaaactcgccccagtcttcggggactgggcggtggcgctcacaggaggtgctggagggagcg

SEQ ID NO: 768640 - DNA, 120 bp, Artificial Sequence
  ENSG00000230778_7 (sequence is synthesized)
cccccaaccttagcgcaagcccccattggcctcagtccccacccggagggcggccccggctctggccgcctgggtttgcgccgacgctccacagccccagatatccccagcctggtcggg

SEQ ID NO: 768641 - DNA, 120 bp, Artificial Sequence
  ENSG00000230778_8 (sequence is synthesized)
gaggcgccagggcccgagagtggcccggagttagaggccaacgctctgtctgtctcggtgcctgggccgaacccttggcaggcgggcaccgaggctgtggtgctgcgtgctcagcggtaa

SEQ ID NO: 768642 - DNA, 120 bp, Artificial Sequence
  ENSG00000230797_0 (sequence is synthesized)
attaaataagagaaaaaagcataaaaggagtaggcttttttggcagatactgttatatgggatggacaggaggggaagacatgaaaatcaactaaaatgaaatacataaaaaatcagtaa

SEQ ID NO: 768643 - DNA, 120 bp, Artificial Sequence
  ENSG00000230797_1 (sequence is synthesized)
agagcctgcttacgaaagtggaaaaacaacagctgggcggggtcgcagggtggcaaacgtacgcgggcacgtgcacgtgcttttggggccgacagacgcgccagttgcctaggcgcatgc

SEQ ID NO: 768644 - DNA, 120 bp, Artificial Sequence
  ENSG00000230797_2 (sequence is synthesized)
gtctggctatcccagaagcacctgcgccttccggctcgtgctttcctcagtctcgcgcctttctctgcagctcgcgcctttctctgcagctcgcgcctttctctgcagctcgcgcctttc

SEQ ID NO: 768645 - DNA, 120 bp, Artificial Sequence
  ENSG00000230797_3 (sequence is synthesized)
tctgcagctcgcgcctttctctgcagctcgccccttcctctgcagctcgccccttcctctgcagctcccacctcactcccctcagcgttctttttcccacggtcttcccgttgccgctaa

SEQ ID NO: 768646 - DNA, 120 bp, Artificial Sequence
  ENSG00000230797_4 (sequence is synthesized)
cctaactaactctcagccatggcctccaacgaagatttctccatcacacaagacctggagatcccggcagatattgtggagctccacgacatcaatgtggagccccttcctatggaggac

SEQ ID NO: 768647 - DNA, 120 bp, Artificial Sequence
  ENSG00000230797_5 (sequence is synthesized)
attccgacggaaagcgtccagtacgaggatgtggatggcaattggatctacggtggccacaaccatccgccattgatggtgttgcagccgctcttcacgaacacgggctatggcgaccac

SEQ ID NO: 768648 - DNA, 120 bp, Artificial Sequence
  ENSG00000230797_6 (sequence is synthesized)
gaccaggaaatgcttatgttgcagacacaagaggaagtggtgggctattgcgactcagacaaccagctaggcaacgacttggaggaccagttggccctcccggatagcattgaagacgag

SEQ ID NO: 768649 - DNA, 120 bp, Artificial Sequence
  ENSG00000230797_7 (sequence is synthesized)
cacttccagatgaccctggcctctctgtcggcctcggcggcatcaacatcaacatcaacccagagccgcagcaaaaagcccagcaaaaagcccagcggcaagagtgccaccagcactgag

SEQ ID NO: 768650 - DNA, 120 bp, Artificial Sequence
  ENSG00000230797_8 (sequence is synthesized)
gccaacccggcaggcagcagctccagcctgggcacgaggaagtgggagcagaagcaaatgcaggtcaaaacgctggagggtgagttttccgtgactatgtggtcccctaacgataacaat

SEQ ID NO: 768651 - DNA, 120 bp, Artificial Sequence
  ENSG00000230797_9 (sequence is synthesized)
gaccaaggggcagtgggtgaaggccaggctgaaaacccacctgattattccgagtacttgaaagggaagaaacttcctcctggggggttaccaggcattgatctctcagatcctaaacag

SEQ ID NO: 768652 - DNA, 120 bp, Artificial Sequence
  ENSG00000230797_10 (sequence is synthesized)
ctggcagaatttactaaagtgaagcccaaaaggtccaaaggagaacctcccaaaacagtcccttgctcttatagcggctgcgaaaagatgttccgggattacgccgccatgagaaaacat

SEQ ID NO: 768653 - DNA, 120 bp, Artificial Sequence
  ENSG00000230797_11 (sequence is synthesized)
tgcacattcgaaggctgcgggaaacgcttttcccttgatttcaatttgcgcacacacttgcgcatccacaccggcgataagcccttcgtgtgccccttcgatgtttgcaacaggaagttc

SEQ ID NO: 768654 - DNA, 120 bp, Artificial Sequence
  ENSG00000230797_12 (sequence is synthesized)
gctcagtcaaccaacctgaaaacccacatattaacgcatgtgaagaccaaaaacaacccgtgaaaaggagaagacccctctcagacttgggaattatcttccaggactgcggtagggaat

SEQ ID NO: 768655 - DNA, 120 bp, Artificial Sequence
  ENSG00000230797_13 (sequence is synthesized)
aaatatgcctctcaaagctttgtatgttgtttctaagagttttaaaaaaaaatgaatcctgcacatttaaggttcgtgttttgttagagtagtaaaaatagaatttaaacgtttttaaaa

SEQ ID NO: 768656 - DNA, 120 bp, Artificial Sequence
  ENSG00000230797_14 (sequence is synthesized)
aggtaaaccttgacataagataatagtgctaagatgccatagcttgttctgtaactatttttgtaaagtttggtcccaacaggagaaaaattcgtagacttcacatcaagagacggttct

SEQ ID NO: 768657 - DNA, 120 bp, Artificial Sequence
  ENSG00000230797_15 (sequence is synthesized)
tacaaactgtttaaaatgggacttttcacattcttagaaataggaagttcatttattgtttacaatgtttttaaaaaacttgttaaaaaattcaaagtgttcatgtttatacttttagga

SEQ ID NO: 768658 - DNA, 120 bp, Artificial Sequence
  ENSG00000230797_16 (sequence is synthesized)
atatgcttaataagtctatgtatggtttttctggaggttgataactttgggaaagatttactttaaaagagtgaacaattatatgcatacgtgaagtattttcctgcttaaaaaagttat

SEQ ID NO: 768659 - DNA, 120 bp, Artificial Sequence
  ENSG00000230797_17 (sequence is synthesized)
ataggtgttatttgttttaatcttggttgtagtcttggatgttaacacatcttgcattttagctgtattaggtcatgtagtattgatattaggtgatttaatagtactagtttaaaccta

SEQ ID NO: 768660 - DNA, 120 bp, Artificial Sequence
  ENSG00000230797_18 (sequence is synthesized)
ttttagtcattttattttccccaaaatactaccagatgctgttgtttagtgtaatttctttgcctgttcagttaaagtagtgcttgcttgtagaatatattgtgtatatgttgactttaa

SEQ ID NO: 768661 - DNA, 120 bp, Artificial Sequence
  ENSG00000230797_19 (sequence is synthesized)
cacttaagaagtacatcctgtgtaatagaaaaagcaaaataaaacacctcttctaaagaaggaaaaaagtagtttgcctatatcagtacagaagttagaactaaagaaaagggggagggt

SEQ ID NO: 768662 - DNA, 120 bp, Artificial Sequence
  ENSG00000230797_20 (sequence is synthesized)
gctactggcatctggtgagtggagggagatcaggaatgccactaaacatcctacaatgcacagacagccccacgaaacacataattatttggctaaaatgccaatagtgtcaggtgcagg

SEQ ID NO: 768663 - DNA, 87 bp, Artificial Sequence
  ENSG00000230797_21 (sequence is synthesized)
ggctcaggcctgtaatgtttgagctcaggaattgaacatcagcctgggcaacatggcataactcggtctctaccaaaaataaaaaaa

SEQ ID NO: 768664 - DNA, 120 bp, Artificial Sequence
  ENSG00000230873_0 (sequence is synthesized)
atgggctgtggaccttcccaacctgctgaagaccggagacgtgtacgcgcgcccaagaagggctggaaagaggaattcaaggctgatgtcagtgtgcctcatactggggaaaattgcagc

SEQ ID NO: 768665 - DNA, 120 bp, Artificial Sequence
  ENSG00000230873_1 (sequence is synthesized)
ccccggatggaagctgctctgaccaagaatactgtggacattgcagaaggcctggaacaagtccagatgggaagcttacctggaaccatttcagaaaattctccatctcctagtgaaaga

SEQ ID NO: 768666 - DNA, 120 bp, Artificial Sequence
  ENSG00000230873_2 (sequence is synthesized)
aacagacgagtaaattcagacctagtgaccaatggattaatcaataaaccccaatccctagagagtcgagagcgacagaagtcatcagatatcctggaggaactaattgttcaaggaatt

SEQ ID NO: 768667 - DNA, 120 bp, Artificial Sequence
  ENSG00000230873_3 (sequence is synthesized)
atacaaagccacagcaaagtatttagaaatggagaatcatatgatgtcacgttgactacgactgagaagccattgagaaagccaccttccagactgaaaaaactcaagatcaaaaagcaa

SEQ ID NO: 768668 - DNA, 120 bp, Artificial Sequence
  ENSG00000230873_4 (sequence is synthesized)
gtgaaggatttcacaatgaaggacatcgaggagaagatggaggctgccgaggagcgcaggaagactaaagaagaagaaataagaaaaaggctacggagtgaccgacttttgccttcagcc

SEQ ID NO: 768669 - DNA, 120 bp, Artificial Sequence
  ENSG00000230873_5 (sequence is synthesized)
tcactcagattcagctgaattagatggggccgaggttgcatttgccaaaggacttcaaagggtgaggtctgctggatttgaaccatctgacctgcagggaggaaaaccattgaagaggaa

SEQ ID NO: 768670 - DNA, 120 bp, Artificial Sequence
  ENSG00000230873_6 (sequence is synthesized)
gaagagtaaatgtgatgcaaccttgattgatagaaacgaaagtgatgaaagttttggggtcgtggagtcagacatgtcctacaaccaagcagatgacatagtctactaagccattttttg

SEQ ID NO: 768671 - DNA, 120 bp, Artificial Sequence
  ENSG00000230873_7 (sequence is synthesized)
tgaatttcataagaaagcattcattctccccatttgtgacatttgtagtatgtctcatattctttgactgactgacctcattccactgggatttctgccttgggcttaaggatgattgtg

SEQ ID NO: 768672 - DNA, 120 bp, Artificial Sequence
  ENSG00000230873_8 (sequence is synthesized)
tgggctgcacaggctgaaggttagttgagtaaattaagtagctatgctagcttttaaaaaaagagcgagggggagacttgaccagcatagatatttggcactctcctttgtgtggcttca

SEQ ID NO: 768673 - DNA, 120 bp, Artificial Sequence
  ENSG00000230873_9 (sequence is synthesized)
aacattatggagatgtctttaattcatttataagtgccttcagtttacattaataagttcgtgccaaatgaaatccttcctgtttactcctgccttgtggcggggtccatcctctgctgc

SEQ ID NO: 768674 - DNA, 120 bp, Artificial Sequence
  ENSG00000230873_10 (sequence is synthesized)
tcctttaaaacaaattgcatggatttgtattaagtattttaatggcttatatgttttttatgctgtatgtctatggttttataatttttttctctgtgttgtgaaggaataaagcaatgt

SEQ ID NO: 768675 - DNA, 120 bp, Artificial Sequence
  ENSG00000230873_11 (sequence is synthesized)
aagactctgtctcaaaaaaataaaaaatagacattaaaagaatcctgggaagacattaccgagtggaagatgcacgtgttctttgtgttcttatctcttctggagacactgaggagactt

SEQ ID NO: 768676 - DNA, 120 bp, Artificial Sequence
  ENSG00000230873_12 (sequence is synthesized)
gtttaacattacagatatccttaacatatatatgtgcagagtagatatctgggaagacacacactgaactctttacaaaggttcatgctaaggactgggattgggggccatgtggttaaa

SEQ ID NO: 768677 - DNA, 120 bp, Artificial Sequence
  ENSG00000230873_13 (sequence is synthesized)
gggccatgtggttaaatagaggataaggagatgatttatgtatcagttatattttttataatcaatctatattatcttaaaactaatttttaaaacaaaacaccttaaaactttcttcat

SEQ ID NO: 768678 - DNA, 120 bp, Artificial Sequence
  ENSG00000230873_14 (sequence is synthesized)
ttttacttattttggaactagaaattataattagaaagtcatcattactgctttgaactgttgaaagggtagttgatcatatgaagtgggatttttcccccgctgtcatgaaaatgtttg

SEQ ID NO: 768679 - DNA, 120 bp, Artificial Sequence
  ENSG00000230873_15 (sequence is synthesized)
tcaagttcctccagcaaagcccagaacagagttgttgttcagtaatcgttaattatctctttctaccacaaaaccagaagcaatgagaactaatctctatcccagatgaaagtaacttgt

SEQ ID NO: 768680 - DNA, 120 bp, Artificial Sequence
  ENSG00000230873_16 (sequence is synthesized)
agcttgtggaatattataaaatcatcaggttgaactcttcaccttaaactacaaattcacccccattctccactgcttttcatcttatattcattctcaagattttttccttctaagggt

SEQ ID NO: 768681 - DNA, 120 bp, Artificial Sequence
  ENSG00000230873_17 (sequence is synthesized)
tcatcttctatgcagtctgagaacacctgcattcatagggcctttttgtaatagcctggtgcttttaaggcatctaaaagatcttatcgttataattctgttgttatcaactttcacgtt

SEQ ID NO: 768682 - DNA, 120 bp, Artificial Sequence
  ENSG00000230873_18 (sequence is synthesized)
atcttatcgttataattctgttgttatcaactttcacgttggtttttttaatctgcgcctggaaagttagatttttagaatttactttattcatttatttatttatttatttagagacag

SEQ ID NO: 768683 - DNA, 120 bp, Artificial Sequence
  ENSG00000230873_19 (sequence is synthesized)
gattacaggcatgagccactgcacccagactagaatttacattttaaactgtttattctaactcttttgcccttctcttctgccagtgaatatgattgtttcttcatgtaaaaagatgtt

SEQ ID NO: 768684 - DNA, 120 bp, Artificial Sequence
  ENSG00000230989_0 (sequence is synthesized)
agtctcgtcgcgagaagcagcggcccggggcgactgagcggacaaacggaagtgtaggttacggtctgagacatcaccgccaagctgggcatcggggagatggccgagactgaccccaag

SEQ ID NO: 768685 - DNA, 120 bp, Artificial Sequence
  ENSG00000230989_1 (sequence is synthesized)
accgtgcaggacctcacctcggtggtgcagacactcctgcagcagatgcaagataaatttcagaccatgtctgaccagatcattgggagaattgatgatatgagtagtcgcattgatgat

SEQ ID NO: 768686 - DNA, 120 bp, Artificial Sequence
  ENSG00000230989_2 (sequence is synthesized)
ctggaaaagaatatcgcggacctcatgacacaggctggggtggaagaactggaaagtgaaaacaagatacctgccacgcaaaagagttgaaggttgctaataatttatactggaatctgg

SEQ ID NO: 768687 - DNA, 120 bp, Artificial Sequence
  ENSG00000230989_3 (sequence is synthesized)
catttttccaagccaagagaagatcgaatggctttttgcagctaactactatgtgtagacaggttttatattataaagtatgcattcttatcacctagtatatagttagtttgtagagtg

SEQ ID NO: 768688 - DNA, 120 bp, Artificial Sequence
  ENSG00000230989_4 (sequence is synthesized)
atttccccccagtttcttgaacatggtatcttcacatcttggaccttggtcagttgtgctattcattattaaacactaaaactttggcggttcttgcataacattgtcagattttttagt

SEQ ID NO: 768689 - DNA, 120 bp, Artificial Sequence
  ENSG00000230989_5 (sequence is synthesized)
gtatttctgtgaagtcattttttttcttgtcattccttttgtagtagttgctgtttggataaaagttgatgtgtgattttttattaaacaaatagtaaacccttcaattatagttagtct

SEQ ID NO: 768690 - DNA, 120 bp, Artificial Sequence
  ENSG00000230989_6 (sequence is synthesized)
tggtgaagtaagatgtttgtagactttagagttctttaattcttggcacaacgtgactgttgagctaacaccaaatagtgtgttggcaatacttttcaaatggctgaaaacacctaaaaa

SEQ ID NO: 768691 - DNA, 120 bp, Artificial Sequence
  ENSG00000230989_7 (sequence is synthesized)
ttgttcattcagaaatatctgtcactgctctgttgccaaaactcagaatagaacttagacgtatgtctgagtccctgagatcacatgctaaagtcgatgaaaagtaaccactgccactgt

SEQ ID NO: 768692 - DNA, 120 bp, Artificial Sequence
  ENSG00000230989_8 (sequence is synthesized)
cttgtgtcagaacttttacagtacagaaaataacagaatagccttctgtaatgaggcgtttgttagagttttgcatgagattctaatacttcagtaggaccctacctacgtggttcatct

SEQ ID NO: 768693 - DNA, 120 bp, Artificial Sequence
  ENSG00000230989_9 (sequence is synthesized)
acaatggttaccataaaaaatctggcaggattttaaaactcaatcagtctttcctttgagctagtgacttgaaaagaaagagagaaggaaaagagaccatattaagtccatgccagttgc

SEQ ID NO: 768694 - DNA, 120 bp, Artificial Sequence
  ENSG00000230989_10 (sequence is synthesized)
ttggctagaatatgatcaacgacttgtagtagactcaagtttttaaaaaacactattttacttaaactgtttcttatctaaattcttgcagagtgtcaatgttatcattgattatagaag

SEQ ID NO: 768695 - DNA, 120 bp, Artificial Sequence
  ENSG00000230989_11 (sequence is synthesized)
acagggataatacctttatctctggccactcaaaaatgcagtgccaggagtgctaaacctagaggccaatactgatgacctggaaggtgatccatatgattgtcaccacaaagtgctttt

SEQ ID NO: 768696 - DNA, 120 bp, Artificial Sequence
  ENSG00000230989_12 (sequence is synthesized)
acacaaaaacttgaaaatttgaaaaacatgatttttttaagtttctcatctcaccagtcttggtgtttatattgcaaatctatcaaagtaagaaataatttgtgctgtatacaaattaca

SEQ ID NO: 768697 - DNA, 120 bp, Artificial Sequence
  ENSG00000230989_13 (sequence is synthesized)
tggggaacataaaggagtgagatccttctgtgataaaatgaattcaccactctggttacccaactacagaacctcctttgatcaggccagtaggttgtgatgcaggctggagcccccgaa

SEQ ID NO: 768698 - DNA, 120 bp, Artificial Sequence
  ENSG00000230989_14 (sequence is synthesized)
tgccccacacacactgcagcattgaccagaccatccgaaacctgcgtccctggtgatgttctcaagcctcggaagtggcaaatggaaatgatatggccggttgcggttgtaggagagttg

SEQ ID NO: 768699 - DNA, 120 bp, Artificial Sequence
  ENSG00000230989_15 (sequence is synthesized)
tgacttaggcaggagtcgacctcctcaagtaatggaacgatttcaaaggcaggctgccctgaccaaaaatatctgccatgaataaaggtgcctgaaatcctgctatgaagcttcctttgt

SEQ ID NO: 768700 - DNA, 120 bp, Artificial Sequence
  ENSG00000230989_16 (sequence is synthesized)
gtcaaaaatctgtttggttttcagatggaaatgcagaaatcacattagagtatcaactaaaacctctggacggattaagtacaagtagcccaaggcaaagcaggagagggggtgttgggg

SEQ ID NO: 768701 - DNA, 120 bp, Artificial Sequence
  ENSG00000230989_17 (sequence is synthesized)
gaggttgcctgctggaaggggaagctgaggagcgggaggagggcttgccaagactggcattgcaggagacttgtctcaggtgtgttcccagaactcttgcccctggagatgctgcaggaa

SEQ ID NO: 768702 - DNA, 120 bp, Artificial Sequence
  ENSG00000230989_18 (sequence is synthesized)
ggaaggggttatggtcacttgggtttagacgacattctgtgaacctcatgaagaaattagcatattaaagactctgaaagtagagcagagaactcagctttaacctgctcacctgctagt

SEQ ID NO: 768703 - DNA, 88 bp, Artificial Sequence
  ENSG00000230989_19 (sequence is synthesized)
gtgcagtggcacagtcatagctcacttggagcctgaagctcctgggctcagaatattacaggttcgtgccaccgcacctgggtcttgc

SEQ ID NO: 768704 - DNA, 120 bp, Artificial Sequence
  ENSG00000230989_20 (sequence is synthesized)
gcctcccaagtagctaatattacaggttcgtgccaccgcacctgggtcttgctgtgttgcccaggctggtctagaactcctaggctcaagcagtcctgtctcagcctcccaaagtgctgg

SEQ ID NO: 768705 - DNA, 120 bp, Artificial Sequence
  ENSG00000230989_21 (sequence is synthesized)
atgcctgtccaagggtcttttttatactatatgaagtattccttctccagctattcttgttcgtttaccagccagtgaagattctcttgagggctgaacaatacagatgagtatgggggc

SEQ ID NO: 768706 - DNA, 120 bp, Artificial Sequence
  ENSG00000230989_22 (sequence is synthesized)
cctcgcaccaaggaaaacagcgttacatttaattaagtgccctgtctcaaaccccaaggccccacagcttcttcatttggcccctagttcatcctgctttcctttgagccacaggatttt

SEQ ID NO: 768707 - DNA, 120 bp, Artificial Sequence
  ENSG00000230989_23 (sequence is synthesized)
aaaatatttcaatcttattttcatatcaattttttctttgtttcactacaagtacagtcattgtttaaccctatcaggactaacacaatatttcacgtaactaagagttaatttgccctt

SEQ ID NO: 768708 - DNA, 120 bp, Artificial Sequence
  ENSG00000230989_24 (sequence is synthesized)
gtgagtccttggaatttaagccccacacacacacacttagagcactgttgctatgggaacatagagtcctccaaacaaaagtgaactttttcaacatgctgtttgtaaatggaagccttc

SEQ ID NO: 768709 - DNA, 120 bp, Artificial Sequence
  ENSG00000230989_25 (sequence is synthesized)
ccaagcagacactgtgttcctcttttattttgtattttgcacattatatattttgattagattaaaatggaggaatttgcaggatgtgttgtcatatctagccctgaaagttaactggtt

SEQ ID NO: 768710 - DNA, 120 bp, Artificial Sequence
  ENSG00000230989_26 (sequence is synthesized)
acagttaccaaatgttcacagctagcgccattgaaagcattgactgtaaaccgctgtactgtgctaagccttttgtttgcactgtttggcttaatcctcacaacaacactgagaggtttt

SEQ ID NO: 768711 - DNA, 120 bp, Artificial Sequence
  ENSG00000230989_27 (sequence is synthesized)
catttgatgagtcatatttaaagaaaaggaacccaagacggggagtcaggggcacaaggtcacagctggtaatgatgaccctggaatgtcctcacagctgcacacctgcaccgctcacaa

SEQ ID NO: 768712 - DNA, 120 bp, Artificial Sequence
  ENSG00000230989_28 (sequence is synthesized)
acacagctgaccgtctcacagctgcacacctgcaccgctcacgagcacagctgaccgtctcacagctgcacacctgcactgctcacgaacacagctgatcgtctgcctcttcgtgtgagc

SEQ ID NO: 768713 - DNA, 120 bp, Artificial Sequence
  ENSG00000230989_29 (sequence is synthesized)
tgagctccgaatctcagctgtccaggctgtctggaaatcatcagccccactggctggatctcaaaatttactttcaaaaggctgatggagtgttttcaattaaacatgacctaaaattaa

SEQ ID NO: 768714 - DNA, 120 bp, Artificial Sequence
  ENSG00000230989_30 (sequence is synthesized)
gtaataaacacactggatgtgagtttttatttggaatttaaactattcagagctggtagaaaatgtgtgctcctggatcagtgccttttttctcctaaatcagttgagaacaacaacaga

SEQ ID NO: 768715 - DNA, 120 bp, Artificial Sequence
  ENSG00000230989_31 (sequence is synthesized)
aacaaatgacattcctcaaacatttgcccagagcacaaccacggggaatatgaaccacaggttttcacattggttttccatgcctatacctgtcctgtctcccacaaaaattattgcttg

SEQ ID NO: 768716 - DNA, 120 bp, Artificial Sequence
  ENSG00000230989_32 (sequence is synthesized)
aggcccaacccgggggataaaaagacacccccccgccactccgtgacctattagcttaccatcctattggatttcactgttttttgttttgtggtgttttttttttattgcaacgaagac

SEQ ID NO: 768717 - DNA, 120 bp, Artificial Sequence
  ENSG00000230989_33 (sequence is synthesized)
ttttaaatggactcatgaagaagccatcacctggaatcttaatcttgcattaattttaagtgtctgattttagctgcagccacttgagaacttttcaatgaatgaaaatgagggagggga

SEQ ID NO: 768718 - DNA, 120 bp, Artificial Sequence
  ENSG00000230989_34 (sequence is synthesized)
gatgcaagtcactgcccaaaaacaaaaccagaggaattgtgattgaacattgcacttatcaaccctacaaattaatatggaaataggaaaagggtttgtttcaacaagtcaggatgacag

SEQ ID NO: 768719 - DNA, 120 bp, Artificial Sequence
  ENSG00000230989_35 (sequence is synthesized)
tattttaaaaaagaaaaaaaggccagcctgggcaatatactgagactccatctctacaaaaaagtagaaaaattagcccagagtgtggtggcacacatctgtgctcccagctactcagga

SEQ ID NO: 768720 - DNA, 79 bp, Artificial Sequence
  ENSG00000230989_36 (sequence is synthesized)
aggtgggaggatcatttgagcccaggaagtcgaggttgcagtgagctgtgatcggacgactccactccagccgggcgga

SEQ ID NO: 768721 - DNA, 120 bp, Artificial Sequence
  ENSG00000230989_37 (sequence is synthesized)
aacgcttggtcctcacacctgaggctctcactaagaggtggctggaagctcctcagaccgctgcctagggttcgagtgatcctgaaagctgtacaacatcagcctctgtgggatccctga

SEQ ID NO: 768722 - DNA, 120 bp, Artificial Sequence
  ENSG00000230989_38 (sequence is synthesized)
gaatgatgaaatgtaatatgtggctgtctcatcaacagagcttcattttaccaaagcatatgtagacaccacatacatgaactacatacctatcgtgtagatgctgccctgcctcataag

SEQ ID NO: 768723 - DNA, 120 bp, Artificial Sequence
  ENSG00000230989_39 (sequence is synthesized)
aacactcttgactgtcctgcttcacaataataatcttcgcaataatgatctaataatggtcaaattctgtgtctctaccgtagaaaacagaatttgaccatttagtcacgttggtcttgc

SEQ ID NO: 768724 - DNA, 120 bp, Artificial Sequence
  ENSG00000230989_40 (sequence is synthesized)
aaaatgtccaccttccaaaagagaacagtattgcttcccaataattaagaatagtctggattcaggatccagcagcttagaagcgtttagctaccaatagcaaaaatcagcccttttaac

SEQ ID NO: 768725 - DNA, 120 bp, Artificial Sequence
  ENSG00000230989_41 (sequence is synthesized)
aatggtgggatgtattatttcacatggcaagaagtcccaagggagggcagctctggggcgagtaaattctgcacctcagtaaaactaagagcaagacccggccgggcgcagtggctcatg

SEQ ID NO: 768726 - DNA, 77 bp, Artificial Sequence
  ENSG00000230989_42 (sequence is synthesized)
aaaaattagccaggcgtggtggtgggcgcttgtaatcccagttgctcgggaggctgagggaggaggatcgcttgaac

SEQ ID NO: 768727 - DNA, 120 bp, Artificial Sequence
  ENSG00000230989_43 (sequence is synthesized)
aaaaaaataaataaaaaataaaaagacccaaccccagatttgttccacctgggtgcatccggtcagagaatgcctttcttcttcccttttgtctcctaagagtgaagaaaatgtttcttt

SEQ ID NO: 768728 - DNA, 120 bp, Artificial Sequence
  ENSG00000230989_44 (sequence is synthesized)
ccttttgtctcctaagagtgaagaaaatgtttctttgaaggtgtttccaccccactcctgtgcctaaaatgatcctggcaaacaggacccgcatgataggttgagccatgtggttcttgt

SEQ ID NO: 768729 - DNA, 120 bp, Artificial Sequence
  ENSG00000230989_45 (sequence is synthesized)
ttttttgttgtcacaactcaggttgggggtgttactggcatcaagagtgtagaaaccagggatgctgcgtcaacaccctaccatgcacaggacaaccctcaccccaaagagtggcacagc

SEQ ID NO: 768730 - DNA, 120 bp, Artificial Sequence
  ENSG00000230989_46 (sequence is synthesized)
cccaagtgtcaacagtgctgaggttgaggaatcccagcttaacccattcatgagaccacctgagcctggtgtaacggttctgctgatagtttccggaccctcagaggtggagacataaga

SEQ ID NO: 768731 - DNA, 120 bp, Artificial Sequence
  ENSG00000230989_47 (sequence is synthesized)
gaacaataccagggttccatcagaaaggaaatcagaatggctatcgggtggacaacctacagtgtttgctacagaccttctagatgtaacttctagattataaacactggtaacactgga

SEQ ID NO: 768732 - DNA, 120 bp, Artificial Sequence
  ENSG00000230989_48 (sequence is synthesized)
gatggttaaatcggaattagctgactgtcaaccttggtggcacattagaatcacctggggagcagttcaaaggcccaaaactgggcagcaccacagaaccctcacatcagaatccccatg

SEQ ID NO: 768733 - DNA, 120 bp, Artificial Sequence
  ENSG00000230989_49 (sequence is synthesized)
ggtgggcccagacagcagtgttcatcttagactccagtgtgcagtcgaggtcgagaactgcattcaagaaggcctgtctactgcgaaccgtccgatgatgtaattcaccaagttccatgg

SEQ ID NO: 768734 - DNA, 120 bp, Artificial Sequence
  ENSG00000230989_50 (sequence is synthesized)
gattccgccacgcccgtgtcaacccagctgacacgtccaacttggacaatcagggctttgacccccgttacctggcattcaattcaatccatgtgtcacgcatgccccaacaatttgtgt

SEQ ID NO: 768735 - DNA, 120 bp, Artificial Sequence
  ENSG00000230989_51 (sequence is synthesized)
cccaactgtttgaatcaaaggatttctgattccctgatgggtgatgactcagtaaccggattcagcttcagatctgcctgacatttttcctgcctgtcctgggccaggtatggcgctagc

SEQ ID NO: 768736 - DNA, 120 bp, Artificial Sequence
  ENSG00000230989_52 (sequence is synthesized)
tgctttcacctgtatcatctcattcactgctcagaggctctcgaaagctgttgacattatcaaaaagttttccagctggaattcatctccctctaatcagccttcaaaacctccatttgt

SEQ ID NO: 768737 - DNA, 120 bp, Artificial Sequence
  ENSG00000230989_53 (sequence is synthesized)
aaaccattgctgtagttttattacctcttaccttggtctttacaagttgctgtcaaaacccagtaagtgtttacagaaagaaactttacatattaaatatcttaaaggtcttttatgcag

SEQ ID NO: 768738 - DNA, 120 bp, Artificial Sequence
  ENSG00000230989_54 (sequence is synthesized)
aatatgcagttaattttgatgggctatggataatcatcagaagagccatttctggaaatgtaaataatatggctgtttcttttaacagtgcattctcctgaaaacataagaccatttgac

SEQ ID NO: 768739 - DNA, 120 bp, Artificial Sequence
  ENSG00000230989_55 (sequence is synthesized)
tgattctgctccagaatcttattgaggcaaaggactggaccgaattattcatggaacagaagcctaggactggtaagtccaggaaatgctgcaaaacaatgccctcaaaagaaatcagcc

SEQ ID NO: 768740 - DNA, 120 bp, Artificial Sequence
  ENSG00000230989_56 (sequence is synthesized)
tttccctttgataggtatctctcctgcaagccaggctcaggtgcgcctcaattagaacctgtgttcgctggggccataattaagaatcttaaagggaaagaatgttttgaaagccatctg

SEQ ID NO: 768741 - DNA, 120 bp, Artificial Sequence
  ENSG00000230989_57 (sequence is synthesized)
tcaaaagtacgcagtcttgcttgtagaattttagaggttcatggttaccgtgggtcggcactgggtctgtgagccctcatccccagggctcggtttcctatcagaatccttgtctggaag

SEQ ID NO: 768742 - DNA, 120 bp, Artificial Sequence
  ENSG00000230989_58 (sequence is synthesized)
gttgattatatcagatgcgcattttgccagcatcctcagaaggagatgcgaggaagattcttttcctgggccactctcattttctcaaacttggacaagtcttaacaataatctgtgacc

SEQ ID NO: 768743 - DNA, 120 bp, Artificial Sequence
  ENSG00000230989_59 (sequence is synthesized)
caactttgtcttccccatgatgaaaaacagaccccatagaaactctctggcacaaaaactctggaatcactgaccccagacattgttccctgccatccactctgccagacatttcttgga

SEQ ID NO: 768744 - DNA, 120 bp, Artificial Sequence
  ENSG00000230989_60 (sequence is synthesized)
tttattcaagctgacttgtattccagaacaattgtggacaagatttgctagtaatgcttccaacaagttaccgtttagcaagttcagaacttgaagaatcccttttatcctaacgctgac

SEQ ID NO: 768745 - DNA, 120 bp, Artificial Sequence
  ENSG00000230989_61 (sequence is synthesized)
taataaactggtgagaactgtttgaaatacccataagtcaatggaggtcgtaatttgcttttatgctgtattaaacaccactgagatgttaaggtctttcttgggaaccaccgtgatgtt

SEQ ID NO: 768746 - DNA, 120 bp, Artificial Sequence
  ENSG00000230989_62 (sequence is synthesized)
ctcttctggactcttcgtaaccccttcagcagacgaccctgtatctggtcttggttctgaaaggtttgcagcggcacctaagtcactgaagttctggcagaattcattctcctgctctct

SEQ ID NO: 768747 - DNA, 120 bp, Artificial Sequence
  ENSG00000230989_63 (sequence is synthesized)
actgggacttgttttccataattggtctgagaacaacagatttttttcttttttgcctcggatttcaacaaaacatacatggaaagaatattttcttccttggagacatttcccataggg

SEQ ID NO: 768748 - DNA, 120 bp, Artificial Sequence
  ENSG00000230989_64 (sequence is synthesized)
cagtggttcttaaaatacgttcctgaaccggcagcatcagaatcccctgggaacgtgctggaaatgtagatccccaggccctacctagccctactgaatcagagaccctgggagggaggt

SEQ ID NO: 768749 - DNA, 120 bp, Artificial Sequence
  ENSG00000230989_65 (sequence is synthesized)
ccagcagcctgggttttaacacatcctccaggcgattctgagagtgagagagccagggccttcgggcatcaaccttggggcgagggtgttgggttgcccaacaccctttagtctaatggc

SEQ ID NO: 768750 - DNA, 120 bp, Artificial Sequence
  ENSG00000230989_66 (sequence is synthesized)
tttagggtcaaatatgtctaaaccaagaagccccatggggcactgattagcatgcaggtccccaggccccctttttgtagatcctgattcagaatatctgggacgggggctggagattca

SEQ ID NO: 768751 - DNA, 120 bp, Artificial Sequence
  ENSG00000230989_67 (sequence is synthesized)
tatttttaataaattccctcatttattatttttgtgtcttatttcccatacacaaaaacactgcgtagagaaatgggagtgtgggcgatgctcccatgctgggagtctcaggcctgggct

SEQ ID NO: 768752 - DNA, 120 bp, Artificial Sequence
  ENSG00000230989_68 (sequence is synthesized)
agtcctaaaataattgaaaaggaattgattcttaattacccagaacgtccacgctctaggacctagtgtgacctcttctgccttctgaaccgaggagtccacccctaagcccgaggaact

SEQ ID NO: 768753 - DNA, 120 bp, Artificial Sequence
  ENSG00000230989_69 (sequence is synthesized)
gagcgtgaagagccctgacgccatgaagacttgaatcactttaaagcaatttgcttcttattaaaatgtacttcagtaaaaaatcatttcaactcttaagccacaaaaggatatccaatc

SEQ ID NO: 768754 - DNA, 120 bp, Artificial Sequence
  ENSG00000230989_70 (sequence is synthesized)
atttaaagcttcctgagtgtttcggttgattaaaaagcttttaaagagcatagtaaatattttaccagaaggataagttattcagtatggagattatttattaaaaactagtaatttatt

SEQ ID NO: 768755 - DNA, 120 bp, Artificial Sequence
  ENSG00000230989_71 (sequence is synthesized)
ctgggcatcggggagatggccgagactgaccccaagaccgtgcaggacctcacctcggtggtaagggacggctgtgagggccggaggccgcggccttcccgggcggcgccgggccaagcc

SEQ ID NO: 768756 - DNA, 120 bp, Artificial Sequence
  ENSG00000230989_72 (sequence is synthesized)
ctgctggacagaggcgcgcccaccgcggccgcgcgtggcgtctgccgaggccccgtttctggaagcgtctctggccgaggctcccggccaccttgacccccggggcgctcggtgcgggcc

SEQ ID NO: 768757 - DNA, 120 bp, Artificial Sequence
  ENSG00000230989_73 (sequence is synthesized)
agtctccccgcgggcgcccccaagcccgaccccttccagtagccccattcatctgtcgcgaacgccctccgggtccctcccgcctacctctgacaccctccccgcccttcaactcctcac

SEQ ID NO: 768758 - DNA, 120 bp, Artificial Sequence
  ENSG00000230989_74 (sequence is synthesized)
tttgagtcgcagcggcctccccagcccagcagtctaattggacaggttggaaaacggaagcccagagaaggaagatcttgctgaaggccgcacagctgtccagaggcagaaatggggctg

SEQ ID NO: 768759 - DNA, 120 bp, Artificial Sequence
  ENSG00000230989_75 (sequence is synthesized)
aatccgatgcggggtagccatgccccacagtcctgtactcttacccaccagcgtgtaacagtgtcgaaagaaaattggaagaccagtttccctaaagtcgttgtgtttaaggctgtagtc

SEQ ID NO: 768760 - DNA, 120 bp, Artificial Sequence
  ENSG00000231068_0 (sequence is synthesized)
ttctcatctcctgacactatgtatttcaattacaaaagtgtgtgtgggagctgtggatttggctcttgctatggttgtgggtatggctgtatacacagcacccactgtggctgtaacggt

SEQ ID NO: 768761 - DNA, 120 bp, Artificial Sequence
  ENSG00000231068_1 (sequence is synthesized)
atgaaaataaatattctgttatagatgatctgatattttttgcttctaagaaatgccattgagcattgtttcttatttagtttctcaaagatctgttctgctttaatcaccttcaatcct

SEQ ID NO: 768762 - DNA, 120 bp, Artificial Sequence
  ENSG00000231192_0 (sequence is synthesized)
atggaagaggaaaatgcaacattgctgacagagtttgttctcacaggatttttatatcaaccacagtggaaaatacccctgttcctggcattcttggtaatatatctcatcaccatcatg

SEQ ID NO: 768763 - DNA, 120 bp, Artificial Sequence
  ENSG00000231192_1 (sequence is synthesized)
gggaatcttggtctgattgctgtcatctggaaagaccctcaccttcatatcccaatgtacttactccttgggaatttagcttttgtggatgcttggatatcatccacagtgaccccaaag

SEQ ID NO: 768764 - DNA, 120 bp, Artificial Sequence
  ENSG00000231192_2 (sequence is synthesized)
atgctgaataacttcttagctaagagtaagatgatatctctctctgaatgcaagatacagtttttttcgtttgcaatcagtgtaaccacggaatgttttctcttggcaacgatggcatat

SEQ ID NO: 768765 - DNA, 120 bp, Artificial Sequence
  ENSG00000231192_3 (sequence is synthesized)
catgctttaatccatgaaggatttttattcagactaaccttctgtaactccaacatagtacatcacatttactgtgacactatcccattgtctaagatttcttgtactgattcttctatt

SEQ ID NO: 768766 - DNA, 120 bp, Artificial Sequence
  ENSG00000231192_4 (sequence is synthesized)
aattttctaatggtttttattttctcaggttcaattcaggtattcagcattgtgactattcttgtatcttatacatttgttctcttcgcaatcttaaaaaagaaatctgataaaggtgta

SEQ ID NO: 768767 - DNA, 120 bp, Artificial Sequence
  ENSG00000231192_5 (sequence is synthesized)
aggaaagccttttccacctgtggagcccatctcttctctgtctctttatactatggaccccttctcttcatttatgtgggccctgcatctccgcaagcagatgatcaagatatggtggag

SEQ ID NO: 768768 - DNA, 120 bp, Artificial Sequence
  ENSG00000231192_6 (sequence is synthesized)
cctctattctacactgtcatcattcctttgttaaatcctatcatctacagtctgagaaataagcaagtcacagtttcattcacaaaaatgttaaaaaaacatgttaaggtttcatactaa

SEQ ID NO: 768769 - DNA, 120 bp, Artificial Sequence
  ENSG00000231192_7 (sequence is synthesized)
aaccttcaaaaagaatgaatatgccatgaatggctacctgtattattgacattgctgtgctactgtatgtatttttgtttagaaagcacaacgtgtttaaaggatatccacaatttcctt

SEQ ID NO: 768770 - DNA, 120 bp, Artificial Sequence
  ENSG00000231192_8 (sequence is synthesized)
tgagctaatgttttagtacctaataaactaatcgcaatatgtctatatgttattcaaaagcattcaagaaattttcatactgttcataatagaataatgactgtagaaatcaaataaaac

SEQ ID NO: 768771 - DNA, 120 bp, Artificial Sequence
  ENSG00000231192_9 (sequence is synthesized)
tatttaacagttgtatatgttattcaatgtgcatttataaatgcattaattgctaaaatagcctagtttatcatataaggacttgagtatgatggttttgatactaatactactgaatta

SEQ ID NO: 768772 - DNA, 120 bp, Artificial Sequence
  ENSG00000231192_10 (sequence is synthesized)
cctgcgatatccatcatataccataactgaggcagatttgtttttgagtgaacagaggtaagtcccaatgattctgctaaccatcaaggtcttccatttcattatattaggaaagggtga

SEQ ID NO: 768773 - DNA, 120 bp, Artificial Sequence
  ENSG00000231192_11 (sequence is synthesized)
attctgtttcttgaaggaagtcaactcgcaggtcagacagaaatggaaatgcaatgagaaaaataaaaatagaaggaatgaacagtgaaggcactgccatagtgtaagagcatgctctta

SEQ ID NO: 768774 - DNA, 120 bp, Artificial Sequence
  ENSG00000231192_12 (sequence is synthesized)
actctatgtgctcgtatgagtaagaagaggcaagctgcctctcactttctaggatggcttctaaggcccttcccagctatgattatatgattttagacaacctggaagccttccctaatt

SEQ ID NO: 768775 - DNA, 120 bp, Artificial Sequence
  ENSG00000231192_13 (sequence is synthesized)
caggaaattaaaagattaaatagaataactgcatttggagtagacatagagaagaaataagtatcataaaagaaagaaagtggtcttaatgtttttatgatgaagctaccaagatgtgta

SEQ ID NO: 768776 - DNA, 120 bp, Artificial Sequence
  ENSG00000231192_14 (sequence is synthesized)
aaaatcaataatattgcaaggttgttggaatgtgttgttatcaacaagaagttttaaatgcctgtcatgtaagttcaaataatgttaacatgatacgacatcatggtgcccagcaagagg

SEQ ID NO: 768777 - DNA, 120 bp, Artificial Sequence
  ENSG00000231192_15 (sequence is synthesized)
aagcaaaaacaaaaaaatgaggtaagattttggagattttttgcctcggaaagtcattgattgttaaccttcttaacacttcttgtacttcaagtatgttaatcatctttctaccagtcc

SEQ ID NO: 768778 - DNA, 120 bp, Artificial Sequence
  ENSG00000231192_16 (sequence is synthesized)
accctctccttcatctttcaatactgaaattcctttcacattctcactgatactattgaggtccctagcataaaaactactcacatgtagttttgcaaacctctagttacttatttcctc

SEQ ID NO: 768779 - DNA, 120 bp, Artificial Sequence
  ENSG00000231192_17 (sequence is synthesized)
catccttctaacagtcactcacttccccaaaatggctgttagattgttttttcaaatggaactctaactaattatatccctcttcaattccttttgttagattgtcattgctaccagatt

SEQ ID NO: 768780 - DNA, 120 bp, Artificial Sequence
  ENSG00000231192_18 (sequence is synthesized)
attgtcattgctaccagattatatgcatgtatgttttaggtatcttatatctatatgtatacatatgcatatgtttagtttttcatatgtatacatagtgatacaagatatatattagta

SEQ ID NO: 768781 - DNA, 120 bp, Artificial Sequence
  ENSG00000231192_19 (sequence is synthesized)
atgtagcagcattagaatttagagtttatctgaggagactcgatttattttgcaacaccagattgcatgtggtatggggatttcctgaaggtgcaagagaggagataaaggcttttacag

SEQ ID NO: 768782 - DNA, 120 bp, Artificial Sequence
  ENSG00000231192_20 (sequence is synthesized)
ggcaaatgtgaaagtatggcaaaagtaaagattgtattggttaaagtggagcagtagtgttattttgatcattccagtggaaaattcctagttagaaattagctggggtttttggttggt

SEQ ID NO: 768783 - DNA, 120 bp, Artificial Sequence
  ENSG00000231192_21 (sequence is synthesized)
taaagttaacttttgttttaccatttacaatgagttggattcctgtttgcttaggtacaaacccactttgctggacccacgtcagcctgatatacttttatttaattattttaactcatt

SEQ ID NO: 768784 - DNA, 120 bp, Artificial Sequence
  ENSG00000231192_22 (sequence is synthesized)
ctcttacagaagtgtttcttttatggacacttcgtttttgttattctaatcatagtgagaaaatctggcacagtgtagtggctacaaacttgtatttaaaactcttgagagaatacaaca

SEQ ID NO: 768785 - DNA, 120 bp, Artificial Sequence
  ENSG00000231192_23 (sequence is synthesized)
caccaagaagatgacaatgactatcacaaacatagtaccaagggactggggtatgctccatagccaaagtacgtatgaacaaaaccaactgaaataaaccaaatgaaaataataaaaggt

SEQ ID NO: 768786 - DNA, 120 bp, Artificial Sequence
  ENSG00000231192_24 (sequence is synthesized)
taatggttaaaactacctataagcttagcatgtgagccagagggcagttagttgagaagacttttagatttaagctcaaagcatctttagatgatgaaataaaatggcagttgcagtctg

SEQ ID NO: 768787 - DNA, 120 bp, Artificial Sequence
  ENSG00000231192_25 (sequence is synthesized)
ataatttttctgttttttagtctgaatgtcttttgtcatgtcattgaatgtttggtgaacttcctgagtgggacactaagcatcatgcatgaagattatcctctgacatttatatcaagt

SEQ ID NO: 768788 - DNA, 120 bp, Artificial Sequence
  ENSG00000231192_26 (sequence is synthesized)
tgtccagccctagcttgtagcgcttcaggaataggacagtttctaagtagataataaaacatcaaagacaatggacagaactggaatttaattatgggtgcgctatatttttctactgaa

SEQ ID NO: 768789 - DNA, 120 bp, Artificial Sequence
  ENSG00000231192_27 (sequence is synthesized)
acatgatttttccctccataatcaggccatttctttcaaatgtaattatagtaagactaatttatttaccaactagatctaccctcattaagcttcaagtgagtatttacataagtgcaa

SEQ ID NO: 768790 - DNA, 120 bp, Artificial Sequence
  ENSG00000231192_28 (sequence is synthesized)
gttggaataggaattgatcatctctttttaagaaggcctcattacgacctttactaaataatctccgattagactttaaagtttcttcaagctataaagtcacaccaacaacataccatt

SEQ ID NO: 768791 - DNA, 120 bp, Artificial Sequence
  ENSG00000231192_29 (sequence is synthesized)
agtttcacctgcaacactgatacatttaggtaaactcccctgtactcaaaaaggtcctaaaagtatatttcagttcctgggccttccagagagtaaggtctttcttcctctttaccaata

SEQ ID NO: 768792 - DNA, 120 bp, Artificial Sequence
  ENSG00000231192_30 (sequence is synthesized)
tggctagaaagcttgtgagcagctatcagcccagattttctaaaggaactggctgtagttatttttctgatacctgcaaatctcatattaaaatttgattccaaattctggaggtgtcga

SEQ ID NO: 768793 - DNA, 120 bp, Artificial Sequence
  ENSG00000231192_31 (sequence is synthesized)
agatgggaggtgtttgggtcatgggggtcgatctctcatgaatgccttggtgccatcatcatagtaataagcatgttcttactgtcttagttcccatgagggctggttgataaaagagcc

SEQ ID NO: 768794 - DNA, 120 bp, Artificial Sequence
  ENSG00000231192_32 (sequence is synthesized)
cagcactccactctctctctttcctttcctctctcaccacgtgatcaccacacttgccagctccacttcgcctgctgtcatgagtgaagtaggctgaagctgtcatcagaagtggacatt

SEQ ID NO: 768795 - DNA, 120 bp, Artificial Sequence
  ENSG00000231192_33 (sequence is synthesized)
taagccttgttttctgtatagcctgcagaattgttctccaaacaaacaccttttacttataaattacccagcctcaagaatttctttattgcaacactaaatggaatgaggcagggctta

SEQ ID NO: 768796 - DNA, 120 bp, Artificial Sequence
  ENSG00000231192_34 (sequence is synthesized)
attggatgcataaagtcaattcttagtttcttaaaattctccagtcatatctaattttatgcacattctccaatgtgacattccagtcacagtagtggtaatataaccataattatgtta

SEQ ID NO: 768797 - DNA, 120 bp, Artificial Sequence
  ENSG00000231192_35 (sequence is synthesized)
tattgtaataacagattctgattaaaattttgcaaatacctatattgcaatcaaaataaaaatgctcaatgatgatttctgaattctggagaggtcagctaaggagaagaaggtaaacgt

SEQ ID NO: 768798 - DNA, 120 bp, Artificial Sequence
  ENSG00000231192_36 (sequence is synthesized)
attaattctgtttacaaaaggtatacttggccagattgtttgcaaagtttctttaattctggtctcgtgttgtgtttctaacgttatcagaaatctttacttgtcagagccttttccgca

SEQ ID NO: 768799 - DNA, 120 bp, Artificial Sequence
  ENSG00000231192_37 (sequence is synthesized)
aatctgttgagattagacagatactttgcatacagggatgtttcctttatgttatttagtggtatttattaccacacattaactagaattctaaactcttagtaactttcttttctggga

SEQ ID NO: 768800 - DNA, 120 bp, Artificial Sequence
  ENSG00000231192_38 (sequence is synthesized)
tagaagcgattgacaaatatacatcacaccggcattttacagattggcaaatctacgaatatacaatttcataattcctagaagtatgtgctttcccattatataatttttcagtgtgcc

SEQ ID NO: 768801 - DNA, 120 bp, Artificial Sequence
  ENSG00000231192_39 (sequence is synthesized)
acaggacatgttgaacacaaatatgaacacaaaagtgaacccaaatatctttgtttcttctgtaataagaagtccaaaatagagaagtgtatgttcagcaattagtcttttaaaaaaatg

SEQ ID NO: 768802 - DNA, 120 bp, Artificial Sequence
  ENSG00000231192_40 (sequence is synthesized)
ttgtttggaaataatccagatattcaatgactattgataatttaatcaactgtgtgaaactctaagggtttaatttaccacagagaagtgggaaggtatttttaagtagacttcttatta

SEQ ID NO: 768803 - DNA, 120 bp, Artificial Sequence
  ENSG00000231192_41 (sequence is synthesized)
aacataattatggtttaaaagttcatttataaacgtatattgtacttacatctatttaattcacttattctgaattgtttggtttactcatgaaaatttcataagacattagacacagcc

SEQ ID NO: 768804 - DNA, 120 bp, Artificial Sequence
  ENSG00000231192_42 (sequence is synthesized)
agtcatcgtttcaaattactttcttgttaactacatttacagcacgtttatgtcagtgtagcaggacgagccgtgggcaaaacccctcagacaccgagatagtgaagggagtggctttaa

SEQ ID NO: 768805 - DNA, 120 bp, Artificial Sequence
  ENSG00000231192_43 (sequence is synthesized)
agacaccgagatagtgaagggagtggctttaatcagatgggagcatcgataggctagcgtcttaaaatccgagctcgtcaggtgctcaacttctgtcccttttaagggctcacaactcta

SEQ ID NO: 768806 - DNA, 120 bp, Artificial Sequence
  ENSG00000231192_44 (sequence is synthesized)
gagcaagccagggggtacgtgacaggggctgcgagcaccggtggtcagagtgaaacagaacagaacgggaggtttcacaatgtcctaccatacgatgtctggaatctatagataacaaca

SEQ ID NO: 768807 - DNA, 69 bp, Artificial Sequence
  ENSG00000231192_45 (sequence is synthesized)
tgtcctaccatacgatgtctggaatctatagataacaacagttgctaggtgaggggtcgaattttaacg

SEQ ID NO: 768808 - DNA, 65 bp, Artificial Sequence
  ENSG00000231192_46 (sequence is synthesized)
agtcagtcatcataaaagcaaaaatctaaaagtcaaatatgtgtttttttgttttattgccgtgc

SEQ ID NO: 768809 - DNA, 120 bp, Artificial Sequence
  ENSG00000231213_0 (sequence is synthesized)
ctttgtcaaataaggaaaactcaaacttttggcagtctgcaaactgtgaggttgactttataatttttcatcacaaggtatacctcctgaagcctcttaactattttcagaaaaagacag

SEQ ID NO: 768810 - DNA, 120 bp, Artificial Sequence
  ENSG00000231213_1 (sequence is synthesized)
tgttgctgataatgcaatatatcctgcatgttcaacctttgtgaatcataccatgtagggcaattgacttggtgagcaaaatctccatggtcacctgggtagctgcatttagaaatagga

SEQ ID NO: 768811 - DNA, 120 bp, Artificial Sequence
  ENSG00000231213_2 (sequence is synthesized)
gctgtccagtcaaggttacagcacttgttttctttccttagaattcaatgcagttaaatatcatctgtaaattttgattagctttgcaaggctattgaaggtttgtatattccaatgcct

SEQ ID NO: 768812 - DNA, 120 bp, Artificial Sequence
  ENSG00000231213_3 (sequence is synthesized)
gcctctgattaatcaaattcaattaaaaatgaaaataaagatttatttatataatagtagggaatatatcctcttcttatttattttgagttgaagagatggagataaatccaatagaaa

SEQ ID NO: 768813 - DNA, 120 bp, Artificial Sequence
  ENSG00000231213_4 (sequence is synthesized)
acaataataatgttcaaacattttcaacatgtaaagaattgtatttagaactatcaaaaatttatacaataggatgttttatcacagaatctggaaaggagacttctagaaattgagaaa

SEQ ID NO: 768814 - DNA, 120 bp, Artificial Sequence
  ENSG00000231213_5 (sequence is synthesized)
tacaggatatttctgatataagactgaatgcaaatgtgtatattctaagaaatacaaaaacaacttggtaaaaaaaaaaaagacacttaaaatgagtgctgtgtgctttcctttctggtt

SEQ ID NO: 768815 - DNA, 120 bp, Artificial Sequence
  ENSG00000231213_6 (sequence is synthesized)
tttattatttttaaattgttccttcagccaccaaagttatatgatggtttctgaacagcgtttacttttgtgacagtttcatctcactctgttgtccaaactgataaagtccagaagtct

SEQ ID NO: 768816 - DNA, 120 bp, Artificial Sequence
  ENSG00000231213_7 (sequence is synthesized)
agaaacagcaagggactcccttcctctgttatatgtaagctgacaagaggcagacaaacacgttctgaagttttgtgcatgctgcgttttctctccttgctgcaacaagaaaagcctttg

SEQ ID NO: 768817 - DNA, 120 bp, Artificial Sequence
  ENSG00000231213_8 (sequence is synthesized)
ctctaaagatgcccagaaccaaagaagaggtctgcctggttttcttcctggagctccagacccagaccaaagccttcctgcctcttccaatccagggaaccaagcatggcagctgagtct

SEQ ID NO: 768818 - DNA, 120 bp, Artificial Sequence
  ENSG00000231213_9 (sequence is synthesized)
ccctctgccaagcagtttcctgccaacagtcagtctccctcctggtctagaatatttaagccagttagacctgataattatacaccagcaggtggagctgcttggaatgatacttggtac

SEQ ID NO: 768819 - DNA, 120 bp, Artificial Sequence
  ENSG00000231213_10 (sequence is synthesized)
tgagacctccaacaaatatgagattaaaaacagcttgggacaaagaatttactttgcagtggaggaaagcatctgcttcaatcgtactttctgttccactctgcgatcttgcaccctgag

SEQ ID NO: 768820 - DNA, 120 bp, Artificial Sequence
  ENSG00000231213_11 (sequence is synthesized)
gatcacagataactcaggtcgagaggtcattacagtgaacaggcccttgagatgtaacagctgctggtgcccttgctacctacaagagttagaaatccaagcccctcctggtactatagt

SEQ ID NO: 768821 - DNA, 120 bp, Artificial Sequence
  ENSG00000231213_12 (sequence is synthesized)
tggttacgttacgcagaagtgggacccctttctgcctaaattcacaatccaaaatgcaaacaaagaagatattttgaaaattgttggtccttgtgtgacatgtggctgttttggcgatgt

SEQ ID NO: 768822 - DNA, 120 bp, Artificial Sequence
  ENSG00000231213_13 (sequence is synthesized)
ggattttgaggtgaaaaccattaatgaaaagcttacaattgggaagatttcaaagtactggtcaggatttgtaaatgatgtcttcacaaatgctgacaatttcggaattcatgttcctgc

SEQ ID NO: 768823 - DNA, 120 bp, Artificial Sequence
  ENSG00000231213_14 (sequence is synthesized)
agatctagatgtaacagtcaaagcagcaatgatcggtgcctgttttctctttgattttatgttctttgaacattcactggctggattataataaccaagataatgaaaacaataaaatat

SEQ ID NO: 768824 - DNA, 120 bp, Artificial Sequence
  ENSG00000231213_15 (sequence is synthesized)
gcagaacatatttcaaaatcccttgggctctggatttcatttctgaatggtttgaatgtttgcttttttgttaaaaaaaaatgttaattattatatttattaaaacagtttaatgaggca

SEQ ID NO: 768825 - DNA, 120 bp, Artificial Sequence
  ENSG00000231213_16 (sequence is synthesized)
ggacctcacaagaaaacagagggtttcaactgtgcataacatcagagatgaccaggtgcaacctccatatattgaagacttagaaaatgagaaatataaaaattaaattactttgtttta

SEQ ID NO: 768826 - DNA, 120 bp, Artificial Sequence
  ENSG00000231256_0 (sequence is synthesized)
atttctgaagtgagactaggaagagaagatgaacaattccctggattatctggcctaccctgttatcgtctctaatcacaggcaaagcacaaccttcagaaagaaactggactttggcca

SEQ ID NO: 768827 - DNA, 120 bp, Artificial Sequence
  ENSG00000231256_1 (sequence is synthesized)
ctacgtatctcacaagaatagaatacaaatagcgaagcctactgttgataccaaacctccagtggcgcacacaaatcacattttaaaattgagcaaactacagggtgaacaaaagaaaat

SEQ ID NO: 768828 - DNA, 120 bp, Artificial Sequence
  ENSG00000231256_2 (sequence is synthesized)
caacaaaatcgagtatgaaaacaagcaactgtgtcagaaaatcgcaaatgcccatcgcggccctgccaaggtggattgctggaatgaatatttttccaagagcttaaacagagaaacaag

SEQ ID NO: 768829 - DNA, 120 bp, Artificial Sequence
  ENSG00000231256_3 (sequence is synthesized)
gaaccgcgagctagtgagaatcaccatggaaaaccagggcattctgaagaggcttgttgatcgcaaaccccactatgaccgcagggcatctgagatagactggcagaattcaaggcgcta

SEQ ID NO: 768830 - DNA, 120 bp, Artificial Sequence
  ENSG00000231256_4 (sequence is synthesized)
tatcagaaataccacgagatatcttctctcccaaaatgaataggttactcaccatggaaaagatacaagagaaggccctaggatttcttggctgctcaggatctcaagacactcccgact

SEQ ID NO: 768831 - DNA, 120 bp, Artificial Sequence
  ENSG00000231256_5 (sequence is synthesized)
ggctgaatgctccatcttcagatgcttcaataaagcttggaacataaaatgcgtaagttacatttaggggacccaaaggctttatgttctcattccaaaatggggcaggcagaaggaaag

SEQ ID NO: 768832 - DNA, 120 bp, Artificial Sequence
  ENSG00000231256_6 (sequence is synthesized)
atgcaatgagcatttttatttggggctatgaaaagaagttttaacgagagagagagagagaaatctgagagaactctttaaaacatacaccatcatcaccatcccgtggaagaagaaaag

SEQ ID NO: 768833 - DNA, 120 bp, Artificial Sequence
  ENSG00000231256_7 (sequence is synthesized)
ctggggtgagatcatccagccacaagtacagcactgtcaaaatggaaaacgaaatcacatgacaacatcaaggttcagaaaacacaaggaacaaatgccattagttcctctgtgaataca

SEQ ID NO: 768834 - DNA, 120 bp, Artificial Sequence
  ENSG00000231256_8 (sequence is synthesized)
cacgatcggaaaagaatgcctcattgaagtttccatggactctgttcatttatagggagcagcagcagtgaaaatgtctcaaaacatacggtgagacaatgttgcaggcctgctatgatt

SEQ ID NO: 768835 - DNA, 120 bp, Artificial Sequence
  ENSG00000231256_9 (sequence is synthesized)
ggtcatgctagttttcagcccaactatattagtcagcatttgccaaagagacagactcaataggagagagagagagagagagagagtgagagagatagatagagagtgagagagagagag

SEQ ID NO: 768836 - DNA, 120 bp, Artificial Sequence
  ENSG00000231256_10 (sequence is synthesized)
aaagagagagagagaggagaggatttatttggggaattggctcacaagatcatggaagctaaagaagtcccaccacaggccatctgcaagctggagaccctggtggagcagggcagacaa

SEQ ID NO: 768837 - DNA, 120 bp, Artificial Sequence
  ENSG00000231256_11 (sequence is synthesized)
cccccaaagtggggcttagcctgcgagtgttcttggcttcacccaggaaagaatttaagggtgagccagtggtagggtagaagaagacagttttattgaagcagcagtgttacagctcca

SEQ ID NO: 768838 - DNA, 120 bp, Artificial Sequence
  ENSG00000231256_12 (sequence is synthesized)
tgactgctcctgcagtacagggctaccccaaaggcagagagttttgcagtcatagttatacgtacttttaattacatgtagattaaggggcggtttgtgcagaaattctagggaaggagt

SEQ ID NO: 768839 - DNA, 88 bp, Artificial Sequence
  ENSG00000231256_13 (sequence is synthesized)
gattaaggggcggtttgtgcagaaattctagggaaggagtagtaatttttttttttttttttgagatgaatggcgcgatctcagctca

SEQ ID NO: 768840 - DNA, 120 bp, Artificial Sequence
  ENSG00000231256_14 (sequence is synthesized)
gcgtgagccaccatgtccggcctataggaaagggtagtaatttttgggtccttgggtcattgccctggaaaggggtggtaactcctaggtgttgctacggtaatggtaaactgacatggc

SEQ ID NO: 768841 - DNA, 120 bp, Artificial Sequence
  ENSG00000231256_15 (sequence is synthesized)
acactagtgggagtgtcttatggaaagctgcttccacccctttcctgttttagctagtcctcaattggatcctgtgtccaagccccgcctctggagtcaaggcctgcctcccacctcact

SEQ ID NO: 768842 - DNA, 120 bp, Artificial Sequence
  ENSG00000231256_16 (sequence is synthesized)
gggatgctggtagcatggcttggtccaagcccaaaaacctcagaaccaagaagaaggtggtgtaactctcagttcgaggccaaaggctgagaacccactaggggggacaagggtgctggt

SEQ ID NO: 768843 - DNA, 120 bp, Artificial Sequence
  ENSG00000231256_17 (sequence is synthesized)
gtgagtcttggagtacaaaggccaaggagcctagagttgttgtcccaggacaggagaggaagagtgtattccagttccagcagatagattgacatattcgcctcttgtctgtttttgttc

SEQ ID NO: 768844 - DNA, 120 bp, Artificial Sequence
  ENSG00000231256_18 (sequence is synthesized)
tttctgaatccacagcaagttggatgatgcctctccacattgagagtggatcttcccacatagttcactcagacttacatgctaatctcccctggaaacactcacagacacacccaaaaa

SEQ ID NO: 768845 - DNA, 120 bp, Artificial Sequence
  ENSG00000231256_19 (sequence is synthesized)
taatgctttaccaggtttctattcagtcaagttggcaccttaaattaaccatcgcactgactttttaaactttctattttgaaataatgaaaattcacaggtagttgcacataaaggaac

SEQ ID NO: 768846 - DNA, 120 bp, Artificial Sequence
  ENSG00000231256_20 (sequence is synthesized)
agggaggcctcctgcaccctttacccagtctccaccaatgttagcatcttgcgtaactggagtacaatatcaaaaccaggaaactgacattggcatgatgcatggaacctatgcaggttt

SEQ ID NO: 768847 - DNA, 120 bp, Artificial Sequence
  ENSG00000231256_21 (sequence is synthesized)
catcagttatacatgcactcatttttgtacatatatgtatagctctatgcggtttttgccacatgtatagctttgtgtaaccacattcgagatacttaaaaccactattatcaaaagaca

SEQ ID NO: 768848 - DNA, 120 bp, Artificial Sequence
  ENSG00000231256_22 (sequence is synthesized)
ctcttattgccacccttttagccacagtcacctcagaccctcaagcctaactcttggcaatcacaatctgttttccacctctctgttagttcatggtattacgtaaatggcgtcatgcaa

SEQ ID NO: 768849 - DNA, 120 bp, Artificial Sequence
  ENSG00000231256_23 (sequence is synthesized)
tgtatgttcatccttttgagattggcttttttcactcaggataatttccttgatgttcatccaagttgtgtgtgcctttttattgctgagtagtattccatggtatggacatgctacaat

SEQ ID NO: 768850 - DNA, 120 bp, Artificial Sequence
  ENSG00000231256_24 (sequence is synthesized)
gctgagtagtattccatggtatggacatgctacaatatatttaaccatacatccatcaaaggacattggggtagtttctagtttttcaaacattattattattattattattattatttt

SEQ ID NO: 768851 - DNA, 120 bp, Artificial Sequence
  ENSG00000231256_25 (sequence is synthesized)
ctggcctgattttttaaatagcaaattttgaaagttatttacatattataggaataagtcctttgcctgctatgcgccttgcatgtatttttctcccagtctataatttgtcttttcatc

SEQ ID NO: 768852 - DNA, 120 bp, Artificial Sequence
  ENSG00000231256_26 (sequence is synthesized)
ctcagggtctttgacagagtaaaatatttttatttggatgacatccaatatatcaatgatgaaactgttctatatcttgactctatcaatgtcaatatccttgttgtgatactgtaccat

SEQ ID NO: 768853 - DNA, 120 bp, Artificial Sequence
  ENSG00000231256_27 (sequence is synthesized)
atagttttgcactatgctaccactgggggaatctggtaaggagtttacaggatctctctgtattatttcctacatgcatgtgaatatacaattatctcaaaataaaaagcttaaaaaaaa

SEQ ID NO: 768854 - DNA, 120 bp, Artificial Sequence
  ENSG00000231274_0 (sequence is synthesized)
atggagcgcagggcctccgagacccctgaggatggggacccagaggaggacacagccacagccctccaacggctggtggagctgacgaccagcagggtgaccccggtgaggagccttcgg

SEQ ID NO: 768855 - DNA, 120 bp, Artificial Sequence
  ENSG00000231274_1 (sequence is synthesized)
gaccagtaccacctcatccggaagctgggctccggctcctacggccgcgtgctccttgcccagcctcaccaggggggtccagctgtggctctgaagctcctgcgtcgggatttggtcctg

SEQ ID NO: 768856 - DNA, 120 bp, Artificial Sequence
  ENSG00000231274_2 (sequence is synthesized)
agaagcaccttcctgagggagttctgtgtgggccgctgcgtctctgcacacccaggcctgctgcagaccctggcaggacccctacagaccccccgctattttgccttcgcccaggagtac

SEQ ID NO: 768857 - DNA, 120 bp, Artificial Sequence
  ENSG00000231274_3 (sequence is synthesized)
gcgccctgtggggacctcagcgggatgctgcaggaaaggggcctcccagaactgctggtgaagcgggtggtggcccagttggcaggagctctggacttcctccacagccgggggctggtc

SEQ ID NO: 768858 - DNA, 120 bp, Artificial Sequence
  ENSG00000231274_4 (sequence is synthesized)
cacgcagatgtcaaacctgacaacgtgctggtcttcgacccggtctgcagccgtgtggccctgggagacctgggtctgacccggccagagggcagcccgacccccgccccaccagtgcct

SEQ ID NO: 768859 - DNA, 120 bp, Artificial Sequence
  ENSG00000231274_5 (sequence is synthesized)
actcctggggcctgggggtgcttctcttctgtgctgccactgcctgtttcccttgggacgtggcactggcccccaaccctgagttcgaggccttcgctggctgggtgaccaccaagcctc

SEQ ID NO: 768860 - DNA, 120 bp, Artificial Sequence
  ENSG00000231274_6 (sequence is synthesized)
agccacctcagccaccaccaccctgggaccagtttgcgcccccagccctggccttgctccaggggcttctggacctggatcccgagactaggagccccccactggctgtcctggacttcc

SEQ ID NO: 768861 - DNA, 120 bp, Artificial Sequence
  ENSG00000231274_7 (sequence is synthesized)
tgggggacgactgggggttgcaagggaacagagagggacctggggttttggggagcgccgtgtcctatgaggacagggaggagggaggctcaagcctggaggagtggacagatgagggtg

SEQ ID NO: 768862 - DNA, 120 bp, Artificial Sequence
  ENSG00000231274_8 (sequence is synthesized)
atgacagcaaaagtggtgggaggacggggacagatgggggagctccctgaccaggtgacagagacaggtggccagagcctgggccagaggcccttcccccagcccccagggccacctgga

SEQ ID NO: 768863 - DNA, 120 bp, Artificial Sequence
  ENSG00000231274_9 (sequence is synthesized)
tggagagacagctgcacccgggaggacagagagggaacacattgcactctccctacggaacgctgggcttggacgcgcattcctcttccaactgaggacccaagagcccagctcctgccc

SEQ ID NO: 768864 - DNA, 120 bp, Artificial Sequence
  ENSG00000231274_10 (sequence is synthesized)
acccctgaggatggggacccagaggtgagagacgggagccaggggaggaagacagagagagaaaagaaggagagagaggcaggaggcaacacggggagagagaggaagagaaacagaaaa

SEQ ID NO: 768865 - DNA, 120 bp, Artificial Sequence
  ENSG00000231274_11 (sequence is synthesized)
cagggaaacgcaaagacctcagagacccagacccagggagagaggatgacagagatccaaggacacacagcgagaccaaggcccccagagaattggactcagaaacacacagcgggatgc

SEQ ID NO: 768866 - DNA, 120 bp, Artificial Sequence
  ENSG00000231292_0 (sequence is synthesized)
ccgctcagctcctggggctcctgctgctctggctccgaggtgccagatgtgacatccaggtgacccagtctccatcttccctgtctgcgtctgtaggagacagagtcaccatcacctgcc

SEQ ID NO: 768867 - DNA, 62 bp, Artificial Sequence
  ENSG00000231292_1 (sequence is synthesized)
cccctacgctcctgatctatgctgcatccagtttgcagtcgggggtcccatctcggttcagg

SEQ ID NO: 768868 - DNA, 120 bp, Artificial Sequence
  ENSG00000231389_0 (sequence is synthesized)
acgcgtagcattcctgccgtccctggaaaagtgctagaggcccacagtttcagtctcatctgcctccactcggcctcagttcctcatcactgttcctgtgctcacagtcatcaattatag

SEQ ID NO: 768869 - DNA, 120 bp, Artificial Sequence
  ENSG00000231389_1 (sequence is synthesized)
accccacaacatgcgccctgaagacagaatgttccatatcagagctgtgatcttgagagccctctccttggctttcctgctgagtctccgaggagctggggccatcaaggcggaccatgt

SEQ ID NO: 768870 - DNA, 120 bp, Artificial Sequence
  ENSG00000231389_2 (sequence is synthesized)
gtcaacttatgccgcgtttgtacagacgcatagaccaacaggggagtttatgtttgaatttgatgaagatgagatgttctatgtggatctggacaagaaggagaccgtctggcatctgga

SEQ ID NO: 768871 - DNA, 120 bp, Artificial Sequence
  ENSG00000231389_3 (sequence is synthesized)
ggagtttggccaagccttttcctttgaggctcagggcgggctggctaacattgctatattgaacaacaacttgaataccttgatccagcgttccaaccacactcaggccaccaacgatcc

SEQ ID NO: 768872 - DNA, 120 bp, Artificial Sequence
  ENSG00000231389_4 (sequence is synthesized)
ccctgaggtgaccgtgtttcccaaggagcctgtggagctgggccagcccaacaccctcatctgccacattgacaagttcttcccaccagtgctcaacgtcacgtggctgtgcaacgggga

SEQ ID NO: 768873 - DNA, 120 bp, Artificial Sequence
  ENSG00000231389_5 (sequence is synthesized)
gctggtcactgagggtgtcgctgagagcctcttcctgcccagaacagattacagcttccacaagttccattacctgacctttgtgccctcagcagaggacttctatgactgcagggtgga

SEQ ID NO: 768874 - DNA, 120 bp, Artificial Sequence
  ENSG00000231389_6 (sequence is synthesized)
gcactggggcttggaccagccgctcctcaagcactgggaggcccaagagccaatccagatgcctgagacaacggagactgtgctctgtgccctgggcctggtgctgggcctagtcggcat

SEQ ID NO: 768875 - DNA, 120 bp, Artificial Sequence
  ENSG00000231389_7 (sequence is synthesized)
aaagtctctgcgttctggccatgacccccgggcccaggggaccctgtgaaatactgtaaaggtgacaaaatatctgaacagaagaggacttaggagagatctgaactccagctgccctac

SEQ ID NO: 768876 - DNA, 120 bp, Artificial Sequence
  ENSG00000231389_8 (sequence is synthesized)
aaactccatctcagcttttcttctcacttcatgtgaaaactactccagtggctgactgaattgctgacccttcaagctctgtccttatccattacctcaaagcagtcattccttagtaaa

SEQ ID NO: 768877 - DNA, 120 bp, Artificial Sequence
  ENSG00000231389_9 (sequence is synthesized)
gtttccaacaaatagaaattaatgacactttggtagcactaatatggagattatcctttcattgagccttttatcctctgttctcctttgaagaacccctcactgtcaccttcccgagaa

SEQ ID NO: 768878 - DNA, 120 bp, Artificial Sequence
  ENSG00000231389_10 (sequence is synthesized)
taccctaagaccaataaatacttcagtatttcagagcggggagactctgagtcattcttactggaagtctaggaccaggtcacatgtgaatactatttcttgaaggtgtggtttcaacct

SEQ ID NO: 768879 - DNA, 120 bp, Artificial Sequence
  ENSG00000231389_11 (sequence is synthesized)
ctgttgccgatgtggttactaaaggttctgatcccacttgaacggaaaggtctgaggatattgattcagtcctgggtttttccctaactacaggatagggtggggtagagaaaggatatt

SEQ ID NO: 768880 - DNA, 120 bp, Artificial Sequence
  ENSG00000231389_12 (sequence is synthesized)
tgggggaaattttacttggatgaagattttcttggatgtagtttgaagactgcagtgtttgaagtctctgagggaagagatttggtctgtctggatcaagatttcaggcagattaggatt

SEQ ID NO: 768881 - DNA, 120 bp, Artificial Sequence
  ENSG00000231389_13 (sequence is synthesized)
ccattcacagcccctgagcttccttcccaaggctgtattgtaattatagcaatatttcatggaggatttttctacatgataaactaagagccaagaaataaaatttttaaaatgccctaa

SEQ ID NO: 768882 - DNA, 120 bp, Artificial Sequence
  ENSG00000231389_14 (sequence is synthesized)
ccccctgctgtgtgatcctcttcccctagtggccatgggctgatcccactacagcaagggcttgcatcctctcttctcaggagagagaaaggtgagcagagtgaggctggtcagtggtgt

SEQ ID NO: 768883 - DNA, 120 bp, Artificial Sequence
  ENSG00000231389_15 (sequence is synthesized)
gatacccctctctgtgattcagagctgccataaaatctaaggctgaggtagaggaccaccctcccctaagaggtggagcctttgtgattcatcccagaagaggggcctaacctggtgctg

SEQ ID NO: 768884 - DNA, 120 bp, Artificial Sequence
  ENSG00000231389_16 (sequence is synthesized)
accagctttccgcactggctgggtctcagtcctctcctcgtcctaacatccaattaactggtccataaccttcaattcccacaaccatcccaggccatcaccaccctcactgcacctcct

SEQ ID NO: 768885 - DNA, 120 bp, Artificial Sequence
  ENSG00000231389_17 (sequence is synthesized)
gggaggaaaaattcaatctgataagtgttcattgatcttctaatgggttaaaagcattcagccacataacaacaacaacaccgataactaactgagtagttaatatggtcaggcgctatt

SEQ ID NO: 768886 - DNA, 120 bp, Artificial Sequence
  ENSG00000231389_18 (sequence is synthesized)
ctgaggatttacatttattaactcactttattctcacacatagtctttgaggtaggtactattattttcactatttcacatgagagatacttacatctttttacatacacagagacttta

SEQ ID NO: 768887 - DNA, 120 bp, Artificial Sequence
  ENSG00000231389_19 (sequence is synthesized)
agcactttgatcaagttcccacagctatgaagtagtagggctagcttccaatccagaaagtctggatccaagactgtttatccactgtcctattcaccctattttgtgaaggaaaagacc

SEQ ID NO: 768888 - DNA, 120 bp, Artificial Sequence
  ENSG00000231389_20 (sequence is synthesized)
aagttcaaattctccagagtccattgccaaataatggagtcagatctatatttctatacataattacaacacagtgtggtgggtgcctgtaactacttactgtctctacttggactcatt

SEQ ID NO: 768889 - DNA, 120 bp, Artificial Sequence
  ENSG00000231389_21 (sequence is synthesized)
ccatggcaatgttcacacaaaaaatgcccctccagagatcttacaggtttctatttatcataacactcaccatgctttatatttttatatgttttgggaattctcttagcattagacagt

SEQ ID NO: 768890 - DNA, 120 bp, Artificial Sequence
  ENSG00000231389_22 (sequence is synthesized)
gaacttccatgcagatgaccacatctaattcattattattattgttattcatgctggacctcaggtacaaaaggttaagaacttctcagttcattatatgatcatcattggtgcctccga

SEQ ID NO: 768891 - DNA, 120 bp, Artificial Sequence
  ENSG00000231389_23 (sequence is synthesized)
gctctctctctctcccttgatttatttggtcccttttatctccagtccttactcccatatctaacctcttacccctacctcataggtaaacattttaatgaatttgatgtttccttttat

SEQ ID NO: 768892 - DNA, 120 bp, Artificial Sequence
  ENSG00000231389_24 (sequence is synthesized)
ttgcatagatcctctgtaatatgtagtagtgtccagtgtacatgtatttttaattaaccaaaatggcattaaattatagatctaattttgtacatccagtttgtttcttccaaatcttcc

SEQ ID NO: 768893 - DNA, 120 bp, Artificial Sequence
  ENSG00000231389_25 (sequence is synthesized)
agatctgcaggctgtacgcgaaacatggcactagcatctgcttctgttgggggattctggaagcttttactcatggtggaaggcaagtggagccagtgcatcacatggtcatagagggag

SEQ ID NO: 768894 - DNA, 120 bp, Artificial Sequence
  ENSG00000231389_26 (sequence is synthesized)
aaagagacatagaaagaggtgccagcctctttttaacaaccaggtttcatgtgcactaatagagtgagaactcactcattacccggagaggggacaaagccattcatgagggtctcctcc

SEQ ID NO: 768895 - DNA, 120 bp, Artificial Sequence
  ENSG00000231389_27 (sequence is synthesized)
atgattcaaatacctcccaccaggccccacctgcaacactggggatcaattttcaacatgagacttggaagtgacaaatatccaaatcatattaatccacatatctacattgctcctggg

SEQ ID NO: 768896 - DNA, 120 bp, Artificial Sequence
  ENSG00000231389_28 (sequence is synthesized)
atacctggatcattcctggttctctactattgcaagcaatgcttgtatctcacatggaactgcatatacatgtgggcctgacctgcatccctggaatgtatgtatcctagaaaggggttg

SEQ ID NO: 768897 - DNA, 120 bp, Artificial Sequence
  ENSG00000231389_29 (sequence is synthesized)
cagggttgctggagatgcagctccttaatttgactaaacactgctcatcttctcatcagaatggctgtactcatctgaacttcctttgtcagtactctaattgtcctgcaactcctaaat

SEQ ID NO: 768898 - DNA, 120 bp, Artificial Sequence
  ENSG00000231389_30 (sequence is synthesized)
ggacttcaacactggacattatccagttttctaacttttgccaatttcatgtgcataaagaaatatgctgttttattttgcatttctttaattactaataattggggctataattaggac

SEQ ID NO: 768899 - DNA, 120 bp, Artificial Sequence
  ENSG00000231389_31 (sequence is synthesized)
tgattagccacttgggggttccttttctataaattgcctgttcacattcattgtccatttttgtactatgtgcttccatcattttcttattgatttgcaggtgatccttatatagtcctg

SEQ ID NO: 768900 - DNA, 120 bp, Artificial Sequence
  ENSG00000231389_32 (sequence is synthesized)
ctagtagtcccttgtcagttttaggcattgcaaatgttttcctctaatctgacttctggcaactgtctccttggtttcctttattgaagagaaatccttaatattttgtaatgaagtcca

SEQ ID NO: 768901 - DNA, 120 bp, Artificial Sequence
  ENSG00000231389_33 (sequence is synthesized)
tcaactgtatttttgtttgtgtgtcttttttaaaagaagtcttccctatactgagatatcaaagatactcttaaaacatctcctacagttttaaatttcacatttactactttaattcat

SEQ ID NO: 768902 - DNA, 120 bp, Artificial Sequence
  ENSG00000231389_34 (sequence is synthesized)
ctgggattcatctttgtgtttgatggggatcatgttttatttttctttatataatgggccagtgtgttcccacaactactaaatagttcaccttttccccataggttagtagtgtctcct

SEQ ID NO: 768903 - DNA, 120 bp, Artificial Sequence
  ENSG00000231389_35 (sequence is synthesized)
ttgctatactgaaagctcccattataggtgggcctgtgtctgagttccatcttgttccactgttctgtttgtctcttcttgtgccagtgtcctagtattttgattactatgacattgtag

SEQ ID NO: 768904 - DNA, 120 bp, Artificial Sequence
  ENSG00000231389_36 (sequence is synthesized)
tgtgtgttagtatccagtaggacaaattcttgtttatttttcttagttcacacacatttataattatatctataatgatttgtaacagagtgaagtgaatgtagaatgtcagatgttaag

SEQ ID NO: 768905 - DNA, 120 bp, Artificial Sequence
  ENSG00000231389_37 (sequence is synthesized)
aggaagaatggaaaagagggctgggactagggtgatgtaggggatgcacctggcttaggtgcaaaatttgggggataccaaaagaactcagtaataaatcatattttaatgaaatatctt

SEQ ID NO: 768906 - DNA, 120 bp, Artificial Sequence
  ENSG00000231389_38 (sequence is synthesized)
gaaaaggcaaaattaatgcaaagatacatgattaacaaaacatccaaagaggagtatttaacaaaaatggagaagcagagaagcagaagaattaggagaatatgctgtcacatgagccaa

SEQ ID NO: 768907 - DNA, 120 bp, Artificial Sequence
  ENSG00000231389_39 (sequence is synthesized)
ggaattaaagaattcaggaaggaggaagtactgctgtcagatgttcaacagaggtcattttagaaaatttaccttggtttttgaaatcctttcaaagagcagtatacacaatgtgagcaa

SEQ ID NO: 768908 - DNA, 120 bp, Artificial Sequence
  ENSG00000231389_40 (sequence is synthesized)
gtatccttcgttcattgccgtcattgatatggtttggatatttgtcccttccaattctcattccagggttaagcttcttctctgccctcagtaatgtggcccttccccttgtctgtatat

SEQ ID NO: 768909 - DNA, 120 bp, Artificial Sequence
  ENSG00000231389_41 (sequence is synthesized)
tttggagacatgaagcatgtgggatggcctcacagtcagctggggtttgagggtgaaattcaatgactttcgtgaactccttggctcctatgtgctcttcacctggaggaccagggcatg

SEQ ID NO: 768910 - DNA, 120 bp, Artificial Sequence
  ENSG00000231389_42 (sequence is synthesized)
tgcagggatgaccaccttctccctgggacctgaacagggcagagaaatgggaagctcgggtgcaaagggagtggggaagatgggtccgggcttacagtactgaacccaggaatgacaata

SEQ ID NO: 768911 - DNA, 120 bp, Artificial Sequence
  ENSG00000231389_43 (sequence is synthesized)
gtcgaagcgcgcgaactcctcccggttgtagatgtatctctccaggaagcgctgtgtcccattaaacgcgtagcattcctgccgtccctggaaaaggtgaatcccagccatgctgattcc

SEQ ID NO: 768912 - DNA, 120 bp, Artificial Sequence
  ENSG00000231389_44 (sequence is synthesized)
gcgcgaactcctcccggttgtagatgtatctctccaggaagcgctgtgtcccattaaacgcgtagcattcctgccgtccctggaaaagcaccttccagcgtcctctttacccagcaacag

SEQ ID NO: 768913 - DNA, 73 bp, Artificial Sequence
  ENSG00000231396_0 (sequence is synthesized)
tgcagtgcctgacatacaaaccgccacttgccaactacatgctgttccgggagcactctcaaacgtgtcatcg

SEQ ID NO: 768914 - DNA, 61 bp, Artificial Sequence
  ENSG00000231396_1 (sequence is synthesized)
tgattcatcaatcaaaatacaagtgtcccgacagatcaggagtccatgaacactggcacac

SEQ ID NO: 768915 - DNA, 120 bp, Artificial Sequence
  ENSG00000231475_0 (sequence is synthesized)
atttccttaaattcagggtccagctcacatgggaaatactttctgagagtcctggacctcctgtgcaagaacatgaaacacctgtggttcttcctcctgctggtggcagctcccagatgg

SEQ ID NO: 768916 - DNA, 120 bp, Artificial Sequence
  ENSG00000231475_1 (sequence is synthesized)
cacctgcgctgtctctggtggctccatcagcagtggtggttactcctggagctggatccggcagccaccagggaagggcctggagtggattgggtacatctatcatagtgggagcaccta

SEQ ID NO: 768917 - DNA, 120 bp, Artificial Sequence
  ENSG00000231475_2 (sequence is synthesized)
ctacaacccgtccctcaagagtcgagtcaccatatcagtagacaggtccaagaaccagttctccctgaagctgagctctgtgaccgccgcggacacggccgtgtattactgtgccagaga

SEQ ID NO: 768918 - DNA, 120 bp, Artificial Sequence
  ENSG00000231500_0 (sequence is synthesized)
ctctcttccacaggaggcctacacgccgccgcttgtgctgcagccatgtctctagtgatccctgaaaagttccagcatattttgcgagtactcaacaccaacatcgatgggcggcggaaa

SEQ ID NO: 768919 - DNA, 120 bp, Artificial Sequence
  ENSG00000231500_1 (sequence is synthesized)
atagcctttgccatcactgccattaagggtgtgggccgaagatatgctcatgtggtgttgaggaaagcagacattgacctcaccaagagggcgggagaactcactgaggatgaggtggaa

SEQ ID NO: 768920 - DNA, 120 bp, Artificial Sequence
  ENSG00000231500_2 (sequence is synthesized)
gatgtaaaggatggaaaatacagccaggtcctagccaatggtctggacaacaagctccgtgaagacctggagcgactgaagaagattcgggcccatagagggctgcgtcacttctggggc

SEQ ID NO: 768921 - DNA, 120 bp, Artificial Sequence
  ENSG00000231500_3 (sequence is synthesized)
cttcgtgtccgaggccagcacaccaagaccactggccgccgtggccgcaccgtgggtgtgtccaagaagaaataagtctgtaggccttgtctgttaataaatagtttatatacctatggc

SEQ ID NO: 768922 - DNA, 120 bp, Artificial Sequence
  ENSG00000231500_4 (sequence is synthesized)
gaactcactgaggatgaggtgaggacaaggaagggggctgggggtggggtcagcctcagaaaggggtccatctagatctgaccttggtctgcctgccaggtggaacgtgtgatcaccatt

SEQ ID NO: 768923 - DNA, 120 bp, Artificial Sequence
  ENSG00000231500_5 (sequence is synthesized)
ttacttttttctttttttgagacggggtctcactgtcgcccaggttagagtgtggttgcgtgatcttggcttgctgcaacctccacctcctaggttcaagctattctgctgcagcctccc

SEQ ID NO: 768924 - DNA, 120 bp, Artificial Sequence
  ENSG00000231500_6 (sequence is synthesized)
acaggcgtgagccactgcgaccggcccaaagttaaccttctgtcgaacggtttatatctggaaaggtgggtgaggaaagggtgacctaggggattgcaaaatagattattgcagatccta

SEQ ID NO: 768925 - DNA, 120 bp, Artificial Sequence
  ENSG00000231500_7 (sequence is synthesized)
ggggattgcaaaatagattattgcagatcctacctttgtgagctttttgaatgaggctataaaggaatttaaaaatcagattcaacactaattccgaaacccctcacttcattcagggtg

SEQ ID NO: 768926 - DNA, 120 bp, Artificial Sequence
  ENSG00000231500_8 (sequence is synthesized)
agacagaaggatgtaaaggatggaaaatacagccaggtgtgtactgaaatgagggcaggattagaggaagggtggagggtcctaacagaattgggcataggaggtcaggggataaaacat

SEQ ID NO: 768927 - DNA, 120 bp, Artificial Sequence
  ENSG00000231500_9 (sequence is synthesized)
agtggggggtctcatctccctgcctacctcgactcagcattcctcctactcgctcttctttttccccaaccttttgtttctgctgtgcatgacctgtgactcttctctttttacctgcag

SEQ ID NO: 768928 - DNA, 120 bp, Artificial Sequence
  ENSG00000231500_10 (sequence is synthesized)
ctctcttccacaggaggcctacacgccgccgcttgtgctgcagccatgtttactgtgtctgatttcttcccccgtactttttcaactagtctctagtgatccctgaaaagttccagcata

SEQ ID NO: 768929 - DNA, 120 bp, Artificial Sequence
  ENSG00000231500_11 (sequence is synthesized)
gaatccgtgccgtgatccagcggcatcgcagctcgggcaaggaaagccggctgtcagggttctggaaacgtcctgccctgagggcctgcgactttctgtatggagccttggatcgcgtcc

SEQ ID NO: 768930 - DNA, 120 bp, Artificial Sequence
  ENSG00000231500_12 (sequence is synthesized)
ctggaaagggacaccaaagatttccaattccggagagcgggcccgaggaagggtcactgctcgggcgcacgaaagctgtctaaggcttgggcgtatatggggaactctggcttttgccac

SEQ ID NO: 768931 - DNA, 120 bp, Artificial Sequence
  ENSG00000231500_13 (sequence is synthesized)
gcacttttgggaatgggcaggagacctgcttcctctctccagaggttgcattttcccaagcttgaacgcttcatgtgcctactctgcaggactgaggagtttgctctgtggtgtgaaaac

SEQ ID NO: 768932 - DNA, 120 bp, Artificial Sequence
  ENSG00000231500_14 (sequence is synthesized)
ctaaggaatggggggcgggtgtcttgccacttgtgtgacaggcttaacctttttgtatgaagttcgtttgccttatcggccttactgtttgatagtttactgtgtctgatttcttccccc

SEQ ID NO: 768933 - DNA, 120 bp, Artificial Sequence
  ENSG00000231738_0 (sequence is synthesized)
aaacaatctcgattctaaattgaaacgaacgcagcatttcagggactggatgaggagcttacggttttttacagaatcatcaatatcttggaagaaaaagaatgttaagaaataacaaaa

SEQ ID NO: 768934 - DNA, 120 bp, Artificial Sequence
  ENSG00000231738_1 (sequence is synthesized)
caataattattaagtactttcttaatctcattaatggagctttcttggttcttggacttttattcatgggatttggtgcatggctcttattagatagaaataattttttaacagcttttg

SEQ ID NO: 768935 - DNA, 120 bp, Artificial Sequence
  ENSG00000231738_2 (sequence is synthesized)
atgaaaataatcacttcatagtacctatttctcaaattttgattggaatgggatcttctactgttcttttttgtctattgggttatataggaattcacaacgaaatcagatggctcctaa

SEQ ID NO: 768936 - DNA, 120 bp, Artificial Sequence
  ENSG00000231738_3 (sequence is synthesized)
ttgtgtatgcagtattgataacatggacctttgctgttcaggttgtactttcagcattcatcatcacaaagaaagaggaggttcagcaactatggcatgacaaaattgattttgtcattt

SEQ ID NO: 768937 - DNA, 120 bp, Artificial Sequence
  ENSG00000231738_4 (sequence is synthesized)
cttacagaaaacattacagtgttgtggccaacataattacacagactggataaagaataagaacaaagaaaattcaggacaggtgccatgttcttgcacaaagtcaactttaagaaaatg

SEQ ID NO: 768938 - DNA, 120 bp, Artificial Sequence
  ENSG00000231738_5 (sequence is synthesized)
gttttgtgatgagccactgaatgcaacttaccttgagggttgtgaaaataaaatcagtgcatggtataatgttaatgtgttaaccttaatcggaattaactttggacttttaacttcaga

SEQ ID NO: 768939 - DNA, 120 bp, Artificial Sequence
  ENSG00000231738_6 (sequence is synthesized)
ggttttccaagtctcattaacagtttgtttcttcaaaaacatcaagaatataatccatgcagaaatgtgacctttggatttcaatttgttcagaagaaaccagttaattcttaaaaaatc

SEQ ID NO: 768940 - DNA, 120 bp, Artificial Sequence
  ENSG00000231738_7 (sequence is synthesized)
tgccttacagaaaacatgttgtggccaacataattacacagactggataaagaataagaacaaagaaaattcaggacaggtgccatgttcttgcacaaagtcaactttaagaaaatggtt

SEQ ID NO: 768941 - DNA, 63 bp, Artificial Sequence
  ENSG00000231738_8 (sequence is synthesized)
attccgaagtagctggaattacagtatgcagtattgataacatggacctttgctgttcaggtt

SEQ ID NO: 768942 - DNA, 120 bp, Artificial Sequence
  ENSG00000231738_9 (sequence is synthesized)
tttatagtattttgtttgtttattttgcaagtcaatttagaattctgagcaaatttttatataaaaataatgttgttgacggtggctacattcttaatccacttccctaagttgaacacg

SEQ ID NO: 768943 - DNA, 120 bp, Artificial Sequence
  ENSG00000231738_10 (sequence is synthesized)
taattaggtaaattgtagtgtcatttccagtgtataatacgtaaagtaaataaatttcctgggagtatatgatttatgtattcttggaacttgggatatcatcagtctttctccccagcc

SEQ ID NO: 768944 - DNA, 120 bp, Artificial Sequence
  ENSG00000231738_11 (sequence is synthesized)
ttccttgagaagtcctgcagaaagaggaggcacttctgtcaaagccttggtgcataagattggaaagggagctaaaacaccaggagtaaaagaataggcaaaaactaaagggagtggacc

SEQ ID NO: 768945 - DNA, 120 bp, Artificial Sequence
  ENSG00000231738_12 (sequence is synthesized)
ccagcaatgatgaatgtggtgttcaagtaagtgtagcagaagcaagagtaaagggttgtctggagcaactgcgatttacaggtgtgggatactgataactagattttttcatcctaagaa

SEQ ID NO: 768946 - DNA, 120 bp, Artificial Sequence
  ENSG00000231738_13 (sequence is synthesized)
ctgcgaatactttgtatagtttacatattaagcttattctaatcttaagatgtattgtttcaattgcataattaattcataaataaatggaacattactttttttttttaaaaaaaagca

SEQ ID NO: 768947 - DNA, 120 bp, Artificial Sequence
  ENSG00000231738_14 (sequence is synthesized)
tctactctttgggaaataaccattttatgtggtgatatatacagtagttgcccctatctgcagtttcacattgtgagagttcaaccattgaaaatattaagtggaaaattccagaaataa

SEQ ID NO: 768948 - DNA, 120 bp, Artificial Sequence
  ENSG00000231738_15 (sequence is synthesized)
acaattcataagttttcaattgcacactgttctgggtagtatgatgaaatcttgtgtcttcctgccctgttccctcctgggacatgagtcatccctttgtccagtgtattcatgatgcag

SEQ ID NO: 768949 - DNA, 120 bp, Artificial Sequence
  ENSG00000231738_16 (sequence is synthesized)
atgctacccacccttagtcacttagtagtcatcttcattgtaagatcgactgttgaggtatcacagtgcctgtgttcaagaacccttaatttacttaatgatgaccccaaagtgtaagaa

SEQ ID NO: 768950 - DNA, 120 bp, Artificial Sequence
  ENSG00000231738_17 (sequence is synthesized)
attagttattgttttaatctcttgttgtgcctaatttataaattaaactctattatatatatgtttctataggaagacatgtaatatatttagggtttgatactgtctgtgttttcaggc

SEQ ID NO: 768951 - DNA, 120 bp, Artificial Sequence
  ENSG00000231738_18 (sequence is synthesized)
agaagagaaaatctctttctaaagtgtaacaaatttctgattttaattacatgataacatcttagcaattttaaaattagcaactgaggtgtcctgctgccgtagaaagctttctggact

SEQ ID NO: 768952 - DNA, 120 bp, Artificial Sequence
  ENSG00000231738_19 (sequence is synthesized)
aaaagtccagttcgccaattagatattgacttactatttagactttggtaaattactaatctctgtttaccttttattttttgtaaagatttatgtataagatcatttccatctccatgt

SEQ ID NO: 768953 - DNA, 120 bp, Artificial Sequence
  ENSG00000231738_20 (sequence is synthesized)
gttcatatgttaaaatgaaaaatattaagtataagctatacagaatagactgcagagcaatcaggtggagacctaatcagataagttcatataatagagccaggactttgaggctcttta

SEQ ID NO: 768954 - DNA, 120 bp, Artificial Sequence
  ENSG00000231738_21 (sequence is synthesized)
catccaagagttgtacaggtgattccttaatcagccaggtcaggggagcctattaataagtggtcatcctggaggtagtgattttattactatgtatagtacctatgtatatttttatct

SEQ ID NO: 768955 - DNA, 63 bp, Artificial Sequence
  ENSG00000231738_22 (sequence is synthesized)
agatatcatatattggcagtaagagcaccatgttgggcagtctgcaagttgccagacttctga

SEQ ID NO: 768956 - DNA, 120 bp, Artificial Sequence
  ENSG00000231738_23 (sequence is synthesized)
agcaccatgttgggcagtctgcaagttgccagacttctgaaatctaggcagatgtttgactttagtaagatccactattcactcatatgttcattcattcaatgtatttggagggacggg

SEQ ID NO: 768957 - DNA, 120 bp, Artificial Sequence
  ENSG00000231738_24 (sequence is synthesized)
gagcatttactgtgtgtcatgtactgtactagatgttgaatatacaatgagatgcaaaatagacacattccatgacctaaaggtgtcaactgcagaattaagtttcagaagcaagacgct

SEQ ID NO: 768958 - DNA, 120 bp, Artificial Sequence
  ENSG00000231738_25 (sequence is synthesized)
attcttcagtctcagtgaagactattaagaataagtgcaggctatggattcaaagaaactttgagagtaaatagagtgttatagtggggactatgccactaaaacaaatacatactgcat

SEQ ID NO: 768959 - DNA, 120 bp, Artificial Sequence
  ENSG00000231738_26 (sequence is synthesized)
ttgactttgtatagatccatgaagcccctgacctaagttttcatctcttcaattggtaacaattttagtctcagaatggtagtaaaccaagacattctttatacacattaatatcattgt

SEQ ID NO: 768960 - DNA, 120 bp, Artificial Sequence
  ENSG00000231738_27 (sequence is synthesized)
ttttaaatgtttattctctactgtgttcatgctggaatatcttaagacaaaactgcagaggtaatatccatgttccattttatcttctgccctttacaagccacctttcattatctataa

SEQ ID NO: 768961 - DNA, 120 bp, Artificial Sequence
  ENSG00000231738_28 (sequence is synthesized)
aaaaaagaagcagttttgtacatttaatgacatagttagaaagatatcgaacaacaacaacaagaaaaccatcagcagtttgtccaggcatgtagctcagtgatagctaatgtaattaaa

SEQ ID NO: 768962 - DNA, 120 bp, Artificial Sequence
  ENSG00000231738_29 (sequence is synthesized)
acctaaaggtttttccttattctcctctgtacgtgaacttggtaacaggtgggttattcttgaagactcattttgcagacttcctattcacaactgtatgtaccttattctgaaattttc

SEQ ID NO: 768963 - DNA, 120 bp, Artificial Sequence
  ENSG00000231738_30 (sequence is synthesized)
tcaccagttttgatcccttttccctttacaatacgcattttggtgactatatattgttaactttgcaaattactcttatcattgattaaattttaatctcttattgttcccttttcttcc

SEQ ID NO: 768964 - DNA, 71 bp, Artificial Sequence
  ENSG00000231738_31 (sequence is synthesized)
ttttactattgctcactgtagcctccaactcttgtactcaagtaatcctcccgccttggcctcccaaagca

SEQ ID NO: 768965 - DNA, 120 bp, Artificial Sequence
  ENSG00000231767_0 (sequence is synthesized)
aaagtttattcagcttttcgatccgccatctgcagtggagccgccaccaaaatgcagattttcgtgaaaacccttatggggaagaccatcaccctcgaggttgaactctcggatacaata

SEQ ID NO: 768966 - DNA, 120 bp, Artificial Sequence
  ENSG00000231767_1 (sequence is synthesized)
gataatgtaaaggccaagatccaggataaggaaggaattcctcctgatcagcagagactgatctttgctggcaagcagttggaagatggacgtactttgtctgactacaatattcaaaag

SEQ ID NO: 768967 - DNA, 120 bp, Artificial Sequence
  ENSG00000231767_2 (sequence is synthesized)
aagaaaaggaagaagaagtcttacaccactcccaggaagaataagcacaagagaaagaaggttaagctggctctcctgaaatattataaggtggatgagaatggcaaaattagttgcctt

SEQ ID NO: 768968 - DNA, 120 bp, Artificial Sequence
  ENSG00000231767_3 (sequence is synthesized)
catcgagagtgcccttctgatgaatgtggtgctggggtgtttatggcaagccactttgacagacattattgtggcaaatgttgtctgacttactgtttcaacaaaccagaagacaagtaa

SEQ ID NO: 768969 - DNA, 120 bp, Artificial Sequence
  ENSG00000231824_0 (sequence is synthesized)
ctggagctgcggccccaggatctagcggcgggagctgtccggggtgctgaccgccccgcccgccgcccgcccagcgcgccctcctgcaccggaccccgccaagtccggccttcttcccat

SEQ ID NO: 768970 - DNA, 120 bp, Artificial Sequence
  ENSG00000231824_1 (sequence is synthesized)
accccgccaagtccggccttcttcccatcctccgtctgcctgtctttctctcttaatctgggggcgtagcggctggaagaaatcatggtgttcgctccaggtgagaaacctggaaatgag

SEQ ID NO: 768971 - DNA, 120 bp, Artificial Sequence
  ENSG00000231824_2 (sequence is synthesized)
cctgaagaggtgaagctgcagaatgccagcaaacagattgtgcagaatgcaatcctgcaagctgtgcagcaagtctcccaggagagtcagcgcagagaagagagaatcagtgacaaccgg

SEQ ID NO: 768972 - DNA, 120 bp, Artificial Sequence
  ENSG00000231824_3 (sequence is synthesized)
gaccacatccaactgggcgttggggagttaaccaagaagcacgaaaagaagtaacatggtggatttggctcttgacatgtgcttggtttctagccttcctcttagtataggacgcatctc

SEQ ID NO: 768973 - DNA, 120 bp, Artificial Sequence
  ENSG00000231824_4 (sequence is synthesized)
caaaatgttgccagtaaagcaaaccgaagtgtcaccggcacctagctgtagaatgaattcacactagcccctggctgagaagcactgttttgaaaaagtgcattagacgattctgttcat

SEQ ID NO: 768974 - DNA, 120 bp, Artificial Sequence
  ENSG00000231824_5 (sequence is synthesized)
atttatgcagtgcctctgagacatagtggggccaaatatgacactgtaattgcaaaagtagttttgcaggccaatttatttttaaagttcttttatttgaaaaaaagaattctatgtctc

SEQ ID NO: 768975 - DNA, 120 bp, Artificial Sequence
  ENSG00000231824_6 (sequence is synthesized)
gtttatttacttctgccttttatgcgttccttctgtgaatttaacaagcagcctttttgctgaaatactgaatacagtactgagttctttatggtatattaaaaagacatgctagaaagg

SEQ ID NO: 768976 - DNA, 120 bp, Artificial Sequence
  ENSG00000231824_7 (sequence is synthesized)
tgagggaatgcagttttagttaccttcaaatgtgaaattgaaggctttaagtgggttcaggtctaagatcaaattaagaaaagggaaattctaaggctgagtccctcgggaccataccaa

SEQ ID NO: 768977 - DNA, 120 bp, Artificial Sequence
  ENSG00000231824_8 (sequence is synthesized)
ggcatttactaatatttatgttattttaagaaagggaggagtttaagtttctcaagaactcagtcttttagtctcaattctctgaatgatttcataattggtgtttatgctctgtgtaga

SEQ ID NO: 768978 - DNA, 120 bp, Artificial Sequence
  ENSG00000231824_9 (sequence is synthesized)
aatcttttgggaatattatggatttcttttctcaagattaaataaaataagacaagtgagtctacacatgtgagttgccaatgactcatttccttagcagcctcatggagaatggctaga

SEQ ID NO: 768979 - DNA, 120 bp, Artificial Sequence
  ENSG00000231824_10 (sequence is synthesized)
agtgtagatttcttcaacagctgcctatcattaagagacttacacttggggctgattatggggtgcaacatccttggaagggattctggggtccttaacgaatgctgttttgccactagg

SEQ ID NO: 768980 - DNA, 120 bp, Artificial Sequence
  ENSG00000231824_11 (sequence is synthesized)
ctatgcatttgcattaggaccttactaacttttcccattcacacattaaattttttttttgagattatgaaaatcatacaggtcaggaatacatgagaacacaatggggacagtaaagtg

SEQ ID NO: 768981 - DNA, 120 bp, Artificial Sequence
  ENSG00000231824_12 (sequence is synthesized)
caacaggatcaatccctgctccacttctgtgaggataatgcacatatttctggagtatctacagtcccatttcctgggcttcacaaaagttattgaattggtgctattggggacagagga

SEQ ID NO: 768982 - DNA, 120 bp, Artificial Sequence
  ENSG00000231824_13 (sequence is synthesized)
agaatttgaccttggttaaaaaccttctagtttcagagtatcaatatctacatttgatttttttttaaagcaaagtattcgggtataaattgtgactgatattaagatatacttctaaaa

SEQ ID NO: 768983 - DNA, 120 bp, Artificial Sequence
  ENSG00000231824_14 (sequence is synthesized)
ttccaatatgctacagtttctagaataaatagttggataatagataatgaatgaaaaatatcttaccagctttgttatgctatctcccacagtgcacaggtggaataaattcacaggaaa

SEQ ID NO: 768984 - DNA, 120 bp, Artificial Sequence
  ENSG00000231824_15 (sequence is synthesized)
catggaaggagaaggaagcagaagggcttaaaatttaaagattgtttactcacaagtatttcttttagcagaattcatgccaagtgaagagtgagtttaagtcgaccaaaagtcatataa

SEQ ID NO: 768985 - DNA, 120 bp, Artificial Sequence
  ENSG00000231824_16 (sequence is synthesized)
ctgatgtgatataattgcatagcatacatagtgagaatgaaggtattcagggaaattattcaggagtgccacaaataaaataaataaataaatctaatgcttgtagtttgtaagtgatct

SEQ ID NO: 768986 - DNA, 120 bp, Artificial Sequence
  ENSG00000231824_17 (sequence is synthesized)
ggtactatgtctactcagatatctggatatgaccagcctttgtttttgctgtcaagtgacagaaacatataaacatactatttttcctctctgatgtgtctgtactaaaaaattgggaat

SEQ ID NO: 768987 - DNA, 120 bp, Artificial Sequence
  ENSG00000231824_18 (sequence is synthesized)
ttttggaacatcttattgacctctgtgtctaaatgttatttataaataaaacacatacagctttgaaatatcttaagcaaagttttctagactctgccgtttggctcattttgtacgtgg

SEQ ID NO: 768988 - DNA, 120 bp, Artificial Sequence
  ENSG00000231824_19 (sequence is synthesized)
atcttaccattatttggaaccatgagacttccaaggctattttcaaacccctagatatcatgaccaggggaagtgcttccttaatgggcccttcactgtgactgtgtgaggacagccatg

SEQ ID NO: 768989 - DNA, 120 bp, Artificial Sequence
  ENSG00000231824_20 (sequence is synthesized)
ggatggtgggtcctgaggcttgaagagaaaaggatgtatgctaagaagtggtcttttgatctaaaaaattcaaggtaagtgggtctggaaggtagagtgtctgccataatttttgagatg

SEQ ID NO: 768990 - DNA, 120 bp, Artificial Sequence
  ENSG00000231824_21 (sequence is synthesized)
gaaaatcgacagcaaggaacagagatatgactaagttgttgggaggacaaaaggaggttcagcaatgcctgtcctcaataggtaggtgccatattggcaaaattctaagaaagctcagtc

SEQ ID NO: 768991 - DNA, 120 bp, Artificial Sequence
  ENSG00000231824_22 (sequence is synthesized)
ataaaaacaaacgagttaaagacctataaacttttacagatctttcagtatgaagaaaaagttactagattttacaaggggcctacagaacttcatttgacataggattaaggtggattt

SEQ ID NO: 768992 - DNA, 120 bp, Artificial Sequence
  ENSG00000231824_23 (sequence is synthesized)
ccacttgattatcatcataaaccagatcacagcttttagtttcagaaatgagtgggaacatttacttagtgtcctttatctttctgatttactgcatacacaggcttcccatctctgtgt

SEQ ID NO: 768993 - DNA, 120 bp, Artificial Sequence
  ENSG00000231824_24 (sequence is synthesized)
gttcagctgttcgtcttctctgttgcctgcccctagggtggatctaaagaaagaaatcctttcatgttacttttctctgctgtaatcatctgttcagtgcaaacagtattgtaaattgat

SEQ ID NO: 768994 - DNA, 120 bp, Artificial Sequence
  ENSG00000231852_0 (sequence is synthesized)
gtctcgccatgctgctcctgggcctgctgctgctgctgcccctgctggctggcgcccgcctgctgtggaactggtggaagctccggagcctccacctcccgcctcttgccccgggcttct

SEQ ID NO: 768995 - DNA, 120 bp, Artificial Sequence
  ENSG00000231852_1 (sequence is synthesized)
tgcacctgctgcagcccgacctccccatctatctgcttggcctgactcagaaattcgggcccatctacaggctccaccttgggctgcaagatgtggtggtgctgaactccaagaggacca

SEQ ID NO: 768996 - DNA, 120 bp, Artificial Sequence
  ENSG00000231852_2 (sequence is synthesized)
ttgaggaagccatggtcaaaaagtgggcagactttgctggcagacctgagccacttacctacaagctggtgtctaggaactacccggacctgtccttgggagactactccctgctctgga

SEQ ID NO: 768997 - DNA, 120 bp, Artificial Sequence
  ENSG00000231852_3 (sequence is synthesized)
aagcccacaagaagctcacccgctcagccctgctgctgggcatccgtgactccatggagccagtggtggagcagctgacccaggagttctgtgagcgcatgagagcccagcccggcaccc

SEQ ID NO: 768998 - DNA, 120 bp, Artificial Sequence
  ENSG00000231852_4 (sequence is synthesized)
ctgtggccattgaggaggaattctctctcctcacctgcagcatcatctgttacctcaccttcggagacaagatcaaggacgacaacttaatgcctgcctattacaaatgtatccaggagg

SEQ ID NO: 768999 - DNA, 120 bp, Artificial Sequence
  ENSG00000231852_5 (sequence is synthesized)
tgttaaaaacctggagccactggtccatccaaattgtggacgtgattccctttctcaggttcttccccaatccaggtctccggaggctgaagcaggccatagagaagagggatcacatcg

SEQ ID NO: 769000 - DNA, 120 bp, Artificial Sequence
  ENSG00000231852_6 (sequence is synthesized)
tggagatgcagctgaggcagcacaaggagagcctcgtggcaggccagtggagggacatgatggactacatgctccaaggggtggcgcagccgagcatggaagagggctctggacagctcc

SEQ ID NO: 769001 - DNA, 120 bp, Artificial Sequence
  ENSG00000231852_7 (sequence is synthesized)
tggaagggcacgtgcacatggctgcagtggacctcctgatcggtggcactgagaccacagcaaacaccctctcctgggccgtggtttttttgcttcaccaccctgagattcagcagcgac

SEQ ID NO: 769002 - DNA, 120 bp, Artificial Sequence
  ENSG00000231852_8 (sequence is synthesized)
aatgccaccatcgccgaggtgctgcgcctgcggcccgttgtgcccttagccttgccccaccgcaccacacggcccagcagcatctccggctacgacatccctgagggcacagtcatcatt

SEQ ID NO: 769003 - DNA, 120 bp, Artificial Sequence
  ENSG00000231852_9 (sequence is synthesized)
ccgaacctccaaggcgcccacctggatgagacggtctgggagaggccacatgagttctggcctgatcgcttcctggagccaggcaagaactccagagctctggccttcggctgcggtgcc

SEQ ID NO: 769004 - DNA, 120 bp, Artificial Sequence
  ENSG00000231852_10 (sequence is synthesized)
cgcgtgtgcctgggcgagccgctggcgcgcctggagctcttcgtggtgctgacccgactgctgcaggccttcacgctgctgccctccggggacgccctgccctccctgcagcccctgccc

SEQ ID NO: 769005 - DNA, 120 bp, Artificial Sequence
  ENSG00000231852_11 (sequence is synthesized)
cactgcagtgtcatcctcaagatgcagcctttccaagtgcggctgcagccccgggggatgggggcccacagcccgggccagagccagtgatggggcaggaccgatgccagccgggtacct

SEQ ID NO: 769006 - DNA, 120 bp, Artificial Sequence
  ENSG00000231852_12 (sequence is synthesized)
cagtttctcctttattgctcccgtacgaacccctcccctcccccctgtaaacacagtgctgcgagatcgctggcagagaaggcttcctccagcggctgggtggtgaaggaccctggctct

SEQ ID NO: 769007 - DNA, 120 bp, Artificial Sequence
  ENSG00000231852_13 (sequence is synthesized)
tctctcggggcgacccctcagtgctcggcagtcatactggggtgcgagagaggtgggcagcagctcagcctccccccgctggggagcgaaagtttcttggtctcagcttcatttccgtga

SEQ ID NO: 769008 - DNA, 120 bp, Artificial Sequence
  ENSG00000231852_14 (sequence is synthesized)
agggcaccgagaactcgaagcccttccagtggtaccagctcactccctgggaaaggggttgtcaagagagagtcaaagccggatgtcccatctgctcttcccgttccccttaaggaggta

SEQ ID NO: 769009 - DNA, 120 bp, Artificial Sequence
  ENSG00000231852_15 (sequence is synthesized)
gctcccagcactcaaccaacctccccgcagagctcccttcctgaccctccgctgcagaggattgaggcttaattctgagctggccctttccagccaataaatcaactccagctccctctg

SEQ ID NO: 769010 - DNA, 120 bp, Artificial Sequence
  ENSG00000231852_16 (sequence is synthesized)
cgctgctttggctgtctcccagatgtggtggtgctgaactccaagaggaccattgaggaagccatggtcaaaaagtgggcagactttgctggcagacctgagccacttacctacaagctg

SEQ ID NO: 769011 - DNA, 120 bp, Artificial Sequence
  ENSG00000231852_17 (sequence is synthesized)
tgctatgctgcccaggctggtcttaaattcctagtctcaaatgatcctcccacctcagcctcaagtgtgagccacctttggggcatccccaatccaggtccctggaagctcttggggggg

SEQ ID NO: 769012 - DNA, 120 bp, Artificial Sequence
  ENSG00000231852_18 (sequence is synthesized)
catatctggtggggagaaagcaggggttggggaggccgaagaaggtcaggccctcagctgccttcatcagttcccaccctccagcccccacctcctcctgcagacaagctggtgtctagg

SEQ ID NO: 769013 - DNA, 120 bp, Artificial Sequence
  ENSG00000231852_19 (sequence is synthesized)
tgactcccgagggttggggatgagtgaggaaagcccgagcccagggaggtcctggccagcctctaactccagcccccttcagcatctccggctacgacatccctgagggcacagtcatca

SEQ ID NO: 769014 - DNA, 120 bp, Artificial Sequence
  ENSG00000231852_20 (sequence is synthesized)
atgcttcctgccgcagttcttccccaatccaggtctccggaggctgaagcaggccatagagaagagggatcacatcgtggagatgcagctgaggcagcacaaggtggggactgtacgtgg

SEQ ID NO: 769015 - DNA, 120 bp, Artificial Sequence
  ENSG00000231852_21 (sequence is synthesized)
acggcctcccctcggcccacagccagtgatgctaccggcctcagcattgctatgaggcgggttcttttgcataccccagttatgggcctgttgccactctgtactcctctccccaggcca

SEQ ID NO: 769016 - DNA, 120 bp, Artificial Sequence
  ENSG00000231861_0 (sequence is synthesized)
caaagagacgtcaataattgtggcatattattaattagtgccttattcctctacaatttttttcagagaggtcaggaatggttgaagaaaatcataccatgaaaaatgagtttatcctca

SEQ ID NO: 769017 - DNA, 120 bp, Artificial Sequence
  ENSG00000231861_1 (sequence is synthesized)
caggatttacagatcaccctgagctgaagactctgctgtttgtggtgttctttgccatctatctgatcaccgtggtggggaatattagtttggtggcactgatatttacacactgtcggc

SEQ ID NO: 769018 - DNA, 120 bp, Artificial Sequence
  ENSG00000231861_2 (sequence is synthesized)
ttcacacaccaatgtacatctttctgggaaatctggctcttgtggattcttgctgtgcctgtgctattacccccaaaatgttagagaacttcttttctgagggcaaaaggatttccctct

SEQ ID NO: 769019 - DNA, 120 bp, Artificial Sequence
  ENSG00000231861_3 (sequence is synthesized)
atgaatgtgcagtacagttttattttctttgcactgtggaaactgcagactgctttcttctggcagcagtggcctatgaccgctatgtggccatctgcaacccactgcagtaccacatca

SEQ ID NO: 769020 - DNA, 120 bp, Artificial Sequence
  ENSG00000231861_4 (sequence is synthesized)
ctgtggattgaatcacatcaaccacttttactgtgatactcttcccttgtatagactctcctgtgttgaccctttcatcaatgaactggttctattcatcttctcaggttcagttcaagt

SEQ ID NO: 769021 - DNA, 120 bp, Artificial Sequence
  ENSG00000231861_5 (sequence is synthesized)
ctttaccataggtagtgtcttaatatcttatctctatattcttcttactattttcagaatgaaatccaaggagggaagggccaaagccttttctacttgtgcatcccacttttcatcagt

SEQ ID NO: 769022 - DNA, 120 bp, Artificial Sequence
  ENSG00000231861_6 (sequence is synthesized)
ttcattattctatggatctatttttttcctatacattagaccaaatttgcttgaagaaggaggtaatgatataccagctgctattttatttacaatagtagttcccttactaaatccttt

SEQ ID NO: 769023 - DNA, 120 bp, Artificial Sequence
  ENSG00000231861_7 (sequence is synthesized)
catttatagtctgagaaacaaggaagtaataagtgtcttaagaaaaattctgctgaaaataaaatctcaaggaagtgtgaacaaatgacatctatcctagcttaatggtttaatgctcaa

SEQ ID NO: 769024 - DNA, 120 bp, Artificial Sequence
  ENSG00000231887_0 (sequence is synthesized)
cacaaagttgggagtgacaccagagcctcctgcaagatgcttctgattctgctgtcagtggccctgctggccttcagctcagctcaggatttaaatgaagatgtcagccaggaagatgtt

SEQ ID NO: 769025 - DNA, 120 bp, Artificial Sequence
  ENSG00000231887_1 (sequence is synthesized)
cccctcgtaatatcagatggaggagactctgagcagttcctagatgaggagcgtcagggaccacctttgggaggacagcaatctcaaccctctgctggtgatgggaaccaggatgatggc

SEQ ID NO: 769026 - DNA, 120 bp, Artificial Sequence
  ENSG00000231887_2 (sequence is synthesized)
accacctcctcagggaaagccacaaggaccaccccaacagggaggccatccccctcctcctcaaggaaggccacaaggaccaccccaacagggaggccatccccgtcctcctcgaggaag

SEQ ID NO: 769027 - DNA, 120 bp, Artificial Sequence
  ENSG00000231887_3 (sequence is synthesized)
gccacaaggaccaccccaacagggaggccatcagcaaggtcctcccccacctcctcctggaaagccccagggaccacctccccaagggggccgcccacaaggacctccacaggggcagtc

SEQ ID NO: 769028 - DNA, 120 bp, Artificial Sequence
  ENSG00000231887_4 (sequence is synthesized)
tcctcagtaatctaggattcaatgacaggaagtgaataagaagataacagtgtttcaaatgccgtgaaacatggcatcatgctctaacttcagtataccaataaaacaatcagcttgcaa

SEQ ID NO: 769029 - DNA, 120 bp, Artificial Sequence
  ENSG00000231887_5 (sequence is synthesized)
agactccatctatccatatgagctgctgcagaagaatattttgcctgctggaacctgctgtatctactcaagagtggaagttttcacagagatatttgcttacattccagtgtaaagctt

SEQ ID NO: 769030 - DNA, 120 bp, Artificial Sequence
  ENSG00000231887_6 (sequence is synthesized)
cttcttcagaaggcaagatggacaggttactcacagtgatcaaagtttttaagactggagtttcctaattttgagatttctcttttgatagacaccactacttgcacatgtaacatcagt

SEQ ID NO: 769031 - DNA, 120 bp, Artificial Sequence
  ENSG00000231887_7 (sequence is synthesized)
acttcagtgaataataaaccatcttttgccttctgcaagtacaacaagtgacaagctaagttgttagcttataataattttggcaacgaggatggaacacagcccaaagacctggccttc

SEQ ID NO: 769032 - DNA, 120 bp, Artificial Sequence
  ENSG00000231887_8 (sequence is synthesized)
tgaggagaaagtgaaggatcctacaagctgattaataggatttgctgaaagtccatgggaactggtagctaacatgttgactaaaatgtttgtaattggtaaataaatattcttctatta

SEQ ID NO: 769033 - DNA, 120 bp, Artificial Sequence
  ENSG00000231887_9 (sequence is synthesized)
aggttctccagcatttggctcaaggccccaagggcacatgtgacaagaaggcgccagctttttaaacattggaagttcttctgtgtcagttctgtgacagaacatttacttaacacatca

SEQ ID NO: 769034 - DNA, 120 bp, Artificial Sequence
  ENSG00000231887_10 (sequence is synthesized)
tgaaggctagtttggatgtggaggggaatagactccatctatccatatgagctgctgcagaagaatattttgcctgctggaacctgctgtatctactcaagagtggaagttttcacaggg

SEQ ID NO: 769035 - DNA, 120 bp, Artificial Sequence
  ENSG00000231887_11 (sequence is synthesized)
agctgacacgtttctcccagcacaaagttgggagtgacaccagagcctcctgcaagatgcttctgattctgctgtcagtggccctgctggccttcagctcagctcaggatttaaatgaag

SEQ ID NO: 769036 - DNA, 120 bp, Artificial Sequence
  ENSG00000231887_12 (sequence is synthesized)
agggtgcgggagagccccttgcagaagacgccgtacgagtttctccagcatttggctctaggtgccaagggcacatgtgacaagaaggtgccagctttataaaccttggaacttcttctg

SEQ ID NO: 769037 - DNA, 120 bp, Artificial Sequence
  ENSG00000231887_13 (sequence is synthesized)
actaaaacacatcatgaaggcctgttttgaagagaaggggaataagactgcatctgttcatatgaggtatgtcgaagcacttggatatgttttcaaaccaccaatcttgatcatttagaa

SEQ ID NO: 769038 - DNA, 120 bp, Artificial Sequence
  ENSG00000231887_14 (sequence is synthesized)
atgtgctcccttttccaatttcatcctgataaaaatgtatgatctctggacgttgccaatattcccctccattccatcatgagccgttctctgtaattcagaatctgtggactaagctgt

SEQ ID NO: 769039 - DNA, 120 bp, Artificial Sequence
  ENSG00000231887_15 (sequence is synthesized)
tgacagggaatctcagtctttgaggagattttaatctcacatgcaaattcagtggcttagtcagcttccccaccctgcaacttcttcctacaaacttcctagaggaagaccatcagcctg

SEQ ID NO: 769040 - DNA, 120 bp, Artificial Sequence
  ENSG00000231887_16 (sequence is synthesized)
gagactattcgctgtaaagattataacggtgagaataagctctaaaataaaacttcttgttgtgctttacctgacttttctgaagcaaggacacccattctcccagaaaacccaaaggaa

SEQ ID NO: 769041 - DNA, 120 bp, Artificial Sequence
  ENSG00000231887_17 (sequence is synthesized)
attttgcctgctggaacctgctgtatctactcaagagtggaagttttcacagatgatgttcatccttccttttgtggaaacactggcttccattcttctcttaatcctctccttatggag

SEQ ID NO: 769042 - DNA, 120 bp, Artificial Sequence
  ENSG00000231887_18 (sequence is synthesized)
atcccagcacagaagcccatgtaaaacctataaaagctataatttcatttctactcctctttattgtgcattatttcatcagtatcatactaacattggcctgtcctcttctagacttcg

SEQ ID NO: 769043 - DNA, 120 bp, Artificial Sequence
  ENSG00000231887_19 (sequence is synthesized)
aggagggtattgttattgtgtgcgttttacagatggctatcctaaggctgatagtagttgtaaaatatagtctaagttcatatctatatgaaacagagtatctgggtttctgtcctggcc

SEQ ID NO: 769044 - DNA, 120 bp, Artificial Sequence
  ENSG00000231887_20 (sequence is synthesized)
atcagacttgaagatcatttcttagaaacaattatattatcaaaactgaaaagaaatacaatccaaggttggagtcttattttagcatctattaatcttaagccattaagtaatcaaaaa

SEQ ID NO: 769045 - DNA, 120 bp, Artificial Sequence
  ENSG00000231887_21 (sequence is synthesized)
ccagctttttaaacattggaagttcttctgtgtcagttctgtgacagaacatttacttaacacatcatgaaggctagtttggatgtggaggggaatagactccatctatccatatgagac

SEQ ID NO: 769046 - DNA, 120 bp, Artificial Sequence
  ENSG00000231887_22 (sequence is synthesized)
actgaggcagagagcagttgtgaaatggagtctcagaatcgtcggtatatgaagcagaaaaactggtttcctctcttggcagtctgactccaagatctcttagaaacaattatactgtaa

SEQ ID NO: 769047 - DNA, 120 bp, Artificial Sequence
  ENSG00000231887_23 (sequence is synthesized)
aaacctgaaaaagaagtaaaaaacaagattggagactaatactaacatctattcttcttaatagcataatcaaaaataaattaaacagaaaaataaaagtgaatattcataccaagggaa

SEQ ID NO: 769048 - DNA, 120 bp, Artificial Sequence
  ENSG00000231887_24 (sequence is synthesized)
tcggccatcatgctggccccggaggccgttagcttagtcatggctctaaatatgtacctgcaatcggatgttgaggatcaccgagcccgcgacgtagaagtacgggaagttcatgcgcag

SEQ ID NO: 769049 - DNA, 120 bp, Artificial Sequence
  ENSG00000231924_0 (sequence is synthesized)
gagcttgagaattgctcctgccctgggaagaggctcagcacagaaagaggaaggacagcacagctgacagccgtgctcagagagtttctggatcctaggcttatctccacagaggagaac

SEQ ID NO: 769050 - DNA, 120 bp, Artificial Sequence
  ENSG00000231924_1 (sequence is synthesized)
acacaagcagcagagaccatgggaaccctctcagcccctccctgcacacagcgcatcaaatggaaggggctcctgctcacagcatcacttttaaacttctggaacctgcccaccactgcc

SEQ ID NO: 769051 - DNA, 120 bp, Artificial Sequence
  ENSG00000231924_2 (sequence is synthesized)
caagtcacgattgaagccgagccaaccaaagtttccgaggggaaggatgttcttctacttgtccacaatttgccccagaatcttaccggctacatctggtacaaagggcaaatgagggac

SEQ ID NO: 769052 - DNA, 120 bp, Artificial Sequence
  ENSG00000231924_3 (sequence is synthesized)
ctctaccattacattacatcatatgtagtagacggtgaaataattatatatgggcctgcatatagtggacgagaaacagcatattccaatgcatccctgctgatccagaatgtcacccgg

SEQ ID NO: 769053 - DNA, 120 bp, Artificial Sequence
  ENSG00000231924_4 (sequence is synthesized)
gaggacgcaggatcctacaccttacacatcataaagggagatgatgggactagaggagtaactggacgtttcaccttcaccttacacctggagactcctaagccctccatctccagcagc

SEQ ID NO: 769054 - DNA, 120 bp, Artificial Sequence
  ENSG00000231924_5 (sequence is synthesized)
aacttaaatcccagggagaccatggaggctgtgagcttaacctgtgaccctgagactccagacgcaagctacctgtggtggatgaatggtcagagcctccctatgactcacagcttgaag

SEQ ID NO: 769055 - DNA, 120 bp, Artificial Sequence
  ENSG00000231924_6 (sequence is synthesized)
ctgtccgaaaccaacaggaccctctttctattgggtgtcacaaagtatactgcaggaccctatgaatgtgaaatacggaacccagtgagtgccagccgcagtgacccagtcaccctgaat

SEQ ID NO: 769056 - DNA, 120 bp, Artificial Sequence
  ENSG00000231924_7 (sequence is synthesized)
ctcctcccgaagctgcccaagccctacatcaccatcaacaacttaaaccccagggagaataaggatgtcttaaacttcacctgtgaacctaagagtgagaactacacctacatttggtgg

SEQ ID NO: 769057 - DNA, 120 bp, Artificial Sequence
  ENSG00000231924_8 (sequence is synthesized)
ctaaatggtcagagcctcccggtcagtcccagggtaaagcgacccattgaaaacaggatcctcattctacccagtgtcacgagaaatgaaacaggaccctatcaatgtgaaatacgggac

SEQ ID NO: 769058 - DNA, 120 bp, Artificial Sequence
  ENSG00000231924_9 (sequence is synthesized)
ctgttctgcggactctaacccaccggcacagtattcttggacaattaatgaaaagtttcagctaccaggacaaaagctctttatccgccatattactacaaagcatagcgggctctatgt

SEQ ID NO: 769059 - DNA, 120 bp, Artificial Sequence
  ENSG00000231924_10 (sequence is synthesized)
ttgctctgttcgtaactcagccactggcaaggaaagctccaaatccatgacagtcgaagtctctggtaagtggatcccagcatcgttggcaatagggttttaggtggagtctatctggca

SEQ ID NO: 769060 - DNA, 120 bp, Artificial Sequence
  ENSG00000231924_11 (sequence is synthesized)
ttcagagaagagtcaggaaaacaattgtattcccagcctgtgtcccatgggcacaagcaaatcccaaattctcctcctgaaccctccaaatttgtctaagaacttcgaaaactttaacaa

SEQ ID NO: 769061 - DNA, 120 bp, Artificial Sequence
  ENSG00000231924_12 (sequence is synthesized)
acaggctgatatcttcataatattcccagcctagaccaagcaggaagaacattgatttcattgaaataattgataataatgaagataatgtttttatgatttttatttgaaaatttgctg

SEQ ID NO: 769062 - DNA, 120 bp, Artificial Sequence
  ENSG00000231924_13 (sequence is synthesized)
attctttaaatggtttgttttctacattgatggaatttttctcttttaatctatctacagcttatagcagttcaataaactatacttctgggaaccgtaattgaaacatttacttttgct

SEQ ID NO: 769063 - DNA, 120 bp, Artificial Sequence
  ENSG00000231924_14 (sequence is synthesized)
ttctacctgactgccccagaattgggcaactattcatgagaattgatatgtttatggtaatacacatatttgcacaagtacagtaacaatctgctttctttgtaacatgacacatttgaa

SEQ ID NO: 769064 - DNA, 120 bp, Artificial Sequence
  ENSG00000231924_15 (sequence is synthesized)
atcattggttatattaccaatgctttgattcggatgttatattaaaaacatagatagaatgaaccaatatgaactgcaggcaaagtctgaagtcagccttggtttggcttcctattctca

SEQ ID NO: 769065 - DNA, 120 bp, Artificial Sequence
  ENSG00000231924_16 (sequence is synthesized)
agaggtttgtgaagatttaatctcagattccttataaaaacttagagaaaagaaaattttagaagacagcctacatggtccattgctactcttgctgcacttatgtaaacaatcagacca

SEQ ID NO: 769066 - DNA, 120 bp, Artificial Sequence
  ENSG00000231924_17 (sequence is synthesized)
catttgaagaaactccacctattttgcaaacaaacttattctactgaaattatcattggtaaaagtagagatgcccatagagggaaaaattatgtggaaaataaaaactgtagtatacct

SEQ ID NO: 769067 - DNA, 120 bp, Artificial Sequence
  ENSG00000231924_18 (sequence is synthesized)
aaagctccaaatccatgacagtcgaagtctctgactggacagttccctgaattctactagtacctccaattccattttctcccatggaatcactaagagcaagacccactctgttccaga

SEQ ID NO: 769068 - DNA, 120 bp, Artificial Sequence
  ENSG00000231924_19 (sequence is synthesized)
agccctataagctggaggtggacaactcaatgtaaatttcatgggaaaacccttgtacgtgaagcatgagccactcagaactcaccaaaatattcgacaccataacaacagatgctcaaa

SEQ ID NO: 769069 - DNA, 120 bp, Artificial Sequence
  ENSG00000231924_20 (sequence is synthesized)
ctgtaaaccaggacaacaagtggatgacttcacactgtggacagtttttcccaagatgtcagaacaagactccccatcatgatgaggctctcccccctcttaactgtccttgctcatgcc

SEQ ID NO: 769070 - DNA, 120 bp, Artificial Sequence
  ENSG00000231924_21 (sequence is synthesized)
tgcctctttcacttggcaggataatgcagtcattagaatttcacatgtagtagcttctgagagtaacaacagagtgtcagatatgtcatctcaacctcaaacttttacataacatctcag

SEQ ID NO: 769071 - DNA, 120 bp, Artificial Sequence
  ENSG00000231924_22 (sequence is synthesized)
ggggaaatgtggctctctccaccttgcatacagggctcccaatagaaatgaacacagagatattgcctgtgtgtttgcagagaagatggtttgtatgaagacgtaggaaagctgaaatta

SEQ ID NO: 769072 - DNA, 120 bp, Artificial Sequence
  ENSG00000231924_23 (sequence is synthesized)
taatagagtcccctttaaatccacattgtgtggatggctcttgccgtttcctaagagatacattgtaaaacgtgacagtaagacattctagcagaataaaacatgtaccacctttgctaa

SEQ ID NO: 769073 - DNA, 120 bp, Artificial Sequence
  ENSG00000231924_24 (sequence is synthesized)
gtgtgtgtgtgtgtgtgtttgtatgtgtgtgtgtgtctgtgttgtcaaggctgaggactgaagagaccttctcaggacccagggccccatgttttcacaccaatacataggtctcaatat

SEQ ID NO: 769074 - DNA, 120 bp, Artificial Sequence
  ENSG00000231924_25 (sequence is synthesized)
gtaacattttttgcagaattagaaaacactgtcctaaatctcacatgacaggctcttattaatgactgacacaacacaaacactgagaaaaagaggtaaccatgaaaaggtggaaagttc

SEQ ID NO: 769075 - DNA, 120 bp, Artificial Sequence
  ENSG00000231924_26 (sequence is synthesized)
tgatgacatagaaaatagcaatcagcctttctcacatcccaaggccttcaaaaatatacgagtgcagcatggccactgtggaattcaccgaaaactgatcaccaagctagaaacgtggtg

SEQ ID NO: 769076 - DNA, 120 bp, Artificial Sequence
  ENSG00000231924_27 (sequence is synthesized)
agagaaaaaaaagggcaagaatatctttggcttatcacctcccacttttgcctactaatctgatgctgaaaagaaatgctcactggagcattttagattttgaatctttcagatttggga

SEQ ID NO: 769077 - DNA, 120 bp, Artificial Sequence
  ENSG00000231924_28 (sequence is synthesized)
tgctaaaccagtaagtatatgacaaatatttcagaatcaaaaaatgtcagaaatccaaaacactttttgtcctaagtcttatgcataagaaatactcaatctgtgtgaactataggcatc

SEQ ID NO: 769078 - DNA, 120 bp, Artificial Sequence
  ENSG00000231924_29 (sequence is synthesized)
aagctctacagcagttctctagaacctccccaccttgcataactgaaactgcacacccatgaacaacttctgattctacccactcccagctcctgacaaccagcagtctcttctcatatt

SEQ ID NO: 769079 - DNA, 120 bp, Artificial Sequence
  ENSG00000231924_30 (sequence is synthesized)
cactctggaatccacttacatgaggtccctagagtagttgaacccatggaatcagagagtagaatgtccaatgaaataaaatatttgcaaaacctctctccaaatttgtctcatatccat

SEQ ID NO: 769080 - DNA, 120 bp, Artificial Sequence
  ENSG00000231924_31 (sequence is synthesized)
caaacacacatggttcatgaggaccagatttccagcagttcattcccaccctttctaccagtcagttctgaatttgcaaatgtccacatgtatttctggaaagatccacatggtcctcac

SEQ ID NO: 769081 - DNA, 120 bp, Artificial Sequence
  ENSG00000231924_32 (sequence is synthesized)
ctgccctctgcagaaggagaggaaacttaaagaacccaagacagggaacatgcttctgctccaaagccaccagctcttgcctgtccccttcactctttctagatcattccttgcactctg

SEQ ID NO: 769082 - DNA, 87 bp, Artificial Sequence
  ENSG00000231924_33 (sequence is synthesized)
aaacacctgcaaaaaactgccccaccttgagccttgattctggtctcccctgtgttatttctgctgaaacatccagtcccaggccag

SEQ ID NO: 769083 - DNA, 120 bp, Artificial Sequence
  ENSG00000231924_34 (sequence is synthesized)
ccctgtgttatttctgctgaaacatccagtcccaggccaggctgctcagtatcttcagggttgcaggacaaagggaagtcccattattactcatctctagaatgtcctttgaaatggaag

SEQ ID NO: 769084 - DNA, 120 bp, Artificial Sequence
  ENSG00000231924_35 (sequence is synthesized)
ctgcagagaaatcacatctagggggacaaagtaggatggaatttggaaggggcccagcagttgcatattccaggtaaggaacccaaggtgagccagccagtcaactgattagggagggcc

SEQ ID NO: 769085 - DNA, 120 bp, Artificial Sequence
  ENSG00000231924_36 (sequence is synthesized)
acacttcagaaagtctgtgcttccctaagacagagaaggcggcctcacagtctttgagcccttagatcatcatgcatctatcttgtgacaaaagcaccagctattggctttcaaggactc

SEQ ID NO: 769086 - DNA, 120 bp, Artificial Sequence
  ENSG00000231925_0 (sequence is synthesized)
ctggagaggatctacccgggtccctgcctggccagtggggaaacaccggtcccccaggcaccttcacctaaccagagcggggatttccaccgcccctcatgccgccctttggaggaaagt

SEQ ID NO: 769087 - DNA, 120 bp, Artificial Sequence
  ENSG00000231925_1 (sequence is synthesized)
gaaagtgaaaggaggaagaggaggcttcatggctgaggaggtcgcagcgccatgaagtccctgtctctgctcctcgctgtggctttgggcctggcgaccgccgtctcagcaggacccgcg

SEQ ID NO: 769088 - DNA, 120 bp, Artificial Sequence
  ENSG00000231925_2 (sequence is synthesized)
gtgatcgagtgttggttcgtggaggatgcgagcggaaagggcctggccaagagacccggtgcactgctgttgcgccagggaccgggggaaccgccgccccggccggacctcgaccctgag

SEQ ID NO: 769089 - DNA, 120 bp, Artificial Sequence
  ENSG00000231925_3 (sequence is synthesized)
ctctatctcagtgtacacgaccccgcgggcgccctccaggctgccttcaggcggtatccccggggcgcccccgcaccacactgcgagatgagccgcttcgtgcctctccccgcctctgcg

SEQ ID NO: 769090 - DNA, 120 bp, Artificial Sequence
  ENSG00000231925_4 (sequence is synthesized)
aaatgggccagcggcctgacccccgcgcagaactgcccgcgggccctggatggggcttggctgatggtcagcatatccagcccagtcctcagcctctccagcctcttgcgaccacagcca

SEQ ID NO: 769091 - DNA, 120 bp, Artificial Sequence
  ENSG00000231925_5 (sequence is synthesized)
gagcctcagcaggagcctgttctcatcaccatggcaacagtggtactgactgtcctcacccacacccctgcccctcgagtgagactgggacaagatgctctgctggacttgagctttgcc

SEQ ID NO: 769092 - DNA, 120 bp, Artificial Sequence
  ENSG00000231925_6 (sequence is synthesized)
tacatgccccccacctccgaggccgcctcatctctggctccgggtccccctccctttgggctagagtggcgacgccagcacctgggtaagggacatctgctcctggctgcaactcctggg

SEQ ID NO: 769093 - DNA, 120 bp, Artificial Sequence
  ENSG00000231925_7 (sequence is synthesized)
atgggaccttctggctgcctacagttcaaccctttcaggagggcacctatctggccaccatacacctgccatacctgcaaggacaggtcaccctggagcttgctgtgtacaaacccccca

SEQ ID NO: 769094 - DNA, 120 bp, Artificial Sequence
  ENSG00000231925_8 (sequence is synthesized)
aagtgtccctgatgccagcaacccttgcacgggccgccccaggggaggcacccccggaattgctctgccttgtgtcccacttctacccttctgggggcctggaggtggagtgggaactcc

SEQ ID NO: 769095 - DNA, 120 bp, Artificial Sequence
  ENSG00000231925_9 (sequence is synthesized)
ggggtggcccagggggccgctctcagaaggccgaggggcagaggtggctctcggccctgcgccaccattccgatggctctgtcagcctctctgggcacttgcagccgcccccagtcacca

SEQ ID NO: 769096 - DNA, 120 bp, Artificial Sequence
  ENSG00000231925_10 (sequence is synthesized)
ctgagcagcatggggcacgctatgcctgtcgaattcaccatcccagcctgcctgcctcggggcgcagcgctgaggtcaccctggaggtagcaggtctttcagggccctcccttgaggaca

SEQ ID NO: 769097 - DNA, 120 bp, Artificial Sequence
  ENSG00000231925_11 (sequence is synthesized)
gcgtaggccttttcctgtctgcctttcttctgcttgggctcttcaaggcactgggctgggctgctgtctacctgtccacctgcaaggattcaaagaaggtacagtgctccacctctctgt

SEQ ID NO: 769098 - DNA, 120 bp, Artificial Sequence
  ENSG00000231925_12 (sequence is synthesized)
atctttcccttgtcactttatctcctcatcctatctcaaaacccatggagggaggctgctggtgtggtaggcagaacctaggcttggaattcacactgatctgggttaaaacctggcact

SEQ ID NO: 769099 - DNA, 120 bp, Artificial Sequence
  ENSG00000231925_13 (sequence is synthesized)
atatcctaactgtaggactctttgagcatgctacttaatctatatgtttccttgggtgtagggattttaaaaagttacttaggcagtgctgtccaatagaaagataatgcaagccacata

SEQ ID NO: 769100 - DNA, 120 bp, Artificial Sequence
  ENSG00000231925_14 (sequence is synthesized)
tgtaaatttaaatactctagtactcacattaaaaaaataagcagaaacaggtaaaattaacttaataatataccttatttaatctaataattctggtcccttatctgaaatgcttgggtc

SEQ ID NO: 769101 - DNA, 120 bp, Artificial Sequence
  ENSG00000231925_15 (sequence is synthesized)
ggggacgcggcacagatagggggaagccggagtaatggttttcgggcaagtggatgttggagagcacacacaggagttggggggcgggggagggcctggggttggggagggctcgaactc

SEQ ID NO: 769102 - DNA, 120 bp, Artificial Sequence
  ENSG00000231925_16 (sequence is synthesized)
gaaagcagagtgagggcactcactgccatcctgtggaagccaccatcatctctggcccaagcttctgtagtagctccctaaaataataccctatcatctgctcctaatccctccaatctc

SEQ ID NO: 769103 - DNA, 78 bp, Artificial Sequence
  ENSG00000231925_17 (sequence is synthesized)
ctctccactgagtggctggaatgcttttttttttttctttcacttatataagggataccgcccaggctgcagtgcagt

SEQ ID NO: 769104 - DNA, 77 bp, Artificial Sequence
  ENSG00000231925_18 (sequence is synthesized)
gagaaatgcttttttaaaaaacacacatcttatggcattcaccttcttggagctctaggacagtggttctcaaaatt

SEQ ID NO: 769105 - DNA, 120 bp, Artificial Sequence
  ENSG00000231925_19 (sequence is synthesized)
ttcaccttcttggagctctaggacagtggttctcaaaatttttttctctcaggacctcttaaaaatcatcaaggaccccaaaaagcttttgggtatgtgggttatagctatcaatattta

SEQ ID NO: 769106 - DNA, 120 bp, Artificial Sequence
  ENSG00000231925_20 (sequence is synthesized)
tggtactagaacttaaaagtgagaaaaatttaaaacacgagaatacataggcacacattctattcatcgtgggaaccatggtgtcaatacatatcatgtagcttctgaaaaactccactg

SEQ ID NO: 769107 - DNA, 66 bp, Artificial Sequence
  ENSG00000231925_21 (sequence is synthesized)
gtgtcaatacatatcatgtagcttctgaaaaactccactgtacacttatagaatgaagaaggcaaa

SEQ ID NO: 769108 - DNA, 75 bp, Artificial Sequence
  ENSG00000231925_22 (sequence is synthesized)
gatctcctaccgcgtgagccaccgcgcccggctgcaaataatctttctttttttctgagacagagtctcgctctg

SEQ ID NO: 769109 - DNA, 120 bp, Artificial Sequence
  ENSG00000231925_23 (sequence is synthesized)
acaggcgtgagccaccgcgcccggcggcgaaacacgatattgtactaacatcttaattttgttataaaatctcacaaaccccctgacatagtctcagagatctgtagggccgaggttaca

SEQ ID NO: 769110 - DNA, 120 bp, Artificial Sequence
  ENSG00000231925_24 (sequence is synthesized)
aggttacatttggagaacccgtactctagggccaaatccattcttcttgccctggctcacttgtcccccccaccgccccgcgctggagccactgcctagttcttcagccctagatggtgc

SEQ ID NO: 769111 - DNA, 120 bp, Artificial Sequence
  ENSG00000231925_25 (sequence is synthesized)
tcgccagacctcctctcaatgctcatcacacacagggctattcctttcctccaatgaaccaaacgcctcccgcccacctccaggtcccagtcctctgttccctttgcctggtccaccctt

SEQ ID NO: 769112 - DNA, 120 bp, Artificial Sequence
  ENSG00000231925_26 (sequence is synthesized)
gccctccctgggtcgcagacgaggtcggcctcgtcattccccgcagaccgccgcgcgtccctcttgtgcggttcaccacagttgtatttaagtgatcgtgtgagtcgtcgttaaatgcct

SEQ ID NO: 769113 - DNA, 120 bp, Artificial Sequence
  ENSG00000231925_27 (sequence is synthesized)
gtctccccgcggatcatgggctcctcgaggacagggactggcctgtctgtccactgctgtaaccccgcgccggcatagggacctaaggcccactggagggcgctcatcaagtagctgctg

SEQ ID NO: 769114 - DNA, 120 bp, Artificial Sequence
  ENSG00000231925_28 (sequence is synthesized)
gatgttgacgaaggaagcggcggcgcagctcagggatctccgagtcaggacggtcggccagacccacggggtaacgggtctaatcgtgtaggaataaagctgtattccagtgcttccaaa

SEQ ID NO: 769115 - DNA, 120 bp, Artificial Sequence
  ENSG00000231925_29 (sequence is synthesized)
gccctggatggggcttggctgatggtcagcatatccagcatggggcacgctatgcctgtcgaattcaccatcccagcctgcctgcctcggggcgcagcgctgaggtcaccctggaggtag

SEQ ID NO: 769116 - DNA, 120 bp, Artificial Sequence
  ENSG00000231925_30 (sequence is synthesized)
gagggtgcctgggcaagtaagtagagatagaaagaggttcctgggagttagaggggtaatgggaggctagaagtttcctggaaatttgaggggctttgacatgggtatttctgtgacgca

SEQ ID NO: 769117 - DNA, 120 bp, Artificial Sequence
  ENSG00000231925_31 (sequence is synthesized)
cacccaggaagacaggagctcactctcaccccttctgcctgccaggtctttcagggccctcccttgaggacagcgtaggccttttcctgtctgcctttcttctgcttgggctcttcaagg

SEQ ID NO: 769118 - DNA, 120 bp, Artificial Sequence
  ENSG00000231925_32 (sequence is synthesized)
cactgggctgggctggtaagtgtcagccctaccctgaccatgacctgaggttggtggactttccccacctactcccaagagcctgacacccatccctctgccctccacctctaccactcc

SEQ ID NO: 769119 - DNA, 120 bp, Artificial Sequence
  ENSG00000231925_33 (sequence is synthesized)
gaggtggccccactggagccgatgccagggtgggagtggggcaggtcaccagacatacaaaccgctcctcactcgcgtccctatacgccaggcctggcgaccgccgtctcagcaggaccc

SEQ ID NO: 769120 - DNA, 120 bp, Artificial Sequence
  ENSG00000231925_34 (sequence is synthesized)
cctcagcaggagcctgttctcatcaccatggcaacaggtagctggggaggggaggtggagaagggtgggtagattctaagggtccagatcagccggtggtctcgctttatggacttgagc

SEQ ID NO: 769121 - DNA, 120 bp, Artificial Sequence
  ENSG00000231925_35 (sequence is synthesized)
aagacatttcgccaatcggggttcagtttcctttttttgttaagagaggtggtttggctagaatgaatcaatctctaccgctccttctagccctcacccagttaaaaaaaaaaaacaaaa

SEQ ID NO: 769122 - DNA, 120 bp, Artificial Sequence
  ENSG00000231989_0 (sequence is synthesized)
ggagctctaggccggcatctctccgcgagccgcgggtcaagtgccggcggctaatggtgcgcgaggagccgccacccattcggcgttggctctggcgtcggggtcgttgtgacaaccgct

SEQ ID NO: 769123 - DNA, 120 bp, Artificial Sequence
  ENSG00000231989_1 (sequence is synthesized)
ccagtagccgtttccgaggcagcaggtgcggccgctttagccctgagcgggctctgcggctgcctgcgagtctctgctgtgccgacccttctcttcgcggaccccacgccaagcagcgac

SEQ ID NO: 769124 - DNA, 120 bp, Artificial Sequence
  ENSG00000231989_2 (sequence is synthesized)
cctgaggcgacagccggagcgcccggcaatggcggcctcgacggcctcccaccggcccatcaaggggatcttgaagaacaagacctctacgacttcctctatggtggcgtcggccgaaca

SEQ ID NO: 769125 - DNA, 120 bp, Artificial Sequence
  ENSG00000231989_3 (sequence is synthesized)
gccccgcaggagtgtcgacgaggagctgagcaaaaaatcccagaagtgggatgaaattaacatcttggcgacctatcatccagcagacaaaggctatggtttaatgaaaatagatgaacc

SEQ ID NO: 769126 - DNA, 120 bp, Artificial Sequence
  ENSG00000231989_4 (sequence is synthesized)
aagccctccttaccatagtatgatgggtgatgatgaagatgcgtgtagggacaccgagaccactgaagccatggcgccagacatcctagccaagaaattagctgctgctgaaggcttgga

SEQ ID NO: 769127 - DNA, 120 bp, Artificial Sequence
  ENSG00000231989_5 (sequence is synthesized)
gccaaagtaccggattcaggaacaagaaagcagtggagaggaggatagtgacctctcacctgaagaacgagaaaaaaagcgacaatttgaaatgagaaggaagcttcactacaatgaagg

SEQ ID NO: 769128 - DNA, 120 bp, Artificial Sequence
  ENSG00000231989_6 (sequence is synthesized)
actcaatatcaaactagccagacaattaatttcaaaagacctacatgatgatgatgaagatgaagaaatgttagagactgcagatggagaaagcatgaatacggaagaatcaaatcaagg

SEQ ID NO: 769129 - DNA, 120 bp, Artificial Sequence
  ENSG00000231989_7 (sequence is synthesized)
atctactccaagtgaccaacagcaaaacaaattacgaagttcatagaagagatttgttcaacactgcaattgtttgttagatataaaccctgtgactataatacattgcttcttgttctc

SEQ ID NO: 769130 - DNA, 120 bp, Artificial Sequence
  ENSG00000231989_8 (sequence is synthesized)
cacaattcatgacttaagtaccaaaatgcataccagttattatatattgccaagaattaaatgataaacttagagactaattagactgaaaatgcctaattgatatatatattcttatgc

SEQ ID NO: 769131 - DNA, 120 bp, Artificial Sequence
  ENSG00000231989_9 (sequence is synthesized)
tttgtataagatattatagagctttttatgctttagaagttaagcaatatctttgggggggaactaatttattttcatcactcgaaatgtggtagctcttacaaagtttgttgatttgtt

SEQ ID NO: 769132 - DNA, 120 bp, Artificial Sequence
  ENSG00000231989_10 (sequence is synthesized)
tttttaaaaatcaaaagccagttgaacaacaggatatatagacttataaatattcaagctgaatcgtattttaacacttctcttcaacttgatttgtctgtttaattgaaaagaattgta

SEQ ID NO: 769133 - DNA, 120 bp, Artificial Sequence
  ENSG00000231989_11 (sequence is synthesized)
agagttactgttgcattttctgacctactacctttaaaattcctgttgagtttctttgtgtttacaaggaaaggactgaactttttctcatcaaaactagcttttttccccacaaataaa

SEQ ID NO: 769134 - DNA, 120 bp, Artificial Sequence
  ENSG00000231989_12 (sequence is synthesized)
ttatcaggttaaactttcaccaatgtctgctctgttttttggcagggggtttgtttgtttttgttttttaatgtttttggtacactgggcagacttcagagcagttttttaaaaaataaa

SEQ ID NO: 769135 - DNA, 120 bp, Artificial Sequence
  ENSG00000231989_13 (sequence is synthesized)
tattctaatgtagctatctcgccattccctttaaatacctgtcttaacctcctgcttttatttcctactcctttccacacatacacacacaatcttttaccttttaaaggatcattaaga

SEQ ID NO: 769136 - DNA, 120 bp, Artificial Sequence
  ENSG00000231989_14 (sequence is synthesized)
ttgtcacgacattaggaactctttctgtcactcttctgtcatttgctgctgtgtggaaattcttattttgaccatcaatgcctatgaattcttctaatacatgaagaaaatagattgagt

SEQ ID NO: 769137 - DNA, 120 bp, Artificial Sequence
  ENSG00000231989_15 (sequence is synthesized)
agcagcagtactataggcaggaaatacagtttaactgctgaatttctatgcctctcgatttacagattgctaattaaattgctattattagtttggcttaattagacttaagaaaacaac

SEQ ID NO: 769138 - DNA, 120 bp, Artificial Sequence
  ENSG00000231989_16 (sequence is synthesized)
cgagggtttttttttgttttttgagggttttctttgcatgagaattgtatgtaaccagtgatatgattattcctgaatgtacagacagaagtaagcctggacattttttaatttaaaaac

SEQ ID NO: 769139 - DNA, 120 bp, Artificial Sequence
  ENSG00000231989_17 (sequence is synthesized)
tttaaatagtccctgctttaagggaatatgataatgtatactatgacaaatgtactttattcctctaacgcagtaagaattatgtggaatattttccttaaacgaagtgcaggaaagccc

SEQ ID NO: 769140 - DNA, 120 bp, Artificial Sequence
  ENSG00000232030_0 (sequence is synthesized)
atgcctcggggtcagaagagtaagctccgtgcccgtgggaaacgccgagagacccatgatcagccgcaaggtctcacaggtccccaggccactgcagagaaacaagaagagtctcgctct

SEQ ID NO: 769141 - DNA, 120 bp, Artificial Sequence
  ENSG00000232030_1 (sequence is synthesized)
tcgtcatcctcttctgctgtttgtcagggtgctcgtcgtaggtcttctggttcctccgttcctcaggagtctcagggagcttcacccactggctatcctgatgcaggtgcttcatgctca

SEQ ID NO: 769142 - DNA, 120 bp, Artificial Sequence
  ENSG00000232030_2 (sequence is synthesized)
aaatatgatgtggctgccatgggtcaagatgagaaaagtcctagtacctcccgtgatgcctccgtttctcaagagtctcagggagcttcacccattggccctcctgatgcaggtatttca

SEQ ID NO: 769143 - DNA, 120 bp, Artificial Sequence
  ENSG00000232030_3 (sequence is synthesized)
tgctcaaaatctgatgaggctgccaagggtcaaaatgagaaaagtccaagcacctcccgtgatgcctctgttcctcaggagtctcagggagcttcacccactggctcgcctgatgcagat

SEQ ID NO: 769144 - DNA, 120 bp, Artificial Sequence
  ENSG00000232030_4 (sequence is synthesized)
gtttcaggctcaaaatctgatgtggctgccaagggtcaagatgaggaaagtttaagctcctccaagagagctgcgttctttacaaccacagacggagatcctataaaaaggaaggcaaac

SEQ ID NO: 769145 - DNA, 120 bp, Artificial Sequence
  ENSG00000232030_5 (sequence is synthesized)
aagtttgagaagaaagagcccattttgaaggcagacatgctgaagcgtctccgcagacagtacaagccatgcttccctgagatcctcaagagaacctccgaacatttgacggtgttcttt

SEQ ID NO: 769146 - DNA, 120 bp, Artificial Sequence
  ENSG00000232030_6 (sequence is synthesized)
ggcgttgaattgaaagaaacggattccagcggcgagtcctacacccttgtcagcaagctgggtctctccaatgaaggaagtctgagtggtgataatgcgctgccgaagtcgggtctcctg

SEQ ID NO: 769147 - DNA, 120 bp, Artificial Sequence
  ENSG00000232030_7 (sequence is synthesized)
atgtcgatcctgggtttgatcttcatgagaggcaaccgtgccactgaagaggaggtctggaagttcctgggtctgttggggatatatgatgggatcctgcattcaatctatggggatgct

SEQ ID NO: 769148 - DNA, 120 bp, Artificial Sequence
  ENSG00000232030_8 (sequence is synthesized)
cggaagatcattactgaagatttggtgcaagataagtacgtggtttaccggcaggtgtgcaacagtgatcctccatgctatgagttcctgtggggtccacgagcctatgctgaaaccacc

SEQ ID NO: 769149 - DNA, 120 bp, Artificial Sequence
  ENSG00000232030_9 (sequence is synthesized)
aagatgagagtcctgcgtgttttggccgagatcaataacaccagtcccggtttatacccacatctgtatgaagacgctttgacagatgaggtagagagagcattgagactgagagcttaa

SEQ ID NO: 769150 - DNA, 120 bp, Artificial Sequence
  ENSG00000232040_0 (sequence is synthesized)
acagctgcgggtgtgtctgcggaacctccacctgagctgtagagtgtttccctcgacccactagtctgggttccacagggtctgagctcctcagaggtgggagctgcggccgagggaagg

SEQ ID NO: 769151 - DNA, 120 bp, Artificial Sequence
  ENSG00000232040_1 (sequence is synthesized)
gtgcatgtgcgcggcgacaatcgggcctcttccccaggcagcttgtgagcccctctccctctccgccctcgcccaggctgctccgatcttcgtttccttgcctaggctcatacacccagg

SEQ ID NO: 769152 - DNA, 120 bp, Artificial Sequence
  ENSG00000232040_2 (sequence is synthesized)
ctttatttagggccaaagtatccgtcataacctcggttttctgtctcgcaagtatcttgccgctcaatttgtgaccctgaagctttagtgagtcgctctgtgctcactatttctggtctt

SEQ ID NO: 769153 - DNA, 120 bp, Artificial Sequence
  ENSG00000232040_3 (sequence is synthesized)
ttcagaggatggcttcactttcaatggaattgcccgagtaactgccctgtgttgtcacgtaaacaagtccttttaaactgagtctgtagttgtcctgtgttgagtgttttcttatatcaa

SEQ ID NO: 769154 - DNA, 120 bp, Artificial Sequence
  ENSG00000232040_4 (sequence is synthesized)
aaactttcctgaccaagaacaaaaaaggagctcaagtaaaatcacccatttgcctagaccccaactggagagaacctttgcctgagctgtctaagctcgggatggaagcagtctctaggg

SEQ ID NO: 769155 - DNA, 120 bp, Artificial Sequence
  ENSG00000232040_5 (sequence is synthesized)
tcttcccagccttggctggccaggctccagaagaacaaggggagattatcaaagtaaaggttaaagaagaagaccacacttgggatcaggaatcagccctacgtaggaatttgtcttata

SEQ ID NO: 769156 - DNA, 120 bp, Artificial Sequence
  ENSG00000232040_6 (sequence is synthesized)
ccagggaactctctcgtcagcgcttcaggcagttctgctatcaggagacacctgggcccagggaggctctgagtcaactgcgggaactttgccgtcagtggctgaacccagagatacata

SEQ ID NO: 769157 - DNA, 120 bp, Artificial Sequence
  ENSG00000232040_7 (sequence is synthesized)
ccaaggagcagatcctggaattgttggtgctggagcagttcctgaccatcctgcctgaggagctccagtcttgggtgcgggagcataatcctgagagtggagaagaggtggtgactttgc

SEQ ID NO: 769158 - DNA, 120 bp, Artificial Sequence
  ENSG00000232040_8 (sequence is synthesized)
tggaagatttggagagggagcttgatgaacctagacagcaggtctcacagggcacatatgggcaggaagtttctatggaagaaatgatccctctggattctgcaaaggagtctttaggca

SEQ ID NO: 769159 - DNA, 120 bp, Artificial Sequence
  ENSG00000232040_9 (sequence is synthesized)
cccagcttcagtctatggaagatagaatggaatgtgaatctccagagccacacccacttcaagataatgggtcatttttgtggttttccatgatgtctcaaagcatgggtggtgataacc

SEQ ID NO: 769160 - DNA, 120 bp, Artificial Sequence
  ENSG00000232040_10 (sequence is synthesized)
tcagtagcttagatactaatgaagcagaaattgaaccagaaaacatgagagaaaagttcttcagaagcttagcaaggttactggaaaacaaaagtaataatactaagatattttctaaag

SEQ ID NO: 769161 - DNA, 120 bp, Artificial Sequence
  ENSG00000232040_11 (sequence is synthesized)
caaagtactgtcagttgataaaggaagtgaaagaagctaaagctaaggcgaaaaaggaatcagttgactaccgtcgcttggctagatttgatgttatccttgtacaaggaaatgagaagc

SEQ ID NO: 769162 - DNA, 120 bp, Artificial Sequence
  ENSG00000232040_12 (sequence is synthesized)
taattgaggctgtaaatggggaaacagataaaatacggtattacttacacagtgaggacttatttgacattctgcataatacacatctcagcattggacatggtggacgtactcgcatgg

SEQ ID NO: 769163 - DNA, 120 bp, Artificial Sequence
  ENSG00000232040_13 (sequence is synthesized)
agaaagagttacaagcgaaatacaagaacatcacaaaagaagttataatgctgtatctgaccctctgtaaaccatgccaacagaaaaattcaaaactcaagaaggttctaacatcaaaat

SEQ ID NO: 769164 - DNA, 120 bp, Artificial Sequence
  ENSG00000232040_14 (sequence is synthesized)
caattaaggaagttagttcaagatgccaagtagatcttatagacatgcagttgaatcctgatggggagtacagatttattttgcattatcaagatctctgtacaaagttaacttttttgc

SEQ ID NO: 769165 - DNA, 120 bp, Artificial Sequence
  ENSG00000232040_15 (sequence is synthesized)
ggtcattaaagtctaaaaggcctacggaagttgcacatgctcttttagatatatttacaattattggagcacccagtgtcctacaatctgacaatgggagggaattttcaagccaggttg

SEQ ID NO: 769166 - DNA, 120 bp, Artificial Sequence
  ENSG00000232040_16 (sequence is synthesized)
tcagtgaactcagtaatatttggccagaattgaaaattgtccatgggaagtctcagacctgccaaagccagagttctgcagaacaaactgaggatatccgaaagaggattttctcctgga

SEQ ID NO: 769167 - DNA, 120 bp, Artificial Sequence
  ENSG00000232040_17 (sequence is synthesized)
tgcaaactaacaactcatcacactggactgaatttttgtggttcattcagatgtcccaaaatcagccctatcacagaagcatgcaacagactccatgtgaaagtgcatttagctctgaag

SEQ ID NO: 769168 - DNA, 120 bp, Artificial Sequence
  ENSG00000232040_18 (sequence is synthesized)
ctaaactgggcttgtcccattctcagctaactgaagaacttgttgccagcttgcatacagaaaatgaattagatcaggctgacaaagagttagaaaatactttaagagcccagtatgaag

SEQ ID NO: 769169 - DNA, 120 bp, Artificial Sequence
  ENSG00000232040_19 (sequence is synthesized)
aaaacattgagactggaacagacagtagtgatattgaagagaatctttctgtcactcctaaggtggctgaaaaaagccctcctgagagcagactaagatttttatcctgtgtagtttgtg

SEQ ID NO: 769170 - DNA, 120 bp, Artificial Sequence
  ENSG00000232040_20 (sequence is synthesized)
aaaaagaatgcacaggtgttaatagttgtatatcatgtgatggaaatatccatgcaatttgtggagtgccctctcaacatgggactgagggctgtggtcggcaaataacttgtagccttt

SEQ ID NO: 769171 - DNA, 120 bp, Artificial Sequence
  ENSG00000232040_21 (sequence is synthesized)
gctatgaaaccagcacaatgaagaggaaacatgatgagattcaaagaagtttgcctgttaaaccttccaaaatgctaaagccatcagggacaccattttcaccagacaaagtaggagact

SEQ ID NO: 769172 - DNA, 120 bp, Artificial Sequence
  ENSG00000232040_22 (sequence is synthesized)
ggatggcgaaacaagcttcactggacttttttgtcaagaaaagacatgccttttctgaacacagtagtagtaataaaagaaatgttaacaatagaagttatcctgaagaagggaaaacca

SEQ ID NO: 769173 - DNA, 120 bp, Artificial Sequence
  ENSG00000232040_23 (sequence is synthesized)
aaagagttcatgctagtttcactcggaaatatgatccttcatatattgagtttggttttgtagctgtaattgatggtgaagtactaaaaccacagtgtattatttgtggagatgtactgg

SEQ ID NO: 769174 - DNA, 120 bp, Artificial Sequence
  ENSG00000232040_24 (sequence is synthesized)
agaaataagttcacaaccaaaagaattctttgaaagaaagagtagtgaattgaaaagccaaccaaagcaggtgttcaacgtttctcatataaacattagtgctttgcgggcttcatataa

SEQ ID NO: 769175 - DNA, 120 bp, Artificial Sequence
  ENSG00000232040_25 (sequence is synthesized)
agtagcacttccggttgccaagtctaaaacaccatacacaattgctgagacactagtgaaagactgcatcaaagaagtttgcttggaaatgttgggtgaatctgcagcaaagaaggtagc

SEQ ID NO: 769176 - DNA, 120 bp, Artificial Sequence
  ENSG00000232040_26 (sequence is synthesized)
tcaggtaccactttccaatgacaccatagctcgacgtattcaggaactggctaatgatatggaagatcaactcatagaacaaataaaactagcaaagtatttttcattgcaacttgatga

SEQ ID NO: 769177 - DNA, 120 bp, Artificial Sequence
  ENSG00000232040_27 (sequence is synthesized)
atgcagagatattgctaacatgataattcttttagtctatgtgaggtttgaacatgatgatgatataaaggaagagttctttttttcagcctctttgcctacaaacacaactagctcaga

SEQ ID NO: 769178 - DNA, 120 bp, Artificial Sequence
  ENSG00000232040_28 (sequence is synthesized)
actgtatgaagctgtaaagaattatattgttaacaaatgtggtttggaatttaaattttgtgtaggagtatgttctgatggtgcagcttcaatgacaggaaaacattctgaagtggtaac

SEQ ID NO: 769179 - DNA, 120 bp, Artificial Sequence
  ENSG00000232040_29 (sequence is synthesized)
ccagattaaggaacttgcgccagaatgtaaaacaacacattgcttcattcatcgagaaagtcttgccatgaaaaaaatatcagctgaactaaatagtgtacttaatgatatagtaaaaat

SEQ ID NO: 769180 - DNA, 120 bp, Artificial Sequence
  ENSG00000232040_30 (sequence is synthesized)
tgtgaattatataaaatctaattcattgaattcaagattattctctttattatgtgataatatggaagctgatcataagcaactgttactgcatgctgagatacggtggttatcacgggg

SEQ ID NO: 769181 - DNA, 120 bp, Artificial Sequence
  ENSG00000232040_31 (sequence is synthesized)
aaaagttctgtcaagaatgtttgaaatacgaaatgaactcttagtgtttctgcaaggcaagaaacccatgtggtcccaactttttaaagatgtgaattggacagccagacttgcttattt

SEQ ID NO: 769182 - DNA, 120 bp, Artificial Sequence
  ENSG00000232040_32 (sequence is synthesized)
gtctgatatcttcagtatttttaatgatcttaatgcttctatgcaagggaagaatgcaacttatttttcaatggcagataaagttgaaggacaaaaacagaagttagaagcttggaaaaa

SEQ ID NO: 769183 - DNA, 120 bp, Artificial Sequence
  ENSG00000232040_33 (sequence is synthesized)
cagaatttctacagattgttatgacatgtttcataatttaacaacaattatcaatgaagtaggtaatgatcttgatattgcacatctgcgaaaagttatcagtgaacatcttacaaattt

SEQ ID NO: 769184 - DNA, 120 bp, Artificial Sequence
  ENSG00000232040_34 (sequence is synthesized)
gttagaatgttttgaattttattttccatcaaaagaagatccacgcataggaaatttgtggatccaaaatccatttctttcatcaaaagataacttaaatttaactgtaactctacagga

SEQ ID NO: 769185 - DNA, 120 bp, Artificial Sequence
  ENSG00000232040_35 (sequence is synthesized)
taagttgttgaagctggctaccgacgaaggattgaaaatcagttttgaaaatacagcatcacttccttcattttggataaaagctaaaaatgactatcctgagcttgctgagattgcttt

SEQ ID NO: 769186 - DNA, 120 bp, Artificial Sequence
  ENSG00000232040_36 (sequence is synthesized)
aaaattgctgcttcttttcccctcaacatacctctgtgagaccggattctctactttaagtgttattaaaacaaaacatagaaacagtttaaatatacattatcccctgagggtagcatt

SEQ ID NO: 769187 - DNA, 120 bp, Artificial Sequence
  ENSG00000232040_37 (sequence is synthesized)
gtcatcaatccaacctagattagacaaattaacaagcaagaagcaagctcacttatcacattaaaagctttaaatattgatatgtaaggtattggttcaaagtatgcatataagcattga

SEQ ID NO: 769188 - DNA, 120 bp, Artificial Sequence
  ENSG00000232040_38 (sequence is synthesized)
gtgtgaggaatttgctatttcactttaaactttctgtctagttacagttatggaagtatgagaagttatgagtgaaacagcaattttctatataaattgcctatatgtatattttcaatt

SEQ ID NO: 769189 - DNA, 120 bp, Artificial Sequence
  ENSG00000232040_39 (sequence is synthesized)
tttgtcgtatttattaaaatataattttaaatctgttgattctaatattaaaacatttgatcttatattttgtgtcttcttcttgtatttcattagcatgttaagattgtaggacaactt

SEQ ID NO: 769190 - DNA, 120 bp, Artificial Sequence
  ENSG00000232040_40 (sequence is synthesized)
tcttgtatttcattagcatgttaagattgtaggacaacttcaggatgggagatggtttctttgaaatagacaaggtcagtgaaaggaagtgaattcaaaggggtaggcttagaattcaaa

SEQ ID NO: 769191 - DNA, 120 bp, Artificial Sequence
  ENSG00000232040_41 (sequence is synthesized)
tgcaggggacaggtcagtagggtatgaagtttgttaaactgatccagagtggttaggttggaagttgatgttgtttgttttgtaggtgcatgtttagacaaagatggaagggaacactta

SEQ ID NO: 769192 - DNA, 120 bp, Artificial Sequence
  ENSG00000232040_42 (sequence is synthesized)
ggtgcatgtttagacaaagatggaagggaacacttattttgtaatggtgttatggccttggattcatattgataaatttatttacttatttatttttgaggcagggtcttgctctgttgc

SEQ ID NO: 769193 - DNA, 83 bp, Artificial Sequence
  ENSG00000232040_43 (sequence is synthesized)
ttgcccaggctggagtgcattggtgcaatctctgctcactgcaacctgtccgagtaactgagattacaggcacccaccaccat

SEQ ID NO: 769194 - DNA, 76 bp, Artificial Sequence
  ENSG00000232040_44 (sequence is synthesized)
tgacctgctgcgcccggccgataaattctgatttcataaggatgggcgattgggccatactgacaagtttatgtta

SEQ ID NO: 769195 - DNA, 120 bp, Artificial Sequence
  ENSG00000232040_45 (sequence is synthesized)
taaggatgggcgattgggccatactgacaagtttatgttaggtggtttctagattttgctagaactgattgcctttaaggtgctctgggacaaagtcagaaattattggcacctcaatta

SEQ ID NO: 769196 - DNA, 120 bp, Artificial Sequence
  ENSG00000232040_46 (sequence is synthesized)
gatttaacaacctctattttgtttggagatgattcagaaaaatgccacaaatatctgctcttgtgtctgtgaactcatttagaataatcgaaagcaaattagtccgataaaacaggttct

SEQ ID NO: 769197 - DNA, 120 bp, Artificial Sequence
  ENSG00000232040_47 (sequence is synthesized)
ttagcatcaaaacatgacagaatccatgaagaaaatatcttttcctagacagggtagcaatttacagtaagtgcttcgtttcaaataaatgtgatattcaaagttaaggaaaggaaggct

SEQ ID NO: 769198 - DNA, 120 bp, Artificial Sequence
  ENSG00000232040_48 (sequence is synthesized)
atttagtgattcagaatgttactaataatttaaccttttggtaatggaagtttcaaggatcctccaaacctttgaaagtagaggaaaggttcatatttagtcctgaaaccttaattggat

SEQ ID NO: 769199 - DNA, 120 bp, Artificial Sequence
  ENSG00000232040_49 (sequence is synthesized)
gcagttttttgtattccagaaaaggagcaagcagagggttttgcaagtgccatagaagtgtgcttgtgataaaatttctgctagtgagtataaaagaagaaaagctttaacaattgaaga

SEQ ID NO: 769200 - DNA, 120 bp, Artificial Sequence
  ENSG00000232040_50 (sequence is synthesized)
ggatgaggacgagtagaacggtaacggccatggggcggttggccttccttctaccagaccttgatgtgggaagagagaaatggagtaacaagccacatttggcgctttggagatgcccac

SEQ ID NO: 769201 - DNA, 120 bp, Artificial Sequence
  ENSG00000232040_51 (sequence is synthesized)
cacgctttgggaagatgtaccagcgtttatagaaggcccgagtgtataaggatatattcctagacgtgggactgctggatcataagggcacacctttccctcaccttgacacctcacatt

SEQ ID NO: 769202 - DNA, 120 bp, Artificial Sequence
  ENSG00000232040_52 (sequence is synthesized)
tcccacctcattctaacagctaaattagtgtctataaggaattttccagaccttccgggtttcatcaactctatctccaattcaatcctcgtctacacacacagttcaggggaggcaaga

SEQ ID NO: 769203 - DNA, 120 bp, Artificial Sequence
  ENSG00000232040_53 (sequence is synthesized)
tagcggctacattttctgttcttgaccttcagctccaagggactgtttcccggatgcttcggaccgagtgtttggtagtgtctggggaggactcggtcagggagccccctcctttcaccc

SEQ ID NO: 769204 - DNA, 120 bp, Artificial Sequence
  ENSG00000232040_54 (sequence is synthesized)
tggtactaggagctgaagaggcgagatgccaggcgaacggctgaaggcagaggtctttttacccccatctcccttgtctcccacacaagttgtagggcccctccaccgtgtctggtcctg

SEQ ID NO: 769205 - DNA, 120 bp, Artificial Sequence
  ENSG00000232040_55 (sequence is synthesized)
aattgggaatgccagctcccagcgcggcgaggcccaggtccggtcctaggtgagtttttctctccggctggaagactcgacgccgtggataccagggacccgagccctccggggctgctg

SEQ ID NO: 769206 - DNA, 120 bp, Artificial Sequence
  ENSG00000232040_56 (sequence is synthesized)
aggggactagagaaagcagatgagggtgaattgtctcatcaagatgggggatagggaaaaggggcgagaagtaacccggggcgcaaggtccacagcgaaaaaaaaaaaaaaaaacaaaca

SEQ ID NO: 769207 - DNA, 120 bp, Artificial Sequence
  ENSG00000232040_57 (sequence is synthesized)
aacaaacaaaagaaacacgcccgagaccaaggctcagccactttacacgcaggacttggttgtggcagcgaggagggcttcgaacctaggaaattttgaggaagcgtttgtctccatcac

SEQ ID NO: 769208 - DNA, 120 bp, Artificial Sequence
  ENSG00000232040_58 (sequence is synthesized)
aggaattgggtttccacgttgctgctggagcttttcgtaagtcgataagagcagcatctttctctttgtctccaaacccgtgaatttgatacgctttgaaagcgttcttctaggcgaaag

SEQ ID NO: 769209 - DNA, 120 bp, Artificial Sequence
  ENSG00000232040_59 (sequence is synthesized)
agcttggtactttcatgcttggatagaaggggagagttcaataccgtgcacgcgaccacaaagttgttttcgacgagaattcgatgggaagcggaggaacgaatttttcccacattcaga

SEQ ID NO: 769210 - DNA, 120 bp, Artificial Sequence
  ENSG00000232040_60 (sequence is synthesized)
ggccaagccaggaactgtaaaacgttcacctttgaaaggtcccaccgagattcgaactcggattgctggattcaaagtccagagtgctaaccattacaccatgggaccaaccacaagggt

SEQ ID NO: 769211 - DNA, 120 bp, Artificial Sequence
  ENSG00000232040_61 (sequence is synthesized)
acagtagagatttctaaaagagatgttctgattattcaaagactctctactcagaaatgccaaaatgtgagaaatcaacatgaggaccacagcagaaggaaacagagaatggagaaggga

SEQ ID NO: 769212 - DNA, 120 bp, Artificial Sequence
  ENSG00000232040_62 (sequence is synthesized)
ccaaaatgtgagaaatcaacatgaggaccacagcagaaggaaacagagaatggagaagggaaccaggcagcaattcaacaaatattccttgggcatctctgcgctaccagaggtcgctgc

SEQ ID NO: 769213 - DNA, 120 bp, Artificial Sequence
  ENSG00000232040_63 (sequence is synthesized)
tatcacggtgacaggaaaacacagaccagcagcatctactccagcactactcacactgtggaactcttttcaccgtgatgccagataactaggtctcacagggcacatatgggcaggaag

SEQ ID NO: 769214 - DNA, 120 bp, Artificial Sequence
  ENSG00000232040_64 (sequence is synthesized)
acatcggggagtctttctaccttttttccaaccccgttttgacccattgctgcatatctcagcaatgcaataattccaaaccccagataaagaactagagagaaatgaaagcgtctcttt

SEQ ID NO: 769215 - DNA, 120 bp, Artificial Sequence
  ENSG00000232040_65 (sequence is synthesized)
gctgtccggcatatttcagaagcaaaaatgtataaggaatcacagagccggtttattgttcgttgtagtttgtttgctaatttctggcacctcccagaaaacaggaatctctggagatgt

SEQ ID NO: 769216 - DNA, 120 bp, Artificial Sequence
  ENSG00000232040_66 (sequence is synthesized)
acctcccagaaaacaggaatctctggagatgttctcatcaggagaaggaataatccggtccctccaaagggagaacacagaggagctagctggagccaggctggagtgcaatggcgagat

SEQ ID NO: 769217 - DNA, 120 bp, Artificial Sequence
  ENSG00000232070_0 (sequence is synthesized)
ggcgattatagagatagttaatgtcggccgtataagaaacattattaaagttactcttcggtcctttccgttcttgataaacaattcctgcgccttcctctcgaattctattttccattc

SEQ ID NO: 769218 - DNA, 120 bp, Artificial Sequence
  ENSG00000232070_1 (sequence is synthesized)
ctcaagtcactttaatggctcttcaatacaacaaatatttactgagtgcttactaagtgccaggcactgggctcagcgctgtgagggatgagaaagaagtggtaccttccttccaggcga

SEQ ID NO: 769219 - DNA, 120 bp, Artificial Sequence
  ENSG00000232070_2 (sequence is synthesized)
ttgtagtctagactacaaactgccttcctctgccaggacaagtttgtcgtctgctctgagctatcaagccccttaggagacctaggacccagctgggtcccatccctttggagtagctgc

SEQ ID NO: 769220 - DNA, 120 bp, Artificial Sequence
  ENSG00000232070_3 (sequence is synthesized)
ttcagactagcctaggaagcacctaattcttgtgggcaaaggagccatggaagatagagctggtgagcaagagcaggagagacacagccttcgtctggaaaagctacaacactgggcaag

SEQ ID NO: 769221 - DNA, 120 bp, Artificial Sequence
  ENSG00000232070_4 (sequence is synthesized)
gcacaggcagagtgggcacctcttggtgctagcggtgagccagctatggctggcagtggttgtggtgccccttgctgtctcagtcgcctgcctgaactctgattgtcacatggccacagc

SEQ ID NO: 769222 - DNA, 120 bp, Artificial Sequence
  ENSG00000232070_5 (sequence is synthesized)
gctgcctcttgggcctggagcctcaggtctcctcactgggactgtcactctggagcttcgcagagcaccccgcctttggaaggtgcgggccatgatgatattcaacaccttcaacttgat

SEQ ID NO: 769223 - DNA, 120 bp, Artificial Sequence
  ENSG00000232070_6 (sequence is synthesized)
tggtgctggaactcagtgctgaggccttcaccctagggggagtgctggtctcagtgcacgccctattcttgctgagccagaggaaaccaggatgctgcaggagccagagtctgcactatc

SEQ ID NO: 769224 - DNA, 120 bp, Artificial Sequence
  ENSG00000232070_7 (sequence is synthesized)
aagagctgcaggagggcttctctgagttggaagaggttcctggtttggagaatggtcccacggtggccagcacaggagcaaatgagagggtgggacagcgggaacagacacgtgctgctc

SEQ ID NO: 769225 - DNA, 120 bp, Artificial Sequence
  ENSG00000232070_8 (sequence is synthesized)
tccttccaccctgagagaatgctctccagacattcctgcatcccaccccaccaaactcagaagcttgctgggatccttcgagtccaataggaagtccgggagtgccttcagttttcactc

SEQ ID NO: 769226 - DNA, 120 bp, Artificial Sequence
  ENSG00000232070_9 (sequence is synthesized)
aaagcaggcccttttttcgttccttccctgttaggggaagatacacctggacgagaatatatcctcacctcaccaccctgaaaagctgctttctcccttgcatccatatcctctcttcct

SEQ ID NO: 769227 - DNA, 120 bp, Artificial Sequence
  ENSG00000232070_10 (sequence is synthesized)
gtcacctccccatacagcttcacatttgcctcatcgcacttttcttttctgtccacctttcataatcccatccactccaaatcccggaccctgcacacgccaactccctgaatccaattc

SEQ ID NO: 769228 - DNA, 120 bp, Artificial Sequence
  ENSG00000232070_11 (sequence is synthesized)
aggagtgccccagttcccctttcgatccatctcctttctactgtagcggagactacaagtcccaggatgccccgctagcccgtgaccggctaggaaataaagagccttctctccgcggta

SEQ ID NO: 769229 - DNA, 120 bp, Artificial Sequence
  ENSG00000232070_12 (sequence is synthesized)
catagaaataaacaaggcaagacccttaatctcccaagtagcttccatcttgtgggggaaaacatacaggtaagtaactaaactacaatatgaggcagaaaaaattaaatgatacttaat

SEQ ID NO: 769230 - DNA, 120 bp, Artificial Sequence
  ENSG00000232070_13 (sequence is synthesized)
ttttaatgatcacgtccttgctctgggttgactgctttcctccaccctgcattcaatcccatttcctgatctctaaagaggtaggagttacgagaagggagggaatccctgacagttcct

SEQ ID NO: 769231 - DNA, 120 bp, Artificial Sequence
  ENSG00000232112_0 (sequence is synthesized)
gtttccggtggcagggtctggggaagcggcggcaggcgccatgtccggccgcgaaggtggcaagaagaagccactgaaacagcccaagaagcaggccaaggagatggacgaggaagataa

SEQ ID NO: 769232 - DNA, 120 bp, Artificial Sequence
  ENSG00000232112_1 (sequence is synthesized)
ggctttcaagcagaaacaaaaagaggagcagaagaaactcgaggagctaaaagcgaaggccgcggggaaggggcccttggccacaggtggaattaagaaatctggcaaaaagtaagctgt

SEQ ID NO: 769233 - DNA, 120 bp, Artificial Sequence
  ENSG00000232112_2 (sequence is synthesized)
cgtatagctggaattaagtgttgtcttggagctgttgtacatttaagaataaacttttgtaaaaaaagaaaaatcttacagtggctcatcatctctttagttgttttcactaagtcgttc

SEQ ID NO: 769234 - DNA, 120 bp, Artificial Sequence
  ENSG00000232112_3 (sequence is synthesized)
ctaccataactgtgaatttaaagtaaaaccagctcagaatcttgccagagtctgttctttggtccttgttctaccctaaactttgtatcacctgaaattaaaccaactcatttgaaagga

SEQ ID NO: 769235 - DNA, 120 bp, Artificial Sequence
  ENSG00000232112_4 (sequence is synthesized)
gtttccggtggcagggtctggggaagcggcggcaggcgccatgtccggccgcgaaggtggcaagaagaagccactgaaacagcccaagaagcaggccaaggagatggacgaggtgagggc

SEQ ID NO: 769236 - DNA, 120 bp, Artificial Sequence
  ENSG00000232112_5 (sequence is synthesized)
gggcgcggaggcactggcgggtgcgggggcgctgggagacaggcctgagttgaacacgctctgcctctccccaggaagataaggctttcaagcagaaacaaaaagaggagcagaagaaac

SEQ ID NO: 769237 - DNA, 120 bp, Artificial Sequence
  ENSG00000232112_6 (sequence is synthesized)
acctattgggatgagggcgcgggcatgtctttttcctgcctcctgaactgcgaggtctcgttttccgacgtccgctgcagcgaatggtctctagccagtctaggatttgcagcggcagta

SEQ ID NO: 769238 - DNA, 120 bp, Artificial Sequence
  ENSG00000232112_7 (sequence is synthesized)
agggccgggagctggaaacgaggtctcctgcctcccaggcagtctgggcttccattccttaggaagagctgcagaaacggaaacagtgaaatgtatttacctcagacgcagattcacagt

SEQ ID NO: 769239 - DNA, 120 bp, Artificial Sequence
  ENSG00000232112_8 (sequence is synthesized)
taagtttctcaaagtctgacgtcgtccgcaatcttttgccccaaattcgtatttcactgccttctagtgtttgaaccttacttgacttagaagtttttttgttttgttttgttttgtttg

SEQ ID NO: 769240 - DNA, 120 bp, Artificial Sequence
  ENSG00000232112_9 (sequence is synthesized)
ggcggcaggcgccatgtccggccgcgaaggtaagtgttccggaaccgtgaggactgcggggacggcggggtggggaccgggcggcaggggcaggccgaacgtgctcgtgtcgcccacagg

SEQ ID NO: 769241 - DNA, 120 bp, Artificial Sequence
  ENSG00000232113_0 (sequence is synthesized)
atattttgctgactggcaaggttatatgaagtgcttttattgaagcaccattttaactaatagctcctggtattttctgcttcccttcgtagggaatttagttattttattttattattt

SEQ ID NO: 769242 - DNA, 120 bp, Artificial Sequence
  ENSG00000232113_1 (sequence is synthesized)
agctaatttagctattttaaaatagctaaattttagctacttttttttcaattgacaaagaaggatgtctaatcaaagactaccgctgattttttctctgttgtttatctgcttcttcgg

SEQ ID NO: 769243 - DNA, 120 bp, Artificial Sequence
  ENSG00000232113_2 (sequence is synthesized)
ggagagtttctgcatttgtgatggaactgtctggacaaaggttggatgggagattcttccagaagaagtacattattggaaagttaagggttctccatctcactgcctgccttatcttct

SEQ ID NO: 769244 - DNA, 120 bp, Artificial Sequence
  ENSG00000232113_3 (sequence is synthesized)
tatttgttttgtctgtgcattacctgtggaagaaatggaagaaacaccaaaaaaagctgaaaaagcaagcctccttagaaaaacctggtaatgatctagaaagcccattgatcaacaaca

SEQ ID NO: 769245 - DNA, 120 bp, Artificial Sequence
  ENSG00000232113_4 (sequence is synthesized)
ttgaccaaacactccacagagtggcaaccacagcatcagtgatatacaagatctgggagcacaggtctcaccatccttcctctaagaaaattaagcactgcaaattaaagaagaagagta

SEQ ID NO: 769246 - DNA, 120 bp, Artificial Sequence
  ENSG00000232113_5 (sequence is synthesized)
aagaagaaggagccagaagatactaaataaatgcatatgcaaatgtagcttagtcaattatagatatcacaaaagaaatctatcatctaaggattaaaaattgttctttggaaaccttta

SEQ ID NO: 769247 - DNA, 120 bp, Artificial Sequence
  ENSG00000232119_0 (sequence is synthesized)
gttttccggataacgactacagctccgactgtcagtgccggccttcctcgtgtgaggggatctgccggacccctgcaaattcaatttctttcccattccgggcccttccctatcgtcgcc

SEQ ID NO: 769248 - DNA, 120 bp, Artificial Sequence
  ENSG00000232119_1 (sequence is synthesized)
cccttcaccttggatcatgttcaagaaatttgatgaaaaagaaaatgtgtccaactgcatccagttgaaaacttcagttattaagggtattaagaatcaattgatagagcaatttccagg

SEQ ID NO: 769249 - DNA, 120 bp, Artificial Sequence
  ENSG00000232119_2 (sequence is synthesized)
tattgaaccatggcttaatcaaatcatgcctaagaaagatcctgtcaaaatagtccgatgccatgaacatatagaaatccttacagtaaatggagaattactcttttttagacaaagaga

SEQ ID NO: 769250 - DNA, 120 bp, Artificial Sequence
  ENSG00000232119_3 (sequence is synthesized)
agggcctttttatccaaccctaagattacttcacaaatatccttttatcctgccacaccagcaggttgataaaggagccatcaaatttgtactcagtggagcaaatatcatgtgtccagg

SEQ ID NO: 769251 - DNA, 120 bp, Artificial Sequence
  ENSG00000232119_4 (sequence is synthesized)
cttaacttctcctggagctaagctttaccctgctgcagtagataccattgttgctatcatggcagaaggaaaacagcatgctctatgtgttggagtcatgaagatgtctgcagaagacat

SEQ ID NO: 769252 - DNA, 120 bp, Artificial Sequence
  ENSG00000232119_5 (sequence is synthesized)
tgagaaagtcaacaaaggaattggcattgaaaatatccattatttaaatgatgggctgtggcatatgaagacatataaatgagcctcagaaggaatgcacttgggctaaatatggatatt

SEQ ID NO: 769253 - DNA, 120 bp, Artificial Sequence
  ENSG00000232119_6 (sequence is synthesized)
gtgctgtatctgtgtttgtgtctgtgtgtgacagcatgaagataatgcctgtggttatgctgaataaattcaccagatgctaaaattctgttagcttcagaaattattttaagttttctt

SEQ ID NO: 769254 - DNA, 120 bp, Artificial Sequence
  ENSG00000232119_7 (sequence is synthesized)
aaactcaagttaaaattgggtagcaaacttggacattaaaaggtatctggtaagtaagcaaactcatacaactaatgtcctttcttaggctaatgatataagagtgaagagcaggacttg

SEQ ID NO: 769255 - DNA, 120 bp, Artificial Sequence
  ENSG00000232119_8 (sequence is synthesized)
gtcaatggattgccattttatggtagacctctagagaaactgtctagttaaatggggctagaaactagactaggaattttattctattactccaggggacccagcagtgctcattctcgt

SEQ ID NO: 769256 - DNA, 120 bp, Artificial Sequence
  ENSG00000232119_9 (sequence is synthesized)
gtgtgtgtgtgtgtgtgtgtgttttgttgattgtttttttaaaaaaaacttcaatggaaaattctaaacatattaagaagtctggagaatagtataatggacctctccatatccatcacc

SEQ ID NO: 769257 - DNA, 120 bp, Artificial Sequence
  ENSG00000232119_10 (sequence is synthesized)
tataatggacctctccatatccatcacccagtttcagtttatggtcagtcttatttcatctatacctcaattatttctccccaccccccaattattttgaagcaaatcccagacatccta

SEQ ID NO: 769258 - DNA, 66 bp, Artificial Sequence
  ENSG00000232119_11 (sequence is synthesized)
ccaccccccaattattttgaagcaaatcccagacatcctatcatttcatccataactactttattc

SEQ ID NO: 769259 - DNA, 64 bp, Artificial Sequence
  ENSG00000232119_12 (sequence is synthesized)
cttggcctcaagtgatccgtatttttatatattttatagttggccaggctggtcttgaactcct

SEQ ID NO: 769260 - DNA, 120 bp, Artificial Sequence
  ENSG00000232119_13 (sequence is synthesized)
gattataggcatgagtcaccatgcctggcgtcataactactttagtgtgtatctttaaaaattagaaaaaccccacaataccattatcacacctaaaaagttgaactgtttcttaatatg

SEQ ID NO: 769261 - DNA, 120 bp, Artificial Sequence
  ENSG00000232119_14 (sequence is synthesized)
ccattatcacacctaaaaagttgaactgtttcttaatatgatcaactgtctagactgttaattctctttaactgttggtttgcttgaaataggtaccacacaaggttcatacattgcatt

SEQ ID NO: 769262 - DNA, 120 bp, Artificial Sequence
  ENSG00000232119_15 (sequence is synthesized)
tggttgttatttattgaagtctgtttaatttataagttaccttttcttttcccccttaaattatttaagaaatctagttgttttgtctttaaagtttccacacatattctggattttgtt

SEQ ID NO: 769263 - DNA, 120 bp, Artificial Sequence
  ENSG00000232119_16 (sequence is synthesized)
gattgtatcactgtgaagtcattaacttgtttttatgcctcctgtatatcctgtaaacaaataagattgatcagattcaggttcagtttttttagtgccttcttttgagtaaagtcatac

SEQ ID NO: 769264 - DNA, 120 bp, Artificial Sequence
  ENSG00000232119_17 (sequence is synthesized)
caaacagatgcccagaacatctggatttgggtccccactagactccttaaataatgtatatcttctataagtggaatatgagggacatggacctgctttagtaagaacagtaatctgttt

SEQ ID NO: 769265 - DNA, 120 bp, Artificial Sequence
  ENSG00000232119_18 (sequence is synthesized)
ggggagttaaaagagcagttgtggatttatttattgataaagaccatttttcttcctaataaccttgctgttattctagtgtcttagccatcttcatttggttgtttaccaatatatgac

SEQ ID NO: 769266 - DNA, 120 bp, Artificial Sequence
  ENSG00000232119_19 (sequence is synthesized)
atgtgattttatttttcagatggatacagacatatacaagattgtggtgacctgtgttacagttagaagttggtgagaaaggtgagggtggatagcaaaaagagagagatcatttggctg

SEQ ID NO: 769267 - DNA, 120 bp, Artificial Sequence
  ENSG00000232119_20 (sequence is synthesized)
gctgttccagctgggtctcccaggatgtaacataggtggacatagatccagggtctgaccctcagcttgagaaaccatttcccactgatgaaacttgagagacttggagattccccagtt

SEQ ID NO: 769268 - DNA, 120 bp, Artificial Sequence
  ENSG00000232119_21 (sequence is synthesized)
agaatataaatgtattaattcatagtgataggtctgcctatggtaaacaattaggaaacaggaagttacttggtaaacacaggtatgagcaaaggaagattgataaattggggtaatatt

SEQ ID NO: 769269 - DNA, 120 bp, Artificial Sequence
  ENSG00000232119_22 (sequence is synthesized)
tcagttgtgctgaggtaagacttggagaatttttcctgcttcatcattaattagaatgcttatctctgccaaaatctcatctctttcctagcccatagaggtgccctgatattttatttc

SEQ ID NO: 769270 - DNA, 120 bp, Artificial Sequence
  ENSG00000232119_23 (sequence is synthesized)
ctatatccttttcaagttccatgtagttttccttatgttatgacagttttattctgcagcttaccatattatttattcctggtccacgaaagtataaatagtctcatcaggaactcattt

SEQ ID NO: 769271 - DNA, 120 bp, Artificial Sequence
  ENSG00000232119_24 (sequence is synthesized)
gtaagtcatctcccaggggggtttcttcaacagatagtttaattttttgctgacttactggcttcaaattcagatgtctccctatttgggggaggaggcaccctatttgaggcctgtagc

SEQ ID NO: 769272 - DNA, 120 bp, Artificial Sequence
  ENSG00000232119_25 (sequence is synthesized)
tccttatgttcttaaaaagaatatacaagtcatttatgtcagaatcaaactttgaacctttatttttgttgctaagagaatgttttttgaccaagactgcctatggagtattagcaatga

SEQ ID NO: 769273 - DNA, 120 bp, Artificial Sequence
  ENSG00000232119_26 (sequence is synthesized)
aaaacaaagcacacatatacatacattagagaagtaaaaacttttaatagcttggtttttgaaataattcatctttgtgtctaaccactgttacagtgggtgtaaggaacactttttaaa

SEQ ID NO: 769274 - DNA, 120 bp, Artificial Sequence
  ENSG00000232119_27 (sequence is synthesized)
tattcaacatcaacatctgtgcttgtttttctactgtgctgaggtacactgtgttgccttggtgatatggactaaatatgtatgttctctgcttcccctgggtctgaggcctctgctcat

SEQ ID NO: 769275 - DNA, 120 bp, Artificial Sequence
  ENSG00000232119_28 (sequence is synthesized)
cactgttaatcagggatgtcactctacatgtgtgatccttgtcattttctaaacattaggtcatacatgaaaggcaattcaaagagattaaactagcagatgtgtcagcatctttagata

SEQ ID NO: 769276 - DNA, 120 bp, Artificial Sequence
  ENSG00000232119_29 (sequence is synthesized)
ctgtgcttaatggaaacttagtttacctatattcgtgagaataggaatacagggatagagagcctgcttctctcaggcagtgtgtctttagttcatttttagtttcaaaattaagtttgt

SEQ ID NO: 769277 - DNA, 120 bp, Artificial Sequence
  ENSG00000232119_30 (sequence is synthesized)
gtcaaaccaacctacaatctagtaacttgtgtattggactcacttttactcagacaaggtcagttcagctcaataggtatttattgagtatctactaggttctaagtgacgtggcatgaa

SEQ ID NO: 769278 - DNA, 120 bp, Artificial Sequence
  ENSG00000232119_31 (sequence is synthesized)
gatgaataatacagaagtagcccttgctcttaaggagcttccaatctagtgagtaaagaaaatttacattttaaataatctgggtaatggtgacagcccaatactaatatgtaaagccag

SEQ ID NO: 769279 - DNA, 120 bp, Artificial Sequence
  ENSG00000232119_32 (sequence is synthesized)
taggaatgtactaatccttttccaattttagtcatcaaaaattgtaaattacaaatgaactaaatgtagtaatattccatagattgtatccaatgtgagggtaaaaaaaaaatcccagat

SEQ ID NO: 769280 - DNA, 120 bp, Artificial Sequence
  ENSG00000232119_33 (sequence is synthesized)
gtcttggagttgccgtgattcagcatcccaactcagatgattgtcctgttgtccggtgacataatggcctgatcagttctcttctagcagactgtctgttatggtggtttggtagtggtc

SEQ ID NO: 769281 - DNA, 120 bp, Artificial Sequence
  ENSG00000232119_34 (sequence is synthesized)
tgttgggaagctgcatttttccttttctgtttttatgctctggaccccaaacaaaaacagctggatttatcccatgggtagtcatgaacatttccaatttgagggattttatattcccca

SEQ ID NO: 769282 - DNA, 120 bp, Artificial Sequence
  ENSG00000232119_35 (sequence is synthesized)
aacagaaggttatatggcatatatcaaataataatgatatccagccaggttccctgtcgtacccaaatcagtaactgaagatacgtatttctaagtataatacttcagaggaagagataa

SEQ ID NO: 769283 - DNA, 120 bp, Artificial Sequence
  ENSG00000232119_36 (sequence is synthesized)
gaattacaattcactaaattcgtggaggtgtttcattataataaatatgtcacttattaataatgtagcaattatatattaatggaaatatgaatgtatgcccaagcaaaatgtcataaa

SEQ ID NO: 769284 - DNA, 120 bp, Artificial Sequence
  ENSG00000232119_37 (sequence is synthesized)
tattttaactttgtttgtctaggttccttaattttgagactataattatcaaggctcttcaagaaactcaaaatgattctaatttctaagtagtatgcattaaaactgatatataatgaa

SEQ ID NO: 769285 - DNA, 120 bp, Artificial Sequence
  ENSG00000232119_38 (sequence is synthesized)
tgtatgtattttatactttgtatgaatacttttattacactttttaaggcaggtaaaagaatgagtagatgttatcaactataacaacaatttgttgaatactgtgttaaaaccaagtaa

SEQ ID NO: 769286 - DNA, 120 bp, Artificial Sequence
  ENSG00000232119_39 (sequence is synthesized)
aggaccacaactccacgagatcaggaatgaatgaagaaaattgagggccagtttttaaatcattgttgagactattaggttcatctgtctgtttaagagtctggccttagggaatataat

SEQ ID NO: 769287 - DNA, 120 bp, Artificial Sequence
  ENSG00000232119_40 (sequence is synthesized)
ttatgcatgtaaaaaaatacaggagatgattcactggaatgtctcttaataataccatgttcattaagaataggtcattgggaggaaaaataaataaaaacatctgaactcattagtata

SEQ ID NO: 769288 - DNA, 120 bp, Artificial Sequence
  ENSG00000232119_41 (sequence is synthesized)
attaatacttgcctcttagaatgaaaattaaagaactccaaattttagccttgaatactttgagaaataaaagatgaattagtgaaataatttctacttaaaatcttagttgttacagag

SEQ ID NO: 769289 - DNA, 120 bp, Artificial Sequence
  ENSG00000232119_42 (sequence is synthesized)
aatgacatgcctcactattaatgtccaattctaattaatggattgttttagaaatgtatttgtgaaatatagcaaacatagctagtaatactaacaggtgaaaactgatatttcaaatga

SEQ ID NO: 769290 - DNA, 120 bp, Artificial Sequence
  ENSG00000232119_43 (sequence is synthesized)
ctaaatagacttaagattagaggaaggtaggaaaaggtgtgcaactaacagaagcagttaaccaaaaaatgagcttcaggcatcagtcttatttggaagactgtaaatcaacaggctaac

SEQ ID NO: 769291 - DNA, 120 bp, Artificial Sequence
  ENSG00000232119_44 (sequence is synthesized)
gttcaaaatatggcagacatcttaatatcaatatatgctaaattggtttatctttaggcagaaacagaaagcaaaaaattaaactcatccaactcatacatttgttgttgttgttgttgt

SEQ ID NO: 769292 - DNA, 120 bp, Artificial Sequence
  ENSG00000232119_45 (sequence is synthesized)
gggattacaggtgtgaaccaccacacccgacccaactaatacatttttaaaatcccattttaaaagtaaaaccacagttttcatataacaaatgttattgctcttcatttcattctccaa

SEQ ID NO: 769293 - DNA, 120 bp, Artificial Sequence
  ENSG00000232119_46 (sequence is synthesized)
ctcttcatttcattctccaattttaaaatgctttactttcagccaatatgtgaatataggagacttcaaaagcataatcaattactcccttaaagttcattgtaagtgttctcagaactc

SEQ ID NO: 769294 - DNA, 120 bp, Artificial Sequence
  ENSG00000232119_47 (sequence is synthesized)
taccacctagaatttaaagacgggaagatttactttataattttaatttcttatcacaagactcgattgtcaataactgttaacgtccatttaataatctatggtgaaataggtaatttc

SEQ ID NO: 769295 - DNA, 120 bp, Artificial Sequence
  ENSG00000232119_48 (sequence is synthesized)
ttcttattttcacaagcgtgtgagtaaaagactgggttttaagcaataaatcatttgttctaactaagcacatgcttggaaaaagtgctatttttccaaacgtatgccttgaaaacaaat

SEQ ID NO: 769296 - DNA, 120 bp, Artificial Sequence
  ENSG00000232119_49 (sequence is synthesized)
acaattcaattgcctttttggttcatgggaagccatactgcggtggcttccaaggttggccaacctgtttttattcttaccacctctttcaaaaagggatgttgtctttgtccccaaatt

SEQ ID NO: 769297 - DNA, 120 bp, Artificial Sequence
  ENSG00000232119_50 (sequence is synthesized)
ctggtgttgtcctatgctgatgcataatgaagccctgaggcttggaaacttgcaaaccaataagatgatttaatgatgaaacggcatgtcagtttgacactgtctattaatagtccttga

SEQ ID NO: 769298 - DNA, 120 bp, Artificial Sequence
  ENSG00000232119_51 (sequence is synthesized)
gtgagcttaaatttgagacacttttaaaagcggcatgtagttccagttttgcttcccttatcagtggagcttgagatgtctgttcctgccgactgatgttttaacaaatttttagtttct

SEQ ID NO: 769299 - DNA, 120 bp, Artificial Sequence
  ENSG00000232119_52 (sequence is synthesized)
catgatgtgaaagattttgtatgcacgtcttagtctggatactgttttcattagttctaatgctgctgcatgcaaattttgtttaaaaccaaaattgactcttcacatctggactagatt

SEQ ID NO: 769300 - DNA, 120 bp, Artificial Sequence
  ENSG00000232119_53 (sequence is synthesized)
ggacatggtgaggaggctggaaggaaagtcctttttgctctgtaggctctggacagctttcttagagttgacttatccaggattaagaaaaagttttcttttgcgtgactaaattctttc

SEQ ID NO: 769301 - DNA, 120 bp, Artificial Sequence
  ENSG00000232119_54 (sequence is synthesized)
cacagtttgcttgtgtaagcattttagatttaagcaagttcaacttgaaatatatttgaatatgaagtagaaacagcttcatttaatgggataatagcaatctctaacccatcaaattaa

SEQ ID NO: 769302 - DNA, 120 bp, Artificial Sequence
  ENSG00000232119_55 (sequence is synthesized)
tatctactaaatagcttccaaaaagcactgactggaaaatatttttcactatcatggctttattcagtttcaaaaacagtaggggctaaaatgtttggacatttatcctgcatttatttt

SEQ ID NO: 769303 - DNA, 120 bp, Artificial Sequence
  ENSG00000232119_56 (sequence is synthesized)
gtgtttcacaaggttaaaattttgtattttgtaaagtgtctgaaaaggagtccacaaagtatttctgctttcttgctcctgaatgcaaaggtctgagagaaggcacatcctcattagctt

SEQ ID NO: 769304 - DNA, 120 bp, Artificial Sequence
  ENSG00000232119_57 (sequence is synthesized)
ctgggtgttgtcaaacccaatcctctctcaagtaccaaatgcccagatacatttattgggatgcaggaatctcacttaagtagcggtttttgctgatataaagacaaacatcttgattaa

SEQ ID NO: 769305 - DNA, 120 bp, Artificial Sequence
  ENSG00000232119_58 (sequence is synthesized)
agtgtagggagatagaaactataccaatttgggcaattttggctctaatgtctaatttgttgtgaaaggggaagatgttctaagctaatgttcttaaaagtaacttatgaatttcttaaa

SEQ ID NO: 769306 - DNA, 120 bp, Artificial Sequence
  ENSG00000232119_59 (sequence is synthesized)
aatagtttttaaaaagctgtttcaggaaaagctgttttattgcatggcacagattaaatgtacagatgttatcttaaaacaatgaaagagttcccctaatttgaatattcaataccagct

SEQ ID NO: 769307 - DNA, 120 bp, Artificial Sequence
  ENSG00000232119_60 (sequence is synthesized)
gttattcacatcaatattttaacattttaccatcaagatatttaatacaaaggattgatacatatttaactgtttagaattctagttaaacttgtccagatgagtaagagggaaggagaa

SEQ ID NO: 769308 - DNA, 120 bp, Artificial Sequence
  ENSG00000232119_61 (sequence is synthesized)
ataacattctccaagtacctaccatgtgcacaagctctacttatatatcttgcttaatcttagcaatgattccatgaggtagattttaactctcattttacaaacgaggagactaaggct

SEQ ID NO: 769309 - DNA, 120 bp, Artificial Sequence
  ENSG00000232119_62 (sequence is synthesized)
cagagaggtcatacaacttcaggaaagttgtatgacctctctgaggtaataaatggcagaactggaatttgaacctaagtctccttgtctgcaaatcctgtgttttgcagaaaactctcc

SEQ ID NO: 769310 - DNA, 120 bp, Artificial Sequence
  ENSG00000232119_63 (sequence is synthesized)
tcttgtatttcataaaatgttaaatcttggcccaaattcaaatcaccatctttatgggttattggagagaggtataagttggcaagactctgttccacgatgggaaaaaatgggtaggat

SEQ ID NO: 769311 - DNA, 120 bp, Artificial Sequence
  ENSG00000232119_64 (sequence is synthesized)
ttgaatgagtaagagtgggatacttgcacagtatcatatttgtgtggctggagtaatgtttttctgtttccctcttagcaaagtggagtgggagaatcttgaaattgaactcagtcctga

SEQ ID NO: 769312 - DNA, 120 bp, Artificial Sequence
  ENSG00000232119_65 (sequence is synthesized)
ggtctgattttcctattattagtcactttcaagccaggtgatttgtgaccatttaaatgttatgctatttcaaagtcttctacatctttagaaaaggacatgagggagggttagttaagt

SEQ ID NO: 769313 - DNA, 120 bp, Artificial Sequence
  ENSG00000232119_66 (sequence is synthesized)
gacatgagggagggttagttaagtggggcaatgagaatgtagagtgtaatgtgcaaaagcaggactagcagttgctttgaagatatctggggaaggccgggcacggtggttcacgcctgt

SEQ ID NO: 769314 - DNA, 70 bp, Artificial Sequence
  ENSG00000232119_67 (sequence is synthesized)
caacagagcgaaactccgtctcaaaaaccaaccaaacaaaaaacaaaaattagctgggcatggtggcgcg

SEQ ID NO: 769315 - DNA, 75 bp, Artificial Sequence
  ENSG00000232119_68 (sequence is synthesized)
accaaacaaaaactttgggagccaaggtgggtggatcatgaggtcagaagattgagaccaccctggccaacatgg

SEQ ID NO: 769316 - DNA, 73 bp, Artificial Sequence
  ENSG00000232119_69 (sequence is synthesized)
gatattaaaattaatgacaggaagagtttgggttcagttataatttaagggaaaaaacattgaggggcctaat

SEQ ID NO: 769317 - DNA, 120 bp, Artificial Sequence
  ENSG00000232119_70 (sequence is synthesized)
tcagttataatttaagggaaaaaacattgaggggcctaatctacattttgctccggatccaatgatttaatttttgggaagaaaaatccagtgattaaagtcatgcaaggagatggcctg

SEQ ID NO: 769318 - DNA, 120 bp, Artificial Sequence
  ENSG00000232119_71 (sequence is synthesized)
gggcttgctaaaagtcaggttgcagtttccattgcattcaagaaaatcagaaaaataaatacaacttttagaagaaactaagttttctcccattcatgtttagctattggggggtctcat

SEQ ID NO: 769319 - DNA, 120 bp, Artificial Sequence
  ENSG00000232119_72 (sequence is synthesized)
acttctggacttgcttagacctatgctatctaatatggtagcctctgcccatccatatgtggccactgagaacttgaaatgtgactagtttgaattaagatgtgctgtaactaaaataca

SEQ ID NO: 769320 - DNA, 120 bp, Artificial Sequence
  ENSG00000232119_73 (sequence is synthesized)
ctgtaactaaaatacaccctggatttcaaagacttaataaataatgtaaattatctattctttcctgttgattatatattgaaatgataatattttggatatgtttgggttaaataaaat

SEQ ID NO: 769321 - DNA, 120 bp, Artificial Sequence
  ENSG00000232119_74 (sequence is synthesized)
taagatcctctttctctctcccccgcccctgccatcctgactccctaaggttttctatagtactatgctctcactcccaacttgaacacttctttaagctttccatccgtagtccttaat

SEQ ID NO: 769322 - DNA, 120 bp, Artificial Sequence
  ENSG00000232119_75 (sequence is synthesized)
tgggtttcagtccctccactcccattgttttttctccttacccctctttctcttttgccccctcccccaattctgtctccattcctagggttctaccaatcacatccgtgcactgtgatt

SEQ ID NO: 769323 - DNA, 120 bp, Artificial Sequence
  ENSG00000232119_76 (sequence is synthesized)
tagaggcatattctctgtagctgagaggggagccctgcgctcactgccatatgtttattagttatgaactgaataaaggaaggcttgacttcctgggtcatgggagtgaaggagtctggg

SEQ ID NO: 769324 - DNA, 120 bp, Artificial Sequence
  ENSG00000232119_77 (sequence is synthesized)
tgacaggaagcaagcggcctgtcatgcctattgcctagctgccagattaaccttgccttgaaaataacgattgccccataggctattcagtgtaaggaagacaaaaattccttgggaacc

SEQ ID NO: 769325 - DNA, 120 bp, Artificial Sequence
  ENSG00000232119_78 (sequence is synthesized)
gtgctgggaatataggtgtgagcccatgtgcctggcctattgctgtttataatgtatttattgttaaatggcaggctcccagggtgatttgagagttgccaggagaggaaggccatttgg

SEQ ID NO: 769326 - DNA, 120 bp, Artificial Sequence
  ENSG00000232119_79 (sequence is synthesized)
caagaatcctgacagacaaaagctggaggagggtagagcaagatggcagaatagaaagcgccaccgatcatactccgcccccacaaggacaccaagttaactacctacacagaagaaata

SEQ ID NO: 769327 - DNA, 120 bp, Artificial Sequence
  ENSG00000232119_80 (sequence is synthesized)
tcaggttctacctcccagatgacatttctagacacaccctgggccagaagagaacccacttccttgaaggaaaggatccagtcctggcagcattcatcgcctgctaactgaagatccctt

SEQ ID NO: 769328 - DNA, 120 bp, Artificial Sequence
  ENSG00000232119_81 (sequence is synthesized)
gagaagacacaagaggggttccaagtggcttaactagtaacatgatcattatttgacacccttcccttgatggggaggccccaaggcattttgataaatagttttcttagctgtgttctt

SEQ ID NO: 769329 - DNA, 120 bp, Artificial Sequence
  ENSG00000232119_82 (sequence is synthesized)
aactgctgaaaaatgtattcattgtgctcttatcattactgcgaaaggtgtaccatccaagagaacattagatgtacttttttgaaggctatcatggcagaaggaaaacagcatgctcta

SEQ ID NO: 769330 - DNA, 120 bp, Artificial Sequence
  ENSG00000232125_0 (sequence is synthesized)
ttgcctttttgttcccctgtcctcattcctctgctgcaaaaccttctgcttaaaatactggttcatttctagttacagggacccacttgccatctgtcattccaggaaatttgtgaaatg

SEQ ID NO: 769331 - DNA, 120 bp, Artificial Sequence
  ENSG00000232125_1 (sequence is synthesized)
gatccagataaacaagatgctcttaatagtattgagaattccatttatagaacagccttcaaattacaatcagtgcaaactctgtgccagttggacttgattgacagctccctgattcag

SEQ ID NO: 769332 - DNA, 120 bp, Artificial Sequence
  ENSG00000232125_2 (sequence is synthesized)
caggtcctactgcgtccaagtttctgggaagctcgcaagcactccctttctgtgcagcaactttctcaggcactccaagagctgtttcagaaggccagggaggaaaacccaggacaagtg

SEQ ID NO: 769333 - DNA, 120 bp, Artificial Sequence
  ENSG00000232125_3 (sequence is synthesized)
catcccagagctccggaactcactctgagccttctcacgacaatgtacaacagcaaaggaacaggttttctccagcttatgcctgcggccgctgccctaataaccctctcaggagacagc

SEQ ID NO: 769334 - DNA, 120 bp, Artificial Sequence
  ENSG00000232125_4 (sequence is synthesized)
cctctttcaaaataccgagctctttttcaactctatgcagaaaatagcaggggaggctatgattctgggccacgcatgactcgaagggttttgagaaaactactaacagatctacagcag

SEQ ID NO: 769335 - DNA, 120 bp, Artificial Sequence
  ENSG00000232125_5 (sequence is synthesized)
atcccaactttcgtgggagagagtcgtgctctgtgccctgtggaaagtgccacccgcagctgtttccaaggggtgttgagcccagcaatcaaagaagaaaaattcctgtcttgggtccaa

SEQ ID NO: 769336 - DNA, 120 bp, Artificial Sequence
  ENSG00000232125_6 (sequence is synthesized)
tctgagcctcccatcctcctgtggctcccgacctgccaccggttatcagctgctgaaagggtcactcaccctgctcggtgcactctctgcaggactttcccaatcacgggactcagatac

SEQ ID NO: 769337 - DNA, 120 bp, Artificial Sequence
  ENSG00000232125_7 (sequence is synthesized)
cgctgtctgaagtgtctcaactttgacatctgccagatgtgtttcttatctggtcttcacagcaagtcccatcagaagtctcatcctgtcattgagcactgcattcagatgtcagcaatg

SEQ ID NO: 769338 - DNA, 120 bp, Artificial Sequence
  ENSG00000232125_8 (sequence is synthesized)
acttctcttcaggaccctcagaaacaaccttcttcaggggcgctgtaggaagaaagaagcagcgagaaggcagcagctgctggaccaggtgaatccaaagggtgtgcctcaccatgcgca

SEQ ID NO: 769339 - DNA, 120 bp, Artificial Sequence
  ENSG00000232125_9 (sequence is synthesized)
ggccaggctccttaaaaaacagttaaaccaatacaaagacaagttgcaagctatatacacctcccaggaagaaagaatttgtcgatttgaaacaaggattcacaaactcaaaaccaacca

SEQ ID NO: 769340 - DNA, 120 bp, Artificial Sequence
  ENSG00000232125_10 (sequence is synthesized)
ggatagtctatggaccaagctacaacagataagacgggacctacaggcaaggttgcagccacccggtccttcatcttcttcctttcaaaatgtggggaacaaggttgaccattcttcaac

SEQ ID NO: 769341 - DNA, 120 bp, Artificial Sequence
  ENSG00000232125_11 (sequence is synthesized)
tgaaaaggttccaaagggaggggattatttgcagatcaagaatgccactgaagatgcttcaacaggggaacctcttcctaagcttgatgaggttgacagaagtcacagaagtcacacaaa

SEQ ID NO: 769342 - DNA, 120 bp, Artificial Sequence
  ENSG00000232125_12 (sequence is synthesized)
tgcagagcatgctctgcgaaatccagaatcaccagagaccactttgcacagcaccagggcacaaagccaaacacaaaagatgccacagaaagtcattagtgccctacccagttatcagga

SEQ ID NO: 769343 - DNA, 120 bp, Artificial Sequence
  ENSG00000232125_13 (sequence is synthesized)
gggactgaagcaggacatccccaaaatggttcctgctgaaatgagcagtcctgctctggcagccgtggaaaagaaagaggcaggtaacatcaaggagagaaaggatgagctggaggaaga

SEQ ID NO: 769344 - DNA, 120 bp, Artificial Sequence
  ENSG00000232125_14 (sequence is synthesized)
ggaactgcaagaactattgtcaaaacttatggatgccttcaatctagaaacgccatcaggcccggagtcttcagtaaacatggacctgtacagtggagctcagcgagtgtgcagggcctt

SEQ ID NO: 769345 - DNA, 120 bp, Artificial Sequence
  ENSG00000232125_15 (sequence is synthesized)
ctctgcccttgttgatcaaattgccttgcccaatttgaagtgaaatggagtccaggctcaaaggcctcttggtgtgatgacaaaatgcagttgcacaactgtattaaaagaattaagact

SEQ ID NO: 769346 - DNA, 120 bp, Artificial Sequence
  ENSG00000232125_16 (sequence is synthesized)
tctacctttcttttaatagtttagtgtgaactatgaagaaaacaggttttgttttttgatctccctccctacttatgtatcttagttctgcagttcagagtgaaggttgggggttagcag

SEQ ID NO: 769347 - DNA, 120 bp, Artificial Sequence
  ENSG00000232125_17 (sequence is synthesized)
gctggcatcctaaatccggagtccctgctttgcagccatgatgctccgctgcctccctgtgcagacaactgcaaacaaggcacagactcacagagatcatcagcattcatgagaacaact

SEQ ID NO: 769348 - DNA, 120 bp, Artificial Sequence
  ENSG00000232125_18 (sequence is synthesized)
caggcttgatcttctctccacctggagcaaaaagcagatttgagagctagatttggagataccgctgtctgaagtgtctcaactttgacatctgccagatgtgtttcttatctggtcttc

SEQ ID NO: 769349 - DNA, 87 bp, Artificial Sequence
  ENSG00000232196_0 (sequence is synthesized)
ccagcctggacaacaaaagcgaaactccgtctttcaagctcaacatccaattattttaaatcctaatcactctattgaactcctaac

SEQ ID NO: 769350 - DNA, 120 bp, Artificial Sequence
  ENSG00000232196_1 (sequence is synthesized)
caattattttaaatcctaatcactctattgaactcctaacattacattagactaatctattacttaatagaagcaataatgttaatattagtaacacgaagacattctccattgcataag

SEQ ID NO: 769351 - DNA, 120 bp, Artificial Sequence
  ENSG00000232196_2 (sequence is synthesized)
cttatatcaaaccagaatccactgatagttaacagcctaatattaataaagaataaataccctattatttataccattaatccaacacaggtatgctctaaggaaagattacaaaaagta

SEQ ID NO: 769352 - DNA, 120 bp, Artificial Sequence
  ENSG00000232196_3 (sequence is synthesized)
taaggaactcgggaaatcttaccccacctgtttaccaaaaacatcacctctggcttcaccagtattagaggcaccgcctgcccagtgacatatgttcaacagctgcggtatcctgacatt

SEQ ID NO: 769353 - DNA, 120 bp, Artificial Sequence
  ENSG00000232196_4 (sequence is synthesized)
gtaaaggtagcataatcacttgttccctaaatagggacttgtatgaatggccacacaagggttcagctgtctcttactttcagtcagtgaaattgacctatccatgaagaggcagtataa

SEQ ID NO: 769354 - DNA, 120 bp, Artificial Sequence
  ENSG00000232196_5 (sequence is synthesized)
tgagaagactctatagagctttaattcattaatgcaaatagaaactcaaaaaaagcctacaggccctagcctactatctttgcattaaaaattttggttggggtgcccggcgtggtggct

SEQ ID NO: 769355 - DNA, 70 bp, Artificial Sequence
  ENSG00000232196_6 (sequence is synthesized)
aggagactgaggcaggagaatggctttaacccgggaggtggagcagactctgtcttaaaaaataaataaa

SEQ ID NO: 769356 - DNA, 120 bp, Artificial Sequence
  ENSG00000232196_7 (sequence is synthesized)
taaataaaaaacaaaaaaaataaaaattttcttttatttcagagcataattcaacctccaaactacctaaactaagaccgcactagtctaagcaagttaacacacactgacccaataatt

SEQ ID NO: 769357 - DNA, 120 bp, Artificial Sequence
  ENSG00000232196_8 (sequence is synthesized)
taagcaagttaacacacactgacccaataatttgatcaacggaataagttatcctagggataacggcacaatcctattctagggtccatatcaacaacagggtttacagcttcaatgctg

SEQ ID NO: 769358 - DNA, 120 bp, Artificial Sequence
  ENSG00000232196_9 (sequence is synthesized)
gatcaggacatcctaatagtgtagccgctattaagggttcgttttttcaactattaaagtcccatgtgatctcagttcagatcggagtaatccaggtcggtttctaactatttaacattt

SEQ ID NO: 769359 - DNA, 120 bp, Artificial Sequence
  ENSG00000232196_10 (sequence is synthesized)
ctcctagtacaaaaggacaagagaagcagggcccatttcacaaagcacccttgccaccataaatgatgctgtctcaatctaacaaatcatcacacactctaccatcttaaacagtgttta

SEQ ID NO: 769360 - DNA, 120 bp, Artificial Sequence
  ENSG00000232216_0 (sequence is synthesized)
agctctgggagaggagccccagccctgagattcccaggtgtttccattcggtgatcagcactgaacacagagaacgcaccatggagtttggactgagctgggttttccttgttgctattt

SEQ ID NO: 769361 - DNA, 120 bp, Artificial Sequence
  ENSG00000232216_1 (sequence is synthesized)
cctgtgcagcctctggattcacctttgatgattataccatgcactgggtccgtcaagctccggggaagggtctggagtgggtctctcttattagttgggatggtggtagcacatactatg

SEQ ID NO: 769362 - DNA, 120 bp, Artificial Sequence
  ENSG00000232216_2 (sequence is synthesized)
tatgcagactctgtgaagggccgattcaccatctccagagacaacagcaaaaactccctgtatctgcaaatgaacagtctgagaactgaggacaccgccttgtattactgtgcaaaagat

SEQ ID NO: 769363 - DNA, 120 bp, Artificial Sequence
  ENSG00000232237_0 (sequence is synthesized)
ctgctgggcaggcgggcagccccggagattccgcagtccccccaggaggttcaagagccactgatcaggataagcgctgccggaggaacaaacccagagagaaatgttcccggggactcc

SEQ ID NO: 769364 - DNA, 120 bp, Artificial Sequence
  ENSG00000232237_1 (sequence is synthesized)
ctccactgagctggcgcactcctaacagcagccatcagtttggggaccccggacagcccggggatcccgaaggccgcgaggaccaaggaccaggcgctggggtgggtgtggaggacatgg

SEQ ID NO: 769365 - DNA, 120 bp, Artificial Sequence
  ENSG00000232237_2 (sequence is synthesized)
agcccgtggtttaggcctgaggtgcccatgttgggtggcagcaagaggcagggtgggcgggtctgtggccatgcccatgggtgctgcggaacggggtgcgggccctcagagttccgcggc

SEQ ID NO: 769366 - DNA, 120 bp, Artificial Sequence
  ENSG00000232237_3 (sequence is synthesized)
gccatgggctggctctgagaaggcgtgcaccgacctcctgagaggggccacacttgtctagggcgatggctcttgttagggagtcattggaagccaccctaaagggcgaaaagaggccct

SEQ ID NO: 769367 - DNA, 120 bp, Artificial Sequence
  ENSG00000232237_4 (sequence is synthesized)
agcaagtcctggtacccaagagctgctgctagcgatgtgacttgccccactggtggagacggtgcagaccccaagccggggccattcggtggaggcctcgctctgggtccagctccacgc

SEQ ID NO: 769368 - DNA, 120 bp, Artificial Sequence
  ENSG00000232237_5 (sequence is synthesized)
ggcaccatgaacaataacttctgccgggctctggtggaccggaggcctctggggccccccagctgcatgcagctgggcgtcatgccccctccccggcaggcgcccctgccccccgccgag

SEQ ID NO: 769369 - DNA, 120 bp, Artificial Sequence
  ENSG00000232237_6 (sequence is synthesized)
cccctgggcaacgtgcccttcctgctgtacccgggcccagcagagccgccctactacgacgcctatgcgggggtgttcccctacgtgcccttccccggcgccttcggggtctacgaatac

SEQ ID NO: 769370 - DNA, 120 bp, Artificial Sequence
  ENSG00000232237_7 (sequence is synthesized)
cccttcgagccagccttcatccagaagcgcaacgagcgcgagaggcagcgagtcaagtgcgtcaacgagggctacgctcgcctccgcggccacctccccggcgccctggctgagaagcga

SEQ ID NO: 769371 - DNA, 120 bp, Artificial Sequence
  ENSG00000232237_8 (sequence is synthesized)
ctgccccgcgccgcccgccaccccccgtcccgaccgccctggcgacggcgaggcccgggcgccctcctccctggtgccggagtcatccgagtcctcctgcttctccccgtcgcctttctt

SEQ ID NO: 769372 - DNA, 120 bp, Artificial Sequence
  ENSG00000232237_9 (sequence is synthesized)
ccccgtcgcctttcttggagtcggaggaatcctggcattgatcgggcctgtggccgcccccggcttggaggatgatccgccggccccgtcccactttcgggagcagcgggaggctgttgg

SEQ ID NO: 769373 - DNA, 120 bp, Artificial Sequence
  ENSG00000232237_10 (sequence is synthesized)
gtcacccgcgatgcgccgcaggacggtgactgtaggaggtccgcggcgctcccgtgtctgcgacaccctccctcctccaccagcttggggcggaagtgcagggcagcgggtacgatgggc

SEQ ID NO: 769374 - DNA, 120 bp, Artificial Sequence
  ENSG00000232237_11 (sequence is synthesized)
acgatagagacctaggagctccgtgggtgaagcgaggggcagggcctgggactgctccgggcgtcctgcgtcccctccggggtgcagaggggctccccaggacggtcatccctgggtctg

SEQ ID NO: 769375 - DNA, 120 bp, Artificial Sequence
  ENSG00000232237_12 (sequence is synthesized)
gctcccgctcggcctcaggtggctctgctccgtccttccttgccgcaggcgcagtccagtctctgcgagtccccgggatgcgagcccgactttgagccctcggttaccatgccactgctc

SEQ ID NO: 769376 - DNA, 120 bp, Artificial Sequence
  ENSG00000232237_13 (sequence is synthesized)
tccaccagatggcctcagatactagcgacttctttgggagcacgcttactcctcgagaaaggaacccagaggaagggatgggaggccagattgctgctggcgctcagcccagaccgaacc

SEQ ID NO: 769377 - DNA, 120 bp, Artificial Sequence
  ENSG00000232237_14 (sequence is synthesized)
tacagactcagcagaggcgacctgtgtgccccggtggcgttctctggcttcctgggttgggagggggggttactccctccccgcatcccccccatgaggtcgtctagttttgtcccaggt

SEQ ID NO: 769378 - DNA, 120 bp, Artificial Sequence
  ENSG00000232237_15 (sequence is synthesized)
tgggtggggactgtggtttttttccctcagactgtaagccttgggggaggggggcgtgcatataggtacataggcactgcgtcggcaccaaagagctaaataaaaggattgttgaatttt

SEQ ID NO: 769379 - DNA, 120 bp, Artificial Sequence
  ENSG00000232258_0 (sequence is synthesized)
atgcgggtgcacctgggcgggctggccggcgcggctgcgctgaccggggcgctcagctttgtgctcctggcggccgccatcggcacggacttctggtatatcattgacaccgagcggctg

SEQ ID NO: 769380 - DNA, 120 bp, Artificial Sequence
  ENSG00000232258_1 (sequence is synthesized)
gagaggactggcccgggggcgcaggacctgctggggtccatcaatcgcagccagcccgagcctctgagctcccactccggcctctggcggacctgccgggtgcagagcccgtgcacaccg

SEQ ID NO: 769381 - DNA, 120 bp, Artificial Sequence
  ENSG00000232258_2 (sequence is synthesized)
ctgatgaaccccttcaggctggagaacgtgacagtcagcgaatcgagccggcaacttctcaccatgcatgggacatttgtgattctgctgccgctcagcctgatcctgatggtttttggg

SEQ ID NO: 769382 - DNA, 120 bp, Artificial Sequence
  ENSG00000232258_3 (sequence is synthesized)
gtctacatagcgtattcagccgccgccttccgggaggcgctgtgtctcttggaggagaaggccctcctggaccaggtggacatcagcttcggctggtccctggccctgggctggatcagc

SEQ ID NO: 769383 - DNA, 120 bp, Artificial Sequence
  ENSG00000232258_4 (sequence is synthesized)
ttcatcgccgagctgctcaccggggcagccttcctggcagcagcccgcgagctcagcctgagacggaggcaggaccaggccatatgagcctgggcgctgggtcgtggaggggagggaggg

SEQ ID NO: 769384 - DNA, 120 bp, Artificial Sequence
  ENSG00000232258_5 (sequence is synthesized)
gcttggccccggagcttcaccgaccgatctccatcggctgcggcctcttcttcctcaaaggccactcggggaggccaggcacccccctccttcccccacaaatccccgcggactaagctt

SEQ ID NO: 769385 - DNA, 120 bp, Artificial Sequence
  ENSG00000232258_6 (sequence is synthesized)
ggggcctggctgttatcctagtacctgtgtgcttatgtccgtgtgtgtccgtgtggcctggaggagcccgagggagtgccaaaccgcttcgcgagaaataaaaacgatcctttaatcaca

SEQ ID NO: 769386 - DNA, 120 bp, Artificial Sequence
  ENSG00000232258_7 (sequence is synthesized)
gtgggttaaggtgctggtggggaaggactagagcttccaggagggtctgaaggcggaggtggaggtcggacagcacaagtgagagtgagggggtctgcaggtagagctggcattggaggg

SEQ ID NO: 769387 - DNA, 120 bp, Artificial Sequence
  ENSG00000232258_8 (sequence is synthesized)
gctcgggaagtgtttgttgattgaatgaaggatgttagtaactgtcctctgcctggtatcctctctgtctcttctaagccatgcatgggacatttgtgattctgctgccgctcagcctga

SEQ ID NO: 769388 - DNA, 120 bp, Artificial Sequence
  ENSG00000232258_9 (sequence is synthesized)
cgagccggcaacttctcactgctttttgatagctccatggatgtcaatggtgaattattaacagtcaatcaatagaatggaaaacttctgcagggctttgccgtcatggaaagaagttcc

SEQ ID NO: 769389 - DNA, 120 bp, Artificial Sequence
  ENSG00000232258_10 (sequence is synthesized)
tggtataaaacagaatggcggataaaaccagattgtagcttcacaccatatgatatcatatgatattatcatggttatgaaaaatagaatctatacatatatgtgaatagctatatgaat

SEQ ID NO: 769390 - DNA, 120 bp, Artificial Sequence
  ENSG00000232263_0 (sequence is synthesized)
ttctcaagttcctgccaatcctcaatgcataacagatctcaaggcttttttttcagtagttgccacccccaaaaccatgtctcttatggctgtcaatcaccgagctttattttttgtcgc

SEQ ID NO: 769391 - DNA, 120 bp, Artificial Sequence
  ENSG00000232263_1 (sequence is synthesized)
tgaattttgtgtccaggacctgctatcccttgagctatttctcctatggtaatcaaactataggttctatatccaacagcttcagatccctgaattatgtgtctcatagtttccaaccta

SEQ ID NO: 769392 - DNA, 120 bp, Artificial Sequence
  ENSG00000232263_2 (sequence is synthesized)
tttccttcatgcacagcagtttccaaccagcttgttctgattttgtgggttggcaatctccatttcttagaagaacatgctgaattgtcttttcagtgtcttgccctgacagcgttttac

SEQ ID NO: 769393 - DNA, 120 bp, Artificial Sequence
  ENSG00000232268_0 (sequence is synthesized)
tatatatatcttcactcaagtgacttgtgaccacagctatggatcacaatcttcctataaggcacttgagtgaataccataaactcatacagtactggaattgtcgatttagtccctaca

SEQ ID NO: 769394 - DNA, 120 bp, Artificial Sequence
  ENSG00000232268_1 (sequence is synthesized)
ggagatttcaggaaactgcaaaagaggtaattaacttaacctgggcatggggttgggtgaggaagagagcagaacacaagtccctaaggaaggaattcacgagctgatccttcaacaatg

SEQ ID NO: 769395 - DNA, 120 bp, Artificial Sequence
  ENSG00000232268_2 (sequence is synthesized)
aatagaaacttgtaaggaggatgaaaagtagcacagtattagaagtcatttttctgatcctgccataccaccaagctgagaatatccctaggttttcccagcaccacaaagaggaactaa

SEQ ID NO: 769396 - DNA, 120 bp, Artificial Sequence
  ENSG00000232268_3 (sequence is synthesized)
tcttataggactgcaccattctcttacatcatctatacattaataggcaagaagtctcacctgtgatgctgggtccagcttacaaccacacaatggaaacccctgcctccttcctccttg

SEQ ID NO: 769397 - DNA, 120 bp, Artificial Sequence
  ENSG00000232268_4 (sequence is synthesized)
tgggtatcccaggactgcaatcttcacatctttggctggctatctcactgagtgccatgtacatcacagccctgttaggaaacaccctcatcgtgactgcaatctggatggattccactc

SEQ ID NO: 769398 - DNA, 120 bp, Artificial Sequence
  ENSG00000232268_5 (sequence is synthesized)
ggcatgagcccatgtattgctttctgtgtgttctggctgctgtggacattgttatggcctcctccgtggtacccaagatggtgagcatcttctgctcgggagacagctccatcagcttta

SEQ ID NO: 769399 - DNA, 120 bp, Artificial Sequence
  ENSG00000232268_6 (sequence is synthesized)
gtgcttgtttcactcagatgttttttgtccacttagccacagctgtggagacggggctgctgctgaccatggcttttgaccgctatgtagccatctgcaagcctctacactacaagagaa

SEQ ID NO: 769400 - DNA, 120 bp, Artificial Sequence
  ENSG00000232268_7 (sequence is synthesized)
ttctcacgcctcaagtgatgctgggaatgagtatggccgtcaccatcagagctgtcacattcatgactccactgagttggatgatgaatcatctacctttctgtggctccaatgtggttg

SEQ ID NO: 769401 - DNA, 120 bp, Artificial Sequence
  ENSG00000232268_8 (sequence is synthesized)
tccactcctactgtaagcacatagctttggccaggttagcatgtgctgaccccgtgcccagcagtctctacagtctgattggttcctctcttatggtgggctctgatgtggccttcattg

SEQ ID NO: 769402 - DNA, 120 bp, Artificial Sequence
  ENSG00000232268_9 (sequence is synthesized)
ctgcctcctatatcttaattctcagggcagtatttgatctctcctcaaagactgctcagttgaaagcattaagcacatgtggctcccatgtgggggttatggctttgtactatctacctg

SEQ ID NO: 769403 - DNA, 120 bp, Artificial Sequence
  ENSG00000232268_10 (sequence is synthesized)
ggatggcatccatctatgcggcctggttggggcaggatatagtgcccttgcacacccaagtgctgctagctgacctgtacgtgatcatcccagccactttaaatcccatcatctatggca

SEQ ID NO: 769404 - DNA, 120 bp, Artificial Sequence
  ENSG00000232268_11 (sequence is synthesized)
tgaggaccaaacaattgctggagggaatatggagttatctgatgcacttcctctttgaccactccaacctgggttcatgaacacaatatctgttcagatccagagcattctagccaactt

SEQ ID NO: 769405 - DNA, 120 bp, Artificial Sequence
  ENSG00000232268_12 (sequence is synthesized)
tctttgtgtaacttttaaatttctaccaataatatgaatgaaatgtttctaattttctgacatttttaatgggttaatatgatagtgtctgaatcagagtaagtttggtatagaatacag

SEQ ID NO: 769406 - DNA, 120 bp, Artificial Sequence
  ENSG00000232268_13 (sequence is synthesized)
ctctgtaatttttccttctatagcttctgacctatatttcctacctaatatcctaccatcccctctgctgaagagaccaactgtttggtatcttccccttaacctgactgatattctcag

SEQ ID NO: 769407 - DNA, 120 bp, Artificial Sequence
  ENSG00000232268_14 (sequence is synthesized)
aactgttctttcctccaagtgattacatggaagaagctattaatatatgaccctgccctctggcccaatagtgatctcactccatttgggtcctaatgcccacacctagaccagggtcct

SEQ ID NO: 769408 - DNA, 120 bp, Artificial Sequence
  ENSG00000232268_15 (sequence is synthesized)
tcccaagctgtatggtctactgttcatctggggagatataaacttgggatcagagatggtggtaattctacaacacataaactggaaggagaaaattgggattggcccatgcatcaaaag

SEQ ID NO: 769409 - DNA, 120 bp, Artificial Sequence
  ENSG00000232268_16 (sequence is synthesized)
ccaatcaccaagaacggatgaagagaataagtccttggttctctgattccaaatcactttggacacccaggtatattgttatgttctgtaaaataccacttaacttttaaatgtatctcc

SEQ ID NO: 769410 - DNA, 120 bp, Artificial Sequence
  ENSG00000232268_17 (sequence is synthesized)
tattgttaagctagttggagttagtgaaccaattaccagctttttgtttttaagcaacagaagctaagttaatataagtttggttttggaaatctttcttgttgcttcctagtcccagtc

SEQ ID NO: 769411 - DNA, 120 bp, Artificial Sequence
  ENSG00000232268_18 (sequence is synthesized)
cgtgtaacttaaccttaaggcataaaagaaagggatcaaatatacacaggtctttcttcttgtgggcacctctcagggggtgtgctctgtgatgaagaggctaatagaaaacaatgtaga

SEQ ID NO: 769412 - DNA, 61 bp, Artificial Sequence
  ENSG00000232268_19 (sequence is synthesized)
gaagttgaaatgtaatcactcttctccaggtcactggatgcttccatgatttttggttttg

SEQ ID NO: 769413 - DNA, 120 bp, Artificial Sequence
  ENSG00000232268_20 (sequence is synthesized)
ttctccaggtcactggatgcttccatgatttttggttttgtttttccccttcagaaaatcttgaactgagtaatcagtatacgttaaaagaaaaagatcttatatataagagatatgtac

SEQ ID NO: 769414 - DNA, 120 bp, Artificial Sequence
  ENSG00000232382_0 (sequence is synthesized)
tgctctccttcctttaagccaaagagacctaaataactgtggcatattataaattagtgccttctttctccacaattttttttcagacaagtcaggaatggctgaagaaaatcataccat

SEQ ID NO: 769415 - DNA, 120 bp, Artificial Sequence
  ENSG00000232382_1 (sequence is synthesized)
gaaaaatgagtttatcctcacaggatttacagatcaccctgagctgaagactctgctgtttgtggtgttctttgccatctatctgatcaccgtggtggggaatattagtttggtggcact

SEQ ID NO: 769416 - DNA, 120 bp, Artificial Sequence
  ENSG00000232382_2 (sequence is synthesized)
gatatttacacaccgtcggcttcacacaccaatgtacatctttctgggaaatctggctcttgtggattcttgctgtgcctgtgctattacccccaaaatgttagagaacttcttttctga

SEQ ID NO: 769417 - DNA, 120 bp, Artificial Sequence
  ENSG00000232382_3 (sequence is synthesized)
gaacaaaaggatttccctctatgaatgtgcagtacagttttattttctttgcactgtggaaactgcagactgctttcttctggcagcaatggcctatgaccgctatgtggccatatgcaa

SEQ ID NO: 769418 - DNA, 120 bp, Artificial Sequence
  ENSG00000232382_4 (sequence is synthesized)
tcatgatgtccaagaaactctgcattcagatgaccacaggggccttcatagctggaaacctgcattccatgattcatgtagggcttgtatttaggttagttttctgtggatcgaatcaca

SEQ ID NO: 769419 - DNA, 120 bp, Artificial Sequence
  ENSG00000232382_5 (sequence is synthesized)
tcaaccacttttactgtgatattcttcccttgtatagactctcttgtgttgatccttatatcaatgaactggttctattcatcttctcaggttcagttcaagtctttaccataggtagtg

SEQ ID NO: 769420 - DNA, 120 bp, Artificial Sequence
  ENSG00000232382_6 (sequence is synthesized)
tcttaatatcttatctctatattcttcttactattttcaaaatgaaatccaaagagggaagggccaaagctttttctacctgtgcatcccactttttgtcagtttcattattctatggat

SEQ ID NO: 769421 - DNA, 120 bp, Artificial Sequence
  ENSG00000232382_7 (sequence is synthesized)
ctcttttcttcatgtacgttagaccaaatttgcttgaagaaggggataaagatataccagctgcaattttatttacaatagtagttcccttactaaatcctttcatttatagcctgagaa

SEQ ID NO: 769422 - DNA, 120 bp, Artificial Sequence
  ENSG00000232382_8 (sequence is synthesized)
atagggaagtaataagtgtcttaagaaaaattctgatgaagaaataatctcaagaaagatggaaacaagtgacatctactatagcttaatgatttaaatgcagcaaaaacttccatgtga

SEQ ID NO: 769423 - DNA, 120 bp, Artificial Sequence
  ENSG00000232382_9 (sequence is synthesized)
ttctcctaaatgatcaagaagatagagcttaattgtgagatctactttaaaaactgttatcaggcaacctactggcccctttaaaactcttaccagggaaaattcagacaagtcaggaat

SEQ ID NO: 769424 - DNA, 120 bp, Artificial Sequence
  ENSG00000232382_10 (sequence is synthesized)
gtagaatatacaaaaaagagtaaactgtggtaaatcttaattcaaaataacaaaaatgaaattctaattttgaactcattcaagtaacaatgtagtatgttgtcaagctcttggtctgtg

SEQ ID NO: 769425 - DNA, 120 bp, Artificial Sequence
  ENSG00000232382_11 (sequence is synthesized)
ttggcatcagggatgataagcatccaaaagaacacagcaaaactggaagttacaagttcaaaggaccattccattaagcattgataaccagataagttattttaatagcttagagcatga

SEQ ID NO: 769426 - DNA, 120 bp, Artificial Sequence
  ENSG00000232382_12 (sequence is synthesized)
gcattatggttaaactgaaagagtttaagatcatatgatggtcaaccagtaaaatcacttacatccatgagcaacaaaattgtgacaagcgaattttgagaaatcaattttaatagcatt

SEQ ID NO: 769427 - DNA, 120 bp, Artificial Sequence
  ENSG00000232382_13 (sequence is synthesized)
atggggacattactgtagttagaaaggaagtattaggaaaacgaaggtgtcaaataatagtgaatatcagatttccaaatttaaattattactgagttaaatattaaacacagaatgtca

SEQ ID NO: 769428 - DNA, 120 bp, Artificial Sequence
  ENSG00000232382_14 (sequence is synthesized)
gatttgaagagcttctttgttagtgagttaggtgcaatgtctctgtgctcctacttgagaggtgaggaaaggtttcaacaatagagaccactaccctgggtatattatatatagaaatgt

SEQ ID NO: 769429 - DNA, 120 bp, Artificial Sequence
  ENSG00000232382_15 (sequence is synthesized)
aaaacatagtgttgttaaactgtaggtagagtttatctaatttttttttcttttcactattgcaaaacctgaagttggtattgtgggtagagtaatgatcttaatgtgatatcattttaa

SEQ ID NO: 769430 - DNA, 120 bp, Artificial Sequence
  ENSG00000232382_16 (sequence is synthesized)
aaattactttccaattattcactcaacatatatttattgaaatcctgctataggtaggcattgttctgggtgttgggccatatcagttacaaaaaatgccagtttttccatcttctcgaa

SEQ ID NO: 769431 - DNA, 120 bp, Artificial Sequence
  ENSG00000232382_17 (sequence is synthesized)
gaatagaatattgccacaatttttattactaacttctggattaagaaggacctatgtcacataatagaaaaacatctcccttccacctcttgctctgaggacctgtctaaattcccagaa

SEQ ID NO: 769432 - DNA, 120 bp, Artificial Sequence
  ENSG00000232382_18 (sequence is synthesized)
agcaattgtcaagtgctccaggttagccagccaccagaggctggcatcacaggaaaaatcaatatgctgagtctgtacagaaaaagtaataggagagcagatgaatttccaattccctaa

SEQ ID NO: 769433 - DNA, 120 bp, Artificial Sequence
  ENSG00000232382_19 (sequence is synthesized)
ctcatcaatgcaaaaatataaccacctagtttttctttgtaacctccaagaaaatctaacctagttcattccaattatacttggacatgtgaagatcttgtttgtttcaaattaaattcc

SEQ ID NO: 769434 - DNA, 120 bp, Artificial Sequence
  ENSG00000232382_20 (sequence is synthesized)
atcaatttaggatttacccaacactacctacatccttccttcatcacatataggtccttgcctggtatcatggcactgagcacaggtgccagattatatatgagctctgtccaagctatg

SEQ ID NO: 769435 - DNA, 120 bp, Artificial Sequence
  ENSG00000232382_21 (sequence is synthesized)
attctgtgagatgtttgagcctatttgacccgttggttatttcttcatgccaccatcacttcaggtatctacgtccatgtctactcctcaggctgcattgattttcagctaaaatgtcta

SEQ ID NO: 769436 - DNA, 120 bp, Artificial Sequence
  ENSG00000232382_22 (sequence is synthesized)
tttatccaacccacaaggctttgggttggctggctctctctctcttactcttcatctgctaatttctgagtaaattctcttgacctcttcccagtgggtccaggaaatgttgaaatgcat

SEQ ID NO: 769437 - DNA, 120 bp, Artificial Sequence
  ENSG00000232382_23 (sequence is synthesized)
catttttgcacttccgatgctacacaataccagtacaatgtaggattttgaaagcttacatgggtcccttttgaaggtcccttttgcacataggtcaccaaacctccctgagcaattgtc

SEQ ID NO: 769438 - DNA, 120 bp, Artificial Sequence
  ENSG00000232382_24 (sequence is synthesized)
accccactcccatgccaggacaccccctgggaattgaaaccacagaaccttttccaggcaacacgaactcttcccttcttgatgttgctttttttcccaactgactgaatccttaattct

SEQ ID NO: 769439 - DNA, 120 bp, Artificial Sequence
  ENSG00000232382_25 (sequence is synthesized)
aggatgatacttagttttcacatcattacaaatgtttcccaaatgtacttttatggagtaaaattggactcaaaaatgagactctgtcttagtctattctctctgtctggaatatcaaag

SEQ ID NO: 769440 - DNA, 120 bp, Artificial Sequence
  ENSG00000232382_26 (sequence is synthesized)
gtatgctcagaaataaaaaaaaagtgagggataacactgttgtatggctctggcctccttttcttatatcaaaaaatgtgaactgccctggttactgtctgaaacggcaggcatagttat

SEQ ID NO: 769441 - DNA, 120 bp, Artificial Sequence
  ENSG00000232382_27 (sequence is synthesized)
tgggtaagacagaattacaggcaggctttatctgagaattactggttatgggagaaaaatatctgataaaatgaatatttttaaaatctcgactcattttatggtatgcagaggaaaaca

SEQ ID NO: 769442 - DNA, 120 bp, Artificial Sequence
  ENSG00000232388_0 (sequence is synthesized)
accggaagtcccgcctctgccgtgggcctgcgagaatcgaggcactcgctggcgtacccatgtatcgaaatgagttcacggcctggtaccggcggatgtcggtggtctacgggatcggca

SEQ ID NO: 769443 - DNA, 120 bp, Artificial Sequence
  ENSG00000232388_1 (sequence is synthesized)
cctggtctgtgttgggctcactgctttactatagccggacaatggcgaagtcgtcagtagaccaaaaggatggctcagcaagtgaagtacccagtgaactctctgaacgcccaaaaggat

SEQ ID NO: 769444 - DNA, 120 bp, Artificial Sequence
  ENSG00000232388_2 (sequence is synthesized)
taaagaagattttgttccaaatacagaaaagatcctcaactattggaaatcatggactggtggccctggtacagaaccatgactggctgctgaattctgaaaaccaggacttggttcaac

SEQ ID NO: 769445 - DNA, 120 bp, Artificial Sequence
  ENSG00000232388_3 (sequence is synthesized)
atttaaatttgatagttgccctgattcccattttgggtttgtgaaaagtgtatgtatttaaatttgctgtaaaacataatcactaataatatgcaataaatattttcttgaaggaaacta

SEQ ID NO: 769446 - DNA, 84 bp, Artificial Sequence
  ENSG00000232388_4 (sequence is synthesized)
tacgggatcggcacctggtctgtgttgggctcactgctttactatagccggacaatggcgaagtcgtcaggtctcaccctgtcg

SEQ ID NO: 769447 - DNA, 120 bp, Artificial Sequence
  ENSG00000232388_5 (sequence is synthesized)
tgtcgcccaggctggagtgcactggcgctatcttggctcactgtaacctccatctcccaactcaagcagtcctcctgcctcatcctccccagtagctggggttataggcccatgccacca

SEQ ID NO: 769448 - DNA, 86 bp, Artificial Sequence
  ENSG00000232388_6 (sequence is synthesized)
caaagtgagatttcttttcccttccttttcattccttccttcattattggggttggagagagtggatgtaattcttaccttagtta

SEQ ID NO: 769449 - DNA, 120 bp, Artificial Sequence
  ENSG00000232423_0 (sequence is synthesized)
agcctggagttcctgcttggttcttcctgaggactgagcaccttctagactacatccagatctgttttccctgcagattcgtgaagatgagcatccggactccacccagactcctggagc

SEQ ID NO: 769450 - DNA, 120 bp, Artificial Sequence
  ENSG00000232423_1 (sequence is synthesized)
ttgcagggcggagcctgctgagggaccaagccttggccatgtccaccctggaggagctgcccacagaacttttccccccactgttcatggaggccttcagcaggagacgctgtgaggccc

SEQ ID NO: 769451 - DNA, 120 bp, Artificial Sequence
  ENSG00000232423_2 (sequence is synthesized)
tgaagctgatggtgcaggcctggcccttccgccgcctccctctgaggcctctgataaagatgccttgtctggaggccttccaagctgtgctcgatgggctggatgcactgcttacccaag

SEQ ID NO: 769452 - DNA, 120 bp, Artificial Sequence
  ENSG00000232423_3 (sequence is synthesized)
ttcaagtgctggatttacaggatgtctgtgagaacttctggatggtttggtctgaagctatggcccgtgggtgcttcctcaatgccaagaggaacaaaacaccagtgcaggactgtccaa

SEQ ID NO: 769453 - DNA, 120 bp, Artificial Sequence
  ENSG00000232423_4 (sequence is synthesized)
aaacaccagtgcaggactgtccaaggatgagaggacagcagcccttgactgtgttcgtagaactttggctcaagaacaggactctggatgaatacctcacctgcctccttctatgggtca

SEQ ID NO: 769454 - DNA, 120 bp, Artificial Sequence
  ENSG00000232423_5 (sequence is synthesized)
agcagaggaaagatttactacacctgtgctgtaagaagctgaaaattttgggaatgcccttccgcaatatcagaagcatcctgaaaatggtgaacctagactgtatccaggaggtggaag

SEQ ID NO: 769455 - DNA, 120 bp, Artificial Sequence
  ENSG00000232423_6 (sequence is synthesized)
tgaattgcaagtgggtactgcccatcctgacacagtttaccccatacctgggccacatgaggaatcttcagaagctcgttctctcccacatggatgtctctcgctacgtttccccagagc

SEQ ID NO: 769456 - DNA, 120 bp, Artificial Sequence
  ENSG00000232423_7 (sequence is synthesized)
cagttcaccactcagttcctcaagctgtgctgcctccaaaagctttctatgaactctgtttctttcctcgaaggccacctggaccagctgctcagctgtctgaagacctcgttaaaggtc

SEQ ID NO: 769457 - DNA, 120 bp, Artificial Sequence
  ENSG00000232423_8 (sequence is synthesized)
gcttttggaatcagacttgaagcatctatcccagtgcccgagtatcagtcaactaaagaccctggacctgagtggcatcagactgaccaattacagtcttgtgcctctccaaattctcct

SEQ ID NO: 769458 - DNA, 120 bp, Artificial Sequence
  ENSG00000232423_9 (sequence is synthesized)
agaaaaagttgcagccacccttgagtacctggatttagatgactgtggcatcatagactcccaagtcaacgccatcctgcctgccctgagccgctgctttgagctcaacaccttcagctt

SEQ ID NO: 769459 - DNA, 120 bp, Artificial Sequence
  ENSG00000232423_10 (sequence is synthesized)
ctgtggaaatcccatctccatggccaccctggagaacctgctgagccacacaatcatactcaaaaacttatgcgtggagctgtatcctgccccccgggagagttatgatgctgatggtac

SEQ ID NO: 769460 - DNA, 120 bp, Artificial Sequence
  ENSG00000232423_11 (sequence is synthesized)
tctctgctggagcagatttgctcaaattagggctgagctgatgaagagagtgagggacttaaggcaccccaagaggatcttgttctgtactgactgctgccctgactgtggcaacaggtc

SEQ ID NO: 769461 - DNA, 120 bp, Artificial Sequence
  ENSG00000232423_12 (sequence is synthesized)
attttatgacctggaggcagatcaatgctgctgttgaatgcctgcctatttgggtggatatgtcaaacgctttcttctggacacttggaaactaaaacctaggtcttaggtacatcctat

SEQ ID NO: 769462 - DNA, 120 bp, Artificial Sequence
  ENSG00000232423_13 (sequence is synthesized)
agggagcacagaacccatcatttcacacatgggctctgaaagtgggaaagggaaggtgatcaagcaggggcaggacttgggggaagtgttgccatggattcgatgggactttggggacct

SEQ ID NO: 769463 - DNA, 120 bp, Artificial Sequence
  ENSG00000232434_0 (sequence is synthesized)
atgacccgtacggaccctccggacctgctggtgtcgaccgtgtaccaggacatcaaggtggcgaccccgggacccgcgtccaagtgctcgccatgtgagcgatccgtggcccggcctgct

SEQ ID NO: 769464 - DNA, 120 bp, Artificial Sequence
  ENSG00000232434_1 (sequence is synthesized)
gagcccgcgcctttcaacaagcgccactgccgcagcttcgacttcctggaggcgctggacgggccggccatggagaccctgccggagccaccgccgccggagtccgctgtgccgcgcgcc

SEQ ID NO: 769465 - DNA, 80 bp, Artificial Sequence
  ENSG00000232434_2 (sequence is synthesized)
caccgccgccggagtccgctgtgccgcgcgcccggacccgcgaagccgagccacgccgccgcgcccgctccaagagtgcg

SEQ ID NO: 769466 - DNA, 120 bp, Artificial Sequence
  ENSG00000232434_3 (sequence is synthesized)
ccgagggcgggaggcccagcgtgcggcgcgggccgaggcatcgccgcgccgggagcccgcgtacccggcgctccgcgcccttgccaacgagctgcatcccatcaagttgcagccgcagcg

SEQ ID NO: 769467 - DNA, 80 bp, Artificial Sequence
  ENSG00000232434_4 (sequence is synthesized)
ccgagccacccgcgggtcccgccccccacgtgcgctgccgcctggacatcaagccagacgacgcagtgctccagcacgcc

SEQ ID NO: 769468 - DNA, 120 bp, Artificial Sequence
  ENSG00000232434_5 (sequence is synthesized)
cccaccgaggccgcgcactgggcccgccccgccccgcagttccacggcctcacggtgcccgggccccgccacatggcgctgtcgcgcaccccgacgcccagcgactcatactgtgcggat

SEQ ID NO: 769469 - DNA, 120 bp, Artificial Sequence
  ENSG00000232434_6 (sequence is synthesized)
cccagcgactcatactgtgcggatccccgggcgttctactgcgacgggcccctgcctgggccccgggactacgccgagcgccgcagtctgcccttcaccaccccgccgggccccacccag

SEQ ID NO: 769470 - DNA, 120 bp, Artificial Sequence
  ENSG00000232434_7 (sequence is synthesized)
ttcttctatacagaggagccccaaggcttccggggcagctttgcagccagtcccggcccaaccttcgacgcctactaccccaggccctatccgtccgaggagctctcggggcccagtcca

SEQ ID NO: 769471 - DNA, 120 bp, Artificial Sequence
  ENSG00000232434_8 (sequence is synthesized)
aggcgcatgggcggctactacgcaggagaggtgcgcaccttcccaatccaggaaccgccctcccgctcctactatggggaggctccacgagcctacggcctgccctacgggccccgctat

SEQ ID NO: 769472 - DNA, 120 bp, Artificial Sequence
  ENSG00000232434_9 (sequence is synthesized)
gtccccgaggagccccgggcccactccaccgcccgccccttttacacggaggacttcggaaggtaccgcgagcgtgacgtcctggctcggacgtacccgcacccgcgcagcagcccggcc

SEQ ID NO: 769473 - DNA, 120 bp, Artificial Sequence
  ENSG00000232434_10 (sequence is synthesized)
tgggcggactggggcccgcgaccgtaccgcaccctgcaagtggtgccgccctctgaccccgacccgttgctcgcctcctggcacggcggcaccggcaccagtccgccccggctggccacc

SEQ ID NO: 769474 - DNA, 120 bp, Artificial Sequence
  ENSG00000232434_11 (sequence is synthesized)
gacagccgccactactcgcgctcctgggacaacattctggccccggggccgcgccgagaagacccgttgggccgcggccgcagctacgagaacctgctggggcgcgaggtgcgggagccg

SEQ ID NO: 769475 - DNA, 120 bp, Artificial Sequence
  ENSG00000232434_12 (sequence is synthesized)
cgaggcgtgtcccccgaaggccggcgcccgcccgtcgtcgtgaacctgtccacctctcccagacgctacgccgcactgtccctgtccgagacgtcgctgacggagaagggccgcgcgggc

SEQ ID NO: 769476 - DNA, 120 bp, Artificial Sequence
  ENSG00000232434_13 (sequence is synthesized)
gagggcctgggccgcaactggtacgtgacgcccgagatcaccatcactgacaatgacctgcgcgccaccgagcgcccgagcgccagggcctgggagttgcccgggggccgcacgcggcca

SEQ ID NO: 769477 - DNA, 120 bp, Artificial Sequence
  ENSG00000232434_14 (sequence is synthesized)
cctccccacgcggcccccgacggccccacctctggccgccagcggagcctagagcagctggacgagctcatcacggacctggtcatcgactcgcgacccaccgccggccaggcctcagag

SEQ ID NO: 769478 - DNA, 80 bp, Artificial Sequence
  ENSG00000232434_15 (sequence is synthesized)
cctcagagcccgcggccgactgcctgggcccccaactgcgccgactgctggactcgcggcccgcgggctccggggccccc

SEQ ID NO: 769479 - DNA, 120 bp, Artificial Sequence
  ENSG00000232434_16 (sequence is synthesized)
gagcccgcggccccgggagaggcggccgacgcgtcccccgaacccagcgccgacgaggacgacctgatgacctgctccaatgcgcgctgccggcgcaccgagaccatgttcaacgcctgc

SEQ ID NO: 769480 - DNA, 120 bp, Artificial Sequence
  ENSG00000232434_17 (sequence is synthesized)
ctctacttcaagtcctgccacagctgctacacctactactgctcgcgcctgtgccgccgcgaggactgggacgcccacaaggcgcgctgcgtgtacggccgcgtgggcagcgtgtgccgc

SEQ ID NO: 769481 - DNA, 120 bp, Artificial Sequence
  ENSG00000232434_18 (sequence is synthesized)
gcttcctgtcgcgcggccgcggcgtgctcttcctgggcttcccaagtccaggctcggccgacaacttcctgcgctttggcctggaggggctgctgctatcccccacctacctatcgctgc

SEQ ID NO: 769482 - DNA, 120 bp, Artificial Sequence
  ENSG00000232434_19 (sequence is synthesized)
gtgagctggccacacacgcggcgcccctgggcagctacgcgcgcgagctggcggccgctgggcgcctctacgaaccggcagagtgcttcctgctcagcgtgtccgtggccgtgggacccg

SEQ ID NO: 769483 - DNA, 120 bp, Artificial Sequence
  ENSG00000232434_20 (sequence is synthesized)
ctcagcgtgtccgtggccgtgggacccggcaccgcgccaccggggacaccggccctgcccgcgcccgcgccacgcagccacgggccaacagtgcgcaagttcgccaaggtagcgctggcg

SEQ ID NO: 769484 - DNA, 120 bp, Artificial Sequence
  ENSG00000232434_21 (sequence is synthesized)
cgcggagccgcgagcccgacatggagacgctgatcctgacgccaccgccgggcacggcgggcctggatcaggacggcgaggcgggccggcgcgcgcgcgaggtggccttcatccacatcc

SEQ ID NO: 769485 - DNA, 120 bp, Artificial Sequence
  ENSG00000232434_22 (sequence is synthesized)
agcgcgagctgcggctgcgcggcgtcttcctgcgccacgagttcccgcgcgtctacgagcagctttgcgagttcgtcgaggccaacaggcgcttcacgcccaccaccatctaccccacgg

SEQ ID NO: 769486 - DNA, 120 bp, Artificial Sequence
  ENSG00000232434_23 (sequence is synthesized)
accggcgcaccggccgccccttcatgtgcatgatcatggccgcctccgagccgcgcgcgctcgactgggtggccagcgccaacctgctggacgacatcatgtgaggcgccgggcccacca

SEQ ID NO: 769487 - DNA, 120 bp, Artificial Sequence
  ENSG00000232434_24 (sequence is synthesized)
tggcccgaaccctgccctgcccactcaggccccgcccggcccacccagggccgcccccgagccccgccagggccccaccccgacttcttctaggccccgcctctaattccccagccttcc

SEQ ID NO: 769488 - DNA, 120 bp, Artificial Sequence
  ENSG00000232434_25 (sequence is synthesized)
aattccccagccttccaagctccgctcagttcggcctccagctccgcccaggcccccaccccccggcccttcgtccccgtagtgttcctcacaggcccttcgccttcccacccccagcaa

SEQ ID NO: 769489 - DNA, 120 bp, Artificial Sequence
  ENSG00000232434_26 (sequence is synthesized)
cccctctccctcctccgggcctcctccctctcccagctcgccctcgaggatccccagaagaagtcggtcctcgccctcggtgctccccgctgggaggcggggtgggcctgaggaccgccg

SEQ ID NO: 769490 - DNA, 120 bp, Artificial Sequence
  ENSG00000232434_27 (sequence is synthesized)
agctctgccttcactcggaggggtcactactgcacagaccccacccgtagagatccggtccccgtcggtccgcggggctctcgctggagcctccccgactccggtttcccctcgtccaga

SEQ ID NO: 769491 - DNA, 120 bp, Artificial Sequence
  ENSG00000232434_28 (sequence is synthesized)
agcccgacgtaaccaaagcccagtctgtcactttaaacacgccccgccccgcctcccgcggctgtgttgcctcctcgctggagaacaccctggtcgacctctgtgcgtccgtgtgcgcga

SEQ ID NO: 769492 - DNA, 120 bp, Artificial Sequence
  ENSG00000232434_29 (sequence is synthesized)
gcgcgtcccgccgaggcggtgggcagggcggacggtgcgcagtgcgttcccgctggtcggagccagcacactaaccacgccacgcgccctgccgtcccttcgcctccagccgctgcagtc

SEQ ID NO: 769493 - DNA, 120 bp, Artificial Sequence
  ENSG00000232434_30 (sequence is synthesized)
tgggccctgcaggagctgggaaaaaccgcagggaggtcttcaggccgatatgcaagtctcccagccgaaggggcaggggacctgaacaggggaagcagagcacctgggcctggccagagc

SEQ ID NO: 769494 - DNA, 120 bp, Artificial Sequence
  ENSG00000232434_31 (sequence is synthesized)
tgacacctggctaggagaggaaggaccaagggacggggcgttcccaggtgggagcctggagggcaaagcgtggtgcgagcaggtgagggagagagctagttggtaagcgtggaagcccac

SEQ ID NO: 769495 - DNA, 120 bp, Artificial Sequence
  ENSG00000232434_32 (sequence is synthesized)
ccgagggggcttgacctgtcccgagaggtccccgcacacccgctctggccgcacgccgtactgcgggcgtggaggcgcaagcccggcggcccggcctccacctgtcccccaagtgcaccc

SEQ ID NO: 769496 - DNA, 120 bp, Artificial Sequence
  ENSG00000232434_33 (sequence is synthesized)
tggtccgcgcccagagctctctggagggtggggtatgcgggagaggggtggaggccaaacgcaagggccctcctggagtccccagccctacttcggagccaggggagggggcaccaagtg

SEQ ID NO: 769497 - DNA, 120 bp, Artificial Sequence
  ENSG00000232434_34 (sequence is synthesized)
agagaaattgggcacccccgcctccgctcctgctttcgcacccggcacgcccatctcgtccccgcgcgtctgcaccggccaggcgtcccgcttgcccacccgccgccgcgccccgcgccc

SEQ ID NO: 769498 - DNA, 120 bp, Artificial Sequence
  ENSG00000232434_35 (sequence is synthesized)
cctaccccagggcctctgcattcggccccacccctgagggccggccgggaacgcccctggaccggaataatttccagggggcaagagctttcgaaccaagtaaaatagaacttgaatgta

SEQ ID NO: 769499 - DNA, 120 bp, Artificial Sequence
  ENSG00000232593_0 (sequence is synthesized)
ggcgtaggcccgtgcccctgctcgcgctgcagcccgtggaagggttccgtccagcgtatccttcagatcttgctgtaggcctctggtgtctgtgcgcgcgcggcaggggcggcggcggcg

SEQ ID NO: 769500 - DNA, 120 bp, Artificial Sequence
  ENSG00000232593_1 (sequence is synthesized)
acggccggaggtgtacgttgcttcctctactgaagtcttgaaacccctgaaagtcatccctgaggtttgaagttaacttcttctacaccctgttaatgttgatattttgacctccttcca

SEQ ID NO: 769501 - DNA, 120 bp, Artificial Sequence
  ENSG00000232593_2 (sequence is synthesized)
aaatgttcttaatggcatctagaatgaacatgcatcattattagaaccatcaccctgcagctagcttggataccattaaaagggctcatcagctgcaaacggattaaagtatctgatact

SEQ ID NO: 769502 - DNA, 120 bp, Artificial Sequence
  ENSG00000232593_3 (sequence is synthesized)
ctgatactcgggaagacagagtttcagggtttctacctggagctacaccctcaggaagcccctccttggcctccctgcacccagtcccatcccaaccagtcacatcttgggctgtgcgtg

SEQ ID NO: 769503 - DNA, 120 bp, Artificial Sequence
  ENSG00000232593_4 (sequence is synthesized)
gtgtttcttggaaactggaacacagactcctccagcagctccacaggtcccttgtcctcaatgagcagaagactacaggagctggctactgaagaggctgtccaagtaatagagcacctt

SEQ ID NO: 769504 - DNA, 120 bp, Artificial Sequence
  ENSG00000232593_5 (sequence is synthesized)
cttggccctgcttagcacatttactgcagagctggatgctacttatttgtgctcaccaccttcagggactgcagagagatttgtcagaccctacttcactaagggccaccctctaaggat

SEQ ID NO: 769505 - DNA, 120 bp, Artificial Sequence
  ENSG00000232593_6 (sequence is synthesized)
ctccagaagaggctgcccatagagagaagtggcctgcctagggtctccacttcctcaggtcctacccggacacctctagggctgaggggatcagtatctcttcacctgcctgtaatccac

SEQ ID NO: 769506 - DNA, 120 bp, Artificial Sequence
  ENSG00000232593_7 (sequence is synthesized)
ataccaagtggaagaatctgcctgctattttttgtttgtttgtttgttttggcgggaagagttttaactactgctgtaactcctttagtagctatggaactgttgaggatttctttttct

SEQ ID NO: 769507 - DNA, 120 bp, Artificial Sequence
  ENSG00000232593_8 (sequence is synthesized)
tcttgagtcgattttggtaagataacagttttctaggagttggtccattttgtctgcattttcaaattcattggcataaagtttcctttttattctgtgctgtgtatgaactgtaacaat

SEQ ID NO: 769508 - DNA, 120 bp, Artificial Sequence
  ENSG00000232593_9 (sequence is synthesized)
gtctcctttttcattactgatattggttatttgtgccttctcactttttttcttgatcaatctcaccagaggtttatctattttattagtcttttcaaagaaccaacttttggctttgtt

SEQ ID NO: 769509 - DNA, 120 bp, Artificial Sequence
  ENSG00000232593_10 (sequence is synthesized)
gctcctctctattgtatctttgttttctatttctttaatttctgctcttatcttttttgatctccttccttccacattttttgggtttattctgttgttctttttctaatttaactggac

SEQ ID NO: 769510 - DNA, 120 bp, Artificial Sequence
  ENSG00000232593_11 (sequence is synthesized)
attgagctcattagttttcattctttcccattttctaatttgtgcatttaaggatataatttccctctaactcctgcttctccataagtttagatatgtagtattttcattattgctcag

SEQ ID NO: 769511 - DNA, 120 bp, Artificial Sequence
  ENSG00000232593_12 (sequence is synthesized)
ttataagtacttcatttctatcaaggttacttctttgacctgtaagttatatagaaatgtgtttttagatttccaaatgtttggggatttaaaattttatctctttgttattgaaatctg

SEQ ID NO: 769512 - DNA, 120 bp, Artificial Sequence
  ENSG00000232593_13 (sequence is synthesized)
tcttaattgcattatggtcagaggatgtggtttgtgtgacaacaactctgaaattttttagacttgttttatggcttagtatgtgaccaatatttttgaatgcttcctgtgtgctaattt

SEQ ID NO: 769513 - DNA, 120 bp, Artificial Sequence
  ENSG00000232593_14 (sequence is synthesized)
ataagaatgtgtgttctctaattgttgaatacagagatctacatatgtctattatcaagtttgtgaactattgttcaatttttacttacctatactgatttttttggtcattatctactg

SEQ ID NO: 769514 - DNA, 120 bp, Artificial Sequence
  ENSG00000232593_15 (sequence is synthesized)
ataattgaaagaggtgcgttaatgttcaactgtaatggtggatttggcaatttctccttgtaattctatctcgtttcttgctttatatattttgagggtgttcattaggaatattcaaat

SEQ ID NO: 769515 - DNA, 120 bp, Artificial Sequence
  ENSG00000232593_16 (sequence is synthesized)
taaaaattgttatatattcctgataaatatgtaatgaccctctctattcctgataatgcatttttctttgaaacctattttatcttatattaatgtagtaacacaaacttttcttgttgg

SEQ ID NO: 769516 - DNA, 120 bp, Artificial Sequence
  ENSG00000232593_17 (sequence is synthesized)
ccattatgtttaattatatctcttggaaacaacatataactggaccttttaaaaaatctaatctgattatctcttttggttggcaagtttagtctgtttacatttactgtgatgtatttg

SEQ ID NO: 769517 - DNA, 120 bp, Artificial Sequence
  ENSG00000232593_18 (sequence is synthesized)
ggcttgtttctaccatcatacttttttatttctgtttaccatcactaccttttctgtgcttcattttctcttttctcgcctgcttttttagttttgagatttgttttcttattcaatttt

SEQ ID NO: 769518 - DNA, 120 bp, Artificial Sequence
  ENSG00000232593_19 (sequence is synthesized)
tttcctccctatttttaaatttttttctattctttctgtggttatccttgatgttttccatatgtgtttaacttataaagtctaaagttaaacaatattttagcccccttcttaaagaat

SEQ ID NO: 769519 - DNA, 120 bp, Artificial Sequence
  ENSG00000232593_20 (sequence is synthesized)
gcaggaagcttagaaaccttcaactctagtcattcctctcctgatcacatactgttgttttcaaatatgttagtttgttcctttttataaacctcacaattttacatcattgtcagtgtt

SEQ ID NO: 769520 - DNA, 120 bp, Artificial Sequence
  ENSG00000232593_21 (sequence is synthesized)
attttatatagacagtgtttgtttggacttacatgcatacattcttgtatcacacatcatcctttgggatcattttctttcattatgaatatagtgtttaagtgagtttttttttttttt

SEQ ID NO: 769521 - DNA, 120 bp, Artificial Sequence
  ENSG00000232593_22 (sequence is synthesized)
agtacaggtctcttgatgttaaattcttccagtctttcttatatgtaaatgtctttattttatcctcattcttaaaagatagtttgttacaggtatttttactcaacacttagaatatat

SEQ ID NO: 769522 - DNA, 120 bp, Artificial Sequence
  ENSG00000232593_23 (sequence is synthesized)
ggttccattctcttttggctttgagatgtctgttgctattaagaagtcgactatcagactaattgctggttttgtgtgtgtgtgtagtagtagtagtagtagtggtagtagtggtagtag

SEQ ID NO: 769523 - DNA, 120 bp, Artificial Sequence
  ENSG00000232593_24 (sequence is synthesized)
tagtagtggaatgtgcagggggtcctgcagttttactctaacatgtttacatatgtatttttttttaattctactttgggaatgtcatgcttcgtggctcagtgaattcatgcttttcat

SEQ ID NO: 769524 - DNA, 120 bp, Artificial Sequence
  ENSG00000232593_25 (sequence is synthesized)
aatttctgggaaattctcaaccattatctcttcaaatattgcctttcattttttctagtttttctttcttggaatacagttagtcatattttggacctcctcattctatcttccgtatct

SEQ ID NO: 769525 - DNA, 120 bp, Artificial Sequence
  ENSG00000232593_26 (sequence is synthesized)
cataacatctctgagattttctatctccttgtctttctgcacttcattctggataatttctttaggtatatctttcagcttactgattctcttttcaactatgtttaatctgctctaatc

SEQ ID NO: 769526 - DNA, 120 bp, Artificial Sequence
  ENSG00000232593_27 (sequence is synthesized)
tgcccattgagttttttatttcaaaagttatatttttcatttgtacaaacctcatatattttacttgctaatctgcctagtcatccctaatagtctcttattgcttggtcatcttagtga

SEQ ID NO: 769527 - DNA, 120 bp, Artificial Sequence
  ENSG00000232593_28 (sequence is synthesized)
ttacatctgttattacttctttaaaacattttatataatttttgttcaaccagtagtcactgtttgcatgagtatgacattgtaaatattgttcacatcaaaactacatagtatattctg

SEQ ID NO: 769528 - DNA, 120 bp, Artificial Sequence
  ENSG00000232593_29 (sequence is synthesized)
attacatatccttcgttgtataccctttcgttttccttggagctaataattgtgtattttgttttcttttgcttagtgttctagtacctatactattcttctctgaaattctttatacaa

SEQ ID NO: 769529 - DNA, 120 bp, Artificial Sequence
  ENSG00000232593_30 (sequence is synthesized)
tccaaatcagatcatgtccttccactattcagaattctcccatggctcccacctccctcaacaaaagccaaagccctcaccatggcccaaagtccctacataatctggttccctttacct

SEQ ID NO: 769530 - DNA, 120 bp, Artificial Sequence
  ENSG00000232593_31 (sequence is synthesized)
ctcttaccttgtctcctatcactctcaatatcactcactcttctccagctacactggcctccttgctgttccccaagtgtgctagatacccttccttttcagggcctttgtacttgttct

SEQ ID NO: 769531 - DNA, 120 bp, Artificial Sequence
  ENSG00000232593_32 (sequence is synthesized)
tctcactgcctgaaacacccttcctcctaaataatctgatgagttgccctagtacttccagtgtgctcaaatgtcacctccctagagaagtgtttcctgatcaacatatctaaaatcgcc

SEQ ID NO: 769532 - DNA, 120 bp, Artificial Sequence
  ENSG00000232593_33 (sequence is synthesized)
ccatcacatgcattttatatccctttatcctattttatgtatgtttttctacaaagcactgatcaccacctggtatattttatatttatttattgtggttagtgttcgtctctcttcagt

SEQ ID NO: 769533 - DNA, 120 bp, Artificial Sequence
  ENSG00000232593_34 (sequence is synthesized)
agactgtaagctccataaagcagggacttctgttttgttcactgctgtatccccagtgccaaaaacaacagtgcatagtagatactcaataaatatttgtggaataaactgaatgaatgg

SEQ ID NO: 769534 - DNA, 120 bp, Artificial Sequence
  ENSG00000232593_35 (sequence is synthesized)
gggttccgtccagcgtatccttcagatcttgctgtaggcctctggtgtctgtgcgcgcgcggcaggggcggcggcggcgacggccggaggtgtacggtgtaaatccaaaccgcttccaac

SEQ ID NO: 769535 - DNA, 120 bp, Artificial Sequence
  ENSG00000232593_36 (sequence is synthesized)
tcaaggcaagtaacagcccacggtgttctggcaggaaaacatcagctaagaaaggaaactgggtcctatggcttggactttccaactctgacagaccggcaggacagaaacaactggttc

SEQ ID NO: 769536 - DNA, 120 bp, Artificial Sequence
  ENSG00000232593_37 (sequence is synthesized)
aggagcccttgccagcctctagagaaatcccagaacactcagccctgatgacacattaataccctgcacatattggagactgctgaccacgcatactcaccaaccaccacttctggccac

SEQ ID NO: 769537 - DNA, 120 bp, Artificial Sequence
  ENSG00000232593_38 (sequence is synthesized)
aaatttctttttgaaggcttattccagttttgtgaggctagcatgaggtgtatgcatttgccaggggcaaatttatactgctgaattaacccatgcaacaaatgctgcacatctgctcgc

SEQ ID NO: 769538 - DNA, 120 bp, Artificial Sequence
  ENSG00000232593_39 (sequence is synthesized)
gggccacatacctaattgctaatccacatctgctggaaggtggacagtgaggccaggatggaaccaccaatccacaccgagtacttgtgctctgggggcatgatgaacttgatcttcatg

SEQ ID NO: 769539 - DNA, 120 bp, Artificial Sequence
  ENSG00000232593_40 (sequence is synthesized)
gtgctggatgccagcgtggtgatgccagggcacatggtggtgctgctggacagcactgtgttggcgtacaggtctttgcggatgtccacgtcacacttcatgatggagttgaaggtggtc

SEQ ID NO: 769540 - DNA, 120 bp, Artificial Sequence
  ENSG00000232593_41 (sequence is synthesized)
ttgtggatgccgcaggattccatgcccaagaaggaaggctggaacagcacctgcagacaccagaaccacttgttgccgatggtgatgacctgacctggccatcaggcagctcatagctct

SEQ ID NO: 769541 - DNA, 120 bp, Artificial Sequence
  ENSG00000232593_42 (sequence is synthesized)
tctccagggaggaggaggatgtggcagtggccatctcctgctcgaagtccagggcgatgtagcacaccttctcgttgatgtcgcgcacaatctcctgcttggccgtgatggtgaagcttg

SEQ ID NO: 769542 - DNA, 120 bp, Artificial Sequence
  ENSG00000232593_43 (sequence is synthesized)
gtgaggatcttcatgaggtagttggtcaggtcctggccagccaggtccagacgcaggatggcgtggtgggagggcatggccctcgtagatgggtaccatgtaggtggccctgtctccaga

SEQ ID NO: 769543 - DNA, 120 bp, Artificial Sequence
  ENSG00000232593_44 (sequence is synthesized)
ccgagtttatcttgggaactcaagaggagaggatcacccagttcacaggtatttgaggatacaaacccattgctgggctcggctttaaaagtcttatctgaaattccttgtgaaacagag

SEQ ID NO: 769544 - DNA, 84 bp, Artificial Sequence
  ENSG00000232593_45 (sequence is synthesized)
atataagactacagtttatttacaatttgtttttaccaaaaatgaggactagagagaaaaatggtgctccaaagcttatcatac

SEQ ID NO: 769545 - DNA, 89 bp, Artificial Sequence
  ENSG00000232593_46 (sequence is synthesized)
aagactacagtttatttacaatttgtttttaccaaaaatgaggactagagagaaaaatggtgtcctagtctcattaattgttttcaagc

SEQ ID NO: 769546 - DNA, 120 bp, Artificial Sequence
  ENSG00000232593_47 (sequence is synthesized)
aatcaagtagtggtctcctgcagcttggaagaaaaaataagggatgggtaatgtaaaaatctggatcaatatactggttctgggcaattatcctgcaaattctgccaggtaataaaagtg

SEQ ID NO: 769547 - DNA, 120 bp, Artificial Sequence
  ENSG00000232593_48 (sequence is synthesized)
agtagggtgcccataatccggaagtttctttgtttaggaaaataaaaacaaggaacttcatagaccccccccaaaggggaattctatatcttgacaagtaaaattttagatggaaattat

SEQ ID NO: 769548 - DNA, 120 bp, Artificial Sequence
  ENSG00000232593_49 (sequence is synthesized)
ctacaacaccacacttacggaaattgctatcctcactctattatttgcaaaagggttatacacagtagcaccttctaactgaagtattaaacagagtttccattgctgtcgtattttgct

SEQ ID NO: 769549 - DNA, 120 bp, Artificial Sequence
  ENSG00000232593_50 (sequence is synthesized)
taattattatccttatagcagggataatagttactaacaaaaaggaagcatgaaagttttactatcactgagcctggtaggactttttattgggtttagtgatgcagttttaaatgaaac

SEQ ID NO: 769550 - DNA, 120 bp, Artificial Sequence
  ENSG00000232593_51 (sequence is synthesized)
atgccgcttttggattaatacctctagtaaaggaaaatttacagatacttaaaaatcaaatcaaaattattgataggctcaggaaaaatgccagcttcagccctgagtggctacaaaccc

SEQ ID NO: 769551 - DNA, 120 bp, Artificial Sequence
  ENSG00000232593_52 (sequence is synthesized)
tctttaataaattccagtcttctttatggaattggttaacgcctttattaagccctctcttgcttatatgtcttgtattgatatttggactctgtatatacaatactataactcgaattg

SEQ ID NO: 769552 - DNA, 120 bp, Artificial Sequence
  ENSG00000232593_53 (sequence is synthesized)
tttcttctcgcctagaagcaatcaaactccaaatggtgctgtaaactgaaccacacatggacaggccattcttccgaggacccttagattgatcccagggggagccctagctgctattcc

SEQ ID NO: 769553 - DNA, 120 bp, Artificial Sequence
  ENSG00000232593_54 (sequence is synthesized)
ccattcaacgccccttttcagcaggaagtagccagaaggagtcgccgcccaaaatcccctaacagcagttagtgtggcatctccacaggaagtaatgttgtaggagttactaagaaatta

SEQ ID NO: 769554 - DNA, 120 bp, Artificial Sequence
  ENSG00000232593_55 (sequence is synthesized)
gggaagttttcattttttaaagcatctctggaaaagtttcttgtaaagccccggctcttagagccaggctggcaacctttgatatgcaaatgtaagccattagaaaccaggtccacccag

SEQ ID NO: 769555 - DNA, 69 bp, Artificial Sequence
  ENSG00000232593_56 (sequence is synthesized)
ccccggctcttagagccaggctggcaacctttgatatgcaaatgtaagccattagaaaccaggtccact

SEQ ID NO: 769556 - DNA, 65 bp, Artificial Sequence
  ENSG00000232593_57 (sequence is synthesized)
ctggccaacatggtgaaaccccgcctctaataaaaacacaaaaaactagccaggtgtgctgctgt

SEQ ID NO: 769557 - DNA, 120 bp, Artificial Sequence
  ENSG00000232593_58 (sequence is synthesized)
tatatgtatgtatgtatgttaacctcatcccaaaacatcctcacagaacatccagaataatgtttgaccaaatatctgggcaccaatggcacattcaagttgacacataaaattaaccct

SEQ ID NO: 769558 - DNA, 120 bp, Artificial Sequence
  ENSG00000232593_59 (sequence is synthesized)
cacaataccgtactgtacaacttttggagtgaagctggaatgtcatcgcatttccaagactaactcagtgtccacaaatgatgcttaagtcatgaggatcatctcggatttggatttgga

SEQ ID NO: 769559 - DNA, 120 bp, Artificial Sequence
  ENSG00000232593_60 (sequence is synthesized)
tgcctgtcaagccctcactcttcagactaaatgtctgatttgcatggagaattatcaagagaagcaacaatgccaagcagactattccaggtcaaaatagtcaaattaataattcataaa

SEQ ID NO: 769560 - DNA, 120 bp, Artificial Sequence
  ENSG00000232593_61 (sequence is synthesized)
ttattatatgttttgaaggtattgcaaaattaaagttgcaagaacagtacagataacttttttcctgaaccatttgagagtaggttgcagacctggtgccccatcatttctgaatatttt

SEQ ID NO: 769561 - DNA, 120 bp, Artificial Sequence
  ENSG00000232593_62 (sequence is synthesized)
agtgtgcattttctacaaacaaggacattttccagcataaccacaatgcacccatcaatgtcgtgaaattaatgttggtacattactaccacctagtcctcagaccctattcaaattata

SEQ ID NO: 769562 - DNA, 120 bp, Artificial Sequence
  ENSG00000232593_63 (sequence is synthesized)
ccagttatcataatagtttcttataatttatagcaaaatgatccaaaccaggagcatgcattgcatttttatgaatttttaaaacaattaagtctgtgtagtgagtgaagccacagtgat

SEQ ID NO: 769563 - DNA, 120 bp, Artificial Sequence
  ENSG00000232593_64 (sequence is synthesized)
aggaatatataaaggctttgcatctagaatttgttctgaaaaccctgagattcaagtagtacattatttcatttactattttacacagagaagccctcatttttaagagtttgcctttct

SEQ ID NO: 769564 - DNA, 120 bp, Artificial Sequence
  ENSG00000232593_65 (sequence is synthesized)
gatttccaccggaaatgatactatcagtatcatactcagaatcttaattacatacaaggcactaacctctcacctgttttcagctttgtgtaaagacaagggatcaaaacatccctttct

SEQ ID NO: 769565 - DNA, 120 bp, Artificial Sequence
  ENSG00000232593_66 (sequence is synthesized)
gctatttcatacttaagtgtgggagctgatccaaaggaagaatagtttcaaaagtttgtagcaaaaaaaatttaaaaggtgaagattttttccttgaatgattctcacctggcagatcta

SEQ ID NO: 769566 - DNA, 120 bp, Artificial Sequence
  ENSG00000232593_67 (sequence is synthesized)
tggaaagattagctgactctttggatccctgaatatagttaatagaaatttggaaggaccatgtcaaaattaactaatgtgaactgacaaagatttggtgttcaaagcaaaaattaaact

SEQ ID NO: 769567 - DNA, 120 bp, Artificial Sequence
  ENSG00000232593_68 (sequence is synthesized)
aaacaaaaaaaaaaaaaagaaaggaaaagttaggtgaaaatggtttccaggtgttgttgctgttatagtttgaatcataaaagttgttaaaagtctgctgtaacaaaccatcatagactg

SEQ ID NO: 769568 - DNA, 120 bp, Artificial Sequence
  ENSG00000232593_69 (sequence is synthesized)
gtctgctgtaacaaaccatcatagactgggtgacttataaagaacaaaaatgtatttctcacagttccagaggctgggaagtctaagatcaaggcatcagcagattcagtgtctggtgag

SEQ ID NO: 769569 - DNA, 120 bp, Artificial Sequence
  ENSG00000232593_70 (sequence is synthesized)
ggcccactttctggttcatagatggcaccttctcactgtctccccacgtgatggaaggggcaagaggtctctcttggtactcttttattaagggcactaatcccatccatggggctccac

SEQ ID NO: 769570 - DNA, 120 bp, Artificial Sequence
  ENSG00000232593_71 (sequence is synthesized)
cttcatgacctattcatctcccagaggccctacctgcagataccatcgtatgggggatttgatttcagcctgtgaatttgggggaagcgggacaaacattcgttttgtagcaaaaggagt

SEQ ID NO: 769571 - DNA, 120 bp, Artificial Sequence
  ENSG00000232593_72 (sequence is synthesized)
agagtaatatctgccaataactggaggaaagaattgttcttttaaaactattaaattgtttaatgggatttaaatgatttcaggaatgaaatggaaatcctggtaatgggtagaaacata

SEQ ID NO: 769572 - DNA, 120 bp, Artificial Sequence
  ENSG00000232593_73 (sequence is synthesized)
ggtaaattctccttttccacttaccaccacctgtgtgaacaacaatcatttctcattaatagtcaagaatttgaagagatcatgagtaaaaagtcttgatcagaaattgtgtatagctgt

SEQ ID NO: 769573 - DNA, 120 bp, Artificial Sequence
  ENSG00000232593_74 (sequence is synthesized)
ttccagcataaaaccttatataaaatgcatattcatagaagatgctcaagtatgtcatgaaaaatatgaagtttatttaaatatttatacaaattaaagatttactgtattctctaacag

SEQ ID NO: 769574 - DNA, 120 bp, Artificial Sequence
  ENSG00000232593_75 (sequence is synthesized)
aatatagcttgaatagaaagtcaaaatcagcaacaagtctacaatccagtgctgatatcagatacaagcttcaaggacaactttctgtgtatgtttttttttttttttttgagacgtagt

SEQ ID NO: 769575 - DNA, 120 bp, Artificial Sequence
  ENSG00000232593_76 (sequence is synthesized)
ataggcgtgagccaccacttctggccacaaatttctttttgaaggcttattccagttttgtgaggctagcatgaggtgtatgcatttgccaggggcaaatttatactgctgaattaaccc

SEQ ID NO: 769576 - DNA, 120 bp, Artificial Sequence
  ENSG00000232629_0 (sequence is synthesized)
tctcacttacgtcttggaagatggctctgcagatccctggaggcttttgggcagcagctgtgaccgtgatgctggtgatgctgagcaccccagtggctgaggccagagactttcccaagg

SEQ ID NO: 769577 - DNA, 120 bp, Artificial Sequence
  ENSG00000232629_1 (sequence is synthesized)
atttcttggtccagtttaagggcatgtgctacttcaccaacgggacagagcgcgtgcgcggtgtggccagatacatctataaccgcgaggagtacgggcgcttcgacagcgacgttgggg

SEQ ID NO: 769578 - DNA, 120 bp, Artificial Sequence
  ENSG00000232629_2 (sequence is synthesized)
agttccaggcggtgaccgagctggggcggagcatcgaggactggaacaactataaggacttcttggagcaggagcgggccgcggtggacaaggtgtgcagacacaactacgaggcggagc

SEQ ID NO: 769579 - DNA, 120 bp, Artificial Sequence
  ENSG00000232629_3 (sequence is synthesized)
tgcgcacgaccttgcagcggcaagtggagcccacagtgaccatctccccatccaggacagaggccctcaaccaccacaacctgctggtctgctcggtgacagatttctatccagcccaga

SEQ ID NO: 769580 - DNA, 120 bp, Artificial Sequence
  ENSG00000232629_4 (sequence is synthesized)
tgctggaaataactccccagcgtggagacatctacacctgccaagtggagcaccccagcctccagagccccatcaccgtggagtggcgacctcgagggcctccaccagcaggactcctgc

SEQ ID NO: 769581 - DNA, 120 bp, Artificial Sequence
  ENSG00000232629_5 (sequence is synthesized)
actgactcctgaggacttttgtctgggattggtcatcactcttctgtaatgcccacctgcccctgcccagaattcctagctgcctgtgtcaccctgtcccactgaggtcagagtcctaca

SEQ ID NO: 769582 - DNA, 120 bp, Artificial Sequence
  ENSG00000232629_6 (sequence is synthesized)
gtggctcatgcagccacaggtcaccttctgtgatccccatcccaaggcactggtggtgactctgcttcctgcactgacccagagcctctgcctgtgcactgcaagctgtgtctactcagg

SEQ ID NO: 769583 - DNA, 120 bp, Artificial Sequence
  ENSG00000232629_7 (sequence is synthesized)
ccccaaggggcatctctgtttccattctccccccacagacctgtcaagagaagcatgacaaacaaaatcatttacctgactttagtgctttttcccataattaaacctgattctgagtta

SEQ ID NO: 769584 - DNA, 120 bp, Artificial Sequence
  ENSG00000232629_8 (sequence is synthesized)
aatctgcccagagcaagatgctgagtggcattggaggcttcgtgctggggctgatcttcctcgggctgggccttatcatccgtcacaggggtcagaaaggacctcgagggcctccaccag

SEQ ID NO: 769585 - DNA, 120 bp, Artificial Sequence
  ENSG00000232629_9 (sequence is synthesized)
gggtcagaaaggacctcgagggcctccaccagcaggtaatatttcagccatgatccagtcaggggagagggcacaggcataagagggaagagccatggtgaaaccgcatctctactaaaa

SEQ ID NO: 769586 - DNA, 120 bp, Artificial Sequence
  ENSG00000232629_10 (sequence is synthesized)
atagagctagagtctgtctcaaaaaaaaaaaagaagagcatgagcggagtgttccagggcacagtggtctctgttcatggcctgtttgctgctatgagggttaagacttaggggaaaagt

SEQ ID NO: 769587 - DNA, 120 bp, Artificial Sequence
  ENSG00000232629_11 (sequence is synthesized)
ttgccagtttctacgaatctccagagattgtttcctagaaccaggccttaactttggtggcatctttttgtgaaatgtggggacagagccacatcttgaatgtgagatagtagggtgatg

SEQ ID NO: 769588 - DNA, 120 bp, Artificial Sequence
  ENSG00000232629_12 (sequence is synthesized)
cccactttgtgccacattttgttagctactgcctgtaggcattttcagtgactaaaagaggctgctagtggtggagatgaagtgtcacccaatttactaaaaaaatcaaactcttcatat

SEQ ID NO: 769589 - DNA, 120 bp, Artificial Sequence
  ENSG00000232629_13 (sequence is synthesized)
tacccagaagggtaactgctgttcccccacctccacatatctgcatcaagctgaagttctgtgtcctcatgagctgattttacctttacacagatattggggaacgtgatgatgatatgc

SEQ ID NO: 769590 - DNA, 120 bp, Artificial Sequence
  ENSG00000232629_14 (sequence is synthesized)
cctggacctcagcatcctctgtttgatgctacagagggaactgaggactaggggagagggtgtgtccctcagggtaccctgtgctgatcatgcctcgtctctcttctccaggactcctgc

SEQ ID NO: 769591 - DNA, 120 bp, Artificial Sequence
  ENSG00000232653_0 (sequence is synthesized)
agtcacacagctgcctggtaggtgactggaggccttgatcggttcttattgggattttgctgctgtggccccaacccttcctccctccccaccctgcgatggcagaagaaactcaacaca

SEQ ID NO: 769592 - DNA, 120 bp, Artificial Sequence; identical to SEQ ID NO: 751008
  ENSG00000232653_1 (sequence is synthesized)

SEQ ID NO: 769593 - DNA, 120 bp, Artificial Sequence; identical to SEQ ID NO: 751009
  ENSG00000232653_2 (sequence is synthesized)

SEQ ID NO: 769594 - DNA, 85 bp, Artificial Sequence; identical to SEQ ID NO: 751010
  ENSG00000232653_3 (sequence is synthesized)

SEQ ID NO: 769595 - DNA, 120 bp, Artificial Sequence; identical to SEQ ID NO: 751011
  ENSG00000232653_4 (sequence is synthesized)

SEQ ID NO: 769596 - DNA, 120 bp, Artificial Sequence
  ENSG00000232653_5 (sequence is synthesized)
tccgtctgcaacattcattgcagtgtaaaggagagttagagagcgctctgtctgctgtcatcgccacagagaagaagaaggcaaaccagttgtccagctgcagcaaagcacatacagagt

SEQ ID NO: 769597 - DNA, 120 bp, Artificial Sequence; identical to SEQ ID NO: 751013
  ENSG00000232653_6 (sequence is synthesized)

SEQ ID NO: 769598 - DNA, 120 bp, Artificial Sequence; identical to SEQ ID NO: 751014
  ENSG00000232653_7 (sequence is synthesized)

SEQ ID NO: 769599 - DNA, 120 bp, Artificial Sequence; identical to SEQ ID NO: 751015
  ENSG00000232653_8 (sequence is synthesized)

SEQ ID NO: 769600 - DNA, 74 bp, Artificial Sequence; identical to SEQ ID NO: 751016
  ENSG00000232653_9 (sequence is synthesized)

SEQ ID NO: 769601 - DNA, 120 bp, Artificial Sequence; identical to SEQ ID NO: 751017
  ENSG00000232653_10 (sequence is synthesized)

SEQ ID NO: 769602 - DNA, 120 bp, Artificial Sequence
  ENSG00000232653_11 (sequence is synthesized)
aggacctggagagcagggaggccatgagcagctttatggaccacctgaaggagaaggcagacctgagtgagctggtgaaaaaacaagaacttcgcttcattcaatactggcaagagagat

SEQ ID NO: 769603 - DNA, 120 bp, Artificial Sequence; identical to SEQ ID NO: 751019
  ENSG00000232653_12 (sequence is synthesized)

SEQ ID NO: 769604 - DNA, 85 bp, Artificial Sequence; identical to SEQ ID NO: 751020
  ENSG00000232653_13 (sequence is synthesized)

SEQ ID NO: 769605 - DNA, 76 bp, Artificial Sequence; identical to SEQ ID NO: 751021
  ENSG00000232653_14 (sequence is synthesized)

SEQ ID NO: 769606 - DNA, 73 bp, Artificial Sequence
  ENSG00000232653_15 (sequence is synthesized)
atttacttcctttgaatgttagactcactagttaaaagagagtgtgtgtctgtggctctcactgatgttcact

SEQ ID NO: 769607 - DNA, 120 bp, Artificial Sequence
  ENSG00000232653_16 (sequence is synthesized)
ttgcctatgttctgctgttgtttgatctaatcttaatcacagtgagctcttccttagctcaatatgtagtttgcccccaagtgtgcactgtttattactttgtaatacgccactatgagt

SEQ ID NO: 769608 - DNA, 77 bp, Artificial Sequence
  ENSG00000232653_17 (sequence is synthesized)
cctctggcaggtatgtgcaggatagagtgtgtttcatctcttccggtgccaggaattagcggtgtattatggtggtg

SEQ ID NO: 769609 - DNA, 120 bp, Artificial Sequence
  ENSG00000232653_18 (sequence is synthesized)
tcttcaaccaccttggttactctgatataggaatttacttctttttctttgaatggaaaacactttaaaaaaaatagaaacattcttataaactaatatatgtgagatagttgaaacaaa

SEQ ID NO: 769610 - DNA, 120 bp, Artificial Sequence
  ENSG00000232653_19 (sequence is synthesized)
caatgtattatcaggaaacgtgtctatacaaccacagagttatattttctcacaaacttctttacaaagtgaaatatgtttttgtacctctgggtttctgttcgggacatattttgtgcg

SEQ ID NO: 769611 - DNA, 120 bp, Artificial Sequence
  ENSG00000232653_20 (sequence is synthesized)
ggtttctgttcgggacatattttgtgcgatatttatgtgattgtgcctatgcatgatgaatgaatgcatttcagttatgtattgcctaaatcgtaacttgatgatgcttgggaaagactc

SEQ ID NO: 769612 - DNA, 69 bp, Artificial Sequence
  ENSG00000232653_21 (sequence is synthesized)
ttagaccaaataatgcggctaattaacagtggtacgatttctagcccgtgggtttaaaatgcacttaaa

SEQ ID NO: 769613 - DNA, 120 bp, Artificial Sequence
  ENSG00000232653_22 (sequence is synthesized)
tatattgactgaaataccactctttgtgtaggtatttgtcatatatttaagaaaacactaaaaagaatggaaattgtatgacaataacttaagtctttctccaaagtgcatgcagtcttt

SEQ ID NO: 769614 - DNA, 120 bp, Artificial Sequence
  ENSG00000232653_23 (sequence is synthesized)
acaataacttaagtctttctccaaagtgcatgcagtcttttgcgatacctcattcagccgagtatttgtactcttcctcattcagtataaggaagctttcagtttgcttagaaggcaaca

SEQ ID NO: 769615 - DNA, 120 bp, Artificial Sequence
  ENSG00000232653_24 (sequence is synthesized)
ttggaatgttagagttcatgagaaacatagaattttaaactgtgagttccactgaatacattttaatgtctgtaggaagaatcaaaacacctatttaaagatggcaatatataataatca

SEQ ID NO: 769616 - DNA, 120 bp, Artificial Sequence
  ENSG00000232653_25 (sequence is synthesized)
caatatataataatcattttaaaagtatttgattcaacctaattttccagaaatgaaaaaaaaaaaatcagctctaaaaccaaagctgatttcagaaaatttgaaaatgtaaatcagccc

SEQ ID NO: 769617 - DNA, 120 bp, Artificial Sequence
  ENSG00000232653_26 (sequence is synthesized)
aaataatataactattaaaaaatgtaactgctatcttaatgttctgaaataatttaaaacattttaaaatatgaatactgtagtataaaagaaagaaatggtgggaacgaaaagcagaga

SEQ ID NO: 769618 - DNA, 85 bp, Artificial Sequence
  ENSG00000232653_27 (sequence is synthesized)
caagttttcttagaatgaattttaccagtttatgaattattgtaaacagaatgtgtcatggaaatactgaaagatttttccctag

SEQ ID NO: 769619 - DNA, 84 bp, Artificial Sequence
  ENSG00000232653_28 (sequence is synthesized)
attaaattgtttcaatgtgttgtttttgccttaaaattttattttgcgtttcttgaaaactatagtattaaaggtattgatact

SEQ ID NO: 769620 - DNA, 79 bp, Artificial Sequence
  ENSG00000232653_29 (sequence is synthesized)
aattgtttcaatgtgttgtttttgccttaaaattttattttgcgtttcttgaaaactatagtcatgagataatgtgttt

SEQ ID NO: 769621 - DNA, 120 bp, Artificial Sequence
  ENSG00000232653_30 (sequence is synthesized)
ttccatcctatatctgctgtgaagaaccgtacctggcccataggtgctcagtaagtgtttattgaatgaacccacttttctaaatcacaagctgccagaaggaggggcctttctgaaact

SEQ ID NO: 769622 - DNA, 80 bp, Artificial Sequence
  ENSG00000232653_31 (sequence is synthesized)
taaatcacaagggtttatgttgctgtcctctcaagagattccagattcagactgagttctgtggctgtgggcaaaagcca

SEQ ID NO: 769623 - DNA, 72 bp, Artificial Sequence
  ENSG00000232653_32 (sequence is synthesized)
tccttgggagcttgaggagagtttaccggttcgtgttcccattacttcctggtctggggaatagagttgagg

SEQ ID NO: 769624 - DNA, 87 bp, Artificial Sequence
  ENSG00000232653_33 (sequence is synthesized)
ctggaagaagtaacgtgatttcgtttcctcgcgacatgactgctgggtttggggggcactcagacatagaggccccagtctcgaccc

SEQ ID NO: 769625 - DNA, 62 bp, Artificial Sequence
  ENSG00000232653_34 (sequence is synthesized)
ggggtccctggtgcccgggacaaatagggagcttgggtgcccaggcctcacctggagggacc

SEQ ID NO: 769626 - DNA, 120 bp, Artificial Sequence; identical to SEQ ID NO: 751035
  ENSG00000232653_35 (sequence is synthesized)

SEQ ID NO: 769627 - DNA, 120 bp, Artificial Sequence
  ENSG00000232653_36 (sequence is synthesized)
acaaattggctgcagccaagaaaaaggtaaaaacgcactaggtcatagcccctcaacccagccacagatcccctctgatgacaagacccctgccagagtctatacgactcctgaggcaca

SEQ ID NO: 769628 - DNA, 120 bp, Artificial Sequence
  ENSG00000232653_37 (sequence is synthesized)
ctggactggtccccccaaccccggtgccttgggctacccccaccaaagttttgtcagtcagccccaccccttcagaaagcagcccagtccttgccctcgccaatcaccccagggtgactt

SEQ ID NO: 769629 - DNA, 120 bp, Artificial Sequence
  ENSG00000232653_38 (sequence is synthesized)
tgggtgggtgactcctggggcttcccgctccattactgggccgtcatctcctgccgccccaagcttgatctccgtgggctctttgggctctcatctccaaggagccaggccccaccctcg

SEQ ID NO: 769630 - DNA, 120 bp, Artificial Sequence
  ENSG00000232653_39 (sequence is synthesized)
gggctctcatctccaaggagccaggccccaccctcgccagtcatccttgggtgactttgggctggtgactcctgggactccctgctgcagactgtgccctcccctcctgctgcctcaagg

SEQ ID NO: 769631 - DNA, 120 bp, Artificial Sequence
  ENSG00000232653_40 (sequence is synthesized)
cttacagatgttgacggtgggaaaagcctacacttcccccatgaactcaaaacaatgacagtatctctgggtggcaatgagagaatgggtttgatttggttttctcccaggcttctactt

SEQ ID NO: 769632 - DNA, 120 bp, Artificial Sequence
  ENSG00000232810_0 (sequence is synthesized)
agcagacgctccctcagcaaggacagcagaggaccagctaagagggagagaagcaactacagaccccccctgaaaacaaccctcagacgccacatcccctgacaagctgccaggcaggtt

SEQ ID NO: 769633 - DNA, 120 bp, Artificial Sequence
  ENSG00000232810_1 (sequence is synthesized)
ctcttcctctcacatactgacccacggctccaccctctctcccctggaaaggacaccatgagcactgaaagcatgatccgggacgtggagctggccgaggaggcgctccccaagaagaca

SEQ ID NO: 769634 - DNA, 120 bp, Artificial Sequence
  ENSG00000232810_2 (sequence is synthesized)
ggggggccccagggctccaggcggtgcttgttcctcagcctcttctccttcctgatcgtggcaggcgccaccacgctcttctgcctgctgcactttggagtgatcggcccccagagggaa

SEQ ID NO: 769635 - DNA, 120 bp, Artificial Sequence
  ENSG00000232810_3 (sequence is synthesized)
gagttccccagggacctctctctaatcagccctctggcccaggcagtcagatcatcttctcgaaccccgagtgacaagcctgtagcccatgttgtagcaaaccctcaagctgaggggcag

SEQ ID NO: 769636 - DNA, 120 bp, Artificial Sequence
  ENSG00000232810_4 (sequence is synthesized)
ctccagtggctgaaccgccgggccaatgccctcctggccaatggcgtggagctgagagataaccagctggtggtgccatcagagggcctgtacctcatctactcccaggtcctcttcaag

SEQ ID NO: 769637 - DNA, 120 bp, Artificial Sequence
  ENSG00000232810_5 (sequence is synthesized)
ggccaaggctgcccctccacccatgtgctcctcacccacaccatcagccgcatcgccgtctcctaccagaccaaggtcaacctcctctctgccatcaagagcccctgccagagggagacc

SEQ ID NO: 769638 - DNA, 120 bp, Artificial Sequence
  ENSG00000232810_6 (sequence is synthesized)
ccgagtctgggcaggtctactttgggatcattgccctgtgaggaggacgaacatccaaccttcccaaacgcctcccctgccccaatccctttattaccccctccttcagacaccctcaac

SEQ ID NO: 769639 - DNA, 120 bp, Artificial Sequence
  ENSG00000232810_7 (sequence is synthesized)
ctcttctggctcaaaaagagaattgggggcttagggtcggaacccaagcttagaactttaagcaacaagaccaccacttcgaaacctgggattcaggaatgtgtggcctgcacagtgaag

SEQ ID NO: 769640 - DNA, 120 bp, Artificial Sequence
  ENSG00000232810_8 (sequence is synthesized)
tgctggcaaccactaagaattcaaactggggcctccagaactcactggggcctacagctttgatccctgacatctggaatctggagaccagggagcctttggttctggccagaatgctgc

SEQ ID NO: 769641 - DNA, 120 bp, Artificial Sequence
  ENSG00000232810_9 (sequence is synthesized)
aggacttgagaagacctcacctagaaattgacacaagtggaccttaggccttcctctctccagatgtttccagacttccttgagacacggagcccagccctccccatggagccagctccc

SEQ ID NO: 769642 - DNA, 120 bp, Artificial Sequence
  ENSG00000232810_10 (sequence is synthesized)
tctatttatgtttgcacttgtgattatttattatttatttattatttatttatttacagatgaatgtatttatttgggagaccggggtatcctgggggacccaatgtaggagctgccttg

SEQ ID NO: 769643 - DNA, 120 bp, Artificial Sequence
  ENSG00000232810_11 (sequence is synthesized)
gctcagacatgttttccgtgaaaacggagctgaacaataggctgttcccatgtagccccctggcctctgtgccttcttttgattatgttttttaaaatatttatctgattaagttgtcta

SEQ ID NO: 769644 - DNA, 120 bp, Artificial Sequence
  ENSG00000232810_12 (sequence is synthesized)
aacaatgctgatttggtgaccaactgtcactcattgctgagcctctgctccccaggggagttgtgtctgtaatcgccctactattcagtggcgagaaataaagtttgcttagaaaagaaa

SEQ ID NO: 769645 - DNA, 120 bp, Artificial Sequence
  ENSG00000232838_0 (sequence is synthesized)
gagcctgggcagtacaggcggcggtgcgcactctgcggcggcctctgcgcctcgggcgggcgggagagagaggccgcggccgccagcgtggggatgtctaggagctcgaaggtggtgctg

SEQ ID NO: 769646 - DNA, 120 bp, Artificial Sequence
  ENSG00000232838_1 (sequence is synthesized)
ggcctctcggtgctgctgacggcggccacagtggccggcgtacatgtgaagcagcagtgggaccagcagaggcttcgtgacggagttatcagagacattgagaggcaaattcggaaaaaa

SEQ ID NO: 769647 - DNA, 120 bp, Artificial Sequence
  ENSG00000232838_2 (sequence is synthesized)
gaaaacattcgtcttttgggagaacagattattttgactgagcaacttgaagcagaaagagagaagatgttattggcaaaaggatctcaaaaatcatgacttgaatgtgaaatatctgtt

SEQ ID NO: 769648 - DNA, 120 bp, Artificial Sequence
  ENSG00000232838_3 (sequence is synthesized)
ggacagacaacacgagtttgtgtgtgtgtgttgatggagagtagcttagtagtatcttcatctttttttttggtcactgtccttttaaacttgatcaaataaaggacagtgggtcatata

SEQ ID NO: 769649 - DNA, 120 bp, Artificial Sequence
  ENSG00000232838_4 (sequence is synthesized)
tgggtgatcctggtagaagccccattagggtcactgtccagtgcttagggttgttactgagaagcactgccgagcttgtgagaaggaagggatggatagtagcatccacctgagtagtct

SEQ ID NO: 769650 - DNA, 120 bp, Artificial Sequence
  ENSG00000232838_5 (sequence is synthesized)
gatcagtcggcatgatgacgaagccacgagaacatcgacctcagaaggactggaggaaggtgaagtggagggagagacgctcctgatcgtcgaatccgaggatcaggcatcagtggactt

SEQ ID NO: 769651 - DNA, 120 bp, Artificial Sequence
  ENSG00000232838_6 (sequence is synthesized)
atcgcacgaccagagtggggattccctcaacagtgatgaaggagacgtgtcttggatggaggagcagctgtcctacttctgtgacaagtgccaaaaatggataccagccagtaaggagct

SEQ ID NO: 769652 - DNA, 120 bp, Artificial Sequence
  ENSG00000232838_7 (sequence is synthesized)
tctcaattcctttgatttgtcaattcctgtgtgaaggtttgtttttccaacctgtgaaagaaacgtgaatgtaaaagagacctaaataaaaggataattatatttattctctagttgatc

SEQ ID NO: 769653 - DNA, 120 bp, Artificial Sequence
  ENSG00000232838_8 (sequence is synthesized)
agctataaatttatataaaacataggcatgtttgtactaatgaaacgtactgtcaacctctatcacattgttaaattaacacttttggtggtaactcaataaaattgagaaaattggaaa

SEQ ID NO: 769654 - DNA, 120 bp, Artificial Sequence
  ENSG00000232859_0 (sequence is synthesized)
agtccccggggcgcaggcgcactcgtcgccgcggcggcgtccggggctggcgttcccctggaggctgggacagagggtctcacggatggccccgctgccaggagcagaactggttcggag

SEQ ID NO: 769655 - DNA, 120 bp, Artificial Sequence
  ENSG00000232859_1 (sequence is synthesized)
gccactgcagctctaccgatacttgctgcgctgttgccagcagctgccgaccaagggcatccagcagcattacaagcatgctgtcaggcagagttttcgggttcattcagatgaagacaa

SEQ ID NO: 769656 - DNA, 120 bp, Artificial Sequence
  ENSG00000232859_2 (sequence is synthesized)
tattaaaagagccattgaagatgctgactggatcatgaacaaatataaaaaacaaaactgagagctccgagggtgagccttcctggcctctggaagttgagaggcccctcttctggagct

SEQ ID NO: 769657 - DNA, 120 bp, Artificial Sequence
  ENSG00000232859_3 (sequence is synthesized)
cagcagcagcagctggtttggaagagccattggccttgttggctgaaagccagaaatcaggggagaagctgaccttgctccagaggctcctcttgccgcggccatgttgctagcatcctt

SEQ ID NO: 769658 - DNA, 120 bp, Artificial Sequence
  ENSG00000232859_4 (sequence is synthesized)
gaactaatacagtatagtttcttgttcttcagaagcttacagtcagcaaggaacagaaagccaaataaagtaggaaagggctcaggcctgtaggcattctcccctctgtggcttggtgcc

SEQ ID NO: 769659 - DNA, 120 bp, Artificial Sequence
  ENSG00000232859_5 (sequence is synthesized)
ctcgccagaccatggctgatgtcagagctggtttcctagtgattgcccctcagggtcttcctgcttttctaccctaccctgccggtgagggacacctactcatgcaccacttgaagttga

SEQ ID NO: 769660 - DNA, 120 bp, Artificial Sequence
  ENSG00000232859_6 (sequence is synthesized)
agccacttacgatgtgaaatttggggagaatgtagtatttttttgcttcttttgtgtgttttttatttttgtgtttttgttcttttacttttctctgaaagtgattcatttattctggag

SEQ ID NO: 769661 - DNA, 120 bp, Artificial Sequence
  ENSG00000232859_7 (sequence is synthesized)
tttatcattctctgagtcccagagcagatgtcccctcaggtagcaacctgtacagaagaaagcacgtgggttttagaaccagacagatctggatttgaatcccagatgcaataagatgaa

SEQ ID NO: 769662 - DNA, 120 bp, Artificial Sequence
  ENSG00000232859_8 (sequence is synthesized)
ggtgaagtgcctcacacaggatgtggcacatgacagtgcctgaagggctcccttcaaggaagccgtcctgccccgccccctcctctgctcctgcagcgccctgcacagctctgctccccg

SEQ ID NO: 769663 - DNA, 120 bp, Artificial Sequence
  ENSG00000232859_9 (sequence is synthesized)
catgcaccgcatcgggtctcagttttttgtttgcgagcttgccctgtccctgcttgtagcccctgagccctcacagttgtcacacacccagcagtctgccaaggagctgcttttcctgac

SEQ ID NO: 769664 - DNA, 120 bp, Artificial Sequence
  ENSG00000232859_10 (sequence is synthesized)
tactgtctctccatgcctagggaagtcaaagccctgggccttgccttcagggagttgacagtgtccttgaagtggtgaagtgcccaccacatgaaccaaggagagacgccaaagcagctg

SEQ ID NO: 769665 - DNA, 120 bp, Artificial Sequence
  ENSG00000232859_11 (sequence is synthesized)
ccatggactctggcctgtccaagcctctgtgcacctgcagtctctttccactggcacttccctgctttgctaccatcgtggaagaatggaagggagggggagaaggtgggtgggctcagg

SEQ ID NO: 769666 - DNA, 120 bp, Artificial Sequence
  ENSG00000232859_12 (sequence is synthesized)
gagaacggccagagtggccagaagatgcagagagaagccccactgggatctgagtattccccaagggcactcagccacagggatgaactagtgtttgtttgtatccttgcagttatgtga

SEQ ID NO: 769667 - DNA, 120 bp, Artificial Sequence
  ENSG00000232859_13 (sequence is synthesized)
cttaaagtgactcagagatatctatgtatgcgagtgtactccgctggcaatgaagtaaatatatcaatttgtggaagctcgtgtgtcttctcaactgataaaccatacgttccctaagca

SEQ ID NO: 769668 - DNA, 120 bp, Artificial Sequence
  ENSG00000232859_14 (sequence is synthesized)
ccctgagagaatccagcagattattaaaagagccattgaagatgctgactggatcatgaacaaattgagaatggtccctgtggaggaggccaccagccagctgcttccctcctccagaag

SEQ ID NO: 769669 - DNA, 120 bp, Artificial Sequence
  ENSG00000232859_15 (sequence is synthesized)
tttctgatgcaggaatacagctatctaggaacaaaagggagatgagactacagaacagactgtgaaatttcttaaaattattaaatgatcctaagactgagcacaggagtggatgatgtt

SEQ ID NO: 769670 - DNA, 120 bp, Artificial Sequence
  ENSG00000232859_16 (sequence is synthesized)
actgcagattgttcttaataagggctttaaaagcttaatgatttattgattggctctgcattaatgacgtgcccttgattatgcatgtgtaaataagagggctgatttatgagggtacaa

SEQ ID NO: 769671 - DNA, 120 bp, Artificial Sequence
  ENSG00000232859_17 (sequence is synthesized)
ttgtatctttcagatatatttgtccaagtctacatctttaaaataaatggaagcaattatctgaatatttcaagggagggaaccccaccttcccatcccccacccccgatttgagggaag

SEQ ID NO: 769672 - DNA, 120 bp, Artificial Sequence
  ENSG00000232859_18 (sequence is synthesized)
tctagtatgttaggtgaagagaaaaaaaaagaaaagaggaagctctaaagggagttaggaacaaaacaaaacttccgttaagaaatatccctgcttctcttatcctaagagaagaaaaac

SEQ ID NO: 769673 - DNA, 90 bp, Artificial Sequence
  ENSG00000232859_19 (sequence is synthesized)
ctgtaagaagttgtcctgttaaatcaacgacacatggagtctgaaggaaatcagccttttcgttacaaacaggtttaaaaagccctggag

SEQ ID NO: 769674 - DNA, 120 bp, Artificial Sequence
  ENSG00000232859_20 (sequence is synthesized)
tcagccttttcgttacaaacaggtttaaaaagccctggagaagagagacgtgaacagaagcaatattatccactaacaacctaactcccgcttagacatcagctgagagatcagcagcat

SEQ ID NO: 769675 - DNA, 120 bp, Artificial Sequence
  ENSG00000232859_21 (sequence is synthesized)
cattgaacaggggggtttgtcttaagataatgactcatcttgatttctttcaggatataaaacttgtatttaaatcaattcagagaagcacttgagctttaaacattagagagcagggag

SEQ ID NO: 769676 - DNA, 120 bp, Artificial Sequence
  ENSG00000232859_22 (sequence is synthesized)
agcctatttaataaacagcattatttcattttcaaagaatgatactggcagtagctctaagtttaaattttgtattattttcctcaattataattatagatgggtctgaaaggaagcatg

SEQ ID NO: 769677 - DNA, 120 bp, Artificial Sequence
  ENSG00000232859_23 (sequence is synthesized)
cttattactgtcatatttattcttttgacaggtgttatgggactgtaatttggtgaaatgattcaaaacgcagattcctatccaaacacaattcttgtcatcaacacgagaggttcagga

SEQ ID NO: 769678 - DNA, 120 bp, Artificial Sequence
  ENSG00000232859_24 (sequence is synthesized)
aaagtcctccagcaagcctttcagagatcttgaacaccccatattcatagcacaatccatattcaggaataaggaggagagagtgcctttagggcttatatccggcgtagcaacagccag

SEQ ID NO: 769679 - DNA, 120 bp, Artificial Sequence
  ENSG00000232859_25 (sequence is synthesized)
aaggcagagtgggtgtttgaggtaacaggtaacgaaggctgttagtggggacagctttcaactgggtggggtcggatctaggaagaggcacccagtaggaccccgagtcccgcgcgcggc

SEQ ID NO: 769680 - DNA, 80 bp, Artificial Sequence
  ENSG00000232859_26 (sequence is synthesized)
ggcgcactcgtcgccgcggcggcgtccggggctggcgttcccctggaggctggtgagccgcgctgcgcaggccgaggccg

SEQ ID NO: 769681 - DNA, 120 bp, Artificial Sequence
  ENSG00000232859_27 (sequence is synthesized)
gtggcgggggcgggctagggatgtggaggcctcgggtgtcctcggatctattgaagacctaggggcgacccgcgccggcaccttttcccttgcggtctgcgctcttccaccggagagctg

SEQ ID NO: 769682 - DNA, 120 bp, Artificial Sequence
  ENSG00000232859_28 (sequence is synthesized)
gagagctgagtgcaccggagcgcggcgcccgggcttgacgcaggcctggccgggcggcctcggaggagcaggaaaggcctgcagcgcgagctaggggcgcgaggtccggggcagcccgga

SEQ ID NO: 769683 - DNA, 120 bp, Artificial Sequence
  ENSG00000232859_29 (sequence is synthesized)
tctcagaggctcacgggcctggccacttttaaaaggagaatgtcccctccaccgtccctctgcccgcggcacccggtggccggagcaaccttgtcgtgatgatttatgcttctgcgtaag

SEQ ID NO: 769684 - DNA, 120 bp, Artificial Sequence
  ENSG00000232859_30 (sequence is synthesized)
agcaagttgctccgtggccaaaaccctttcgctcctaggattgatcctttttgtggttattgttttaaaaagttttattgagatataattcacgaagcatacagttcacccatctaaagt

SEQ ID NO: 769685 - DNA, 120 bp, Artificial Sequence
  ENSG00000232859_31 (sequence is synthesized)
gcacaattcagtgtcttttagtgtgtttgcagagttgtgcagctgtcaccataatgttttagaacattaccccccaaaagaaacacctcctttagctgtcactcccccctcccatctact

SEQ ID NO: 769686 - DNA, 120 bp, Artificial Sequence
  ENSG00000232859_32 (sequence is synthesized)
cccattctcccagccctaggcaaccaccaatgtacttctgtctctgtacttttgcctattctggatgtttcgtataaatggaatcatacattaagtagccccttgtgactgggtttgttc

SEQ ID NO: 769687 - DNA, 120 bp, Artificial Sequence
  ENSG00000232859_33 (sequence is synthesized)
acttagcgtaatgttttctgggttcacctgccataggttcttgacttcaggacagtttcctgctggctttagtttcctctggtaacttgggaatcaattgacatctatggaacttctgtt

SEQ ID NO: 769688 - DNA, 120 bp, Artificial Sequence
  ENSG00000232859_34 (sequence is synthesized)
atggttcaggtactataaactgtggaggagtgactaataaccgtatatatatttttcttactaatttcccttcatttcacaggtgttgaactaatacagtatagtttcttgttcttcaga

SEQ ID NO: 769689 - DNA, 120 bp, Artificial Sequence
  ENSG00000232859_35 (sequence is synthesized)
agcttacagtcagcaaggaacagaaagccaaataaagtaggaaagggtaagatgttcaacgctgggcgcagtggctcatgcccataatctcagcaccgtaggaggctgaggaaagaggat

SEQ ID NO: 769690 - DNA, 120 bp, Artificial Sequence
  ENSG00000232859_36 (sequence is synthesized)
agaccagcctgggcaacatagtaagacttcgtttctataaataattaaaaaaattagccagacgtggtggcgtgtgcctgtgatcccggccacttgagaggctgaggtagaatcgtttga

SEQ ID NO: 769691 - DNA, 120 bp, Artificial Sequence
  ENSG00000232859_37 (sequence is synthesized)
ggcgtgtgcctgtgatcccggccacttgagaggctgaggtagaatcgtttgagcccgggcagttgtgactgcagtgatccctgatcatgctactgtactccagcctgggtgacagagtga

SEQ ID NO: 769692 - DNA, 120 bp, Artificial Sequence
  ENSG00000232859_38 (sequence is synthesized)
gattcatgcttctcagactttaaaatgtgcctgcaaatctcctggcatccttgttaaaatgcaggtttgatctggtgggtctttggggtggggcccaagactacatttgtgatgagctcc

SEQ ID NO: 769693 - DNA, 120 bp, Artificial Sequence
  ENSG00000232859_39 (sequence is synthesized)
ctgggttcacctgccataggttcttgacttcaggacagtttcctgctggctttagtttcctctggtaacttgggaatcaattgacatctatggaacttctgttatggttcagggacagag

SEQ ID NO: 769694 - DNA, 120 bp, Artificial Sequence
  ENSG00000232859_40 (sequence is synthesized)
aagagccattgaagatgctgactggatcatgaacaaagtaggtgcttggcccctgggctctgcctgcgagctggggtgatgatggctgtgatccccatgaccactagaggccactcctgc

SEQ ID NO: 769695 - DNA, 120 bp, Artificial Sequence
  ENSG00000232859_41 (sequence is synthesized)
ggggctctcactcttcatccttaaaggcaaatttctgcccaacagtgctgatcgagctgagagggggcagcaggaagaaggagggaaagctatagtgccagagccggcggtggcactgtg

SEQ ID NO: 769696 - DNA, 120 bp, Artificial Sequence
  ENSG00000232859_42 (sequence is synthesized)
atgccgcagagagggaagctgtcctggcgggggactccctgtctctggggggtattcacactggggcagaattatggaggaaacattcagtatgttttggtggaggaagggagtgagtca

SEQ ID NO: 769697 - DNA, 120 bp, Artificial Sequence
  ENSG00000232859_43 (sequence is synthesized)
ggaatgtagactggcgtcttggcccttagatgctggtattagaaggacctagagagttggagtgtgaccatacctccctgtccttctaactcactctccagagtgagttatcactatcct

SEQ ID NO: 769698 - DNA, 120 bp, Artificial Sequence
  ENSG00000232859_44 (sequence is synthesized)
ccctccccagccctgtcagcttcctttttcactaaagaagaaagggagtccaggcatgaactagagatttggctgcccagtgcctcctgcttgggtttcaccacctccaagaagcccctg

SEQ ID NO: 769699 - DNA, 120 bp, Artificial Sequence
  ENSG00000232859_45 (sequence is synthesized)
caggaggcaggtgaggtccagatgatggaggcctgagatttctccagagtcctcctgcccctgttggcttccctcctccacttcgaatctctctgtcttgcagtataaaaaacaaaactg

SEQ ID NO: 769700 - DNA, 120 bp, Artificial Sequence
  ENSG00000232869_0 (sequence is synthesized)
gaaggaaagatgaacttgagtttcacttcttagtgccttttctcaggggagaggccatcacttgaagatgctgagtcttctgctccttctcctgggactaggctctgtgttcagtgctgt

SEQ ID NO: 769701 - DNA, 120 bp, Artificial Sequence
  ENSG00000232869_1 (sequence is synthesized)
ctccctgacgatccagtgtcaagtcgatagccaagtcaccatgatgttctggtaccgtcagcaacctggacagagcctgacactgatcgcaactgcaaatcagggctctgaggccacata

SEQ ID NO: 769702 - DNA, 120 bp, Artificial Sequence
  ENSG00000232869_2 (sequence is synthesized)
tgagagtggatttgtcattgacaagtttcccatcagccgcccaaacctaacattctcaactctgactgtgagcaacatgagccctgaagacagcagcatatatctctgcagcgttgaaga

SEQ ID NO: 769703 - DNA, 120 bp, Artificial Sequence
  ENSG00000232948_0 (sequence is synthesized)
atgaaactccattcccttatttctgttctcctcctctttgtgactttaataccaaaaggaaagactggcgttattccaggacaaaaacagtgtattgctttgaaaggggtgtgcagagac

SEQ ID NO: 769704 - DNA, 120 bp, Artificial Sequence
  ENSG00000232948_1 (sequence is synthesized)
aaactatgcagcacactagatgataccattggtatatgtaatgaaggaaaaaaatgttgtagaaggtggtggatacttgagccctatccaactccggttcccaaaggaaaatctccttag

SEQ ID NO: 769705 - DNA, 120 bp, Artificial Sequence; identical to SEQ ID NO: 657825
  ENSG00000233024_0 (sequence is synthesized)

SEQ ID NO: 769706 - DNA, 120 bp, Artificial Sequence; identical to SEQ ID NO: 657826
  ENSG00000233024_1 (sequence is synthesized)

SEQ ID NO: 769707 - DNA, 120 bp, Artificial Sequence; identical to SEQ ID NO: 657827
  ENSG00000233024_2 (sequence is synthesized)

SEQ ID NO: 769708 - DNA, 82 bp, Artificial Sequence; identical to SEQ ID NO: 657828
  ENSG00000233024_3 (sequence is synthesized)

SEQ ID NO: 769709 - DNA, 85 bp, Artificial Sequence; identical to SEQ ID NO: 657829
  ENSG00000233024_4 (sequence is synthesized)

SEQ ID NO: 769710 - DNA, 89 bp, Artificial Sequence; identical to SEQ ID NO: 653734
  ENSG00000233024_5 (sequence is synthesized)

SEQ ID NO: 769711 - DNA, 89 bp, Artificial Sequence; identical to SEQ ID NO: 653735
  ENSG00000233024_6 (sequence is synthesized)

SEQ ID NO: 769712 - DNA, 64 bp, Artificial Sequence; identical to SEQ ID NO: 657832
  ENSG00000233024_7 (sequence is synthesized)

SEQ ID NO: 769713 - DNA, 120 bp, Artificial Sequence
  ENSG00000233024_8 (sequence is synthesized)
actacatcgtcatgctgacatgtgctgtgtgcctggtgacctacatggtcatggccgccatcctgcacaagctggaccagttggatgccagccggggctgcgccatccccttctgtgggc

SEQ ID NO: 769714 - DNA, 79 bp, Artificial Sequence
  ENSG00000233024_9 (sequence is synthesized)
ctggggccggggcggacagccggagcggccaccggcacctggacggcgacagagccttccaccgcaacagtctggacat

SEQ ID NO: 769715 - DNA, 120 bp, Artificial Sequence
  ENSG00000233024_10 (sequence is synthesized)
tggacggcgacagagccttccaccgcaacagtctggacatcttccagatcgccaccccgcacagcctgggtagcatgtggaagatccgagtgtggcacgacaacaaagggctcagccctg

SEQ ID NO: 769716 - DNA, 120 bp, Artificial Sequence
  ENSG00000233024_11 (sequence is synthesized)
cctggttcctgcagcacatcatcgtcagggacctgcagacggcacgcagcaccttcttcctggtcaatgactggctttcggtggagacggaggccaacgggggcctggtggagaaggagg

SEQ ID NO: 769717 - DNA, 120 bp, Artificial Sequence
  ENSG00000233024_12 (sequence is synthesized)
tgctggccgcgagtcacgcagccctgttgcgcttccggcgcctgctggtggctgagctgcagcgtggcttctttgacaagcacatctggctctccatatgggaccggccgcctcgtagct

SEQ ID NO: 769718 - DNA, 120 bp, Artificial Sequence
  ENSG00000233024_13 (sequence is synthesized)
gtttcactcgcatccagagggccacctgctgcgatctcctcatctgtctcttcctgggcgccaacgccgtgtggtacggggctgttggagactctgcctacagcacggggcgtgtgtcca

SEQ ID NO: 769719 - DNA, 120 bp, Artificial Sequence
  ENSG00000233041_0 (sequence is synthesized)
agacttcctgcccctgctctgcactctcaggtattccctgctcttactccaaaaagatggacccaggtccgaaggggcactgccactgtggggggcatggccatcctccaggtcactgcg

SEQ ID NO: 769720 - DNA, 120 bp, Artificial Sequence
  ENSG00000233041_1 (sequence is synthesized)
tggccatggcccagggccctgcgggccacccccccaccatggtccagggccctgcgggcctccccctggccatggcccaggtcacccaccccctggtccacatcactgaggaagtagaag

SEQ ID NO: 769721 - DNA, 120 bp, Artificial Sequence
  ENSG00000233041_2 (sequence is synthesized)
aaaacaggacacaagatggcaagcctgagagaattgcccagctgacctggaatgaggcctaaaccacaatcttctcttcctaataaacagcctcctagaggccacattctattctttaaa

SEQ ID NO: 769722 - DNA, 120 bp, Artificial Sequence
  ENSG00000233041_3 (sequence is synthesized)
agacttcctgcccctgctctgcactctcaggtattccctgctcttactccaaaaagatggacccaggtaagcactgtggctgagaggctgggaattggaagaagggagagagcaggagag

SEQ ID NO: 769723 - DNA, 120 bp, Artificial Sequence
  ENSG00000233041_4 (sequence is synthesized)
cggtaaaggcagggactatcagtcagccataactagtgcgtgccaaaaatgtacgtgcgtgtgtgtttgtatgaaggcagtggtaggggtccacaatgaagacaagcccttacatactgt

SEQ ID NO: 769724 - DNA, 120 bp, Artificial Sequence
  ENSG00000233041_5 (sequence is synthesized)
caggggagctaggggttatgctcagggaaaggccatagaggtgcagctgggtcggaatccagaatccagttcttgggagctgtgccatcggcttccctcgaaatgaacaaaagaccgtcc

SEQ ID NO: 769725 - DNA, 120 bp, Artificial Sequence
  ENSG00000233041_6 (sequence is synthesized)
tagcctttaagaagtagcaggtgattcccacaccaatggggcacttcagaacatgcaggaccactcaggtgggtgctgcaggagcccagtggacccacagctgggcagcctggatggctc

SEQ ID NO: 769726 - DNA, 120 bp, Artificial Sequence; identical to SEQ ID NO: 769703
  ENSG00000233050_0 (sequence is synthesized)

SEQ ID NO: 769727 - DNA, 120 bp, Artificial Sequence; identical to SEQ ID NO: 769704
  ENSG00000233050_1 (sequence is synthesized)

SEQ ID NO: 769728 - DNA, 120 bp, Artificial Sequence
  ENSG00000233087_0 (sequence is synthesized)
gctgcggcggcggcggctggggaagccgaagcgccgcgcgtgagagatcccagatacgtctgcggttccggctccgccaccctccgcctttctcccgcaggtcttggagccgggtgagga

SEQ ID NO: 769729 - DNA, 120 bp, Artificial Sequence
  ENSG00000233087_1 (sequence is synthesized)
agaagggaacggccctagccttgggaagccaaagcacacccctggctcctgccgacaccgccctccttcccttcccagccgcgggcctcgctcggtgctcggctactctgccgggaggcg

SEQ ID NO: 769730 - DNA, 120 bp, Artificial Sequence
  ENSG00000233087_2 (sequence is synthesized)
gcggcggctgccagtctgtggagagtcctgctgccctccagccgggctcctccaccggcccttgcaggggcgcagagagctcggcgcccgcccttccgctcgcctttttcgtcagccggc

SEQ ID NO: 769731 - DNA, 120 bp, Artificial Sequence
  ENSG00000233087_3 (sequence is synthesized)
tggagcagcatcggtccgggaggtctctgggctgaggcggcgacagctcctctagttccaccatgtccgcgggcggagacttcgggaatccgctgaggaaattcaagctggtgttcctgg

SEQ ID NO: 769732 - DNA, 120 bp, Artificial Sequence
  ENSG00000233087_4 (sequence is synthesized)
gggagcaaagcgttgcaaagacatctttgatcaccagattcaggtatgacagttttgacaacacctatcaggcaataattggcattgactttttatcaaaaactatgtacttggaggatg

SEQ ID NO: 769733 - DNA, 120 bp, Artificial Sequence
  ENSG00000233087_5 (sequence is synthesized)
gaacaatcgggcttcggctgtgggatacggcgggtcaggaacgtctccgtagcctcattcccaggtacatccgtgattctgctgcagctgtagtagtttacgatatcacaaatgttaact

SEQ ID NO: 769734 - DNA, 120 bp, Artificial Sequence
  ENSG00000233087_6 (sequence is synthesized)
cattccagcaaactacaaagtggattgatgatgtcagaacagaaggaggaagtgatgttatcatcacgctagtaggaaataaaacagatcttgctgacaagaggcaagtgtcaattgagg

SEQ ID NO: 769735 - DNA, 120 bp, Artificial Sequence
  ENSG00000233087_7 (sequence is synthesized)
agggagagaggaaagccaaagggctgaatgttacgtttattgaaactagggcaaaagctggatacaatgtaaagcagctctttcgacgtgtagcagcagctttgccgggaatggaaagca

SEQ ID NO: 769736 - DNA, 120 bp, Artificial Sequence
  ENSG00000233087_8 (sequence is synthesized)
cacaggacggaagcagagaagacatgagtgacataaaactggaaaagcctcaggagcaaacagtcagcgaagggggttgttcctgctactctcccatgtcatcttcaacccttcctcaga

SEQ ID NO: 769737 - DNA, 120 bp, Artificial Sequence
  ENSG00000233087_9 (sequence is synthesized)
agcccccttactctttcattgactgcagtgtgaatattggcttgaaccttttcccttcattaataacgttttgcaattcatcattgctgcctgtctcgtggagatgatctattagcttga

SEQ ID NO: 769738 - DNA, 120 bp, Artificial Sequence
  ENSG00000233087_10 (sequence is synthesized)
caagcacaaaaaaagtcagcgtcttcattatttatattttacaaaaagccaaactatttcagcgtattccagtgataactttaaaaattagatacattttcttaacattttttttctttt

SEQ ID NO: 769739 - DNA, 120 bp, Artificial Sequence
  ENSG00000233087_11 (sequence is synthesized)
ttaatgttatgataatgtacttcaaaatgatggaaatctcaacagtatgagtatggcttggttaacgagcagtatgttcacagcctgctttatctctccttgctcttctcacctctccct

SEQ ID NO: 769740 - DNA, 120 bp, Artificial Sequence
  ENSG00000233087_12 (sequence is synthesized)
gcctccccccacttcctcaaaacaaacaagagatggcaaagcagcagtccgaccaagcccactggaattatcctttaattttacagataccacttgctgtaggctgtggaccaagatgtc

SEQ ID NO: 769741 - DNA, 120 bp, Artificial Sequence
  ENSG00000233087_13 (sequence is synthesized)
cagaattattcttgagcactgatataaattacttagatcctctttgaggtcagaattcagcgatcacggtaggcagtgcttgaatgagaaaagcctcctggtgcatcttcaaaatgagtc

SEQ ID NO: 769742 - DNA, 120 bp, Artificial Sequence
  ENSG00000233087_14 (sequence is synthesized)
ctaaagaacatactgagtacttataagtagcagaacataaaatgtatttctgactaaaacaaatggtcctttcacatgtgctttattagactctgggagagaaaattaaccaagtgcttc

SEQ ID NO: 769743 - DNA, 120 bp, Artificial Sequence
  ENSG00000233087_15 (sequence is synthesized)
agaacaggtttttagtatttaattcttcatggtaagataatgacgttctaatgaactatttctcccaaggttttaaaattgtcaagagttattctgtttgtttaaaaaataagaaacctc

SEQ ID NO: 769744 - DNA, 120 bp, Artificial Sequence
  ENSG00000233087_16 (sequence is synthesized)
tttaagcaatagattttgcttgggttttctttttttaaaaaataatactatgcaggcaagacaccataaaagtttaattccttacagaagaaccagtggaagaatttaaatttggcacta

SEQ ID NO: 769745 - DNA, 120 bp, Artificial Sequence
  ENSG00000233087_17 (sequence is synthesized)
cgatcaaaactactgaattagcagaaataacgatatctaaagcttaccaacaaaagaaccctcagcagaagagcaaaaactttgctcaggacatttgaggtcaaattgaagatggaaacc

SEQ ID NO: 769746 - DNA, 120 bp, Artificial Sequence
  ENSG00000233087_18 (sequence is synthesized)
ggaaaccattttcttgtaagcccctagaggcagatcaggtaaagcatacatagtagagggaaaggagagaatggaaataaaactgaatattatgcagatttatgccttattttttagcat

SEQ ID NO: 769747 - DNA, 120 bp, Artificial Sequence
  ENSG00000233087_19 (sequence is synthesized)
ttttttaaggttgggtctttcaggctggttttcgtttgtatgagatctgtatagtttaattaactaatgatttagttttatatttaagctacgattaatcttttttctttggtgatattt

SEQ ID NO: 769748 - DNA, 120 bp, Artificial Sequence
  ENSG00000233087_20 (sequence is synthesized)
ctttgctttttttttaacaactttcaatttttagatgtttcgttgaatctatttagagcttcaccatggcaatatgtatttcccttgaaacactgcaaacaaatatactaggagtgtgcc

SEQ ID NO: 769749 - DNA, 120 bp, Artificial Sequence
  ENSG00000233087_21 (sequence is synthesized)
cttttaatcttcactagttattgtgagattgctgtgtaagctaataaacacatttgtaaatacattgtttgcaggaagaaaacttcgagttataggtcaggaaaagcctgctgaatttat

SEQ ID NO: 769750 - DNA, 120 bp, Artificial Sequence
  ENSG00000233087_22 (sequence is synthesized)
gttgtaaacgttacttaacacagtataaagatgaaaagacaacaaaaatatcttcatacttcctcatcccctcattgcaacaaaaccttaaactgggagaaccttagtcccctctctttc

SEQ ID NO: 769751 - DNA, 120 bp, Artificial Sequence
  ENSG00000233087_23 (sequence is synthesized)
ctcttcctcctccacttcccacttattgtcaccttgtaatattcagagagcacttggattatggatctgaatagagaaatgcttacagataatcattagcccacataccagtaacttaca

SEQ ID NO: 769752 - DNA, 120 bp, Artificial Sequence
  ENSG00000233087_24 (sequence is synthesized)
cttaaagatgggatggagttataaagtgcttttataatacaatataattgctaaaggcaagggttgactctgttttattttgacatggcatgtcctgaaataaatattgattcactgtgg

SEQ ID NO: 769753 - DNA, 120 bp, Artificial Sequence
  ENSG00000233198_0 (sequence is synthesized)
cctgaccctgtgccaggacttagcgtgccaggctccccgccttgccccgttgctggcccccaccagagggtgaccacacccaggccagccacgagaacttgtctgaccagtcctgggggc

SEQ ID NO: 769754 - DNA, 120 bp, Artificial Sequence
  ENSG00000233198_1 (sequence is synthesized)
agactgccaagaaggtgggcaggggtgaggaggggccatttgcttccacccagcggggctgtgagtggttctggggtcctgcccacctgtcccaacccttcttggtccctcaactctgct

SEQ ID NO: 769755 - DNA, 120 bp, Artificial Sequence
  ENSG00000233198_2 (sequence is synthesized)
ctgcctgcagtctggtgtggacacactgatcatacctcccggaacctgggcctcccagggtggcctggaggctgcagacgggcagagcagccaggagctgcccaccaaggaggcgtctgg

SEQ ID NO: 769756 - DNA, 120 bp, Artificial Sequence
  ENSG00000233198_3 (sequence is synthesized)
cactgtctggggtcccgagctgggagcggggatccccagacacggagctggtgcgccacctggagtccatgtggactggtgcagccctctgccgtccagccggcatcaaggtgaggctga

SEQ ID NO: 769757 - DNA, 120 bp, Artificial Sequence
  ENSG00000233198_4 (sequence is synthesized)
gaagccacacagatccacagacaagcacagtggcaaagtctgcagaaggctctgagccaggagggaaccctggcaggcttcctagaggaggagatgtgagcagaggccaagatctagttt

SEQ ID NO: 769758 - DNA, 120 bp, Artificial Sequence
  ENSG00000233198_5 (sequence is synthesized)
caaggctttgtggctgaaacgggagcccacgcccgccacagctggccacctgcctctctcctgactcccgtgcaaggccagtaatgcaacccaggagggagccgcagggcgccctgggtc

SEQ ID NO: 769759 - DNA, 120 bp, Artificial Sequence
  ENSG00000233198_6 (sequence is synthesized)
ccccactcccttctccggccaccccgtggctgtgcatagctgcccagcagagcccatgcaggatgctgcagccggagggcccccaggcctcggaggaggggggcccccggaggagaggac

SEQ ID NO: 769760 - DNA, 120 bp, Artificial Sequence
  ENSG00000233198_7 (sequence is synthesized)
cagcgctggatcccctgtccgcagtgccgtcagagcacgcccacgcctcgcggaggggtggccatgctagacctggacctggctgctttcctggcggtcaaggctgagcgggagccggca

SEQ ID NO: 769761 - DNA, 120 bp, Artificial Sequence
  ENSG00000233198_8 (sequence is synthesized)
agactagaacccctgcccctcacctccctcaaaggcagcgccatcactcggcagccagctgggctgtgccctgccctgggaccccagccccacttcccccagcccagatactgctgctgg

SEQ ID NO: 769762 - DNA, 120 bp, Artificial Sequence
  ENSG00000233198_9 (sequence is synthesized)
ggctgtggcagcctctgctgcccacccctaggcagccccgaggtctgaactctggccattcccacccctgcaggggaaatgcctgccttggaacccctgaccacacaccatcatgggttc

SEQ ID NO: 769763 - DNA, 120 bp, Artificial Sequence
  ENSG00000233198_10 (sequence is synthesized)
agcccactcagaacaacctggcagtagcatcctatacgcagcttcgtgtggcccagcagggtggtgtcatcccagccgtgaacatcccaggccacagcctaaggttgggggctgggaggc

SEQ ID NO: 769764 - DNA, 120 bp, Artificial Sequence
  ENSG00000233198_11 (sequence is synthesized)
tccgcaggaggctggtgacctcccacctgtcctggccacaattaccagaccccagactagcccgaccggatgtgcctggtgaggacactgctgtctgagtgggcggcaagcctggcttgg

SEQ ID NO: 769765 - DNA, 120 bp, Artificial Sequence
  ENSG00000233198_12 (sequence is synthesized)
gcctagacgcagcgcaaaggatggctcccaagaggatgcgaaggcgtcccgggggcctgggctgcaggctggaggggcagggccggtctggctatgcctggcgggctgcccagagcaggt

SEQ ID NO: 769766 - DNA, 120 bp, Artificial Sequence
  ENSG00000233198_13 (sequence is synthesized)
ctcccctctcccacagacgtccccggggtgtaccgggagggtggcaagactacctccttcctccctgccctgcatggcagccctgtgaattcacccactcaacaaagctcatggagttcc

SEQ ID NO: 769767 - DNA, 69 bp, Artificial Sequence
  ENSG00000233232_0 (sequence is synthesized)
ccctgaaaggatcaggacatgcggctgcgcttttggctcctcatttggctcctgctgggatttatcagc

SEQ ID NO: 769768 - DNA, 88 bp, Artificial Sequence
  ENSG00000233232_1 (sequence is synthesized)
cacccacccctgttatcaatagtctggctgtctatcgtcatcgtgagactgactttggtgtaggagttcgagaccaccctggccaaca

SEQ ID NO: 769769 - DNA, 120 bp, Artificial Sequence
  ENSG00000233232_2 (sequence is synthesized)
tggcaaaaccccatctccacaaaaattggataatttgataattatcattattgggtttctgagacgttacacatttaacgttctcttctgcacaagttgcctttgtgtgtctttcctgaa

SEQ ID NO: 769770 - DNA, 73 bp, Artificial Sequence
  ENSG00000233232_3 (sequence is synthesized)
gtctggatgtacagcagagagcctggaggtccaaccgcagtagacagaaagggctgaggtccatttgtatgca

SEQ ID NO: 769771 - DNA, 81 bp, Artificial Sequence
  ENSG00000233232_4 (sequence is synthesized)
gcaaaatccccccttctgcaagaaagtgtcattcttcaggattgccctactggctctacctcacagctgaaactttaaaaa

SEQ ID NO: 769772 - DNA, 77 bp, Artificial Sequence; identical to SEQ ID NO: 711856
  ENSG00000233232_5 (sequence is synthesized)

SEQ ID NO: 769773 - DNA, 77 bp, Artificial Sequence; identical to SEQ ID NO: 711857
  ENSG00000233232_6 (sequence is synthesized)

SEQ ID NO: 769774 - DNA, 120 bp, Artificial Sequence; identical to SEQ ID NO: 711858
  ENSG00000233232_7 (sequence is synthesized)

SEQ ID NO: 769775 - DNA, 120 bp, Artificial Sequence; identical to SEQ ID NO: 711859
  ENSG00000233232_8 (sequence is synthesized)

SEQ ID NO: 769776 - DNA, 86 bp, Artificial Sequence
  ENSG00000233232_9 (sequence is synthesized)
cctcctccagggcaccctgaaaggatcaggacatgcggctgcgcttttggctcctcatttggctcctgctgggatttatcagccat

SEQ ID NO: 769777 - DNA, 63 bp, Artificial Sequence
  ENSG00000233232_10 (sequence is synthesized)
gtctggctgtctatcgtcatcgtgagactgactttggtgtaggagttcgagaccaccctggcc

SEQ ID NO: 769778 - DNA, 120 bp, Artificial Sequence
  ENSG00000233306_0 (sequence is synthesized)
ggaaggcttgggagtcctcttagacagatcctcagtcacttccctctgcttgtgtctcaggaagaccacctcctcctactgtcttctgtgctagggatcacttccttgttgagtggaacc

SEQ ID NO: 769779 - DNA, 120 bp, Artificial Sequence
  ENSG00000233306_1 (sequence is synthesized)
tgagttttaagaggatcttctgctcctcttcatctggtccctttccttccaaggccccagagaggaaggcatgcagtgggccctagcggtgcttctagctttcctgtctcctgccagtca

SEQ ID NO: 769780 - DNA, 120 bp, Artificial Sequence
  ENSG00000233306_2 (sequence is synthesized)
atcacttgtgatcttgctgaaggaagtaacggctacatccactggtacctacaccaggaggggaaggccccacagcgtcttcagtactatgactcctacaactccaaggttgtgttggaa

SEQ ID NO: 769781 - DNA, 120 bp, Artificial Sequence
  ENSG00000233306_3 (sequence is synthesized)
tcaggagtcagtccagggaagtattatacttacgcaagcacaaggaacaacttgagattgatactgcgaaatctaattgaaaatgactttggggtctattactgtgccacctgggacggg

SEQ ID NO: 769782 - DNA, 120 bp, Artificial Sequence
  ENSG00000233412_0 (sequence is synthesized)
aatgaaaccttcaaaaagcatgagtacgtaatgaatggctacctgtgttattgacattgctgtgctactgtatgtatttcggttttagaaggcgtaacacatttaaaggatatccacaat

SEQ ID NO: 769783 - DNA, 120 bp, Artificial Sequence
  ENSG00000233412_1 (sequence is synthesized)
ttccttcaaaatatagaggacatgcagtgaggacatggaagaggaaaatgcaacattgctgacagagtttgttctcacaggatttttatatcaaccacagtggaaaatacccctgttctt

SEQ ID NO: 769784 - DNA, 120 bp, Artificial Sequence
  ENSG00000233412_2 (sequence is synthesized)
ggcattcttggtaatatatctcatcaccatcatggggaatcttggtctgattgctgtcatctggaaagaccctcaccttcatatcccaatgtacttactccttgggaatttagcttttgt

SEQ ID NO: 769785 - DNA, 120 bp, Artificial Sequence
  ENSG00000233412_3 (sequence is synthesized)
ggatgcttggatatcatccacagtgaccccaaagatgctgaataacttcttagctaagagtaagatgatatctctctctgaatgcaagatacaatttttttccattgcaattggcgtaac

SEQ ID NO: 769786 - DNA, 120 bp, Artificial Sequence
  ENSG00000233412_4 (sequence is synthesized)
cacagaatgttttctcttggcaacaatggcatatgatcgctatgtagccatatgcaaacctttactttatccagccattatgaccaatggactgtgcatccggctattaatcttgtcata

SEQ ID NO: 769787 - DNA, 120 bp, Artificial Sequence
  ENSG00000233412_5 (sequence is synthesized)
atgaaggatttttattcagactaaccttctgtaactccaacatagtacatcacatttactgtgacactatcccattgtctaagatttcttgtactgattcttctattaattttctaatgg

SEQ ID NO: 769788 - DNA, 120 bp, Artificial Sequence
  ENSG00000233412_6 (sequence is synthesized)
tttttattttctcaggttcaattcaggtattcagcattgtgactattcttatatcttacacatttgttctcttcacagtcttagaaaagaaatctgataagggtgtaaggaaagcctttt

SEQ ID NO: 769789 - DNA, 120 bp, Artificial Sequence
  ENSG00000233412_7 (sequence is synthesized)
ccacctgtggagcccatctcttctctgtctgtttatactatggcccccttctcttaatgtatgtgggccctgcatctccgcaagcagatggtcaaaatatggtggagcctctattctaca

SEQ ID NO: 769790 - DNA, 120 bp, Artificial Sequence
  ENSG00000233412_8 (sequence is synthesized)
ctgtcatcattcctttgttaaatcctatcatctacagtctgagaaataagcaagtcatagtttcattcataaaaatgttaaaaagaaatgttaaggtttcatactaatatcctttttcta

SEQ ID NO: 769791 - DNA, 120 bp, Artificial Sequence
  ENSG00000233412_9 (sequence is synthesized)
tttactaaaatagtcacaaaattacgcaagttagaggtacctatgttgtttccagtgttcaaacatttttgcaagtataactgtcctagcactttaatgacctaacattttagtacctaa

SEQ ID NO: 769792 - DNA, 120 bp, Artificial Sequence
  ENSG00000233436_0 (sequence is synthesized)
aatgtttccttaaaagtgttaacttgaagattatacctgtggagctgggatgtggtgctcaggaagaatataagtagtcagcattgtagcagttgagtctcagtggtaatggaaatgagg

SEQ ID NO: 769793 - DNA, 120 bp, Artificial Sequence
  ENSG00000233436_1 (sequence is synthesized)
aaggttgaaggataataatagttaccatttggggcttggtagttattttgtgccaggcactcactgtgctaagcaactttaccttcactgactcatttaatctttaaaacaaccctacaa

SEQ ID NO: 769794 - DNA, 120 bp, Artificial Sequence
  ENSG00000233436_2 (sequence is synthesized)
ggagtctgatctgtgaaaacctagaaggtttgttaagactcttgccaacatgtgctctcctgccagtcccaaaatcctatacaggaacccccggttcctcaggttagcttttctgcagct

SEQ ID NO: 769795 - DNA, 120 bp, Artificial Sequence
  ENSG00000233436_3 (sequence is synthesized)
tcatcaccagcagcagagtgatgtgttctgtgatgtccttctgcaggcagaaggtgaggcagttccagctcactgctgcatcctgtcagcttgtagccccttcttcacagagcgcctgga

SEQ ID NO: 769796 - DNA, 120 bp, Artificial Sequence
  ENSG00000233436_4 (sequence is synthesized)
gcgggagaggccagctcagggtgggaaggtggtgctagagctgggtggcctgaagatcagcacacttaggaagctggtggacttcttgtatacctcagaaatggaagtatctcaagaaga

SEQ ID NO: 769797 - DNA, 120 bp, Artificial Sequence
  ENSG00000233436_5 (sequence is synthesized)
agcccaggatgtgctatctgctgcccgtcagctccgtgtgtctgagctggaatcccttcagcttgagggtggaaagttggtgaaggccccacagggccgaaggctgaaccgagagtgctt

SEQ ID NO: 769798 - DNA, 120 bp, Artificial Sequence
  ENSG00000233436_6 (sequence is synthesized)
acaaccaacaagtgctgcaccaatctctgccagagtggtgacacccagccaccaccctcacaccccactgcccactaatcaaactccttgtcctcttggggcaataagattgaagtcctt

SEQ ID NO: 769799 - DNA, 120 bp, Artificial Sequence
  ENSG00000233436_7 (sequence is synthesized)
ggggaaggaagaggggccccaggaaaacaaccgacagaatgcagacaatttgtctggcactcttctgctcaagaggaaggccagagcctgcccaactccacaagaaaaaaactcttcacc

SEQ ID NO: 769800 - DNA, 120 bp, Artificial Sequence
  ENSG00000233436_8 (sequence is synthesized)
atcaagccatagtcaagagcctagagagaacaagaatgacactgcccttgatcctacagtgctctccccacccagcttgtacccctctgtggacaaacacctgttgcccagaaagatcag

SEQ ID NO: 769801 - DNA, 120 bp, Artificial Sequence
  ENSG00000233436_9 (sequence is synthesized)
gctcagtcgctcaaagccatctcctggtatctgtacatcaaagccttccagcattttaagtggatctagctcagtgcctgcaacccctggccggcgtctttggcggcagaggagtgtaaa

SEQ ID NO: 769802 - DNA, 120 bp, Artificial Sequence
  ENSG00000233436_10 (sequence is synthesized)
taaagaaacaccagaggacaagccaaaaccaggcagagctagtcctctgcagagcaccccaaacccatctggtctgggaaagacaggtgggagcaggaagcggagccctgaagtcagggc

SEQ ID NO: 769803 - DNA, 120 bp, Artificial Sequence
  ENSG00000233436_11 (sequence is synthesized)
acctaactcagactctgcagaggaggggcaggttgggagagttaaacttaggaagattgtcaatgggacttgctgggaagtggtacaagagactcctctcaaaaacactcaagatagccc

SEQ ID NO: 769804 - DNA, 120 bp, Artificial Sequence
  ENSG00000233436_12 (sequence is synthesized)
ctcagccattctccagtaatgagcaggaaatgtcacctactagaacagaactgtgtcaggactcccccatgtgcactaagctacaagacattctggtctctgctagccactccccagacc

SEQ ID NO: 769805 - DNA, 120 bp, Artificial Sequence
  ENSG00000233436_13 (sequence is synthesized)
acccagtggtgaagtcagagtttgagtccagtccagaactggtagagaaggaacctatgttggctattgactgcagagaaccctatgcatttgacacagctctgctggagcagccctgtg

SEQ ID NO: 769806 - DNA, 120 bp, Artificial Sequence
  ENSG00000233436_14 (sequence is synthesized)
aggctgaggagtaccgaatcacaagtgctgctgccaccagtgagctggaggagatcctggacttcatgctctgtggctcagacattgaaccacctatagggtctctggagagtccagggg

SEQ ID NO: 769807 - DNA, 120 bp, Artificial Sequence
  ENSG00000233436_15 (sequence is synthesized)
ctgagggctgcagaacgcctacctaccatctgacagaaacaggaaagaactggattgaaggggaagaatggtgtctaccagacatggaactctggcccagggagctcacagaattggaaa

SEQ ID NO: 769808 - DNA, 120 bp, Artificial Sequence
  ENSG00000233436_16 (sequence is synthesized)
aggaacctgctggtgagaacagagggccaactgagctccttagcccccttgtcatgccctctgaggtgagtgaagtgctttcagtaggaggccgttggacaccagaccttgaaattacca

SEQ ID NO: 769809 - DNA, 120 bp, Artificial Sequence
  ENSG00000233436_17 (sequence is synthesized)
gctcccagccactggatggtcaggaagacaaacttctccatgtcagctcccttgatactccccagaggtcttatggggacctctcacctccctgctcaaactgggtggagactgggctgg

SEQ ID NO: 769810 - DNA, 120 bp, Artificial Sequence
  ENSG00000233436_18 (sequence is synthesized)
aagtctccttgactacagatgagttattatacccttctcccaaggcaggcaaggaggtatctggtcactctgaactactaggctcacttcctgccagctctgaagaggaagagattgatg

SEQ ID NO: 769811 - DNA, 120 bp, Artificial Sequence
  ENSG00000233436_19 (sequence is synthesized)
tggtggactggacagcagaggggaggctggtacccactactgttccctccgtgtggcctgacccttcctcagagtcagaaacagaggtagatatactaacatagtggagaggggagggca

SEQ ID NO: 769812 - DNA, 120 bp, Artificial Sequence
  ENSG00000233436_20 (sequence is synthesized)
ggttaggggccttgggagggtgggaaatgttagctagcaaaaggcttactggcagagaagctggcacgtgccctcagcacaagaggcaggtgtaccctggctctttgtaggtcccttcct

SEQ ID NO: 769813 - DNA, 120 bp, Artificial Sequence
  ENSG00000233436_21 (sequence is synthesized)
cccttccctaagcctcagaagccaggcagaagccaagggtaccatagatagaaaattatgaacttgtaccatcttatttgtaatctattttccggttagtgacaactgaaacaaactgtg

SEQ ID NO: 769814 - DNA, 120 bp, Artificial Sequence
  ENSG00000233436_22 (sequence is synthesized)
tgctccccaattctggtgggtcataggtaacagccaaggccagatctctcaggtcataaggcatccagtcactggtaatttaggaaaagctgagaaagaacaccctcctctgtggtgggg

SEQ ID NO: 769815 - DNA, 120 bp, Artificial Sequence
  ENSG00000233436_23 (sequence is synthesized)
tattgtttaagaaaatgttccagaggaaggtgtgaagcagtgttgggtggaatactaagtgggtgggagtgatggatgctgtccagcacccaacgtggggcttattcactgccagtatta

SEQ ID NO: 769816 - DNA, 120 bp, Artificial Sequence
  ENSG00000233436_24 (sequence is synthesized)
ggaagtctagctaaaacctctgcaggggccaagaagatgtacttccatcattacttccaaaaagtaagttgaaaaagatacagttgcttttttaaaaaataaattatttactttgctccc

SEQ ID NO: 769817 - DNA, 120 bp, Artificial Sequence
  ENSG00000233436_25 (sequence is synthesized)
atatccttggcacaatttctgggctgatgtttcctcaactcatactattatctctcactttcaaaattcccctgccatttcaaagacaaaaaacaaattagatgtaaccatgcctctgaa

SEQ ID NO: 769818 - DNA, 120 bp, Artificial Sequence
  ENSG00000233493_0 (sequence is synthesized)
ggcctgggccgctgccggatggcgctgctgctggccgtggcgctggatgtggcgggcatggcggcgctgctgaccggcgtgttcgcgcagctgcaggtgcgcggccgcgacttcggggac

SEQ ID NO: 769819 - DNA, 120 bp, Artificial Sequence
  ENSG00000233493_1 (sequence is synthesized)
gcaacatcgagatctcgcgccaggagctggagcgcgactacggcctgcggccctcggcgctcgcccgcctggcgcgcaagctctcccgccgctggtcggcgcccgccgccgcgggccagc

SEQ ID NO: 769820 - DNA, 120 bp, Artificial Sequence
  ENSG00000233493_2 (sequence is synthesized)
ccggctcccgccgcgtgcgcctgcagctcgccacgctcgaggccgggcccggggcggcgggcgcgggcagcgagtgaggcccagacaaccccttggctccagctgtcaggaccagactga

SEQ ID NO: 769821 - DNA, 120 bp, Artificial Sequence
  ENSG00000233493_3 (sequence is synthesized)
ccccttggctccagctgtcaggaccagactgagatgtgcagctgcccctacatccgtggccagacggacgctccctgtaccccctccctcctcacttggataaaaagcagatttgcctta

SEQ ID NO: 769822 - DNA, 120 bp, Artificial Sequence
  ENSG00000233608_0 (sequence is synthesized)
ctagagtttccaaaaaagttagaataacttcctctcccggagacctcggttttgcacaagccggccttgaaatcagagcctttccagcaactccgagagcgtgtgctcggcgaccgcggg

SEQ ID NO: 769823 - DNA, 120 bp, Artificial Sequence
  ENSG00000233608_1 (sequence is synthesized)
gcccccagccccacgcgcgccgggcgggcgccatggaggagggctccagctcgcccgtgtcccccgtggacagcctgggcaccagcgaggaggagctcgagaggcagcccaagcgcttcg

SEQ ID NO: 769824 - DNA, 120 bp, Artificial Sequence
  ENSG00000233608_2 (sequence is synthesized)
ggaggagctcgagaggcagcccaagcgcttcggccggaagcggcgctacagcaagaagtcgagcgaagatggcagcccgaccccgggcaagcgcggcaagaagggcagccccagcgcgca

SEQ ID NO: 769825 - DNA, 120 bp, Artificial Sequence
  ENSG00000233608_3 (sequence is synthesized)
gtccttcgaggagctgcagagccagcgcatcctggccaacgtgcgcgagcgccagcgcacccagtcgctcaacgaggccttcgcggcgctgcgcaagatcatccccacgctgccctctga

SEQ ID NO: 769826 - DNA, 120 bp, Artificial Sequence
  ENSG00000233608_4 (sequence is synthesized)
cagctgcagctacgtggcccacgagcgcctcagctacgccttctccgtgtggcgcatggagggcgcgtggtccatgtccgcctcccactagcgccgcgccacccacctccggaccggcgc

SEQ ID NO: 769827 - DNA, 120 bp, Artificial Sequence
  ENSG00000233608_5 (sequence is synthesized)
gccaggaggagattctgaatgatgctgccattgccagaccttctgctaccaaacagagcgaagaggaagagggggcagtgtttggtcaagacagcccacgaaacgttggcgggagtgagc

SEQ ID NO: 769828 - DNA, 120 bp, Artificial Sequence
  ENSG00000233608_6 (sequence is synthesized)
acattagcaatggctaagaacatgcttgaatcatttgtaacaacccaggacagagatgccacaagaggactttggggaaaggcgaatccactcatacatcttggagttgttttttcaagt

SEQ ID NO: 769829 - DNA, 120 bp, Artificial Sequence
  ENSG00000233608_7 (sequence is synthesized)
tcagaaaatgaaccttcaccaaggtcttggaacatgaagcagagactctggtgctgactctatcatttgagctcctaagggtactcatgcccagtggagcatgcacaccagcaacactgc

SEQ ID NO: 769830 - DNA, 120 bp, Artificial Sequence
  ENSG00000233608_8 (sequence is synthesized)
caacaccatctcggtgtcccaccccttagaggaggaagaggacacagaggggcgcccggtaataaccctcatttcctctcttccaccccaccacatcatcttaataaaacatgaaggtaa

SEQ ID NO: 769831 - DNA, 120 bp, Artificial Sequence
  ENSG00000233608_9 (sequence is synthesized)
gccctccaccagcgtcgagagaagggacagcagtgacatcggacagaagacccgggctcccgtcctcccccaggacggtccccacataggaagggcactcccagccctcttgctggtgac

SEQ ID NO: 769832 - DNA, 120 bp, Artificial Sequence
  ENSG00000233608_10 (sequence is synthesized)
attgtcatggtcatcttgtttctgtttggatttttcttctgggtcttatgtttggggggaggtttattctttctgaaaatgtctagattcaggaacacatttatgaggatttggattttg

SEQ ID NO: 769833 - DNA, 120 bp, Artificial Sequence
  ENSG00000233608_11 (sequence is synthesized)
aatttgtatttccctctaagtgccttttttaatgtctatttttttaataaaacagaaatgcattcttgtacaattctgttgaaactggaccaaggctctcagaagaggacccccgagttc

SEQ ID NO: 769834 - DNA, 120 bp, Artificial Sequence
  ENSG00000233608_12 (sequence is synthesized)
cttcccctcccccgagcctctgcatgattgtttcaagtcagcctggaattcttactttcacgccgctattcttttcctttctccgtgattgcttggctagccatttaaaaaaaaatattc

SEQ ID NO: 769835 - DNA, 120 bp, Artificial Sequence
  ENSG00000233608_13 (sequence is synthesized)
tctgttcagtgtatatgttgcttgtttgttttatttattgagatatttttacaagctaagtgactgcagtgtggctgtgtatcctgctccccacccaggaaaaataaagacgtccgcgca

SEQ ID NO: 769836 - DNA, 120 bp, Artificial Sequence
  ENSG00000233670_0 (sequence is synthesized)
acaacacactgacttctggacgtggtcagggtggctttctctggctggcatggacttgagcagaaactcattgccggcttcctccttgcacgagcaccaagtgattcccaggtcccccat

SEQ ID NO: 769837 - DNA, 120 bp, Artificial Sequence
  ENSG00000233670_1 (sequence is synthesized)
cctcccctgggacatcgaggacacacaaaaaccttgttcaccctccactgagagcggggctagagatggatgctgagtacaggaagggtgtgtgaggattcctttggctccactcttgtt

SEQ ID NO: 769838 - DNA, 120 bp, Artificial Sequence
  ENSG00000233670_2 (sequence is synthesized)
tccaactattgctggtcctaggcgcccagtcctgagcaaccatgacgatggagactctccccaaggttctagaggtcgatgagaagtctccagaagccaaggacctgctgcccagccaga

SEQ ID NO: 769839 - DNA, 120 bp, Artificial Sequence
  ENSG00000233670_3 (sequence is synthesized)
ccgccagctccctgtgcatcagctccaggagcgagtctgtctggaccaccacccccaggagtaactgggaaatctaccgcaagcccatcgttatcatgtcagtgggcggtgccatcctgc

SEQ ID NO: 769840 - DNA, 120 bp, Artificial Sequence
  ENSG00000233670_4 (sequence is synthesized)
ttttcggcgtggtcatcacctgcttggcctacaccttgaagctgagtgacaagagtctctccatcctcaaaatggtagggcctggcttcctgtccctgggactcatgatgctggtgtgcg

SEQ ID NO: 769841 - DNA, 120 bp, Artificial Sequence
  ENSG00000233670_5 (sequence is synthesized)
ggctggtgtgggtgcccatcatcaaaaagaaacagaagcacagacagaagtcgaatttcttacgcagcctcaagtccttcttcctgactcgctgatggtggtttccgcatctccctgcca

SEQ ID NO: 769842 - DNA, 120 bp, Artificial Sequence
  ENSG00000233670_6 (sequence is synthesized)
ccttgactgggagaagatctgatgaccaacatccgacatccctgtctcctctgtggggtgccataaaactgatccaggaaaatgctcttcctgaccctgtggggaagatagagcttgggg

SEQ ID NO: 769843 - DNA, 120 bp, Artificial Sequence
  ENSG00000233670_7 (sequence is synthesized)
ctccaccctccatgcagccgggaatgttgccagatgtatccacttgatctctattctgactgatgcttccttggatcccggctgtggccttccctttggtcactctaaccccctgcccct

SEQ ID NO: 769844 - DNA, 120 bp, Artificial Sequence
  ENSG00000233670_8 (sequence is synthesized)
gcatccaggcatcattcatccaactctctctgccaagtgcaatgcatgctgggaaattcttcgaaggtgggctatgcccaagggagaacctcatgtttacatatctgagtgccagagctg

SEQ ID NO: 769845 - DNA, 120 bp, Artificial Sequence
  ENSG00000233670_9 (sequence is synthesized)
gattcttcatttgcatacttctggaaccaaaactgacccacggaggtcctttacagaggagggagggatggctgagctctgacccattgggtttgacagccctagctcccttagcagact

SEQ ID NO: 769846 - DNA, 120 bp, Artificial Sequence
  ENSG00000233670_10 (sequence is synthesized)
ttcaagatcacaagtatcaaacattccaaagactgaacaatgaagggaggcctgggaaaaatactctccaagatggcacgtgcccctggacatgacaacatgactctaggggttagtcag

SEQ ID NO: 769847 - DNA, 120 bp, Artificial Sequence
  ENSG00000233670_11 (sequence is synthesized)
ctgaagaagtttagttcctaattatataatatttacatcagaggcagtggggtaggctaggggatgtcactgtttccgcttgaccttatctttctcattgaccactgtcttctctgaact

SEQ ID NO: 769848 - DNA, 120 bp, Artificial Sequence
  ENSG00000233670_12 (sequence is synthesized)
tgatcattagccaaggacaaaatgcatgttgccctaatttctttcctacccctgcctctatctctgcatctagaacagctaaatggaaagatacagagggatcctgtaaggttgttttcc

SEQ ID NO: 769849 - DNA, 120 bp, Artificial Sequence
  ENSG00000233670_13 (sequence is synthesized)
ctttcacgtccatcaagatcaaaattgagagaatcaagttccatatctgaatgatctgtaggtttctagagatggaattcacgtcagaaaattccaacttctgttatccctgcccccacc

SEQ ID NO: 769850 - DNA, 120 bp, Artificial Sequence
  ENSG00000233670_14 (sequence is synthesized)
agagaggcagccaagccaactggcgaaatgtgggtgggtgtgggaacacaggcggtgtctaccctagacttgatagaggacggagaaattcctggaggccatgtcctccaacccaaaaac

SEQ ID NO: 769851 - DNA, 120 bp, Artificial Sequence
  ENSG00000233670_15 (sequence is synthesized)
aaaaggaaagataagagttaccaaagaggggaaagaatggcattggaagcagcaggagctgctatgcgtgtgcaggagtagcttggggaaggagaagcatgatggaattaggaaactgca

SEQ ID NO: 769852 - DNA, 120 bp, Artificial Sequence
  ENSG00000233670_16 (sequence is synthesized)
cggccatttgtctgacctcccagatgtttttacttcatccctctctttcccggcttcccacctcttcaccaagtgcctagcgcagcttctcctggaggcacattgagggcctcctggtgt

SEQ ID NO: 769853 - DNA, 120 bp, Artificial Sequence
  ENSG00000233670_17 (sequence is synthesized)
ctatggtagagacgggaagtgggtttccagagggcctggcaagcaaagagtccctgagaagtgcttctgtaactccctgtggcaaccaagaggcccgtaggtgaaagaacagaagcagta

SEQ ID NO: 769854 - DNA, 120 bp, Artificial Sequence
  ENSG00000233670_18 (sequence is synthesized)
cctgtgagggagccagccacgctgccctaggccaaagacccctggagagcatttggtaatgaggtgtgagaggagagcatcctgcaccagaatcacccttgtcttgagctaattctcttc

SEQ ID NO: 769855 - DNA, 120 bp, Artificial Sequence
  ENSG00000233670_19 (sequence is synthesized)
actcctcagccttgtggccttcccagtcaccatggccctccagatatccccatcctgcatggcagttccatatgcagagccagaatccatccttgttccttctgcattgtgagaaaatcc

SEQ ID NO: 769856 - DNA, 120 bp, Artificial Sequence
  ENSG00000233670_20 (sequence is synthesized)
atggaggaaagcacttgtgtcatggggaccacccctacctgacccacccacggagtcagagtttggggaactcatggccgttgaggctcacccaggatggccatagccttcatggagacc

SEQ ID NO: 769857 - DNA, 120 bp, Artificial Sequence
  ENSG00000233670_21 (sequence is synthesized)
catgccagtgtggccatgtctctagctcacctctagccctgcacacaggtggtcaggaccaatcttgggagtgttgcaagtgctatgtcgttaattgtagttttagtgcctcagtgacaa

SEQ ID NO: 769858 - DNA, 120 bp, Artificial Sequence
  ENSG00000233670_22 (sequence is synthesized)
accttgcagatcatttcccttcttctgagatgaatgcagatttgatggccctataatattactcttgcattcctcgatgcattcttaaatgggagcaaatgggatgggccccagatcact

SEQ ID NO: 769859 - DNA, 120 bp, Artificial Sequence
  ENSG00000233670_23 (sequence is synthesized)
cactggaaacccacactccaggtgcctcatttcctctgcccaggagattgtagcctgggcacagctatatgaggagggcccatttggatactgctatcatggatgtcttagtggaaggaa

SEQ ID NO: 769860 - DNA, 120 bp, Artificial Sequence
  ENSG00000233670_24 (sequence is synthesized)
gtttagggataaccacaactctagaagtccaggttctggactcactttgcagactctagcagtacctgcctccattccctgcccactcaagctagtttctcagcaaagagaatatgagga

SEQ ID NO: 769861 - DNA, 120 bp, Artificial Sequence
  ENSG00000233670_25 (sequence is synthesized)
aatatccccaaacatcgtcatccccactgggatcctccacatgagtgtgggctggaaaggttccagggtcacactgaggcaggacattttttgccaatgcctgttaccccatggaaggct

SEQ ID NO: 769862 - DNA, 120 bp, Artificial Sequence
  ENSG00000233670_26 (sequence is synthesized)
gaggtacggatgcacctgatctggaaatgcagcccaggtcagactccacatttctgcaacaaagcatcacctgcaatgactcttttcacgtcagtgggtcaaaggacagaaccagcttcc

SEQ ID NO: 769863 - DNA, 120 bp, Artificial Sequence
  ENSG00000233670_27 (sequence is synthesized)
gtgttttaggctcactagattgtctcatgctccccatggctattctgtttgggagaatttgatctaacccgaagcctaaaggaatcaatgtaatgttgaattgtattctatgtaacactg

SEQ ID NO: 769864 - DNA, 120 bp, Artificial Sequence
  ENSG00000233701_0 (sequence is synthesized)
aacataattggctttgcagtgcgcatccgggtctgcgtcaggaaggcccaagtttccatcgcgcgaggctgagccacacagcgtgcgaggttcccccagcagcagcaccgactccgatct

SEQ ID NO: 769865 - DNA, 120 bp, Artificial Sequence
  ENSG00000233701_1 (sequence is synthesized)
ccgggaggcgcccccagagctccgaggactcgccccgcgtcgcgcggtcctgccgacacctgttacctcaaagaggacttcgccgccccgagccccccgcacccacgtcccctgccaggc

SEQ ID NO: 769866 - DNA, 120 bp, Artificial Sequence
  ENSG00000233701_2 (sequence is synthesized)
ccaggagcgccgtccgcagcgccgtcgaggtgatgggcagccggccctgcagccccagcgcctgccttgcgccctggtggggacagcagccaggaggaccaggccctgccaagcgcagcc

SEQ ID NO: 769867 - DNA, 120 bp, Artificial Sequence
  ENSG00000233701_3 (sequence is synthesized)
gattggaggagcccgcgggccccgaatcccgagcggcgcccagcccggaagacccggcggggaccccggccgtggacgcgctcacctccatggtggtcctggacgcgggctgtgccctgc

SEQ ID NO: 769868 - DNA, 120 bp, Artificial Sequence
  ENSG00000233701_4 (sequence is synthesized)
gtgtgcccctggaggacgtcgacctggtgctggagctcgcgccaatgtcggtcctgcgagtgtctcttggtggacacaccctcatcgtgatccccgaggtcctcctgagctccgtcgacg

SEQ ID NO: 769869 - DNA, 120 bp, Artificial Sequence
  ENSG00000233701_5 (sequence is synthesized)
aatgctcaggagcgcagggcgactggtctgccggcctggaagtggacgttttcctgggcgctcacggggaagacgtcgtcgtcgagcaggaagtctgcgcatctgtcccagagatcgctg

SEQ ID NO: 769870 - DNA, 120 bp, Artificial Sequence
  ENSG00000233701_6 (sequence is synthesized)
ccgaggaagaggcctacgaggaggacgcggactctgagttcccggagctctggatggactccgcagccggctcagccgctgggctctacccctccgctagaagtatgttcagcccctacc

SEQ ID NO: 769871 - DNA, 120 bp, Artificial Sequence
  ENSG00000233701_7 (sequence is synthesized)
gggagggccccatccgagggccctgtgctctggcccccaaccccagttcagagagacgctctccacgccccatcttcgacctggaattccatcttctggagcctgtccccagctcacctc

SEQ ID NO: 769872 - DNA, 120 bp, Artificial Sequence
  ENSG00000233701_8 (sequence is synthesized)
tccaacctctacctccctctccgagtccaggtccccacgcgcgcccggagctcccagagcgccctccgtgcaaggtccgaagacgcctgttccaggaatgagttgcctcccacaatccct

SEQ ID NO: 769873 - DNA, 120 bp, Artificial Sequence
  ENSG00000233701_9 (sequence is synthesized)
tgccaccctgctgggctccaggagaccgtctcctgatagccgttgtgtgtatgttgcgcaacctacaaggatctcggagagtggataacggatagatgcttttttgatacaggctgcgtt

SEQ ID NO: 769874 - DNA, 120 bp, Artificial Sequence
  ENSG00000233701_10 (sequence is synthesized)
gcagaattctggatcagtggctgacttagaaagtctggaaaaaaaagatcctcctcctcagcataaaaatacgctagttgaaatacagtctactttcagactgtgagattgctgcttcgg

SEQ ID NO: 769875 - DNA, 120 bp, Artificial Sequence
  ENSG00000233701_11 (sequence is synthesized)
gctccattccccctggttttgctttgaacctcagttccagcacatttctctaaaaatccgccctttccccagcacgttaccatggcacaccttttctcccaagttaatttactacattta

SEQ ID NO: 769876 - DNA, 120 bp, Artificial Sequence
  ENSG00000233701_12 (sequence is synthesized)
ttttgtttaatgggttttggccctagtctctgggctagtttatgacgaccttctcaacatggaatttttccctatggtggcctgagcccttttgggtgatcttgcacatagttgtacctg

SEQ ID NO: 769877 - DNA, 120 bp, Artificial Sequence
  ENSG00000233701_13 (sequence is synthesized)
gacaaatgtttgttgtttgcaaaacagaccgaactgggaataatgatcatgtaccctcctttttttcatgattggtttagcaaattgtttatgttattgggctttatttcccccctaact

SEQ ID NO: 769878 - DNA, 120 bp, Artificial Sequence
  ENSG00000233701_14 (sequence is synthesized)
cttagagccagctcttttccattcatttcttcttctatgtttttaatataattattttatcctggaaaagcttataattctaagactctgtgtgtgtatgtgtgtgtgtgttgtttgttt

SEQ ID NO: 769879 - DNA, 120 bp, Artificial Sequence
  ENSG00000233701_15 (sequence is synthesized)
agtgctgggattacaggcacgagccatcgcacccagccggaaataatttgtttcttaggttgatgtatcaaatgcaattactgaatttctttaatggtgtatgtgtagattctcaattga

SEQ ID NO: 769880 - DNA, 120 bp, Artificial Sequence
  ENSG00000233701_16 (sequence is synthesized)
gtagattctcaattgattgattgattgattgataaaaacaatatctccaaataatgagaatattgtcttttttgacaagcttcatacatcttatttttctttaatcttttatattggaca

SEQ ID NO: 769881 - DNA, 120 bp, Artificial Sequence
  ENSG00000233701_17 (sequence is synthesized)
ttacttcaagtccagattgaacagtatggttaatatgggcattcctgttttatgccttgtgttaatgcttctaaattttaccataaagtatgatctttacatggttgttagataaccctt

SEQ ID NO: 769882 - DNA, 120 bp, Artificial Sequence
  ENSG00000233701_18 (sequence is synthesized)
aatctattgaagcagttaattttcagtctttcagatcatgaaaaactgttgaatttttgctttgtttttgcctgttactacaaagatgttatcaagttgttttaaatgttgacatttaat

SEQ ID NO: 769883 - DNA, 120 bp, Artificial Sequence
  ENSG00000233701_19 (sequence is synthesized)
tatttgtgtgtatacaataatacaatacaatagctagatggaacctttgggccacaagagtacgtacagaaacctggcaagagcgctaatgagaccaggctttgggcttcagggatttaa

SEQ ID NO: 769884 - DNA, 120 bp, Artificial Sequence
  ENSG00000233701_20 (sequence is synthesized)
aacaattggatgctttatgaggacttgagaagacacaagtggaaggagaaaggcagtaactgtagggtgcatttaaggttttaaatgttaaaaattaaagaaacttttttttctgtatgc

SEQ ID NO: 769885 - DNA, 120 bp, Artificial Sequence
  ENSG00000233732_0 (sequence is synthesized)
ctatgcagactccgtgaagggccgattcaccatctccagagacaatgccaagaactccttgtatcttcaaatgaacagcctgagagccgaggacatggctgtgtattactgtgcaagaga

SEQ ID NO: 769886 - DNA, 120 bp, Artificial Sequence
  ENSG00000233757_0 (sequence is synthesized)
gttggccggcgctaggcgtccccgccggctgttagatgcctttgtcgtcgggctcggcttcctcagtgtgtggctggaggtcgaacccagggtagaggagggctgaacgcatcccctttt

SEQ ID NO: 769887 - DNA, 120 bp, Artificial Sequence
  ENSG00000233757_1 (sequence is synthesized)
aatctgagtgtccgggaggagggtggcgggaggacccccgggtgggggcgccaggctgcccacgcgtgcgttcccggcctcttgggggacccgagcggcggacctccggctccttcccct

SEQ ID NO: 769888 - DNA, 120 bp, Artificial Sequence
  ENSG00000233757_2 (sequence is synthesized)
gtcgcggttgcctccagcgcgggccggaggaaggagtctccatggaacctgagggcagaggatcactttttgaggactcagaccttctccatgctggaaacccaaaagaaaatgacgtga

SEQ ID NO: 769889 - DNA, 120 bp, Artificial Sequence
  ENSG00000233757_3 (sequence is synthesized)
ctgctgtgctgctgacccctgggtcccaagaattgatgatcagggatatggccgaggctctcacccagtggaggcagctgaactctcctcagggagatgtgcctgagaagcctaggaatc

SEQ ID NO: 769890 - DNA, 120 bp, Artificial Sequence
  ENSG00000233757_4 (sequence is synthesized)
tggtcttgctggggcttccaatttccacacctgatgtaatctctcagttggagcatgaggaagagctggagagagaagtctcaaaggcagccagtcaaaagcactgggaaacaataccag

SEQ ID NO: 769891 - DNA, 120 bp, Artificial Sequence
  ENSG00000233757_5 (sequence is synthesized)
aaagcaaggagctaactccagagaaggatatttctgaagaagaatcggctcctggggtgttaattgtaagattttcaaaggaaagttctagtgaatgtgaggattctttagagagtcagc

SEQ ID NO: 769892 - DNA, 120 bp, Artificial Sequence
  ENSG00000233757_6 (sequence is synthesized)
aggaaaaccatgagaaacatttaatacaagaggctgtcactgagaaatcttctagggagagaagctaccaatctgatgaatttagaagaaattgcactcagaggtccttacttgttcagc

SEQ ID NO: 769893 - DNA, 120 bp, Artificial Sequence
  ENSG00000233757_7 (sequence is synthesized)
caaaattcagatataattaggcatgagagaatttgtgcaggaaagaaaccttggaaatgcaatgaatgcgagaaagccttcagttactactcagcttttgtcttgcatcagagaattcac

SEQ ID NO: 769894 - DNA, 120 bp, Artificial Sequence
  ENSG00000233757_8 (sequence is synthesized)
acaggagaaaaaccctatgaatgtaacgaatgtggtaaagcctttagccagagcatacaccttactctgcaccagagaattcatactggggagaaaccctatgaatgtcatgagtgtggg

SEQ ID NO: 769895 - DNA, 120 bp, Artificial Sequence
  ENSG00000233757_9 (sequence is synthesized)
aaagccttcagtcaccgctcagcccttattcggcatcatataattcatactggagaaaaaccctatgaatgcaatgaatgcgggaaggcctttaatcagagttcatacctcactcaacat

SEQ ID NO: 769896 - DNA, 120 bp, Artificial Sequence
  ENSG00000233757_10 (sequence is synthesized)
cagcgaattcatactggagagaaaccttatgagtgtaatgaatgtgggaaggccttcagccaaagcacattccttacccagcatcaggtcattcacactggagagaaaccttataagtgt

SEQ ID NO: 769897 - DNA, 120 bp, Artificial Sequence
  ENSG00000233757_11 (sequence is synthesized)
aacgaatgtggcaaagcctttagtgatcggtcaggtcttatccagcaccagagaactcatactggggagcggccatatgagtgtaacgaatgtgggaaagcctttggctactgctcagcc

SEQ ID NO: 769898 - DNA, 120 bp, Artificial Sequence
  ENSG00000233757_12 (sequence is synthesized)
ctgactcagcaccagaggactcacactggggagaaaccctataaatgcaatgattgtgccaaagccttcagtgaccgctcagcccttattcgtcatcagagaacacacactggagagaaa

SEQ ID NO: 769899 - DNA, 120 bp, Artificial Sequence
  ENSG00000233757_13 (sequence is synthesized)
ccttacaaatgtaaagattgtggaaaagcattcagccagagctcatctcttacaaagcatcagaaaactcacactggagaaaagccctacaagtgtaaggaatgtggaaaagcctttagc

SEQ ID NO: 769900 - DNA, 120 bp, Artificial Sequence
  ENSG00000233757_14 (sequence is synthesized)
cagagttcatccctctctcaacatcagaaaactcatgctggagtgaaaaccaagaaatatgtccaagctcttagtgagcatttaacctttggccaacacaagagaattcatactggataa

SEQ ID NO: 769901 - DNA, 120 bp, Artificial Sequence
  ENSG00000233757_15 (sequence is synthesized)
ggaaagctgggtggaggaagagctcccaaatccaacatggaattctcttggcgacaactccccattgaagaatgttcctttcttctggagaaaggagggcacctttcacgtgggagtttt

SEQ ID NO: 769902 - DNA, 120 bp, Artificial Sequence
  ENSG00000233757_16 (sequence is synthesized)
tagccacatgtccctgagccaactacaatggagcctggaatatgcaatcttccccagcatctgggagaggaaagtgaacatggagcattgtcttggctgtggtggccaacaaacattggg

SEQ ID NO: 769903 - DNA, 120 bp, Artificial Sequence
  ENSG00000233757_17 (sequence is synthesized)
acagaacttgattgtaggggcaccagtgggaggcgagtgttatgatccgatggcttcacttgtgatctattcttcatgataatataggctaaacctgagccctgggctccaggacaggca

SEQ ID NO: 769904 - DNA, 120 bp, Artificial Sequence
  ENSG00000233802_0 (sequence is synthesized)
atgaattctggaatctcgcaagtcttccagagggaactcacctgccccatctgcctgaactacttcatagacccggtcaccatagactgtgggcacagcttttgcaggccctgtttctac

SEQ ID NO: 769905 - DNA, 120 bp, Artificial Sequence
  ENSG00000233802_1 (sequence is synthesized)
ctcaactggcaagacatcccaattcttactcagtgctttgaatgcctaaagacaacacagcagagaaacctcaaaactaacattcgattgaagaagatggcttcccgtgccagaaaagcc

SEQ ID NO: 769906 - DNA, 120 bp, Artificial Sequence
  ENSG00000233802_2 (sequence is synthesized)
agtctctggctattcctgagctctgaggagcaaatgtgtggcactcacagggagacaaagaagatattctgtgaagtggacaggagcctgctctgtttgctgtgctccagctctctggag

SEQ ID NO: 769907 - DNA, 120 bp, Artificial Sequence
  ENSG00000233802_3 (sequence is synthesized)
caccggtatcacagacactgtcccgctgagtgggctgctgaggaacaccgggagaagcttttaaagaaaatgcagtctttatgggaaaaagtttgtgaaaatcagagaaacctgaacgtg

SEQ ID NO: 769908 - DNA, 120 bp, Artificial Sequence
  ENSG00000233802_4 (sequence is synthesized)
gaaaccaccagaatcagccactggaaggattatgtgaatgtaaggctagaagctattagagctgagtatcagaagatgcctgcatttcatcatgaagaagaaaaacataatttggagatg

SEQ ID NO: 769909 - DNA, 120 bp, Artificial Sequence
  ENSG00000233802_5 (sequence is synthesized)
gggagattttaagaggaacgtatgcggagctgatgaaaatgtgccataaaccagatgtggagctacttcaggcttttggagacatattacacaggagtgagtccgtgctgctgcacatgc

SEQ ID NO: 769910 - DNA, 120 bp, Artificial Sequence
  ENSG00000233802_6 (sequence is synthesized)
gggcagggcccatcactggactgagggacaggctcaaccaattccgagtggatattactctgcctcataatgaagccaacagtcatatcttccgacgtggagatttgagaagcatttgta

SEQ ID NO: 769911 - DNA, 120 bp, Artificial Sequence
  ENSG00000233802_7 (sequence is synthesized)
ttggatgtgaccgtcaaaatgcgccccatatcactgcaacacctacaagttttcttgcatggggtgctcagactttcacctctggcaaatattactgggaggtccatgtgggggactctt

SEQ ID NO: 769912 - DNA, 120 bp, Artificial Sequence
  ENSG00000233802_8 (sequence is synthesized)
ggaattgggcctttggtgtctgtaataagtattggaaagggacgaatcagaatggcaatatacatggagaggagggactctttagtcttgggtgtgttaagaatgacattcagtgcagcc

SEQ ID NO: 769913 - DNA, 120 bp, Artificial Sequence
  ENSG00000233802_9 (sequence is synthesized)
tctttaccacctccccacttacactgcagtatgtcccaagacctaccaaccatgtaggattattcctggattgtgaagctagaactgtgagcttcgttgatgttaatcaaagctccccta

SEQ ID NO: 769914 - DNA, 80 bp, Artificial Sequence
  ENSG00000233802_10 (sequence is synthesized)
tacacacttttgctgtgttcacctctgaccagagacaaatcagatatgtgttcatctgctgtgggaacccctttatccca

SEQ ID NO: 769915 - DNA, 120 bp, Artificial Sequence; identical to SEQ ID NO: 765287
  ENSG00000233802_11 (sequence is synthesized)

SEQ ID NO: 769916 - DNA, 120 bp, Artificial Sequence; identical to SEQ ID NO: 767937
  ENSG00000233803_0 (sequence is synthesized)

SEQ ID NO: 769917 - DNA, 80 bp, Artificial Sequence; identical to SEQ ID NO: 767938
  ENSG00000233803_1 (sequence is synthesized)

SEQ ID NO: 769918 - DNA, 120 bp, Artificial Sequence
  ENSG00000233803_2 (sequence is synthesized)
gctgttggatgacataatggcggaggtggaggtggtggcggaggtggaggtggtggcggaggaggagggcctcgtggagcggcgggaggaggcccagcgggcacagcaggctgtgcctgg

SEQ ID NO: 769919 - DNA, 120 bp, Artificial Sequence; identical to SEQ ID NO: 767940
  ENSG00000233803_3 (sequence is synthesized)

SEQ ID NO: 769920 - DNA, 120 bp, Artificial Sequence; identical to SEQ ID NO: 553820
  ENSG00000233803_4 (sequence is synthesized)

SEQ ID NO: 769921 - DNA, 120 bp, Artificial Sequence; identical to SEQ ID NO: 553821
  ENSG00000233803_5 (sequence is synthesized)

SEQ ID NO: 769922 - DNA, 120 bp, Artificial Sequence; identical to SEQ ID NO: 553822
  ENSG00000233803_6 (sequence is synthesized)

SEQ ID NO: 769923 - DNA, 120 bp, Artificial Sequence; identical to SEQ ID NO: 767944
  ENSG00000233803_7 (sequence is synthesized)

SEQ ID NO: 769924 - DNA, 75 bp, Artificial Sequence
  ENSG00000233803_8 (sequence is synthesized)
cggcagcgggaaaagatggagcggaggcgcaagccccacctagatgttattgcaaaccacccccagatgtcagcc

SEQ ID NO: 769925 - DNA, 120 bp, Artificial Sequence
  ENSG00000233803_9 (sequence is synthesized)
tgaggtgagtcctcactgggaaacatgaggaatgaccccatgtgttcccagctgcttgggtcacctttctgagccctgatgaggcctttcccgattgagtcccctgacagatcctatgta

SEQ ID NO: 769926 - DNA, 120 bp, Artificial Sequence; identical to SEQ ID NO: 553826
  ENSG00000233803_10 (sequence is synthesized)

SEQ ID NO: 769927 - DNA, 120 bp, Artificial Sequence; identical to SEQ ID NO: 553827
  ENSG00000233803_11 (sequence is synthesized)

SEQ ID NO: 769928 - DNA, 120 bp, Artificial Sequence; identical to SEQ ID NO: 768125
  ENSG00000233803_12 (sequence is synthesized)

SEQ ID NO: 769929 - DNA, 120 bp, Artificial Sequence
  ENSG00000233803_13 (sequence is synthesized)
tgatggatttccttaagctgttgccccatcagacttgtgtgtgcttttagggtccagtgcatcttgttagctgactcccctcacagacaatactgggaatggggcagggattgcgcagaa

SEQ ID NO: 769930 - DNA, 120 bp, Artificial Sequence; identical to SEQ ID NO: 553830
  ENSG00000233803_14 (sequence is synthesized)

SEQ ID NO: 769931 - DNA, 120 bp, Artificial Sequence
  ENSG00000233816_0 (sequence is synthesized)
agatctcaaagtcatatcatgagaggtgtcctctgcatacatatggtttgtcactggccatcttatagatattgcttatgtttgatccttagcatttctgtctgtgttgtgggctttgaa

SEQ ID NO: 769932 - DNA, 120 bp, Artificial Sequence
  ENSG00000233816_1 (sequence is synthesized)
atgaaatataaataatttatattttaacaattctactgaagttgttcaacacatctatatttaggtcaagaattgaagaaaaaattcttcacactctctaggtgagtatctagcagctag

SEQ ID NO: 769933 - DNA, 120 bp, Artificial Sequence
  ENSG00000233816_2 (sequence is synthesized)
ggtgagtatctagcagctagtgaagttaaaaattttctcacatgcaacaaaattaaaagttaagtataataaaaataaatgataaaaatattttaaattattaagtctttatcagtttca

SEQ ID NO: 769934 - DNA, 120 bp, Artificial Sequence
  ENSG00000233816_3 (sequence is synthesized)
gcccacaagcaaatttagttataaagttaagttaaatttgaatagcgtttaaatttaacttttatcttaaaattttcatttggttatttttaaacttgcattgaataaaatgattaaact

SEQ ID NO: 769935 - DNA, 120 bp, Artificial Sequence
  ENSG00000233816_4 (sequence is synthesized)
tttgagtatagagatatacatatagtacacaaatagatagatattatatctgtgttattaaattttcacggtgggttcaattaggaaaaaaaatctaaaaagtctctgggaacaagatgg

SEQ ID NO: 769936 - DNA, 120 bp, Artificial Sequence
  ENSG00000233816_5 (sequence is synthesized)
agaagcattaagaaagtggaaatcagtatgttccctatttaaggcatctgcaggaagcaaagccttcagagaacctagagcccaaggttcagagtcacccatctcagcaagcccagaagc

SEQ ID NO: 769937 - DNA, 120 bp, Artificial Sequence
  ENSG00000233816_6 (sequence is synthesized)
atctgcaatatctatgatggcctcgccctttgctttactgatggccctggtggtgctcagctgcaagtcaagctgctctctgggctgtgatctccctgagacccacagcctggataacag

SEQ ID NO: 769938 - DNA, 120 bp, Artificial Sequence
  ENSG00000233816_7 (sequence is synthesized)
gaggaccttgatgctcctggcacaaatgagcagaatctctccttcctcctgtctgatggacagacatgactttggatttccccaggaggagtttgatggcaaccagttccagaaggctcc

SEQ ID NO: 769939 - DNA, 120 bp, Artificial Sequence
  ENSG00000233816_8 (sequence is synthesized)
agccatctctgtcctccatgagctgatccagcagatcttcaacctctttaccacaaaagattcatctgctgcttgggatgaggacctcctagacaaattctgcaccgaactctaccagca

SEQ ID NO: 769940 - DNA, 120 bp, Artificial Sequence
  ENSG00000233816_9 (sequence is synthesized)
gctgaatgacttggaagcctgtgtgatgcaggaggagagggtgggagaaactcccctgatgaatgcggactccatcttggctgtgaagaaatacttccgaagaatcactctctatctgac

SEQ ID NO: 769941 - DNA, 71 bp, Artificial Sequence
  ENSG00000233816_10 (sequence is synthesized)
agagaagaactctctttatcaacaaacttgcaagaaagattaaggaggaaggaataacacctggtccaaca

SEQ ID NO: 769942 - DNA, 120 bp, Artificial Sequence
  ENSG00000233822_0 (sequence is synthesized)
atgcccgagccctcaaagtccgctcctgccccgaagaaaggctccaagaaggcagtgacaaaggcccagaagaaggacggcaagaagcgcaagcgcagccgcaaggagagctactccgtg

SEQ ID NO: 769943 - DNA, 120 bp, Artificial Sequence
  ENSG00000233822_1 (sequence is synthesized)
accggtatctcgtccaaggccatgggcatcatgaactccttcgtcaatgacatcttcgagcgcatcgccggcgaggcttcccgcctggcgcattacaacaagcgctcgaccatcacctcc

SEQ ID NO: 769944 - DNA, 120 bp, Artificial Sequence
  ENSG00000233822_2 (sequence is synthesized)
ggggagctggccaagcacgcggtgtcggagggcaccaaggccgtcaccaagtacaccagttccaaataatgtctccatagaatcactttccaatacaacggctcttttcagagccaccta

SEQ ID NO: 769945 - DNA, 120 bp, Artificial Sequence
  ENSG00000233822_3 (sequence is synthesized)
caaaacaatgtggtgtaaaagccgtttagttttgcttcatctccatacagcattccagtgccattgcaaaatgactcgactatcagataaaactgaacacagctctacttggtgaaaaag

SEQ ID NO: 769946 - DNA, 120 bp, Artificial Sequence
  ENSG00000233822_4 (sequence is synthesized)
taggtggctctgaaaagaacctttttggtttggaccgaggtatgagtaatgaactgctccagccccgctacttgcccttggccttgtggtggctctcagttttcttaggcagcagcacgg

SEQ ID NO: 769947 - DNA, 120 bp, Artificial Sequence
  ENSG00000233822_5 (sequence is synthesized)
cctggatattgggcaggacaccaccctgggcgatggtcactttaccaagcagcttgttgagctcctcgtcgttgcggatggccagctgcaagtggcgcgggatgatgcgggtcttcttgt

SEQ ID NO: 769948 - DNA, 120 bp, Artificial Sequence
  ENSG00000233822_6 (sequence is synthesized)
tgtcgcgggccgcgttgccagccagttccaggatctcggcggttaggtactccaacaccgccgccaggtacaccggcgctccggcaccgacccgctcagcgtagttgcccttgcggagca

SEQ ID NO: 769949 - DNA, 120 bp, Artificial Sequence
  ENSG00000233822_7 (sequence is synthesized)
gtcggtgcactcggcccactgggaactgaagacccgcccttgaagaacgggtcttagccttggcgcgagctttgccgccctgcttgccacgtcccgacatgacgtaaaaaattcaatcag

SEQ ID NO: 769950 - DNA, 120 bp, Artificial Sequence
  ENSG00000233822_8 (sequence is synthesized)
taacgttcctgagactgacgtaacgctaaagctccgctacttatagtcaacagaggcacgaaaactaagctgtgctattggctaacattacagtttcgctttaaccaatgggattgcggt

SEQ ID NO: 769951 - DNA, 120 bp, Artificial Sequence
  ENSG00000233822_9 (sequence is synthesized)
tttgaaaaacacttattttgattggacaaagttaatatacgtttccaggactcaccactggttaaacgcacaacttcattctctaccccacttgcgttaagaagcagtgaataagcggta

SEQ ID NO: 769952 - DNA, 120 bp, Artificial Sequence
  ENSG00000233822_10 (sequence is synthesized)
gggcaccaaggccgtcaccaagtacaccagttccaagtgagcccgcccaccgcggaacgttcggtcagtctcggcccacaccccaaaggctcttttcagagccactcagtcttcccaaag

SEQ ID NO: 769953 - DNA, 120 bp, Artificial Sequence
  ENSG00000233822_11 (sequence is synthesized)
agaactggcactcactgttcttacagcaggtatttcttacttgctacaaagacgatttccaagattcctttagccttgttagaaactaattttggctcaagcctctaatcccggttcggg

SEQ ID NO: 769954 - DNA, 86 bp, Artificial Sequence
  ENSG00000233822_12 (sequence is synthesized)
agaaactaattttggctcaagcctctaatcccggttcgggaaaccgaagcgggtggctcacctgaggttagaagttcgagacgagc

SEQ ID NO: 769955 - DNA, 120 bp, Artificial Sequence
  ENSG00000233822_13 (sequence is synthesized)
ccaagtacaccagttccaagtgagcccgcccaccgcggaacgttcggaagagaaaaagaagattcacagagagcattaagaaggcccatggattcagaaagctcaagatttggctaaaat

SEQ ID NO: 769956 - DNA, 120 bp, Artificial Sequence
  ENSG00000233822_14 (sequence is synthesized)
taagagtcagcaaccaatctccagatgacatttatattgcaagagattgaatgcagaaagaagaattcagctttcttttattaaacaaggcattagagagatttgcaaaattgtaaaaca

SEQ ID NO: 769957 - DNA, 120 bp, Artificial Sequence
  ENSG00000233822_15 (sequence is synthesized)
gaattaaccaaatttttttgttttactatataatacggtaaatgtcaatagttataacctacagaaacacaaattctttggattgcaaagctccaccacctaatatgctatagatcaagg

SEQ ID NO: 769958 - DNA, 120 bp, Artificial Sequence
  ENSG00000233822_16 (sequence is synthesized)
ttcaaaagagagctccctggaaaactccttggtgttttgttcactgaaatattatttaaggagaacatattttattttaatgactgtcattgctggcatccgaactctaattcccaaggc

SEQ ID NO: 769959 - DNA, 120 bp, Artificial Sequence
  ENSG00000233822_17 (sequence is synthesized)
atcctcaaattatcatctgcatcacttcattactttttaagagtgtaagtgggtcatgagaccagaaggttcaagaactgctgccttagggtatataccacactagtaatgttcatttgt

SEQ ID NO: 769960 - DNA, 120 bp, Artificial Sequence
  ENSG00000233822_18 (sequence is synthesized)
gttcaaatgactatttttcaaagtatttggagtatcccttcctgcacacttatgttatgatctagatatacagatccatttactttgttttgctgttgatgtctaggattggacttttta

SEQ ID NO: 769961 - DNA, 120 bp, Artificial Sequence
  ENSG00000233822_19 (sequence is synthesized)
atgtttggttctatcattacataaaatatttttacatagtcccaaggtcaaatcaaattatatccaaagaaatctttctccttcatgctaatagcctctcttgccttagagtaataattt

SEQ ID NO: 769962 - DNA, 120 bp, Artificial Sequence
  ENSG00000233822_20 (sequence is synthesized)
taaaggttatgatatatccttctgttgtttattataagcatatatgtatgtattcttagggaatattaacttcattttgctgttgatgtctagggattggactttttaatatttgtttct

SEQ ID NO: 769963 - DNA, 120 bp, Artificial Sequence
  ENSG00000233822_21 (sequence is synthesized)
accgttacataaaatatttttacatagtcccaaggtcaaatcaaattatatccaaagaaatctttctccttcatcctaatagcctctcttaccttagagtaataattttaaatgttatga

SEQ ID NO: 769964 - DNA, 120 bp, Artificial Sequence
  ENSG00000233822_22 (sequence is synthesized)
tatatccttctgttgtttattataagcatatatatatgtattctagggaagattaactcgtatcacaggagaggagactggaagttgatactatgcaagataaactttgtcacagacagt

SEQ ID NO: 769965 - DNA, 120 bp, Artificial Sequence
  ENSG00000233822_23 (sequence is synthesized)
cacctgttctttggagggcccattcatctttcccaaaaataatttcctctcccctacattgcctacatcccccttcctgtcttccctatgaagacagtatataagcttctagatctcact

SEQ ID NO: 769966 - DNA, 120 bp, Artificial Sequence
  ENSG00000233822_24 (sequence is synthesized)
atctcactgggcttggggggcattcacttatttttcatgtgatacctccatgcacaaaataaaatttttttttttcgagacggagtcttgccgcgtctcccaggctggagtgcagtggcg

SEQ ID NO: 769967 - DNA, 120 bp, Artificial Sequence
  ENSG00000233822_25 (sequence is synthesized)
cgtgagccaccacgcccggccacaaaataaatttttatatctttctcttattaatctgcctgctgtcaatttatttcatacacttaattatcaaaccctcagagggcagagggagtcttc

SEQ ID NO: 769968 - DNA, 120 bp, Artificial Sequence
  ENSG00000233822_26 (sequence is synthesized)
tatcaaaccctcagagggcagagggagtcttccctcccctacagttccaatcagattgttttctagttagcatgagggttgatctaagatgtctggtctaccattactgaaaataattac

SEQ ID NO: 769969 - DNA, 120 bp, Artificial Sequence
  ENSG00000233822_27 (sequence is synthesized)
taaaaatagaatcaatggtatagtatttgttaacatgttttaaaaatatcaataactaaattatcatagggcttccaattcttaaaatcttcaaaatgcagttgtataaaatgatataga

SEQ ID NO: 769970 - DNA, 120 bp, Artificial Sequence
  ENSG00000233822_28 (sequence is synthesized)
tcagtgccgtcatactctctggtccagggatgggtttcccatataaataattcaaattctcactaacgatgtttaagttaggaaattagttgccatgttggttcagttgtgtatcaccac

SEQ ID NO: 769971 - DNA, 120 bp, Artificial Sequence
  ENSG00000233822_29 (sequence is synthesized)
caaagaagtgagttgctaaattaaatataaataaatacttagccatagaactagaggaaaagattaaacaatgtattgttggatcaagaaatcatgtttcaaaatttaaatcaatgactt

SEQ ID NO: 769972 - DNA, 120 bp, Artificial Sequence
  ENSG00000233822_30 (sequence is synthesized)
ttatagttcaagtgtctgtgaagtctaaaataaaaatacagacattaattgcactaccttattggtagaagaaatagcaagtaccttaaaaagtgcatgtcatattggaatcaaatctct

SEQ ID NO: 769973 - DNA, 120 bp, Artificial Sequence
  ENSG00000233822_31 (sequence is synthesized)
tgaaggctaggctagtggtaaaagaaatagtaggtaccttagaaactacatgtcatatttgaatcaaatctcttgaaggctaggcaattcatcttgactatatttttgtcaccaaagagc

SEQ ID NO: 769974 - DNA, 120 bp, Artificial Sequence
  ENSG00000233822_32 (sequence is synthesized)
ttaatattgaaccatcaaaatatattcactttaccatctgggacattttaatcaaacctctcatctgttcaatcacatctttcacttcagaaagaactttcacttctgccttgtttttca

SEQ ID NO: 769975 - DNA, 120 bp, Artificial Sequence
  ENSG00000233822_33 (sequence is synthesized)
gaactatctatagccaccacttttcacattaagatgatccttctcaagccatcagagaactaagtgacatctgcaatgaaatggcttcaccacttctgtcctcgggtaattctgcaatct

SEQ ID NO: 769976 - DNA, 120 bp, Artificial Sequence
  ENSG00000233822_34 (sequence is synthesized)
atttttgctggatccaatccctgaagaccatcctgcctttctaagggatgcttctccctttcagctaccttcatgtcttttaatgcaattgttgcttctttctgtcctggtgttgtactt

SEQ ID NO: 769977 - DNA, 120 bp, Artificial Sequence
  ENSG00000233822_35 (sequence is synthesized)
ggtgttgtactttggcagtggtcacacccatggagcacagacttctacaaggcacaaggcatgactttgatttttctgttgtaatttgatggaattggccaggcgtggtagctcatgcct

SEQ ID NO: 769978 - DNA, 120 bp, Artificial Sequence
  ENSG00000233822_36 (sequence is synthesized)
caaaaataataataataataataataattgatggaattaagaaatattgaaaaatatataccattcactgtgagaaaaaagttcaactcctcaaactgggaatctcagtccattttatgt

SEQ ID NO: 769979 - DNA, 120 bp, Artificial Sequence
  ENSG00000233822_37 (sequence is synthesized)
atgtatgaaggtgatggcctgcactaaccttttgaggctgctatcatcctatgcctattttatgggtgaaaaaattgatggacagagaaagggagcattttcagtatatcacctagagaa

SEQ ID NO: 769980 - DNA, 120 bp, Artificial Sequence
  ENSG00000233822_38 (sequence is synthesized)
tcagtgacagagtcagtctatgaatcttgtggtggtgggtggccttcactgtagaaaggatagattccatgatcttttgtaccatcaaataaaatacttacaaacaaatgagaattagcc

SEQ ID NO: 769981 - DNA, 120 bp, Artificial Sequence
  ENSG00000233822_39 (sequence is synthesized)
atttgtatttgttttgttttaatagtgcaaataagatgtcattctagacctaaaaaaatgtttttctcccttttgtttccaaattttaggataaaaggcaaataaaaatctgttcttaga

SEQ ID NO: 769982 - DNA, 120 bp, Artificial Sequence
  ENSG00000233917_0 (sequence is synthesized)
ggtagacgcgatctgttcgctactaccggcctcccctggctgttaaaagcagatggtggctgaggtttgttcaatgcccgctgcctctgctgtgaagaagccatttgatctcaggagcaa

SEQ ID NO: 769983 - DNA, 120 bp, Artificial Sequence
  ENSG00000233917_1 (sequence is synthesized)
gcaagatgggcaagtggtgccaccaccgcttcccctgctgcagggggagcggcacgagcaatgtgggcacttctggagaccatgacgactcctttatgaagacactcaggagcaagatgg

SEQ ID NO: 769984 - DNA, 74 bp, Artificial Sequence
  ENSG00000233917_2 (sequence is synthesized)
tgctgacttggggagactacgacgacagcgccttcatggagccgaggtaccacgtccgtcgagaagatctggac

SEQ ID NO: 769985 - DNA, 80 bp, Artificial Sequence
  ENSG00000233917_3 (sequence is synthesized)
agaaaggatctcatcgtcatgctcagggacactgacatgaacaagagggacaagcaaaagaagtagtacaactcctgctg

SEQ ID NO: 769986 - DNA, 120 bp, Artificial Sequence
  ENSG00000233917_4 (sequence is synthesized)
ctctgccaatggaaattcagaagtagtacaactcctgctggacagacgatgtcaacttaacgtccttgacaacaaaaaaaggacagctctgataaaggccgtacaatgccaggaagatga

SEQ ID NO: 769987 - DNA, 120 bp, Artificial Sequence
  ENSG00000233917_5 (sequence is synthesized)
aatgccaggaagatgaatgtgtgttaatgttgctggaacatggcgctgatggaaatattcaagatgagtatggaaataccgctctacactatgctatctacaatgaagataaattaatgg

SEQ ID NO: 769988 - DNA, 120 bp, Artificial Sequence
  ENSG00000233917_6 (sequence is synthesized)
acaccacttttgcttggcgtacatgaacaaaaacaggaagtggtgaaatttttaatcaagaaaaaagctaatttaaatgcacttgatagatatggaagaactgccctcatacttgctgta

SEQ ID NO: 769989 - DNA, 69 bp, Artificial Sequence; identical to SEQ ID NO: 768340
  ENSG00000233917_7 (sequence is synthesized)

SEQ ID NO: 769990 - DNA, 120 bp, Artificial Sequence; identical to SEQ ID NO: 768341
  ENSG00000233917_8 (sequence is synthesized)

SEQ ID NO: 769991 - DNA, 120 bp, Artificial Sequence; identical to SEQ ID NO: 768342
  ENSG00000233917_9 (sequence is synthesized)

SEQ ID NO: 769992 - DNA, 120 bp, Artificial Sequence; identical to SEQ ID NO: 768343
  ENSG00000233917_10 (sequence is synthesized)

SEQ ID NO: 769993 - DNA, 120 bp, Artificial Sequence; identical to SEQ ID NO: 768344
  ENSG00000233917_11 (sequence is synthesized)

SEQ ID NO: 769994 - DNA, 120 bp, Artificial Sequence
  ENSG00000233917_12 (sequence is synthesized)
aagaataatttttggcaggaggaaattgcaacaagtttgtgtgtttgccagaagaacatctgatgagattgcctgtttggcaggaagagcaacaactgcaaaagacaagatgccgagtga

SEQ ID NO: 769995 - DNA, 71 bp, Artificial Sequence
  ENSG00000233917_13 (sequence is synthesized)
gtgaacttaccagagtttgggaatgaggtgaatacttagctaagtgtgaaagccaccatgattatatgtaa

SEQ ID NO: 769996 - DNA, 120 bp, Artificial Sequence
  ENSG00000233917_14 (sequence is synthesized)
gagctcctataaaactttatttacaaagccaaaaggcagattggatttgtcctgtggcctatagtttgctgggattgatggaagataaccatgtaaagaaaccaggagacaaaggaagct

SEQ ID NO: 769997 - DNA, 89 bp, Artificial Sequence
  ENSG00000233917_15 (sequence is synthesized)
gtttccatgtcacacatccttggactagtatcaatgtattctaaggttttcacctgcccatggtgaaataaagtttggaatccccgtta

SEQ ID NO: 769998 - DNA, 120 bp, Artificial Sequence
  ENSG00000233927_0 (sequence is synthesized)
actcctctccgccagaccgccgccgcgccgccatcatggacaccagccgtgtgcagcctatcaagctggccagggtcaccaaggtcctgggcaggaccggttctcagggacagtgcacgc

SEQ ID NO: 769999 - DNA, 120 bp, Artificial Sequence
  ENSG00000233927_1 (sequence is synthesized)
aggtgcgcgtggaattcatggacgacacgagccgatccatcatccgcaatgtaaaaggccccgtgcgcgagggcgacgtgctcacccttttggagtcagagcgagaagcccggaggttgc

SEQ ID NO: 770000 - DNA, 120 bp, Artificial Sequence
  ENSG00000233927_2 (sequence is synthesized)
gctgagcttggctgctcgctgggtcttggatgtcgggttcgaccacttggccgatgggaatggtctgtcacagtctgctccttttttttgtccgccacacgtaactgagatgctccttta

SEQ ID NO: 770001 - DNA, 120 bp, Artificial Sequence
  ENSG00000233927_3 (sequence is synthesized)
aataaagcgtttgtgtttcaagttaactcaggttcttgtctgggttatacgactagggtttctccaggtttcttgagtggctcccaggcggtcaccgatcctccgcactctggaaatcct

SEQ ID NO: 770002 - DNA, 120 bp, Artificial Sequence
  ENSG00000233927_4 (sequence is synthesized)
ggccgtgcggtcttgccaaacgaagcttttcctttttgaggcggggggtcgtgtttgtcgattgcaccctctaccccaaacaaaacacaagcgtagtaggaatgttttattagcaaagaa

SEQ ID NO: 770003 - DNA, 120 bp, Artificial Sequence
  ENSG00000233927_5 (sequence is synthesized)
gtgggtggatcagggctctatcacttggtccccacctcaccttggtggggccagagtgagccccttcctgccacagtcaccccaactgaaattgcctttctcttcggccagtgttagcct

SEQ ID NO: 770004 - DNA, 120 bp, Artificial Sequence
  ENSG00000233927_6 (sequence is synthesized)
ctgagcaggggaccctggacccttctgtgcgccaaaggctgaggtgactgacgaggagatctccccacagctaggtgtagtgagccagacgaggcagcttactgaacctgggggttctct

SEQ ID NO: 770005 - DNA, 120 bp, Artificial Sequence
  ENSG00000233927_7 (sequence is synthesized)
ccattgtcaccgcattctccttcaccaggtgtggctgtctgggagccagggggtgactcgctctggagagaggggaaaagaggggggcctgctgcaatctccttgaggcaggaaacgtgg

SEQ ID NO: 770006 - DNA, 120 bp, Artificial Sequence
  ENSG00000233927_8 (sequence is synthesized)
gattcagccccagcctcacttagtggaggttcttttaccatggacccaggctgcctggtttgtatccaacctctgccccttctgacctggaagaggcgcttgaccttcctcccacatccc

SEQ ID NO: 770007 - DNA, 120 bp, Artificial Sequence
  ENSG00000233927_9 (sequence is synthesized)
ttccagtggggtgagtacaggtgttcctcagtttacaatgggttacattccggtgagtacatcataggttgaaagtattgcaagttgaaatgtgtttaatacacctaatctcccaaacat

SEQ ID NO: 770008 - DNA, 120 bp, Artificial Sequence
  ENSG00000233927_10 (sequence is synthesized)
cacagcttagcatggtccatcttaagcttgttcagaacgccttagcctgtagttggggaaactcgtctaacacgaagcctgttttaataaagtattgaatgtcttatgtaatttattgaa

SEQ ID NO: 770009 - DNA, 120 bp, Artificial Sequence
  ENSG00000233927_11 (sequence is synthesized)
cgggctgaaggggtgactagctgggggttcccagggagattcggggagagcgaagggtcccggcttaggagggaggtgaggagcaggagcgggtcccggacacacggagcccgaagcccc

SEQ ID NO: 770010 - DNA, 120 bp, Artificial Sequence
  ENSG00000233927_12 (sequence is synthesized)
ccatggtgcagccctgtccgccccgcgcaccccggacgcccagttccgcagccgctggatgagacgggtggcggacgccatcttccgtccgcgatactgaagggcgcagccggtgacgtc

SEQ ID NO: 770011 - DNA, 120 bp, Artificial Sequence
  ENSG00000233927_13 (sequence is synthesized)
ggccgactgccggcgacctaaaccctgatgtgacctctaccctgccctaacccctgccagccggaatccgggagccgattctcatttcatcacggggttctgatggttccctttaacgat

SEQ ID NO: 770012 - DNA, 120 bp, Artificial Sequence
  ENSG00000233927_14 (sequence is synthesized)
gtggtagggaggcttcgttaagcccagggtgagagggtttgggaggcagagtctacatacagagactgacaagagggaggcgggagtttgccaattgctgcggggcctgtcaacatctca

SEQ ID NO: 770013 - DNA, 120 bp, Artificial Sequence
  ENSG00000233932_0 (sequence is synthesized)
gtctcaccaacagacacagacatttacacttctaggccaggaaagcgctaaccagggccctgtgactctacgcaggttccagaacacgccttctacatttgttactgaaccgatcagcga

SEQ ID NO: 770014 - DNA, 120 bp, Artificial Sequence
  ENSG00000233932_1 (sequence is synthesized)
acacagacaaacgtgccaacacttaagtctactggctggacttcatctccatggcaacaagcatggaaggcaaagagttgattccagaaggaactgtgaagagccacaacaatgtgccag

SEQ ID NO: 770015 - DNA, 120 bp, Artificial Sequence
  ENSG00000233932_2 (sequence is synthesized)
tgaataatgagtagtacctactgtggcaactcttcagctaagatgagtgtcaacgaagtatcagctttctcattgactctggagcaaaaaactggctttgcttttgttgggattttgtgt

SEQ ID NO: 770016 - DNA, 120 bp, Artificial Sequence
  ENSG00000233932_3 (sequence is synthesized)
atcttcttgggacttcttattatccgatgcttcaaaatcctgctagacccatatagtagcatgccttcctctacatgggaagatgaagttgaagagtttgataaagggacatttgaatat

SEQ ID NO: 770017 - DNA, 120 bp, Artificial Sequence
  ENSG00000233932_4 (sequence is synthesized)
gcactcgcgtgagagttccagctatatggtttttatggttgtgccatcgggacacattctggatacaattgtaactaccttgagggtgtgggagagaggctcattttgttcagtgaattc

SEQ ID NO: 770018 - DNA, 120 bp, Artificial Sequence
  ENSG00000233932_5 (sequence is synthesized)
aataaacatctgtgactaatttcttcaccatgctgtgtaaatgataaactattgttgggattcctcactttcctctgttcccacttagaggtttccaatgaatagagcataaggatggct

SEQ ID NO: 770019 - DNA, 120 bp, Artificial Sequence
  ENSG00000233932_6 (sequence is synthesized)
gccgccatgtttaccatctttattcttatcttgaacaactgccttgaatttctgcttcctttcttgtgctaataaactgtgccaaaggcatcttgctctctcccctctgaaaagcccagg

SEQ ID NO: 770020 - DNA, 120 bp, Artificial Sequence
  ENSG00000233932_7 (sequence is synthesized)
catcccctccacattcctgactcagacccctttagctttagtgagtcaggtcttaaacagagaatttagtccaaagaataatcaaaatattatttgtctaataataaccataggcccaaa

SEQ ID NO: 770021 - DNA, 120 bp, Artificial Sequence
  ENSG00000233932_8 (sequence is synthesized)
aggttcacaggtgaaaaaatatctcaaaaatctaacacccaaagcctacaagtagtcacaggccctaaagctccccaaatttcacagagccctgaccctcctatctcttctgtttgtcga

SEQ ID NO: 770022 - DNA, 120 bp, Artificial Sequence
  ENSG00000233932_9 (sequence is synthesized)
atctcttgcagtaaaatcccatagcttggaatccaaaccagatctgcctcatactgatgctccctcccctaccccttgcataaatagaatttaaaagggagtttccagcatgacctagtg

SEQ ID NO: 770023 - DNA, 120 bp, Artificial Sequence
  ENSG00000233932_10 (sequence is synthesized)
gaaagagtactctaagcagaaacaaagacagtctcagctgtgccaccagtagagctatgctctaatgggtaagtcatctaatctctgtgagcttcagtgaagagtagtgttaacatcctt

SEQ ID NO: 770024 - DNA, 120 bp, Artificial Sequence
  ENSG00000233932_11 (sequence is synthesized)
aggatttaagatatcatgaaaagtttttcagattaggagcctaaactcagagatttgaattctaatgttagcttagccaagaactagctttatgacctagaaagttacctaaagggaacc

SEQ ID NO: 770025 - DNA, 120 bp, Artificial Sequence
  ENSG00000233932_12 (sequence is synthesized)
tatattgcacaacaagaattaagaaacccatcctgcatgtcttcagcaatattgagagggccaattagatataatgaatgtgaaagcattttgtaaaccataaaacagtatctaaacata

SEQ ID NO: 770026 - DNA, 120 bp, Artificial Sequence
  ENSG00000233932_13 (sequence is synthesized)
ccttgctatcaatatttattgtcctcatcagtagcagtaatagagattctcaaaccctaagaagcaatggcttagtgtaaattattcaatctctctagtatttcattctcttcaattgag

SEQ ID NO: 770027 - DNA, 120 bp, Artificial Sequence
  ENSG00000233932_14 (sequence is synthesized)
aaataaaaagataaaattatatagttctaaattctttccaactacaaacttctgactctctatgagtcagaatggaggaacatagcaggagataaatacaaaaatatttatgtcctttga

SEQ ID NO: 770028 - DNA, 120 bp, Artificial Sequence
  ENSG00000233932_15 (sequence is synthesized)
aaacacagaactgcaaaacataccatgaaggaacaagactaatattaccaagaggtagcactaagttagttactttcaatttatttgatactcttataaattctttgagttggagactac

SEQ ID NO: 770029 - DNA, 120 bp, Artificial Sequence
  ENSG00000233932_16 (sequence is synthesized)
tatttccattttatttttaatcttaattttgcagaagagaaactgaagctaagagaaattaactagcttcccaaggtcaccatagctagggaatggttatgttagggattgaacttgggc

SEQ ID NO: 770030 - DNA, 120 bp, Artificial Sequence
  ENSG00000233932_17 (sequence is synthesized)
agtttgatttctgctgtatccctagacactgtcctcaacacttctacatagcttataggcatggttactgctcaggtctatggaattccaaaaccagctgtctctgtgagattccttgat

SEQ ID NO: 770031 - DNA, 120 bp, Artificial Sequence
  ENSG00000233932_18 (sequence is synthesized)
gctttccatctcataatagatttagaacatatctgttattagctatggatcttctggaccaaatcctcacctcaaggaggctctctgtaccccagttggttcaagagtgtaggcctggta

SEQ ID NO: 770032 - DNA, 120 bp, Artificial Sequence
  ENSG00000233932_19 (sequence is synthesized)
cacctcatagccagttagtaacttggcccaagaacaggccactgggccaagttcaactgaacatactgaaaattgtgtgtgccaggaaactaggtctctttgttgaccaaggcttttaaa

SEQ ID NO: 770033 - DNA, 120 bp, Artificial Sequence
  ENSG00000233932_20 (sequence is synthesized)
gtaccagatgtttcatttgtctcccagagaagacacccaccaagaccctccattttgatgactagaacaaaccaaggccagatctttatttcaaaggaagaaagacctctacaaccaaga

SEQ ID NO: 770034 - DNA, 120 bp, Artificial Sequence
  ENSG00000233932_21 (sequence is synthesized)
aaactttatgaaatatgagcattgtttctggaagttcaactcccataagcttttcaagtatattaactctaccataatattatttccaaatccactaaagaaaaattctattaaccaaaa

SEQ ID NO: 770035 - DNA, 80 bp, Artificial Sequence
  ENSG00000233932_22 (sequence is synthesized)
tccgcctccgcggggtgcggctctcgccgcggctcgcccggcggctctgcgggctgcaggtgcgggctgtcgccaccagt

SEQ ID NO: 770036 - DNA, 120 bp, Artificial Sequence
  ENSG00000233932_23 (sequence is synthesized)
ccgccgctgcctccgcctcggccgcctgagctgaggggctccgagcgcgacaatggcggctgccggggaagcggtaacggatcccgatttgaaaaggccccgagcgctcagtaacccgga

SEQ ID NO: 770037 - DNA, 120 bp, Artificial Sequence
  ENSG00000233932_24 (sequence is synthesized)
tctcgcgagaaccggtcgagactgggtgactgggagatgaactgaagaatagagcctgttgctgctggagctgattcccttcccctcctcatctcccacctcctttcagtctcacataca

SEQ ID NO: 770038 - DNA, 120 bp, Artificial Sequence
  ENSG00000233932_25 (sequence is synthesized)
cacacagatgctgccacagacacacgcgagcgcaaatatttacacactgccacaccgaagaaatccatgcacgttttcctgcaaacgcgcgcgcgcacacgtacttcggcgggcgcccac

SEQ ID NO: 770039 - DNA, 120 bp, Artificial Sequence
  ENSG00000233932_26 (sequence is synthesized)
gctgttgctgcagtcggccctacacctgcctgggagggctggaccagtcctgaaagcccccggtggtggtgccatgtctgcccaccagcccgcctgtcgcttggcaccagtggagtcttc

SEQ ID NO: 770040 - DNA, 120 bp, Artificial Sequence
  ENSG00000233932_27 (sequence is synthesized)
acccctaatgctagcgccactgctgatgcggctgccaggcgggggaaaagtgttgtgtacgtgcagattgctgatgcttctcccataatgttttgtaggaagtttccatgcttcttcggt

SEQ ID NO: 770041 - DNA, 120 bp, Artificial Sequence
  ENSG00000233932_28 (sequence is synthesized)
ttagtgcgtagaaagagacctggaaacaaacaacgcagaatgatgatgatggtctaggtttctttaatgagatatctggagaattttcagaccaggtttcccagtgcgttggaaggattg

SEQ ID NO: 770042 - DNA, 120 bp, Artificial Sequence
  ENSG00000233932_29 (sequence is synthesized)
agtgtcagagtccttgagccatccaaagattctcttaagagagaaattctcttaaggttgaaatctgagggtttaggggtggattctggcagatcctaaggtctgggatctctggaaagc

SEQ ID NO: 770043 - DNA, 120 bp, Artificial Sequence
  ENSG00000233954_0 (sequence is synthesized)
ctgtctcaaaaacaaaacaaaacaaaaacagaaagaatcagagtcaacaaatcagtatggatgcagattcctcagatgccaggaatcccaggataaatggcaggggtgaaccaaatactt

SEQ ID NO: 770044 - DNA, 120 bp, Artificial Sequence
  ENSG00000233954_1 (sequence is synthesized)
aaatacttcccattcttccctcaccaccctcctccatccaataaagaagtaaataaattcctcaagtcccctctgccccagtgcatggaatgtttacctgtggactaggactggtctaca

SEQ ID NO: 770045 - DNA, 120 bp, Artificial Sequence
  ENSG00000233954_2 (sequence is synthesized)
tgccaaacaggccttgcctcctgggcggcatgtttgcaggggatccttgctgatgatgttggcctcctcctgcaccctcccactccatggctgtctcacctgagagagctttcttccttt

SEQ ID NO: 770046 - DNA, 120 bp, Artificial Sequence
  ENSG00000233954_3 (sequence is synthesized)
tgcattaagtgtgagtcctgataaattcaaaaaagcctccaggtgacatcattttaacaccagttaacaatcacaaatctgggtgaatgagcctcagagtttttcttgacagtagtgtgc

SEQ ID NO: 770047 - DNA, 120 bp, Artificial Sequence
  ENSG00000233954_4 (sequence is synthesized)
gtgcgtgtgtgtgtgcgtgttttccatggaaaaataaaatgtattacacaaactatcagtattaattacagaaaggtggccaggtgcagtgcctcacgcctgtaatcctggcactttggg

SEQ ID NO: 770048 - DNA, 90 bp, Artificial Sequence
  ENSG00000233954_5 (sequence is synthesized)
ctgggcgtggtggcgcatgcctgtagtctcaggtactcggaagggtgaggcacaagaatcgcttgagtacacgccactaaactccagccg

SEQ ID NO: 770049 - DNA, 120 bp, Artificial Sequence
  ENSG00000233954_6 (sequence is synthesized)
caaaaaacaaacaaacaattaattacagaaaggtaagcctggccaataggtcaggaaaagcagccccactgcagatccacaccactacggaaacttgaggcaccacacacatgactttgc

SEQ ID NO: 770050 - DNA, 120 bp, Artificial Sequence
  ENSG00000233954_7 (sequence is synthesized)
accactacggaaacttgaggcaccacacacatgactttgctgactgggggcaaaggatgaactagtgagcaaacttgggaggctgagacaggaggatcgcttgaacctgggaggtagagg

SEQ ID NO: 770051 - DNA, 120 bp, Artificial Sequence
  ENSG00000233954_8 (sequence is synthesized)
tcaaaaaaaaaaaaaaagtcaagatattaaatatgaaagcaacactttattttttattttattttattttaagacagggtctctctctgtcacccagactggagtacagtgacatgatct

SEQ ID NO: 770052 - DNA, 120 bp, Artificial Sequence
  ENSG00000233954_9 (sequence is synthesized)
gtgacatgatctctgctcactgtgatctctgcctcccaggctcaaactatcctcccacatcagcctcccaaatagctgggactacaggggcccaccaccacacctgactaatttttgtat

SEQ ID NO: 770053 - DNA, 79 bp, Artificial Sequence
  ENSG00000233954_10 (sequence is synthesized)
accacacctgactaatttttgtatttttggtagagatgcggtttcaccatgttgcccagcctgatcttgaacttctgga

SEQ ID NO: 770054 - DNA, 120 bp, Artificial Sequence
  ENSG00000233954_11 (sequence is synthesized)
ttgagccacctcgcccagctgaaagtgacactttaatactttcaggaaattataggagatgattgttaagagctcaggataaagagaagtttctggccgggaacggtggctcacacctgt

SEQ ID NO: 770055 - DNA, 87 bp, Artificial Sequence
  ENSG00000233954_12 (sequence is synthesized)
ggtgccgctgttgctgctcgtgttaaatctagaaccgtagccagacatgggactggaggacgagcaaaagatgcttaccgaatccgg

SEQ ID NO: 770056 - DNA, 120 bp, Artificial Sequence
  ENSG00000233954_13 (sequence is synthesized)
tgggactggaggacgagcaaaagatgcttaccgaatccggagatcctgaggaggaggaagaggaagaggaggaattagtggatcccctaacaacagtgagagagcaatgcgagcagttgg

SEQ ID NO: 770057 - DNA, 120 bp, Artificial Sequence
  ENSG00000233954_14 (sequence is synthesized)
agaaatgtgtaaaggcccgggagcggctagagctctatgatgagcatgtatcctctcgatcacatacagaagaggattgcacggaggagctctttgacttcttgcatgcaaaggaccatt

SEQ ID NO: 770058 - DNA, 120 bp, Artificial Sequence
  ENSG00000233954_15 (sequence is synthesized)
gcgtggcccacaaactctttaacaacttgaaataaatgtgtggacttaattcaccccagccttcatcatctgggcatcagaatatttccttatggtttcggatgtaccatttgtttctta

SEQ ID NO: 770059 - DNA, 120 bp, Artificial Sequence
  ENSG00000233954_16 (sequence is synthesized)
tttgtgtaactgtaagttcacatgaacctcgtgggttttggcttaggctggtagcttctatgtaattcgcagtgattccatctaaataaaagttctgtgatctgcaaaaaaaaaaaaaaa

SEQ ID NO: 770060 - DNA, 120 bp, Artificial Sequence
  ENSG00000233999_0 (sequence is synthesized)
atggaagccccagcacagcttctcttcctcctgctactctggctcccagataccaccggagaaattgtaatgacacagtctccagccaccctgtctttgtctccaggggaaagagccacc

SEQ ID NO: 770061 - DNA, 84 bp, Artificial Sequence; identical to SEQ ID NO: 767686
  ENSG00000233999_1 (sequence is synthesized)

SEQ ID NO: 770062 - DNA, 120 bp, Artificial Sequence
  ENSG00000234068_0 (sequence is synthesized)
gtgtccgcacagaggtctgcaaggagagagagtgtcttcattctttccgccatcttgattctttctcactgaccaagactcagccgtgggaaatatgagtgagcttctaagagcaagatc

SEQ ID NO: 770063 - DNA, 120 bp, Artificial Sequence
  ENSG00000234068_1 (sequence is synthesized)
ccaatcctcagaaagaggaaatgaccaagagtcttcccagccggttggatctgtgattgtccaggagcccactgaggaaaaacgtcaagaagaggaaccaccaactgataatcagggtat

SEQ ID NO: 770064 - DNA, 120 bp, Artificial Sequence
  ENSG00000234068_2 (sequence is synthesized)
gcttttcaacaggaactggctctgcttaagatagaggatgagcctggagatggtcctgatgtcagggagggtattatgcccacttttgatctcactaaagtgctggaagcaggtgatgcg

SEQ ID NO: 770065 - DNA, 120 bp, Artificial Sequence
  ENSG00000234068_3 (sequence is synthesized)
caaccataggtttcaagcaagacaaatgaagactgaaaccaagaacgttattcttaatctggaaatttgactgataatattctcttaataaagttttaagttttctgcaaagaatcctta

SEQ ID NO: 770066 - DNA, 120 bp, Artificial Sequence
  ENSG00000234068_4 (sequence is synthesized)
agttgtgagagaatgtgtggaggagccagctggctttggacaggtcctgcggcacagtctgtggcttctgagggaaaagggcctcggggccgtcatccagctcctcccagtgggaaatat

SEQ ID NO: 770067 - DNA, 120 bp, Artificial Sequence
  ENSG00000234127_0 (sequence is synthesized)
gagtcaggaatggagagaagggtaatggttttacctcttattgtggaaacctgttgagatcacagagaatatactgacggcataaaagggcagaaccatagcagggtgcgcgctgctgta

SEQ ID NO: 770068 - DNA, 120 bp, Artificial Sequence
  ENSG00000234127_1 (sequence is synthesized)
gttgccttccatggatctataggagagcaagtcctccaggagaagaagtcctcaccagtgaacggagacctctctgaactaaggataccatggccacgtcagccccactacggagcctgg

SEQ ID NO: 770069 - DNA, 120 bp, Artificial Sequence
  ENSG00000234127_2 (sequence is synthesized)
aagaggaggtgacctgctccatctgtcttgattacctgcgggaccctgtgaccattgactgtggccacgtcttctgccgcagctgcaccacagacgtccgccccatctcagggagccgcc

SEQ ID NO: 770070 - DNA, 120 bp, Artificial Sequence
  ENSG00000234127_3 (sequence is synthesized)
ccgtctgcccactctgcaagaagccttttaagaaggagaacatccgacccgtgtggcaactggccagcctggtggagaacattgagcggctgaaggtggacaagggcaggcagccgggag

SEQ ID NO: 770071 - DNA, 120 bp, Artificial Sequence
  ENSG00000234127_4 (sequence is synthesized)
aggtgacccgggagcagcaggatgcaaagttgtgcgagcgacaccgagagaagctgcactactactgtgaggacgacgggaagctgctgtgcgtgatgtgccgggagtcccgggagcaca

SEQ ID NO: 770072 - DNA, 120 bp, Artificial Sequence
  ENSG00000234127_5 (sequence is synthesized)
ggccccacacggccgtcctcatggagaaggccgcccagccccacagggaaaaaatcctgaaccacctgagtaccctaaggagggacagagacaaaattcagggcttccaggcaaagggag

SEQ ID NO: 770073 - DNA, 120 bp, Artificial Sequence
  ENSG00000234127_6 (sequence is synthesized)
aagctgatatcctggccgcgctgaagaagctccaggaccagaggcagtacattgtggctgagtttgagcagggtcatcagttcctgagggagcgggaggaacacctgctggaacagctgg

SEQ ID NO: 770074 - DNA, 120 bp, Artificial Sequence
  ENSG00000234127_7 (sequence is synthesized)
cgaagctggagcaggagctcacggagggcagggagaagttcaagagccggggcgtcggggagcttgcccggctggccctggtcatctccgaactggagggcaaggcgcagcagccagctg

SEQ ID NO: 770075 - DNA, 120 bp, Artificial Sequence
  ENSG00000234127_8 (sequence is synthesized)
cagagctcatgcaggacacgagagacttcctaaacaggtatccacggaagaagttctgggttgggaaacccattgctcgagtggttaaaaaaaagaccggagaattctcagataaactcc

SEQ ID NO: 770076 - DNA, 120 bp, Artificial Sequence
  ENSG00000234127_9 (sequence is synthesized)
tctctctgcaacgaggcctgagggaattccaggggaagctgctgagagacttggaatataagacagtgagcgtcaccctggacccacagtcggccagtgggtacctgcagctgtcagagg

SEQ ID NO: 770077 - DNA, 120 bp, Artificial Sequence
  ENSG00000234127_10 (sequence is synthesized)
actggaagtgcgtgacctacaccagcctgtacaagagtgcctacctgcacccccagcagtttgactgtgagcctggggtgctaggcagcaagggcttcacctggggcaaggtctactggg

SEQ ID NO: 770078 - DNA, 120 bp, Artificial Sequence
  ENSG00000234127_11 (sequence is synthesized)
aagtggaagtggagagggagggctggtctgaggatgaagaagagggggatgaggaggaagagggagaagaggaggaggaggaagaggaggccggctatggggatggatatgacgactggg

SEQ ID NO: 770079 - DNA, 120 bp, Artificial Sequence
  ENSG00000234127_12 (sequence is synthesized)
aaacggacgaagatgaggaatcgttgggcgatgaagaggaagaagaggaggaggaagaggaggaagttctggaaagctgcatggtgggggtggctagagactctgtgaagaggaagggag

SEQ ID NO: 770080 - DNA, 120 bp, Artificial Sequence
  ENSG00000234127_13 (sequence is synthesized)
gcggccagaggatggcgtgtgggcgctgcgcctctcctcctccggcatctgggccaacaccagccccgaggctgagcttttcccagcactgcggccccggagagtgggcatcgccctgga

SEQ ID NO: 770081 - DNA, 120 bp, Artificial Sequence
  ENSG00000234127_14 (sequence is synthesized)
ttatgaagggggcaccgtgactttcaccaacgcagagtcacaggaactcatctacaccttcactgccaccttcacccggcgcctggtccccttcctgtggctcaagtggccaggaacacg

SEQ ID NO: 770082 - DNA, 120 bp, Artificial Sequence
  ENSG00000234127_15 (sequence is synthesized)
cctcctgctaagaccctgagccctgacatctgcccccagccccaaccctcagatgcttcacttctttggaattccaggactctcaatggggggacgggatgcctggcctaagcacctgga

SEQ ID NO: 770083 - DNA, 120 bp, Artificial Sequence
  ENSG00000234127_16 (sequence is synthesized)
gcaggggaccccatatccactggtagccacctccccattgctgtggccccctgaaatctcactcagtgctgttgctccatctactgccctaatggggctcttttcccacctcctgctggt

SEQ ID NO: 770084 - DNA, 120 bp, Artificial Sequence
  ENSG00000234127_17 (sequence is synthesized)
ttcccgagggaacttctgaccctggagtccatgagggctcctttcctttttgaccacgaccttggccccagctctgcactctctggaataagggcccgatgcagcattttcttgcccagt

SEQ ID NO: 770085 - DNA, 120 bp, Artificial Sequence
  ENSG00000234127_18 (sequence is synthesized)
gtggcaagacctcagaaaaaccagtcaattacgcctaagatcattttgctgtccttaaaccccccaggttccttcttgcacaaatccactctgctgcccaccttccctggcattttaaac

SEQ ID NO: 770086 - DNA, 120 bp, Artificial Sequence
  ENSG00000234127_19 (sequence is synthesized)
agacctaccccaccccaactcagagttaagcatacatggcaatgctgaaaataaacaaaatccactgaggcttcccaggccatttaaagcctggagtaccagcgcatatcatctcatggg

SEQ ID NO: 770087 - DNA, 120 bp, Artificial Sequence
  ENSG00000234127_20 (sequence is synthesized)
gtccagagtggagtccaggcttctctgaaaccagggctgagcatatttccatagccaaggaggtgggactccctggagctatctgtggtcttagggaaggatccagacatacacggcttt

SEQ ID NO: 770088 - DNA, 120 bp, Artificial Sequence
  ENSG00000234127_21 (sequence is synthesized)
ggggtacaagctgtgatcactgatcaataaattatctctagattggtccttgtgaggggagttttaagaatccagaacatcttgctcttgatcagcacatccaaaaacaccaagacaaac

SEQ ID NO: 770089 - DNA, 120 bp, Artificial Sequence
  ENSG00000234127_22 (sequence is synthesized)
atccagtggagcagaacctctcctgcctcgggagttctgaccgggttccccagcagggtgttaagcctctgtctctggccctaccagcatccaggttccactttcctaggagagagtgga

SEQ ID NO: 770090 - DNA, 120 bp, Artificial Sequence
  ENSG00000234127_23 (sequence is synthesized)
gatgggaagacagggaaaggaaggcagcaggaggccacaagcccaccaggtcttcatgtcaagagagggagtaacatgtcttctcattgcccacggacccaacctctgtccaggtgcccc

SEQ ID NO: 770091 - DNA, 120 bp, Artificial Sequence
  ENSG00000234127_24 (sequence is synthesized)
tcatcatcacagtttaacacaagctcccctgctccagccaaattgatctcccagtcttgtccttacccattccaagtgctctgccagcccctgttcatccaagttttaagtcctccaccc

SEQ ID NO: 770092 - DNA, 120 bp, Artificial Sequence
  ENSG00000234127_25 (sequence is synthesized)
tgttctaagagactgttccaacggctctgggcctcagtggtcacttgaccaccattgtctcagagctgcccactttgtgtgtgtcacatgctgcctgagtcacatgtacatcttatttct

SEQ ID NO: 770093 - DNA, 120 bp, Artificial Sequence
  ENSG00000234127_26 (sequence is synthesized)
gcctctagttttgtaagctcctggagggcggataacatcttatactactcttgtattctcatggcacctagtgcagtgctgggcacagagtaggtgctcaataaagacttgttgaatgaa

SEQ ID NO: 770094 - DNA, 120 bp, Artificial Sequence
  ENSG00000234127_27 (sequence is synthesized)
gggagattacggggcggggacgagctgtcgcgctggttgctcgtgcaggagcgggacccggaacagaccgccgtgagagaggaggggtgccggccgggattcgcggcccggagctcggga

SEQ ID NO: 770095 - DNA, 120 bp, Artificial Sequence
  ENSG00000234127_28 (sequence is synthesized)
gagctgtcgcgctggttgctcgtgcaggagcgggacccggaacagaccgccgtgagagaggaggggtgccggccgggattcgcggcccggagctcgggaccggagtcaggaatggagaga

SEQ ID NO: 770096 - DNA, 120 bp, Artificial Sequence
  ENSG00000234127_29 (sequence is synthesized)
agggtaatggttttacctcttattgtggaaacctgttgagatcacagagaatatactgacggcataaaagggcagaaccatagcagggtgcggttgcttcattccagcctcgcagtcacc

SEQ ID NO: 770097 - DNA, 120 bp, Artificial Sequence
  ENSG00000234127_30 (sequence is synthesized)
catgcatatccagccctgcgcagtctggcctctgccgttctcaccaagccctttcctgttttaccttacctctcttcatccggccagtacttcttatccgtcaattctctgcgcaggtat

SEQ ID NO: 770098 - DNA, 120 bp, Artificial Sequence
  ENSG00000234127_31 (sequence is synthesized)
ctcccagagaggttgcccatgtcatctcccagccattgtggcttctgtcattgtgccgattttgtttgttttcttgttgttttatgcagtgaccccactggaatgtcagctccataaaaa

SEQ ID NO: 770099 - DNA, 120 bp, Artificial Sequence
  ENSG00000234127_32 (sequence is synthesized)
agggaccacatttgttttgttcactgatatgtcccatctctgctacagtgttgggtgcagatgcattgaagtcttatttgattcatattgatacttgtgcttttttctttcccttctagg

SEQ ID NO: 770100 - DNA, 120 bp, Artificial Sequence
  ENSG00000234127_33 (sequence is synthesized)
acacgagagacttcctaaacaggtaaaagagtctcctctccatggcgtacctcatcccccttgtttatgttcccccgcttctgaccaggtgcatttgaattcatggggagtggtatggtg

SEQ ID NO: 770101 - DNA, 120 bp, Artificial Sequence
  ENSG00000234127_34 (sequence is synthesized)
ccagaggtactcacatcccatggttcatcctgatgcccttctgaggagcaggacacatcattgagaactggagacttgctctcctccttatggttctctgtgtagccccagctccttggc

SEQ ID NO: 770102 - DNA, 120 bp, Artificial Sequence
  ENSG00000234127_35 (sequence is synthesized)
ccactggccttatttgaggtgggacagagcagagaggttagaaacatggcttagtagacagagcgccctggatgtggagtctactgatgttctgaagccctggttcagctggtgtctttg

SEQ ID NO: 770103 - DNA, 120 bp, Artificial Sequence
  ENSG00000234127_36 (sequence is synthesized)
ggccactgtttttctgtcacttgtttggggataatcatacctttcctctccccttcataattgccatgaggattgagagataagtatgaaggaaagtaagaagagctgagtaacagcttg

SEQ ID NO: 770104 - DNA, 80 bp, Artificial Sequence
  ENSG00000234224_0 (sequence is synthesized)
gcagctccgcgcacccggcagcggcggcggtgcagcctcgggcgttcggacagcctccgagcccatggcggggagcgacg

SEQ ID NO: 770105 - DNA, 120 bp, Artificial Sequence
  ENSG00000234224_1 (sequence is synthesized)
gcgtccgggggcccctggcgggccaggaagcgaggcggcagccggctgcccggagccgctgtccactgctgaagcgccggctgagagcgccacgctgcccgcctggatgcgcctctactt

SEQ ID NO: 770106 - DNA, 120 bp, Artificial Sequence
  ENSG00000234224_2 (sequence is synthesized)
ctacgggatgcacgggatcaccctggacgtgctggtgtcctcggcccggcgcttcgcccgcagcccggacctgcggatgctaggcttctcctcgccctaccgctgcctgctgcactcgct

SEQ ID NO: 770107 - DNA, 120 bp, Artificial Sequence
  ENSG00000234224_3 (sequence is synthesized)
cacccatttcgccctggagaaggtgtacctgcagcagcggcgctgtcccaacgccttcgtcttcaatttcctcctctacccctcggcccacgtggggctgcagaccctagcgggccaggc

SEQ ID NO: 770108 - DNA, 120 bp, Artificial Sequence
  ENSG00000234224_4 (sequence is synthesized)
gctactactcagcctgggcggcggggcgggggtcgcggtggcgccaggggcgctggacctggcgctgcagtacgtgctggcgctctaccactgccaagtgttcctgaagcgcttcctgcg

SEQ ID NO: 770109 - DNA, 88 bp, Artificial Sequence
  ENSG00000234224_5 (sequence is synthesized)
cgctctaccactgccaagtgttcctgaagcgcttcctgcgcttgcggtacgggcgacagaggcggcggcagcaggaggggcgcgctcc

SEQ ID NO: 770110 - DNA, 120 bp, Artificial Sequence
  ENSG00000234224_6 (sequence is synthesized)
ccggcggcgacgaccccgtggccccaggggcgccgggggagcccccagccaggggctgcccgacctaccccgctttcttttcttcggaatgcacggctttctggatgagatcttcttcac

SEQ ID NO: 770111 - DNA, 120 bp, Artificial Sequence
  ENSG00000234224_7 (sequence is synthesized)
cttcttcttcaacgtactggggcagggggacgggacaaccagcggccacacgtcgctctggtccttctttatgtacggcagctgcagtttcgtggtggaaaagctctacttccacctcca

SEQ ID NO: 770112 - DNA, 120 bp, Artificial Sequence
  ENSG00000234224_8 (sequence is synthesized)
cctgggactattctcactacccgctcaattttatgggcctcatcaccctgatgtatttacctggctggatattccttagtgtgtaccaggacctaatttccaacgtgttgtggagggtgc

SEQ ID NO: 770113 - DNA, 120 bp, Artificial Sequence
  ENSG00000234224_9 (sequence is synthesized)
agtacgtaccagctaactaaaaccaaaaaagaaagaaagaaaaggaaaaagtcactggattcccacgaatggatgcgatttatttttacacatttaaaatgaagtgggttttttagtcct

SEQ ID NO: 770114 - DNA, 120 bp, Artificial Sequence
  ENSG00000234224_10 (sequence is synthesized)
ttaatttttatacgctttactaaactcttccaaattgttttattccaccttttagtttttctatttgaaacccgtgtataatatactttgaaacactactcgaaacataattcaaagtac

SEQ ID NO: 770115 - DNA, 120 bp, Artificial Sequence
  ENSG00000234224_11 (sequence is synthesized)
tttatttgccaatgttttaaaacatttacaagcccaaacgtttacacgcccaaacagcaaaaccgttataccttaacatcagaatgatgtagtagtgtttacccatctggcaacagatga

SEQ ID NO: 770116 - DNA, 120 bp, Artificial Sequence
  ENSG00000234224_12 (sequence is synthesized)
gtgacagctactaatttttttttttttggcggggggggatctttaaatcagagaccagtgatttttacaagatttggctaaattttctgattcagtgatttgttttactttctttttaat

SEQ ID NO: 770117 - DNA, 120 bp, Artificial Sequence
  ENSG00000234224_13 (sequence is synthesized)
ctaatttcattttaattccttgccatatttaccaatgactgaagaaactcaatgtcttgtactcttgagactacagttaatagctcttaaagtgcctccgtctagcacacaagtgaaaag

SEQ ID NO: 770118 - DNA, 120 bp, Artificial Sequence
  ENSG00000234224_14 (sequence is synthesized)
aggctgaaaaatgtgaaagcacgttctatgaacagatttttaaatgagaggtcttttctagcaactcacacaggtgacactgtgttaagatatttgatctccatcctggaaatgattgct

SEQ ID NO: 770119 - DNA, 120 bp, Artificial Sequence
  ENSG00000234224_15 (sequence is synthesized)
ttccaatgtgggtaagccttaaacagcaggtgtgttaacgttgatcagatcctgtgttatctatggctgtaaatttttgttactgtgcaataatgtaaaatgtttaccttacatagccga

SEQ ID NO: 770120 - DNA, 120 bp, Artificial Sequence
  ENSG00000234224_16 (sequence is synthesized)
gggccaagtgaaattatatcaccttccacagtgttctaactccaaggacccttttctacatggaacttcaagggcagaaacattacctttgaataaaatgaacctgaatgttcactctaa

SEQ ID NO: 770121 - DNA, 120 bp, Artificial Sequence; identical to SEQ ID NO: 745358
  ENSG00000234278_0 (sequence is synthesized)

SEQ ID NO: 770122 - DNA, 120 bp, Artificial Sequence; identical to SEQ ID NO: 745359
  ENSG00000234278_1 (sequence is synthesized)

SEQ ID NO: 770123 - DNA, 120 bp, Artificial Sequence; identical to SEQ ID NO: 745360
  ENSG00000234278_2 (sequence is synthesized)

SEQ ID NO: 770124 - DNA, 120 bp, Artificial Sequence; identical to SEQ ID NO: 745361
  ENSG00000234278_3 (sequence is synthesized)

SEQ ID NO: 770125 - DNA, 120 bp, Artificial Sequence; identical to SEQ ID NO: 745362
  ENSG00000234278_4 (sequence is synthesized)

SEQ ID NO: 770126 - DNA, 120 bp, Artificial Sequence; identical to SEQ ID NO: 745363
  ENSG00000234278_5 (sequence is synthesized)

SEQ ID NO: 770127 - DNA, 120 bp, Artificial Sequence; identical to SEQ ID NO: 745364
  ENSG00000234278_6 (sequence is synthesized)

SEQ ID NO: 770128 - DNA, 120 bp, Artificial Sequence; identical to SEQ ID NO: 745365
  ENSG00000234278_7 (sequence is synthesized)

SEQ ID NO: 770129 - DNA, 120 bp, Artificial Sequence; identical to SEQ ID NO: 745366
  ENSG00000234278_8 (sequence is synthesized)

SEQ ID NO: 770130 - DNA, 120 bp, Artificial Sequence; identical to SEQ ID NO: 745367
  ENSG00000234278_9 (sequence is synthesized)

SEQ ID NO: 770131 - DNA, 120 bp, Artificial Sequence; identical to SEQ ID NO: 745368
  ENSG00000234278_10 (sequence is synthesized)

SEQ ID NO: 770132 - DNA, 120 bp, Artificial Sequence; identical to SEQ ID NO: 745369
  ENSG00000234278_11 (sequence is synthesized)

SEQ ID NO: 770133 - DNA, 120 bp, Artificial Sequence; identical to SEQ ID NO: 745370
  ENSG00000234278_12 (sequence is synthesized)

SEQ ID NO: 770134 - DNA, 120 bp, Artificial Sequence; identical to SEQ ID NO: 745371
  ENSG00000234278_13 (sequence is synthesized)

SEQ ID NO: 770135 - DNA, 120 bp, Artificial Sequence; identical to SEQ ID NO: 745372
  ENSG00000234278_14 (sequence is synthesized)

SEQ ID NO: 770136 - DNA, 120 bp, Artificial Sequence
  ENSG00000234284_0 (sequence is synthesized)
gcagttgcgcccggcagcgacgggaaacgtctctgaattaggtgttccgctcgcctcttgtgcggtgtggagctgcgcgccccccgccgaggcgggcccaggtgccttctccaagagagg

SEQ ID NO: 770137 - DNA, 120 bp, Artificial Sequence
  ENSG00000234284_1 (sequence is synthesized)
cagcagggagggagaaatggcaaggaggttgctgccagcccatgtacaggagtccgtgacgttcagggatgtggccgtgttcttcagccaggacgagtggttgcacctggactctgccca

SEQ ID NO: 770138 - DNA, 120 bp, Artificial Sequence
  ENSG00000234284_2 (sequence is synthesized)
gagagccttgtaccgggaggtgatgctggagaactacagcatcctggtctcactggggattctcttttccaagccaaaggtcatctcccagttagagcaaggagaagacccctggatggt

SEQ ID NO: 770139 - DNA, 120 bp, Artificial Sequence
  ENSG00000234284_3 (sequence is synthesized)
ggagagtggagttccccaaggcgcacatctcggatgggaaagcttgtttggaaccatagtttctaaagaagaaaatcaggaagtcatgaaaaaactcataattgatggcacatttgactt

SEQ ID NO: 770140 - DNA, 120 bp, Artificial Sequence
  ENSG00000234284_4 (sequence is synthesized)
caagttggagaagacctacataaatgaagataagttagagaagcaacaaggcaaaaagaacagacttttcagtaaagtgttagttaccatcaaaaaagtctacatgaaggagaggagctt

SEQ ID NO: 770141 - DNA, 120 bp, Artificial Sequence
  ENSG00000234284_5 (sequence is synthesized)
taaaggtgttgaatttgggaaaaatcttggtctaaaatcatcgcttattagaaaaccgagaatagtttccagaggaaggagaccccgttcacagcagtattcagttctctttaaacaact

SEQ ID NO: 770142 - DNA, 120 bp, Artificial Sequence
  ENSG00000234284_6 (sequence is synthesized)
gggggtcaacacagtgcgtaaatgttataaatgtaatatctgtgggaaaatcttcctccacagttcctccctgagtaaacaccagagaatccacactggagagaagctctataaatgtaa

SEQ ID NO: 770143 - DNA, 120 bp, Artificial Sequence
  ENSG00000234284_7 (sequence is synthesized)
ggaatgtaggaaagccttcagccaaagctcatccctaactcagcacttgagggttcatacaggagagaaaccttatatatgtagtgaatgtggaaaagccttcagtttcaccacatctct

SEQ ID NO: 770144 - DNA, 120 bp, Artificial Sequence
  ENSG00000234284_8 (sequence is synthesized)
tattggacaccagagaatgcatactggagagagaccttataaatgcaaggaatgtggaaaaacatttaaaggtagttcatctcttaataatcaccagcgaattcacacaggagagaagcc

SEQ ID NO: 770145 - DNA, 120 bp, Artificial Sequence
  ENSG00000234284_9 (sequence is synthesized)
ctataagtgtaatgaatgtgggagggccttcagtcagtgctcatctctcattcagcaccacagaattcatactggggagaaaccgtatgaatgtactcagtgtgggaaagccttcacttc

SEQ ID NO: 770146 - DNA, 120 bp, Artificial Sequence
  ENSG00000234284_10 (sequence is synthesized)
aatatcgcggctaagtaggcaccatcgaattcatactggagagaaaccctttcattgtaacgagtgtggaaaagtattcagctatcactcagcccttatcatacatcagagaattcacac

SEQ ID NO: 770147 - DNA, 120 bp, Artificial Sequence
  ENSG00000234284_11 (sequence is synthesized)
tggtgagaaaccatatgcatgcaaagaatgtgggaaagccttcagccaaagctcagctctcatacaacatcaaagaattcacactggagaaaaaccctacaaatgtaatgaatgtgggaa

SEQ ID NO: 770148 - DNA, 120 bp, Artificial Sequence
  ENSG00000234284_12 (sequence is synthesized)
agccttctcttggatttcacggcttaatatacatcacagaattcacactggagagaaaccatataattgtaaggaatgtggaaaagccttcagttcccactcaggcgttaatactcatcg

SEQ ID NO: 770149 - DNA, 120 bp, Artificial Sequence
  ENSG00000234284_13 (sequence is synthesized)
tggagaaaaaccttataaatgtaatgactgtgagaaagccttcaaccaaagctcagctctaattcagcaccagagaattcatactggagagaaaccatataattgtaaagtgtgtgggaa

SEQ ID NO: 770150 - DNA, 120 bp, Artificial Sequence
  ENSG00000234284_14 (sequence is synthesized)
agccttcagacagagttcatcccttatgacacacatgagaattcatacaggggaaaaaccttataaatgtaaagaatgtgggaaggcttttagtcagagctcatctcttactaatcatca

SEQ ID NO: 770151 - DNA, 120 bp, Artificial Sequence
  ENSG00000234284_15 (sequence is synthesized)
aaggactcataattgagaaaaactgtataaatgcatgtaggaactgaagttatattccatactgagtatcaaaaaattcattgtggggagaaagtgatgaagagtagttaatcataggta

SEQ ID NO: 770152 - DNA, 120 bp, Artificial Sequence
  ENSG00000234284_16 (sequence is synthesized)
aaacttcagcattagacctcatcacacatcagagacttcatgatgcagggtaaccttgggaatgctagaaaagcttctataaaatgtttattcatatgttcttaagttattaccatgaaa

SEQ ID NO: 770153 - DNA, 120 bp, Artificial Sequence
  ENSG00000234284_17 (sequence is synthesized)
tggagaatttttaagattgcagggttagtatttgattgtctagtgatgtacgataacagccaccagctttcctgagcatcactgggaagcctgctgtttatgtacaagtacagccataaa

SEQ ID NO: 770154 - DNA, 120 bp, Artificial Sequence
  ENSG00000234284_18 (sequence is synthesized)
atccagacacagataaatctaggaatctattttttgaaactattatgcaagccagtggtactagaaagaatgttttagaaaagaaatatgtacaggtgacccatagctacctcactgtca

SEQ ID NO: 770155 - DNA, 120 bp, Artificial Sequence
  ENSG00000234284_19 (sequence is synthesized)
ctaaaatgttttttaataatcttaaagcagattctgcacttcatggtaaagactttgaattgtttctctgctttctaagccattcacctgagaagaaaatcactccataaactatgcaga

SEQ ID NO: 770156 - DNA, 120 bp, Artificial Sequence
  ENSG00000234284_20 (sequence is synthesized)
cgtactgtctttgcgttttcttcctgactacttgttccaaactctgagtcagatctaaagtcactttaagtcacagaacgcatggtatttcacttgtttttctcattaaaagtgattacc

SEQ ID NO: 770157 - DNA, 120 bp, Artificial Sequence
  ENSG00000234284_21 (sequence is synthesized)
tttgctgtattaaattgataagtaaaggtcattcagacaaccactgcttttgcaatttactgaaaaatgttataaattatctcagaatgtagccaatagcaagcacagctcagctcccag

SEQ ID NO: 770158 - DNA, 120 bp, Artificial Sequence
  ENSG00000234284_22 (sequence is synthesized)
ggtctgcctgcttctgtgagctttctggttaccagccaccagaaggcccaggaacaatgtagaactcaggtcatcatccttggaggtaaaatgaaccagatgattttcacccttacttcc

SEQ ID NO: 770159 - DNA, 120 bp, Artificial Sequence
  ENSG00000234284_23 (sequence is synthesized)
actttttcgccttcatcagacaaggttcactttctccccacactctaaaggtcactgggcaaatatttaggctctgagttcagatactctttcttccagcaaatggacttacactcttca

SEQ ID NO: 770160 - DNA, 120 bp, Artificial Sequence
  ENSG00000234284_24 (sequence is synthesized)
acaagtgatttagctcatttcagcatttctaaaatgtgaatcataagattagcaagctaaaaacagttatctcacaagtcaaaattgttgggctttacagaggctaacatctagtttagc

SEQ ID NO: 770161 - DNA, 120 bp, Artificial Sequence
  ENSG00000234284_25 (sequence is synthesized)
caagtttatcaggagggggcaagcacttaagggctgaaacgacccatttcataaagtgctaagtttttctgccaaggaactttaaaaaatagaaaactggctgggtgcagtggctcacgc

SEQ ID NO: 770162 - DNA, 120 bp, Artificial Sequence
  ENSG00000234284_26 (sequence is synthesized)
cagcagggagggagaaatggcaaggaggttgctgccagcccatgtacagtcctggatgaacaggagtgggtttgccattccaggagtccgtgacgttcagggatgtggccgtgttcttca

SEQ ID NO: 770163 - DNA, 120 bp, Artificial Sequence
  ENSG00000234284_27 (sequence is synthesized)
ttttcttgcgcccttgtttttttggggccagggagaatgggtaacgctacctttaagcagctttgataactgtttttgataaaggaagtaaatcttacaagaggaagaaaagaggactaa

SEQ ID NO: 770164 - DNA, 120 bp, Artificial Sequence
  ENSG00000234284_28 (sequence is synthesized)
tttttggttggctgttcctaaaaaagagcatcagttcttcaactgctgtttttcgtattgaacaacatccaagtgcagatgtgtggaatattgtgtcatttcctattactttatctgaat

SEQ ID NO: 770165 - DNA, 120 bp, Artificial Sequence
  ENSG00000234284_29 (sequence is synthesized)
gcagaaaggtagcaggcccggtgactctgaacctgcttcccacactggtttaagtggccggacttagggcccctctggcctgggcagttccaggctccttctctgcaggtgctcagctta

SEQ ID NO: 770166 - DNA, 120 bp, Artificial Sequence
  ENSG00000234284_30 (sequence is synthesized)
gcagttgcgcccggcagcgacgggaaacgtctctgaattaggtgttccgctcgcctcttgtgcggtgtggagctgcgcgccccccgccgaggcgggcccaggtacaggctgccggtgcct

SEQ ID NO: 770167 - DNA, 120 bp, Artificial Sequence
  ENSG00000234289_0 (sequence is synthesized)
attacttcccgttttcacgatctgctgctcgtctcaggctcgtagttcgccttcaacatgccggagccagcgaagtccgctcccgcgcccaagaagggctcgaagaaagccgtgactaag

SEQ ID NO: 770168 - DNA, 120 bp, Artificial Sequence
  ENSG00000234289_1 (sequence is synthesized)
acaccggcatctcctctaaggccatgggaatcatgaactccttcgtcaacgacatcttcgaacgcatcgcaggtgaggcttcccgcctgccgcattacaacaagcgctcgaccatcacct

SEQ ID NO: 770169 - DNA, 120 bp, Artificial Sequence
  ENSG00000234289_2 (sequence is synthesized)
ggccgtgcgcctgctgctgcccggggagttggccaagcacgccgtgtccgagggcaccaaggccgtcaccaagtacaccagcgctaagtaaacttgccaaattgatgcctgcagctcctg

SEQ ID NO: 770170 - DNA, 120 bp, Artificial Sequence
  ENSG00000234409_0 (sequence is synthesized)
agtaagagggtggcaggttgggccaggccagagcctggacctgggatcaggaaggggttgcagggagggatggaggggctgaaaaccctgggcccctgcggccacccccacccccagtgt

SEQ ID NO: 770171 - DNA, 120 bp, Artificial Sequence
  ENSG00000234409_1 (sequence is synthesized)
cccccaaccccagcctccagcagccatggaggaggcctggaccagccctgccagggatttgtagggtggccctgcctgggccccatctcctctgctcactcagtgcagtcccagagacct

SEQ ID NO: 770172 - DNA, 120 bp, Artificial Sequence
  ENSG00000234409_2 (sequence is synthesized)
ttcccagtcccaggggcagggggcagtgggcccacagtggagggcgaggctcccgggctctttctgtccagccaggagcagagagcgagagacactgaggggccgagacaaggagacctg

SEQ ID NO: 770173 - DNA, 120 bp, Artificial Sequence
  ENSG00000234409_3 (sequence is synthesized)
gaggcagggcttgggtggggctggcccctgcacccagggtcgaaccagggggctcccaggcaggggggatccattggctcagggaccagaccctgcccatgcccacccctgtcacgggag

SEQ ID NO: 770174 - DNA, 120 bp, Artificial Sequence
  ENSG00000234409_4 (sequence is synthesized)
ggaggggccctggcctcgcccagggtagccctgtcccagcttcagtgcgggctgctgggctctgcagaacagtccttcctgcagctggagcaggagaaccacagcctgaaaaggcagaat

SEQ ID NO: 770175 - DNA, 120 bp, Artificial Sequence
  ENSG00000234409_5 (sequence is synthesized)
caggaacttcgggagcagctgggggccctcctggggccggggcagcagttcctgcccctgtgtcccgaacactcaagctgcactgctctggcctggccccccgacccggctggcacgcag

SEQ ID NO: 770176 - DNA, 120 bp, Artificial Sequence
  ENSG00000234409_6 (sequence is synthesized)
cgggagctgtgccaggggcaagaggctttcgtgcaacagtcccagaacgagctgcagcagatccgcctgtgctttgagaggaagaagatggtcatcacagaggtgtgggacaacgtggct

SEQ ID NO: 770177 - DNA, 120 bp, Artificial Sequence
  ENSG00000234409_7 (sequence is synthesized)
gagatgcacatggccctgaacaaccaggccaccgggctcctgaacctcaagaaggacatccggggcgtgctggaccagatggaggacatccagctggagattctcagggagcgggcccag

SEQ ID NO: 770178 - DNA, 120 bp, Artificial Sequence
  ENSG00000234409_8 (sequence is synthesized)
tgccgcactcgagccaggaaggagaagcagatggcaagcatgtcgaaagggaggccaaagctgggaagctccaagggcctggcaggccagctctggctgctgaccctgaggctgctgctg

SEQ ID NO: 770179 - DNA, 120 bp, Artificial Sequence
  ENSG00000234409_9 (sequence is synthesized)
ggcgccctgctggtctggaccgctgcctacgtgtacgtggtgaaccccacacctttcgaggggctggtgccacccctgctgagccgtgccaccgtctggaagctccgggccctgctggac

SEQ ID NO: 770180 - DNA, 120 bp, Artificial Sequence
  ENSG00000234409_10 (sequence is synthesized)
cccttcctgcgcctcaaagtggacggcttcctgcccttctaggccagaggcccagcggccccagcaaggaggccaggcgaccagcactgccccggatgcccagtggccgtgccagccccc

SEQ ID NO: 770181 - DNA, 120 bp, Artificial Sequence
  ENSG00000234409_11 (sequence is synthesized)
tgcacatggcaccactgtgcaccatccttgccagaagctgcagagaagggtggaggtggggtctgtcctgagggctgggcctgtggctggacatagaatcatgacataagtggccggtga

SEQ ID NO: 770182 - DNA, 120 bp, Artificial Sequence
  ENSG00000234409_12 (sequence is synthesized)
ccaggtgggcctgagggattcattagggagggaggtcttcgtgcagtaggccagtgggcccagcggggaggtactggccaccctgctgatgctgcccaagcccatcctgggccccaccct

SEQ ID NO: 770183 - DNA, 120 bp, Artificial Sequence
  ENSG00000234414_0 (sequence is synthesized)
atttccgggcacggcttccggcgtccttccctctcagggaagctccagctgtccctcccgcagttggccctgtggtgttccgaagccggttacgtacggcctgagggccaggcgaacctc

SEQ ID NO: 770184 - DNA, 120 bp, Artificial Sequence
  ENSG00000234414_1 (sequence is synthesized)
tagaagcagatcatcctggcaagcttttcattggtggcctcaatagagaaaccaatgagaagatgcttaaagcagtatttgggaaacatggtcccatatcagaagttcttttgataaagg

SEQ ID NO: 770185 - DNA, 120 bp, Artificial Sequence
  ENSG00000234414_2 (sequence is synthesized)
aacatggtcccatatcagaagttcttttgataaaggatcgaaccagcaaatccagaggctttgcatttattacttttgagaaccctgcagatgctaagaatgctgccaaagatatgaatg

SEQ ID NO: 770186 - DNA, 82 bp, Artificial Sequence
  ENSG00000234414_3 (sequence is synthesized)
caggaagtctgagatctgcaagaggaagccgtggaggaacaagagggtggcttccctcacatgaagggcacctgttctaggg

SEQ ID NO: 770187 - DNA, 120 bp, Artificial Sequence
  ENSG00000234414_4 (sequence is synthesized)
caagatgagttattctaggggactcattccagttaaaagaggtccatcttcaagaagtggaggtcctcctccgaaaaaatctgctccttctgctgtggcaagaagcaatagttggatggg

SEQ ID NO: 770188 - DNA, 120 bp, Artificial Sequence
  ENSG00000234414_5 (sequence is synthesized)
attatggagttcctccacgcagagcgacaatatcttcctggagaaatgatcgcatgtcaacaagacatgatggttatgcaactaacgatggaaatcatccaagttgccaagaaacgaggg

SEQ ID NO: 770189 - DNA, 120 bp, Artificial Sequence
  ENSG00000234414_6 (sequence is synthesized)
agggattatgctccaccatctagaggctatgcataccgtgataatggtcattctaatcgggatgaacattcctctagaggatatagaaatcatcgaagttcccgagaaactagggattat

SEQ ID NO: 770190 - DNA, 120 bp, Artificial Sequence
  ENSG00000234414_7 (sequence is synthesized)
accatctagaggccatgcataccgtgattatggtcattctcgtcgggatgaaagttattctagaggatacagaaatcgtcgaagttcccgagaaactagggagtatgctccaccatctag

SEQ ID NO: 770191 - DNA, 120 bp, Artificial Sequence; identical to SEQ ID NO: 562624
  ENSG00000234414_8 (sequence is synthesized)

SEQ ID NO: 770192 - DNA, 80 bp, Artificial Sequence; identical to SEQ ID NO: 562625
  ENSG00000234414_9 (sequence is synthesized)

SEQ ID NO: 770193 - DNA, 120 bp, Artificial Sequence; identical to SEQ ID NO: 767121
  ENSG00000234414_10 (sequence is synthesized)

SEQ ID NO: 770194 - DNA, 120 bp, Artificial Sequence; identical to SEQ ID NO: 562627
  ENSG00000234414_11 (sequence is synthesized)

SEQ ID NO: 770195 - DNA, 120 bp, Artificial Sequence
  ENSG00000234414_12 (sequence is synthesized)
atgtggtagctcaagttatgtggcatctatagtagatggtggggagagtcgatctgaaaaaggagactcgagcagatattaaagcaagcattgaaaataatagttattgcataccaatcc

SEQ ID NO: 770196 - DNA, 120 bp, Artificial Sequence; identical to SEQ ID NO: 562629
  ENSG00000234414_13 (sequence is synthesized)

SEQ ID NO: 770197 - DNA, 120 bp, Artificial Sequence
  ENSG00000234414_14 (sequence is synthesized)
tattcaaaggaaaaggaattgttttcaaagtaatttcatacttgttgatgctatttgaaaagtgtttagatgtaatatctaccttaaaattttcacaataaaatttgacatgtactgcaa

SEQ ID NO: 770198 - DNA, 120 bp, Artificial Sequence
  ENSG00000234438_0 (sequence is synthesized)
atggcacggggtccacagaccctggtgcaggtgtgggtgggcggccagctcttccaagccgaccgcgccctgctggtggagcactgtggcttcttccgaggcctcttccgctccggcatg

SEQ ID NO: 770199 - DNA, 120 bp, Artificial Sequence
  ENSG00000234438_1 (sequence is synthesized)
cgggagacccgcgcagcagaggtgcgcctgggcgttctgagcgcgggaggtttccgcgccacgctgcaggtgctgcgcggcgaccggccggcgctggcggcggaggacgagctgctgcag

SEQ ID NO: 770200 - DNA, 120 bp, Artificial Sequence
  ENSG00000234438_2 (sequence is synthesized)
gccgtggagtgcgccgccttcctccaggcgccggcgctggctcgctttctggagcacaacctcacgtcggacaactgcgcattgctgtgcgacgcggccgccgccttcggcctgcgcgac

SEQ ID NO: 770201 - DNA, 120 bp, Artificial Sequence
  ENSG00000234438_3 (sequence is synthesized)
gtgttccacagtgccgcgctcttcatctgcgacggcgagcgcgagctggcggccgaactggcgctgcctgaggcccgcgcctacgtggcggccctgcggcccagcagctacgcggccgtg

SEQ ID NO: 770202 - DNA, 120 bp, Artificial Sequence
  ENSG00000234438_4 (sequence is synthesized)
agcacgcacacgcccgcgcccggcttcctggaggacgcctcgcgcacgctgtgttacctggacgaggaagaggacgcgtggcgcacgctggctgcgctgcccctggaggccagcacgttg

SEQ ID NO: 770203 - DNA, 120 bp, Artificial Sequence
  ENSG00000234438_5 (sequence is synthesized)
ctggccggggtggccacgctgggcaacaagctttacatcgtggggggcgtgcgcggcgccagcaaggaggtggtagagctgggcttctgctacgaccccgacggcggcacgtggcacgag

SEQ ID NO: 770204 - DNA, 120 bp, Artificial Sequence
  ENSG00000234438_6 (sequence is synthesized)
ttccccagcccgcaccagccgcgctatgacacagcgctggccggcttcgacggccgcctctacgccatcggcggcgaattccagaggacgcccatcagctccgtggagcgctacgaccca

SEQ ID NO: 770205 - DNA, 120 bp, Artificial Sequence
  ENSG00000234438_7 (sequence is synthesized)
gccgcgggctgctggagtttcgtggccgacctgccgcagccggccgccggcgtgccctgcgcccaggcttgtggccgtctcttcgtgtgcctgtggcggccggccgacaccaccgccgtg

SEQ ID NO: 770206 - DNA, 120 bp, Artificial Sequence
  ENSG00000234438_8 (sequence is synthesized)
gtggagtacgcagtgcggaccgacgcgtggctgccagtggccgagctgcggcgtccgcagagctatggccactgcatggtggcccaccgcgacagcctctatgtggtgcgcaacggacct

SEQ ID NO: 770207 - DNA, 120 bp, Artificial Sequence
  ENSG00000234438_9 (sequence is synthesized)
tccgacgacttcctgcactgcgccatcgactgtctcaacctggccacgggccagtggacggcgctgcccggccagttcgtcaacagcaagggagcgctcttcacggccgtggtgcgcggt

SEQ ID NO: 770208 - DNA, 120 bp, Artificial Sequence
  ENSG00000234438_10 (sequence is synthesized)
gacaccgtctatacggtcaaccgcatgttcacgctgctctacgccatcgagggcggcacctggcggctgctcagggagaaagccggcttcccgcggcccggctccttgcagacctttctc

SEQ ID NO: 770209 - DNA, 120 bp, Artificial Sequence
  ENSG00000234438_11 (sequence is synthesized)
ctaaggctgcctcctggcgctcctgggcctgtgacttcgacaacggcagaactgtgacctctgggctggctttaggagggaggagacgccgcgactcctccctgagctatggctgagtgt

SEQ ID NO: 770210 - DNA, 120 bp, Artificial Sequence
  ENSG00000234438_12 (sequence is synthesized)
gtgaggccggccttagaagtagctggcaacttccctctttctactgagacacccaggtttggtgccttctggtggtgtggacatgttcaagaagctcagggagcagtgatgatgccctca

SEQ ID NO: 770211 - DNA, 120 bp, Artificial Sequence
  ENSG00000234438_13 (sequence is synthesized)
acttgggctctgctgagagctggtgggtcacaatgtcagtgaacagggtagggggagttgggatttgaataatccgggcttatatgtaatgggctagtgattgagcatcgctgggagcga

SEQ ID NO: 770212 - DNA, 120 bp, Artificial Sequence
  ENSG00000234438_14 (sequence is synthesized)
cttaaatgatgttaatcaaactgcaagtagtaggcaagaattaggcacctactgtatgcccaatacagtgttatgcgtaatgagagccgtagttgccacacagggatccaggaagcttaa

SEQ ID NO: 770213 - DNA, 120 bp, Artificial Sequence
  ENSG00000234438_15 (sequence is synthesized)
aggataacccagaaaacaatcttaacagttacaggacaacaaaaaggtttacacacaacttgatccacagagttgaaggcaacatgcaaaaaaatttaaaaccgcatacaatataataaa

SEQ ID NO: 770214 - DNA, 120 bp, Artificial Sequence
  ENSG00000234438_16 (sequence is synthesized)
ataaagtgctgaagaaatcagggcaaagggaaaataggaagagaaaaaatatataactccagaaaagaagagagtgtgcaaactctatggaggagatgagcaggataccattagctgctg

SEQ ID NO: 770215 - DNA, 120 bp, Artificial Sequence
  ENSG00000234438_17 (sequence is synthesized)
aaaggggaggcttagaccatggaggctgagagctcagaagagaagcagggttggggaaggctggagcagatggggagggtctctgcaagtccagccataccagcagagcagcagtagttg

SEQ ID NO: 770216 - DNA, 120 bp, Artificial Sequence
  ENSG00000234438_18 (sequence is synthesized)
gggcatctagagaggggatgagactgggccagcttgcagcagataatgactgagctgagcctggagtgagacctgtgggggcgagaggattcttcacgttcctttttggaacccttaggg

SEQ ID NO: 770217 - DNA, 120 bp, Artificial Sequence
  ENSG00000234438_19 (sequence is synthesized)
gagcacccaggtgtaagcccttgcccaccctgtttttgccatcaccacggggcagtggactgttaacccacatgacttcaggtcagttgaggtatgagccaaatcctgcctcatcttcct

SEQ ID NO: 770218 - DNA, 120 bp, Artificial Sequence
  ENSG00000234438_20 (sequence is synthesized)
cagttgtagcccctcctccacattctacaggtttgttctcttcctgtcctattctgccctttgcaattccctgggctggaatgcctagtctcctcctctctccctgtcagtgctctacca

SEQ ID NO: 770219 - DNA, 120 bp, Artificial Sequence
  ENSG00000234438_21 (sequence is synthesized)
tcctctgtgcagcattggctcacccagctcttcgttttcctgacctgggctgcctgcattgctcattggacccctggctgtaacatcattgtgtgtgcacaaccacgtgtgtggattgta

SEQ ID NO: 770220 - DNA, 120 bp, Artificial Sequence
  ENSG00000234438_22 (sequence is synthesized)
agggcagagatcctgttaagtgagctgggggacttccctgtcccagattaaaatgatgatgccttgaaagaacccaggctacagaggccactagttaggaacctagtgctgacctctgtt

SEQ ID NO: 770221 - DNA, 120 bp, Artificial Sequence
  ENSG00000234438_23 (sequence is synthesized)
gttggatgaggactctcgttccttcatcaaaatccccagctctggcttctgggcagatgcctgtcccagccctttccagcctctccatggccttgggaagacttctctgggtggttctca

SEQ ID NO: 770222 - DNA, 120 bp, Artificial Sequence
  ENSG00000234438_24 (sequence is synthesized)
ttggtctccatcccccaggacctgaggcccatggggaatcttggcctcgtcagaagtggagaatgcagtgtcagcatgacacctccggggcatggaggctcgcgccagggctgcacctag

SEQ ID NO: 770223 - DNA, 120 bp, Artificial Sequence
  ENSG00000234438_25 (sequence is synthesized)
ctgcctcttctcctggcctatgtcccaaccctggagaatgctgccctcagaagcctgggaccttccagccctggagtagcctagtctgataagtctcaacaataaaccctgacttttgca

SEQ ID NO: 770224 - DNA, 120 bp, Artificial Sequence
  ENSG00000234444_0 (sequence is synthesized)
ggtggccaacttgggtgtcttcctctgccagggtcaaggacaaggattgaaacgggtggggcctggagccctagccaatcagtggcgccagcgtgaaactgtccaatcaagtgcgcagct

SEQ ID NO: 770225 - DNA, 120 bp, Artificial Sequence
  ENSG00000234444_1 (sequence is synthesized)
acagaggaagaggcggcctcttcaatatggcggggcctttgtctcctagcttccgggctctgatcctagttcgcgtctccactgttccatctcctccgttcctggagttcctcggtgact

SEQ ID NO: 770226 - DNA, 120 bp, Artificial Sequence
  ENSG00000234444_2 (sequence is synthesized)
ctactatagcttctgttatcctgtgacctgcaggtactgggagatccatagggaggacggcggaacatctggaggctgggaaatgggagtgttgacattcagggatgtggctgtagaatt

SEQ ID NO: 770227 - DNA, 120 bp, Artificial Sequence
  ENSG00000234444_3 (sequence is synthesized)
ctccccagaagagtgggaatgcctggactctgctcagcagcgtttgtatagggatgtgatgttagagaactatggaaacctggtctccttgggtcttgctatctttaagccagacttgat

SEQ ID NO: 770228 - DNA, 120 bp, Artificial Sequence
  ENSG00000234444_4 (sequence is synthesized)
gacctgtctggagcaaagaaaagagccttggaaagtgaagagacaggaggcagtagccaaacacccagctggttcttttcattttactgcagagatattgccggatcatgacataaaaga

SEQ ID NO: 770229 - DNA, 120 bp, Artificial Sequence
  ENSG00000234444_5 (sequence is synthesized)
ttcatttcaaaaagtgattctgagaaaatatggaagctgtgaccttaataatttacatttaaagaaagactaccaaagtgtgggtaattgcaaggggcagaaaagcagttataatggcct

SEQ ID NO: 770230 - DNA, 120 bp, Artificial Sequence
  ENSG00000234444_6 (sequence is synthesized)
tcatcaatgtttgtcagctacccatagcaaaacctgtcaatgtaataaatgtggcagaggttttcagttgtgctcaatcttcactgaacataaagacatttttagcagagagaaatgcca

SEQ ID NO: 770231 - DNA, 120 bp, Artificial Sequence
  ENSG00000234444_7 (sequence is synthesized)
caaatgtgaagaatgtggcaaagactgtaggttgttctcagattttactagacataagaaaattcatactgtagagagatgctacaaatgtgaagaatgtggcaaagcgtttaaaaagtt

SEQ ID NO: 770232 - DNA, 120 bp, Artificial Sequence
  ENSG00000234444_8 (sequence is synthesized)
tactggagagaaaccttacaaatgtgaaggatgtggcaaaacttttacctgctcctcaacccttgttaaacacaagagaaatcatactggagacagaccctacaaatgtgaagaatgtgg

SEQ ID NO: 770233 - DNA, 120 bp, Artificial Sequence
  ENSG00000234444_9 (sequence is synthesized)
agaaaccctacaaatgtgaagaatgtaacaaagcctataggtggttctcagaccttgctaaacataagataattcatactggagacaaaccctacacatgtaatgaatgtggaaaagctt

SEQ ID NO: 770234 - DNA, 90 bp, Artificial Sequence
  ENSG00000234444_10 (sequence is synthesized)
ccttgctaaacataagataattcatactggagacaaaccctacacatgtaatgaatgtggaaaagcttttaagtggttctcggcccttag

SEQ ID NO: 770235 - DNA, 120 bp, Artificial Sequence
  ENSG00000234444_11 (sequence is synthesized)
tcctcaaccctttttaaccacaagagaattcatatggaagagagaccttacaaatgtgaagaatgcagcaaaacctttaagtgcttctcagacctgactaatcataagagaattcacact

SEQ ID NO: 770236 - DNA, 120 bp, Artificial Sequence
  ENSG00000234444_12 (sequence is synthesized)
tacaaatgtgaagaatgtggcaaagcatcgagctggttctcacacctcatcagacataagagaattcatactagagagaagctccacaagtgttaaaaatgtggaaaagcctttaccaag

SEQ ID NO: 770237 - DNA, 120 bp, Artificial Sequence
  ENSG00000234444_13 (sequence is synthesized)
gcctttaccaagtcctcatactgtgttcaacatctgaaatttaatactgaacaaatgcagtataaatgtaatgacagtggaagaacatttatcatcttagagggtctctaagaacttact

SEQ ID NO: 770238 - DNA, 120 bp, Artificial Sequence
  ENSG00000234444_14 (sequence is synthesized)
aacttactttataatctggttgcttatatgttgggtacatatatagccctttgctattatgtaatgccctttttttttaaatctatgttaatttcaagtctgttttgtcagaaactagga

SEQ ID NO: 770239 - DNA, 120 bp, Artificial Sequence
  ENSG00000234444_15 (sequence is synthesized)
cctgcttcttttcctgttttctatttgcttggtaggcttttctttttccctttattttgagcttatttgagatgggtgtcttgattaaagcataccattagatcttgattcttttttcag

SEQ ID NO: 770240 - DNA, 90 bp, Artificial Sequence
  ENSG00000234444_16 (sequence is synthesized)
cttgccatctgtgctttaatttgtattcatatgtgtggattggattctgttattaggatcttagctggctattttgcacatttgtttctg

SEQ ID NO: 770241 - DNA, 120 bp, Artificial Sequence
  ENSG00000234444_17 (sequence is synthesized)
tttaatgctttcttcagaagctcttttaagacagatcctgtggtaacattttctcagcatttgcttgtctgaataggatcatatatattttttacttctgaagcttaccttggtcagata

SEQ ID NO: 770242 - DNA, 120 bp, Artificial Sequence
  ENSG00000234444_18 (sequence is synthesized)
tgaaattctgtgttggaattctttttttaagaatgttgaatattggcccctataatctcttttgacttgtaggatttcagctgaaagatttgttgttttcctgatgagcttctttttaga

SEQ ID NO: 770243 - DNA, 120 bp, Artificial Sequence
  ENSG00000234444_19 (sequence is synthesized)
ggtgacctggcctttctctctagctgcctttaacatattttttctttcattttgaccctggagaatctcatgattatgtgtcttgaggatgaccttctcctggggtatcttactggggtt

SEQ ID NO: 770244 - DNA, 120 bp, Artificial Sequence
  ENSG00000234444_20 (sequence is synthesized)
ctccacatttcctgcatttgaatgttggcctctctaggttggggaagttctcatggatgttatcctgaaatacgtatttcaagttgttttcattctccccatcactttcaggcaatctct

SEQ ID NO: 770245 - DNA, 120 bp, Artificial Sequence
  ENSG00000234444_21 (sequence is synthesized)
tgcatcatagatttggtttctttacataatcccatatttcttagaggttttgttcattcctctttattcttttttcactgttcttgtctgtctgatttcagaaagccagtcttgaggccc

SEQ ID NO: 770246 - DNA, 120 bp, Artificial Sequence
  ENSG00000234444_22 (sequence is synthesized)
tgagattctttcctctgcttggcctattctgctgttaatatatgtgattacattataaaggttttgtattgtgtttttcagttctatcaggttggccacattttttctccagactggctg

SEQ ID NO: 770247 - DNA, 120 bp, Artificial Sequence
  ENSG00000234444_23 (sequence is synthesized)
ttttttccgtcagttcctgcaattttttttcctcccttgcattgggttgcaaattacttttgtaactcagtgaagtttgtttctacccatattctgaattctacttctgtcatcttaggc

SEQ ID NO: 770248 - DNA, 120 bp, Artificial Sequence
  ENSG00000234444_24 (sequence is synthesized)
cttgctggaaatgtaatttggtcatttggatgaaagaagtcactctggctttttgtgtttttatctttgcactgattgtgtcttatctttgtgggcatatctttgaggttgctgaccttt

SEQ ID NO: 770249 - DNA, 120 bp, Artificial Sequence
  ENSG00000234444_25 (sequence is synthesized)
ctttgggcttttttttttttaatcctatttgatggtcttgagtatttgattgtggtataagatggatgcagccaacaggctttgttcctgggaggttttttttgttttgttttgttttgt

SEQ ID NO: 770250 - DNA, 120 bp, Artificial Sequence
  ENSG00000234444_26 (sequence is synthesized)
ttttgtttggtggtggtggtgggtgggcaatgctcagctcacaactcagaggctgcatactctaactccgggggacttgttttgagccccaactgtgttctctggctccttgagatttgg

SEQ ID NO: 770251 - DNA, 120 bp, Artificial Sequence
  ENSG00000234444_27 (sequence is synthesized)
agtttgcgagtttgtgggatgaaggtgccatagctggagcagagtgctagtggatatgggatttctgcctgtctttgggtactcacctcagtggcaggagcaaagcagctgggaagggag

SEQ ID NO: 770252 - DNA, 120 bp, Artificial Sequence
  ENSG00000234444_28 (sequence is synthesized)
tgggggatacctgctggaggctgtgtgctgttgcactaaaggtggtgttggcttggggcaggatactggccagtaaaggttttgatgccttctctgtgccccccaagaaagagtgattgt

SEQ ID NO: 770253 - DNA, 120 bp, Artificial Sequence
  ENSG00000234444_29 (sequence is synthesized)
tcagagtgtgggaggttaccctgttctctgcacagtgttagcacaaaggcaggggtggagttttctggctctctgcccaccaaagtttcatctacaatggcagttgctgggggtggcggg

SEQ ID NO: 770254 - DNA, 120 bp, Artificial Sequence
  ENSG00000234444_30 (sequence is synthesized)
gcatattgcattcccatttgctggtggggcaagcaaagccaaacctgcctttgcagacatgtgccagcaaagaaatatcaggagttgccatggtgtcacgggaagctgcagtatggggaa

SEQ ID NO: 770255 - DNA, 120 bp, Artificial Sequence
  ENSG00000234444_31 (sequence is synthesized)
gaaatgtgggctggtgcagtcataggggctgctttgctggagctcttcatgagtcaggcatgtccctccagtgcagatgctctggtatgagcttccagggtacctgagactgccctgtaa

SEQ ID NO: 770256 - DNA, 120 bp, Artificial Sequence
  ENSG00000234444_32 (sequence is synthesized)
gcagctgtggccagactgggtccctgggagaggccagcagaccaaggagtgctcagttggaccagcttcttctgatttgcaagaccatcctgcagaaattaggcccaacagttcccgtag

SEQ ID NO: 770257 - DNA, 120 bp, Artificial Sequence
  ENSG00000234444_33 (sequence is synthesized)
ggctaaagtctcttatgggagacagttgagcctagagaaatggccatcactggccacactttactacagatgctcttgcaccaaaccctctggccaccacatgagctggcttgctgcatt

SEQ ID NO: 770258 - DNA, 120 bp, Artificial Sequence
  ENSG00000234444_34 (sequence is synthesized)
atctctttgcttgtcttctgggggctgcatctcagagagatgtaggtcagcaattactcagtgcagccagcccaggatggaagatctttacttttggccaagttaggggtttactgtctg

SEQ ID NO: 770259 - DNA, 120 bp, Artificial Sequence
  ENSG00000234444_35 (sequence is synthesized)
ctgaggagcagtgggtagtttgtgggacccatggaggatgggctggcttcctctccttgggtaaactgcagtttgaggtgtgaataaggcacttagggtttgggattttttattagtctg

SEQ ID NO: 770260 - DNA, 120 bp, Artificial Sequence
  ENSG00000234444_36 (sequence is synthesized)
agggtagcaaggacagttgtactgcagaggcccctggaggctctgtccagggagttgctaagctgctactggctcaatagctctggcaatgattggctagtggcccgggcctggagaacc

SEQ ID NO: 770261 - DNA, 120 bp, Artificial Sequence
  ENSG00000234444_37 (sequence is synthesized)
ccactacagtttctagtcacctcagattttccagtactggaagttatcaccactgaatgctgcaaaacagcaacaatggcagcatgcccttttctctgggagcgccatcccagggaggta

SEQ ID NO: 770262 - DNA, 120 bp, Artificial Sequence
  ENSG00000234444_38 (sequence is synthesized)
tagacctgttgccagcccaaaagcacctgtaggaggtagctggaagcccctgttgaaggtcctacccagtgaggaaaacatgattggggacccacttaagaaagcagtctagccatattt

SEQ ID NO: 770263 - DNA, 120 bp, Artificial Sequence
  ENSG00000234444_39 (sequence is synthesized)
ttgcaggacagctctgctattcagaggtaccacttccacccccagtttatttggattctccaaagccagaaggctggaacagctaactcacacaaacagcaaaaatggcagctcactcct

SEQ ID NO: 770264 - DNA, 120 bp, Artificial Sequence
  ENSG00000234444_40 (sequence is synthesized)
ccctctaggaactgtatcccaaagaggtttcaaaactccatcaaccaaagagcgctggtggtggtagctggagaccctcattgggaagtactttccagtgagaaggaatgaaacggggga

SEQ ID NO: 770265 - DNA, 120 bp, Artificial Sequence
  ENSG00000234444_41 (sequence is synthesized)
cctgctttaacaggcagtctggccatgtctttttagagcacctgtactgtgctaggagatcctttccgccccccggtcagcttgggctcttcaaagcctgaaggctggaatggctaagtt

SEQ ID NO: 770266 - DNA, 120 bp, Artificial Sequence
  ENSG00000234444_42 (sequence is synthesized)
gctcaagcagcaaagatggtggcccactcctctttctggtagctccatcccagggaggtgcagtgctgctaccaatggttggctggaatctaagccagtaggtcttaccacgtgaggcat

SEQ ID NO: 770267 - DNA, 120 bp, Artificial Sequence
  ENSG00000234444_43 (sequence is synthesized)
tgttgaagtgggtcctacagaccatcactatcagccccctggattctgcctctttcctatgggtatgttcaggggtgtaacctgctttgctcgagttgcagctactttttctgggaagcc

SEQ ID NO: 770268 - DNA, 120 bp, Artificial Sequence
  ENSG00000234444_44 (sequence is synthesized)
tggaaagccagtatctaaggctcttgaatctgcgcaggcctaagtggcttatctgctgagactccatgtagctctgtgtgttaaactgaaggccttggtgaagtgggttcatgagggtat

SEQ ID NO: 770269 - DNA, 120 bp, Artificial Sequence
  ENSG00000234444_45 (sequence is synthesized)
ctcctcacctgaaggttgcagagatctgtgggagaatcatgggtttctagggtcacacatgcactcactgctttactgggtggggaggttcccttggctccatgttgttcccaggtggcc

SEQ ID NO: 770270 - DNA, 120 bp, Artificial Sequence
  ENSG00000234444_46 (sequence is synthesized)
cattgtcctgccttgctttactccattctccatagattgtttctttgattattcccaatgcaagtacctggatgtttcagttgcaggtgctgtatttatgtataccttgcattcctgtct

SEQ ID NO: 770271 - DNA, 120 bp, Artificial Sequence
  ENSG00000234444_47 (sequence is synthesized)
atgagaactgcacagtctagctgcttctagtcagcaatctcgatcacttttctctaaagggaacctacttttttatattaaaaggattcaatatttttcaaaagcaaatttcaatataat

SEQ ID NO: 770272 - DNA, 120 bp, Artificial Sequence
  ENSG00000234444_48 (sequence is synthesized)
ttaactcttacatttgatgctgtgtcttcatttctagaatttatgtgaaagaacatggtcagtggttgcaccagagttgtgagaggttcttctatattagatggacagatttatatactt

SEQ ID NO: 770273 - DNA, 120 bp, Artificial Sequence
  ENSG00000234444_49 (sequence is synthesized)
ttccatggaggattaagtaaactgaaacctaagacacacgaagaaattctaagtggaaaggccacttattagtttacagcagtatcgtaagtgacaggatgataggagtgtggtaagtga

SEQ ID NO: 770274 - DNA, 120 bp, Artificial Sequence
  ENSG00000234444_50 (sequence is synthesized)
tcaggataataatctgcttagtaagagaaacaatttgaattttagaaggaaattgccttaccatttgcaaattaaggtaattaaaatacagtgaatttcaaaatgcctttttaatgacaa

SEQ ID NO: 770275 - DNA, 120 bp, Artificial Sequence
  ENSG00000234444_51 (sequence is synthesized)
tgtgtgaacttaatttgttttaataaaccaaaattattgttattgtgttaaggctattttacattgaatgtgtatcttgccactgatgttaacttatcccatcttacccaaggttgtagg

SEQ ID NO: 770276 - DNA, 120 bp, Artificial Sequence
  ENSG00000234444_52 (sequence is synthesized)
taacaatatactattgggtgacagtggactaacatctctagtgatccctttgtcagtggtctttaacttaaaataatttagagaatatggtttctacaacttacatttttgtttacttgt

SEQ ID NO: 770277 - DNA, 120 bp, Artificial Sequence
  ENSG00000234444_53 (sequence is synthesized)
aactacagattattatgatggttgtaatgaagattatgagtataattggagctatatgtttctgaattctgaacaactatttataaaattttatcctacttttttctgttgaacatatga

SEQ ID NO: 770278 - DNA, 120 bp, Artificial Sequence
  ENSG00000234444_54 (sequence is synthesized)
cttctctggtctgctaaacacatacagacctttagttttggtttacatggatttaaatatatagatatatcactgtaaaataaacttcaggtgtaacagatttatagagaaagtaatcat

SEQ ID NO: 770279 - DNA, 120 bp, Artificial Sequence
  ENSG00000234444_55 (sequence is synthesized)
atttgtttatggttgtgtacctactttgagaagaaaagaaaaatattagaatgaacagataattttacaagtgttgatcacttaccagcaaaccagaaacttcagagattttgaaagcaa

SEQ ID NO: 770280 - DNA, 120 bp, Artificial Sequence
  ENSG00000234444_56 (sequence is synthesized)
atctattttctctgctgtgtattaaattcatttatctaaaatgttattgctcctggcttagaatcatcttgtgcaaattctttttttgttgtttgtctgtttgcctgttgctcaccatag

SEQ ID NO: 770281 - DNA, 120 bp, Artificial Sequence
  ENSG00000234444_57 (sequence is synthesized)
acataattttcttttcataaaacattctttgtataatcacctcagagattatgaaagtgactttgataaaatttaatggtgttcacaaaataattttcacgtgagtaatttcacagtgcg

SEQ ID NO: 770282 - DNA, 120 bp, Artificial Sequence
  ENSG00000234444_58 (sequence is synthesized)
tgcgtgtattgtatgttatttagtgtattttatattttgtttcaattagagaatgctattgaatccagtttttgtttagttactgttcattttactttataaaattgacataattgagtt

SEQ ID NO: 770283 - DNA, 120 bp, Artificial Sequence
  ENSG00000234444_59 (sequence is synthesized)
aaatttattgggccaatttaagtaaacagttgaacgtttcataagtcatgaggtctttttggcatatacatgaagtaaacaaagacaatactagctatgtaatagaagctacataattag

SEQ ID NO: 770284 - DNA, 120 bp, Artificial Sequence
  ENSG00000234444_60 (sequence is synthesized)
aagtaaatattctttttgaaattggcctgtggtctcaggtgaaaaatggaaaatatctatagtaaaaaaaatgacattaattctgcatatgaagagagcataattgtacccatgccacac

SEQ ID NO: 770285 - DNA, 120 bp, Artificial Sequence
  ENSG00000234444_61 (sequence is synthesized)
aattgactcacaattgaaacaagatgaagagatggacattttagcaaaactaagtgaaaaccttgtaaaattttcagattatgtttctacatttaaacatctactgggggaggcagaggc

SEQ ID NO: 770286 - DNA, 120 bp, Artificial Sequence
  ENSG00000234444_62 (sequence is synthesized)
caattctatgcagtcaaacctggaattgctgacacaggttaagagtatgcaccacaggtatcgaaacctaaaatgccctgaactcttttcatatagattaataaaatatggttttagtct

SEQ ID NO: 770287 - DNA, 120 bp, Artificial Sequence
  ENSG00000234444_63 (sequence is synthesized)
tccttctctatattctggcttagacagaactatcaagccatttcaagtagatttaattctagatctttttttttttttctttttttgagatggactcttgctctgtcacccaagctggtg

SEQ ID NO: 770288 - DNA, 67 bp, Artificial Sequence
  ENSG00000234444_64 (sequence is synthesized)
ttttttgagatggactcttgctctgtcacccaagctggtgtgcagtggtgtgatcttggctcatagc

SEQ ID NO: 770289 - DNA, 61 bp, Artificial Sequence
  ENSG00000234444_65 (sequence is synthesized)
atgcacatgtgagccaccgcgcctgtccttgattttagatcttgacacagcacatcctcaa

SEQ ID NO: 770290 - DNA, 120 bp, Artificial Sequence
  ENSG00000234444_66 (sequence is synthesized)
cctgtccttgattttagatcttgacacagcacatcctcaacttattgtctccgaggatagaaaagctgtgtgatggaagaacaaaaccaaacatatgttataacccaaggagattttatt

SEQ ID NO: 770291 - DNA, 120 bp, Artificial Sequence
  ENSG00000234444_67 (sequence is synthesized)
tctgccctgctttcctgggctctcagaagtgtagttctgacagacattactggaaggtagaggtgggaaacaagcctaaatgaaaattaggtgtgtgtcaagattgtcttcttaggacct

SEQ ID NO: 770292 - DNA, 120 bp, Artificial Sequence
  ENSG00000234444_68 (sequence is synthesized)
ggcaggatcagccttcagttctgggttgatttgggggcaattggatgatatatagagtggttatgctgcatcaggtcctaagaaaacccaccttctgccagtagtaaaatccagtaagat

SEQ ID NO: 770293 - DNA, 120 bp, Artificial Sequence
  ENSG00000234444_69 (sequence is synthesized)
tggtattcttttggactatgaattgggtgattttttaaagtaatataaataataggtttgttctgtatattttaatgatctttcacaagagctgtttggccttatttctatgctgaagca

SEQ ID NO: 770294 - DNA, 120 bp, Artificial Sequence
  ENSG00000234444_70 (sequence is synthesized)
gattctgaacgtcttaaaatctgttcattatcagatgctgaaagataaagagcaagtaaatgaatctatttcagtttttgtgggtaatttagccagtaaatttaatcttatttctttaat

SEQ ID NO: 770295 - DNA, 120 bp, Artificial Sequence
  ENSG00000234444_71 (sequence is synthesized)
ctttaagttttactactgaaggccagaatagatttttttctcttaaatttttggcaagtataaaagcacattcagaatgtcactttcatagatactatgaatatcaattgtcaagtgtgt

SEQ ID NO: 770296 - DNA, 120 bp, Artificial Sequence
  ENSG00000234444_72 (sequence is synthesized)
tgatttctaagataaaatatttgagaattaatattacccaacttgtccaataaaatgtttttaagttgcctatttttaaaaaaatctatcaattttgaattgcatacctagctaaatttt

SEQ ID NO: 770297 - DNA, 120 bp, Artificial Sequence
  ENSG00000234444_73 (sequence is synthesized)
gctacgagcggttaagagactacagctcccaggatgtacggtgatggcacccgtttggactccgcccctctgcgcgtctagagctgttctcccgtgcggaggggatcctggctgttccca

SEQ ID NO: 770298 - DNA, 120 bp, Artificial Sequence
  ENSG00000234444_74 (sequence is synthesized)
aatctcgcctgcctgcgaggagccagcgtggcccgggcagctgatctcaacctgtgattgtgacatcacccctacctgaggaagcctcttccagcctgctcaagtttttcagattaacta

SEQ ID NO: 770299 - DNA, 120 bp, Artificial Sequence
  ENSG00000234444_75 (sequence is synthesized)
gtgcctgcccagctggagtgctgggcccccggggtcaccatgcagcagggcctgacactgaccagggagccatggccacaggctcttggcagctggcccaaaataaatattctccataac

SEQ ID NO: 770300 - DNA, 120 bp, Artificial Sequence
  ENSG00000234444_76 (sequence is synthesized)
gggacccctttaagccactttgggagccacatccaccactctgtgactcccacacaggctggttcccaggtatcaggtgtcctagtgttaacacgggccaaaaggacaaaacaggaccct

SEQ ID NO: 770301 - DNA, 120 bp, Artificial Sequence
  ENSG00000234444_77 (sequence is synthesized)
aggtccttcccaaaacattaggaaagtttgtgtactgagtttttcagattaactaagtaattcatattgtacatttctgaaattgaagtacgcacagcttcaattctgtgcagggaggat

SEQ ID NO: 770302 - DNA, 120 bp, Artificial Sequence
  ENSG00000234444_78 (sequence is synthesized)
agaatatcctgggcacatctttctggagaatcacttttactacaagatttgtaagaaacaaatttatttccaaggtaagaaattaaaactctaaaacaaggctagaaagtcatctgcctt

SEQ ID NO: 770303 - DNA, 120 bp, Artificial Sequence
  ENSG00000234444_79 (sequence is synthesized)
taataacccttagtcatctgtgcctgatatgtgagactttctccaagataaatctctcaaggataacctattttccatcattataattagtaaaaattagaaattttagaaagtcaattg

SEQ ID NO: 770304 - DNA, 120 bp, Artificial Sequence
  ENSG00000234444_80 (sequence is synthesized)
catagtgcagcccctcagtaaaggtgcagctaatggcccgtgggcctagcagttgtcaggccttttgggagcccatgatgggagctccctgatcctcctctgtaccccaagaacacccca

SEQ ID NO: 770305 - DNA, 120 bp, Artificial Sequence
  ENSG00000234444_81 (sequence is synthesized)
ttggatttccgggctggctgcttggcctacacacctgggtcaggcctctcgcagggatgcgcctgccactgtaataaagaggagaaaacgtcacacgggaaaggcctgactccttcgtac

SEQ ID NO: 770306 - DNA, 120 bp, Artificial Sequence
  ENSG00000234444_82 (sequence is synthesized)
tcacttttactacaagatttgtaagaaacaaatttatttccaagcccctgggaaacactctcctacttggtgttttctatgactttaactactcttaagtaccacatatgagaagaatca

SEQ ID NO: 770307 - DNA, 120 bp, Artificial Sequence
  ENSG00000234444_83 (sequence is synthesized)
tatagtaaagaaatcatgaggaagaatgataaaaaatgtatcacatgcttattaattttcaataaaaacaccaacagagatcagtagtacctgttgattataaataaacagataaatgag

SEQ ID NO: 770308 - DNA, 120 bp, Artificial Sequence
  ENSG00000234444_84 (sequence is synthesized)
atttaaaataattttatacattatgttaaaatacacataaaattaactattttaaccattttaaaggtttccattgagatgaattaagtacactcattattttgctaccatcatttccat

SEQ ID NO: 770309 - DNA, 120 bp, Artificial Sequence
  ENSG00000234444_85 (sequence is synthesized)
cagatgacacaaatgacggatcccaatgtcaaggaggaagccaaacctttaaacatgcttccagaagctctgctccagtggaaatggtttctgagaaaccttcatttctttctcttgctt

SEQ ID NO: 770310 - DNA, 120 bp, Artificial Sequence
  ENSG00000234444_86 (sequence is synthesized)
taacatagggacattttttgtcccattcttgtgaattttccaagcactgtacttccccttcagtaatgtgtgtgtgtgtgttgtgtgtgtgttttgttttgttttttgtttttagtttac

SEQ ID NO: 770311 - DNA, 120 bp, Artificial Sequence
  ENSG00000234444_87 (sequence is synthesized)
agcaataatgaaagtctttcatggcttgacagaaaatgtgtgatttgactgcttttccattgctttggggaaacagcaatatctgtatttttgagaaactatattaaaccatttttttaa

SEQ ID NO: 770312 - DNA, 120 bp, Artificial Sequence
  ENSG00000234465_0 (sequence is synthesized)
aggagaggggaagagagagaaggagagggaatcccagttcttgcagccactgggaatcaagaggcccaactccgtcttggtcttcaagcaaacaaacaaacaacaatgggccgtgggaag

SEQ ID NO: 770313 - DNA, 120 bp, Artificial Sequence
  ENSG00000234465_1 (sequence is synthesized)
ggtgaatgtgggtccagacccacccctcctcagcttcctataaaagctggggaccaggtactgctgatacacacaccatgaggctctccaggagaccagagacctttctgctggcctttg

SEQ ID NO: 770314 - DNA, 120 bp, Artificial Sequence
  ENSG00000234465_2 (sequence is synthesized)
tgttgctctgcaccctcctgggtcttgggtgcccactacactgcgaaatatgtacggcggcggggagcaggtgccatggccaaatgaagacctgcagcagtgacaaggacacatgtgtgc

SEQ ID NO: 770315 - DNA, 120 bp, Artificial Sequence
  ENSG00000234465_3 (sequence is synthesized)
tgctactccggcgttatatccaccaccatgggccccaaggaccacatggtaaccagctccttctgctgccagagcgacggctgcaacagtgcctttttgtctgttcccttgaccaatctt

SEQ ID NO: 770316 - DNA, 120 bp, Artificial Sequence
  ENSG00000234465_4 (sequence is synthesized)
actgagaatggcctgatgtgccccgcctgcactgcgagcttcagggacaaatgcatggggcccatgacccactgtactggaaaggaaaaccactgcgtctccttatctggacacgtgcag

SEQ ID NO: 770317 - DNA, 120 bp, Artificial Sequence
  ENSG00000234465_5 (sequence is synthesized)
gctggtattttcaaacccagatttgctatgcggggctgtgctacagagagtatgtgctttaccaagcctggtgctgaagtacccacaggcaccaatgtcctcttcctccatcatatagag

SEQ ID NO: 770318 - DNA, 120 bp, Artificial Sequence
  ENSG00000234465_6 (sequence is synthesized)
tgcactcactccccctgaaaagctatctgaacagaggaagataatgtagtgtgaagtccccatttgtcctcagcctgtaactccccgtgtgcctataaagaagttaatagagcaagcctg

SEQ ID NO: 770319 - DNA, 120 bp, Artificial Sequence
  ENSG00000234465_7 (sequence is synthesized)
gtgtctggaagaaattcgcctttctcattgcacgatggagttaccgcccacactgaagccgagaaagcaaatctttttgctgtattattatttattttattttttaaaaattttttgttg

SEQ ID NO: 770320 - DNA, 120 bp, Artificial Sequence
  ENSG00000234465_8 (sequence is synthesized)
agacagggtcttgctctctcacccaggatggagtgcagtggcacgatctcggctttctgcaacccctgtctcctggggccaagggatcctcccacttcagcctcctaagtagctgggatt

SEQ ID NO: 770321 - DNA, 120 bp, Artificial Sequence
  ENSG00000234465_9 (sequence is synthesized)
ctaagtagctgggattacacgcacgcgccaccacattcggctaatttttgtattttttgtggagacatggggtgagagggcggcgggtcttgccatgttgcccagactggtctcgaactc

SEQ ID NO: 770322 - DNA, 120 bp, Artificial Sequence
  ENSG00000234465_10 (sequence is synthesized)
cacctgcctcggcctctcaaagtgctggaactacaggcgtgagcgactgcgctgggctaggacagcaaatctgagtgaattttcgtagtttcgtagggaacctggattctacgcaacagg

SEQ ID NO: 770323 - DNA, 120 bp, Artificial Sequence
  ENSG00000234465_11 (sequence is synthesized)
atctcttcaaatggctcaggcggctgcactcttctctctgtccccttgccacacacacacacacgcacatatacatacatacgcgcgcgcgcacgcgcgaaaaaaattagcagatctctt

SEQ ID NO: 770324 - DNA, 120 bp, Artificial Sequence
  ENSG00000234465_12 (sequence is synthesized)
tcagccttatgcctgaggccaaaagagaagggttctgcgtcctaaatataacacaaagcatgtgcccaacccccaccacacacacacacacacacccctatcctggagttcttccacaaa

SEQ ID NO: 770325 - DNA, 120 bp, Artificial Sequence
  ENSG00000234465_13 (sequence is synthesized)
agcctcagtttcccaatatgtggactgtgggcatctgtcttttactacgcccgcctatgactgccgacagacatccctctgttcattcggtgccttggagacccaagggtgcagccctgg

SEQ ID NO: 770326 - DNA, 120 bp, Artificial Sequence
  ENSG00000234465_14 (sequence is synthesized)
aaataagaaaagaaagaaaaaaaagaaagagaccatcccaggaagttgtggggttggggaggcctagggttaggcaagaccttgaggcaggggttgaagccagggagtggtcagccagca

SEQ ID NO: 770327 - DNA, 120 bp, Artificial Sequence
  ENSG00000234465_15 (sequence is synthesized)
acctggtggggaggtggggtgtaccttcagggtggaagagactaccatgctgaggggggatcatcatggttctcaagacgggagcgtgggaagaaatcagtggagagcaggaaagaggga

SEQ ID NO: 770328 - DNA, 120 bp, Artificial Sequence
  ENSG00000234465_16 (sequence is synthesized)
aagaccatcatgagatggagggaacagaaataagtggtgtgatagaaatcattattgtcacagaattctgaaaatgacactgtcctaaagagaaggaaaatgtgggaggggtgagagtta

SEQ ID NO: 770329 - DNA, 120 bp, Artificial Sequence
  ENSG00000234465_17 (sequence is synthesized)
atagactttcttaggcagaagaggggtaaggaaagacactgtggggggcagagaaatagtgagaggggaagaatctaactggcaggaggtggaaatggtggggagtggatagagaaggaa

SEQ ID NO: 770330 - DNA, 120 bp, Artificial Sequence
  ENSG00000234465_18 (sequence is synthesized)
gaactagaggtccaaacttctaggttcgatgggaggagagggttccagagaagtgggtgaggatgtgttctgggattatgaggaagaaggggctgaggtccctgattccagtctgaaatc

SEQ ID NO: 770331 - DNA, 90 bp, Artificial Sequence
  ENSG00000234465_19 (sequence is synthesized)
gctgaagtgcagtggtgcattcaagggtgattctctcacgtcagcctccctagtagctggcactacaggcatgcaccaccatgctcggtg

SEQ ID NO: 770332 - DNA, 120 bp, Artificial Sequence
  ENSG00000234465_20 (sequence is synthesized)
tagtagctggcactacaggcatgcaccaccatgctcggtgattctcccacctcggcctccctagtagctgggactacaagcgtgcaccaccatgactggctaattttttaatttttttgt

SEQ ID NO: 770333 - DNA, 82 bp, Artificial Sequence
  ENSG00000234465_21 (sequence is synthesized)
ctcctgggctcaagcgattaccatgcctggtggccctgccttttatgaagggattagtctttgccaggtccctgtgctgtgt

SEQ ID NO: 770334 - DNA, 120 bp, Artificial Sequence
  ENSG00000234465_22 (sequence is synthesized)
cataacaactgtgaggttgatattattatccccactctacagatgaacaaactgaggcatagattgtgggtgtcaaaatttgccttgggtcaaacaaccagggagggtcagaaccttgat

SEQ ID NO: 770335 - DNA, 120 bp, Artificial Sequence
  ENSG00000234465_23 (sequence is synthesized)
ttgaacccgagtctggtatacttcagagtccatgatcatctctctcaattaactgcttcctctttttgcctcagtgttcatgtctgcaaaatgtagatattaatagttataacctcataa

SEQ ID NO: 770336 - DNA, 120 bp, Artificial Sequence
  ENSG00000234465_24 (sequence is synthesized)
ggttgttgtaagagtcaaatgaaagacaacttaaaaagcgcttagtgcaatgcctagcaccacatgtggattctaaagacaatgtatgcctgagtaaacagtaatcatcataatagctgc

SEQ ID NO: 770337 - DNA, 120 bp, Artificial Sequence
  ENSG00000234465_25 (sequence is synthesized)
cacttactgagtggccattagttgacaggtgctaaacactgacatcaattgggacagactagatgttacagtaacaaaacaagtccctgatctcagtggtttaaaacaacaaagttgtat

SEQ ID NO: 770338 - DNA, 89 bp, Artificial Sequence
  ENSG00000234465_26 (sequence is synthesized)
aagtccctgatctcagtggtttaaaacaacaaagttgtattaactaacactgtaataatgctatgtaacaaatcatcctaaaactgaga

SEQ ID NO: 770339 - DNA, 120 bp, Artificial Sequence
  ENSG00000234465_27 (sequence is synthesized)
tctgtctcccaggctggagtgcagtgaaaccatcacagttcactgcagcctcaacctcatgggctgaatcgatcctccccgctcagcctccctggtagctgggactacaggcatgcgcca

SEQ ID NO: 770340 - DNA, 89 bp, Artificial Sequence
  ENSG00000234465_28 (sequence is synthesized)
ctcctgggcatgaaaactgagacttataccaacaagcattcttctaagggtttgtgggatggctgctttggctccagttcgggaggatt

SEQ ID NO: 770341 - DNA, 120 bp, Artificial Sequence
  ENSG00000234465_29 (sequence is synthesized)
gtttgtgggatggctgctttggctccagttcgggaggattcaggtctcttccatgagattccacaattttctgggatcagcagctccctcgcaaatgttctcatggcacatcacgggagc

SEQ ID NO: 770342 - DNA, 120 bp, Artificial Sequence
  ENSG00000234465_30 (sequence is synthesized)
acaaaagccaagtgcacttaagggccttgctaaggttaggtctgctaaaattccattaagtaaatcatatggtgaaacccatcagtggagcagggaaatatactccccctccagtagaag

SEQ ID NO: 770343 - DNA, 120 bp, Artificial Sequence
  ENSG00000234465_31 (sequence is synthesized)
ggagaggagtggatatttgctgaatgactgcccattcacaaaaggtaaacttttccttcaccctagcactatccagagggtgttttcctcgtcatagtcataaatcagccaccggcaggg

SEQ ID NO: 770344 - DNA, 90 bp, Artificial Sequence
  ENSG00000234465_32 (sequence is synthesized)
tgttttcctcgtcatagtcataaatcagccaccggcagggcacgatggctcacgcctgtcattccacttgagcccaggaatttgagacca

SEQ ID NO: 770345 - DNA, 120 bp, Artificial Sequence
  ENSG00000234469_0 (sequence is synthesized)
atggtctggttctgcaacagtgccgactgccaattttcagtcttcgcccttaccaccataggatggatcctctcctctacgtccacgggcctcgtggagtggcgaatatggtacatgaaa

SEQ ID NO: 770346 - DNA, 120 bp, Artificial Sequence
  ENSG00000234469_1 (sequence is synthesized)
gacacctcgctctacccccctggaatcgcctgcgtgggaatatttagagtctgcatttaccggcgtcgcaccaacagcaccacaaccaaattttgttaccgatacagctaccaggacacc

SEQ ID NO: 770347 - DNA, 120 bp, Artificial Sequence
  ENSG00000234469_2 (sequence is synthesized)
tttctcccttttgaaatttccatggctcaacgcttcctactgactgccagcattttcggattcttcgggagagcctttaacatgtttgcacttagaaacatgtccatgagaatgtttgag

SEQ ID NO: 770348 - DNA, 120 bp, Artificial Sequence
  ENSG00000234469_3 (sequence is synthesized)
gaggacacctacaattcattcgttgtttcaggaattctcaacattgctgctggtgtctttaacttaattgctgtgctccagaactacgatgccgtcataaactcacaggggatcaccttc

SEQ ID NO: 770349 - DNA, 120 bp, Artificial Sequence
  ENSG00000234469_4 (sequence is synthesized)
gcaggaagttggcactgccattcaagtggcagggataggtgtcttgccgatgctgttaactgggatgttttctctgttttacaaatgtcccccgtacggccaagtgcatcctggtatttc

SEQ ID NO: 770350 - DNA, 120 bp, Artificial Sequence
  ENSG00000234469_5 (sequence is synthesized)
agaaatgtgaatttcctggttgcattggctttgcaaatctaagatttctgggagtttatggaaaatgttattagcatgctctaccaaatatttccaacgactcaagaccgtggcatgggt

SEQ ID NO: 770351 - DNA, 120 bp, Artificial Sequence
  ENSG00000234469_6 (sequence is synthesized)
agtttgggacagaaggtggccaactgcctccttctgttatcttgtgtatctgaatgtggctcactgatttgttggttgaattgagaacttttatttaaaagtcttcccacctgccagttg

SEQ ID NO: 770352 - DNA, 120 bp, Artificial Sequence
  ENSG00000234469_7 (sequence is synthesized)
gtcttattgcatctgaattttaattattgttggctacagcaaataatcaaccctgtaaactaagagtagggaaataagagtttctgagtacattaacttctcacatttccctcttaaact

SEQ ID NO: 770353 - DNA, 120 bp, Artificial Sequence
  ENSG00000234511_0 (sequence is synthesized)
gaacctcggtgacggttggccagtttttttacagtggctctgaaatgagagaaattgcagaaattctccctgctcaggaaaaggtagaggcaaggattgacttaaagatgggtaagaagc

SEQ ID NO: 770354 - DNA, 120 bp, Artificial Sequence
  ENSG00000234511_1 (sequence is synthesized)
tcctacattttaatcatcccatcaagactgagaacttagcagaagcagaaagaaacaaccccctctttgaagagtctaaaatatcagatgtatcccttgtttctaacagtttttctatct

SEQ ID NO: 770355 - DNA, 120 bp, Artificial Sequence
  ENSG00000234511_2 (sequence is synthesized)
ttctaacagtttttctatctgatttcttatttgttatgagtttctgttttattgttgaactaacaaatatttgggagagttgagtttactaatttgtatatatataatttaaaacaaaat

SEQ ID NO: 770356 - DNA, 120 bp, Artificial Sequence
  ENSG00000234511_3 (sequence is synthesized)
agggggcgcggcttcgccttcaccgtcggctccctgctcctgtcagaacctcggtgacggttggccagatgggtaagaagcgtgttactgatcataagctaaatgtggacaaagtaatta

SEQ ID NO: 770357 - DNA, 120 bp, Artificial Sequence
  ENSG00000234511_4 (sequence is synthesized)
aaaatattaacacaatttcttcggagttgaagaagataaaagttaattgagcctgtcagaacatctctgctaaacaaacatacttctggaccagtgattcacagtcttggcttcaaatta

SEQ ID NO: 770358 - DNA, 120 bp, Artificial Sequence
  ENSG00000234511_5 (sequence is synthesized)
gtgcaactactactgagaactactggtgtggagtttaagtgtgaaagatgaaagatttttgctttcccatttctgataaataaatctaaggtaaagtttcggcactggctacgggaaata

SEQ ID NO: 770359 - DNA, 120 bp, Artificial Sequence
  ENSG00000234511_6 (sequence is synthesized)
tgtttaagactttatgatattaaaggactagctagaaacgtctagggcaaaaagcaaaaagttgctgccatctctttaatattggtcctttcacatcaacatggatggcacgtctgtgtt

SEQ ID NO: 770360 - DNA, 120 bp, Artificial Sequence
  ENSG00000234511_7 (sequence is synthesized)
aagaggaagatagaactggtacgatgttggaactttgaaagagagtctccttctgacaccatgtgattcctatgacaagacagactctttcattaataaaatctcctaagatgctgccaa

SEQ ID NO: 770361 - DNA, 120 bp, Artificial Sequence
  ENSG00000234511_8 (sequence is synthesized)
cttgagattcttctgccagcctaatgattcccgagcctaggaatccctgctatgggtgctggtagttgtgaagctggcactaatgggtctcctaggtattacagaaagcaacagcaccta

SEQ ID NO: 770362 - DNA, 120 bp, Artificial Sequence
  ENSG00000234511_9 (sequence is synthesized)
gcagaattcctagcctgtaattggtactcaggacaggtcagttcccttctctgccattaatatttacaactatgttaaaataaactatagcacaatacctggtttatctttctaagagca

SEQ ID NO: 770363 - DNA, 120 bp, Artificial Sequence
  ENSG00000234511_10 (sequence is synthesized)
gcttctgcctctggtcgggtaatataagaaacgtaccactcttcatttaatgaattctgaaaatgtaaatttttagaaactgaataaattttacagttacagatgtaagtgaaaagaaaa

SEQ ID NO: 770364 - DNA, 120 bp, Artificial Sequence
  ENSG00000234511_11 (sequence is synthesized)
tgtctcaactcatctctttattcatgctactctttactattatcattcctataaaatgttataggaaaaataatagctaacagttatggagcacttggtatctgccaagcacctctgatg

SEQ ID NO: 770365 - DNA, 120 bp, Artificial Sequence
  ENSG00000234511_12 (sequence is synthesized)
aattatctcacttaaccctcaaactaacactggaaggcagttattatcgttccatacgataggtgaggacatctgcactctgaatagttaatcgcttatctgcatctatacaactaagca

SEQ ID NO: 770366 - DNA, 120 bp, Artificial Sequence
  ENSG00000234511_13 (sequence is synthesized)
ggtgatagaataggattcaaacccaagtggcttcattccagagtctgcacttaacgctaccgctatcctgtgcgactcaaatgcagataagggttgcaaaagcctggcacactgggggta

SEQ ID NO: 770367 - DNA, 120 bp, Artificial Sequence
  ENSG00000234511_14 (sequence is synthesized)
aggaatgtcagtgctttttccgccaacgtggccgcgcgagtcagttgtaacccggcatccagaaccttctccgtaggggccttgcctgggactacaactcccaggatgccgcaggcggag

SEQ ID NO: 770368 - DNA, 120 bp, Artificial Sequence
  ENSG00000234511_15 (sequence is synthesized)
aagctggccaatcagggggcgcggcttcgccttcaccgtcggctccctgctcctgtcagaacctcggtgacggttggccaggtgggtagtgacggctgctcggtcttgaaggatcctaat

SEQ ID NO: 770369 - DNA, 120 bp, Artificial Sequence
  ENSG00000234511_16 (sequence is synthesized)
ctggtttgggagggtgaagaccgctgaaatttccaggctgcccgaggctccaccttccaccacccaacgggtgggcggtgggccgggctggcctcggagcctctccctgggtgtcggttg

SEQ ID NO: 770370 - DNA, 120 bp, Artificial Sequence
  ENSG00000234511_17 (sequence is synthesized)
ggccgagaaggggacggttggctgggtgggcctggcggctggtggctgtccgtaggccggggtcactctgagggcattttacattaccctaatcctgtccacttggcaagaaacttagta

SEQ ID NO: 770371 - DNA, 120 bp, Artificial Sequence
  ENSG00000234511_18 (sequence is synthesized)
agccccaaaggttcattccaaatcctgtctgggagggcgaggactgtggaaacttccagatgcctcaggctccatctttagctgttgagcgggtggttgggccgctcatggccccaaaga

SEQ ID NO: 770372 - DNA, 120 bp, Artificial Sequence
  ENSG00000234511_19 (sequence is synthesized)
ggccaaggaggaggctgggctttcagagtagaacctgcggtgctaacgatggctctgcagggctgcgggctgagggcctgggcggcgtcctgtggcccggagatggcgctctagtggtat

SEQ ID NO: 770373 - DNA, 120 bp, Artificial Sequence
  ENSG00000234511_20 (sequence is synthesized)
caggccttgagtcagcgacatcctggcttctgaccccccattcctatggcccctacagtctggtctccgcttccccactcccggtgaattgctgttggagcagcctctcctttctgggta

SEQ ID NO: 770374 - DNA, 120 bp, Artificial Sequence
  ENSG00000234511_21 (sequence is synthesized)
gtggcctggccgagctccccggggagggcttgacccagacctgtcctgcctccagtccagtcccagctacattgttgtgtagcaccccactgtgccctcaccccacccacgcgctgggtg

SEQ ID NO: 770375 - DNA, 120 bp, Artificial Sequence
  ENSG00000234511_22 (sequence is synthesized)
ctcgagggcctaggagaaccagagtggagagaggccactgtcttgggctctaaaatcatttagtttctactttactatttttaaaaaacttttgccttgtttttgaagttctttaattcc

SEQ ID NO: 770376 - DNA, 120 bp, Artificial Sequence
  ENSG00000234511_23 (sequence is synthesized)
accactccaccccttgttaaaatatcatctttctttttccctgcaacttgactcttggtttggcatgcccaaggaaggcagctgacatcctggagaatggggtcttgggggtagatgcaa

SEQ ID NO: 770377 - DNA, 120 bp, Artificial Sequence
  ENSG00000234511_24 (sequence is synthesized)
taaatactgatttatacattgtttctgtttttcttttaaaatcagatgggtaagaagcgtgttactgatcataagctaaatgtggacaaagtaattaaaaatattaacacaatttcttcg

SEQ ID NO: 770378 - DNA, 120 bp, Artificial Sequence
  ENSG00000234545_0 (sequence is synthesized)
ggagtggggaggcggcaagaggacctgcggcaggccctcttcggcagtctctccggcccggtttccctcggcgtgctactgtgcgctcgatccagcaccatggggaagcgggacaatcgg

SEQ ID NO: 770379 - DNA, 120 bp, Artificial Sequence
  ENSG00000234545_1 (sequence is synthesized)
gtggcctatatgaacccaatagcaatggcgagatcaaggggtccaatccagtcttcagggccaacaatacaggattatctgaatcgaccaaggcctacctgggaagaagtaaaagagcaa

SEQ ID NO: 770380 - DNA, 120 bp, Artificial Sequence
  ENSG00000234545_2 (sequence is synthesized)
ctagaaaagaaaaagaaaggctccaaggctttggctgaatttgaagaaaaaatgaatgagaactggaagaaagaactggaaaaacacagggagaaattgttaagtggaagtgagagctca

SEQ ID NO: 770381 - DNA, 120 bp, Artificial Sequence
  ENSG00000234545_3 (sequence is synthesized)
tccaaaaaaagacagagaaagaaaaaagaaaagaagaaatctggtaggtattcatcttcttcttcatcaagctctgattcttccagcagttcttctgattctgaagatgaggataagaaa

SEQ ID NO: 770382 - DNA, 120 bp, Artificial Sequence
  ENSG00000234545_4 (sequence is synthesized)
caaggaaaacggagaaagaaaaagaagaaccgttcacataaatcttctgaaagctccatgtcagaaactgaatcagacagtaaggatagtttaaaaaagaaaaagaagtcaaaagatgga

SEQ ID NO: 770383 - DNA, 120 bp, Artificial Sequence
  ENSG00000234545_5 (sequence is synthesized)
actgagaaagaaaaggatattaaaggactcagcaaaaagagaaagatgtattctgaagataaacctttatcatctgagtccttgtcagaatcagagtatattgaggaggtgcgagcaaaa

SEQ ID NO: 770384 - DNA, 120 bp, Artificial Sequence
  ENSG00000234545_6 (sequence is synthesized)
aagaagaaaagcagtgaagaacgagaaaaagcaacagaaaaaacaaaaaagaaaaagaagcataagaaacacagtaagaagaagaaaaagaaggctgctagttcaagtcctgactcacca

SEQ ID NO: 770385 - DNA, 120 bp, Artificial Sequence
  ENSG00000234545_7 (sequence is synthesized)
taacattaagaaaaatcaggattcccttataaagaaagtgcaatgtctgaggaaatttcaactgtgaaaactacaacatatttactaaaatgcatgaattttcttgtttttggaattatt

SEQ ID NO: 770386 - DNA, 120 bp, Artificial Sequence
  ENSG00000234545_8 (sequence is synthesized)
cctggactattcagtagccactcagatgccactgtgtgaaagggccataaatgttgcctgctgcttgaacatctatttttttctcttccagtgcttgataactctgggagataatacact

SEQ ID NO: 770387 - DNA, 120 bp, Artificial Sequence
  ENSG00000234545_9 (sequence is synthesized)
ctggatacatctttaagatgtaatcagaaatgaccagatgactctagttagaatttttgaaggagggattacattaatatttcaaaacccttactctgtagataagtgtattttaatttt

SEQ ID NO: 770388 - DNA, 120 bp, Artificial Sequence
  ENSG00000234545_10 (sequence is synthesized)
ttcccctcgtatacttttatttacctggggaaggagcttttagggttggggggtggtttgctatctctttagctagcagaatagtgtgcctttgatcctcacacatcctgtattatggac

SEQ ID NO: 770389 - DNA, 120 bp, Artificial Sequence
  ENSG00000234545_11 (sequence is synthesized)
acagtagccatgcttcacggggaggtcagagctggctaccagcagtcttgccctttactgagcttagtgtcatctttggatgctgtcatatgctgctttgagtgaaccagagaaacagcc

SEQ ID NO: 770390 - DNA, 120 bp, Artificial Sequence
  ENSG00000234545_12 (sequence is synthesized)
atttgcagcatgagaaagccccaaaagctctgggatttacctccactttagtaataatgaatattttttagcattagaatgtgttatgtcatttgaattaattttgactacactttggct

SEQ ID NO: 770391 - DNA, 120 bp, Artificial Sequence
  ENSG00000234545_13 (sequence is synthesized)
tgggagaggaattattttaaatagacattggtactttttgaacttgatagctaaagattctaaaatgcatgttttatactaagttttaaccagtcaggaaaattttatgtaactagtgat

SEQ ID NO: 770392 - DNA, 120 bp, Artificial Sequence
  ENSG00000234545_14 (sequence is synthesized)
agtttatttttttgtatgaattttgtttaggctgcaatgtttagcttttgttaactcctcactcttgctgtcttaagttcattactatgtttaatggcctacttgccaagatatttagca

SEQ ID NO: 770393 - DNA, 120 bp, Artificial Sequence
  ENSG00000234545_15 (sequence is synthesized)
tgtaaaaagcagggttttgattaaaaaaaaaaaacggcttcatattgaagctgagacttacaataacaagttgagtggcaagcctggtatgctgtgtcttattgccagaatcttagtaaa

SEQ ID NO: 770394 - DNA, 120 bp, Artificial Sequence
  ENSG00000234545_16 (sequence is synthesized)
tgtaatgttttaaaagtttgttgtctttgtatattaataacaaattatgacaagttaagtttaaataagagttacattattgctctccctgtgtcatattttactaagattttgtgcctc

SEQ ID NO: 770395 - DNA, 120 bp, Artificial Sequence
  ENSG00000234545_17 (sequence is synthesized)
atgtctactgctgaattgtttactaggaatgttaaaaggaattgataattcattttcattttacatttttatataatcaggtaacatgacatacaacttgatgtacaattttgcctgtta

SEQ ID NO: 770396 - DNA, 120 bp, Artificial Sequence
  ENSG00000234545_18 (sequence is synthesized)
caaagggtgtgctaattatagtggtatatgcacagaacatgttggcatgacaacaggctgaataaatagctattttacttaaaaatagctgtgttcttatcagctccctttggactgcaa

SEQ ID NO: 770397 - DNA, 120 bp, Artificial Sequence
  ENSG00000234545_19 (sequence is synthesized)
agttatggtggctcatacctataattccagcactttgggaggccgaaacgggaggccaggagttcatgaccagcctgggcaacaaagtaaggcccccccccgccgcccttgtctccatta

SEQ ID NO: 770398 - DNA, 120 bp, Artificial Sequence
  ENSG00000234545_20 (sequence is synthesized)
acaatagaataggtgttttggtttaatataaaatgagtcatggtaaagcttgattggatttactgggaccaaataagtatttgttgggaaaggtgtggtgtgttcagcagcttcacttaa

SEQ ID NO: 770399 - DNA, 120 bp, Artificial Sequence
  ENSG00000234545_21 (sequence is synthesized)
tgggtaggagaaagtcaaaatggttcaggaaaaataaaaaataccctggtagcaagcatgtcctgtttccatttcagtattttactgttagaaatataagctcagggctgggcgctgtgt

SEQ ID NO: 770400 - DNA, 120 bp, Artificial Sequence
  ENSG00000234545_22 (sequence is synthesized)
cttgcccgccccttttttcttccctcacctcgtcgctctttctggcgctgctggtttgcactcttgcctgctgtacgcgggcccccagtgcccacttagaaccgcgagggctcggggaac

SEQ ID NO: 770401 - DNA, 120 bp, Artificial Sequence
  ENSG00000234545_23 (sequence is synthesized)
gactagatgctaggcattacatgtgattcaaatcacttgatctttataacaggaaagtgatgtattaagtattaagaaaaaaatatagaaactgatccttttgtgaaattttgttcactg

SEQ ID NO: 770402 - DNA, 120 bp, Artificial Sequence
  ENSG00000234545_24 (sequence is synthesized)
tgatttaataaatatgacttagaaaaagaaatacttcatatttaatttattcacctttctagtatgaaaaaacaaaatgaaagttatttcatttcagaatgagttttgcttttttccaga

SEQ ID NO: 770403 - DNA, 120 bp, Artificial Sequence
  ENSG00000234545_25 (sequence is synthesized)
tttccagaagataattatctattattttttataattaactgtatttccacatacctttctaatctgagatatttttagtcttctaatatttcctttttattgtgctaccattcttgttac

SEQ ID NO: 770404 - DNA, 120 bp, Artificial Sequence
  ENSG00000234545_26 (sequence is synthesized)
catccgactcacccgccccttggcctatatgaacccaatagcaatggcgagatcaaggggtccaatccagtcttcagggccaacaatacaggattatctgaatcgaccaaggcctacctg

SEQ ID NO: 770405 - DNA, 120 bp, Artificial Sequence
  ENSG00000234545_27 (sequence is synthesized)
cacacacacacaattttctcccaaacttttaagacttaaaagaggattaaattaatttttttagaataaagagttggttagtcagattgcatatacttagctggatatattatgcattta

SEQ ID NO: 770406 - DNA, 120 bp, Artificial Sequence
  ENSG00000234545_28 (sequence is synthesized)
tccaaaaaaagacagagaaagaaaaaagaaaagaagaaatctggtagggtgagcaaaaattttccatttttctaaacgttacaattaagagccaacaaaaaaagtaagaataatttgttt

SEQ ID NO: 770407 - DNA, 120 bp, Artificial Sequence
  ENSG00000234545_29 (sequence is synthesized)
aacctgtatgctaaaggtagcttaaactccagatgagtcaaggaacttagaggttctttgattgtgaagagtgattttgttctatcactgacataaaaaacggtgccaaccaccttataa

SEQ ID NO: 770408 - DNA, 120 bp, Artificial Sequence
  ENSG00000234545_30 (sequence is synthesized)
cgtagtacattttctgttgctatttaaagagaaagattggtgaccatggccacatatgttaacttgttgagcttttgtacagggaacaagtgtgacattttatattttcatatttatgac

SEQ ID NO: 770409 - DNA, 120 bp, Artificial Sequence
  ENSG00000234545_31 (sequence is synthesized)
ttatgaatatggcatctgtttctcagacactagattgatttcactaagtatttgagagactttgtaaaagaaaaacattctcgcatctcacaagctttaattgttttgtgcttggtcaag

SEQ ID NO: 770410 - DNA, 120 bp, Artificial Sequence
  ENSG00000234560_0 (sequence is synthesized)
tcccagagggagagagaccaagggtgagaagaaatgtccaacgccagcctactgacagcgttcatcctcatgggccttccccatgccccagcgctggacgcccccctctttggagtcttc

SEQ ID NO: 770411 - DNA, 120 bp, Artificial Sequence
  ENSG00000234560_1 (sequence is synthesized)
ctggtggtttacgtgctcactgtgctggggaacctcctcatcctgctggtgatcagggtggattctcacctccacaccaccatgtactacttcctcaccaacctgtcgttcattgacatg

SEQ ID NO: 770412 - DNA, 120 bp, Artificial Sequence
  ENSG00000234560_2 (sequence is synthesized)
tggttctccactgtcacggtgcccaaattgctgatgactttggtgttcccaagtggcagggctatctccttccacagctgcatggctcagctctatttctttcacttcctagggggcacc

SEQ ID NO: 770413 - DNA, 120 bp, Artificial Sequence
  ENSG00000234560_3 (sequence is synthesized)
gagtgtttcctctacagggtcatgtcctgtgatcgctacctggccatcagttacccgctcaggtacaccagcatgatgactgggcgctcgtgtactcttctggccaccagcacttggctc

SEQ ID NO: 770414 - DNA, 120 bp, Artificial Sequence
  ENSG00000234560_4 (sequence is synthesized)
gtgatgcaccgcccatcctgaaactggcctgtgcagacacctcagccatagagactgtcatttttgtgactgttggaatagtggcctcgggctgctttgtcctgatagtgctgtcctatg

SEQ ID NO: 770415 - DNA, 120 bp, Artificial Sequence
  ENSG00000234560_5 (sequence is synthesized)
tgtccatcgtctgttccatcctgcggatccgcacctcagaggggaagcacagagcctttcagacctgtgcctcccactgtatcgtggtcctttgcttctttggccctggtcttttcattt

SEQ ID NO: 770416 - DNA, 120 bp, Artificial Sequence
  ENSG00000234560_6 (sequence is synthesized)
acctgaggccaggctccaggaaagctgtggatggagttgtggccgttttctacactgtgctgacgccccttctcaaccctgttgtgtacaccctgaggaacaaggaggtgaagaaagctc

SEQ ID NO: 770417 - DNA, 120 bp, Artificial Sequence
  ENSG00000234560_7 (sequence is synthesized)
tgttgaagctgaaagacaaagtagcacattctcagagcaaatagacactagggaagattacatatcttagctcttgtgaatagtgctgtgaaaaacatacaggggcaggtatcttttgga

SEQ ID NO: 770418 - DNA, 120 bp, Artificial Sequence
  ENSG00000234602_0 (sequence is synthesized)
cccgccatctctcagcacctcctcggcagcccctcggctccttctcggtcacgcgcctgccccaacctctggctggcttcggagcctgcaggcactgaagggagtgcagggtgtggatcg

SEQ ID NO: 770419 - DNA, 120 bp, Artificial Sequence
  ENSG00000234602_1 (sequence is synthesized)
ctgccccagcccgggccgccgcctccgagcagtcggcacccggaggcaggaggcacaatgcaggcgtgcgggggcggcgcggccggccgtcgggccttcgacagcatctgccccaacaga

SEQ ID NO: 770420 - DNA, 120 bp, Artificial Sequence
  ENSG00000234602_2 (sequence is synthesized)
atgctggcactgccgggccgggcgctgctctgcaagccggggaagccggagaggaagttcgctcctccgcggaagttcttccccggatgcacaggcgggagcccggtgtcggtgtacgag

SEQ ID NO: 770421 - DNA, 120 bp, Artificial Sequence
  ENSG00000234602_3 (sequence is synthesized)
gatcccccggacgccgagcccacagcgctgccagccctcaccaccatagacctgcaggacctcgctgactgctcttcgctactcgggtccgacgcgccgcctggtggtgacctggccgcc

SEQ ID NO: 770422 - DNA, 120 bp, Artificial Sequence
  ENSG00000234602_4 (sequence is synthesized)
tcgcagaaccattcccaccaaacggaagcagacttcaatctgcaagatttcagagacacggtggatgatctcatttcagactcatcctctatgatgtcgcctaccctggccagcggagac

SEQ ID NO: 770423 - DNA, 120 bp, Artificial Sequence
  ENSG00000234602_5 (sequence is synthesized)
ttccccttctctccttgcgacatatcaccattcgggccctgcctctccccgccactggacccacgggccctgcagtcaccaccgctgcgccctccagacgtgcccccgcctgagcaatac

SEQ ID NO: 770424 - DNA, 120 bp, Artificial Sequence
  ENSG00000234602_6 (sequence is synthesized)
tggaaggaggtggcggaccagaaccagagagcgttgggagacgcgcttgttgagaataatcaactgcacgtgacattgacccagaaacaggaggagatcgcctcgctcaaggagcggaac

SEQ ID NO: 770425 - DNA, 120 bp, Artificial Sequence
  ENSG00000234602_7 (sequence is synthesized)
gtgcagctgaaggaactcgccagccgaacccggcacctggcctcggtgctggataagctgatgatcacacagtcccgggattgtggggcggcggccgagcccttcctgctcaaggcgaag

SEQ ID NO: 770426 - DNA, 120 bp, Artificial Sequence
  ENSG00000234602_8 (sequence is synthesized)
gagcgctgcgatgaagcccttcagagccgcgatcccaagcggccccgactgctgccagagcccgcgaatactgacaccaggcccgggaacctgcatggcgccttccgggggctgcgcaca

SEQ ID NO: 770427 - DNA, 120 bp, Artificial Sequence
  ENSG00000234602_9 (sequence is synthesized)
gactgcagccggagcgcgttgaacctgagccacagtgagctggaggagggcggctccttcagcacccgcatccgcagccacagcaccatccgcaccctcgccttcccccagggcaatgcc

SEQ ID NO: 770428 - DNA, 120 bp, Artificial Sequence
  ENSG00000234602_10 (sequence is synthesized)
ttcaccatcagaacagccaacgggggttacaagttccgctgggtccccagttgagctgtgatgtggtcccccaaaacactgccctgtgtttccactgaagtgcctgggggcttcccagaa

SEQ ID NO: 770429 - DNA, 120 bp, Artificial Sequence
  ENSG00000234602_11 (sequence is synthesized)
ctttgccttcaggttgaatgccaccctgaaacactttttcaggaacaaaagcatcttgataccgatgcattgtaaatttctgctacaaaacattgtatagcccctccccttgtcacagtg

SEQ ID NO: 770430 - DNA, 120 bp, Artificial Sequence
  ENSG00000234602_12 (sequence is synthesized)
aaactctgtttatatatgtatatgtcacatatgtcacagccaattttaaaagtatttatttttagcagctttgaattatgtatttttagagcagggaaggatttagaaaccatagttact

SEQ ID NO: 770431 - DNA, 120 bp, Artificial Sequence
  ENSG00000234602_13 (sequence is synthesized)
tttataattatgtaatgctctaatattataagaaggaaaagaaggctctaagagattaagtaatttcctgcaatgggaaacactggaacctttcaatcactttaactagtcacttaagga

SEQ ID NO: 770432 - DNA, 120 bp, Artificial Sequence
  ENSG00000234602_14 (sequence is synthesized)
ctctaggcccagaagcctggtttctgggtgaatgtttttatacatcactcaacttccctcgtcctaaaaggacacctaattttgttactattgaaaatttttattttggtggccagaata

SEQ ID NO: 770433 - DNA, 120 bp, Artificial Sequence
  ENSG00000234602_15 (sequence is synthesized)
cgaaatcgggagaggtaacccaaacagttgtcttaggaaaaggcagattctcagaggcaatgggctatcaacaaaataggtgctaagcacatttgtttgtaatgatcattcatataattt

SEQ ID NO: 770434 - DNA, 120 bp, Artificial Sequence
  ENSG00000234602_16 (sequence is synthesized)
agaagatttatggtaacagtttatattcattatccatacagttctatttgtgcaaatagaataaccacctataagcaaacagtgttaatgagaaatatatattgttttaagaaaatagca

SEQ ID NO: 770435 - DNA, 120 bp, Artificial Sequence
  ENSG00000234616_0 (sequence is synthesized)
ggactggaggagaaccgagtggccggcacttccggccggcggcggctgctccgggtgagcaggcccctgaagtgctgtgcctggagataccattgtggaccctggagaggcacctgctgc

SEQ ID NO: 770436 - DNA, 120 bp, Artificial Sequence
  ENSG00000234616_1 (sequence is synthesized)
ttatgcggtaaaacctctaccaccccaaacctggtcagtttgaggggagccgctgccatagtatccacagagaaggccggagttccagccgtgtggagcagcagaggggagtctgacagg

SEQ ID NO: 770437 - DNA, 120 bp, Artificial Sequence
  ENSG00000234616_2 (sequence is synthesized)
gtcacctcctccacagagagaattggcagctgactgcactgccaggagccaaggcctaggtgtgtggagcctggaagaccagggatacctgaggcaggaggtgcagcgtgtggagtgaga

SEQ ID NO: 770438 - DNA, 120 bp, Artificial Sequence
  ENSG00000234616_3 (sequence is synthesized)
aacccgagagggactggggcctgtgctcaggatcagcagagcaggcaggcagagtggagagggagagacggagccccagaaggggagcaggaggagagggaagtagtggcagcagcccag

SEQ ID NO: 770439 - DNA, 120 bp, Artificial Sequence
  ENSG00000234616_4 (sequence is synthesized)
gccaggcgtgtgtcctgcaagtgctaggaccagccacccctccccatggcctccaagccggctgccgggaagagcagaggggagaagcggaagagggtggtgctgacactgaaggagaag

SEQ ID NO: 770440 - DNA, 120 bp, Artificial Sequence
  ENSG00000234616_5 (sequence is synthesized)
attgacatctgcacgcgcctggagaagggcgagagccggaaggcactgatgcaggagtacaatgtgggcatgtccaccctctacgacatcagggcccacaaggcgcagctgctccggttc

SEQ ID NO: 770441 - DNA, 120 bp, Artificial Sequence
  ENSG00000234616_6 (sequence is synthesized)
ttcgccagctccgactccaacaaggcgctggagcagcggcgcacgctgcacacgcccaagctggagcacctggaccgcgtcctgtacgagtggttcctggggaagcgctccgagggcgtc

SEQ ID NO: 770442 - DNA, 120 bp, Artificial Sequence
  ENSG00000234616_7 (sequence is synthesized)
cccgtgtcaggccccatgctcatcgagaaggccaaggacttctacgagcagatgcagctcactgagccctgcgtgttctccggagggtggctttggcgctttaaggccagacacggcatt

SEQ ID NO: 770443 - DNA, 120 bp, Artificial Sequence
  ENSG00000234616_8 (sequence is synthesized)
aaaaagctagatgcatccagtgaaaagcagtcagccgaccaccaggccgcggagcagttctgtgcgtttttcaggagcttggctgctgagcacgggctgtccgccgagcaggtttacaac

SEQ ID NO: 770444 - DNA, 120 bp, Artificial Sequence
  ENSG00000234616_9 (sequence is synthesized)
gctgatgagaccggccttttctggcggtgcctgccaaatcccactccggaaggcggggctgtgcctggccccaagcagggcaaggaccggctgaccgtgctgatgtgtgccaacgccacg

SEQ ID NO: 770445 - DNA, 120 bp, Artificial Sequence
  ENSG00000234616_10 (sequence is synthesized)
ggctcccacaggctcaagcccttggccatcgggaagtgcagcggtcccagggctttcaaaggcatccagcacctgcccgtcgcctataaggcccaggggaacgcctgggtggacaaggag

SEQ ID NO: 770446 - DNA, 120 bp, Artificial Sequence
  ENSG00000234616_11 (sequence is synthesized)
attttttccgattggttccatcatatctttgtgccctcggtgagagagcacttcagaaccataggtttgccggaagacagcaaagccgttctcttgctggacagctcccgggctcacccg

SEQ ID NO: 770447 - DNA, 120 bp, Artificial Sequence
  ENSG00000234616_12 (sequence is synthesized)
caggaggccgagctggtgtccagtaacgttttcaccatcttcctgcctgccagcgtggcctcattggtgcagcccatggagcagggcattcggagagatttcatgaggaacttcattaac

SEQ ID NO: 770448 - DNA, 120 bp, Artificial Sequence
  ENSG00000234616_13 (sequence is synthesized)
cctccggtccccctgcagggcccccacgcccgctacaacatgaacgatgccatattcagcgtggcctgtgcctggaacgcagtccctagccacgtcttcaggcgggcctggaggaagctg

SEQ ID NO: 770449 - DNA, 120 bp, Artificial Sequence
  ENSG00000234616_14 (sequence is synthesized)
tggccgtcggttgcgtttgccgaaggctcctcctctgaggaggagttggaggcagagtgcttcccagtgaagccccacaacaagtcctttgcacacatcctggagcttgtgaaggaaggc

SEQ ID NO: 770450 - DNA, 120 bp, Artificial Sequence
  ENSG00000234616_15 (sequence is synthesized)
tcctcctgcccgggccagcttcgccagcgccaggccgccagctggggggtagcgggaagggaggcagaagggggacggccccctgctgccacgtcgccagcagaggttgtgtggagttca

SEQ ID NO: 770451 - DNA, 120 bp, Artificial Sequence
  ENSG00000234616_16 (sequence is synthesized)
gaaaagactccgaaagctgaccaggacggcagaggagatcctggtgagggcgaggaggtggcctgggagcaggcggccgtggcctttgacgcagtcctgcgctttgcggagcggcagcca

SEQ ID NO: 770452 - DNA, 120 bp, Artificial Sequence
  ENSG00000234616_17 (sequence is synthesized)
tgcttcagtgcgcaggaagtggggcagctgcgggcgctgcgtgccgtgttccggagccagcagcaggtgaggaggcggcgtggtgccctcggggctgtggtcaaggttgaagccctccag

SEQ ID NO: 770453 - DNA, 120 bp, Artificial Sequence
  ENSG00000234616_18 (sequence is synthesized)
gagggccctggtggctgtggggccacagctcagtctcccttgccctgctcatccacagcaggtgacaactgatggcttctctgccctgccctggccactggccctgtttctccccacacc

SEQ ID NO: 770454 - DNA, 120 bp, Artificial Sequence
  ENSG00000234616_19 (sequence is synthesized)
ctggagtggcatggtcctgtgccccgaccccacctgaggcaggagggcatgtgcagacactcaagagcccttccaggagtgggtcgcccacgggtgtggctcgggtgcccaggacggtct

SEQ ID NO: 770455 - DNA, 120 bp, Artificial Sequence
  ENSG00000234616_20 (sequence is synthesized)
gtgcccgaggttcctgtcaatacaggttttattttatcacttgccgtgtcatccgaaagtgaggaaatgttttggaagggtccaccctagcctagaacaagccagagccgcaccctggct

SEQ ID NO: 770456 - DNA, 120 bp, Artificial Sequence
  ENSG00000234616_21 (sequence is synthesized)
ggaatgggggccaggctgagccgatctggtctcgtgttcgctggctgatcattgcagtatcagagggtggagatgtcagtctgtccacgtggagagaagttgccctccaggccgacagga

SEQ ID NO: 770457 - DNA, 120 bp, Artificial Sequence
  ENSG00000234616_22 (sequence is synthesized)
ggccatgcccaccgcccctggacaggcttcgtctcagaaggctctatctgctgggctggcggccatccccgtgttgggtggaccccgagcacggttgcctgaggtccgatggcccgagag

SEQ ID NO: 770458 - DNA, 120 bp, Artificial Sequence
  ENSG00000234616_23 (sequence is synthesized)
ctgggactcagttcttggcctgctagcggctgaacaggccgcacatctcacttcagttgtggcctcattcagcagaatgactctggaaccatcctctgttacccgcagatcctgtcccat

SEQ ID NO: 770459 - DNA, 120 bp, Artificial Sequence
  ENSG00000234616_24 (sequence is synthesized)
gggctctggccccaagatgttggggggccccacggagagttgacttggtagagttcctttctgggaagaaagtaggagtggctgaccaggccctgctcatcacccggatagaggacacgg

SEQ ID NO: 770460 - DNA, 120 bp, Artificial Sequence
  ENSG00000234616_25 (sequence is synthesized)
accctgtgtggtattttggcattttggctcagagtccaatgtaccatgttgcccagaatttcatacttatggcctttacatgaatacgtcttgatcagacattcagagattagtcttagg

SEQ ID NO: 770461 - DNA, 120 bp, Artificial Sequence
  ENSG00000234616_26 (sequence is synthesized)
tttgcacgtaagtcactgaaaacagtaaaacaggctgcttagatttctagcagtatgtgtgctcttatccccagctgttagcacgttagtaatacttttggggaggagttgtctgtcctg

SEQ ID NO: 770462 - DNA, 120 bp, Artificial Sequence
  ENSG00000234616_27 (sequence is synthesized)
gtcagttttcacagaggcggttgtaagaggatgtggttattttctccatgtctgtagttgctttgcggcatctccatttcacgggcaacactcactgcctgcagctgagattccagaacg

SEQ ID NO: 770463 - DNA, 120 bp, Artificial Sequence
  ENSG00000234616_28 (sequence is synthesized)
ccctgtgtccacagtgattagcctcgtctttcagcgagcataaaataggtgcattgtccttttcttttcttgaggcagggtctcactctgttgaccaggctggagtgaagtggtgtgatc

SEQ ID NO: 770464 - DNA, 89 bp, Artificial Sequence
  ENSG00000234616_29 (sequence is synthesized)
tctcactctgttgaccaggctggagtgaagtggtgtgatcccagctcactgcagcctcgacctccctggcttgagtgatcctcccgccc

SEQ ID NO: 770465 - DNA, 84 bp, Artificial Sequence
  ENSG00000234616_30 (sequence is synthesized)
aagcgatcctccttcctcatcctttcggcctaaataggtttttcttgctatgttattttcagtgctttgcccttgaattctttt

SEQ ID NO: 770466 - DNA, 120 bp, Artificial Sequence
  ENSG00000234616_31 (sequence is synthesized)
ttgctatgttattttcagtgctttgcccttgaattcttttcctctcttaaattcatatcatttggccgagtcagcacgtagtttgcattccagcgtctgctgttgattccactgaaacct

SEQ ID NO: 770467 - DNA, 120 bp, Artificial Sequence
  ENSG00000234616_32 (sequence is synthesized)
ctgttctcatgaaggagaggatttggctcgctgtggtttctcgtactttcacatctctgtagatacaggggcaaaagtcattgctgacagagccctatctatgtcctggaagtgtgtgtt

SEQ ID NO: 770468 - DNA, 120 bp, Artificial Sequence
  ENSG00000234616_33 (sequence is synthesized)
tcttgctttgaatgcatgtgtgaagattataaaagccaaatagtttttaaagatctcggtgctgaacgacagtcccagttcccatttgtgtcccattgtctttgtggtgtcacccgcact

SEQ ID NO: 770469 - DNA, 120 bp, Artificial Sequence
  ENSG00000234616_34 (sequence is synthesized)
gtttgcttcattgtctggggaacttctgcacatcatgtactttgtgccatttctgggctcacgtgtcactcctaatagagcctcttaaccaagactgctggattgcagctgcttgaggca

SEQ ID NO: 770470 - DNA, 120 bp, Artificial Sequence
  ENSG00000234616_35 (sequence is synthesized)
acacaggaggttagaacatgtcccgagggctctgaaacagtaggacatcctgggtgggtggagctggggagggcatgggcaggccagctggccgagctcctggctggctctcctgagtcc

SEQ ID NO: 770471 - DNA, 120 bp, Artificial Sequence
  ENSG00000234616_36 (sequence is synthesized)
tctggacatggcttgtccctgtcagactgtagctcttcaggacctgagctcttcccgttcttgatctgctcttgtgctgactgtgctgggctgatgggtaggcgcttgtccccagtgagt

SEQ ID NO: 770472 - DNA, 120 bp, Artificial Sequence
  ENSG00000234616_37 (sequence is synthesized)
ggctgtgtcctcagggtgcccctcttccagaccaactgcagcaaggcctggagcctgactctaggtgcagcccttgtggctggaatcccttgtgccacccaggggactcgggccctgctc

SEQ ID NO: 770473 - DNA, 120 bp, Artificial Sequence
  ENSG00000234616_38 (sequence is synthesized)
tgcagcccctcctcacctgggctcgctgctggagtgaggtttttagggagcccagagcgtactcatctctgagctgctgggcccagctgcctggtgcatacctcttgcctcggtcctgtc

SEQ ID NO: 770474 - DNA, 120 bp, Artificial Sequence
  ENSG00000234616_39 (sequence is synthesized)
ccccagaacgctttatggagactgccgtgtcctccgagcactttgttttcacttcctgacccgtctcagaagctcaagtggttgaatgttttagcctcagaatctttttccccaagccct

SEQ ID NO: 770475 - DNA, 120 bp, Artificial Sequence
  ENSG00000234616_40 (sequence is synthesized)
ctcaggtggagccccgctgtaccagacaccacagcacagctctgtgaggctgtgtctcttcactctgtttctggggctgctgaggcccctgggaagccctggagcttgccagagcagagc

SEQ ID NO: 770476 - DNA, 120 bp, Artificial Sequence
  ENSG00000234616_41 (sequence is synthesized)
gagaaagtctctggtcctgtttaaatgcctccgcgttttatctgtgagcaccaggctggagccactccctgtcttctcacagtgcccctgcaagttgcagcctcagttttccagtggctc

SEQ ID NO: 770477 - DNA, 120 bp, Artificial Sequence
  ENSG00000234616_42 (sequence is synthesized)
gtggggtagcaggtgctgcgtcatatggtttgggacctctgtggctgcttccagcctgctaatagaacctctttccaccactgccttcatctttggggtggcacccctgagtgctcaggc

SEQ ID NO: 770478 - DNA, 120 bp, Artificial Sequence
  ENSG00000234616_43 (sequence is synthesized)
ctgagggcgctcctgtgtcctcactcgggacaggcagcctccactctgggagctcccatccctcgggatgcccaggagaggccatactttcagggtggcatggtgaattcaggggttagg

SEQ ID NO: 770479 - DNA, 120 bp, Artificial Sequence
  ENSG00000234616_44 (sequence is synthesized)
atgggtaggtggtctttcagccccttctacgttggggttggtttacagaacacctgtcctgcctgtgccagcctggccttctgcgagcaccccaggcacgctgtcctggaagttgtctgt

SEQ ID NO: 770480 - DNA, 120 bp, Artificial Sequence
  ENSG00000234616_45 (sequence is synthesized)
ctcctgcataggagggtctagagcagaccttgccctgggcctgtctgtgcgtgacttccatatgcttcattcgtgctcagccatggctgagcatgcgatggagagcacctggactgcccc

SEQ ID NO: 770481 - DNA, 120 bp, Artificial Sequence
  ENSG00000234616_46 (sequence is synthesized)
tgacgtcgcaggccactgttcttatccagtgggccaagtgattgattgctagtggtggagttgattggaagaaaggaagtcgcagcccctgcccacggcttccccagctcgctggggttg

SEQ ID NO: 770482 - DNA, 120 bp, Artificial Sequence
  ENSG00000234616_47 (sequence is synthesized)
gaggactgtcatcagttgtccccagttaaagtccatttggaggaggttcagggtcccagtggctggatgtgcttgtggagggacacggtttgaggcaggggtttgcagaaggtgtagact

SEQ ID NO: 770483 - DNA, 120 bp, Artificial Sequence
  ENSG00000234616_48 (sequence is synthesized)
gcatccattcttgggaggctgtggcacagggcagcgacaacttgggacaaatcaagacccgtccacactgcacctcagggacctcacctcacgccccacataaatgtgcttattggggat

SEQ ID NO: 770484 - DNA, 120 bp, Artificial Sequence
  ENSG00000234616_49 (sequence is synthesized)
cacataaatgtgcttattggggatccgggtgtggtggcttctgcctgaaatcccagtactctggaaggccacggcaggaggatcactttagttcaggagtttgaaaccagcctgggcaac

SEQ ID NO: 770485 - DNA, 120 bp, Artificial Sequence
  ENSG00000234616_50 (sequence is synthesized)
catctctacagaaagtaaaagaaaatgagccaggtgtggtggcatgtgcctgtaaccccagctactcaggaggccgaggcgggaggatccccaagcccaggagtttgaggctgcagtgag

SEQ ID NO: 770486 - DNA, 120 bp, Artificial Sequence
  ENSG00000234616_51 (sequence is synthesized)
cactccagcctgggtgacagagtgagagacctaatctctaaaaacaaaaaataacaaaatgtgctttggggtcaggtgtggagatcagggtcggggaggtcatgaggtaggtaggggtca

SEQ ID NO: 770487 - DNA, 120 bp, Artificial Sequence
  ENSG00000234616_52 (sequence is synthesized)
ggatgtggacagtcatgggctggtgggtgtggcagccgtgaggggtgggtggtggcctgggaggcagggcctgggcagggcttctgcacttctgctgcttacccagccccctctgggttc

SEQ ID NO: 770488 - DNA, 120 bp, Artificial Sequence
  ENSG00000234616_53 (sequence is synthesized)
gaggactctccttgacaagggctgagctctcgggcactgcgttggactcagctgcctactgggaggctggggagaatggacctgtgagaccttgtttgtcctcttccctgcccagctctt

SEQ ID NO: 770489 - DNA, 120 bp, Artificial Sequence
  ENSG00000234616_54 (sequence is synthesized)
gtagaccccaggcctggctgtccgcagggccaggagctgcagccatggcagccaccagcctcccacatgagccccagctcccagccccacacgcccactcctttgcccatgtggtgtcag

SEQ ID NO: 770490 - DNA, 120 bp, Artificial Sequence
  ENSG00000234616_55 (sequence is synthesized)
ctctggcctctgcttctacacatggaccctcagaccttgcacatctgttgtttcccttgcagggcagtgatgatgacatgaaatgaggtggggtcactcctgtttagggatgagactggg

SEQ ID NO: 770491 - DNA, 120 bp, Artificial Sequence
  ENSG00000234616_56 (sequence is synthesized)
gcccagggaggggcaggtgtgaagttgctgagggcagagggagacccagggctacctgctcctaatgaccagcctcacgttctccactgctcactccctgctgttcaccagctgcatgac

SEQ ID NO: 770492 - DNA, 120 bp, Artificial Sequence
  ENSG00000234616_57 (sequence is synthesized)
cttgagcagtgcactcaactgtaaacagaggtgaaaacactcctttaccaactgttttaggggccactcttgtttgaggccttgaacctcctttcagttccgtggtggtcctgagcctct

SEQ ID NO: 770493 - DNA, 120 bp, Artificial Sequence
  ENSG00000234616_58 (sequence is synthesized)
gaatctgggtatggcccctgctgggtcctggtctcttaggcagcacgatggcctccctgctcaaggccctgcacccaggggcagattgtgggaggcccactggccatggctgggccctat

SEQ ID NO: 770494 - DNA, 120 bp, Artificial Sequence
  ENSG00000234616_59 (sequence is synthesized)
cgcagagagcctgtcagcacggccatttccacacccaggctggctgggaagcaagctacgaggtgctcaaaggccctctatgtctgcaggtagccccgtcccacacaggcgaggatcgtt

SEQ ID NO: 770495 - DNA, 120 bp, Artificial Sequence
  ENSG00000234616_60 (sequence is synthesized)
gggcctccttagtagccaaaggaactgaggtccagagcagggaatgtgttgcccagtgtcagcatggtctgctctggggtcaggcgtcttgccctggtcctaagccaccccaagccaagg

SEQ ID NO: 770496 - DNA, 120 bp, Artificial Sequence
  ENSG00000234616_61 (sequence is synthesized)
catgtccctgggcccatttcctctctcgaggtcttgggttccctatttctgatgtgtgtgaaaggaaggcctgtcctctggggtgaccatgaggctcagtgggaggagctgccaggcttg

SEQ ID NO: 770497 - DNA, 120 bp, Artificial Sequence
  ENSG00000234616_62 (sequence is synthesized)
agctgggacttggcacctggccagccttttttctatttcattgtaccttgatgggctgtcagttctgaagagaaaaaatacactaggaatccattcttcctccaccattctccctggcag

SEQ ID NO: 770498 - DNA, 120 bp, Artificial Sequence
  ENSG00000234616_63 (sequence is synthesized)
agggaagtgactacacccctatggtgtggacatactgacgctcctccatgaagcagcaaagttctgttgtttcaggagactgtgggccttgaggatgtggtagtgacctcaccagaggag

SEQ ID NO: 770499 - DNA, 120 bp, Artificial Sequence
  ENSG00000234616_64 (sequence is synthesized)
ttggcaattcctaagtgctgcctggaggcctctacagagacataatgttggagaacttctgccacatggcagtgctgggtaagacccctctgtccccaccagtgcccttgaggttatggg

SEQ ID NO: 770500 - DNA, 120 bp, Artificial Sequence
  ENSG00000234616_65 (sequence is synthesized)
tgttggtaggtctgtggcctccatctccatgacgatggtgttaaggactgcatgtttgtgtccccccccaaagtttatatgttgaaaccctgacccccaggagggtggtattaggaggtg

SEQ ID NO: 770501 - DNA, 120 bp, Artificial Sequence
  ENSG00000234616_66 (sequence is synthesized)
gggcctttgggaggtgactaggcttaggtgagatcgtgagggtggggctcgccgatgagatcgagtccttataagaaaaggaaggaactagagcgaggtcactttgtgctgtgtgagcat

SEQ ID NO: 770502 - DNA, 120 bp, Artificial Sequence
  ENSG00000234616_67 (sequence is synthesized)
gtggctcacgcctgtaatcccagcactggaaggccaaggcattaggattgcatgagtccaggagttcgagaccagcctaggcatgataagaccttattgctaaaaaaaaaaaaaaaggaa

SEQ ID NO: 770503 - DNA, 120 bp, Artificial Sequence
  ENSG00000234616_68 (sequence is synthesized)
aaaaaaaaaaaaggaaataaaatagaaaattgccatctgcaaatgagaaagccttcagccgacaccagactgccagtgcctttgatattggactttcagtccccagatctgtgaaaaatt

SEQ ID NO: 770504 - DNA, 120 bp, Artificial Sequence
  ENSG00000234616_69 (sequence is synthesized)
agatctgtgaaaaattaatttatgttgtttaagacacctagcctgtggtattttgttatcgcaatcaaaactgactgagacaggcagtaaggagagaacagaggttccagcctgcttcag

SEQ ID NO: 770505 - DNA, 120 bp, Artificial Sequence
  ENSG00000234616_70 (sequence is synthesized)
gtccaggcagttctgccattgcccctaactcctcagtgccagtcatgggccaggcccctgggggacttggaatgagtaaaacatgcacctattgttaaggttcacctggtccagaagggg

SEQ ID NO: 770506 - DNA, 120 bp, Artificial Sequence
  ENSG00000234616_71 (sequence is synthesized)
aggcagacccacctgcccaccatgacccggacagaggcaataaatacggagcacctcatggccagggcctggaggattcccaccataccctacccagcgccaataacagagggaccctgg

SEQ ID NO: 770507 - DNA, 120 bp, Artificial Sequence
  ENSG00000234616_72 (sequence is synthesized)
agttgtgtacgcaagatagcagttcagtgcttgcacacatactagttgagaagggaaatcagggctaatgaaacagctcaactgtctggcagagccaggctccttctgccatgatacagt

SEQ ID NO: 770508 - DNA, 120 bp, Artificial Sequence
  ENSG00000234616_73 (sequence is synthesized)
ttggatgtttgtccctttctaatcttatatggaaatttgatccccagtgttgaaggtggggcctggtgggaaatgttcctgttatcgggatggatccttcatgaatagcctggtgccatc

SEQ ID NO: 770509 - DNA, 120 bp, Artificial Sequence
  ENSG00000234616_74 (sequence is synthesized)
tttgtggtaacaagtgagttctcacttgattagtttctgtgagaactgtttgttaaaaagagcctggtggcacctccctcccttcttcctcctgctcttgctatgtgatgctgctgccct

SEQ ID NO: 770510 - DNA, 120 bp, Artificial Sequence
  ENSG00000234616_75 (sequence is synthesized)
tgctcttgctatgtgatgctgctgccctttgccttccgtcatgagtggaagctccctgaagcccccaccagaagcaaatgctggcaccatgctgcttgtacagcctgcagaactgtgagc

SEQ ID NO: 770511 - DNA, 120 bp, Artificial Sequence
  ENSG00000234616_76 (sequence is synthesized)
agttcaagctgcagcctttgctgatgacggtcaggaggccaactgcgcctggggagcagcgggatccggggatggggctgccctgtgtgctcacctgcctgacctgccccaggcctcctc

SEQ ID NO: 770512 - DNA, 120 bp, Artificial Sequence
  ENSG00000234616_77 (sequence is synthesized)
ctgtcccaccctgcctaatgctctagagtccccctgggctggcctcaggattgcaagcagtgcgagggcctggtctcggccctggtctcagccctatccagatgtccgaggcagatggac

SEQ ID NO: 770513 - DNA, 120 bp, Artificial Sequence
  ENSG00000234616_78 (sequence is synthesized)
cagaaatgggtgccagaatggacttggtctttgagaagagatccaaggttccctgagtaatgttccatgccaatctccactccccaccagcagcacccaagtcctgggagaccaagtgat

SEQ ID NO: 770514 - DNA, 120 bp, Artificial Sequence
  ENSG00000234616_79 (sequence is synthesized)
ttgggaacccccatccagcggccctgggttctagtcccaccatgtgcctgttgcctccagggactccagattttcctgtttgctcttggccttctgcccacccaccccactgccatgggc

SEQ ID NO: 770515 - DNA, 120 bp, Artificial Sequence
  ENSG00000234616_80 (sequence is synthesized)
ccaaagcagccgggttccctggagatcctgtcttccacctagtgcagggcatgaggccggggccaggacagccggaccaggccctggggcttctgggagctgactcaccttgcagggagt

SEQ ID NO: 770516 - DNA, 120 bp, Artificial Sequence
  ENSG00000234616_81 (sequence is synthesized)
cccaccaccaccttctggggccccacacggtcccatgctggaacacacatccctgtgtgtaattttttttatttcatgcagcattaattaaaaaaataaagatagcatgtcacttgcaaa

SEQ ID NO: 770517 - DNA, 120 bp, Artificial Sequence
  ENSG00000234616_82 (sequence is synthesized)
cacccgctgagcgtcagaaatgggctcctcatcagcatctctgcccatccatccgtcagtctgtctacctgccccctaggagccaggccctgccccacggtggtgaaggagagtgactcc

SEQ ID NO: 770518 - DNA, 120 bp, Artificial Sequence
  ENSG00000234616_83 (sequence is synthesized)
gtgctgcccctgcaagccccggtcacaggggacggcagggaacaggtcgctgcctggtcgtgccaagagcttccctggaggagcggaggctagggcaagagcctcacccccttcctctcc

SEQ ID NO: 770519 - DNA, 120 bp, Artificial Sequence
  ENSG00000234616_84 (sequence is synthesized)
aaggcctcacctggctgcagggccaagcctgccatcaacagggcaagcagcacagccttcgtggtcactggtgggctgtggtggagagggcctcaggtgactttatatggcctcaaatgg

SEQ ID NO: 770520 - DNA, 120 bp, Artificial Sequence
  ENSG00000234616_85 (sequence is synthesized)
ggagaggctggactgcccacagtcaacaccagcgggtttcctggagccagtgagggccccggggctgggcaggtccgagtctcctccctgagcgacctgcacctccctctccctttgtcc

SEQ ID NO: 770521 - DNA, 120 bp, Artificial Sequence
  ENSG00000234616_86 (sequence is synthesized)
ttctttccacctctggaggacagagcctacccagggccatatctcagccaccccgggctgagggctgaaacgtcctcaagacccagattatgcctctcccacctcccccacctcacagtg

SEQ ID NO: 770522 - DNA, 120 bp, Artificial Sequence
  ENSG00000234616_87 (sequence is synthesized)
caaggccagacaagggagaccctttctccagactcctccaggcctcggccttccagccaaggatgagggcacctccctgggccctgtgctcctatagaagctgtgccgccctctggggcc

SEQ ID NO: 770523 - DNA, 120 bp, Artificial Sequence
  ENSG00000234616_88 (sequence is synthesized)
cacggcccgcagggtgatgagccttggtcacagcgtcactgacagatcattagcaggtgctgcaaaggacaggggcaggggctgttccggtataaaccaaaagtaacattctaaggcccc

SEQ ID NO: 770524 - DNA, 120 bp, Artificial Sequence
  ENSG00000234616_89 (sequence is synthesized)
tcaggattgcaagcagtgcgagggcctggtctcggccctggtctcagccctatccagatgtccgaggcagatggaccacccgctgagcgtcagaaatgggtccctcggtggctgcttttg

SEQ ID NO: 770525 - DNA, 120 bp, Artificial Sequence
  ENSG00000234616_90 (sequence is synthesized)
tgaccgtgtgtttcagaagaggaagctgcggctgtgggggtgactgaacccgggaccctgggtcgggagggtcccacctcaagcagagcagctccctgggacccttggaagctgcagtgc

SEQ ID NO: 770526 - DNA, 120 bp, Artificial Sequence
  ENSG00000234616_91 (sequence is synthesized)
tgggactgggccggatgtagacccccgggtcctcgcaggacacccccagcacctcccccttgtgccccaaaaaccacttcttagcctgaggcttcctgtcccatgtctcccagctcctca

SEQ ID NO: 770527 - DNA, 60 bp, Artificial Sequence
  ENSG00000234719_0 (sequence is synthesized)
ctgactttggtggaagtccttggttacgtatcattattgcatttccgagaagttataaag

SEQ ID NO: 770528 - DNA, 120 bp, Artificial Sequence
  ENSG00000234719_1 (sequence is synthesized)
tggttacgtatcattattgcatttccgagaagttataaagttgtccttaccctctggacagtttacctttggttgtctttcctgaagactatcttccagtctgaaaatggacatgatgta

SEQ ID NO: 770529 - DNA, 88 bp, Artificial Sequence
  ENSG00000234719_2 (sequence is synthesized)
cctgaagactatcttccagtctgaaaatggacatgatgtatccacagatgtacagcagagagccaggaggtccaaccgccgtagacag

SEQ ID NO: 770530 - DNA, 89 bp, Artificial Sequence
  ENSG00000234719_3 (sequence is synthesized)
cctgaaagacgtcattactctacggagacatgtggaaacaaaaggtagagctaaaatccgtaagatgaaggtgacaacgaaaatcaacc

SEQ ID NO: 770531 - DNA, 120 bp, Artificial Sequence
  ENSG00000234719_4 (sequence is synthesized)
aatctcaagacacctcccttagctactcaggaggctgaggcagaaaaaccacccaaacccaagaggtggagagcggctgagatggaatcaccacccgaacccaagaggcggagggccgct

SEQ ID NO: 770532 - DNA, 120 bp, Artificial Sequence
  ENSG00000234719_5 (sequence is synthesized)
gaggtggaatcaccacccgaacccaagaggcggagggccgctgaggtggaaccatcatcacccgagcccaagaggcggaggttgagtaagctgagaacaggccattgcactcaagcctga

SEQ ID NO: 770533 - DNA, 80 bp, Artificial Sequence
  ENSG00000234719_6 (sequence is synthesized)
atcaatggaaagaggaagaccgccaaaaaacagaaactaagcgtgaaagaatgtgagcatgcagaaaaggagaggcaggt

SEQ ID NO: 770534 - DNA, 77 bp, Artificial Sequence
  ENSG00000234719_7 (sequence is synthesized)
cgcagatccaagtcgccggacccggtgtggagagcggtgctgaggctacgcgggctggagactcagggttgatggac

SEQ ID NO: 770535 - DNA, 120 bp, Artificial Sequence
  ENSG00000234719_8 (sequence is synthesized)
aaaccgcggcgcagatccaagtcgccggacccggtgtggagagcggtgctgaggctacgcgggctggagactcaggagtctcactctgtctcccaggctgagtgcagtgacacaatcaca

SEQ ID NO: 770536 - DNA, 86 bp, Artificial Sequence
  ENSG00000234719_9 (sequence is synthesized)
catgcgccagcacgcctgggcttgagcaattcagtttccctgcctgagtgttggtgacctgtgctgtgaaatagagagagacacct

SEQ ID NO: 770537 - DNA, 120 bp, Artificial Sequence
  ENSG00000234719_10 (sequence is synthesized)
ccctgaaaggaccaggacatgcgggtgctgtggatgctcttttggctcctcttttggctcctgctggaatttatcagccatcagtccacctgtgttatcaatactctggctgaccatcat

SEQ ID NO: 770538 - DNA, 120 bp, Artificial Sequence
  ENSG00000234745_0 (sequence is synthesized)
agagtctcctcagacgccgagatgctggtcatggcgccccgaaccgtcctcctgctgctctcggcggccctggccctgaccgagacctgggccggctcccactccatgaggtatttctac

SEQ ID NO: 770539 - DNA, 120 bp, Artificial Sequence
  ENSG00000234745_1 (sequence is synthesized)
acctccgtgtcccggcccggccgcggggagccccgcttcatctcagtgggctacgtggacgacacccagttcgtgaggttcgacagcgacgccgcgagtccgagagaggagccgcgggcg

SEQ ID NO: 770540 - DNA, 120 bp, Artificial Sequence
  ENSG00000234745_2 (sequence is synthesized)
ccgtggatagagcaggaggggccggagtattgggaccggaacacacagatctacaaggcccaggcacagactgaccgagagagcctgcggaacctgcgcggctactacaaccagagcgag

SEQ ID NO: 770541 - DNA, 120 bp, Artificial Sequence
  ENSG00000234745_3 (sequence is synthesized)
gccgggtctcacaccctccagagcatgtacggctgcgacgtggggccggacgggcgcctcctccgcgggcatgaccagtacgcctacgacggcaaggattacatcgccctgaacgaggac

SEQ ID NO: 770542 - DNA, 120 bp, Artificial Sequence
  ENSG00000234745_4 (sequence is synthesized)
ctgcgctcctggaccgccgcggacacggcggctcagatcacccagcgcaagtgggaggcggcccgtgaggcggagcagcggagagcctacctggagggcgagtgcgtggagtggctccgc

SEQ ID NO: 770543 - DNA, 120 bp, Artificial Sequence
  ENSG00000234745_5 (sequence is synthesized)
agatacctggagaacgggaaggacaagctggagcgcgctgaccccccaaagacacacgtgacccaccaccccatctctgaccatgaggccaccctgaggtgctgggccctgggtttctac

SEQ ID NO: 770544 - DNA, 120 bp, Artificial Sequence
  ENSG00000234745_6 (sequence is synthesized)
cagaagtgggcagctgtggtggtgccttctggagaagagcagagatacacatgccatgtacagcatgaggggctgccgaagcccctcaccctgagatgggagccgtcttcccagtccacc

SEQ ID NO: 770545 - DNA, 120 bp, Artificial Sequence
  ENSG00000234745_7 (sequence is synthesized)
gtccccatcgtgggcattgttgctggcctggctgtcctagcagttgtggtcatcggagctgtggtcgctgctgtgatgtgtaggaggaagagttcaggtggaaaaggagggagctactct

SEQ ID NO: 770546 - DNA, 120 bp, Artificial Sequence
  ENSG00000234745_8 (sequence is synthesized)
caggctgcgtgcagcgacagtgcccagggctctgatgtgtctctcacagcttgaaaagcctgagacagctgtcttgtgagggactgagatgcaggatttcttcacgcctcccctttgtga

SEQ ID NO: 770547 - DNA, 120 bp, Artificial Sequence
  ENSG00000234745_9 (sequence is synthesized)
cttcaagagcctctggcatctctttctgcaaaggcacctgaatgtgtctgcgtccctgttagcataatgtgaggaggtggagagacagcccacccttgtgtccactgtgacccctgttcc

SEQ ID NO: 770548 - DNA, 120 bp, Artificial Sequence
  ENSG00000234745_10 (sequence is synthesized)
catgctgacctgtgtttcctccccagtcatctttcttgttccagagaggtggggctggatgtctccatctctgtctcaactttacgtgcactgagctgcaacttcttacttccctactga

SEQ ID NO: 770549 - DNA, 120 bp, Artificial Sequence
  ENSG00000234745_11 (sequence is synthesized)
aaataagaatctgaatataaatttgttttctcaaatatttgctatgagaggttgatggattaattaaataagtcaattcctggaatttgagagagcaaataaagacctgagaaccttcca

SEQ ID NO: 770550 - DNA, 120 bp, Artificial Sequence
  ENSG00000234745_12 (sequence is synthesized)
cagagatacacatgccatgtacagcatgaggggctgccgaagcccctcaccctgagatggggtggaaaaggagggagctactctcaggctgcgtgcagcgacagtgcccagggctctgat

SEQ ID NO: 770551 - DNA, 120 bp, Artificial Sequence
  ENSG00000234745_13 (sequence is synthesized)
ttcctcgtgtttcctgatcctgccctgggtctgtagtcatacttctggaaattccttttgggtccaagactaggaggttcctctaagatctcatggccctgcttcctcccagtgccctca

SEQ ID NO: 770552 - DNA, 120 bp, Artificial Sequence
  ENSG00000234745_14 (sequence is synthesized)
caggacattttcttcccacaggtggaaaaggagggagctactctcaggctgcgtgtaagtggtgggggtgggagtgtggaggagctcacccaccccataattcctcctgtcccacgtctc

SEQ ID NO: 770553 - DNA, 120 bp, Artificial Sequence
  ENSG00000234745_15 (sequence is synthesized)
cccggactcagagtctcctcagacgccgagatgctggtcatggcgccccgaaccgtcctcctgctgctctcggcggccctggccctgaccgagacctgggccggtgagtgcgggtcggga

SEQ ID NO: 770554 - DNA, 120 bp, Artificial Sequence
  ENSG00000234745_16 (sequence is synthesized)
gggaaatggcctctgccgggaggagcgaggggaccgcaggcgggggcgcaggacctgaggagccgcgccgggaggagggtcgggcgggtctcagcccctcctcacccccaggctcccact

SEQ ID NO: 770555 - DNA, 120 bp, Artificial Sequence
  ENSG00000234745_17 (sequence is synthesized)
ggggatggcctcccacgagaagaggaggaaaatgggatcagcgctagaatgtcgccctccgttgaatggagaatggcatgagttttcctgagtttcctctgagggccccctcttctctct

SEQ ID NO: 770556 - DNA, 120 bp, Artificial Sequence
  ENSG00000234745_18 (sequence is synthesized)
agacaattaaggaatgacgtctctgaggaaatggaggggaagacagtccctagaatactgatcaggggtcccctttgacccctgcagcagccttgggaaccgtgacttttcctctcaggc

SEQ ID NO: 770557 - DNA, 120 bp, Artificial Sequence
  ENSG00000234745_19 (sequence is synthesized)
cttgttctctgcctcacactcagtgtgtttggggctctgattccagcacttctgagtcactttacctccactcagatcaggagcagaagtccctgttccccgctcagagactcgaacttt

SEQ ID NO: 770558 - DNA, 120 bp, Artificial Sequence
  ENSG00000234745_20 (sequence is synthesized)
ccaatgaataggagattatcccaggtgcctgcgtccaggctggtgtctgggttctgtgccccttccccaccccaggtgtcctgtccattctcaggctggtcacatgggtggtcctagggt

SEQ ID NO: 770559 - DNA, 120 bp, Artificial Sequence
  ENSG00000234745_21 (sequence is synthesized)
gccggtgagtgaccccggcccggggcgcaggtcacgactccccatcccccacgtacggcccgggtcgccccgagtctccgggtccgagatccgcctccctgaggccgcgggacccgccca

SEQ ID NO: 770560 - DNA, 120 bp, Artificial Sequence
  ENSG00000234745_22 (sequence is synthesized)
gaccggcgagagccccaggcgcgtttacccggtttcattttcagttgaggccaaaatccccgcgggttggtcggggcggggcggggctcgggggactgggctgaccgcggggccggggcc

SEQ ID NO: 770561 - DNA, 120 bp, Artificial Sequence
  ENSG00000234745_23 (sequence is synthesized)
ttttcttgtcccactgggggtttcaagccccaggtagaagtgttccctgcctcattactgggaagcagcatgcacacaggggctaacgcagcctgggaccctgtgtgccagcacttactc

SEQ ID NO: 770562 - DNA, 120 bp, Artificial Sequence
  ENSG00000234745_24 (sequence is synthesized)
ttttgtgcagcacatgtgacaatgaaggatggatgtatcaccttgatggttgtggtgttggggtcctgattccagcattcatgagtcaggggaaggtccctgctaaggacagaccttagg

SEQ ID NO: 770563 - DNA, 120 bp, Artificial Sequence
  ENSG00000234776_0 (sequence is synthesized)
gacaggagccaggacccgtgtaggagatggttctcgccatgctgggggctctgcacccccgggctgggctcagcctcttcctccacctcatcctggcagtggcactgcttcgctcccagc

SEQ ID NO: 770564 - DNA, 120 bp, Artificial Sequence
  ENSG00000234776_1 (sequence is synthesized)
gcctcgacccctcctgtctagggcccagcagcgcaagcgggacgggcccgaccttgccgagtattactatgatgcacacctatgacccaaggccctcataaagataccatgtgtgacaaa

SEQ ID NO: 770565 - DNA, 120 bp, Artificial Sequence
  ENSG00000234776_2 (sequence is synthesized)
aagtgcccccacactgagccatccccccattcacaaggaggtggcggtggccttctgggccagggctgagcaccccgacatctcccacaggtctcagcggtctgttcctgaggcattttc

SEQ ID NO: 770566 - DNA, 120 bp, Artificial Sequence
  ENSG00000234776_3 (sequence is synthesized)
gatggtagtatctctcttgtccccttcccctacccatccctgacagtggagacgcccctaagaggtgccccaagtccagccttcaggggcttgtcatcccaaaccacatctgttcaaggg

SEQ ID NO: 770567 - DNA, 120 bp, Artificial Sequence
  ENSG00000234828_0 (sequence is synthesized)
aattcttctgatgcccaaagaagacaggcatatgtgagaagaagcaatcagaagattggcaggatttaggaatctatttgaaatattcattacctattttgaattggtcttaaaaattta

SEQ ID NO: 770568 - DNA, 120 bp, Artificial Sequence
  ENSG00000234828_1 (sequence is synthesized)
aagaaatataaagctggataattaaagataaataataaaggaagaatacaaggtttctatgctgtgaagcaactgagattattatgattttggggcagtgaatttgtttctagaagtttt

SEQ ID NO: 770569 - DNA, 120 bp, Artificial Sequence
  ENSG00000234828_2 (sequence is synthesized)
gttggaactaaggcagaaaggaagaagaacaaatgaccttggaatgaaaaactttaaggacttggagctcacactttaaaaaagaagatcattctaactgcccctcatgactactgaaga

SEQ ID NO: 770570 - DNA, 120 bp, Artificial Sequence
  ENSG00000234828_3 (sequence is synthesized)
ggctatgcctgaaaaagcaaaatgtcctacattagagatcaccaagcaagacttttttcaagaagcaaaaactctcattgcccaacattatgagaaaataaatgagaataaagttcaagg

SEQ ID NO: 770571 - DNA, 120 bp, Artificial Sequence
  ENSG00000234828_4 (sequence is synthesized)
tacttctataaatgtttttagaaagaaacaccaaaaaccgaaatctggcaaatacatacctttggagattgacaaaaaggtaacacgtgatgtggtgcaagaacatcgggccgcactcag

SEQ ID NO: 770572 - DNA, 120 bp, Artificial Sequence
  ENSG00000234828_5 (sequence is synthesized)
aaggatttgctttcccaaggagctttccaaaagcgagcatcttcaggaacccccacaacgaatctccttcaaggaaccacacatttttagtagaagagaaagatgcaggcccatagatct

SEQ ID NO: 770573 - DNA, 120 bp, Artificial Sequence
  ENSG00000234828_6 (sequence is synthesized)
aattacaaaaggacaagttaaattggataaaatcatgactattattgaaccagtgagtaaaaaaatggagacagcaaagcaacagcactttgaggagtccagaaacagaatgttggaatt

SEQ ID NO: 770574 - DNA, 120 bp, Artificial Sequence
  ENSG00000234828_7 (sequence is synthesized)
gtgctgacaaggtctttccgtttggcttgtgactcccgtcgagttagtttctctcaatcatcatcaatatttcgggattattattctaaaacctttaaaacccttattaaaaaggagcga

SEQ ID NO: 770575 - DNA, 120 bp, Artificial Sequence
  ENSG00000234828_8 (sequence is synthesized)
caacctatcaagccagaaccaaaatcacaacccaggataaaaggtactccaaataaaactgataaacttgacagtaaagttaaaagaattggaccacacatagaaatcttccaagtgttc

SEQ ID NO: 770576 - DNA, 120 bp, Artificial Sequence
  ENSG00000234828_9 (sequence is synthesized)
cgagaaagaaaaaaattcatgattaccccaaaattgattagaatggtcaccgtcatgcaggcacatgtcaggggatggcttgaacggaaaagattgcaaagagtaatgaccaaggctttg

SEQ ID NO: 770577 - DNA, 120 bp, Artificial Sequence
  ENSG00000234828_10 (sequence is synthesized)
gatcatggaccagatatgaaagcagttattaacatgtatggcagactaatccaccgtgttagatatcgacgtggtctttggaggacaagacaaattctcaacttagcagagctagaggag

SEQ ID NO: 770578 - DNA, 120 bp, Artificial Sequence
  ENSG00000234828_11 (sequence is synthesized)
tggatggaccgaaaaaaattctatgaaataatgtttgctaagagggaagattggccaaaaattgaaagaaatgagctccccaatttcttcagtgactgtggtcatttcccaactcagaaa

SEQ ID NO: 770579 - DNA, 120 bp, Artificial Sequence
  ENSG00000234828_12 (sequence is synthesized)
caagttgatgatacttgggacctggtccatcaagatggcaaagaaaaatattctgaactaatcaaaaagtccaaagcaattgaaatgttatttacactctatcctcctgaaggtgcacat

SEQ ID NO: 770580 - DNA, 120 bp, Artificial Sequence
  ENSG00000234828_13 (sequence is synthesized)
gtgcctgacagtacactactcaagtcgacttggttgagacccatagtaaatggggaagaaggttatagatatatagtaaatggacatccagcactcaaacgagctaacatccgggttgtt

SEQ ID NO: 770581 - DNA, 120 bp, Artificial Sequence
  ENSG00000234828_14 (sequence is synthesized)
ggaaagttggtggcccgatccataagagaaaggaaaatgagacaacattataagtcatgtaaagttgaatgatgtttccaacatattattacctgtaatagttaaacttctctacccaaa

SEQ ID NO: 770582 - DNA, 120 bp, Artificial Sequence
  ENSG00000234828_15 (sequence is synthesized)
atagatatatagttttccacctgaaattatcagaaggtgacctatatctatttgtgtttgttgtttagagtctatttgcactttgttaaaataaacaaattaaaaggaaatatgcaagtg

SEQ ID NO: 770583 - DNA, 120 bp, Artificial Sequence
  ENSG00000234828_16 (sequence is synthesized)
aatgaccttggaatgaaaaactttaagttactccacctaaccactatgaatgatagtcttgtctcaccaaccccagcccatcatctgttggacttggagctcacactttaaaaaagaaga

SEQ ID NO: 770584 - DNA, 120 bp, Artificial Sequence
  ENSG00000234828_17 (sequence is synthesized)
aatattttgcatccttcaatccaatcgagttgacactcagtattaaccatcacaagctccaagaaggttaagagacattaacagactgaaaaacaacctgcagcgtatagctgcccagct

SEQ ID NO: 770585 - DNA, 120 bp, Artificial Sequence
  ENSG00000234828_18 (sequence is synthesized)
gtatagctgcccagctatgcccagcctagaccagatgaaccccacctgactcacatgagctaactaaatgtttatcattgatatgataaacacatatgagatggcaaagaaaaatattct

SEQ ID NO: 770586 - DNA, 60 bp, Artificial Sequence
  ENSG00000234828_19 (sequence is synthesized)
gaagaagaacaaatgaccttggaatgaaaaactttaaggctaatccatcaagacgtgtca

SEQ ID NO: 770587 - DNA, 120 bp, Artificial Sequence
  ENSG00000234828_20 (sequence is synthesized)
ggaatgaaaaactttaaggctaatccatcaagacgtgtcaacaaagagatcatccctctatgtgttccagggtcaaatgtgcaaaagttggacagtatttatttgttctaacgtcctaca

SEQ ID NO: 770588 - DNA, 120 bp, Artificial Sequence
  ENSG00000234828_21 (sequence is synthesized)
gctatgcctgaaaaagcaaaataactcttgccctttccgtgtgaggacagtgcttcttttggcttgaattggaaaattaatgtgaaccgggctccattcctcaggacctcattaccctaa

SEQ ID NO: 770589 - DNA, 120 bp, Artificial Sequence
  ENSG00000234829_0 (sequence is synthesized)
gttcaaggttacccatctcaagtagcctagcaacatttgcaacatcccaatggccctgtccttttctttactgatggccgtgctggtgctcagctacaaatccatctgttctctaggctg

SEQ ID NO: 770590 - DNA, 120 bp, Artificial Sequence
  ENSG00000234829_1 (sequence is synthesized)
tgatctgcctcagacccacagcctgggtaataggagggccttgatactcctggcacaaatgggaagaatctctcctttctcctgcctgaaggacagacatgactttggacttccccagga

SEQ ID NO: 770591 - DNA, 120 bp, Artificial Sequence
  ENSG00000234829_2 (sequence is synthesized)
ggagtttgatggcaaccagttccagaagactcaagccatctctgtcctccatgagatgatccagcagaccttcaatctcttcagcacagaggactcatctgctgcttgggaacagagcct

SEQ ID NO: 770592 - DNA, 120 bp, Artificial Sequence
  ENSG00000234829_3 (sequence is synthesized)
cctagaaaaattttccactgaactttaccagcaactgaataacctggaagcatgtgtgatacaggaggttgggatggaagagactcccctgatgaatgaggactccatcctggctgtgag

SEQ ID NO: 770593 - DNA, 89 bp, Artificial Sequence
  ENSG00000234829_4 (sequence is synthesized)
ctctctttttcaacaaacttgcaaaaaatattaaggaggaaggattgaaaactggttcaacatggcaatgatcctgattgactaataca

SEQ ID NO: 770594 - DNA, 120 bp, Artificial Sequence
  ENSG00000234829_5 (sequence is synthesized)
aactggttcaacatggcaatgatcctgattgactaatacattatctcacactttcatgagttcctccatttcaaagactcacttctataaccaccacgagttgaatcaaaattttcaaat

SEQ ID NO: 770595 - DNA, 120 bp, Artificial Sequence
  ENSG00000234829_6 (sequence is synthesized)
gttttcagcagtgtaaagaagcgtcgtgtatacctgtgcaggcactagtactttacagatgaccatgctgatgtctctgttcatctatttatttaaatatttatttaattatttttaaga

SEQ ID NO: 770596 - DNA, 80 bp, Artificial Sequence
  ENSG00000234829_7 (sequence is synthesized)
tcatgtgtacctttacattgtggtgaatgtaacaatatatgttcttcatatttagccaatatattaatttcctttttcat

SEQ ID NO: 770597 - DNA, 120 bp, Artificial Sequence
  ENSG00000234906_0 (sequence is synthesized)
agacaaaggatgggggttgtggctgtggagcggaagtgggtctcaaccactataaatcctctctgtgcccgtccggagctggtgaggacagcctgccagagtctggtctctggacactat

SEQ ID NO: 770598 - DNA, 120 bp, Artificial Sequence
  ENSG00000234906_1 (sequence is synthesized)
gggcacacgactcctcccagctctgtttcttgtcctcctggtattgggatttgaggtccaggggacccaacagccccagcaagatgagatgcctagcccgaccttcctcacccaggtgaa

SEQ ID NO: 770599 - DNA, 120 bp, Artificial Sequence
  ENSG00000234906_2 (sequence is synthesized)
ggaatctctctccagttactgggagtcagcaaagacagccgcccagaacctgtacgagaagacatacctgcccgctgtagatgagaaactcagggacttgtacagcaaaagcacagcagc

SEQ ID NO: 770600 - DNA, 120 bp, Artificial Sequence
  ENSG00000234906_3 (sequence is synthesized)
ttttactgaccaagttctttctgtgctgaagggagaggagtaacagccagaccccccatcagtggacaaggggagagtcccctactcccctgatcccccaggttcagactgagctccccc

SEQ ID NO: 770601 - DNA, 120 bp, Artificial Sequence
  ENSG00000234906_4 (sequence is synthesized)
ttcccagtagctcttgcatcctcctcccaactctagcctgaattcttttcaataaaaaatacaattcaagttgcttctcatggatggcactgcttttctgaggactcaagggccaagatg

SEQ ID NO: 770602 - DNA, 120 bp, Artificial Sequence
  ENSG00000234906_5 (sequence is synthesized)
gaggggctgactcagtccagccaacatttaatgagcacctactttatgtatggagctctaacccatgggtccatgggaataaagcagtgaatagtaacaataaataatcgtaacagcaat

SEQ ID NO: 770603 - DNA, 120 bp, Artificial Sequence
  ENSG00000234906_6 (sequence is synthesized)
tcagatctcaccctctttctgccgtacttcctcatctcctacgtgtggatgatgatattgtgccctgtgcatgttcttcgtcaccaaaagtgcctctctcatagagcaggtctctggaca

SEQ ID NO: 770604 - DNA, 120 bp, Artificial Sequence
  ENSG00000234906_7 (sequence is synthesized)
agaatgttggaaagtgaggcccaagaagggggctgtgtccaagtccatgcatgggaaacttgactgggacaccgagctcacacagagcaggatctcagtcccccccaccagagtggggcg

SEQ ID NO: 770605 - DNA, 120 bp, Artificial Sequence
  ENSG00000234906_8 (sequence is synthesized)
acctgcccgctgtagatgagaaactcaggtagcacctgcccctggagaaatggggtctggcccataccaccgactgcatccaggacccagaagttcaggccccagcccctcctccctcag

SEQ ID NO: 770606 - DNA, 80 bp, Artificial Sequence
  ENSG00000234965_0 (sequence is synthesized)
gtcctcccggcctccggctcgcgctcgcgcttcggctcgcgttgctgctggcgcggccgccgtcgggccgcgcgggagcc

SEQ ID NO: 770607 - DNA, 120 bp, Artificial Sequence
  ENSG00000234965_1 (sequence is synthesized)
cccgaggcgcagggtcccgcggcgcccggcacgacagccccggaggggggcgaccgctgccgcggctactacgacgtgatgggccagtgggacccgcccttcaactgcagctccggagcc

SEQ ID NO: 770608 - DNA, 120 bp, Artificial Sequence
  ENSG00000234965_2 (sequence is synthesized)
tacagcttctgctgcggcacgtgcggctaccgcttctgctgccacgacgggccgcggcgcctcgaccagagccgctgttccaactacgacacgccggcctgggtccagacaggccggccg

SEQ ID NO: 770609 - DNA, 120 bp, Artificial Sequence
  ENSG00000234965_3 (sequence is synthesized)
cgcgacaccgcagcgccccgggaccccggccgcgagcgcagccatacggccgtctacgctgtgtgcggcgtcgcagcgctgctggtgctggccggcatcggggcgcgcctgggactggag

SEQ ID NO: 770610 - DNA, 120 bp, Artificial Sequence
  ENSG00000234965_4 (sequence is synthesized)
ctgggactggagagggcgcacagcccgcgcgcgcggcgcacagtgaccagggcgctgacagagcttctgaagcagccgggcccccaggagccactgcctcccaccctgggcccacccctg

SEQ ID NO: 770611 - DNA, 120 bp, Artificial Sequence
  ENSG00000234965_5 (sequence is synthesized)
aagcgcctcaacaacgcgccccgggggtcggccgccccggggcccccgcgcggcccgcggctgcagggcggcggcagcctgacgctgcagccagactacgccaagtacgccacgttcaag

SEQ ID NO: 770612 - DNA, 120 bp, Artificial Sequence
  ENSG00000234965_6 (sequence is synthesized)
ccgcagaggccgccccgcgggacttctgtcagcgtttccccgccctcgagccgtccccgcggcaacccccggcgcgggctccgcgaccatccccggacttgcctgcgccgctggacgcct

SEQ ID NO: 770613 - DNA, 80 bp, Artificial Sequence
  ENSG00000234965_7 (sequence is synthesized)
gggcccctatgccgcctggacctccagtcgcccggcccggcccgccccgctcagccacccgacggctcgggccttccagg

SEQ ID NO: 770614 - DNA, 120 bp, Artificial Sequence
  ENSG00000234965_8 (sequence is synthesized)
taccccggcgacccgggcacgcggcccggcgccagttcagtgtgaagatgcctgagaccttcaacccgcagctccccggcctttacggcagcgcgggccgcgggtcccggtacctaagga

SEQ ID NO: 770615 - DNA, 120 bp, Artificial Sequence
  ENSG00000234965_9 (sequence is synthesized)
ccaatagcaagaccgaggtcaccgtgtgaagcggggccgcggtgccctcgaggcatgggctggggtcctgtctgcccgtcggagcctcaggccacagggagaggagcgcctgccgtaagg

SEQ ID NO: 770616 - DNA, 120 bp, Artificial Sequence
  ENSG00000234965_10 (sequence is synthesized)
ccagctcttctgtctgcctcaacggcagtggtgtcttggagcctgcaggccgcgggttcgtcttgtaaataagcccttttatgtggttcctgcccctgagaataaagaagccccagcgtg

SEQ ID NO: 770617 - DNA, 120 bp, Artificial Sequence
  ENSG00000235034_0 (sequence is synthesized)
atgcagccagaggtggagcccgtgtgcttccctgccatgggcagccccaccatgcacaggaaggcaggagccctccttatggacctggagaccccagaggagatgcaggctcggagcctg

SEQ ID NO: 770618 - DNA, 120 bp, Artificial Sequence
  ENSG00000235034_1 (sequence is synthesized)
ggcaggcccatcaaatcctcaaagcagtacctgcggcaggtcattgcagagtacgaggcactggaccgagaactcccgtgcatccggaagttccccacaccaccagcttcccagcccctc

SEQ ID NO: 770619 - DNA, 120 bp, Artificial Sequence
  ENSG00000235034_2 (sequence is synthesized)
tgcctctgcatggagaccttgcccgaggaggattttacccacctggaggtgctgcaagccctggaggcccagttaccaggggccatggagagcgggcgcgtgagcagcatccgctttgag

SEQ ID NO: 770620 - DNA, 120 bp, Artificial Sequence
  ENSG00000235034_3 (sequence is synthesized)
gtggctcatcgcggtcacggacttccagacgcgctcgcgcttgctgcgctccgggctcagtccccgcgggcttgcgcaccagatcgtgcgccacgacgacctcctgctgggcgactaccg

SEQ ID NO: 770621 - DNA, 120 bp, Artificial Sequence
  ENSG00000235034_4 (sequence is synthesized)
acgacgacctcctgctgggcgactaccgcctgcacctgcgccgctccctggtccggcggcgcatgctcgaggccctgggggcggagccgaacgaggaggcctgacgcccgggcgggcccc

SEQ ID NO: 770622 - DNA, 120 bp, Artificial Sequence
  ENSG00000235034_5 (sequence is synthesized)
tggggccacccacccggagccccggaggacagggggcgttgccttcccaggaaggaggcggggccggctcgagggggtggatactgtgagtttaattataaagaatgacctggtacaaaa

SEQ ID NO: 770623 - DNA, 120 bp, Artificial Sequence
  ENSG00000235098_0 (sequence is synthesized)
aatggggggctccagttggcctgggacacggctgggggcaggccagaggcctccacagtggatgtaggatccctgctcccccccagatggactcccagaggcctgagcccagagaggagg

SEQ ID NO: 770624 - DNA, 120 bp, Artificial Sequence
  ENSG00000235098_1 (sequence is synthesized)
aggaggaggaacaggaactgcggtggatggagctggactccgaagaggccctgggaaccaggacagaggggcctagtgttgtccagggctgggggcacctgctccaggccgtgtggaggg

SEQ ID NO: 770625 - DNA, 120 bp, Artificial Sequence
  ENSG00000235098_2 (sequence is synthesized)
gccctgcaggcctggtgacgcagctgctgcggcaaggtgccagcgtggaggagagggaccacgcaggccggaccccgctccacctggccgtgctgcggggccacgcgcccctggtgcgtc

SEQ ID NO: 770626 - DNA, 80 bp, Artificial Sequence
  ENSG00000235098_3 (sequence is synthesized)
ggcggggcgcaccgcgctgcacgaggccgcctggcacggacactcgcgggtggccgagctgctgctgcagcgcggggcct

SEQ ID NO: 770627 - DNA, 80 bp, Artificial Sequence
  ENSG00000235098_4 (sequence is synthesized)
gcctcggcggcggctcgctccgggacgggcctcacgccgctgcactgggccgctgccctgggccacacgctgctggccgc

SEQ ID NO: 770628 - DNA, 120 bp, Artificial Sequence
  ENSG00000235098_5 (sequence is synthesized)
gcgcgggggccacagcgctgggtctggcggccgccctaggccgctcccaggacattgaggtgctgctgggccacggggcagacccaggcatcagggacaggcatggccgctctgcgctgc

SEQ ID NO: 770629 - DNA, 120 bp, Artificial Sequence
  ENSG00000235098_6 (sequence is synthesized)
acagggctgccgcccgaggacacctgcttgccgtccagttgctggtcacccagggggccgaggtggatgcgcgggacaccctgggcctcacacccctgcatcacgcctctcgggaaggcc

SEQ ID NO: 770630 - DNA, 120 bp, Artificial Sequence
  ENSG00000235098_7 (sequence is synthesized)
acgtggaggttgccggctgcctgctggacaggggtgcccaggtggatgctaccggctggctccgaaagacccccctacacctggctgcagagcgagggcatgggcctaccgtggggcttc

SEQ ID NO: 770631 - DNA, 120 bp, Artificial Sequence
  ENSG00000235098_8 (sequence is synthesized)
tgctgagccgaggggccagccccactctgcggacgcagtgggccgaggtggcccagatgcctgagggggacctgccccaggcgctgcctgaacttggagggggggagaaggagtgtgagg

SEQ ID NO: 770632 - DNA, 120 bp, Artificial Sequence
  ENSG00000235098_9 (sequence is synthesized)
gcatagagtccacgggctgagccagacagcaggctccaggctccaccgccccagtgatttccaggctctctggctgaggctgcctgcctggaggggacatcagggaagaggcttccggag

SEQ ID NO: 770633 - DNA, 120 bp, Artificial Sequence
  ENSG00000235098_10 (sequence is synthesized)
gaggggatgggagaaagtaggggatgtggcttgagctgcagtcacaggccttggctggaccagggatggcccccagctcccaggagggcccactgaccctgcagctccagccttctccat

SEQ ID NO: 770634 - DNA, 120 bp, Artificial Sequence
  ENSG00000235098_11 (sequence is synthesized)
ccgaactggggccctggcagccagcaggggagggagtatgttggacagggggctgtgcccgaaggcagggccttcctaagtggctgagtaaacagcgtcaggtggcctcagcctggccca

SEQ ID NO: 770635 - DNA, 120 bp, Artificial Sequence
  ENSG00000235098_12 (sequence is synthesized)
ggggaccagctgtgttctcccaccccctgcaaggctgaagctgccaccattcagcttttcagcagcagacactccaccccaaagcctgcagaagggattttgtgaagagggtcaccaggc

SEQ ID NO: 770636 - DNA, 120 bp, Artificial Sequence
  ENSG00000235098_13 (sequence is synthesized)
aggaagtaaaaccaaagacaggcaggcagcctggcgctaggcccgaaaccaggcctgcgcctgcctggcctaaacccagtagttgaaaatcaattcataacttagaaaccgatgttattc

SEQ ID NO: 770637 - DNA, 120 bp, Artificial Sequence
  ENSG00000235098_14 (sequence is synthesized)
cagacattgtatagaagaacatttgtgaaactccctgccgtgttctgtttctctctgaccgccggtgcatgcagcccctgtcacgtaccgcctgcttgctcaaatcaatgacgacccttt

SEQ ID NO: 770638 - DNA, 71 bp, Artificial Sequence
  ENSG00000235098_15 (sequence is synthesized)
tcacgtaccgcctgcttgctcaaatcaatgacgaccctttcatgtgaaatcttcggattttaaggcagtag

SEQ ID NO: 770639 - DNA, 120 bp, Artificial Sequence
  ENSG00000235098_16 (sequence is synthesized)
tggagtccttggtgaatcttttgtcctgtccagcatttacagaaaggaaggccagaacctcaccctgccctcctccccagcctggaatcgggaggaggggccggcacccacccctgggtg

SEQ ID NO: 770640 - DNA, 120 bp, Artificial Sequence
  ENSG00000235098_17 (sequence is synthesized)
ggcttagccagctgggacaggagtgggtgagggggctgcccgagggtgggccccatggagagccctgtgaggccttccaggggcacatcggggtacatccaaggctgcgcttcctggggg

SEQ ID NO: 770641 - DNA, 120 bp, Artificial Sequence
  ENSG00000235106_0 (sequence is synthesized)
ccgctgcccgcatctccgaggcccgcgacgagcggggcctcacgggagctggatgctcggagcagcaaggcggccctgggggccccttccggtcccggggctgacgcctggcggcgtctc

SEQ ID NO: 770642 - DNA, 120 bp, Artificial Sequence
  ENSG00000235106_1 (sequence is synthesized)
ggcgtctccgggaacccgcgccctttcaagcgccgctggctcctgtttcacagatggagaccctgaagccccaacaagcagcctccccagcacctcccagtgactgaaaaagctggcact

SEQ ID NO: 770643 - DNA, 120 bp, Artificial Sequence
  ENSG00000235106_2 (sequence is synthesized)
gggcgcccgtctcactctccacccagctcccaggctgccccacgggacgtaagtagctcgatctaggccgctgacccccagagacttgatgctgcgctgcagactgccgccgctgccggg

SEQ ID NO: 770644 - DNA, 120 bp, Artificial Sequence
  ENSG00000235106_3 (sequence is synthesized)
gcgcttgacttcccctctcctgacagcacgttcgttcctttgcagcagcacctttggggagagacgagacctgaacaaacgctggggctggatccccagggtgggtcagaacagccgttg

SEQ ID NO: 770645 - DNA, 120 bp, Artificial Sequence
  ENSG00000235106_4 (sequence is synthesized)
ccctgaaagctggcccggacagatgcgtgcggggcgtgccaccggagctccttccagcttgcgtctggggccaccatgtcccttcctcagggcactggatccatctcttcaagctcagtg

SEQ ID NO: 770646 - DNA, 120 bp, Artificial Sequence
  ENSG00000235106_5 (sequence is synthesized)
gtccaggccatggtggcagaatcaccccccagggtgtgacgcctcgtccctgtcaattccacacagctgcacccggaagagctgtggccgggcgccgctctgacctgtgtgcggtcccct

SEQ ID NO: 770647 - DNA, 120 bp, Artificial Sequence
  ENSG00000235106_6 (sequence is synthesized)
gaatgggtctcaggtgtcttcagaatggtgaggccgcctcatttcctcaccacacaaccctcctgaggacgttgcctgcaaatgggcggaattcctaatttctaccattcagttaaacga

SEQ ID NO: 770648 - DNA, 120 bp, Artificial Sequence
  ENSG00000235106_7 (sequence is synthesized)
gggatccttaagccccaaagctgggaaagctgtccgttaatttagtgcgcgtgggccgtctcagaacagcagggttcccaggagtccagcgggacgggggaggggatgagtggccgtgtc

SEQ ID NO: 770649 - DNA, 120 bp, Artificial Sequence
  ENSG00000235106_8 (sequence is synthesized)
cccctggcagagaaggccttgtctgaaggctacgcccgcctccggtacagggacacctccttgctcatctggcagcagcaacagcagaagttggagtcggtgccacctgggacgtacctg

SEQ ID NO: 770650 - DNA, 120 bp, Artificial Sequence
  ENSG00000235106_9 (sequence is synthesized)
gtactcacagtatggaaatgaggccatcttggtccgagacaaaaacaagctcgaggtctctagggacacagggcagtccaagttttgcacaattatgtaattccgatgtgagcacctgaa

SEQ ID NO: 770651 - DNA, 120 bp, Artificial Sequence
  ENSG00000235106_10 (sequence is synthesized)
cccaggaccacactttgaggaaaacagacctgagtttcattcagttgtcttgttgatttccaatccttgctggaagattttgaataatgaacgtgaagatcaaactgtggtgtaagaacc

SEQ ID NO: 770652 - DNA, 120 bp, Artificial Sequence
  ENSG00000235106_11 (sequence is synthesized)
caagaagcgcagaattggcccccgaacccctcagcacagccgcggtgtgactggtgcacaggacacttcccctctagagtcccctccgtggtcagctgttgtgacatttgaattctccag

SEQ ID NO: 770653 - DNA, 120 bp, Artificial Sequence
  ENSG00000235106_12 (sequence is synthesized)
gtgctgctagggacagcataggcccgggcactgctagatgcttggtttaaaccaggccaagagtaaccctcccatccccattacaaaccaccttttcaagttttttaggttttagttttt

SEQ ID NO: 770654 - DNA, 120 bp, Artificial Sequence
  ENSG00000235106_13 (sequence is synthesized)
tgtttttagcataaatggcggagtagcagcagcatctcaccaggagctttgtcgcattacattttgtattttgcttttttgagacggggtctcactctgttacccaggctggaatacagt

SEQ ID NO: 770655 - DNA, 120 bp, Artificial Sequence
  ENSG00000235106_14 (sequence is synthesized)
ggcacaatcacagctcactgtaggctctatctcctgggctcaggtgatcctcccaaactcagcctcccaggtagctgtggctccaggcgaactactgtatatagagacagggtttcccta

SEQ ID NO: 770656 - DNA, 90 bp, Artificial Sequence
  ENSG00000235106_15 (sequence is synthesized)
ggtcaccgcaccaagcccgcatttatattttgagttaccaaaatgatcatcatctgtgaagcatcatggtagcttccaagcatttgcggc

SEQ ID NO: 770657 - DNA, 120 bp, Artificial Sequence
  ENSG00000235106_16 (sequence is synthesized)
catctgtgaagcatcatggtagcttccaagcatttgcggcccactggccagtgcatccaaaacacattcaggaaacccgagagttgtaagttgcacatgtgtggcctacagtgacttcca

SEQ ID NO: 770658 - DNA, 120 bp, Artificial Sequence
  ENSG00000235106_17 (sequence is synthesized)
tgtagtaacagggctgagcaaggcaggctctccaccagacttaaagcattcaaccactctgcccccaggccgacactgacatgtgttcactgtcgctgccacagctggccacctgtgttc

SEQ ID NO: 770659 - DNA, 120 bp, Artificial Sequence
  ENSG00000235106_18 (sequence is synthesized)
agtctccatgaaggattcaccttctgctctcactgacatctccttggctacacaaatgtgcaggtgtctcttgtcaaagctaatttttcttttctaaataaacatcctttaatacactcc

SEQ ID NO: 770660 - DNA, 120 bp, Artificial Sequence
  ENSG00000235106_19 (sequence is synthesized)
ttgctaaagactgcaatacacaaaggcataaagcaaagcacaagtgctctccgtggggagaacccggccggcagctggggatgcgtcccacagctcctcagcatgcacacacggtcacgt

SEQ ID NO: 770661 - DNA, 120 bp, Artificial Sequence
  ENSG00000235106_20 (sequence is synthesized)
gattctgacggcctcatcctgcaccatgcctcttgtatccgccattttctttcttgctcaactgtacagactgggcattcacttaatgcttttctttttttttaagagagtctcactctg

SEQ ID NO: 770662 - DNA, 120 bp, Artificial Sequence
  ENSG00000235106_21 (sequence is synthesized)
ctgactcgcagctctcccgtgagcccacagacgggcacagtgacagcatccaggttgtcatctgtgcaaacagcatgttctgaatgtgcctgtactctgttcgtgcttctctttgcagct

SEQ ID NO: 770663 - DNA, 120 bp, Artificial Sequence
  ENSG00000235106_22 (sequence is synthesized)
gtgcaagttcattcgcaaacgtcctagaagtggaactgctgggtcaaagtgcattccccaaatgtcctgccagaggcctggtcggcagcagcctcctgcacagcccgagtcccttctgcg

SEQ ID NO: 770664 - DNA, 120 bp, Artificial Sequence
  ENSG00000235106_23 (sequence is synthesized)
agagtcctggcttgtttgcagcctgcagctgggagatttgaagtcagacttccaggattgccgcatggagctgcagagggagtgagcatggggctggaggacctgccccgccggctgaca

SEQ ID NO: 770665 - DNA, 120 bp, Artificial Sequence
  ENSG00000235106_24 (sequence is synthesized)
ctcccacagcaaggcgggcccgccaaggaagcactccacatccgctaggtagggtttgtctgcatcttttcagttcttcagtttaagtcctgcctgggaagaaagcaaactccagaggca

SEQ ID NO: 770666 - DNA, 120 bp, Artificial Sequence
  ENSG00000235106_25 (sequence is synthesized)
aatctggaatgcctgtgtgccaccttctcaccgcaccacagactcccctgaggacgggttgtggcggggttggccccaagcatgggaggcagcgcagacatgcagaatggggtctgaggt

SEQ ID NO: 770667 - DNA, 120 bp, Artificial Sequence
  ENSG00000235106_26 (sequence is synthesized)
cacgttgcaacgctggcaggatgtgtgctcaagggccagtctctgcaggggtcagggcgtgtgggccacgcacaaggagctggcactaagccgcttaggctgcaggaagacaccatctgc

SEQ ID NO: 770668 - DNA, 120 bp, Artificial Sequence
  ENSG00000235106_27 (sequence is synthesized)
ctggggcggacaaggccccatgtccgtcctcaaggaggctggtctggatgagaagggtcacagtctggccaggagtgtcaccgtgccccctgaccccatctggggtcgggctggacaggt

SEQ ID NO: 770669 - DNA, 120 bp, Artificial Sequence
  ENSG00000235106_28 (sequence is synthesized)
cctcaggcctagacgtgggcccagccagaaccttctcccctggcatgtctcttccaggcctagttccagagctgtcattcttcggcgagccgcgctgcacgccagcctccagtctggcag

SEQ ID NO: 770670 - DNA, 120 bp, Artificial Sequence
  ENSG00000235106_29 (sequence is synthesized)
ttaaacctcactatgaaaatctgcttttgggattttatttgcatttccattagactgagcgcatcacaagccacttcaggatagactgaggtgcagagggaggggacaagcggccaggtt

SEQ ID NO: 770671 - DNA, 120 bp, Artificial Sequence
  ENSG00000235106_30 (sequence is synthesized)
gactagaagagcacagaacctggctgtctcgaagagggcagcttgttccagggaaccaatgaactgtcagtaaaggggattgtggcttcctagtgaggcaagaaatgatgctcccttcat

SEQ ID NO: 770672 - DNA, 120 bp, Artificial Sequence
  ENSG00000235106_31 (sequence is synthesized)
cctgccagggctcaggacaagagctacttaatggtttgattattattattttttaagagatgttgtccaggctggagtgcagtgatgcaatcatggcttactgcagcctcaaactcctgg

SEQ ID NO: 770673 - DNA, 120 bp, Artificial Sequence
  ENSG00000235106_32 (sequence is synthesized)
ctcctgcctcagcctcccaaagtgctgtgatcacaggcacgagccactgcatcctgcctttaaatggttttttggggccccttttggatgctctgggtgtttttgccaagagttacagga

SEQ ID NO: 770674 - DNA, 120 bp, Artificial Sequence
  ENSG00000235106_33 (sequence is synthesized)
agagttacaggatgtcaagtgtggggagctcagcacccttgctgtggaccagtgaaggctgttccagaccaggtgcttccagacatttccaggctccaggagagaggctgggagccccca

SEQ ID NO: 770675 - DNA, 89 bp, Artificial Sequence
  ENSG00000235106_34 (sequence is synthesized)
aaaacaaaacaaatgccccaggagaagggtccatgattaccagaaacatcaaagagtactttctaccatttttattctgttgtgttgag

SEQ ID NO: 770676 - DNA, 120 bp, Artificial Sequence
  ENSG00000235106_35 (sequence is synthesized)
caaagagtactttctaccatttttattctgttgtgttgaggccagcattgcaataaacaagctaaactacttacattggactcattttcagtaactgacatttacaggaatatactagaa

SEQ ID NO: 770677 - DNA, 120 bp, Artificial Sequence
  ENSG00000235106_36 (sequence is synthesized)
acggcactaaaaagtttaagaaaagttacggtaaacttgcatgcacatcatacagaaaagtaacattttaaatataaaaaagaaaaacttcctggaagcattatgccagtattaaggaac

SEQ ID NO: 770678 - DNA, 120 bp, Artificial Sequence
  ENSG00000235106_37 (sequence is synthesized)
agtgctactctggatgtgacaaattctgtatgtgggtgttactctttcccaaaagactgtcagaggcgtgagtgctgcaaaagaacaacaacaaaaacaaacacacaaaaaaatgtgtct

SEQ ID NO: 770679 - DNA, 120 bp, Artificial Sequence
  ENSG00000235106_38 (sequence is synthesized)
tacagtttgtaagcaagatgacactgcccaacacaaagaggggtctggagttcagttcacgcccgaagcctgccccctcggcctccaggggtcattcagagtgttctcaaatccaattcc

SEQ ID NO: 770680 - DNA, 120 bp, Artificial Sequence
  ENSG00000235106_39 (sequence is synthesized)
gacacacgacttgtcactactcctctccccttgaaaaaagcatgttagaagctgccctacaggtctcagcagtgggacaatctaattgaatcaccgcagccttctaatacagaagaaacg

SEQ ID NO: 770681 - DNA, 120 bp, Artificial Sequence
  ENSG00000235106_40 (sequence is synthesized)
gacgtgactgtcaccctcagcccgccagcaagggcgctgaggaagtcattaatccttcgaaactctgaaaagaaaccagtgttgaagtctggacagaaagccttaaaaaagtgacagcac

SEQ ID NO: 770682 - DNA, 120 bp, Artificial Sequence
  ENSG00000235106_41 (sequence is synthesized)
caatgcagctgctcagtgtacccgccgtgggctgtcagggtcagtggcttctttctagatgaaaggagcagaggcgagccgacgccaccgtcacagagaaccagccgagaaggaaaggcc

SEQ ID NO: 770683 - DNA, 120 bp, Artificial Sequence
  ENSG00000235106_42 (sequence is synthesized)
ccacgatgctcctgctgcgctgcccccacagccggccgctcccccgacggctcacacaggcagcacctcactgccctgtggctggaggggcattgcaaggagcgccccccagccccaggc

SEQ ID NO: 770684 - DNA, 120 bp, Artificial Sequence
  ENSG00000235106_43 (sequence is synthesized)
acccccggcttagggtgtacgtatcacccagccctgtgctggcagcacgttaccaaccagcctgcgtgaagacctgtcaactgtcgtgtgtgaattccttaaattcggtttaaatagtcc

SEQ ID NO: 770685 - DNA, 120 bp, Artificial Sequence
  ENSG00000235106_44 (sequence is synthesized)
attaaagatctgtttagaaaatacctttgaaaacgagggtaactttaaaaaatggaaactttcaaatccatttatatttttattataaacaaaacttaattaaaagtttaacaaactggc

SEQ ID NO: 770686 - DNA, 120 bp, Artificial Sequence
  ENSG00000235106_45 (sequence is synthesized)
tggaggtttcaggagctcaagagctcgtctaagaacatggagctcatcaggaggtaagccacactcagacgtgggcctgctcgatgctcaaacccctactgctgacaccccccacccccc

SEQ ID NO: 770687 - DNA, 120 bp, Artificial Sequence
  ENSG00000235109_0 (sequence is synthesized)
acgcatttccggcctttgcggttgatcggtcattggggtgctgcagccccgccacctgttccgtagcttgccggtgccccgaaggtgtcttctcctaaggaagattaaatcagaaaattt

SEQ ID NO: 770688 - DNA, 120 bp, Artificial Sequence
  ENSG00000235109_1 (sequence is synthesized)
taaatcacagttatccctttacttaaagccagagtaagccttccaaattaaccccaggaatggcttcaacagaggaacagtacgatcttaagattgtgaaagtggaggaagaccctatct

SEQ ID NO: 770689 - DNA, 120 bp, Artificial Sequence
  ENSG00000235109_2 (sequence is synthesized)
gggaccaagaaacccaccttcgagggaacaacttttctggccaagaagcctcccgacaactttttaggcagttttgttaccaagagactcctggtccccgagaagctctgagccggctcc

SEQ ID NO: 770690 - DNA, 120 bp, Artificial Sequence
  ENSG00000235109_3 (sequence is synthesized)
gagaactctgtcatcagtggctaaggccagaaatccacaccaaagagcaaatcttggagctgctggtgctggagcaattcctgactatcctgcctgaggagctccaggcctgggtgcggg

SEQ ID NO: 770691 - DNA, 120 bp, Artificial Sequence
  ENSG00000235109_4 (sequence is synthesized)
agcaccatccggagagtggggaggaggctgtggctgtagttgaagatctggaacaagagcttagtgagccagggaaccaggctccagaccatgaacatggacattctgaagtgctcttgg

SEQ ID NO: 770692 - DNA, 120 bp, Artificial Sequence
  ENSG00000235109_5 (sequence is synthesized)
aggatgtggaacatctgaaggtcaagcaggaaccaacagacatacagcttcagcctatggtgacacagctcagatatgaatctttttgcctccaccaatttcaagaacaagatggtgaaa

SEQ ID NO: 770693 - DNA, 120 bp, Artificial Sequence
  ENSG00000235109_6 (sequence is synthesized)
gtatacctgagaaccaggagttggcatcaaagcaagaaatcttaaaagaaatggaacatttgggggatagcaaactccaaagagatgtatctttggattctaagtacagagaaacttgta

SEQ ID NO: 770694 - DNA, 120 bp, Artificial Sequence
  ENSG00000235109_7 (sequence is synthesized)
aacgagacagcaaggcagaaaagcagcaggcacattccactggagagagacgccacaggtgcaatgaatgtgggaaaagcttcactaagagttcagtactcattgagcaccagagaatcc

SEQ ID NO: 770695 - DNA, 120 bp, Artificial Sequence
  ENSG00000235109_8 (sequence is synthesized)
acactggggagaagccatatgaatgtgaagaatgtgggaaggccttcagccggaggtcaagcctgaatgaacatcggcggagccacactggagagaaaccctatcaatgtaaggagtgtg

SEQ ID NO: 770696 - DNA, 120 bp, Artificial Sequence
  ENSG00000235109_9 (sequence is synthesized)
ggaaagccttcagtgccagcaatggcctcactcgacacagaagaatccacacaggggaaaaaccatatgaatgcaaagtgtgtgggaaggctttcctcctcagctcatgccttgttcagc

SEQ ID NO: 770697 - DNA, 120 bp, Artificial Sequence
  ENSG00000235109_10 (sequence is synthesized)
ctggtgagaaaccctatcagtgcagtcagtgcagtaaactctttagtaagcggacacttcttaagaaacatcagaaaatccacactggagagagaccataagggtgatgagtttgggaaa

SEQ ID NO: 770698 - DNA, 120 bp, Artificial Sequence
  ENSG00000235109_11 (sequence is synthesized)
gccttcagtcatcattgcaaccttattaggcattttagaatccatactgttccagcagaactggactaattctgtggaccctcagacccctaaatggggccgtcttggaaagtaagattt

SEQ ID NO: 770699 - DNA, 120 bp, Artificial Sequence
  ENSG00000235109_12 (sequence is synthesized)
tcaagtggcttattctgttcttataaaatttattttgtattgcattgaaccacttgtctacaaaccaggtgttggtgtctcctgtgtggatgactgtgattgtagggggttgctgggtgg

SEQ ID NO: 770700 - DNA, 120 bp, Artificial Sequence
  ENSG00000235109_13 (sequence is synthesized)
ccttcttattccctagcctttggtccatttcttatgatttcctttaaaggcaccaaatcttatctggaaataaattgttatggaggggctgtttttgagcaatactgcatattgaacaat

SEQ ID NO: 770701 - DNA, 120 bp, Artificial Sequence
  ENSG00000235109_14 (sequence is synthesized)
tctaaaagaccagtatctatgtatacttttaaaaaaaagatttgctaagatcaaaggatattcagaggtgcatctttttctgtaagagtgacattttaaacaaatgtaaggttttgggga

SEQ ID NO: 770702 - DNA, 120 bp, Artificial Sequence
  ENSG00000235109_15 (sequence is synthesized)
ataagaatcgtccacattcccacaggaaatcattgctatggtctcccctaggaatgtgatagatagcttctataattatgcagcattatccatagtatgaaacctgtagttttaatggtt

SEQ ID NO: 770703 - DNA, 120 bp, Artificial Sequence
  ENSG00000235109_16 (sequence is synthesized)
tagaaatctatgtctcatttcatatctaactcatgtttttgatacgaatcaatatatatgttgatatcatgagttaatatgagtttgacatgaatcatcaacatagtatatacatatcaa

SEQ ID NO: 770704 - DNA, 120 bp, Artificial Sequence
  ENSG00000235109_17 (sequence is synthesized)
cataactatgttgatgattcatatcaaattctcaatgcaggtcattactgtaagttttccatttttgttacaaataataagtaagatgatactttaaaatctctgttcttcacaaggtac

SEQ ID NO: 770705 - DNA, 120 bp, Artificial Sequence
  ENSG00000235109_18 (sequence is synthesized)
ctctttaattcatagccttttatgtcagcattattcttcttttgggggttggtcagcaactttgagtgccattgcaagcagcatcatttaagtagttttataaagaaaagaagtctgata

SEQ ID NO: 770706 - DNA, 120 bp, Artificial Sequence
  ENSG00000235109_19 (sequence is synthesized)
tcttgggcagcttgctgcttactggggagaccagcatgcttagacacttattgccagggttaaacatatgctctggcaccaagttcaaatctttcctccccatttgtgagctgtgggact

SEQ ID NO: 770707 - DNA, 120 bp, Artificial Sequence
  ENSG00000235109_20 (sequence is synthesized)
ttaggcaagttatctaaatgctgctatgctatagtctccccacctgtaaaacagaggatgataccaataccttcctcatagggtacataagattaaataaatacaaacttgtacttaaaa

SEQ ID NO: 770708 - DNA, 120 bp, Artificial Sequence
  ENSG00000235109_21 (sequence is synthesized)
cagagagagagagaaaaactgctgaccctgtaagagagaactggccatcttgcagacagacagagccccgagtgttctttcaactacctgccacccatccaacaactcccctcggacctc

SEQ ID NO: 770709 - DNA, 120 bp, Artificial Sequence
  ENSG00000235109_22 (sequence is synthesized)
agtatgggctggaacctgacacttggcatgacagtgaccccaggcatccaaaccatgacagttccatcagctctccaaatgagagacagagtctcactatgtcgcccaggcttgtcttga

SEQ ID NO: 770710 - DNA, 120 bp, Artificial Sequence
  ENSG00000235109_23 (sequence is synthesized)
tcaaagtgttgggattacaggcgtgagctattacacctgacttaagtctccattttcatatctatactttgggattccagaagacagaggtttgagtgtaaaacacaaaataacaaaacc

SEQ ID NO: 770711 - DNA, 120 bp, Artificial Sequence
  ENSG00000235109_24 (sequence is synthesized)
cagaggtttgagtgtaaaacacaaaataacaaaaccacaacaaaaacaactctgtattctcgtccccaccattaccatctctcctttgtgatgtcaaagagaccagaggaagtggacaga

SEQ ID NO: 770712 - DNA, 120 bp, Artificial Sequence
  ENSG00000235109_25 (sequence is synthesized)
taggatacgaaatgcctctgctgacattcttgttactcttttctccacagtcaaaacctgaatcagaatatttcaaaagagaggaaataaaagttcagcttaaaactgttctgccctaaa

SEQ ID NO: 770713 - DNA, 120 bp, Artificial Sequence
  ENSG00000235109_26 (sequence is synthesized)
attgctgggcaactaggtcccgccggagcgttccagctcaaagattacctgctgcagtcaggcagaaatgtaaagtctttcctgtttgattgggaactgacccaggtgccaggcttgggg

SEQ ID NO: 770714 - DNA, 120 bp, Artificial Sequence
  ENSG00000235109_27 (sequence is synthesized)
ggacaccggacaaccaaaggcaatatgtggactcggcaagccactggtccctaaacctgaataagtttccgggcagagctgcatttattgacggttatgaaagctgatttagaagcagca

SEQ ID NO: 770715 - DNA, 120 bp, Artificial Sequence
  ENSG00000235109_28 (sequence is synthesized)
acgcagcctcttgcctggaattgggatgatgcggctgaaaccaccttcctggcagccaaacaggctattcagcaggcacaagccctatgggtagctgatcggggcacccatttaaacttg

SEQ ID NO: 770716 - DNA, 120 bp, Artificial Sequence
  ENSG00000235109_29 (sequence is synthesized)
atgtgcatgtgaccagatagttttgactggggcttatggcatcacacagagctctttagaatgccagtagacttttggtcccaactttggaagggagctgagctccagtattcctcgaca

SEQ ID NO: 770717 - DNA, 120 bp, Artificial Sequence
  ENSG00000235109_30 (sequence is synthesized)
gagaagcagttactaactgcatatgctgccctttagactcgtgacagcctggcaggatgggctacagtcgtcgcgcgcatgacttacccaatagcaggccccgagtgttctttcaactac

SEQ ID NO: 770718 - DNA, 120 bp, Artificial Sequence
  ENSG00000235109_31 (sequence is synthesized)
ctgccacccatccaacaactcccctcggacctcagtatgggctggaacctgacacttggcatgacagtgcagaccccaggcatccaaaccatgacagttccatcagctctccaaatgaga

SEQ ID NO: 770719 - DNA, 120 bp, Artificial Sequence
  ENSG00000235109_32 (sequence is synthesized)
attggggtgctgcagccccgccacctgttccgtagcttgccggtgccccgaaggtgagtcttggccccttgtcgcgacccgccaggttcccagaagatttcaggtctgtgccttggagta

SEQ ID NO: 770720 - DNA, 120 bp, Artificial Sequence
  ENSG00000235109_33 (sequence is synthesized)
ggcggggagggaacgtctgcgcaggcgtgacccccgcccctacacattcactggcctgaagcccccgtggagtaggtggaggtcccgccccttatcctgaagattaaacagcctttcttt

SEQ ID NO: 770721 - DNA, 120 bp, Artificial Sequence
  ENSG00000235109_34 (sequence is synthesized)
gttttgggtctcgatgaccatctaactcctaaatgctgggggccgctccccatagaaatgcctcgccggatttctccgcctcgcacccagtgggactgggatttttggccccggggtttg

SEQ ID NO: 770722 - DNA, 120 bp, Artificial Sequence
  ENSG00000235109_35 (sequence is synthesized)
caataagggagtcaccaagcagcagccacctctggaattcctagaaaggaaagagttgcctggcttcagccagtgggctcagaacggctgacgcatttccggcctttgcggttgatcggt

SEQ ID NO: 770723 - DNA, 120 bp, Artificial Sequence
  ENSG00000235109_36 (sequence is synthesized)
acttgtgcccagagagagagagaaaaactgctgaccctgtaagagagaactggccatcttgcagacagacagaggtgagccaggaattaacaagcatgccaaggagtacagctgtaagtg

SEQ ID NO: 770724 - DNA, 120 bp, Artificial Sequence
  ENSG00000235109_37 (sequence is synthesized)
tgggagcggcaggagccacagagccgtttgctgagaagggctgcggtcggaggaggcagccgagacagaggcagacagtgtgagagctgcagcagctgctgctgaataaaatcatatttt

SEQ ID NO: 770725 - DNA, 120 bp, Artificial Sequence
  ENSG00000235109_38 (sequence is synthesized)
cattggggtgctgcagccccgccacctgttccgtagcttgccggtgccccgaagatgtctatcaagtatttgttccctgctaggatatcagatgacaccaaatttgcatttaatcgaata

SEQ ID NO: 770726 - DNA, 120 bp, Artificial Sequence
  ENSG00000235109_39 (sequence is synthesized)
gggctggaacctgacacttggcatgacagtggagggaaaagtaagatattctgaaagagagcctatcccagaagccatgagacctgggcctgatctaagagggaagggaaacctgagatt

SEQ ID NO: 770727 - DNA, 120 bp, Artificial Sequence
  ENSG00000235109_40 (sequence is synthesized)
cctgtgaaccagctgggactagattttaaactagaagtgagtgactgcaaaattatttgactggactcggatgtcaactttgggattccagaagacagaggtttgagtgtaaaacacaaa

SEQ ID NO: 770728 - DNA, 120 bp, Artificial Sequence
  ENSG00000235109_41 (sequence is synthesized)
gcctggcttcagccagtgggctcagaacggctgacgcatttccggcctttgcggttgatcggtcattggggtgctgcagccccgccacctgttccgtagcttgccggtgccccgaagcca

SEQ ID NO: 770729 - DNA, 120 bp, Artificial Sequence
  ENSG00000235109_42 (sequence is synthesized)
tggaaatcaaaacctgaatcagaatatttcaaaagagaggaaataaaagttcagcttaaaactgttctgccctaaacctttggctttgaagtttatttttaaagcgttaaagaatacata

SEQ ID NO: 770730 - DNA, 120 bp, Artificial Sequence
  ENSG00000235109_43 (sequence is synthesized)
gaggtcccgccccttatcctgaagattaaacagcctttctttgtctgagataacgcccggagttctttgtcctgcctccaagacgataaaggagcgcagacacaaagccagagtaagcct

SEQ ID NO: 770731 - DNA, 120 bp, Artificial Sequence
  ENSG00000235109_44 (sequence is synthesized)
tgttctttcaactacctgccacccatccaacaactcccctcggacctcagtatgggctggaacctgacacttggcatgacagtgagacagagtctcactatgtcgcccaggcttgtcttg

SEQ ID NO: 770732 - DNA, 120 bp, Artificial Sequence
  ENSG00000235118_0 (sequence is synthesized)
aggacgcggaagctggggacagccactcgctcgggagcagcctgagcgtttcctctccgcgtactcgagggaactctctccacgcgttcgagggaacccggaaggggccaggcgggtgag

SEQ ID NO: 770733 - DNA, 120 bp, Artificial Sequence
  ENSG00000235118_1 (sequence is synthesized)
tgcggagggaagcccttgtgccatctgggagtagagccgccgagtcaggagttttagggccatggctgatcctgggaacagaggagggatccaccgccccttgagcttcacctgctccct

SEQ ID NO: 770734 - DNA, 120 bp, Artificial Sequence
  ENSG00000235118_2 (sequence is synthesized)
gctcattgtgggaatgtgctgtgtatctcctttcttctgccatagccagacagacttgctggctcttagccaagctgatcctcagtgctgggaatcctcctcagtgcttctcctggaaat

SEQ ID NO: 770735 - DNA, 120 bp, Artificial Sequence
  ENSG00000235118_3 (sequence is synthesized)
cccaactcttctgggacatctatgtggactgtgtgctctctaggaaccatggcttaggaaggaggcaattggttggagaggaagagaaaatctcagcagcgcagccacagcacacaagga

SEQ ID NO: 770736 - DNA, 120 bp, Artificial Sequence
  ENSG00000235118_4 (sequence is synthesized)
gtaaacaaggtacatattctcagctcctaaggacctccttcctaaagaagaaagagttgattgaagatttgataagcatgcatgtgcgtaggagtgggtctagtgtcattggaaaagtga

SEQ ID NO: 770737 - DNA, 120 bp, Artificial Sequence
  ENSG00000235118_5 (sequence is synthesized)
acctggaaataaagagaaaataaattgaactcggagctaattcatgccttggaattaaatatacatatatataacatttttcttaactattgattatttatttattttaaatggtgggaa

SEQ ID NO: 770738 - DNA, 120 bp, Artificial Sequence
  ENSG00000235118_6 (sequence is synthesized)
tgcccagagataaatatgaacccaaattctctcagtatactaatttaaagctgccttctattatttatttatttattttaggctgctagcatgtttcttctaatggtgacattactgcca

SEQ ID NO: 770739 - DNA, 120 bp, Artificial Sequence
  ENSG00000235162_0 (sequence is synthesized)
tcagcctcccgctcggggtgcgccgcccttcgtctgggtctccgcccccaggacccgcggccgagagctccggagcgcggcttccccggccggctgcgcgatgggctgcgggaactccac

SEQ ID NO: 770740 - DNA, 120 bp, Artificial Sequence
  ENSG00000235162_1 (sequence is synthesized)
cccggccggctgcgcgatgggctgcgggaactccaccgccaccagcgcgggcgcgggccaaggccctgcaggagcagccaaagatgtaacagaagaatccgtaacagaagatgacaagag

SEQ ID NO: 770741 - DNA, 120 bp, Artificial Sequence
  ENSG00000235162_2 (sequence is synthesized)
gagaaactatggaggagtatatgttggcctaccatctgaagctgtcaatatggtgtccagtcaaacaaagacggttcggaaaaattagaagaaaataacatcatgactcaagaatcaaga

SEQ ID NO: 770742 - DNA, 120 bp, Artificial Sequence
  ENSG00000235162_3 (sequence is synthesized)
gcttgctcatcagtttggaaggaatttggctccgtgggacgttgtaatgtgcacagacatttccaaggaaattctaaacagtcacccttcccttttgcattcccccaaatcttaagtgta

SEQ ID NO: 770743 - DNA, 120 bp, Artificial Sequence
  ENSG00000235162_4 (sequence is synthesized)
ggttaaacagtacacttgtttatggaactttctgtggccacctacgaaagacaagttaacaaactgtcatggaggctgttgttgcccagccagggccgctgcattttgacaacatttcca

SEQ ID NO: 770744 - DNA, 120 bp, Artificial Sequence
  ENSG00000235162_5 (sequence is synthesized)
ccctggccactcagcacatttcatggaggtcatgtcttttcactgatacttttttgatagtttttatataacaaaatccttattctatttataacttaagatgataaggcactataaatt

SEQ ID NO: 770745 - DNA, 120 bp, Artificial Sequence
  ENSG00000235162_6 (sequence is synthesized)
aatgacctaaaataatatatttgtctgttatcttttgctatttctacttcactttaatttttagctgtaaaattggtaaatggattcttacaactatctctttccatttcttactatttg

SEQ ID NO: 770746 - DNA, 120 bp, Artificial Sequence
  ENSG00000235162_7 (sequence is synthesized)
gttttcaaatttcatttaaatgtcagaatttccttttttaggaacaatgtgtatttcattgcactatttaaaaataaactcaaatttgcatgccatatgcacattttgattacattttta

SEQ ID NO: 770747 - DNA, 120 bp, Artificial Sequence
  ENSG00000235162_8 (sequence is synthesized)
ttttctttcgtgaaaggcatgtgcaactacaaatacttcatagctgtttgggttgctcattctacatcacgacaatctcatcatattatttctataacttttcaaggacttgcgatggat

SEQ ID NO: 770748 - DNA, 120 bp, Artificial Sequence
  ENSG00000235162_9 (sequence is synthesized)
ggttagtgggatatctggaaattaatttgataatgacttgtgtatctacttagtattgcaatgtaagttactcaattcaccaatgtatttcaacaattaaaacatttttatccctcttca

SEQ ID NO: 770749 - DNA, 120 bp, Artificial Sequence
  ENSG00000235162_10 (sequence is synthesized)
agctcaaaggacttgactctcatctcgagtgtgctaatgaagttcccttgtgcgacaaatggggcagatcagttctgtttggaagaatgaaaatgacagctaagtggtgtgatctaactg

SEQ ID NO: 770750 - DNA, 120 bp, Artificial Sequence
  ENSG00000235162_11 (sequence is synthesized)
ctgccaggaaaactgttggcacagagaatacaggtaggggcatatggtctgaaaaagaacttgcccaggattcatcatctttgctccttccaagcaaacttggtttttgtcctatgcatg

SEQ ID NO: 770751 - DNA, 120 bp, Artificial Sequence
  ENSG00000235162_12 (sequence is synthesized)
ctaactggatgacttcccttcattctctcagccttccctgtcctcctacttctctgattaactgcactccaccctcatttctctcttgctgtctctgccctcattttgtatctctctatt

SEQ ID NO: 770752 - DNA, 120 bp, Artificial Sequence
  ENSG00000235162_13 (sequence is synthesized)
agtaagatatctttgtgtgtccataatgcctaatatcataccatgttgaccactctgaattattgataaatgttaactgtaacatgtcactgtatgatatttaatactctaataaattgt

SEQ ID NO: 770753 - DNA, 120 bp, Artificial Sequence
  ENSG00000235162_14 (sequence is synthesized)
aacatcccaaagtcttttcttctttctcattacaagtaaaatatctaaaaattctactaacgcaatacatctttcttttttttaaaaaaaatagcttctttttaacctaggaaaccaatt

SEQ ID NO: 770754 - DNA, 120 bp, Artificial Sequence
  ENSG00000235162_15 (sequence is synthesized)
cagacaattttcctatttaaggttgttgttacagttctgactttggcaagcagaatggtttcaatagagcaatgtggggcttactatattaccatgcctacaggagcagttaaagcttca

SEQ ID NO: 770755 - DNA, 120 bp, Artificial Sequence
  ENSG00000235162_16 (sequence is synthesized)
tgaaagtaattgaaagactaaattttgggctcaacatttaaaacaaaatcaattagatggtttagaagtattttatgaatatccaacagagacagaaatggaggtttctaataattaaaa

SEQ ID NO: 770756 - DNA, 120 bp, Artificial Sequence
  ENSG00000235162_17 (sequence is synthesized)
gtgttgctggatgtgtcaagatatacttgaaaagtgttttttaaaatttaaattggctgccaaccttgttcatcaaattcccctaaggcaacacaataatttaggaatggaagcaattgt

SEQ ID NO: 770757 - DNA, 120 bp, Artificial Sequence
  ENSG00000235169_0 (sequence is synthesized)
gtccgggctgcggcttcccggtgcggccgcagtgggcaggctcgaggcgtctgccgcacctcagcccacgacctgccccgctgggaggtgcgggccgctggccaggccctgaccgcaacc

SEQ ID NO: 770758 - DNA, 120 bp, Artificial Sequence
  ENSG00000235169_1 (sequence is synthesized)
ggccctgaccgcaacctggcccagaggccccagccctcaggcaaggttctccggtgaagccacagcctggccacctgtcttgatctccccaccgagaaggccccgcccctcccgctgcag

SEQ ID NO: 770759 - DNA, 120 bp, Artificial Sequence
  ENSG00000235169_2 (sequence is synthesized)
gagtcagcctaggggctgtgtccagcacagaagaggcctcacgctgccgcaggatctcccagaggctgtgcacgggcaagctgggcatcgccatgaaggtgctgggcggcgtggccctct

SEQ ID NO: 770760 - DNA, 120 bp, Artificial Sequence
  ENSG00000235169_3 (sequence is synthesized)
tctggatcatcttcatcctgggctacctcacaggctactatgtgcacaagtgcaaataaatgctgccccgcatgcacgcggggggctggccgcacacgtgagagcacaggcctggagaca

SEQ ID NO: 770761 - DNA, 120 bp, Artificial Sequence
  ENSG00000235169_4 (sequence is synthesized)
ccgcagtgggcaggtgcgactgtgcgcggcctcgctggctgagaactggcgggggtgggggcgtgccctggactgacccccaccggcctaacccgcggtgcggggccagggccggaactg

SEQ ID NO: 770762 - DNA, 120 bp, Artificial Sequence
  ENSG00000235169_5 (sequence is synthesized)
ggagtcagcctaggggctgtgtccagcacagaagaggcctcacgctgccgcaggtgaggggcctgagggcagcctgccagccatagcaggctggtgtctccctccagagacgcctgccct

SEQ ID NO: 770763 - DNA, 120 bp, Artificial Sequence
  ENSG00000235169_6 (sequence is synthesized)
aacccctgctaccggccccatcaccctccaccccatcctggctgggagcccacggtccagcagctcagcaaaccgcagcctttggccttccctctggttggctgtgggcggggagagctt

SEQ ID NO: 770764 - DNA, 120 bp, Artificial Sequence
  ENSG00000235173_0 (sequence is synthesized)
acacagcggacccctaagcggaccgctggcaccggtcgggtggcagcagagtgtcgctcgacatgggggaggccggggctggcgctggcgcctcgggagggccggaggcaagcccggagg

SEQ ID NO: 770765 - DNA, 120 bp, Artificial Sequence
  ENSG00000235173_1 (sequence is synthesized)
gaggcagaggtggtgaagctgctgcccttcctggcgccgggcgcgcgggcggacctgcaggcggcggcggtgcggcacgtgctggcgctgactggctgcggacccggccgcgcgctgttg

SEQ ID NO: 770766 - DNA, 120 bp, Artificial Sequence
  ENSG00000235173_2 (sequence is synthesized)
ggcaggcggcgctgctgcaggcgctgatggagctggcgccggcctctgccccggcccgggacgccgcccgcgcgctcgtgaacttggccgccgaccccggcctgcacgagacattgctgg

SEQ ID NO: 770767 - DNA, 120 bp, Artificial Sequence
  ENSG00000235173_3 (sequence is synthesized)
cccgggctgccagcgcgcctgatgggccgcgcgttggacccgcagtggccctgggccgaggaggcggccgccgcgctagccaacctcagtcgcgagccggcgccgtgtgcagcgctcatg

SEQ ID NO: 770768 - DNA, 120 bp, Artificial Sequence
  ENSG00000235173_4 (sequence is synthesized)
catggcggcgctggcggccgcggagccggcagactcgggcctggagcggctggtgcgcgcgctgtgcacgcccggctacaacgcccgcgcgcccctgcactacctagcgccgctgctctc

SEQ ID NO: 770769 - DNA, 120 bp, Artificial Sequence
  ENSG00000235173_5 (sequence is synthesized)
tctccaacctcagccaacgccctgcggcgcgggccttcctactggaccccgacaggtgcgtggtccagcggctgctgccccttacccagtaccccgactcctctgtacgcaggggcgggg

SEQ ID NO: 770770 - DNA, 120 bp, Artificial Sequence
  ENSG00000235173_6 (sequence is synthesized)
tggtggggacgctgcggaattgctgcttcgagcaccgacatcacgagtggttgcttggacctgaggtggacattctcccctttttgctcctgcccttggctgggcctgaggatttctccg

SEQ ID NO: 770771 - DNA, 120 bp, Artificial Sequence
  ENSG00000235173_7 (sequence is synthesized)
aggaagagatggaacggctgcctgtcgacttgcagtacctgccaccagacaagcagcgagaacctgatgcagacatccgcaagatgcttgttgaagccatcatgctgctgacagccacag

SEQ ID NO: 770772 - DNA, 120 bp, Artificial Sequence
  ENSG00000235173_8 (sequence is synthesized)
caccaggtcggcagcaggtgcgggaccagggagcctacctgatccttcgagagctgcacagctgggagccggagcccgacgtgcggacggcttgtgagaagctcatccaggtgcttattg

SEQ ID NO: 770773 - DNA, 120 bp, Artificial Sequence
  ENSG00000235173_9 (sequence is synthesized)
gggacgagcctgaacgtggcatggaaaacctgctggaggtgcaggtgcctgaggatgtggagcagcagctgcagcagctggattgcagggagcaggagcagttggagcgggagctggccc

SEQ ID NO: 770774 - DNA, 120 bp, Artificial Sequence
  ENSG00000235173_10 (sequence is synthesized)
gagagggccacacccacctgaggcccctgcagccggacaccagctccagggtcccctttgccaggctttctcagaccaggccttcctgcagctgtctgcaggccccctgggtccccttgt

SEQ ID NO: 770775 - DNA, 120 bp, Artificial Sequence
  ENSG00000235173_11 (sequence is synthesized)
tcagagactgtgctcttctgagaagcagagctacgcttaggctccagtaaggattggaggcactttccagccctgtgcagtgttgctaccagcaagaatgaaggttgtgcagagcagtac

SEQ ID NO: 770776 - DNA, 120 bp, Artificial Sequence
  ENSG00000235173_12 (sequence is synthesized)
tgtgaggtaggcaccgtgactcggctgcctgtgcagaaggtggaggtggcaggcggatggccagggagccatgagaagactcttcctgggcacggcgtggggactggacagaaaaccact

SEQ ID NO: 770777 - DNA, 120 bp, Artificial Sequence
  ENSG00000235173_13 (sequence is synthesized)
gcaagccccaaggagccagctgaagcctcccaatccccagggcactgcagagtctgggcagaggtgggcgcataggtacaagtgctgctttgtcagcctcactccctgcagctctcagct

SEQ ID NO: 770778 - DNA, 120 bp, Artificial Sequence
  ENSG00000235173_14 (sequence is synthesized)
ccctgttccctgagacctggcctcaaagggctgacccagccatacgtagatcctggggtctttctaggactgtgcctccctgcttgacctatgctccaggaccctgccctcaacccttgt

SEQ ID NO: 770779 - DNA, 120 bp, Artificial Sequence
  ENSG00000235173_15 (sequence is synthesized)
cagctccctaagtcttcctgtttcccagtctcagattgagtgggtgctctcattggcctctctagctaggccgtctccctggtcagcttccttgagcctgggccactcctccctggcctt

SEQ ID NO: 770780 - DNA, 120 bp, Artificial Sequence
  ENSG00000235173_16 (sequence is synthesized)
cttacctctgccaagagcctccagatgtgcctgcagcctagtccctgcccaagcttctcccccagccaccctctgcccctgtggtagagcccactataggcccaggcgccttacgtgctt

SEQ ID NO: 770781 - DNA, 120 bp, Artificial Sequence
  ENSG00000235173_17 (sequence is synthesized)
ctcccctggacctatgtgcatccctcacctgccagttatgtggctgccaagccccacaggctgtcatggtggctcttgccacacttcccttcctgagctgacctgacctcactgccacct

SEQ ID NO: 770782 - DNA, 120 bp, Artificial Sequence
  ENSG00000235173_18 (sequence is synthesized)
cttgcattgggatcctgagggctggcccctgctcactgatgggccctcccaggcccgtcaagccctggtgaaggagcttagcttgtcttcttggcaattcacaatgcctcactccacacc

SEQ ID NO: 770783 - DNA, 120 bp, Artificial Sequence
  ENSG00000235173_19 (sequence is synthesized)
ctaaaactggagcgtcccctatggtctcctgctgtggcttgggtgccgggcgtctcccgcctccaggatctcctctcacctgcccccattaaagctctgccactcatgcaggcatgtgtg

SEQ ID NO: 770784 - DNA, 120 bp, Artificial Sequence
  ENSG00000235173_20 (sequence is synthesized)
gaccatgttttcccctggccagagcccccacctgccactggaggccagttgccctcttagcactcagacatcagcactgtcttcacagaataaatgctttatctggccttgccccaccca

SEQ ID NO: 770785 - DNA, 120 bp, Artificial Sequence
  ENSG00000235173_21 (sequence is synthesized)
gccctgcggcgcgggccttcctactggaccccgacaggacatcacgagtggttgcttggacctgaggtggacattctcccctttttgctcctgcccttggctgggcctgaggatttctcc

SEQ ID NO: 770786 - DNA, 120 bp, Artificial Sequence
  ENSG00000235173_22 (sequence is synthesized)
ggaagttaggggggacggccctaagtgacacctcccaacaggtgcgtggtccagcggctgctgccccttacccagtaccccgactcctctgtacgcaggggcggggtggtggggacgctg

SEQ ID NO: 770787 - DNA, 120 bp, Artificial Sequence
  ENSG00000235173_23 (sequence is synthesized)
cggaattgctgcttcgagcaccgtgagtggacatcacgagtggttgcttggacctgaggtggacattctcccctttttgctcctgcccttggctgggcctgaggatttctccgaggaaga

SEQ ID NO: 770788 - DNA, 120 bp, Artificial Sequence
  ENSG00000235173_24 (sequence is synthesized)
gggagagagaggtgtccaggccacaggctcctgaaactttgcagcagtgagttgctgagcacaggtgggacttacacaggcagagcctggctcagctgcccagcccagggacacagtggc

SEQ ID NO: 770789 - DNA, 120 bp, Artificial Sequence
  ENSG00000235194_0 (sequence is synthesized)
gcagttgagcgcacgctcagagcagaccgctagcaggaggcaggatgtgatagtctaagaccctggaagctgacggccagagggagggaagggtggtcacagaggagaggcaaagcaacg

SEQ ID NO: 770790 - DNA, 120 bp, Artificial Sequence
  ENSG00000235194_1 (sequence is synthesized)
ggaggtggaggatcctggaggtgtctgcaaggagaatacacagcagcgaggggctgcagaagcggacccagcgacttctgcgctgacgcggggcgggcgggagagaggaagagaggggag

SEQ ID NO: 770791 - DNA, 120 bp, Artificial Sequence
  ENSG00000235194_2 (sequence is synthesized)
cgcggtggcgctgcgagctggccccgccggggaaggggctgccatgtcccgtgagcggcccccgggcaccgacattccccgcaacctgagcttcatcgccgcgctaacggagcgcgccta

SEQ ID NO: 770792 - DNA, 120 bp, Artificial Sequence
  ENSG00000235194_3 (sequence is synthesized)
ctaccgtagccagcggcccagcctcgaggaggagccggaggaggagccaggcgagggcgggacgcggttcggggcccgatcccgcgctcacgcaccgagtcggggccgccgggcccgatc

SEQ ID NO: 770793 - DNA, 120 bp, Artificial Sequence
  ENSG00000235194_4 (sequence is synthesized)
tgcaccagccggaggcggcggggcccgggcgccccgcagccgtagcccagacacccgcaagagagtgcgtttcgccgacgcactggggttggagctggctgtcgtgcgccgcttccgtcc

SEQ ID NO: 770794 - DNA, 120 bp, Artificial Sequence
  ENSG00000235194_5 (sequence is synthesized)
ttccgtcccggtgagctgccccgggtgccccgccacgtgcagatccaattgcagagggacgccctccgccacttcgcgccctgccagccccgcgcccgcggcctccaggaggcgcgcgcc

SEQ ID NO: 770795 - DNA, 120 bp, Artificial Sequence
  ENSG00000235194_6 (sequence is synthesized)
gccagcgagcccggcttcgccgcccgcttgctgacgcagcgcatctgcctggaacgcgccgaggcgggcccgctgggcgtggccgggagcgcgcgcgtggtggacctggcctacgagaag

SEQ ID NO: 770796 - DNA, 120 bp, Artificial Sequence
  ENSG00000235194_7 (sequence is synthesized)
gcgtggccgggagcgcgcgcgtggtggacctggcctacgagaagcgcgtgagcgtgcgctggagcgccgacggctggcggagccaacgcgaggcgccagccgcctacgccggtccggccc

SEQ ID NO: 770797 - DNA, 120 bp, Artificial Sequence
  ENSG00000235194_8 (sequence is synthesized)
cgcgccgccgattgggggcgccctgctcttcgccttgcgctaccgtgtgacaggtcacgagttctgggacaacaacggcggccgtgactatgctctacgtgggcccgagcacccgggcag

SEQ ID NO: 770798 - DNA, 120 bp, Artificial Sequence
  ENSG00000235194_9 (sequence is synthesized)
tggcggagctccggagccgcagggctggatccactttatctgagacgaggcgcctgcggccgacggcggaaaacaccaaaggcacccgggggcggggcgacccgatgtggcggggaggag

SEQ ID NO: 770799 - DNA, 120 bp, Artificial Sequence
  ENSG00000235194_10 (sequence is synthesized)
taggagagaccaggattggcgggagcggtccaagggagtcaagccggggagggcgaaaagggaacctggccactgctccttggtccttggcattatgacgggattcccttgtcacctctg

SEQ ID NO: 770800 - DNA, 120 bp, Artificial Sequence
  ENSG00000235194_11 (sequence is synthesized)
acagttcctggctgcggtgtccgcggactggctggggagtgatgacagaagggatggaaaccctattttcttttctccaagaccatggttggtctgcttccctcactcgggctccttgac

SEQ ID NO: 770801 - DNA, 120 bp, Artificial Sequence
  ENSG00000235194_12 (sequence is synthesized)
agtcttctagaagagagaaggaggaaaagaagcagttcctgatgttacaaatgaacaaggatctcccagccttagtctttgagaaaagatggctgaaagagaggaactctccaagtcatt

SEQ ID NO: 770802 - DNA, 120 bp, Artificial Sequence
  ENSG00000235194_13 (sequence is synthesized)
ccgcaaacaaatgcccatttaaacatcatccttgtcttgtgaagaaaacaggaagaatgtcatgtaccatgtggatcaccttcagttcaaagttgcagcaaagtgaagaaagaaactact

SEQ ID NO: 770803 - DNA, 120 bp, Artificial Sequence
  ENSG00000235194_14 (sequence is synthesized)
ggaagccacccagcaatgcactgtttagtcatcaattaggagcccatgggaggataatagggagactgggtggaggctcagtgtgtaataatctcttgtctaatgtatgtgtgtcactgc

SEQ ID NO: 770804 - DNA, 120 bp, Artificial Sequence
  ENSG00000235194_15 (sequence is synthesized)
catgttgtatgaacaatagtgagggctcacatttacttaacacttgtgtgcgcaaatctgggtttttcttcctttccagaactatgactcgatcataaaatctgttttgtttgcatgcat

SEQ ID NO: 770805 - DNA, 120 bp, Artificial Sequence
  ENSG00000235194_16 (sequence is synthesized)
gcccaaaacaaccctgtaagtagaacattgtcattatctctgttttagagatgaggaaacaggctcagagaagctcagaaatttgttcaagatcgcacagctagtaaatggcagaagtag

SEQ ID NO: 770806 - DNA, 120 bp, Artificial Sequence
  ENSG00000235194_17 (sequence is synthesized)
gattgtgaacccagggaatctccagagcctctgtgtaaccatgatgttatattttttttcctctttaaaaacaaaatttaaaaccttgctataatctcttattaggaaatgatcatagtt

SEQ ID NO: 770807 - DNA, 120 bp, Artificial Sequence
  ENSG00000235194_18 (sequence is synthesized)
tctgactgtgctctgccttcccatcctgccaatctcctggactggcttggagaagacagggggcccccgagcttcatctgtgactcgaaggagtttgctgctgtctcctgtgtcagtgtc

SEQ ID NO: 770808 - DNA, 120 bp, Artificial Sequence
  ENSG00000235194_19 (sequence is synthesized)
ctccacacctgttggtgtgccacctccctccctcttcccccactggccttgaacaggcaaaccccctaatgtcgccactaggttgggtccgtgactaggacacctgctagagggtctgtg

SEQ ID NO: 770809 - DNA, 120 bp, Artificial Sequence
  ENSG00000235194_20 (sequence is synthesized)
cttgggccttttctaggaatcccgatgttactgggtaagtgccaactctgtgggcagaatgctaatgataatcctgttccctgacctctttctcagaagtaccctggctcactctcccca

SEQ ID NO: 770810 - DNA, 120 bp, Artificial Sequence
  ENSG00000235194_21 (sequence is synthesized)
atctcagctttatagaacaacattttggtcttgattattcccatatcaagctgccccagggcttcggtaagctgttagttgccccactgcctcaaggctgggtctggctgagctacttct

SEQ ID NO: 770811 - DNA, 120 bp, Artificial Sequence
  ENSG00000235194_22 (sequence is synthesized)
taggcacacaaatagtgggtgtctccttggaacctgacacaaaactatcagtgctaccaagccttgtaaaatagggaggaaactaatatttcttgagtggcttctgagtgcctggtgctt

SEQ ID NO: 770812 - DNA, 120 bp, Artificial Sequence
  ENSG00000235194_23 (sequence is synthesized)
tcgcggctctctggagagattccttgccctgatggctttggtgtgtactcctctcccaggacttcagcactgagattttcccaaccccctggcttttcctcaccttgggttgagttgatc

SEQ ID NO: 770813 - DNA, 120 bp, Artificial Sequence
  ENSG00000235194_24 (sequence is synthesized)
cggcactaccacaaaccccaccatctgcaaaccaaccaagattaggcagtatgccctttccgtcttgcactgctcttccaaaacttccatctgtatttctcacaccctcagtaagcaaag

SEQ ID NO: 770814 - DNA, 120 bp, Artificial Sequence
  ENSG00000235194_25 (sequence is synthesized)
ctgagtgtgcatggacagagctgcatccactgctttctcccagcgggtgcagtctaatctgacacggggaacactaggagtttagcggaatcttcagccaccctattaatgtgttacgca

SEQ ID NO: 770815 - DNA, 120 bp, Artificial Sequence
  ENSG00000235194_26 (sequence is synthesized)
ttaggcattgtagtggaaactcctctgatggctcatgactatatgaacaggagcaatttggaatataacatgtcagctgtggactgggaagtgccgtgagagaaaacactacctgggtca

SEQ ID NO: 770816 - DNA, 120 bp, Artificial Sequence
  ENSG00000235194_27 (sequence is synthesized)
taggcttgggtccctgaggcaacccagcagggacactgttgcccattcctctcatccagactgcaggtgtcttcctacacctccctgtcccatagcctccgtcctgttttttgtttgttt

SEQ ID NO: 770817 - DNA, 120 bp, Artificial Sequence
  ENSG00000235194_28 (sequence is synthesized)
gtttttctttgtgaatgtagaaaaacatttcatcatgagccctagctcctcagttttccacctaacacccacattcccttgtttctaactgccgtgtttttctggagcctgctgggatct

SEQ ID NO: 770818 - DNA, 120 bp, Artificial Sequence
  ENSG00000235194_29 (sequence is synthesized)
ttgcagtttgcaggtcatagaatcagacatgaaaaggcttctcttccgacgtcattggttcctggctcctttacagatgagaacacaggtccagaggtgagaaatgactctagcagggtc

SEQ ID NO: 770819 - DNA, 120 bp, Artificial Sequence
  ENSG00000235194_30 (sequence is synthesized)
atagaatttgttagtgcagctcaagatgggacttaaactcaggcctcctgatcacccattcccaggctaggaaacaggtctctgctcggtgtggtggttcatacctgtaatcgcaacact

SEQ ID NO: 770820 - DNA, 90 bp, Artificial Sequence
  ENSG00000235194_31 (sequence is synthesized)
ttgggaggctgaggcaggagcctgagcaacatagtgggaccctgtctctacaaaaacttttaaaattagctgggcatggtggcacacatc

SEQ ID NO: 770821 - DNA, 90 bp, Artificial Sequence
  ENSG00000235194_32 (sequence is synthesized)
cttgagcccaggagttggaggttacttggtgacagtgagaccctcaaaaaaaaaaagaaaagaaagaggtctctacacaagcccgtgatt

SEQ ID NO: 770822 - DNA, 120 bp, Artificial Sequence
  ENSG00000235194_33 (sequence is synthesized)
aaaaaagaaaagaaagaggtctctacacaagcccgtgattcttcatggcaagggataacatcagaaatgtttcattttctgctattagtttccattcctttccccatccaggcataaaga

SEQ ID NO: 770823 - DNA, 120 bp, Artificial Sequence
  ENSG00000235194_34 (sequence is synthesized)
gaaacaaaagacaatgatggtattctctgtgtcctcagctttggcacttttgttgatgttgctaaggagcagtgaccttgctaaaaagactgaataatccacccactgaatagctaacct

SEQ ID NO: 770824 - DNA, 120 bp, Artificial Sequence
  ENSG00000235194_35 (sequence is synthesized)
ggggaggaaatgaaaatttcctttgtggatctccccaaatccattgttgtcaccaggccctcccagaacctcctcagttccttcacagtgcaaccctgtgtacttggcccgcaacccaat

SEQ ID NO: 770825 - DNA, 120 bp, Artificial Sequence
  ENSG00000235194_36 (sequence is synthesized)
agtattgtgcctcacttcaccttccatgggcaactgccctcccttctggacataaaacctcatattttaaataaagttgaaatatgaaaagaaagtatgtcataagatattcagaagtat

SEQ ID NO: 770826 - DNA, 120 bp, Artificial Sequence
  ENSG00000235194_37 (sequence is synthesized)
tgtgtgttttgggctaagggcagcaagagactcagaggcaagattccctccttgactcaatttcttggtcaccttgttttttgtgtgtgtgtgtccagaaaaatttaataagtttgctta

SEQ ID NO: 770827 - DNA, 120 bp, Artificial Sequence
  ENSG00000235194_38 (sequence is synthesized)
aattattataaagttgaaccactgaaatgttcactgaaacattttgacttgcattaatgctttacttccccacctacatttacattaaaaattcacacacaaatgaaaattgaaaactga

SEQ ID NO: 770828 - DNA, 120 bp, Artificial Sequence
  ENSG00000235194_39 (sequence is synthesized)
gagcctgctgggatctttgcagtttgcaggtcatagaatcagacatgaaaaggcttctcttccgacgtcattggttcctggctcctttacagatgagaacacaggtccagaggcataaag

SEQ ID NO: 770829 - DNA, 120 bp, Artificial Sequence
  ENSG00000235194_40 (sequence is synthesized)
ttcccttgtcacctctgacagttcctggctgcggtgtccgcggactggctggggagtgatgacagactttcagcctccatgctctgagacaactgtggaagggatggaaaccctattttc

SEQ ID NO: 770830 - DNA, 120 bp, Artificial Sequence
  ENSG00000235194_41 (sequence is synthesized)
gccttttccacctcagatccccctgtcctacccatcctagctttaactcagccataattgccttgcttaatcccaggaacctggccactgctccttggtccttggcattatgacgggatt

SEQ ID NO: 770831 - DNA, 120 bp, Artificial Sequence
  ENSG00000235194_42 (sequence is synthesized)
cccttgtcacctctgacagttcctggctgcggtgtccgcggactggctggggagtgatgacaggtagctatcagagctccagcctccaggcagctttagggattaaaacggaggccaaag

SEQ ID NO: 770832 - DNA, 120 bp, Artificial Sequence
  ENSG00000235194_43 (sequence is synthesized)
caactccagacctgtttttatagccaaatactgagcctcaggggttgtacactcaggggcttccaggaaaatgccagccttacttttctggggtgccttttaataacctccaagcacttt

SEQ ID NO: 770833 - DNA, 120 bp, Artificial Sequence
  ENSG00000235194_44 (sequence is synthesized)
gtggactgtttgtcgagggacggtgaatcagaagaatcactattctgatttcctttgtctccgaagaggaagtccctgactagctatataactttgggcgagttacctctcacttctttg

SEQ ID NO: 770834 - DNA, 120 bp, Artificial Sequence
  ENSG00000235194_45 (sequence is synthesized)
tgccccagtgttctccttgggaaactggatttaggttagatgaccttttaaggctccttgtatgatattttgtgatctgtacatggcagagtatagattaggagccaaattttccaacct

SEQ ID NO: 770835 - DNA, 120 bp, Artificial Sequence
  ENSG00000235194_46 (sequence is synthesized)
agtgctatggttcagaatacatagcaccccaagcgtctggctggagccgaggatgggtcctccagtttttggcacagatgttccggagcccaggaagcatcccataaccaaccttcagcc

SEQ ID NO: 770836 - DNA, 120 bp, Artificial Sequence
  ENSG00000235268_0 (sequence is synthesized)
ccaagcctgagaatcaggagaagcctcacagtgacacccccaactgaggaaactcacagagctgggacatactctacttcttcagaaaaaagtatactgactagagtggagtccccctgg

SEQ ID NO: 770837 - DNA, 120 bp, Artificial Sequence
  ENSG00000235268_1 (sequence is synthesized)
ggagtcagaaagcctgtgaaagatctcacttgttcaaaagtccaagtgtgaattactgtctcacagataaaccaaagtattttgaaaaacaaaggggagaaaagaaattactccccagaa

SEQ ID NO: 770838 - DNA, 120 bp, Artificial Sequence
  ENSG00000235268_2 (sequence is synthesized)
ctctcaggcatctagaggacacccaagaacgtgggagtcagctgcttcttgtgtgcagccatgaagtctgtgcactccagtccccagaacacgagtcataccatcatgacgttttaccca

SEQ ID NO: 770839 - DNA, 120 bp, Artificial Sequence
  ENSG00000235268_3 (sequence is synthesized)
accatggaagaatttgcagatttcaacacatatgttgcttacatggagtcccaaggcgcacatcaagctggccttgccaaggtaattccacccaaggaatggaaagccagacagatgtat

SEQ ID NO: 770840 - DNA, 120 bp, Artificial Sequence
  ENSG00000235268_4 (sequence is synthesized)
gatgatatcgaagacatcttaatagccactcccctccagcaggtgacctctgggcagggaggtgtgtttactcaataccataaaaagaagaaagccatgagggtggggcagtatcgccgc

SEQ ID NO: 770841 - DNA, 120 bp, Artificial Sequence
  ENSG00000235268_5 (sequence is synthesized)
ttggcaaacagtaaaaaatatcagactccgccacaccagaattttgcagatttggagcaacgatactggaagagccaccccggtaatccaccaatttatggtgctgatatcagcggctcc

SEQ ID NO: 770842 - DNA, 120 bp, Artificial Sequence
  ENSG00000235268_6 (sequence is synthesized)
ttatttgaagaaagcactaaacaatggaacctaggacacctgggaacaattctggacctgttggagcaggaatgtggggttgtcatcgagggtgtcaacacaccctacctgtactttggc

SEQ ID NO: 770843 - DNA, 120 bp, Artificial Sequence
  ENSG00000235268_7 (sequence is synthesized)
atgtggaagaccacgtttgcctggcacacagaggacatggacctttacagcatcaactacctgcactttggggagcccaaaacttggtacgtggtgcccccagaacatggtcagcacctg

SEQ ID NO: 770844 - DNA, 120 bp, Artificial Sequence
  ENSG00000235268_8 (sequence is synthesized)
gaacgcctggccagggagctcttcccagacatttctcggggctgtgaggccttcctgcggcacaaagtggccctcatctcgcctacagttctcaaggaaaatgggattcccttcaattgc

SEQ ID NO: 770845 - DNA, 120 bp, Artificial Sequence
  ENSG00000235268_9 (sequence is synthesized)
caatcacggcttcaactgcgcagaagccattaattttgccactccacgatggattgattatggcaaaatggcctctcagtgtagctgtggggagtcgacagtgaccttttccatggaccc

SEQ ID NO: 770846 - DNA, 120 bp, Artificial Sequence
  ENSG00000235268_10 (sequence is synthesized)
ctttgtgcgcattgtgcaacccgagagttatgagctctggaaacacaggcaagacttggccattgtggaacacacagagcccagggttgcagaaagccaagagctgagcaactggagaga

SEQ ID NO: 770847 - DNA, 120 bp, Artificial Sequence
  ENSG00000235268_11 (sequence is synthesized)
tgatatagtacttagaagagctgctctgggcctgaggcttctcccaaacctcacagcccagtgtcccacacagcctgtgtcctcagggcactgttacaacccaaaaggctgtggcactga

SEQ ID NO: 770848 - DNA, 120 bp, Artificial Sequence
  ENSG00000235268_12 (sequence is synthesized)
tgctgtgcctggatccgcattccaaagctctgcatatcatacccagacccagtcacttaccctggggatgtcagccagggttcttctcccttccactggaagctggggttctggtcgtgg

SEQ ID NO: 770849 - DNA, 120 bp, Artificial Sequence
  ENSG00000235268_13 (sequence is synthesized)
tcgtggtcgtggtcaaggtcaaggtcgaggttgcagtcgtggtcgtggtcatggttgttgtactcgagaactggggactgaggagccaactgttcagcctgcatccaagaggcgcctttt

SEQ ID NO: 770850 - DNA, 120 bp, Artificial Sequence
  ENSG00000235268_14 (sequence is synthesized)
aatgggtacaaggagtagagctcaaggccacaggcctcagctcccgcttgccaatgatttgatgacaaatctgtccctttgagtggtggccttcagcatcttgccaaggcttctggctgc

SEQ ID NO: 770851 - DNA, 120 bp, Artificial Sequence
  ENSG00000235268_15 (sequence is synthesized)
tgctgtgtccctgatcttcaactcctggggcccccactggatcgtgatgaaaccatgcaccctggcctgtgcctgctatccctcaacagcactactagtaatctccctgatgttgtctgc

SEQ ID NO: 770852 - DNA, 120 bp, Artificial Sequence
  ENSG00000235268_16 (sequence is synthesized)
atgactcctcccaatgtcattgtgcctttgattaagttttccagggacactggtggggactggaactgattaagttcaccagggacacttgcctggtgaacatgggcaaggctgtagcaa

SEQ ID NO: 770853 - DNA, 120 bp, Artificial Sequence
  ENSG00000235268_17 (sequence is synthesized)
tggaccacttttacggctctagggttctgactccaactaagttttccagaatctcctgggctcctgactcatctgctgggtctaaagacactgagtttagggatattttcctccaataca

SEQ ID NO: 770854 - DNA, 120 bp, Artificial Sequence
  ENSG00000235268_18 (sequence is synthesized)
tgatcaatcctctggatccacggctatggaatatggtgacaaatgtcagtgtctctcttattccaaccccaggatcagagaagattctttacctgcagtaactgacacatttccaaggcc

SEQ ID NO: 770855 - DNA, 120 bp, Artificial Sequence
  ENSG00000235272_0 (sequence is synthesized)
agatgttatatcactgcatgagatattcaggaagaactaaagtgttatttttgagaacccactctatgccaggtactgttctgggagttttacatgcgtgggttcatttatttctcacaa

SEQ ID NO: 770856 - DNA, 120 bp, Artificial Sequence
  ENSG00000235272_1 (sequence is synthesized)
ccactaatccaggtaggaccccctcattctacataggagggaactgaggccaaggacgggtgaggagcttgtctgatgccacacaattagagtgacggtgattagaactgattttgatgg

SEQ ID NO: 770857 - DNA, 120 bp, Artificial Sequence
  ENSG00000235272_2 (sequence is synthesized)
tacatttctcttgtacttatgaaaagcagatacgaatctctagtctgtgcttatctcatctttcttgcctccctctgtcccatgccagtgtccaaccaagcctttcttgggcctgtaggg

SEQ ID NO: 770858 - DNA, 120 bp, Artificial Sequence
  ENSG00000235272_3 (sequence is synthesized)
ctctgacccagggtctctggactgtgcactcttgtgtttcaggaaaatatttccctgagttcataaaagaaaaattatttcttccttatgtgttagtctaatgtcagggttcctgatgac

SEQ ID NO: 770859 - DNA, 120 bp, Artificial Sequence
  ENSG00000235272_4 (sequence is synthesized)
tggccactttgcttccacatggggatttgggggacccaggcttcttctttgtagctccaccagccctaagggcctgcagttagctgtggggggaaagagactatgaaagaagcacctgct

SEQ ID NO: 770860 - DNA, 120 bp, Artificial Sequence
  ENSG00000235272_5 (sequence is synthesized)
tctttaaggtacaccatccagacacactccattggccagggctagtcacatgaccacacctgcctgcaaggagggctgggtaatgtagtccccactgggaggcagctgaggggagcccca

SEQ ID NO: 770861 - DNA, 120 bp, Artificial Sequence
  ENSG00000235272_6 (sequence is synthesized)
gtctatggcaggagcagagatttctgaaagctgttggctccctctgccctggaggtaatgctgaaatttgactttgtgtataactgatgtgtgttacctttgtcatgtcttcagaataaa

SEQ ID NO: 770862 - DNA, 120 bp, Artificial Sequence
  ENSG00000235272_7 (sequence is synthesized)
ctgtggtcattctttttctttcctcctctggtatatatatggactagttcatgggccttattaaaagacttgtttggagaggaaggcgctcggttacattggagaactggagtggtctgg

SEQ ID NO: 770863 - DNA, 120 bp, Artificial Sequence
  ENSG00000235272_8 (sequence is synthesized)
tgagctggatagacatagcccttggcggatttaaacaacctaaacattaagcaatacagctgcctcaaacctttgggattttcagaatgactgacactgccgaagctgttccaaattttg

SEQ ID NO: 770864 - DNA, 120 bp, Artificial Sequence
  ENSG00000235272_9 (sequence is synthesized)
aagagatgtttgctagtagattcacagaaaatgacaaggagtatcaggaatacctgaaacgccctcctgagtctcctccaattgttgaggaatggaatagcagagctggtgggaaccaaa

SEQ ID NO: 770865 - DNA, 120 bp, Artificial Sequence
  ENSG00000235272_10 (sequence is synthesized)
gaaacagaggcaatcggttgcaagacaacagacagttcagaggcagggacaacagatgggggtggccaagtgacaatcgatccaatcagtggcatggacgatcctggggtaacaactacc

SEQ ID NO: 770866 - DNA, 120 bp, Artificial Sequence
  ENSG00000235272_11 (sequence is synthesized)
cgcaacacagacaagaaccttactatccccagcaatatggacattatggttacaaccagcggcctccttacggttactactgatagaaatgttggcagcttttagtaaaagcatttactc

SEQ ID NO: 770867 - DNA, 120 bp, Artificial Sequence
  ENSG00000235272_12 (sequence is synthesized)
tgttaccatgagaaaagtttgggtgtcttctgttggtcatagttttacatctgattttacagaatggattattgattttttggaagttgagactttaaaaaaaatagatcttacttgcga

SEQ ID NO: 770868 - DNA, 120 bp, Artificial Sequence
  ENSG00000235272_13 (sequence is synthesized)
aatgcgatggttgctgggaatacctgaaactgtggattatattgcttgacttctacctcagaatcttctttgtttcatgacttaatagtgctttaagtttggtatattatttgacctcta

SEQ ID NO: 770869 - DNA, 120 bp, Artificial Sequence
  ENSG00000235272_14 (sequence is synthesized)
ggaattctttgttttacacagaaataaaaattttaaaatagaaaatgcttttactttgtaaggtaagagagtatccatatgcttagatgtgctcgtttctaaaattctagaggttgatat

SEQ ID NO: 770870 - DNA, 120 bp, Artificial Sequence
  ENSG00000235272_15 (sequence is synthesized)
aatcagctcatgaatgcacagctatgctttttgtgatagattgtacataacatcagcagttgaaaggtaaaacaattgcttttttttttttttgcatttgttaagtgactatggtacttt

SEQ ID NO: 770871 - DNA, 120 bp, Artificial Sequence
  ENSG00000235376_0 (sequence is synthesized)
ctggccaaactgtggttctttggtagaatttcctggttttaaaaaaaaaaaaagtgggctctagtcttgccggggactcgtggggtaacttgttcttgggagccagcggtatggcgtcgg

SEQ ID NO: 770872 - DNA, 120 bp, Artificial Sequence
  ENSG00000235376_1 (sequence is synthesized)
gctgcaagattggcccgtccatcctcaacagcgacctggccaatttaggggccaagtgcctccagatgctagactctggggccgattatctgcatctggatgtaatggatgggcattttg

SEQ ID NO: 770873 - DNA, 120 bp, Artificial Sequence
  ENSG00000235376_2 (sequence is synthesized)
ttcccaacatcacctttggtcaccctgtggtagaaagccttcgaaagcagctaggccaggaccctttctttgacatgcacatgatggtgtccaagccagaacagtgggtaaagccaatgg

SEQ ID NO: 770874 - DNA, 120 bp, Artificial Sequence
  ENSG00000235376_3 (sequence is synthesized)
ctgtagcagaagccaatcagtacacctttcatctcgaggctactgagaacccagggactttgattaaagacattcgggagaatgggatgaaggttggccttgccatcaaaccaggaacct

SEQ ID NO: 770875 - DNA, 120 bp, Artificial Sequence
  ENSG00000235376_4 (sequence is synthesized)
cagttgagtatttggcaccatgggctaatcaaatagatatggccttggttatgacagtggaaccggggtttggagagcagaaattcatggaagatatgatgccaaaggttcactggttga

SEQ ID NO: 770876 - DNA, 120 bp, Artificial Sequence
  ENSG00000235376_5 (sequence is synthesized)
ggacccagttcccatctttggatatagagggcgatggtggagtaggttctgacactgtccataagtgtgcagaggcaggagctaacatgactgtatctggcagtgctattatgaggagtg

SEQ ID NO: 770877 - DNA, 120 bp, Artificial Sequence
  ENSG00000235376_6 (sequence is synthesized)
aagaccccagatctgtgatcaacctattaagaaatatttgctcagaagctgctcagaaacgttctcttgatcgatgaaaccataaggagcccaatgtttctgttcatgaaatctcccttt

SEQ ID NO: 770878 - DNA, 120 bp, Artificial Sequence
  ENSG00000235376_7 (sequence is synthesized)
tactggaaaacaggaatattgactaccaaatcatcatgaaattgaagctgtactgcttttttgagcagttattcattccagtgattaaaactgattgtgcagaatattctaagaggtcag

SEQ ID NO: 770879 - DNA, 120 bp, Artificial Sequence
  ENSG00000235376_8 (sequence is synthesized)
agagtaaaaatacggctgcattaaggttacaaacagaaaagtgtcttaatgcctaaggagggcatattagctacactacaaaaacaaattttgtctgtacttctgaaaagaattttgttg

SEQ ID NO: 770880 - DNA, 120 bp, Artificial Sequence
  ENSG00000235376_9 (sequence is synthesized)
tttctcagctgttttccaaaagcaaaggaagtctttatggcttttttctatttcatgttatttgtgatttgtttataagtttgggtgggatggcataccatattcttggttcttaaaatc

SEQ ID NO: 770881 - DNA, 120 bp, Artificial Sequence
  ENSG00000235376_10 (sequence is synthesized)
tatcacttttcaccttacacttaatgtgtaaaaactataaaaacaatgcgtgaaacccaggggttctaaaatacaagcatagattttatcagggtgtttttgtcaaagcaggttattcag

SEQ ID NO: 770882 - DNA, 120 bp, Artificial Sequence
  ENSG00000235376_11 (sequence is synthesized)
tgattcctccccaccattcttaaggacgttaaataatgctgttgtgttagctctgagtagaaaggaaaaagtaaaaacctctgtatggaagtaatattgggttgaattctgactgccctt

SEQ ID NO: 770883 - DNA, 120 bp, Artificial Sequence
  ENSG00000235376_12 (sequence is synthesized)
ttctagctggacctttaacaaatcacccagtcttttttgtgtttctctgaagtcatttatacattaaatgtaattataacaactgtggggttgtgttgagaattaagaggtaacactata

SEQ ID NO: 770884 - DNA, 120 bp, Artificial Sequence
  ENSG00000235376_13 (sequence is synthesized)
taaagtttctagtactagtcccagaatttagaatatgctcaatacaaagtagatagcattatataagtttatatttttgtgagttataaagtactttgatatattctcattaaatctgta

SEQ ID NO: 770885 - DNA, 120 bp, Artificial Sequence
  ENSG00000235376_14 (sequence is synthesized)
tgtaaatcacctctataagtaagtggtaataataaagcagatatttttgtccccatttaaaaaaaaaaaaaagtgttccctaacagtttccagagcacgagctgaagggattgacgggct

SEQ ID NO: 770886 - DNA, 120 bp, Artificial Sequence
  ENSG00000235376_15 (sequence is synthesized)
cctcaaaggctatacacttttcatggccttgtctcttccaggtacagtgctggctacttttacatatatgttgtcaacaaatcctcaggataattctaaggcaattctactgcaaatgag

SEQ ID NO: 770887 - DNA, 120 bp, Artificial Sequence
  ENSG00000235376_16 (sequence is synthesized)
atactatcttaatttacagttgacaaaaactgagtctcaggaaggttgcctgacctgctcaaggtcatatagctagtaagggtgcagtataggttcgaacccacctgcctgattacgtct

SEQ ID NO: 770888 - DNA, 120 bp, Artificial Sequence
  ENSG00000235387_0 (sequence is synthesized)
acagaggctgcagcacccagggaggaacgccgtggtccctgggacggccaccaggccaggaggctgcagcaccagggaatctgtgctcacgtcttccaggacagtgcttcttctagaagc

SEQ ID NO: 770889 - DNA, 120 bp, Artificial Sequence
  ENSG00000235387_1 (sequence is synthesized)
tgacatggagctgaccacagctcttggaggcatggcctgaggcttagaaaatagacagagatcatctgagatttcagcagtggggccacgtggcagcgcccgaaggcctggagcaggagc

SEQ ID NO: 770890 - DNA, 120 bp, Artificial Sequence
  ENSG00000235387_2 (sequence is synthesized)
gacccagggactcagagcagcatcttcttaggagacggaaggagagccgccggaggagcacggggcacctgcgatcgcgaagagcctcctgttctggatgggagcgaaggctccgagagg

SEQ ID NO: 770891 - DNA, 120 bp, Artificial Sequence
  ENSG00000235387_3 (sequence is synthesized)
acctaaggttgctcagtgggccatggaaacggcagtgattggggtggtggtggtgctgttcgtggtgactgtggccatcacctgcgtcctctgctgcttcagctgtgactcaagggccca

SEQ ID NO: 770892 - DNA, 120 bp, Artificial Sequence
  ENSG00000235387_4 (sequence is synthesized)
ggatcctcaggggggtcctggccgcagcttcacggtggccacgtttcgccaggaagcttctctcttcacggggcctgttcgccatgcccagccagtgccaagtgcccaggacttctggac

SEQ ID NO: 770893 - DNA, 120 bp, Artificial Sequence
  ENSG00000235387_5 (sequence is synthesized)
cttcatgtgacgcccgagtccccaggatttgctgtgctgatgggtcagactcacccgctcctcagcaagccttccctggccttcccctcctcccagggccttctccctgtccttcccctc

SEQ ID NO: 770894 - DNA, 120 bp, Artificial Sequence
  ENSG00000235387_6 (sequence is synthesized)
gccctccagcctcagggatccttgttattgggacagcccagctggggttgacccacaggatggggcttaggagagctctgaggagtgagtgaacagacagcgccggagtgcacggtgggc

SEQ ID NO: 770895 - DNA, 120 bp, Artificial Sequence
  ENSG00000235387_7 (sequence is synthesized)
cggctctgctgatctacaccaggaactgaaatatcactggaatttattgtaaacggtgtgcctatgatgctggttctgttgccacctgggcacgcagcaccctcaagtggacatttctag

SEQ ID NO: 770896 - DNA, 120 bp, Artificial Sequence
  ENSG00000235387_8 (sequence is synthesized)
aaaccgcttcttacttgctcctaattgattacttttgcacattgcacagaacccaacctcgaggcctgctccctgccagttgcctgaaatcagccctgaaattctgaaaccaaagagctg

SEQ ID NO: 770897 - DNA, 120 bp, Artificial Sequence
  ENSG00000235387_9 (sequence is synthesized)
cttcctgagaacaagttatttaccttagaattgaaaatgtatatccttttatgggcctttccaaatctgattagaaaaaccacaaaaggaaacagaagagaaaataagagccacagaaag

SEQ ID NO: 770898 - DNA, 120 bp, Artificial Sequence
  ENSG00000235387_10 (sequence is synthesized)
tacaatatgttttattaacaggaaagccagaaataagatattttaaacatatttttaatgagactttattgctatattccaacaggtcactcctattcttagagaatgtgaatgacttgt

SEQ ID NO: 770899 - DNA, 120 bp, Artificial Sequence
  ENSG00000235387_11 (sequence is synthesized)
gtcacttcggagtgacagaaaaatcaggaactgaaagataattccagacaagttaaaatgttatgttacattcaaagctcttgttttcatcacaaataaggggatattcagtttttatta

SEQ ID NO: 770900 - DNA, 120 bp, Artificial Sequence
  ENSG00000235387_12 (sequence is synthesized)
acagaaaacccattctcccatggccatggaataaatgccatgctatatttaaggagtttggtttgaagggtgcaaaattgtgagcctcctggctcttatgtctgtatccagccctgaata

SEQ ID NO: 770901 - DNA, 120 bp, Artificial Sequence
  ENSG00000235387_13 (sequence is synthesized)
cgtcaccggagggccagcgctggctaggctgtctctgtgcaacgtcttctgacccctcctctccaccttctctgtgtccagggaatctgtgctcacgtcttccaggacagtgcttcttct

SEQ ID NO: 770902 - DNA, 68 bp, Artificial Sequence
  ENSG00000235387_14 (sequence is synthesized)
gagtagctgggattaaaggtgcacacgaccacccctggctaatttttgtagtttttgaagtgatccac

SEQ ID NO: 770903 - DNA, 120 bp, Artificial Sequence
  ENSG00000235387_15 (sequence is synthesized)
tacaggtgtgagccaccactcccggccccatctgcatctttgacttgaagaagaagcaggtctttgccctgtacagttttaattgacagtccaggaagcctccctcatagagtaaacttc

SEQ ID NO: 770904 - DNA, 120 bp, Artificial Sequence
  ENSG00000235387_16 (sequence is synthesized)
aggaagcctccctcatagagtaaacttctgtggacggctggaattaagggttaacagacatcagtcctgacccagcctgcttaaggccttcctaaggctttgcacctgcagagatacagg

SEQ ID NO: 770905 - DNA, 120 bp, Artificial Sequence
  ENSG00000235387_17 (sequence is synthesized)
tgcttctccttcacttcctggggcttctctcagctccacatggggcaaagagcagggagaaccctgctcagttctgtctagcccgactgggacgtggaaaggctaatccgagccccactt

SEQ ID NO: 770906 - DNA, 120 bp, Artificial Sequence
  ENSG00000235387_18 (sequence is synthesized)
ctgccactcagttgctgggcctcagtttccctggctgtacggagaaggagaaaacaagatggaacccagtgactggccaccatggacacatgcaagggagaaggagaagtccccagtagg

SEQ ID NO: 770907 - DNA, 120 bp, Artificial Sequence
  ENSG00000235387_19 (sequence is synthesized)
aaaaggaatgtgtacaatgaaatgtaatgatgtataatacattggctgtttttgaattccaaccatggatttcccagctactggcagtgaaactgatcttttctgtgacacgcctgtccc

SEQ ID NO: 770908 - DNA, 120 bp, Artificial Sequence
  ENSG00000235387_20 (sequence is synthesized)
cctttgtcttctgccatgagtggaaacttcctgaggcctcaccagaagctgagcagatgctggtaccaaacttgtacagcctgtagaaccacaaggcaaataaatctctttttgaaaata

SEQ ID NO: 770909 - DNA, 73 bp, Artificial Sequence
  ENSG00000235387_21 (sequence is synthesized)
tgcatttggctgaagtccttcctttgaaggggacctgggcagcacatctccacagaaactctgtagggtcctg

SEQ ID NO: 770910 - DNA, 120 bp, Artificial Sequence
  ENSG00000235387_22 (sequence is synthesized)
ttggctgaagtccttcctttgaaggggacctgggcagcacatctccacagaaactctgtagggtcctgttcttggaagagcctagactggtcagaggctggagtgcaatggcacgatctc

SEQ ID NO: 770911 - DNA, 120 bp, Artificial Sequence
  ENSG00000235453_0 (sequence is synthesized)
cccgccgctccagaccccggaggagggcagcgcgaccctccccatcttgttactggtactcagccactggggacactgactgaatgttcgcccctaacttacccggaaaacacgagaact

SEQ ID NO: 770912 - DNA, 120 bp, Artificial Sequence
  ENSG00000235453_1 (sequence is synthesized)
agttcgatgtcgtttcaaccttaccaaactctgcggaaacttaggaaattatctttagtgtctagataggggaattgttagatggacttgaagtctctcacctcctgttgtacgcctccc

SEQ ID NO: 770913 - DNA, 120 bp, Artificial Sequence
  ENSG00000235453_2 (sequence is synthesized)
ggaagcaacaccaggagtccaacgggatcccaaaccagagcccaaccagtatcctataaagtcttcagagagggatcccctccaggctggggagaaacaggacaacctaacaaaacaggg

SEQ ID NO: 770914 - DNA, 120 bp, Artificial Sequence
  ENSG00000235453_3 (sequence is synthesized)
cctggactcctccctaaacagaccacgtttttctccgctcttccccttcccactccctgaaatctagactaaaactcttttaagataactgcgaggtataaagaacgtctagagcctaag

SEQ ID NO: 770915 - DNA, 120 bp, Artificial Sequence
  ENSG00000235453_4 (sequence is synthesized)
gccccaaacattctagagctgaacctggcgggcaaggcccccgatcacgtgataccgccccccaactccgggcggaagaggccagcgacagcgctgcacgaagcgagtgggcgggcgctc

SEQ ID NO: 770916 - DNA, 120 bp, Artificial Sequence
  ENSG00000235453_5 (sequence is synthesized)
gtgcccggctaaaagatggctgctggcgcctggcagccaccgcctgggaggttactgtaaggcccgcagctcccgccagctcccgcggactgctgccgcctccttaccatgaagccagta

SEQ ID NO: 770917 - DNA, 120 bp, Artificial Sequence
  ENSG00000235453_6 (sequence is synthesized)
agtcgtcgcacgctggactggatttattcagtgttgctgcttgccatcgttttaatctcctggggctgcatcatctatgcttcgatggtgtctgcaagacgacagctaaggaagaaatac

SEQ ID NO: 770918 - DNA, 120 bp, Artificial Sequence
  ENSG00000235453_7 (sequence is synthesized)
ccagacaaaatctttgggacgaatgaaaatttgtaactcttctggatttaattatctgaaaatacagttctttccctcatgcttatgtagatataaaaataaaattcataatgcaaagtt

SEQ ID NO: 770919 - DNA, 120 bp, Artificial Sequence
  ENSG00000235453_8 (sequence is synthesized)
tcgtcgcacgctggactggatttattcagtggttccaggtccagaagaggagcctgctctccctgttactgtaggggttgatggagtatcttgacaagcagccgtccatgtcgaagggac

SEQ ID NO: 770920 - DNA, 120 bp, Artificial Sequence
  ENSG00000235453_9 (sequence is synthesized)
cctggcaggagaactagccttccggtgtgcagagacggctgccacccttggctcctctgttgtatagctgccgtcgtactgcacagactggagcttctggcacatggagcggaggacccg

SEQ ID NO: 770921 - DNA, 120 bp, Artificial Sequence
  ENSG00000235453_10 (sequence is synthesized)
caggaattcctcctgagcctctgcacccaccatggaggagcaggagctcacctctctcaggtaactccggatccggctttcacagctgtatctcagatagccagacttattccaaaatcg

SEQ ID NO: 770922 - DNA, 120 bp, Artificial Sequence
  ENSG00000235453_11 (sequence is synthesized)
ggactccaagccttcaaaccacagcgggtcctcagcccgggtgtcggctgcgacgttctggctgacgttgtacaggaggtcggccagcagtctctgcctctgtgggggcctgctcatcac

SEQ ID NO: 770923 - DNA, 120 bp, Artificial Sequence
  ENSG00000235453_12 (sequence is synthesized)
acagtagctgccgggcggcctggatgagccacgcgtgcggctggcgaaaagcactgaggaagcacccgatgtcactcacatagccctgccaggcctggcgtgaggtgagcagcaccagct

SEQ ID NO: 770924 - DNA, 120 bp, Artificial Sequence
  ENSG00000235453_13 (sequence is synthesized)
cggcatcgtcgaggacgcttcggtcagctccatgccatcctcgtacgagggagctagaagcagaggtagcccttgcgcagcatctcccggcagctcctgcccgccatgccaaacttcctc

SEQ ID NO: 770925 - DNA, 120 bp, Artificial Sequence
  ENSG00000235453_14 (sequence is synthesized)
gggctgcacagggcccgcagcttcacagtcttgtgcttctggagcactgcagatgtactcaacgcctctgggccccgcaggcagtggcacccgctggccagctgctcaagctggtccagg

SEQ ID NO: 770926 - DNA, 120 bp, Artificial Sequence
  ENSG00000235453_15 (sequence is synthesized)
ccccagtcacagggctctacaccaggtgtgctctgcaaaactggcatgggccgggaaccgatcccagaaactcagtgccattttgctaacagcatgtgttcacttcacgtctctgtgcca

SEQ ID NO: 770927 - DNA, 73 bp, Artificial Sequence
  ENSG00000235453_16 (sequence is synthesized)
actttgtcactattgttatattaatatttgttatggtaatctgcactcagtgatttttgatgttactactaca

SEQ ID NO: 770928 - DNA, 120 bp, Artificial Sequence
  ENSG00000235453_17 (sequence is synthesized)
tggtaatctgcactcagtgatttttgatgttactactacaaattttaggggcaacacaaatcacacccatataagatagtgaatttaataagtaaatgttgtgtgttgtgactgttccac

SEQ ID NO: 770929 - DNA, 120 bp, Artificial Sequence
  ENSG00000235453_18 (sequence is synthesized)
caactggccattccccacctctctccctctccttggactgtcctattccctgagacacaacaatactgaaattaggccaatttaataacactacaatgacctctaactgttcaaataaaa

SEQ ID NO: 770930 - DNA, 72 bp, Artificial Sequence
  ENSG00000235453_19 (sequence is synthesized)
tttaataacactacaatgacctctaactgttcaaataaaagaaagagctgcatgtttctcacttcatatcaa

SEQ ID NO: 770931 - DNA, 120 bp, Artificial Sequence
  ENSG00000235453_20 (sequence is synthesized)
cctgagtgacacagcaagaccttgtctcaaaaagaaaaaaaaaagatagtgattcctctgatggatctaggcaaagaaaatggaaaatcttctgggaaagaatttactatcctatatgcc

SEQ ID NO: 770932 - DNA, 120 bp, Artificial Sequence
  ENSG00000235453_21 (sequence is synthesized)
attaagaagatttgtgattaacaggaggaggtcaaagtatcaacatgaacaagagtttggaagaagttgatttcaactctcgtggatgactttgaggggttcaggaattcggtgcaggaa

SEQ ID NO: 770933 - DNA, 120 bp, Artificial Sequence
  ENSG00000235453_22 (sequence is synthesized)
ggaactcgatgtagtggatatagcaaaagaactagaattagaagtggagcctgaccatgtgactgaagtgcctccatcacatgataaagcttgatagatgagaaggtgctccttttggat

SEQ ID NO: 770934 - DNA, 120 bp, Artificial Sequence
  ENSG00000235453_23 (sequence is synthesized)
atgataaagcttgatagatgagaaggtgctccttttggatgagcaaacaaagtggtttcttgagatggaatctgctcctggtgaagatgctatgaacattgttgaaatgacaacaaagaa

SEQ ID NO: 770935 - DNA, 120 bp, Artificial Sequence
  ENSG00000235453_24 (sequence is synthesized)
tggtttgaaaggcctgactccaattttgaaagttatactgtgggtaaaatgctatgctatcaaacagcatctcatgctacagagatatctttcgtgaaaataaaagtcaatcgatgtggc

SEQ ID NO: 770936 - DNA, 120 bp, Artificial Sequence
  ENSG00000235453_25 (sequence is synthesized)
tggatttattcagtggtaagtcccggggatcgcgggcccccaccgtgtcgactcactgggcccgcaggcggaaaggccctatttcttcagcacccagaaactccaaaatccattcctgaa

SEQ ID NO: 770937 - DNA, 120 bp, Artificial Sequence
  ENSG00000235453_26 (sequence is synthesized)
aagggctgctgggtgtacccgccactggaaccccatttattcgactttgttactttaattcccaccttagcaatggcaacggtaacctgacgggggcgaggggaaatatcaggtagattt

SEQ ID NO: 770938 - DNA, 120 bp, Artificial Sequence
  ENSG00000235453_27 (sequence is synthesized)
ctatttcttcagcacccagaaactccaaaatccattcctgaattaagcatttcactccctcacctcgactccgcctcttcctggaggatacgatcttccgcttcttacttgctgcttgcc

SEQ ID NO: 770939 - DNA, 120 bp, Artificial Sequence
  ENSG00000235453_28 (sequence is synthesized)
atttattcagtgaacagtcaagaaggatggagctgcccatttgccatggaaatggagagccagcagacagctgatgcataaacaacttgtccctcaaacaagagtggctaacttcagcca

SEQ ID NO: 770940 - DNA, 120 bp, Artificial Sequence
  ENSG00000235453_29 (sequence is synthesized)
tgacaccgttttagtatggtgaccacaccacatgagcaaaccaaatactggtaaaaccagagaacagaagaattcctcagctcaggacaattcttatccctactgacgactcacaagaca

SEQ ID NO: 770941 - DNA, 120 bp, Artificial Sequence
  ENSG00000235568_0 (sequence is synthesized)
gtgaactaaagagtcgccgcagacaagcaggcccccagatggagaaccagcctgtgaggtggcgggccctgccaggcctcccacgccctcctgggctccccgcagccccctggctcctcc

SEQ ID NO: 770942 - DNA, 120 bp, Artificial Sequence
  ENSG00000235568_1 (sequence is synthesized)
ttggcgtgctgctgctgcccgggaccctgcgactggcaggaggacagtcagtgacccacaccggcctgcccatcatggcctccctggccaacacagctatctccttcagctgcaggatca

SEQ ID NO: 770943 - DNA, 120 bp, Artificial Sequence
  ENSG00000235568_2 (sequence is synthesized)
cctatccatacactccccaattcaaggttttcacagtcagctactttcatgaagatctccagggacagaggagccctaagaagccaacaaactgccaccctggactgggcacagagaacc

SEQ ID NO: 770944 - DNA, 120 bp, Artificial Sequence
  ENSG00000235568_3 (sequence is synthesized)
agagccacaccctggactgccaggtcacccttgtgctgccgggagcatcggccactggcacctactactgctctgtccactggccacactccacggtgagaggcagcggcaccttcatcc

SEQ ID NO: 770945 - DNA, 120 bp, Artificial Sequence
  ENSG00000235568_4 (sequence is synthesized)
tggtcagagacgcagggtaccgagagcccccgcagagtccacagaagctcctgctctttggcttcaccggcctcctgagtgtcctgagtgtagtgggcacggccctgctgctctggaaca

SEQ ID NO: 770946 - DNA, 120 bp, Artificial Sequence
  ENSG00000235568_5 (sequence is synthesized)
agaagcggatgcggggtccagggaaggaccccaccaggaagtgcccagatccaagatctgccagcagccccaagcagcatccttcagaatctgtctacacagctctgcagcgccgcgaga

SEQ ID NO: 770947 - DNA, 120 bp, Artificial Sequence
  ENSG00000235568_6 (sequence is synthesized)
ccgaggtctatgcctgcatcgagaatgaggatggcagctcacccaccgccaagcagagccccctctcccaggagagaccgcatagattcgaagatgatggcgaacttaacctggtctatg

SEQ ID NO: 770948 - DNA, 120 bp, Artificial Sequence
  ENSG00000235568_7 (sequence is synthesized)
aaaatctctaggatgggctccaccgctcatagagcttgccctgggtcagaggaccggggcagcccctgccaccaaaggacttgatctgagttgggagtaaggcccccagggacaccccat

SEQ ID NO: 770949 - DNA, 120 bp, Artificial Sequence
  ENSG00000235568_8 (sequence is synthesized)
catttcaccctcacattcaaggcccttcctgtcttggccggccccactgcccccccattctatgccccaaccaccaaggctttcccatcttggggcctttgcccaggctgttccttctgc

SEQ ID NO: 770950 - DNA, 120 bp, Artificial Sequence
  ENSG00000235568_9 (sequence is synthesized)
caggcaggcccttcctcccttggcccaaccagcaaagcgcccctcagtcttcaagggctttcctggatgccacccttgcccagagccctgctcactgcctcatgctgacagagcagcatg

SEQ ID NO: 770951 - DNA, 120 bp, Artificial Sequence
  ENSG00000235568_10 (sequence is synthesized)
ctctcttggcaccagcctgcacctcagccagtagggcagcctctgagctgagggaggaccctgcaggggcgcctagcagtgctgtgtggggagccgaggtatggaggagctggggagcag

SEQ ID NO: 770952 - DNA, 120 bp, Artificial Sequence
  ENSG00000235568_11 (sequence is synthesized)
ctatgcaaatccctacctacccagctgggccagaggcacgaggcagccaggcagggtgggagcaggggctggcgtgggaggtctgggggacagacaaggatgatggacccctcagaggca

SEQ ID NO: 770953 - DNA, 120 bp, Artificial Sequence
  ENSG00000235568_12 (sequence is synthesized)
agactaggatcagggacagatctggaggcccaggacatggctgagaggtggtcagcaggctgggggcatggagcagagagggcttgggtacaagctggagaggaaggagattctggcatg

SEQ ID NO: 770954 - DNA, 120 bp, Artificial Sequence
  ENSG00000235568_13 (sequence is synthesized)
ttggggtgagggcagagggacagatgaggggaggagggtgctggctaaacaggaactgaatgaatggcctgaagctccctctcccaagggttcccactcccattggcctggccctgtacg

SEQ ID NO: 770955 - DNA, 120 bp, Artificial Sequence
  ENSG00000235568_14 (sequence is synthesized)
tgcactctgtcatctccttggtcaccctctgctccaggccttctccaccacaggacctcagctgtccctccttctacccaaggtggagtcccccaaagtcccttctgtctggcctatcct

SEQ ID NO: 770956 - DNA, 120 bp, Artificial Sequence
  ENSG00000235568_15 (sequence is synthesized)
gtgcccaccacctgtggcttcatccagccctcctcctctatctttatctgccataggccgcagccctggccccctgtggattgaggtcccaagtggtccagctgtggggtttggtgctgg

SEQ ID NO: 770957 - DNA, 120 bp, Artificial Sequence
  ENSG00000235568_16 (sequence is synthesized)
gaccctcaatggcagccggaaggtccctctgaggcagaagctcaagccccatggggacagtggctccccagtgcctggccctgagccatttctgctgtttcaggtgcccacatcaccctc

SEQ ID NO: 770958 - DNA, 120 bp, Artificial Sequence
  ENSG00000235568_17 (sequence is synthesized)
atttcctcctcgcagtagccctgcaccgtggccagaaacccatccacaggcaggcagtggctggggtccgggtgccccgggctgttgggctctgcttcctccctctgctcccccatgtct

SEQ ID NO: 770959 - DNA, 120 bp, Artificial Sequence
  ENSG00000235568_18 (sequence is synthesized)
ccctgagttctcccacctttgctcatttgtaaaatgggcaggtcaatcttcccaccccaccgtgtgggctgccccaaccccaaatgtgcccagggaggggggggaacccaaggcacaggc

SEQ ID NO: 770960 - DNA, 120 bp, Artificial Sequence
  ENSG00000235568_19 (sequence is synthesized)
cccgcccctgcccccaagcagcactgggctactggctcacagaagcacctttggttctgcaggtcatgcccctccctgcagggaagggaaagctggtggtagaggctgggcacagactga

SEQ ID NO: 770961 - DNA, 120 bp, Artificial Sequence
  ENSG00000235568_20 (sequence is synthesized)
cgtccagaagaagtcccttggccctgctagggtggcaccagacttctctggtcccacaggacagccagtggcctcccaacttggttctgggcccccgcctgcaagcacacatggcaagga

SEQ ID NO: 770962 - DNA, 120 bp, Artificial Sequence
  ENSG00000235568_21 (sequence is synthesized)
gggctttagcaggctcacataaccgagtggcaaggcccctgctcccagaggctggatttgaatgaactccgggcctgtttggggaggtgaagctgccaggtgtgcacaggggcctcccag

SEQ ID NO: 770963 - DNA, 120 bp, Artificial Sequence
  ENSG00000235568_22 (sequence is synthesized)
gctcctggctccaccagccaaggaggtgggggcaagggtcagggcaatgggggacaatgccgctcagggtgcagtgagctcccctgggaaaaccgaagccagcaagaccaggagagggcc

SEQ ID NO: 770964 - DNA, 120 bp, Artificial Sequence
  ENSG00000235568_23 (sequence is synthesized)
attttccagtctttttcaggggtagacaggggagcctgggttaaactttaccactgtgccctggcccaggcatcaccaacacggcctccctgcagctgccctgccaccgacagaccccga

SEQ ID NO: 770965 - DNA, 120 bp, Artificial Sequence
  ENSG00000235568_24 (sequence is synthesized)
ttaaacccacacctggccttggcctcccctgctctataccttgcatggtttttgcctcacttggaataaaattccaactcctccctgtggcgtaggaggttcttgggggctgacccatca

SEQ ID NO: 770966 - DNA, 120 bp, Artificial Sequence
  ENSG00000235568_25 (sequence is synthesized)
cccctctggtggacagagacattgccagcgtggtggtcgtctgtgcttggttcagggcaaggctgggaggcagtgggtgctgaggtcttcagtgagcaaggagagaggcagggaggagga

SEQ ID NO: 770967 - DNA, 120 bp, Artificial Sequence
  ENSG00000235568_26 (sequence is synthesized)
ggaggaggaggagagcacagcatgaaaggacgggaccctaaagggctttggcccaagggagggtggggcaagaatgttctgagacttctgtgggcagcaaagaggactgagcacctgttc

SEQ ID NO: 770968 - DNA, 120 bp, Artificial Sequence
  ENSG00000235568_27 (sequence is synthesized)
tccagcccccaggactgagagcctgcagagacaagctggcacagggcgaggggtggcagggaacttcagggtgggaggtgcatggggcaggcgggaggaggaagaacagagaggggacag

SEQ ID NO: 770969 - DNA, 120 bp, Artificial Sequence
  ENSG00000235568_28 (sequence is synthesized)
agagggtatgaatgggagctcctggggtgcaggcttgctttccactatgaatgggtggaggagggaagagaagaaaattgcttttgagacccacccaggctgggtggcctcagggcctcc

SEQ ID NO: 770970 - DNA, 120 bp, Artificial Sequence
  ENSG00000235568_29 (sequence is synthesized)
cttgaatccctgctccacctcccacagccttgtggacttgggcaagtcactggccacctgagcctcagtttgcagtgacagtcaagacagctcaggccaggcgtagtggcttatgcctgt

SEQ ID NO: 770971 - DNA, 73 bp, Artificial Sequence
  ENSG00000235568_30 (sequence is synthesized)
agtggcaccactgcacaccagcctgggctacagagcacgctctgtccaaataaacaaacaaacaaacactact

SEQ ID NO: 770972 - DNA, 120 bp, Artificial Sequence
  ENSG00000235568_31 (sequence is synthesized)
agcacgctctgtccaaataaacaaacaaacaaacactactcagtgtctcagaaaggacagaaggggactccctggctcaggcagaagctcagtgggtgtgcatttccttcaagactcgtc

SEQ ID NO: 770973 - DNA, 120 bp, Artificial Sequence
  ENSG00000235568_32 (sequence is synthesized)
cttcagaaggaataggcttctggggcagtacagaggagtctaagtgagaggcaggcctccctgggagctgggcccaggctctctgcagccatgcctttaaggagtgcctacggggtagca

SEQ ID NO: 770974 - DNA, 120 bp, Artificial Sequence
  ENSG00000235568_33 (sequence is synthesized)
cgatcagatggacaggccagggctgcccagagctgggggtgggagcaaggtaagcagagaggtgagggaaggagggtgctggcttagcaggagctgaatgaatgggcctggaggggaaaa

SEQ ID NO: 770975 - DNA, 120 bp, Artificial Sequence
  ENSG00000235568_34 (sequence is synthesized)
gctaagggggatggggtggcttgagtggagtaggtgaggcctaggtgaaggggagctgtggaccttccaggacggacggatgtgagcagtcctgagtggggactggagttagggtgggga

SEQ ID NO: 770976 - DNA, 120 bp, Artificial Sequence
  ENSG00000235568_35 (sequence is synthesized)
agggaagccccaggcagcccctgcaggcccctgcccctgggccctaccgcagcagggcagccctgtctctgggtctcagctgatgcttccctctgcccactggcccctgacctggtggga

SEQ ID NO: 770977 - DNA, 120 bp, Artificial Sequence
  ENSG00000235568_36 (sequence is synthesized)
tttcccaccatctctcccggcccagcctgccctgccctcctaggtcttcccaacctcccctctgcagaaacatctcagccacgtctggcacccccaggcatccctgcctgcctctaggaa

SEQ ID NO: 770978 - DNA, 120 bp, Artificial Sequence
  ENSG00000235568_37 (sequence is synthesized)
gttgaccccttcaatgggtttcagcctccaaccccacccccgcttgactcctgctctgtcagcacttgcttgagaaaatcatcctgggaaaccagcttctgggagcaggggccttgccac

SEQ ID NO: 770979 - DNA, 120 bp, Artificial Sequence
  ENSG00000235568_38 (sequence is synthesized)
tcggttctgcgagcctgctgaagccctccttgccacgtgtgcttgcaggcgggggcccagaactaagctaggaggccactggctgtcctgtgggaccagggaagtctggtgccaccctag

SEQ ID NO: 770980 - DNA, 120 bp, Artificial Sequence
  ENSG00000235568_39 (sequence is synthesized)
cagagggcccatggacttcttctggaggtcagtctgtgcccagcctctaccaccagtccagaacttgcagtgggtgcggtaaacggtggcccctcctcagcaaacatttccaggggattc

SEQ ID NO: 770981 - DNA, 120 bp, Artificial Sequence
  ENSG00000235568_40 (sequence is synthesized)
tggcagcagagtttccatgggaacatgtgctggttctgcgctgaacccggtgtggctggggttcccttcacagccaatattgcaggaactgagcctggtggcctcggccagggtaggcag

SEQ ID NO: 770982 - DNA, 120 bp, Artificial Sequence
  ENSG00000235568_41 (sequence is synthesized)
tgctctttggccacccagtgtcacaaacctgaactcaagttacaggcaaaacctgcttttcctttttctttctctctctctctctttttttttttgttaaagcacattctaatgtaaagt

SEQ ID NO: 770983 - DNA, 120 bp, Artificial Sequence
  ENSG00000235568_42 (sequence is synthesized)
ccatgctccattctaaagatgcctctgggatttcagggatggatttttatgtagttcaatagttttcttggcagacagcttatgcaggagaggtgggccgttggctcagtccagccaggc

SEQ ID NO: 770984 - DNA, 120 bp, Artificial Sequence
  ENSG00000235568_43 (sequence is synthesized)
tgagtggcgtcactccattccttgcaatgccaggggatgtcatttgtccacctgagggggcttccccagtctcccttccctgacctgtggtcagaatgatggcctcagccttgactgagc

SEQ ID NO: 770985 - DNA, 120 bp, Artificial Sequence
  ENSG00000235568_44 (sequence is synthesized)
gcgggtcaggccagactctctgaacttggtgttggcgtgtgttttgtgtgtgtctggaggtgacatatgtgggtgacagaagcatatgttacagtgaaacattaaaactacagcaaagtg

SEQ ID NO: 770986 - DNA, 120 bp, Artificial Sequence
  ENSG00000235568_45 (sequence is synthesized)
tgagccagcacacccagccagttttcatcacattctcaaaggagtgatgatcccaaaagttatgagtgagcccatcaccaaagccctgattctctgacctacctctgcgatcccctggaa

SEQ ID NO: 770987 - DNA, 120 bp, Artificial Sequence
  ENSG00000235608_0 (sequence is synthesized)
gctggagccccgccgctcgcggccagcgacactgtgcctgcggcgcccgagggggctggagcggcccggcccgcagcgcccctgcgccccacctccttctcggtactggacatcctggac

SEQ ID NO: 770988 - DNA, 120 bp, Artificial Sequence
  ENSG00000235608_1 (sequence is synthesized)
cgccccacctccttctcggtactggacatcctggaccccaacaagttcaacagcaggaggcgtcgttgcgtgctgctgggcccagtggctcccgctgcgtgcgccccttgcgcttcggcc

SEQ ID NO: 770989 - DNA, 120 bp, Artificial Sequence
  ENSG00000235608_2 (sequence is synthesized)
ccacgcgcggaggagctggagcgccgcgccctcgccggcgccgggggagtcggagccgccggagctgagccgccgaacgccggcgaccccttcaaggcaggggaggccgagaccaacgac

SEQ ID NO: 770990 - DNA, 120 bp, Artificial Sequence
  ENSG00000235608_3 (sequence is synthesized)
gaccccttcaaggcaggggaggccgagaccaacgacaccaacggctacagcagcggcggcggcggccacagcccgagcgcggacagcggggacgaggttcccgacgacgaggacgacgac

SEQ ID NO: 770991 - DNA, 120 bp, Artificial Sequence
  ENSG00000235608_4 (sequence is synthesized)
cgaggttcccgacgacgaggacgacgacgaggacgaagcgcccgagacggaggcggcgcgaggcgcggaggaggcgcggggaggcggcggcggcctcggggcccgcgggtcgggttgcca

SEQ ID NO: 770992 - DNA, 80 bp, Artificial Sequence
  ENSG00000235608_5 (sequence is synthesized)
cgcgagaactcgcccgttgcccagggcccaccgggaggtgcagcggcgccggggggcgcggggaccaccccgcagggcac

SEQ ID NO: 770993 - DNA, 120 bp, Artificial Sequence
  ENSG00000235608_6 (sequence is synthesized)
gactccaagtccgggaagccgcggcgagcgcgcaccgccttcacctacgagcagctcgtggcgctggagaacaagttcaaggccacgcgctacctgtcggtgtgcgagcgcctcaacctg

SEQ ID NO: 770994 - DNA, 120 bp, Artificial Sequence
  ENSG00000235608_7 (sequence is synthesized)
gcgctgtcgctcagcctcaccgagacgcaggtgaagatctggttccagaaccgccgaaccaagtggaagaagcagaacccgggcgccgacaccagcgctccgaccggcggcgggggcgga

SEQ ID NO: 770995 - DNA, 80 bp, Artificial Sequence
  ENSG00000235608_8 (sequence is synthesized)
ccccgctcggcatgcacggcccggccgggtacccggcgcacggccccggaggcctggtgtgcgccgcgcagctgccgttc

SEQ ID NO: 770996 - DNA, 120 bp, Artificial Sequence
  ENSG00000235608_9 (sequence is synthesized)
cccggaggcctggtgtgcgccgcgcagctgccgttcctgtcgagcccggcggtgctctcgcccttcgtgctgggctcgcagacctacggggcgcccgccttctacgcgccgcacctctga

SEQ ID NO: 770997 - DNA, 120 bp, Artificial Sequence
  ENSG00000235631_0 (sequence is synthesized)
aatctactaaatattaaaatactggaaggagcaagatagctttgatccagggagaccttttccatttatgtgctttagtaatctgccgccaacaagctatcttctttatgttcttctaca

SEQ ID NO: 770998 - DNA, 120 bp, Artificial Sequence
  ENSG00000235631_1 (sequence is synthesized)
actgatgttgttttgttttctcatgtttgtctcttaatagacaaatggaggcatgagcttccttagaattaccccttcgacgcatagttctgtttcatctggacttttgaggcttagtat

SEQ ID NO: 770999 - DNA, 120 bp, Artificial Sequence
  ENSG00000235631_2 (sequence is synthesized)
ctttctactacttagctttcctgactcaaacggaaaagccatttggacagctcacctgaatataacatttcaggttggaaatgagatcacatcggaattaggagagagtggagtgttcgg

SEQ ID NO: 771000 - DNA, 120 bp, Artificial Sequence
  ENSG00000235631_3 (sequence is synthesized)
gaatcattctcctctggaaagggtgtctggtgtggtggcacttcctgaaggatggaatcagaatgcctgtcatcctttgaccaatttcagcaggcccaaacaggcagactcatggctggc

SEQ ID NO: 771001 - DNA, 120 bp, Artificial Sequence
  ENSG00000235631_4 (sequence is synthesized)
cctcatcgaacgtggaggctgtacttttacacataaaatcaacgtggcagcagagaagggagcaaatggggtgatcatctacaactatcaaggtacgggcagtaaagtatttcccatgtc

SEQ ID NO: 771002 - DNA, 120 bp, Artificial Sequence
  ENSG00000235631_5 (sequence is synthesized)
gaaattttgcactcgattcagaaaggagtctatgtgacagtcatcattgaagtggggagaatgcacatgcagtgggtgagccattacatcatgtatctatttaccttcctggctgccaca

SEQ ID NO: 771003 - DNA, 120 bp, Artificial Sequence
  ENSG00000235631_6 (sequence is synthesized)
attgcctacttttacttagattgcgtctggagacttacacctagagtgcccaattctttcaccaggaggcgaagtcaaataaagacagatgtgaagaaagctattgaccagcttcaactg

SEQ ID NO: 771004 - DNA, 120 bp, Artificial Sequence
  ENSG00000235631_7 (sequence is synthesized)
cgagttctcaaagaaggggatgaggaattagacctaaatgaagacaactgtgttgtttgctttgacacatacaaaccccaagatgtagtacgcattttaacttgcaaacattttttccat

SEQ ID NO: 771005 - DNA, 120 bp, Artificial Sequence
  ENSG00000235631_8 (sequence is synthesized)
aaggcatgcattgacccctggcttttagcccataggacatgtcccatgtgcaagtgtgacatcctgaaaacttaagaaatctggagaattttctgaagatgtaaccagatctttccaaat

SEQ ID NO: 771006 - DNA, 120 bp, Artificial Sequence
  ENSG00000235631_9 (sequence is synthesized)
acaaagattagataaattgtcttattgtactttatgtagagagaaaatttcagcttctctacccaagtatgaacaagggtgaaatttgtgttttaaaaataaaactccttatcatgccca

SEQ ID NO: 771007 - DNA, 120 bp, Artificial Sequence
  ENSG00000235699_0 (sequence is synthesized)
agaccactgggacaattcagtatggcaaaggtgaccagtgagccacagaagcctaatgaagatgtggacgaacagaccccatcaacctcaagtaccaaagggaggaagaaggggaagaca

SEQ ID NO: 771008 - DNA, 120 bp, Artificial Sequence
  ENSG00000235699_1 (sequence is synthesized)
ccggtgaaactaacacccctgcaggaaaacctaagaaagctagaggaccaatactgcgtggtcgttatcaccggctgaaagaaaaaatgaagaaagaagaggccgacaaagagcaaagcg

SEQ ID NO: 771009 - DNA, 120 bp, Artificial Sequence
  ENSG00000235699_2 (sequence is synthesized)
agacctcagttctgtgatgtctctagaggtccgccactgaaaagtcatcaatcatacagtcagtgaattctacaccaacaggttaaaaccatgaaaataaaatcaacctgaatcgaaagg

SEQ ID NO: 771010 - DNA, 120 bp, Artificial Sequence
  ENSG00000235710_0 (sequence is synthesized)
caggaatcgaagcttcactgagagtttcacaccatcattgggcacaaaggaggttgtgaaatggaccacaggggatttctctcacctttttatctgcccctcagtgctaagaacaaagag

SEQ ID NO: 771011 - DNA, 120 bp, Artificial Sequence
  ENSG00000235710_1 (sequence is synthesized)
ggagcgcctcagcctggctgtcaagcccttcatccattcaccgatgtattcattcagcaagcgactgccagccgcctatcaggagagagggagttttcagataaaggctctgggaatcct

SEQ ID NO: 771012 - DNA, 120 bp, Artificial Sequence
  ENSG00000235710_2 (sequence is synthesized)
gagaagggtggaaggtgcaggaatggacgccgtggagtacaggctggctggctggacaacacacacttcccattgagccagcaactcggatttaggagccagcagatggtgaccgaagtg

SEQ ID NO: 771013 - DNA, 120 bp, Artificial Sequence
  ENSG00000235710_3 (sequence is synthesized)
ccctgctctctggaagtccaggcaccagctcagctccacactagcctaggccctgcaagcagaataagctgaccctccccaacctgccggccacccattcaggagcactgctgggtgttt

SEQ ID NO: 771014 - DNA, 120 bp, Artificial Sequence
  ENSG00000235710_4 (sequence is synthesized)
atccagcaacccttagagctgggcttcagggttgggccctgaattcaaaccctaattttacgtgacctagtttcttgccctctgtgagacttcgtgtcctcacgtgtgaattggggtgat

SEQ ID NO: 771015 - DNA, 120 bp, Artificial Sequence
  ENSG00000235710_5 (sequence is synthesized)
cctcaaggtttaatgatggtgtgcatggaaggccctgggttcagggactggcactctactcatggtggttctcggtagaatgagaaccccagagagagcttccccgacagctgcagggac

SEQ ID NO: 771016 - DNA, 120 bp, Artificial Sequence
  ENSG00000235710_6 (sequence is synthesized)
cattgtttttctgctgttgaccttccattatcctctataacagtatcccaattttgctttgagaagttgccttttctccactgagcacagcctggtagggctggaattaggactccagta

SEQ ID NO: 771017 - DNA, 120 bp, Artificial Sequence
  ENSG00000235710_7 (sequence is synthesized)
ccactgccttcaccctgacaaggggtaggcacatgcctgtgtgaaccctgagagagccagcccttcgagatggatcctgaggggctatccgggtctgaattctgagtggcgctgaaagcc

SEQ ID NO: 771018 - DNA, 120 bp, Artificial Sequence
  ENSG00000235710_8 (sequence is synthesized)
atttgcctactgcaggttccctacatgccctgtgcaagccgaacagtagctcaatgttggggccttcttagctgtctgttcctgctcacactgccagaatcaactgctgccgacgtcctc

SEQ ID NO: 771019 - DNA, 120 bp, Artificial Sequence
  ENSG00000235710_9 (sequence is synthesized)
attctaccacctgaacctgaccaatgaaatgtgacccgtggtcaactttaacatcagcaaatcagaactgaacaagcttgcatccctcagatgcaatgggaactgggattagaatctaag

SEQ ID NO: 771020 - DNA, 120 bp, Artificial Sequence
  ENSG00000235710_10 (sequence is synthesized)
cagaaactttttctatgcaggatagcccttctctttgttctggcagacgtgcctttgttttatactgaaggctgagtctccccagttggcaaactgctggttggaataaagactcttttt

SEQ ID NO: 771021 - DNA, 120 bp, Artificial Sequence
  ENSG00000235711_0 (sequence is synthesized)
atgatggatgatgacactgaattaaggactgatggaaactctttgttaaaggctgtgtggctggggaggctcaggttgaccaggctgctcttggaagggggagcttatatcaatgaaagc

SEQ ID NO: 771022 - DNA, 120 bp, Artificial Sequence
  ENSG00000235711_1 (sequence is synthesized)
aatgacaaaggcgaaacagctctcatggtggcgtgcatcaccaaacatgtggaccagcaaagcatcagcaagtccaagatggtgaagtacctgctggacaacagggcagaccccaatatc

SEQ ID NO: 771023 - DNA, 120 bp, Artificial Sequence
  ENSG00000235711_2 (sequence is synthesized)
caagataagtctggcaagactgccctcatccatgcctgtatcagaagagctgggggagaagtggtctccttattactggagaatggagcagaccccagccttgaagatcgcactggggct

SEQ ID NO: 771024 - DNA, 120 bp, Artificial Sequence
  ENSG00000235711_3 (sequence is synthesized)
tcagctctggtttatgcaataaatgcagatgacaaggatgcattgaagcatctccttgatgcctgcaaagccaaagggaaggaggtgattattataacaacagataaatcgtcttcaggc

SEQ ID NO: 771025 - DNA, 120 bp, Artificial Sequence
  ENSG00000235711_4 (sequence is synthesized)
accaaaaccaccaaacagtatcttaatgtccctccttcacccaaagtagaagacaggcattcacctccactgtgtgcgtctccctctgacatagagctgaaggctctaggcctggactct

SEQ ID NO: 771026 - DNA, 120 bp, Artificial Sequence
  ENSG00000235711_5 (sequence is synthesized)
ccactcactgagaaggaagatgacttcttcagcctccaagcagggcatccaagcagttgtaacacctccaaggctgttaatgagcctgggtcacccaccaggaaagtcagtaatctcaaa

SEQ ID NO: 771027 - DNA, 120 bp, Artificial Sequence
  ENSG00000235711_6 (sequence is synthesized)
agggcccgtttgcctcaactgaagaggctccagtctgaaccttggggcctgatagcgccctcggtgctggcagcctcgacgcgtcaggatgagacccatggtgccagcacagacaacgag

SEQ ID NO: 771028 - DNA, 120 bp, Artificial Sequence
  ENSG00000235711_7 (sequence is synthesized)
gtcatcaagagcatcagtgatatatccttccctaaaagggggcccctctccagaaccaacagtatcgatagcaaagaccccaccctctttcacacagtcacagagcaggttctgaagatt

SEQ ID NO: 771029 - DNA, 120 bp, Artificial Sequence
  ENSG00000235711_8 (sequence is synthesized)
ccagtctcttcagcaccggcatcctggaaagcagcctatgagaaaggtcaggctccccacccacgtctggccaggagaggaactctccctgttgaccaagagaaatgtggtatgggtcca

SEQ ID NO: 771030 - DNA, 120 bp, Artificial Sequence
  ENSG00000235711_9 (sequence is synthesized)
tcaggaccctctgctctcaaagagcctgcatccctcaaatggctggaaaatgacctctatgacttagatatacagccagggcctgaccctcccaactccatttcccttgaatccggcaaa

SEQ ID NO: 771031 - DNA, 120 bp, Artificial Sequence
  ENSG00000235711_10 (sequence is synthesized)
ggacctttagatagaaagaagctcaacagctctcacttgtctcttttccatggctctcgggagtccctggacactgtacctagcacatcccccagctcagcacgccgcaggccgccacat

SEQ ID NO: 771032 - DNA, 120 bp, Artificial Sequence
  ENSG00000235711_11 (sequence is synthesized)
cttctagaacgacgaggttctggaactctgctccttgatcgcatttctcacactaggcctggcttcctgccgcctttaaatgtgaatctgaacccgcctattccagatattagatctagc

SEQ ID NO: 771033 - DNA, 120 bp, Artificial Sequence
  ENSG00000235711_12 (sequence is synthesized)
agcaaaccttcttgctctcttgctagtggcttaaaatctatggttcctgttgctccaagttcaccaaagagagttgacttaagaagtaaaaagaagctcctcagaaggcattctatgcaa

SEQ ID NO: 771034 - DNA, 120 bp, Artificial Sequence
  ENSG00000235711_13 (sequence is synthesized)
attgaacaaatgaaacagctgtctgattttgaagaaatcatgacctagaagctttagaaaggcttaaaatagtcaatatagtttatggaagggactatggatgagactgcttcctgatca

SEQ ID NO: 771035 - DNA, 120 bp, Artificial Sequence
  ENSG00000235711_14 (sequence is synthesized)
ttccttaatgttgaactgtggccacttcagaagatataaaagcaggatgctgcttcacttctgagaataatccctgggtttttataggcctacttgaaaagagctcaggataattgggtt

SEQ ID NO: 771036 - DNA, 120 bp, Artificial Sequence
  ENSG00000235711_15 (sequence is synthesized)
ttgaagataaatttttaaaaattctgcaaaggaagaaagcctttggaatttgaaggtaacacagcaagtacaatgatgtaagctggggacatcagtagttttctatcagacaaacagaaa

SEQ ID NO: 771037 - DNA, 120 bp, Artificial Sequence
  ENSG00000235711_16 (sequence is synthesized)
agaatttaaatcaggaggtagtatttggagtatgtcatttgtaataaatctataaagtgcctacatagaaaacgaggctttaacatttgttagaatgtacaaaagccccaaaccaaaccc

SEQ ID NO: 771038 - DNA, 120 bp, Artificial Sequence
  ENSG00000235711_17 (sequence is synthesized)
tcagtgactaaatctgggtgtctgggttctatctgatggagtagaagcagaattccccccatggaagaggctctggcctgtgggtcctggctctgactctgtcagggcactgtaaatcat

SEQ ID NO: 771039 - DNA, 120 bp, Artificial Sequence
  ENSG00000235711_18 (sequence is synthesized)
ggtgtggttgaactcgttcagtaatccagtaatatattttgttcacatactaatttgtatgtgctctgagtacccaaatatcccatctatgtggcccctgaattatgatatgtcatagta

SEQ ID NO: 771040 - DNA, 120 bp, Artificial Sequence
  ENSG00000235711_19 (sequence is synthesized)
gctgatgccttagagataaatcttgctccagaaatgaaactttccccagacccgtcccctgacacaggctcttgtattgaaatcttgtgaaaaacagtcaaggttaactaacttggagtt

SEQ ID NO: 771041 - DNA, 120 bp, Artificial Sequence
  ENSG00000235711_20 (sequence is synthesized)
agaagcatttccagattattcttaaaagttgatgagatcttcccaaaccagaatgacaactgaggatgagatgtgcatagattaaatggtaaagtgggtggttctcaggtgagaagcagt

SEQ ID NO: 771042 - DNA, 120 bp, Artificial Sequence
  ENSG00000235711_21 (sequence is synthesized)
gaggaccattcattttgcagcctaaaaattttaggggatgcaaactgtcatttccccttcagttatgtaaataattgaagaaaaatctggtttcttctcttcctgatctatctaggtgag

SEQ ID NO: 771043 - DNA, 120 bp, Artificial Sequence
  ENSG00000235711_22 (sequence is synthesized)
aagagatttgtagaaataacctgcacaacccttttaggctgctttgagcaaatccaagaaggaaagcagagacttagcacatttggtataatgtagccacatcttagatgaatatatttt

SEQ ID NO: 771044 - DNA, 120 bp, Artificial Sequence
  ENSG00000235711_23 (sequence is synthesized)
tggttatttccatttatgtttcctctcgtgctgctgagatctatttgctctatggttaaaaagttcaatagttcctgaggacagcatcatatagaggaaagagggctttgagtctgacat

SEQ ID NO: 771045 - DNA, 120 bp, Artificial Sequence
  ENSG00000235711_24 (sequence is synthesized)
atttgggtttgcataccagtcttatcatttaccagctgcgtgaccttgaggaggcagcttaacttctcttagtctctgttccctcatctgtaaaataggattagtagtgctgcaccttac

SEQ ID NO: 771046 - DNA, 120 bp, Artificial Sequence
  ENSG00000235711_25 (sequence is synthesized)
aaggttgtgatgagaattaaatgacacaatgtatgaaagtgctgccattgtgcctggcacaggtagaagtcactggataagaagtagctaattttaatgtatttcttgagactgctgaag

SEQ ID NO: 771047 - DNA, 120 bp, Artificial Sequence
  ENSG00000235711_26 (sequence is synthesized)
caatatctcaaataatacatacgctacacaaaatggaataaagtttctctggaaaagttcaagtatctctatgagatccccagttatttttataagtaccgatctctaaactcatgtgta

SEQ ID NO: 771048 - DNA, 120 bp, Artificial Sequence
  ENSG00000235711_27 (sequence is synthesized)
aagtaaaaaattctgccatataaactctacatattatataatttttctataactacctttgctagaaatttatctgaatattccaaacaaaagtgttaatgatggttaaacaaaaaaact

SEQ ID NO: 771049 - DNA, 120 bp, Artificial Sequence
  ENSG00000235711_28 (sequence is synthesized)
cggtgttgtttggagggctgtctgtcctgtgtgttgtaggatgtttagcagcatctctggcctccactcactagatggcagtaacaccctctccccagttgtgacaaccaaaaatgtctc

SEQ ID NO: 771050 - DNA, 120 bp, Artificial Sequence
  ENSG00000235711_29 (sequence is synthesized)
tagacgtggccagatgtctcctgggtgcatcaccttcgttgatctctactgctagacctatcgtatatgtcaagaacaacaaagctgtatggaaatgtgagtgctgactggacagctatg

SEQ ID NO: 771051 - DNA, 120 bp, Artificial Sequence
  ENSG00000235711_30 (sequence is synthesized)
ccctcctgttaacttaagacaattcaaattgtgctttagtaagaggactaatcaatactagtgttgggccttcaggattcttggcaaacacactccaacatgtgtgctaatggtctcata

SEQ ID NO: 771052 - DNA, 120 bp, Artificial Sequence
  ENSG00000235711_31 (sequence is synthesized)
ctttgtaggaagggaagaaaataaggaaagcacataaactagcaaaaatctatagctcatgaacttggtttagtgtggacaaccctgttcttttcagaactatttaatcattaatagttc

SEQ ID NO: 771053 - DNA, 120 bp, Artificial Sequence
  ENSG00000235711_32 (sequence is synthesized)
ttaccaagtagaagtgatcccaggcaaagaaacaactttccaatgcattcaagagagaatcatacggacaaccatcattctcagcagctcattaaatgcaaatacacacacgcaaagaga

SEQ ID NO: 771054 - DNA, 120 bp, Artificial Sequence
  ENSG00000235711_33 (sequence is synthesized)
gagagagaacacattttacatagttttccagctgttgttagtgtcacttaaaactgatctctgctggtagtattcagttgtgagtatagcaagacactgcataggagcattttttttcta

SEQ ID NO: 771055 - DNA, 120 bp, Artificial Sequence
  ENSG00000235711_34 (sequence is synthesized)
aacctttagctaagatttggaaacccaatatttcctaagtagtgaatgtggtctatttatagtaattagcttaggtgacacaccaaacatgatgagttgctcattcaggatagccggtcc

SEQ ID NO: 771056 - DNA, 120 bp, Artificial Sequence
  ENSG00000235711_35 (sequence is synthesized)
attgcacaaatgtgtaatatcaggtactctcatgccactcattgcctgcatcagtcagtcatgacctttgcatcagcctttcaatagacagtcatcaggctagtatcttatctcatcact

SEQ ID NO: 771057 - DNA, 120 bp, Artificial Sequence
  ENSG00000235711_36 (sequence is synthesized)
acttgacgatgagttcgccgaattagactgttctataccagtacaacaaccaaaatactttctcatagattatgcataaatacgcaattttgtccatgtcaatgaacctaacaagaatgc

SEQ ID NO: 771058 - DNA, 120 bp, Artificial Sequence
  ENSG00000235711_37 (sequence is synthesized)
tttttaaaagtatattttagattcaaacatgctttctagatcagaggttaacttgtctttttgaaatcctggagtcacttataagttagctgcaaactgtagtttcggtaattcaactgc

SEQ ID NO: 771059 - DNA, 120 bp, Artificial Sequence
  ENSG00000235711_38 (sequence is synthesized)
ttaagcatttctggactgtttatcaaaatatattacagaatgtgagactaaagtttaaagtctggacctttggtttaatttctagactttccaaagcttttttttttctttttaaaaagc

SEQ ID NO: 771060 - DNA, 120 bp, Artificial Sequence
  ENSG00000235711_39 (sequence is synthesized)
ccattgtcaactctcttagaacttcatcaagtaaatggtaccttgcaaatgtaggttgtgtctgaccttctttctttttgtgtgttggtgcctcagatgtatcatgtgctgcttgaactg

SEQ ID NO: 771061 - DNA, 120 bp, Artificial Sequence
  ENSG00000235711_40 (sequence is synthesized)
attctctacagtgttccttcctagtctcaagctgatgatgtgctcaaagatgtatcaaaatccatgtaatgacaccttttagatgtttctaatatgtcaataaatgatatattgcaatcc

SEQ ID NO: 771062 - DNA, 120 bp, Artificial Sequence
  ENSG00000235718_0 (sequence is synthesized)
acacagagacagagtagcccataggccaaaccactctaccaaggacagcccaagaactggtctagcctggcagccttttccctcgggtagtagaggctgcccctctgacagggagtttgt

SEQ ID NO: 771063 - DNA, 120 bp, Artificial Sequence
  ENSG00000235718_1 (sequence is synthesized)
ggtcagcgagtgggcccttgggggtcttgggctgtcacagggactccagaaagccatgcagagccttgtgccatgaaggacttctcagatgtcatcctctgcatggaggcaacagaatcg

SEQ ID NO: 771064 - DNA, 120 bp, Artificial Sequence
  ENSG00000235718_2 (sequence is synthesized)
agcaagaccgagttctgcaatcctgccttcgagcctgagtctgggccaccctgccctcccccagttttcccagaggatgccagctacagcgtcccagctccctggcatggtcggcgtcct

SEQ ID NO: 771065 - DNA, 120 bp, Artificial Sequence
  ENSG00000235718_3 (sequence is synthesized)
cgagggctacggccagactgccgcttctcctggctctgtgtcctcctgctctccagcctgctcctcctgctgcttgggctgctggtggccatcatcctggcccagctgcaggctgcaccc

SEQ ID NO: 771066 - DNA, 120 bp, Artificial Sequence
  ENSG00000235718_4 (sequence is synthesized)
ccatctggggcgtcccatagcccactgcctgccggaggccttaccacgaccaccaccacccccaccatcaccacctctcaggcagctgggacccctaaagggcagcaggagtcaggcgtg

SEQ ID NO: 771067 - DNA, 120 bp, Artificial Sequence
  ENSG00000235718_5 (sequence is synthesized)
agcccctccccacagtccacctgtggaggcctcctctctggcccaaggggcttcttcagcagccctaactacccagacccttacccccccaacacccactgcgtgtggcatatccaggtg

SEQ ID NO: 771068 - DNA, 120 bp, Artificial Sequence
  ENSG00000235718_6 (sequence is synthesized)
gccacagaccatgcaatacagctcaagatcgaagccctcagcatagagagtgtggcctcttgcctttttgatcgcttggaactctcccctgagcctgaaggccccctcctcagggtttgt

SEQ ID NO: 771069 - DNA, 120 bp, Artificial Sequence
  ENSG00000235718_7 (sequence is synthesized)
ggaagggtgcctccccccacgctcaacaccaatgccagccacctcctggtggtcttcgtctctgacagcagtgtggaaggatttggtttccatgcctggtaccaggctatggcccctggg

SEQ ID NO: 771070 - DNA, 120 bp, Artificial Sequence
  ENSG00000235718_8 (sequence is synthesized)
cgcgggagctgtgcccatgatgagttccgctgtgaccagctcatctgcctgctacctgactcagtgtgtgatggttttgccaactgtgctgacggcagtgatgagaccaattgcagtgcc

SEQ ID NO: 771071 - DNA, 120 bp, Artificial Sequence
  ENSG00000235718_9 (sequence is synthesized)
aagttctcggggtgtggggggaatctgactggcctccagggcactttctctactcccagctacctgcagcagtaccctcaccaactgctctgcacctggcatatctcggtgcctgccgga

SEQ ID NO: 771072 - DNA, 120 bp, Artificial Sequence
  ENSG00000235718_10 (sequence is synthesized)
cacagcatagaactacagttccacaacttcagcctggaggctcaggacgagtgcaagtttgactacgtggaggtgtatgagaccagcagctcaggggccttcagcctcctgggcaggttc

SEQ ID NO: 771073 - DNA, 120 bp, Artificial Sequence
  ENSG00000235718_11 (sequence is synthesized)
tgtggagcagagccacccccccacctcgtctcctcgcaccatgagctggctgtgctgtttaggacagatcatggcatcagcagtggaggcttctcagccacctacctggccttcaatgcc

SEQ ID NO: 771074 - DNA, 120 bp, Artificial Sequence
  ENSG00000235718_12 (sequence is synthesized)
acggagaacccctgtgggcccagtgagctctcctgccaggcaggagggtgtaagggtgtgcagtggatgtgtgacatgtggagagactgcaccgatggcagcgatgacaactgcagcggc

SEQ ID NO: 771075 - DNA, 120 bp, Artificial Sequence
  ENSG00000235718_13 (sequence is synthesized)
cccttgttcccacccccagagctggcctgtgagcctgtccaggtggagatgtgcctcggtctgagctacaacaccacagccttccctaacatctgggtgggcatgatcacccaggaggag

SEQ ID NO: 771076 - DNA, 120 bp, Artificial Sequence
  ENSG00000235718_14 (sequence is synthesized)
gtggtagaggtcctcagcggttacaagagcctgacaagcctgccctgctaccagcatttccggaggctcctgtgtgggctgcttgtgccccgttgcaccccactaggcagtgttctgccc

SEQ ID NO: 771077 - DNA, 120 bp, Artificial Sequence
  ENSG00000235718_15 (sequence is synthesized)
ccttgccgctctgtctgccaggaagcggagcaccagtgccagtctggcctggcactactgggcaccccctggcccttcaactgcaacaggctgccagaggcagctgacctggaagcttgt

SEQ ID NO: 771078 - DNA, 120 bp, Artificial Sequence
  ENSG00000235718_16 (sequence is synthesized)
acccatccttctctggggctcccagggagggggaagagaagtcctcagctggggctcatgggaccctaccaccctccctgctccttcctgtccctttaccggtcccaggctgctgactgg

SEQ ID NO: 771079 - DNA, 120 bp, Artificial Sequence
  ENSG00000235718_17 (sequence is synthesized)
ccccacactgtgccaccggacaatcgagaccacttcccatccaggcctcttcccctttccatctgctttttcagcttctccatcgcctgccttctgaccttttccttgattcaacaaaaa

SEQ ID NO: 771080 - DNA, 120 bp, Artificial Sequence
  ENSG00000235718_18 (sequence is synthesized)
tgtactgagcatctattcatgtggcaggcccctgtcctaggccctagggatccaactggctgtctgcctctagaactctccaccctcatctctctgcgtatttctccctgaaatggggtc

SEQ ID NO: 771081 - DNA, 120 bp, Artificial Sequence
  ENSG00000235718_19 (sequence is synthesized)
tggtccttggtctctgccactgccctgcctctcctctggccctgggaacaggaggtgccctgtgtgtccgtctctcgaagttctgcctctctgtgcccagctcaagtctctctccccctc

SEQ ID NO: 771082 - DNA, 120 bp, Artificial Sequence
  ENSG00000235718_20 (sequence is synthesized)
ctttctccccctaaactttggccggccgccgggcgacaccacgagttatttcccagctatttcccggtccgggagctcttggcccctgaacaactggtttcctcttggagtctgggagga

SEQ ID NO: 771083 - DNA, 120 bp, Artificial Sequence
  ENSG00000235718_21 (sequence is synthesized)
ggaaagcggagccggcagggagcgaaccaggactggggtgacggcagggcagggggcgcctggccggggagaagcgcgggggctggagcaccaccaactggagggtccggagtagcgagc

SEQ ID NO: 771084 - DNA, 120 bp, Artificial Sequence
  ENSG00000235718_22 (sequence is synthesized)
gccccgaaggaggccatcggggagccgggaggggggactgcgagaggaccccggcgtccgggctcccggtgccagcgctatgaggccactcctcgtcctgctgctcctgggcctggcggc

SEQ ID NO: 771085 - DNA, 120 bp, Artificial Sequence
  ENSG00000235718_23 (sequence is synthesized)
cggctcgcccccactggacgacaacaagatccccagcctctgcccggggcaccccggccttccaggcacgccgggccaccatggcagccagggcttgccgggccgcgatggccgcgacgg

SEQ ID NO: 771086 - DNA, 80 bp, Artificial Sequence
  ENSG00000235718_24 (sequence is synthesized)
ccgcgacggcgcgcccggggctccgggagagaaaggcgagggcgggaggccgggactgccgggacctcgaggggaccccg

SEQ ID NO: 771087 - DNA, 120 bp, Artificial Sequence
  ENSG00000235718_25 (sequence is synthesized)
tgccggggagtgctcggtgcctccgcgatccgccttcagcgccaagcgctccgagagccgggtgcctccgccgtctgacgcacccttgcccttcgaccgcgtgctggtgaacgagcaggg

SEQ ID NO: 771088 - DNA, 120 bp, Artificial Sequence; identical to SEQ ID NO: 765623
  ENSG00000235718_26 (sequence is synthesized)

SEQ ID NO: 771089 - DNA, 120 bp, Artificial Sequence; identical to SEQ ID NO: 765624
  ENSG00000235718_27 (sequence is synthesized)

SEQ ID NO: 771090 - DNA, 120 bp, Artificial Sequence; identical to SEQ ID NO: 765625
  ENSG00000235718_28 (sequence is synthesized)

SEQ ID NO: 771091 - DNA, 120 bp, Artificial Sequence; identical to SEQ ID NO: 765626
  ENSG00000235718_29 (sequence is synthesized)

SEQ ID NO: 771092 - DNA, 120 bp, Artificial Sequence; identical to SEQ ID NO: 765627
  ENSG00000235718_30 (sequence is synthesized)

SEQ ID NO: 771093 - DNA, 120 bp, Artificial Sequence; identical to SEQ ID NO: 765628
  ENSG00000235718_31 (sequence is synthesized)

SEQ ID NO: 771094 - DNA, 120 bp, Artificial Sequence
  ENSG00000235718_32 (sequence is synthesized)
cccacctcgtctcctcgcaccatgagctggctgtgctgtttaggacagatcatggcatcagcagtggaggcttctcagccacctacctggccttcaatgccacggagagtaggtgcccct

SEQ ID NO: 771095 - DNA, 120 bp, Artificial Sequence
  ENSG00000235750_0 (sequence is synthesized)
agacctggctcggggtgggagtgcagaggcaaccaaaaaggaacccacacctccctccagggcccggggcgctgtcagacggggcagcaaccaggagattccctgggcctgcaggaagcc

SEQ ID NO: 771096 - DNA, 120 bp, Artificial Sequence
  ENSG00000235750_1 (sequence is synthesized)
cttccgcggaccgaaagattgttccccattttggagatgaagaaactgagactcaaagcagctgagtgaccttcccaaggacacacactgaactgggcggtgatcaggatctgaatgcac

SEQ ID NO: 771097 - DNA, 120 bp, Artificial Sequence
  ENSG00000235750_2 (sequence is synthesized)
agggcgggtgttcagcgattgtttactacgttgaacgtgacctccaggaaagcagttctggccgagatcccctgacaacgcaaagcaagaagtaacgtggaaggaggctccccaagctgg

SEQ ID NO: 771098 - DNA, 120 bp, Artificial Sequence
  ENSG00000235750_3 (sequence is synthesized)
ctggccattttgctgctgtgtgtggaggtgctgccagtggcatgcccaaacccaaagctggaagaggaataaattacaagtggtcaaggttgcatccttttgagcccaggacctgcttgt

SEQ ID NO: 771099 - DNA, 120 bp, Artificial Sequence
  ENSG00000235750_4 (sequence is synthesized)
aagccgagagggttctctggccctaatctagccaagcaccatggagagaatcagtgccttcttcagctctatctgggacaccatcttgaccaaacaccaagaaggcatctacaacaccat

SEQ ID NO: 771100 - DNA, 120 bp, Artificial Sequence
  ENSG00000235750_5 (sequence is synthesized)
ctgcctgggagtcctcctgggcctgccactcttggtgatcatcacactcctcttcatctgttgccattgctgctggagcccaccaggcaagaggggccagcagccagagaagaacaagaa

SEQ ID NO: 771101 - DNA, 120 bp, Artificial Sequence
  ENSG00000235750_6 (sequence is synthesized)
gaagaagaagaagaagaagaagaaggatgaagaagacctctggatctctgctcaacccaagcttctccagatggagaagagaccatcactgcctgtttagttaggcaggaagcagaggtg

SEQ ID NO: 771102 - DNA, 120 bp, Artificial Sequence
  ENSG00000235750_7 (sequence is synthesized)
tttcctttctggggctaagcctccttctgaccacacacagacatttcaggaacccctgaaataatgcactatgtccatgtccacagagtaactactcaaccaaggaacaaacctcagact

SEQ ID NO: 771103 - DNA, 120 bp, Artificial Sequence
  ENSG00000235750_8 (sequence is synthesized)
aagtgtcccagtggagggcagtcccagggaccacgtggacaattcttggatactgtcttggcagctatgtgtccaatagcaatgctccttactgcagacccaggcatgcctcccacctgt

SEQ ID NO: 771104 - DNA, 120 bp, Artificial Sequence
  ENSG00000235750_9 (sequence is synthesized)
ctctggcataccccacatgcaaagcacaaagaacatttatccatacatctcaatatggttcccaagtgtgtgcacatgcacgtaacacacacacacacaaattcaggtagcaggtacgtg

SEQ ID NO: 771105 - DNA, 120 bp, Artificial Sequence
  ENSG00000235750_10 (sequence is synthesized)
ggcaagtatattctgctcatcaaatggtcattggctatgtactttgtgcagggaagtacattatctacagtcacaaaaatgtctcatgggaaagccttgccagattcagacacatatata

SEQ ID NO: 771106 - DNA, 120 bp, Artificial Sequence
  ENSG00000235750_11 (sequence is synthesized)
caatttcctaaccagcaaggcccccatacaccatctattccataaaccactcaggttacagatgcatgctttcctatttctaactctacacataaacttttactggaagtactcataatt

SEQ ID NO: 771107 - DNA, 120 bp, Artificial Sequence
  ENSG00000235750_12 (sequence is synthesized)
ggacattccagcaacctgctacagtccccacccttgtgtgtcttgatacagacacaccaagtttctgtgcctctgacccctcacctgtgccaagatgtttaaagtgtgatggttcaaaat

SEQ ID NO: 771108 - DNA, 120 bp, Artificial Sequence
  ENSG00000235750_13 (sequence is synthesized)
tcattgaaagctcttttcttgtaactcatgacaaagtccgtcctcattgccactgagaggtgtttaatgtgatccaagacctctctgtgaaacattacccccgcaaaccactcagcaaag

SEQ ID NO: 771109 - DNA, 120 bp, Artificial Sequence
  ENSG00000235750_14 (sequence is synthesized)
tgcctttctccaagcaagaacaaagagctcttggtggtgactgctagaaaattatggaagcccactcatttatgtcagtggactgcaactgtgtacctgtgcaatgtttacagatggaaa

SEQ ID NO: 771110 - DNA, 120 bp, Artificial Sequence
  ENSG00000235750_15 (sequence is synthesized)
gggtgaggagatgctacacctgagctaggtatctcctatataaccaaagtttccagcagggaaggaactagacaatcatcagtgcagtctcacagaaggcaacactggaagtgatgtcat

SEQ ID NO: 771111 - DNA, 120 bp, Artificial Sequence
  ENSG00000235750_16 (sequence is synthesized)
aaggttgtgatgtgtgcacggtatggcacaggtgggatgcagaggtaacagagtttaaatgaaagtaggatgaagctataaagaggtttatttatatttatattgaagctcaggcaagtg

SEQ ID NO: 771112 - DNA, 120 bp, Artificial Sequence
  ENSG00000235750_17 (sequence is synthesized)
ccttgcacacagtaggtacttataactaactgtggttactgttggatatgtgatgttgttaagggtaagcttgtaatacctcaccagttctccccgagtgatcttctcttctaagtgagc

SEQ ID NO: 771113 - DNA, 120 bp, Artificial Sequence
  ENSG00000235750_18 (sequence is synthesized)
agctgaggagggctttccccgccagagtgaggttgggaagcagagttaatccacttataggatgaactgcttggtatttttattgtattgtgactgtattacaaagatggacaattcact

SEQ ID NO: 771114 - DNA, 120 bp, Artificial Sequence
  ENSG00000235750_19 (sequence is synthesized)
ccttgggagcaagttatgctctagaagtttatttacaaatatgctgggcagctctcttgaaatattttcccaaggaagctattctacacagtggcaaaattgctatctaattaataatgt

SEQ ID NO: 771115 - DNA, 120 bp, Artificial Sequence
  ENSG00000235750_20 (sequence is synthesized)
agctaaactatgatatttatagtagcaaaaaactaaattctataagattgcattaaaggaaagatatattctatttgctcacttgggctgcttggtactcacctgccctccaggtgtact

SEQ ID NO: 771116 - DNA, 120 bp, Artificial Sequence
  ENSG00000235750_21 (sequence is synthesized)
ttaggcctgtggagggtgggcatttagtggtgacccttgcaccagggttttctaacagatgaccctgtgaatcataatttaaacctgcatatattttatagccagtcacatttgccctct

SEQ ID NO: 771117 - DNA, 120 bp, Artificial Sequence
  ENSG00000235750_22 (sequence is synthesized)
caccctatatggccataaactgcctaagcactcaggcctcccactcatcaacccctttgaccagagaaagaagcactctggttctctatccccttgtcacatagagagtttgtcatgggg

SEQ ID NO: 771118 - DNA, 120 bp, Artificial Sequence
  ENSG00000235750_23 (sequence is synthesized)
cctctggctgtgcccttcacataacagaatgacttgccatctgcctgcaccaaacccagggatgtggaagacatctccccacaactgccactgctcaccaggacaagctgcccttcctgt

SEQ ID NO: 771119 - DNA, 120 bp, Artificial Sequence
  ENSG00000235750_24 (sequence is synthesized)
ctccacctctcagtccccctagaatggatggctggggagaggtggaggctgacagctgagacgtagtgtcagatatgatctaggagggcggatcaccgggatccgggaccatacaagtaa

SEQ ID NO: 771120 - DNA, 120 bp, Artificial Sequence
  ENSG00000235750_25 (sequence is synthesized)
catggtttccatggcaactgcttgctcctttgaattaagacagcagtcagttgtcattgccatgacaaggcctctatctccaggcacaatgtccctgctgtctcctaatccaatggactt

SEQ ID NO: 771121 - DNA, 120 bp, Artificial Sequence
  ENSG00000235750_26 (sequence is synthesized)
gctctcaccccagggatgaaacacccagaaactcacttctcagtcacttccacagccgatgactcagaagagccaaacccagaatggggcctctcttttccccatcacagactcccctga

SEQ ID NO: 771122 - DNA, 120 bp, Artificial Sequence
  ENSG00000235750_27 (sequence is synthesized)
caacctttcctggcgtaactagaggagtcccagtgcaggataggccctaaacgttttgttaaataaacaggtgcatgaaaggagcctaaggccattgttgatatccactctcttctttcc

SEQ ID NO: 771123 - DNA, 120 bp, Artificial Sequence
  ENSG00000235750_28 (sequence is synthesized)
acttccttctcatctttttctccatgttttatgcttctctgattccctcttctgcctgcaccagaccagccccagccctttattcctctccattttcactccttccagcctctgtccctg

SEQ ID NO: 771124 - DNA, 120 bp, Artificial Sequence
  ENSG00000235750_29 (sequence is synthesized)
aactgccactggcaacccatgggacctcaggaccagagactgcttgactcatctggggagggtaagttcacgggggacaaaaaaatgattcctaaagaagaggcttcctagaccagcaca

SEQ ID NO: 771125 - DNA, 120 bp, Artificial Sequence
  ENSG00000235750_30 (sequence is synthesized)
ggctcgagaaagacatcccctaggcctggacttctgagcagctttagccaggctccggacggcagccagaggaggcctttccccattgctcctttccccattgctcaatggattccatgt

SEQ ID NO: 771126 - DNA, 120 bp, Artificial Sequence
  ENSG00000235750_31 (sequence is synthesized)
ttctttttcttggggggagcagggagggagaaaggtagaaaaatggcagccacctttccaagaaaaatataaagggtccaagctgtatagtatttgtcagtatttttttctgtaaaattc

SEQ ID NO: 771127 - DNA, 120 bp, Artificial Sequence
  ENSG00000235750_32 (sequence is synthesized)
aaacacacacaaaagaaaaatttatttaaataaaatactttgaaaatgaaaagtcttgatgtagtcagatggttactctcttaacattaggtattacccccactcagacatcactcagaa

SEQ ID NO: 771128 - DNA, 120 bp, Artificial Sequence
  ENSG00000235750_33 (sequence is synthesized)
atgatcaatgcagggactctttctgtgacacaaatgtcccagccctccctggtcaccgccttcgccatggtagagtcataggtctgaggatgaggaatgtggctgtctcacccttgcttg

SEQ ID NO: 771129 - DNA, 120 bp, Artificial Sequence
  ENSG00000235750_34 (sequence is synthesized)
caaaacagatggccttggagaccagactccctcaaaggtgccagctacaggaaaaatatactgatgttccttggcaacacttacagaactttccatcaatgaggtccatcaatggcttct

SEQ ID NO: 771130 - DNA, 120 bp, Artificial Sequence
  ENSG00000235750_35 (sequence is synthesized)
taaaggaaaaggggggaaatagcaaaaacctaaggaagaatggacctttgagttaaatccagtgtttgttgggaaaggagggatcaaaaacctctatagtagccactagggcaaaaactg

SEQ ID NO: 771131 - DNA, 120 bp, Artificial Sequence
  ENSG00000235750_36 (sequence is synthesized)
tgtgtatgtgtgtgtgtaagtgtgtgtacactgttcaatatggttcaatatggtaccaatagccacatgtgactatttaaattcattgcaatgaaataaaattaaaggtatactagctca

SEQ ID NO: 771132 - DNA, 120 bp, Artificial Sequence
  ENSG00000235750_37 (sequence is synthesized)
gcagaggcaaccaaaaaggaacccacacctccctccagggcccggggcgctgtcagacggggcagcaaccaggagattccctgggcctgcaggaagcccttccgcggaccgaaagactgg

SEQ ID NO: 771133 - DNA, 120 bp, Artificial Sequence
  ENSG00000235750_38 (sequence is synthesized)
gaacggcgagccagattcaggaagttgtgcctgtgacatcaggggcaggacagagttggagcgaaacctcaactatgccaggcgtcggcccgtaggaaggcagggaacacagagggcgct

SEQ ID NO: 771134 - DNA, 120 bp, Artificial Sequence
  ENSG00000235863_0 (sequence is synthesized)
cggccgccggggcgaggcgggggaggggccgtgagtgccgcagtcggccagccatggagcggagcttgctggcggcgaggccgcggcgacaaggtagccacccccgcagcatgcctcgac

SEQ ID NO: 771135 - DNA, 120 bp, Artificial Sequence
  ENSG00000235863_1 (sequence is synthesized)
cgaccgcggtccgcagctgcaccgcctctccccgccccccagggtgcgctggtcccggtcgcgcgctcagacctccgcatcccgggcgtggtcggttaagtccccggccgtgacccaggc

SEQ ID NO: 771136 - DNA, 120 bp, Artificial Sequence
  ENSG00000235863_2 (sequence is synthesized)
ccggggagctagtctccgcccttcgctcttacggatcccctcggagtacgccgcaccatgcagctcaggctcttccggcgcctccttctcgccgctttgctgctggtgatcgtctggacc

SEQ ID NO: 771137 - DNA, 120 bp, Artificial Sequence
  ENSG00000235863_3 (sequence is synthesized)
ctcttcgggccttcggggttgggggaggagctgctgagcctctcactagcctccctgctcccagcccccgcctcaccggggccgcccctggccctgccccgcctcttgatccccaaccag

SEQ ID NO: 771138 - DNA, 120 bp, Artificial Sequence
  ENSG00000235863_4 (sequence is synthesized)
gaagcttgcagtggtcccggggcccctcccttcctgctcatcctggtgtgcacggctccggagaacctgaaccagagaaacgccattcgggcttcgtggggcgggctgcgcgaggcccgg

SEQ ID NO: 771139 - DNA, 120 bp, Artificial Sequence
  ENSG00000235863_5 (sequence is synthesized)
gggctcagggtacagacgctattcttgctgggagagccgaacgcacagcaccccgtgtggggttcccaggggagtgacctggcctcggagtcagcagcccagggggatatcttgcaggcc

SEQ ID NO: 771140 - DNA, 120 bp, Artificial Sequence
  ENSG00000235863_6 (sequence is synthesized)
gccttccaggactcctaccgcaacctcaccctaaagaccctcagcgggctgaactgggctgagaaacactgccccatggcccgatacgtcctcaagacggacgatgatgtgtatgtcaac

SEQ ID NO: 771141 - DNA, 120 bp, Artificial Sequence
  ENSG00000235863_7 (sequence is synthesized)
ggtcttgcgagggggccgttgggggcaatgggagagaagcacggaaccccagagagaggctgagcaggaaggaggccaggttttgcacagcgaggaagtgcctcttctgtacttgggccg

SEQ ID NO: 771142 - DNA, 120 bp, Artificial Sequence
  ENSG00000235863_8 (sequence is synthesized)
ggtgcactggcgcgtgaacccctctcggacaccggggggcaggcaccgcgtatcagaggagcagtggcctcacacctggggcccctttccaccctatgcctcaggcacggggtatgtgct

SEQ ID NO: 771143 - DNA, 120 bp, Artificial Sequence
  ENSG00000235863_9 (sequence is synthesized)
gtcagcgtctgctgtgcagctcattctcaaggtggccagccgggcaccccttctcccattagaggatgtctttgtgggggtaagtgcccgacgaggaggcctcgccccaacacagtgtgt

SEQ ID NO: 771144 - DNA, 120 bp, Artificial Sequence
  ENSG00000235863_10 (sequence is synthesized)
caagctggctggtgccacccactacccgctagaccggtgctgctatgggaaattcctgctgacgtcccacaggctggacccctggaagatgcaggaagcctggaagctggtgggtggctc

SEQ ID NO: 771145 - DNA, 120 bp, Artificial Sequence
  ENSG00000235863_11 (sequence is synthesized)
tgacggggaaaggactgcgcccttttgctcctggttccagggagtcctgggcatcctgcggtgtcgagcaatagcctggcttcagagctgagagtgcctggggccacaggaaaggcagga

SEQ ID NO: 771146 - DNA, 120 bp, Artificial Sequence
  ENSG00000235863_12 (sequence is synthesized)
acaggaccttctctctcccaggcccaacgcaggggccctcactggctgcagctgatctgtttccttataccagatcctcagtctcactaaagacagcgatatgggagacacccaggggcc

SEQ ID NO: 771147 - DNA, 120 bp, Artificial Sequence
  ENSG00000235863_13 (sequence is synthesized)
tggcccgccagcccaaaagatggtcatcgggaagagaaaaagaaaaaaatgctgcagttgttctctcaagctagggcagaagaggggtgtcaagctcctcaataaacttgtctccacttc

SEQ ID NO: 771148 - DNA, 120 bp, Artificial Sequence
  ENSG00000235863_14 (sequence is synthesized)
catgggagagaggacagcctctctgaggaggaaggcccctaaaaggcaaagctaaggccacagcagccacaagaacctcagcgcagagccctgcccacagcaggtgcccagtgaatacct

SEQ ID NO: 771149 - DNA, 120 bp, Artificial Sequence
  ENSG00000235863_15 (sequence is synthesized)
aaatccaaagcagacaccacctccacccctcacatcagccagacctggagagaacgatcatcttgaatgacaatgatgaacacagcgctccctattttgctaagcgctgtgctaaactat

SEQ ID NO: 771150 - DNA, 120 bp, Artificial Sequence
  ENSG00000235863_16 (sequence is synthesized)
atgccttaactcatcttaatgtctacaacagcttatatgagggctttaaaccaaggcttggtaaactactgcccatgggccaaacctggcccatcatctagttctgtatagcccacaagc

SEQ ID NO: 771151 - DNA, 120 bp, Artificial Sequence
  ENSG00000235863_17 (sequence is synthesized)
caagaatggtttttacatttttaagtggttgaaaaaaaatcaaaagaatattttgagactgtgaaaaccgtatgaaattcaaattccaatatccaacaaataaagttttattggaacggg

SEQ ID NO: 771152 - DNA, 120 bp, Artificial Sequence
  ENSG00000235942_0 (sequence is synthesized)
acaaggcctccagactcctcctgggataacttgtccacacatcttccactagggtaaggctacttctggctgaggagacacttggatgtagctcaagtgctgcttaggcagtcctgatct

SEQ ID NO: 771153 - DNA, 120 bp, Artificial Sequence
  ENSG00000235942_1 (sequence is synthesized)
ctcctctcgtctcttcccagggagctgaaaagccagattcgacctggtagccaagcaatgtcacagcagaagcagcaatcttggaagcctccaaatgttcccaaatgctcccctccccaa

SEQ ID NO: 771154 - DNA, 120 bp, Artificial Sequence
  ENSG00000235942_2 (sequence is synthesized)
gtgctccccattcagaaggttgtcattccagttcccaaaggcctgaggttcagaagcctaggagggctcgtcaaaagctgcgctgcctaagtaggggcacaacctaccactgcaaagagg

SEQ ID NO: 771155 - DNA, 120 bp, Artificial Sequence
  ENSG00000235942_3 (sequence is synthesized)
aagagtgtgaaggcgactgagcccagaagagttgaggcacaggtgcagttactctctccctgccccacctttgggtactaattcccccttggaaagccaggccctcaacctctcatttgg

SEQ ID NO: 771156 - DNA, 120 bp, Artificial Sequence
  ENSG00000235942_4 (sequence is synthesized)
actgagaaacacttcctgatccccagctctagagaagcgagaactaggctgagccacgctgctactgctctcttccattcaccccttcagctcagcaacaataaagctgctttacttgga

SEQ ID NO: 771157 - DNA, 120 bp, Artificial Sequence
  ENSG00000235961_0 (sequence is synthesized)
cgaccccgccgccgccgcagcggcgcgcagcccccgacgcgccctgtggggacccggaccaggagggaccctgccccgggaaaaggctgtggagacctgggctccgaccccagttcatcc

SEQ ID NO: 771158 - DNA, 120 bp, Artificial Sequence
  ENSG00000235961_1 (sequence is synthesized)
aaaaggctgtggagacctgggctccgaccccagttcatccccccacacccccgccgccccgtgccaccctggtccgcgctgggaaccctatcctgcccctcgtgtcagcccggcactggc

SEQ ID NO: 771159 - DNA, 120 bp, Artificial Sequence
  ENSG00000235961_2 (sequence is synthesized)
cagaatcgcgggcatggcggtgaccatgctgcaggactggtgccggtggatgggggtcaacgctcgcaggggcctgctcatcctgggcatcccggaggactgtgatgatgccgaattcca

SEQ ID NO: 771160 - DNA, 120 bp, Artificial Sequence
  ENSG00000235961_3 (sequence is synthesized)
agagtccctcgaggctgccctgaggcctatgggacactttacagtgctaggcaaagcgtttcgagaggaggataatgccaccgcggccctggtcgagctcgaccgggaagtcaactatgc

SEQ ID NO: 771161 - DNA, 120 bp, Artificial Sequence
  ENSG00000235961_4 (sequence is synthesized)
tttggtccccagggaaatccccggcactgggggcccgtggaacgtggtctttgtgccccgttgctcaggcgaggagtttctcggtctcggtcgcgtgttccacttcccggagcaagaggg

SEQ ID NO: 771162 - DNA, 120 bp, Artificial Sequence
  ENSG00000235961_5 (sequence is synthesized)
gcagatggtggagagcgtggccggcgccctgggtgtggggctgcgcagggtgtgctggctgcgatccatcggtcaggcggtccagccctgggtggaggccgtgaggtgccagagcctggg

SEQ ID NO: 771163 - DNA, 120 bp, Artificial Sequence
  ENSG00000235961_6 (sequence is synthesized)
cgtgttttccgggagggaccagccagccccaggggaggagtcctttgaggtctggctagaccacaccaccgaaatgctgcatgtgtggcagggggtctcggaaagggagaggaggaggag

SEQ ID NO: 771164 - DNA, 120 bp, Artificial Sequence
  ENSG00000235961_7 (sequence is synthesized)
gctgctggaaggcttgcgtgggaccgccctgcagctcgtgcacgcgctcctggcggagaaccccgccaggacggcgcaggactgtctggcggccctggcccaggtgtttggagacaacga

SEQ ID NO: 771165 - DNA, 120 bp, Artificial Sequence
  ENSG00000235961_8 (sequence is synthesized)
gtcccaggcgaccatccgggtgaagtgtctgaccgctcagcagcagtcaggcgagcgtctctcagctttcgtgttgcggctggaagtgctgctgcagaaggccatggagaaggaggccct

SEQ ID NO: 771166 - DNA, 120 bp, Artificial Sequence
  ENSG00000235961_9 (sequence is synthesized)
gcccaccttactgagcctctggatgaagcactgaggaagctgagaatggccgggaggtctccaagtttcttggagatgctggggctcgttcgggagtctgaggcatgggaggccagtcta

SEQ ID NO: 771167 - DNA, 120 bp, Artificial Sequence
  ENSG00000235961_10 (sequence is synthesized)
gccaggagcgtgagagcccagacacaggaaggggccggtgcccgggctggtgcccaggctgttgccagagccagcactaaagtagaggcggtcccaggaggtcctggtcgggagccagag

SEQ ID NO: 771168 - DNA, 120 bp, Artificial Sequence
  ENSG00000235961_11 (sequence is synthesized)
ggcctcctccaggcaggaggccaggaggctgaggagctcctccaggaggggctcaagcccgtcctggaggaatgtgataactaggttggggctggggaggcagcccagcgcgagtcctcc

SEQ ID NO: 771169 - DNA, 120 bp, Artificial Sequence
  ENSG00000235961_12 (sequence is synthesized)
ccgggcaaataggctccgagggccccggggcctcctctcctcctctcaggcagcagggccctggagacaggcggaggcggggccagggccggtccctcaccccacatcgggatcggggcc

SEQ ID NO: 771170 - DNA, 120 bp, Artificial Sequence
  ENSG00000235961_13 (sequence is synthesized)
ccccacttccccccaaggggccctgcccaccaccaccttcccggtgacccagatgaccacatttaataccaaatggggtggggggaggcgcccctccagtgccaggggcacgtgctgtga

SEQ ID NO: 771171 - DNA, 120 bp, Artificial Sequence
  ENSG00000235961_14 (sequence is synthesized)
gcttcctgggagcccaggttgtgctcactgctctcccgtatcgtgagcaccacctctgctttccctgcgtagatctaggccaggggctgcttgtttttgtggagccgtgtgtgttcttct

SEQ ID NO: 771172 - DNA, 120 bp, Artificial Sequence
  ENSG00000235961_15 (sequence is synthesized)
ctgagcagctcctccccagaggaccccagcgcagtcccgggagatggcggaaagaaggcaccagggcacagtggacactcatcccgtgacagcgatggtgaccatgactgtgggagaaag

SEQ ID NO: 771173 - DNA, 120 bp, Artificial Sequence
  ENSG00000235961_16 (sequence is synthesized)
aacaggacccgggatggagtggggctgtctgagtttccccagtgaactttgtgctttggcgttccacccctgttgttacttgttactgagtttcctagacctggggtgggtgttccccca

SEQ ID NO: 771174 - DNA, 120 bp, Artificial Sequence
  ENSG00000235961_17 (sequence is synthesized)
ggaggaggggggtcccgacctgtgtcctgtggtggccatttgcagcttctgtgttgtgattcccttctcttcaacggtttcagtacatatctctcttcaataaatttcattcagtgttcc

SEQ ID NO: 771175 - DNA, 120 bp, Artificial Sequence
  ENSG00000236027_0 (sequence is synthesized)
ctgcacaagggatttccgggtcaggatgaacaaacacttcttgttcctcttcctcctttactgcctcattgtggcagtgacatcacttcagtgcataacatgccaccttcgcacacggac

SEQ ID NO: 771176 - DNA, 120 bp, Artificial Sequence
  ENSG00000236027_1 (sequence is synthesized)
agaccgctgtagaagaggctttggtgtctgtactgctcagaagggcgaggcatgcatgctcttaaggatttaccagcgcaatactctccagatatcatacatggtgtgtcagaaattctg

SEQ ID NO: 771177 - DNA, 120 bp, Artificial Sequence
  ENSG00000236027_2 (sequence is synthesized)
cagagacatgacatttgatctcaggaatcggacttatgttcatacatgctgcaactacaattactgtaactttaaactctaagatatttgccctcctgaggtctcgctttggaatgtccc

SEQ ID NO: 771178 - DNA, 120 bp, Artificial Sequence
  ENSG00000236027_3 (sequence is synthesized)
caatgttgctcatccttcacactctgctggcccttgcttcccttccgtgtctgtcctgacaatacccctgccctcgcattaacctaagaagactaaactagtgtgatcctttctggtgtc

SEQ ID NO: 771179 - DNA, 120 bp, Artificial Sequence
  ENSG00000236027_4 (sequence is synthesized)
ttcagcttggcttctccctcagtcagagaatagtggttctgaacaatggatttcttctattattgggattattggcatggccatattccaagaaacctgccccaagagttcctgtacagt

SEQ ID NO: 771180 - DNA, 120 bp, Artificial Sequence
  ENSG00000236027_5 (sequence is synthesized)
aaaatttaaagcaggaacattctagaatcttaatttgcttaactagttcaggtacactagaaagccttcagctaaaaattcacaatatttttatctaaaattcccatgtatccggagaat

SEQ ID NO: 771181 - DNA, 120 bp, Artificial Sequence
  ENSG00000236027_6 (sequence is synthesized)
gactaagcagaaatagcaattaaatggatgatggatactgaagatttttctctacggacaccaagttatttctaccagcaggcagtgcccacttcaaactcaaccattgtgattttcttg

SEQ ID NO: 771182 - DNA, 120 bp, Artificial Sequence
  ENSG00000236027_7 (sequence is synthesized)
gcatttacaaactacatccttacactgttattaggagatagcaaacaaggatcttcccggcctctgtgacattcaccgagctctcacacagccactgctactcctatcgagatgtacatt

SEQ ID NO: 771183 - DNA, 120 bp, Artificial Sequence
  ENSG00000236027_8 (sequence is synthesized)
caaggtacatcagaactctcatttcttccccttcctttcctaaaccttctctcttcctttccccctttgccattcacctttactatcacctcccacctccattatcacctccccattgcc

SEQ ID NO: 771184 - DNA, 120 bp, Artificial Sequence
  ENSG00000236027_9 (sequence is synthesized)
acacaacctctccctgtagagaggcaggaggtccttcgaagctttgccccatgcgtcagatggcacctgaggcatataacctagggtgggctgcctttcaggatccgtcatcaaagggag

SEQ ID NO: 771185 - DNA, 120 bp, Artificial Sequence
  ENSG00000236027_10 (sequence is synthesized)
tcaaacatagtcaagataccatctaccctgtacagctttcttgagacttgggggcctgggtcaaagagatttgtctgtcccttgctgcccatctttaagtaataaaccgacttcacataa

SEQ ID NO: 771186 - DNA, 120 bp, Artificial Sequence
  ENSG00000236032_0 (sequence is synthesized)
tcattgcagatgttccctttcatttgttgcattttattttagaggacatgcagtgaggacatggaagaggaaaatgcaacattgctgacagagtttgttctcacaggatttttatatcaa

SEQ ID NO: 771187 - DNA, 120 bp, Artificial Sequence
  ENSG00000236032_1 (sequence is synthesized)
ccacagtggaaaatacccctgttcctggcattcttggtaatatatctcatcaccatcatggggaatcttggtctgattgctgtcatctggaaagaccctcatcttcatatcccaatgtac

SEQ ID NO: 771188 - DNA, 120 bp, Artificial Sequence
  ENSG00000236032_2 (sequence is synthesized)
ttactccttgggaatttagcttttgtggatgctttgttatcatcctcagtgactctgaagatgctgatcaacttcttagctaagagtaagatgatatctctctctgaatgcaagatacag

SEQ ID NO: 771189 - DNA, 120 bp, Artificial Sequence
  ENSG00000236032_3 (sequence is synthesized)
ttgttttcgtttgcaatcagtgtaaccacggaatgttttctcttggcaacaatggcatatgatcgctatgtagccatatgcaaacccttactttatccagccattatgaccaatggactg

SEQ ID NO: 771190 - DNA, 120 bp, Artificial Sequence
  ENSG00000236032_4 (sequence is synthesized)
tgcatccggctattaatcttgtcatatgtaggtggtcttcttcatgctttaatccatgaaggatttttattcagactaaccttctgtaactccaacataatacaacacttttactgtgac

SEQ ID NO: 771191 - DNA, 120 bp, Artificial Sequence
  ENSG00000236032_5 (sequence is synthesized)
attatcccattgttaaagatttcttatactgattcctctattaactttctaatggtttttatttttgcaggttcaattcaagtttttaccatagggactgttcttatatcttacatattt

SEQ ID NO: 771192 - DNA, 120 bp, Artificial Sequence
  ENSG00000236032_6 (sequence is synthesized)
gtcctctatacaatcttgaaaaagaagtctgtcaaaggtatgagaaaagccttctccacctgtggagctcatctcttatctgtatctttatactatgggcccctcgccttcatgtatatg

SEQ ID NO: 771193 - DNA, 120 bp, Artificial Sequence
  ENSG00000236032_7 (sequence is synthesized)
ggctctgcatccccacaggctgatgaccaagatatgatggagtctctattttacactgtcatagttcctttattaaatcccatgatctacagcctgagaaacaagcaagtaatagcttca

SEQ ID NO: 771194 - DNA, 120 bp, Artificial Sequence
  ENSG00000236032_8 (sequence is synthesized)
ttcacaaaaatgttcaaaagaaatgatgtttagatcattactaatatctcttttctatttactaaaatgtcacaaaattgtgcaaattagaggtacctatgtttttgccagcattaaaag

SEQ ID NO: 771195 - DNA, 120 bp, Artificial Sequence
  ENSG00000236032_9 (sequence is synthesized)
aaaggatttgagaaattttaatcaagtcttcataatagaataatgatagcagaagcaaataaaaatattgtacagtatggtatgttaatcactgtgtcttataaatgcattaaatgcaaa

SEQ ID NO: 771196 - DNA, 120 bp, Artificial Sequence
  ENSG00000236032_10 (sequence is synthesized)
atagtctagtttatctgataagcacttaagtatgatgtttttgatactaacacaactgtatgacccgagacgtctatcacatttatcttcatagtgaatgttgatgtgtgtttagaggaa

SEQ ID NO: 771197 - DNA, 120 bp, Artificial Sequence
  ENSG00000236032_11 (sequence is synthesized)
gacaggtagatcccaagaattttgctagctttcaagaggtctttcattccacttaattgtaaaagagtgaatttcacttcttgtaggaagtcaactcatatatcaaataaagaagcagaa

SEQ ID NO: 771198 - DNA, 120 bp, Artificial Sequence
  ENSG00000236032_12 (sequence is synthesized)
atggaaatgcaattaggacaaaatgagaagtgtttaacagtgaaggcactgccaatgtgcaagagggcaagaggatgctgttaactctctgtgcttgtatgagtaagaaccatgcagcct

SEQ ID NO: 771199 - DNA, 120 bp, Artificial Sequence
  ENSG00000236032_13 (sequence is synthesized)
ctaacttcctaagatggcttctaaggcactttccagctgtgattgtgttttcagagaatctgaaaagcttccctaaatcagaaaattaaatgaaaaaatagaacttagtttaaagtgggg

SEQ ID NO: 771200 - DNA, 120 bp, Artificial Sequence
  ENSG00000236032_14 (sequence is synthesized)
atagaaaagaaaagataaatggcatagtgggaagaaaatggtcttaatcttcccagaaaaaaagatgaaactactaagattttaaaaaccagtgatgttacaaggttattggaatgcgtt

SEQ ID NO: 771201 - DNA, 120 bp, Artificial Sequence
  ENSG00000236032_15 (sequence is synthesized)
attgacaatcaggggctttaaatgcatatcatcaaagttcaaattatcttaagatgatatgacatcatagtgcccagtgattggagagaaaaacatgaaaatgaggaagagttcggatat

SEQ ID NO: 771202 - DNA, 120 bp, Artificial Sequence
  ENSG00000236032_16 (sequence is synthesized)
tttctacttcaaaaagtccttattagtcttcttctcacttcatattcttgaagtatgtgagtcatccatctgccattccactctgcccttcatctttcgacactgaaattcctttcactt

SEQ ID NO: 771203 - DNA, 120 bp, Artificial Sequence
  ENSG00000236032_17 (sequence is synthesized)
tgtcactgataccgagacccttatcctaagcattactcacatatcgttttgcaaacctctagttatttcctccacccttctagcactcattcattcccccattttgatgtcagattgttt

SEQ ID NO: 771204 - DNA, 120 bp, Artificial Sequence
  ENSG00000236032_18 (sequence is synthesized)
tttcaactctttcaattttcttttgttggatcatcattgctacctgattatacgtacatgtgttttaggtgtcaatatctatgtatacatacacttatgtatacatgagaggagagaaag

SEQ ID NO: 771205 - DNA, 120 bp, Artificial Sequence
  ENSG00000236032_19 (sequence is synthesized)
gcttttgttgatttaatgcggaagtacgttaaaaagaaacttttttggctaaagtggagcagtagcgttatttggattattccagtagaaagttcctacttagaggtgagttgatggttt

SEQ ID NO: 771206 - DNA, 120 bp, Artificial Sequence
  ENSG00000236032_20 (sequence is synthesized)
gtagaaagttcctacttagaggtgagttgatggtttctgattggttaaagtaaacttttgttaagaacctatcatcagagtgaacaggcaaactgcagaatgggagaaaatttttgcaat

SEQ ID NO: 771207 - DNA, 120 bp, Artificial Sequence
  ENSG00000236032_21 (sequence is synthesized)
atttacaagagaaaaacaaacaaccctatcaaaatatgggtgaagaatatgaacagacagttctcaaaagaagacatttatgcaaccagcaagcatgtgaaaaccttgtcatcactggtc

SEQ ID NO: 771208 - DNA, 120 bp, Artificial Sequence
  ENSG00000236032_22 (sequence is synthesized)
agaaataagaactcatttatcctgttggtgggagtgtaattagttcaacctttgtggaagacagtgcggtgattccttatgaatccggagccagaaatactatttgactcagcaatccca

SEQ ID NO: 771209 - DNA, 75 bp, Artificial Sequence
  ENSG00000236032_23 (sequence is synthesized)
tctcactcataagtgtgaactggagcctgtcagggggtggaggggaaaggtagggagagcattaggacaaataac

SEQ ID NO: 771210 - DNA, 120 bp, Artificial Sequence
  ENSG00000236032_24 (sequence is synthesized)
ggtggaggggaaaggtagggagagcattaggacaaataactaatgcatgtgggacttgaaacctaggtgacgggttgatgggtgtagcaaaacgccatggcacatgtgtacctatgtaac

SEQ ID NO: 771211 - DNA, 120 bp, Artificial Sequence
  ENSG00000236032_25 (sequence is synthesized)
catgtatcccagaacttaaagtataaagaagaaaaaagttaacattttctttaccatttactatgagttggggtttctgtgtgcttaggtagaaacccattttgctggagccacctcagc

SEQ ID NO: 771212 - DNA, 120 bp, Artificial Sequence
  ENSG00000236032_26 (sequence is synthesized)
tcagcccaatgtacttcaatttaattattttaactattttctcccttttgtttcacttctcaattataggatactgaccaacactcaggcacatggagcactttctcaccaccagagctt

SEQ ID NO: 771213 - DNA, 120 bp, Artificial Sequence
  ENSG00000236032_27 (sequence is synthesized)
gtctttgtctcagcatggaactcataagttacaatttctattctcttaaagcagtgtttcttttattggacactttgtttttgccatgttaatcatatagagaaaatctggcaaccgtca

SEQ ID NO: 771214 - DNA, 120 bp, Artificial Sequence
  ENSG00000236032_28 (sequence is synthesized)
tggctatgaacttgcatttcagactcttgagaaaatacagcataccagcaagattacaatgatgaccccttgaggaaaataccaaggaactggggagtactccatagtcaaagcacccat

SEQ ID NO: 771215 - DNA, 89 bp, Artificial Sequence
  ENSG00000236032_29 (sequence is synthesized)
accaaggaactggggagtactccatagtcaaagcacccatgaacaaaatcaacagaaataaaacaaataaaagttaatggttataggct

SEQ ID NO: 771216 - DNA, 78 bp, Artificial Sequence
  ENSG00000236032_30 (sequence is synthesized)
ttatggatcccagctacttatgaggctgtggcaggagaatcacttaaacccaggagtgggaggttgcagtgagccgag

SEQ ID NO: 771217 - DNA, 120 bp, Artificial Sequence
  ENSG00000236032_31 (sequence is synthesized)
atcacttaaacccaggagtgggaggttgcagtgagccgagaaggcaccactgtacaccagcctagggaacagagtgagacactgtctcagaaaaagaaaagaaagttagtggttatagca

SEQ ID NO: 771218 - DNA, 120 bp, Artificial Sequence
  ENSG00000236032_32 (sequence is synthesized)
atctataaacttagtatctaagcccagagggcatttagttgagaagatttttagattttaagctcaaagcatcttttgatgatgggacaaaatggcagttgcaatctgttgatttttctg

SEQ ID NO: 771219 - DNA, 120 bp, Artificial Sequence
  ENSG00000236032_33 (sequence is synthesized)
ttttgcagtctgaatgtctctgattatgttattggatgttttggtgaactttttagcagccagctcagttgcatgtatgaagattgtcctctgaagtttatatcaagttgtccagaccta

SEQ ID NO: 771220 - DNA, 120 bp, Artificial Sequence
  ENSG00000236032_34 (sequence is synthesized)
gcttgcagggcttcaggaaaagggcaatgtataggtagataagaaaactcaaagataacagacagaacttgaatttaataatgaatgcactataattttctactgaaatatattttcaaa

SEQ ID NO: 771221 - DNA, 120 bp, Artificial Sequence
  ENSG00000236032_35 (sequence is synthesized)
tatttgaaaatgtttgacagatcatcagcttcccagtgtagcttttgttttgtaactaggttaatgagttgaaggtggatcccactgatgaataggacaagtattttctatgcctgaact

SEQ ID NO: 771222 - DNA, 120 bp, Artificial Sequence
  ENSG00000236032_36 (sequence is synthesized)
caacatgaattgaccagaatgttttacaaatcatacttttaattttgccttatagtcagagattaattcctgttttgtttataagattacatgtcagaccagtggatttttgaggaaata

SEQ ID NO: 771223 - DNA, 120 bp, Artificial Sequence
  ENSG00000236032_37 (sequence is synthesized)
ctttgtgaatggattctagaggattatttgttattttcccaaccctttttgttccttttctggaagattgaggggttggatctttcctgtctaccttaggtacctcacgtttggcttcag

SEQ ID NO: 771224 - DNA, 120 bp, Artificial Sequence
  ENSG00000236032_38 (sequence is synthesized)
ctataggattaaccaggttaaagtatcatgttactaaattgataaagatcagggagtcctggattatataatcctggaagaattctaaattccacagaaaatgtctggcacttttgtttg

SEQ ID NO: 771225 - DNA, 120 bp, Artificial Sequence
  ENSG00000236032_39 (sequence is synthesized)
ggacaaggatatttttccctattgctctcagcccagattttgaccaaggtgtaaaggtggttaaagaaggcaggcctggttcatctgaggacgtgactttataaggcatttatctagttt

SEQ ID NO: 771226 - DNA, 120 bp, Artificial Sequence
  ENSG00000236032_40 (sequence is synthesized)
cctttattttaatgggtgaaaatgtaactgagcaaaaggcttagtagatgcagagtgacaagatagagtatgatagaatgaaatatagttgaaaccacctttgcaaaaatgatgacagaa

SEQ ID NO: 771227 - DNA, 120 bp, Artificial Sequence
  ENSG00000236032_41 (sequence is synthesized)
aaatctcacataggaatattatgacagtgaatctgaaataagaaaatcaggcagtgcttctaatctccaagctgcccttcttcattcctgagtgtaggtccaactacctctgggaggaat

SEQ ID NO: 771228 - DNA, 120 bp, Artificial Sequence
  ENSG00000236032_42 (sequence is synthesized)
ttatagtttgattttgaaacaaagatggtaacagtctctcctcaaagcaaacttcctcctagcttggggatctgaccacctttgtaaaactcacagattatcacaagattagaaattatg

SEQ ID NO: 771229 - DNA, 120 bp, Artificial Sequence
  ENSG00000236032_43 (sequence is synthesized)
gctcctgatcatcatgcaactggaggccatggaattctaaccttcctaactgctcccacagataatattcctattgtgaaatctaagattggtgttcaaggtattttgtagatcctgaat

SEQ ID NO: 771230 - DNA, 120 bp, Artificial Sequence
  ENSG00000236032_44 (sequence is synthesized)
tctgataaatcagctggcaacattcagaatggtaaaaggactcctctagttttgtgaccacccccctgctgcaggatccacaagaagacagttttaacccctatgattttatccccaaca

SEQ ID NO: 771231 - DNA, 120 bp, Artificial Sequence
  ENSG00000236032_45 (sequence is synthesized)
caaccaatcagctttcctcattccttagaccgctgcccaacaaaccgtgtttagaaaaccctaccctctggatttttggaaagggtgatctgagtaataataaaacttgaatctcccatt

SEQ ID NO: 771232 - DNA, 120 bp, Artificial Sequence
  ENSG00000236032_46 (sequence is synthesized)
tagccaattctatatggattaaactctctattgtaattcctctgtcttggtaatgggctctatctaggtgtcaggcaaaaagatctcattaggtggttccgtacagagagggagcagttg

SEQ ID NO: 771233 - DNA, 120 bp, Artificial Sequence
  ENSG00000236032_47 (sequence is synthesized)
gagttaagtcagtcaatgatctacacctagactttctggaaattatatataaactaatccgatagaatgatagaatgccattatgaagttatagtgacagcaccaactaggtggcaaggc

SEQ ID NO: 771234 - DNA, 120 bp, Artificial Sequence
  ENSG00000236032_48 (sequence is synthesized)
attgcaagattgtctttgtttttattttttcctccccctgatgtttgcctgttaacatttctcaacagatttcagctcacctggaagttagatatatgtctggagtttcagctgcagttt

SEQ ID NO: 771235 - DNA, 120 bp, Artificial Sequence
  ENSG00000236032_49 (sequence is synthesized)
gaaggaggaggacaattttacaagtttacttggggttgccttctgaagggaatctagatctttggccttattaaaatcatattttgaccagctctgatgagaccatattaatcacagcat

SEQ ID NO: 771236 - DNA, 120 bp, Artificial Sequence
  ENSG00000236032_50 (sequence is synthesized)
tcaaagcatcctattttatgtacaaactgaagtgtgcgtaaaatctcagaagtgttatgtgttgtggataatagtggcataaagtgtaatttcaattgttaaaacccaaactgggtacag

SEQ ID NO: 771237 - DNA, 120 bp, Artificial Sequence
  ENSG00000236032_51 (sequence is synthesized)
tgacttaatatctatgtttctaaactctgcaataccctgcaggataatctgtatttcttatacacatctaaatccacaatgcccagttgaagatcttcactttgtcctacaggaaagcct

SEQ ID NO: 771238 - DNA, 120 bp, Artificial Sequence
  ENSG00000236032_52 (sequence is synthesized)
aagatgctctcaggggaatttcagttctctgactttttctctcctggtcaaaacggagatatacaattggtcagcacttttgttgaaagcaaatttttacaaacatttttctaagactgg

SEQ ID NO: 771239 - DNA, 120 bp, Artificial Sequence
  ENSG00000236032_53 (sequence is synthesized)
aaatgaagcctccaaaatgcatcagtacacaaagaattgctgcctgtgttattatcagatatgctctattatgtatttttctctgctttagaaagcctaatacttttaaaggatctccat

SEQ ID NO: 771240 - DNA, 120 bp, Artificial Sequence
  ENSG00000236032_54 (sequence is synthesized)
atgatattagtaaaagagaaattattttatcatatccactattatttttaaagaaattttaaaatgctatttaatatataatgtttgtatttggatcacagcatgctaagattgctggga

SEQ ID NO: 771241 - DNA, 120 bp, Artificial Sequence
  ENSG00000236032_55 (sequence is synthesized)
tgctgggaacaaatggaaccaagaagagtgaagaatctttgtatctcattattatggttaaaatcttgacaagcaaaatacctataaaataagtttttaatgataattcattatcttgtt

SEQ ID NO: 771242 - DNA, 120 bp, Artificial Sequence
  ENSG00000236032_56 (sequence is synthesized)
aacctgactataatgatgttataagttctggctaattagaagcttaaatgttttaaagctgggtttaaatcttcaattcattgtgattgttatataggatacttttctgatggttgtgat

SEQ ID NO: 771243 - DNA, 120 bp, Artificial Sequence
  ENSG00000236104_0 (sequence is synthesized)
gaataaatgcttcggccgaaccaagtcctgagctcccagcggaggaggggacctgatcttttaagagacccccccggccgccctcctcctttctttgttcctgtggctgggggggtatcc

SEQ ID NO: 771244 - DNA, 120 bp, Artificial Sequence
  ENSG00000236104_1 (sequence is synthesized)
cctccctccacaacatggagccatctcctctgtctcccagtggggcagcacttcccctgccgctgtcgctggctccgcccccactacccctgccagcagctgcagtggtacatgtgtcct

SEQ ID NO: 771245 - DNA, 120 bp, Artificial Sequence
  ENSG00000236104_2 (sequence is synthesized)
tccctgaggtgaccagtgccctcttggagtccctcaatcagcagcgtctgcagggccagctctgcgatgtatctatcagagtgcagggccgggagttccgggctcatcgggctgtcctgg

SEQ ID NO: 771246 - DNA, 120 bp, Artificial Sequence
  ENSG00000236104_3 (sequence is synthesized)
ctgcctcctccccttacttccatgatcaggtcctactcaaaggcatgacctccatctcgctgcccagtgtcatggacccaggcgcctttgagactgtcctagcctccgcttacactggcc

SEQ ID NO: 771247 - DNA, 120 bp, Artificial Sequence
  ENSG00000236104_4 (sequence is synthesized)
gcctcagcatggctgctgctgacattgtcaacttccttacagtggggtctgtgctccaaatgtggcacattgtggacaagtgcactgaactactccgagaaggccgggcctcagctacca

SEQ ID NO: 771248 - DNA, 120 bp, Artificial Sequence
  ENSG00000236104_5 (sequence is synthesized)
ccaccatcactactgctgcagccacctctgtcactgtccctggtgctggggtgccatccgggagtgggggcactgtggcccctgctaccatgggctctgcgcgctcccatgcctccagcc

SEQ ID NO: 771249 - DNA, 120 bp, Artificial Sequence
  ENSG00000236104_6 (sequence is synthesized)
gggccagtgagaatcaatctcccagcagcagcaactacttcagccccagggagtccactgatttctcatcttcctcccaagaggcatttgcagcttctgcagtgggcagtggggagcgtc

SEQ ID NO: 771250 - DNA, 120 bp, Artificial Sequence
  ENSG00000236104_7 (sequence is synthesized)
gaggaggtggccctgtattcccagcccctgtcgttggcagtggaggggccacatctggaaagctgctgctggaggcagatgagctgtgcgatgatggtggggatgggaggggggcagtgg

SEQ ID NO: 771251 - DNA, 120 bp, Artificial Sequence
  ENSG00000236104_8 (sequence is synthesized)
ttcctggggctgggctccggagacccacctacacaccccctagcatcatgccacagaaacactgggtatacgtgaagcgaggtggtaattgcccagcgccaacacccctggttccccaag

SEQ ID NO: 771252 - DNA, 120 bp, Artificial Sequence
  ENSG00000236104_9 (sequence is synthesized)
acccagatctggaggaggaagaggaggaggaagatctggtgttgacctgtgaggatgatgaagatgaagaactagggggtagctccagggttccagtggggggagggcctgaggctaccc

SEQ ID NO: 771253 - DNA, 120 bp, Artificial Sequence
  ENSG00000236104_10 (sequence is synthesized)
tcagcataagtgatgtccgtaccctgagtgagcccccagacaagggggaggagcaggtcaacttctgtgagtcctccaatgactttggcccatatgagggtgggggtcctgtggcaggtc

SEQ ID NO: 771254 - DNA, 120 bp, Artificial Sequence
  ENSG00000236104_11 (sequence is synthesized)
gactcaggggggccaactccctcttcctatgccccctcccaccctcctcgaccgctccttcccttggacatgcagggcaaccagatcctggtcttcccgtcgtcgtcttcatcctcatcc

SEQ ID NO: 771255 - DNA, 120 bp, Artificial Sequence
  ENSG00000236104_12 (sequence is synthesized)
tcacaggctcctggccaaccaccagggaaccaagcagaacacggggcagtgaccgtggggggcacgtcggtggggagcctgggtgtgccgggtagcgttggtggggtccctggagggact

SEQ ID NO: 771256 - DNA, 120 bp, Artificial Sequence
  ENSG00000236104_13 (sequence is synthesized)
ggcagtggggacgggaataagatctttctgtgccattgtgggaaggccttctcccacaagagcatgcgggaccggcacgtgaacatgcacctcaatctgcggccgtttgactgccccgtg

SEQ ID NO: 771257 - DNA, 120 bp, Artificial Sequence
  ENSG00000236104_14 (sequence is synthesized)
tgcaacaaaaagttcaagatgaagcaccatctgactgagcacatgaagacgcacacaggtctcaagccctacgagtgcggagtctgcgccaagaagttcatgtggcgagacagcttcatg

SEQ ID NO: 771258 - DNA, 120 bp, Artificial Sequence
  ENSG00000236104_15 (sequence is synthesized)
cgccaccgaggacactgtgagcgccggcaccgcctgggcggggtcggggccgtacctgggcctgggactcccacggggccatccttgccgtccaagagagagtctcccggagtgggcggg

SEQ ID NO: 771259 - DNA, 120 bp, Artificial Sequence
  ENSG00000236104_16 (sequence is synthesized)
ggcagcggcgacgaagcgagtgcggccacgcccccgtccagcagacgtgtctggtccccacccagagtccacaaggtggagatgggcttcggtggaggtggaggagcaaactgaaggggc

SEQ ID NO: 771260 - DNA, 120 bp, Artificial Sequence
  ENSG00000236104_17 (sequence is synthesized)
aggctactggggtggggtagctttcgggaaagggaataaggagcacgatgcaagggcgctgtggcccccgggtgatctcccaccacacttactgtcttcctttatctctgtggacttgta

SEQ ID NO: 771261 - DNA, 120 bp, Artificial Sequence
  ENSG00000236104_18 (sequence is synthesized)
tatattctggaaggggaaccacagtttcaccatcgcccgcccattctactactcaacccctcccccccaaggtatttccagaactaaacccttcctttccctctgatgggtacactgaag

SEQ ID NO: 771262 - DNA, 120 bp, Artificial Sequence
  ENSG00000236104_19 (sequence is synthesized)
cccctgctccacagagtagattgcacatggagggagggagagggggcgtgttgaacatcctgcagtcacagggtcaggggtcaggtggttgtagtctgtgcctgaagtctgtgtttgtgt

SEQ ID NO: 771263 - DNA, 120 bp, Artificial Sequence
  ENSG00000236104_20 (sequence is synthesized)
tgtcgtggagacaaggcctttgagccccacccttgtcctagaacctaccccctctcaaggatgcgctctttatttctaccctgtctctccccgccacccccgacttcccgtggaaattcc

SEQ ID NO: 771264 - DNA, 120 bp, Artificial Sequence
  ENSG00000236104_21 (sequence is synthesized)
caactcggttctcatggaggagtgggtggagacaaggagggagtaagtcgtaggagtacaaggtttttattttttttaacagtgattaaaatatttattggtcatttacttggcttcccg

SEQ ID NO: 771265 - DNA, 120 bp, Artificial Sequence
  ENSG00000236104_22 (sequence is synthesized)
ccaggttgctgctctggccgccgagtgaggggcggggggggcccgggggcgcgcggcccgagacccccccggccgccctcctcctttctttgttcctgtggctgggggggtatcccctcc

SEQ ID NO: 771266 - DNA, 76 bp, Artificial Sequence; identical to SEQ ID NO: 766130
  ENSG00000236125_0 (sequence is synthesized)

SEQ ID NO: 771267 - DNA, 85 bp, Artificial Sequence; identical to SEQ ID NO: 768583
  ENSG00000236125_1 (sequence is synthesized)

SEQ ID NO: 771268 - DNA, 120 bp, Artificial Sequence; identical to SEQ ID NO: 766132
  ENSG00000236125_2 (sequence is synthesized)

SEQ ID NO: 771269 - DNA, 89 bp, Artificial Sequence
  ENSG00000236125_3 (sequence is synthesized)
tggaaagagccactgccaagagcaaaacaaaatgaagcctgagttcaacgtcagaaaagttgaaggtaccctgcctcccaacgtacttg

SEQ ID NO: 771270 - DNA, 75 bp, Artificial Sequence
  ENSG00000236125_4 (sequence is synthesized)
attcccccaagagcaaaacaaaatgaagcctgagttcaacgtcagaaaagttgaaggtaccctgcctcccaacca

SEQ ID NO: 771271 - DNA, 80 bp, Artificial Sequence
  ENSG00000236279_0 (sequence is synthesized)
cggctgtgcgtggaggctgcggctcggcggggcaggcgctgagcgcaccgcggcggcacccggcgcagaggctccagcgc

SEQ ID NO: 771272 - DNA, 80 bp, Artificial Sequence
  ENSG00000236279_1 (sequence is synthesized)
cgcccccaggccgcgttcgcccgcagaggctgaggcccgcggccccgaggggctgctgcggcgatccgggtcgggctacg

SEQ ID NO: 771273 - DNA, 120 bp, Artificial Sequence
  ENSG00000236279_2 (sequence is synthesized)
ggccccgaggggctgctgcggcgatccgggtcgggctacgagggcagcaccagctggaaggcggccttggaggacaccaccacacgcctcctgctgggtgccatcgcggtccttctgttc

SEQ ID NO: 771274 - DNA, 120 bp, Artificial Sequence
  ENSG00000236279_3 (sequence is synthesized)
gccatcttggtggtgatgagcatcttggcttccaagggctgcatcaagtgcgaagcgccctgcccggaggactggctgctctacggaaggaagtgctacttcttttccgaggaacccaga

SEQ ID NO: 771275 - DNA, 120 bp, Artificial Sequence
  ENSG00000236279_4 (sequence is synthesized)
gactggaacacaggcaggcagtactgccacacccacgaggcggtgctggctgtgattcagagccagaaggagctggaatttatgttcaagttcacgcggagggagccctggattggacta

SEQ ID NO: 771276 - DNA, 120 bp, Artificial Sequence
  ENSG00000236279_5 (sequence is synthesized)
tggagcccaccaggctggtgtcgacggagtgtctgatgacccggccctgggtgtgcagcaagatggcctatacttgaggtgggtggggccagaggtggccccgcccctaggcctgtggga

SEQ ID NO: 771277 - DNA, 120 bp, Artificial Sequence
  ENSG00000236279_6 (sequence is synthesized)
ggtgtctggtgtctgctcaagacctgcttccagcggagccgcctgccctctgcaaggcgaagcggtgggtgcgtggcctccgccccaggcccctctcccaggccctggcgctctgagtcc

SEQ ID NO: 771278 - DNA, 120 bp, Artificial Sequence
  ENSG00000236279_7 (sequence is synthesized)
ctggttcctggcctcctttgtctgcaggcaggtcgtgtggctcagcagttaaatcccatatgctaggtagtgtaggcatctgcccacctacacacacacacatgcataggtacacgcacg

SEQ ID NO: 771279 - DNA, 120 bp, Artificial Sequence
  ENSG00000236279_8 (sequence is synthesized)
cacagacgctgtcccttctgaagctcagtgtccatcctgagccaccccacagatctctctccggccccctagaagccctctcctcactgcagccctggtgctctggggaaggaggggcat

SEQ ID NO: 771280 - DNA, 120 bp, Artificial Sequence
  ENSG00000236279_9 (sequence is synthesized)
tgacaggtggtttgactgttcacccagcagccccgcttccccactggtttctctcctggctgccggcggaggtaggctgggaaagcttccccctcacctaggccgggccagccccgcccc

SEQ ID NO: 771281 - DNA, 120 bp, Artificial Sequence
  ENSG00000236279_10 (sequence is synthesized)
gggccccagaggtcccctgcatcccccttctttgccttgcctgggttctcaggcagggcccctgctgtgtccgtggtgctgttgtattggtcactaacggaataaagagttaatatctca

SEQ ID NO: 771282 - DNA, 120 bp, Artificial Sequence
  ENSG00000236279_11 (sequence is synthesized)
acaaaaagtatgcttatggaatttgcagctgacaaaatccaaaaacacaatcccatatgacagatgggtgaaagaaatcaagattaaaatgtatcttgaataactcaaatgatgagccaa

SEQ ID NO: 771283 - DNA, 120 bp, Artificial Sequence
  ENSG00000236279_12 (sequence is synthesized)
agtgaatgacataaatgtggaagaaataaatataaggttctgcatttggatttaagaagttattttcacatgttctgacactgggggagacctggcttagaatcagatcatatgaaaaca

SEQ ID NO: 771284 - DNA, 120 bp, Artificial Sequence
  ENSG00000236279_13 (sequence is synthesized)
atctaagattgtggattaattccttttggcaaggaggccctttgagaagctccgggcttccttcccagaaaagtccatgtatgcacatacccgccgatctgttcgtggaagcagtctgca

SEQ ID NO: 771285 - DNA, 120 bp, Artificial Sequence
  ENSG00000236279_14 (sequence is synthesized)
gactggagatcccatgacgactggaagacagcatggtggtcactgttgctgctggtagagccacatctgatgtgtcccggtctgtcctggtggcagcgattcagtggtaacatggggaca

SEQ ID NO: 771286 - DNA, 120 bp, Artificial Sequence
  ENSG00000236279_15 (sequence is synthesized)
ttgcagcgagcaggcaggatggagagcaacccttgtcaggaatcatgggagagatggcatctgtttcaacctggatgagggaggctggtgtgcttctttgagtagggggtagaagacaga

SEQ ID NO: 771287 - DNA, 120 bp, Artificial Sequence
  ENSG00000236279_16 (sequence is synthesized)
gcgggtgtctctgggtcactccagaggccttagaccagcaggtctaggtcacagggggacaggttgggactcaacatttaagaactttccatgcacactgacagcaagggggttaaaaaa

SEQ ID NO: 771288 - DNA, 120 bp, Artificial Sequence
  ENSG00000236279_17 (sequence is synthesized)
ataaaaatgaaaagaacttcccagcagttcagtggtggaatggcagccttggtagctaacatgggcatggttaatgacagcgggcagtctgtcctgctgttggtacctggcctagctgga

SEQ ID NO: 771289 - DNA, 120 bp, Artificial Sequence
  ENSG00000236279_18 (sequence is synthesized)
aggagaggacacatagccgccagacctcttcccagtctgagtttctggcgttccatgcctctgggagtttggagacagaggagatcctaacccaggggctgccctgctgtcacttcccgt

SEQ ID NO: 771290 - DNA, 120 bp, Artificial Sequence
  ENSG00000236279_19 (sequence is synthesized)
cgtgatgatgcccctgccaggcttcccacagtcccctttctcattcatttagtggccacccttttacctccaggcaccaggagaggacagccacatctgcagtgtccctgcaggacgcca

SEQ ID NO: 771291 - DNA, 120 bp, Artificial Sequence
  ENSG00000236287_0 (sequence is synthesized)
agaccggcgaccgcgccagccgcgaatcggatctctatggagatggcctaggcgatatccctgagctgagagcatcaccctgtccccgaatccttctttcctctctgttttgtttttcat

SEQ ID NO: 771292 - DNA, 120 bp, Artificial Sequence
  ENSG00000236287_1 (sequence is synthesized)
tcccctccctctctcccctccccctccagtccacgacgactggctgttgaccctgttcaggcctcggtgaaggcttttggttactccccttcccaccccatcccttaattttattctttt

SEQ ID NO: 771293 - DNA, 120 bp, Artificial Sequence
  ENSG00000236287_2 (sequence is synthesized)
gaagagtgcatttcaagctgccaaggtggagagagggattacagaaaggagaacaccttatttcagaaaaggtgtaccatacctgagagcaccaggaagtcgcatgagagatcacctgat

SEQ ID NO: 771294 - DNA, 120 bp, Artificial Sequence
  ENSG00000236287_3 (sequence is synthesized)
acatgaacgtatgatgttccatctgcgcattgatgaataggcagcatttacaaattaactgatgtgttgctgtatatcatctctttgatgattgctcctcttctttgtatcctgtcttat

SEQ ID NO: 771295 - DNA, 120 bp, Artificial Sequence
  ENSG00000236287_4 (sequence is synthesized)
aatttcaacacatttgcgatactcaatgtctattctaaattaaccatgttttgtaccacaaactcattgcccatggatctgttgctgaaacaaggaagtcttaaacaagaagtggaatct

SEQ ID NO: 771296 - DNA, 120 bp, Artificial Sequence
  ENSG00000236287_5 (sequence is synthesized)
ttctgttatcagattgtgtctgaatcaaatgatcagaaggttggaatattacaaagtgaagataagcagttgcaaccttcagtttctaaaaaatcagaaggtgagctttccagggtcaaa

SEQ ID NO: 771297 - DNA, 120 bp, Artificial Sequence
  ENSG00000236287_6 (sequence is synthesized)
tttatatccaattccaacaaaataacatttagtaaaaaaccaaaaagaagaaaatatgatgaaagttatttgtcttttggatttacttacttcggaaatagagatgcacctcatgctcag

SEQ ID NO: 771298 - DNA, 120 bp, Artificial Sequence
  ENSG00000236287_7 (sequence is synthesized)
tgtgtattatgtaagaaaattttatcaaatagctctttagcccctagtaagcttcgaagacatttggaaactaaacatgctgcatataaagacaaagacataagctttttcaagcaacat

SEQ ID NO: 771299 - DNA, 120 bp, Artificial Sequence
  ENSG00000236287_8 (sequence is synthesized)
ctcgattcacctgaaaataataaacccccaacacctaaaattgtgaatacagataatgaaagtgctacagaagcatcatacaatgtaagttaccatatagcgctgagtggagaggctcat

SEQ ID NO: 771300 - DNA, 120 bp, Artificial Sequence
  ENSG00000236287_9 (sequence is synthesized)
actattggagaattgcttatcaaaccttgtgcaaaagatgtagtgatgcggatgtttgatgaacaatatagtaaaaaaatagatgcagtacagctatcaaacagtactgttgcacgtcga

SEQ ID NO: 771301 - DNA, 120 bp, Artificial Sequence
  ENSG00000236287_10 (sequence is synthesized)
attaaggatctagctgctgacattgaagaagagcttgtttgtagactgaaaatttgcgatgggttttcactgcaactagatgaatcagctgatgtttcaggacttgctgtgctgcttgtg

SEQ ID NO: 771302 - DNA, 120 bp, Artificial Sequence
  ENSG00000236287_11 (sequence is synthesized)
gtgtgaatctttgcaaagtaatgctaccggtgaagaaatattcaactgtatcaacagttttatgcagaaacatgaaattgaatgggaaaaatgtgttgatgtttgtagtgatgcttctag

SEQ ID NO: 771303 - DNA, 120 bp, Artificial Sequence
  ENSG00000236287_12 (sequence is synthesized)
ggcagtggatgggaaaattgccgaagctgtcaccttaataaaatatgtggctcccgaaagcaccagtagtcactgcctattatacagacatgcactggcagttaaaataatgcctacatc

SEQ ID NO: 771304 - DNA, 120 bp, Artificial Sequence
  ENSG00000236287_13 (sequence is synthesized)
tctaaaaaatgtgctagaccaggcagtacaaatcatcaattatattaaagctcgaccacatcaatccagactattaaaaattttatgtgaggaaatgggtgctcagcacacagcacttct

SEQ ID NO: 771305 - DNA, 120 bp, Artificial Sequence
  ENSG00000236287_14 (sequence is synthesized)
tctaaatacagaggtgaggtggctttctcgaggtaaagttcttgtaagactttttgaacttcgtcgtgaacttttggttttcatggattctgcttttcgactatctgattgtttaacaaa

SEQ ID NO: 771306 - DNA, 120 bp, Artificial Sequence
  ENSG00000236287_15 (sequence is synthesized)
ttcatcttggctgctaagacttgcatatcttgcagatatttttactaaattaaatgaagttaatttgtcaatgcaaggaaaaaatgtgaccgtttttacagtatttgataaaatgtcgtc

SEQ ID NO: 771307 - DNA, 120 bp, Artificial Sequence
  ENSG00000236287_16 (sequence is synthesized)
attgttaagaaaattggaattttgggcctcatctgtagaagaagaaaactttgattgttttcctacactcagtgattttttgactgaaattaattctacagttgataaagatatttgcag

SEQ ID NO: 771308 - DNA, 120 bp, Artificial Sequence
  ENSG00000236287_17 (sequence is synthesized)
tgccattgtgcagcacctaaggggtttgcgcgctactctgttaaaatactttcctgtaacaaatgacaataatgcttgggttagaaatccatttacagttactgttaaaccagcttcatt

SEQ ID NO: 771309 - DNA, 120 bp, Artificial Sequence
  ENSG00000236287_18 (sequence is synthesized)
agtagcacgggactatgagagcctgattgatttaacatctgattctcaagtgaagcaaaattttagtgaactttcactaaatgatttttggagtagcctaattcaggaatacccaagcat

SEQ ID NO: 771310 - DNA, 120 bp, Artificial Sequence
  ENSG00000236287_19 (sequence is synthesized)
tgcaaggcgtgcagtgcgtgtacttcttccttttgctacaatgcacctgtgtgaaacggggttttcatattacgctgcaacaaaaacaaaatataggaaaagacttgatgctgcacctca

SEQ ID NO: 771311 - DNA, 120 bp, Artificial Sequence
  ENSG00000236287_20 (sequence is synthesized)
tatgcgaatccgacttagcaatattacacctaatattaagcggatatgtgataaaaagacacaaaaacactgttctcattaaaattggaggagtttgcatgtctcatgataaccaaatgt

SEQ ID NO: 771312 - DNA, 120 bp, Artificial Sequence
  ENSG00000236287_21 (sequence is synthesized)
aagatgaaaataaaagatgatttacttcatctctggtatttgggggatttaaataaaatgattccatttttttatactatttagattttaagaaggctaaagaatcaaacgttttaaaca

SEQ ID NO: 771313 - DNA, 120 bp, Artificial Sequence
  ENSG00000236287_22 (sequence is synthesized)
acaccttatttcaggtcctggttaagtcgtcacctgttgtataaatagaatgcagagttatctgtaaaaatatacattactttcattgagtcttaatttggataatataaacgtttatat

SEQ ID NO: 771314 - DNA, 120 bp, Artificial Sequence
  ENSG00000236287_23 (sequence is synthesized)
aatttaagtccagagaaacagtacctaacttttgatatacaatttattcttcattgttaacgcataacatttaggatacagtagaattatgtatctcgcaaaacttggaactgtgtgtgt

SEQ ID NO: 771315 - DNA, 120 bp, Artificial Sequence
  ENSG00000236287_24 (sequence is synthesized)
attattatgccaaattaaaaatttttaattaaagtcaagctaaatttcatatatcaatatatcactccacctgctagtctagtctctgttataaaggattggtttgaaagtgcattagtc

SEQ ID NO: 771316 - DNA, 120 bp, Artificial Sequence
  ENSG00000236287_25 (sequence is synthesized)
tgtgcaggctgctataacaaaataccataaaacaggtagcttttaagctgcagtaatttagttttggcagttttggaggctggaaaatccaaaataaaaacaccaacaggctgggcgtgt

SEQ ID NO: 771317 - DNA, 67 bp, Artificial Sequence
  ENSG00000236287_26 (sequence is synthesized)
tggaaaatccaaaataaaaacaccaacaggctgggcgtgtggctcacacctagagaccagcctggcc

SEQ ID NO: 771318 - DNA, 120 bp, Artificial Sequence
  ENSG00000236287_27 (sequence is synthesized)
tgagactccatctcaaagaaaaaaaaaaaaaaacaccaacagattcagtgtctgatgagggcccttgttctgatacataaattgtgccttcttgatgtaccctcacatggcagaaggagc

SEQ ID NO: 771319 - DNA, 120 bp, Artificial Sequence
  ENSG00000236287_28 (sequence is synthesized)
acatggcagaaggagcaaacaagcacctcgggcctctttcatgagataattaatcccattgatgagggttctgtcctcaggatttaattacctcccactaagggcccccatttcttaata

SEQ ID NO: 771320 - DNA, 120 bp, Artificial Sequence
  ENSG00000236287_29 (sequence is synthesized)
agggcccccatttcttaatacagtcagcttgggggttagaatttcaacgtatgaatttaggggagacacaagctttcagaccgtaacagagaggtgtttttcttgttttttttggttttt

SEQ ID NO: 771321 - DNA, 120 bp, Artificial Sequence
  ENSG00000236287_30 (sequence is synthesized)
atattctcagtttgggtgtggtggcgtgtacctgtggccctggctactcagaaggctgaggaaggaggatcccttgagcctgagagtttgaagcacaagaaccatcaatcagcacagaag

SEQ ID NO: 771322 - DNA, 120 bp, Artificial Sequence
  ENSG00000236287_31 (sequence is synthesized)
acttctgtgaccccaaactatgtggggatttctccctagcaacaagcaagcaatcagtttggcaacaaacactgactggatgtcttccaattcaattccaacactatctacctggaaata

SEQ ID NO: 771323 - DNA, 120 bp, Artificial Sequence
  ENSG00000236287_32 (sequence is synthesized)
tggaaatagtgtctgatcccacaggaaacggggtttcaccatattatccaggctggtcttgaactcctgggctgaagaaatccacacacctcgtcctcccaaagtgttgggattacaggc

SEQ ID NO: 771324 - DNA, 120 bp, Artificial Sequence
  ENSG00000236287_33 (sequence is synthesized)
ccacaccccagttcaatccattctacacaaactgtaaggatagtttttctaaaacagtacatggatcaattaaaactgatcagctttacactaaaactgatcagagttctgatcagttca

SEQ ID NO: 771325 - DNA, 120 bp, Artificial Sequence
  ENSG00000236287_34 (sequence is synthesized)
agaactttgtctgtgtagtcaagtcccaaatcatcattctggcacttaaggaagaatggccacagcctcatctccctattattccctttatgaaagcttatggtatctttggtttagcac

SEQ ID NO: 771326 - DNA, 120 bp, Artificial Sequence
  ENSG00000236287_35 (sequence is synthesized)
tgattccacccttccctgccttttatataattggtgtatttatcttttgtctagattgtgagatccttggaaacaggtattatgcatataaactcaataactttatttctttttctgcca

SEQ ID NO: 771327 - DNA, 120 bp, Artificial Sequence
  ENSG00000236287_36 (sequence is synthesized)
gctatagatgcatatcatctattttgaattgcctattgaaatgtccctttgaatatctaataggcatttcaagtttaatatattcagaatagtttttcctccattgtttactacctgcca

SEQ ID NO: 771328 - DNA, 120 bp, Artificial Sequence
  ENSG00000236287_37 (sequence is synthesized)
gttgcttaaggccaaaatctatgaatcattcttgattcttctctcattttccatattcaatccatcagaagttttaatggctttatctccaaaatatatcttaacaatggagcaaaattt

SEQ ID NO: 771329 - DNA, 120 bp, Artificial Sequence
  ENSG00000236287_38 (sequence is synthesized)
gagtaccatagaaccagattagggataactgtaggaatgaaggagtgatacacctaggaataggaaagtagtctgaagccagatgataaaggtccttttatgccaaactaagaagttcag

SEQ ID NO: 771330 - DNA, 120 bp, Artificial Sequence
  ENSG00000236287_39 (sequence is synthesized)
atattattgttagaggagagctattgaggtttttgagtagggcacttatatattcattttgtacttcaggaatgaatcagtagaggggataaatgagggtaccctcaaaattgcaagcaa

SEQ ID NO: 771331 - DNA, 120 bp, Artificial Sequence
  ENSG00000236287_40 (sequence is synthesized)
tgaagtattagaactgaatttttagggacagcaataccagcctaactggctgcataagagaagactgggtgtttgggagaggcaaaaaataaggccaacagaaaaggtagggtagggaca

SEQ ID NO: 771332 - DNA, 120 bp, Artificial Sequence
  ENSG00000236287_41 (sequence is synthesized)
gaatataaagggcttgaaagccaggtaaaagcatataaactgggatgcctgggttctaataactgtttccctacttggagaaactccccttatcttttttaaaccccagtttccttttcc

SEQ ID NO: 771333 - DNA, 120 bp, Artificial Sequence
  ENSG00000236287_42 (sequence is synthesized)
tgggatttgcttcagctataaatgttgtaattttctataatgctctgacctgctacagtggctctgaaaccttgactgcacactggaatcacctagagagctttaaaagctactgatggc

SEQ ID NO: 771334 - DNA, 120 bp, Artificial Sequence
  ENSG00000236287_43 (sequence is synthesized)
tagatctcactaccaaagattcagatttatctggtcttaggtgcagcctggacactgagatatttaaaagttctccaggtgattctaatgtgcagccaaggttgagatcaactcatgtag

SEQ ID NO: 771335 - DNA, 120 bp, Artificial Sequence
  ENSG00000236287_44 (sequence is synthesized)
tcatgtagaaaatagtgaagcactaagattcttaagcatggtaataatatgttaaaatttagtttagtttttttgttttttttgttttttccaagacggagtcttgctctgtcgcccagg

SEQ ID NO: 771336 - DNA, 120 bp, Artificial Sequence
  ENSG00000236287_45 (sequence is synthesized)
tggctgaaaaaaggtattttaagaaagactaacaggaatatacagactagtagggaaagactacagaagatcaactagaattttgcaataatccaggagaaaagtttagtaagggctgga

SEQ ID NO: 771337 - DNA, 120 bp, Artificial Sequence
  ENSG00000236287_46 (sequence is synthesized)
ttagcatacatgcaatgatgttgtagggaggaagatgaatgcaagaaacatttggagagaaggagcaccaggattcagtaagtgattgaatgttaaatctgagcaaaaggaaaaaaaata

SEQ ID NO: 771338 - DNA, 120 bp, Artificial Sequence
  ENSG00000236287_47 (sequence is synthesized)
aaatggccgcttcctggaactgcctaagatggcggtcgcgggctctgctgtggaccgcggcgctgctgtgcagcccagccgcggcaaaatccgttctctccatcgctgatggagatgaaa

SEQ ID NO: 771339 - DNA, 120 bp, Artificial Sequence
  ENSG00000236287_48 (sequence is synthesized)
tagagagatggtgttgggtgctgagacgttttcatgtggtcgttagcgcaggcggccgcccggggacgcgagagaagacctgaggcgagggtgggctgcgactggcttttggttactccc

SEQ ID NO: 771340 - DNA, 120 bp, Artificial Sequence
  ENSG00000236287_49 (sequence is synthesized)
ggacgctgcggtgccgctttccctatccagtcctgttcccgcggctccccagcctaccccgggccgaccaagaggtccggcggggtctgcgccgcatcagcgcccgctcgtcaggcctag

SEQ ID NO: 771341 - DNA, 120 bp, Artificial Sequence
  ENSG00000236287_50 (sequence is synthesized)
ccctccgcacagccaaggccgaccagacctctagacactccgtcgtcgggtgtggggcggagaagtaaagggcgagttttcttcctagattccagtgggaaccaagaaaaggagttggca

SEQ ID NO: 771342 - DNA, 120 bp, Artificial Sequence
  ENSG00000236287_51 (sequence is synthesized)
gctgtgtaaactggacctggggtgcggcctccgggaacaaaagaggtgataaatgcacagcagccgaggttctgcgtgctcctttggggccactacgaatccccgtgaatcaccccagcc

SEQ ID NO: 771343 - DNA, 120 bp, Artificial Sequence
  ENSG00000236287_52 (sequence is synthesized)
cgggcagagggccagaaatgatgaaaatgcagattcatggcttccactccagccctacaagatcaccaaccgtatctggcagtacccaggaatctgcattctcgacaagcgtccgcgccg

SEQ ID NO: 771344 - DNA, 120 bp, Artificial Sequence
  ENSG00000236287_53 (sequence is synthesized)
acggggctagtgaagtttgagaacaattgcttcctacccagccgctccgctatcacctaggtagcacggccgctgcggctgaggctgtgactgcggctgcggctgggccgcgcctcaacc

SEQ ID NO: 771345 - DNA, 120 bp, Artificial Sequence
  ENSG00000236287_54 (sequence is synthesized)
gagcttggtcctttcctttggtcccgccccgctgctcagcgcggattggtggcgggacgcaaatctggcgctgattgggcggcggcagagtcgctcgtgaagattgtagggttcgggtgc

SEQ ID NO: 771346 - DNA, 120 bp, Artificial Sequence
  ENSG00000236287_55 (sequence is synthesized)
gggacgcgagagaagacctgaggcgagggtgggctgcgactggtagggagccccccagtcgtggcaatctgtgggcagcgcgcacctgtgacagggaggagctgagggatagttggccct

SEQ ID NO: 771347 - DNA, 120 bp, Artificial Sequence
  ENSG00000236287_56 (sequence is synthesized)
ggctgcacatccaggtgaccgtttaaaaaagcatttaggtgttggaaggagcatctgttcccacctttttggctggcctgcactcagatcctgtcctcctgaccctgagggtattgttcc

SEQ ID NO: 771348 - DNA, 120 bp, Artificial Sequence
  ENSG00000236287_57 (sequence is synthesized)
cagccggaaccgcccgaagataggggagaaaggattgtgatacttgtcagtttaaccggaaggagactaaagacggaagttttccccgctcttcagggagtggaaaggaaactttactct

SEQ ID NO: 771349 - DNA, 120 bp, Artificial Sequence
  ENSG00000236287_58 (sequence is synthesized)
agggattacagaaaggagaacaccttatttcagtccttttcccctaacctccttggagactagattcctgctcttaagtccaagtccattatctgagaccctgctgtctgctactagacc

SEQ ID NO: 771350 - DNA, 120 bp, Artificial Sequence
  ENSG00000236287_59 (sequence is synthesized)
tttttaatgctgaccgtacccattttggttcttgatgccagctgttcacctcatctgtaacgtatcaggactaaattatggataccatgcacagctagtgagaatggacttttagtacgt

SEQ ID NO: 771351 - DNA, 120 bp, Artificial Sequence
  ENSG00000236287_60 (sequence is synthesized)
tattcttttgaagagtgcatttcaagctgccaaggtggagagagggattacagaaaggagaacaccttatttcaggaacgtggatggagctggtggccattattcttagtaaactcatgc

SEQ ID NO: 771352 - DNA, 120 bp, Artificial Sequence
  ENSG00000236287_61 (sequence is synthesized)
aggaacaaaaccagatactgcatgttcccacttacaggtgagagctaaatgttgagaacacatggacacacagagaggaacaacagacactggtgcctacttgaggatggaaggtggaag

SEQ ID NO: 771353 - DNA, 120 bp, Artificial Sequence
  ENSG00000236287_62 (sequence is synthesized)
gagggagatgagcagaaaaaataactgttggcttagtacctgagtcacaaaatggaacagctggaactgagtcttcaaaaagctgttcaagagttctgaagaccagctgcttctggatga

SEQ ID NO: 771354 - DNA, 120 bp, Artificial Sequence
  ENSG00000236287_63 (sequence is synthesized)
tggaatgtacagtaagaccagaacgtagatggagctggtggccattattcttagtaaactcatgcaggaacagaaaaccaaatactgcacgttcccacttacagcacaagaaccatcaat

SEQ ID NO: 771355 - DNA, 120 bp, Artificial Sequence
  ENSG00000236287_64 (sequence is synthesized)
ggaaactaacattaaattctaagtcggggtctaacctacgtgccttacatacattatctcatttaatctttacaaccaccatataaatactactatcattccgattttacagttttagaa

SEQ ID NO: 771356 - DNA, 120 bp, Artificial Sequence
  ENSG00000236287_65 (sequence is synthesized)
actgagtaagagtaattaaattatttgcccaaagttacacagtaaatggtagagaagacatttgacctcaactggtctaactacttttcctcataggaagatgaccagtttacatatgga

SEQ ID NO: 771357 - DNA, 120 bp, Artificial Sequence
  ENSG00000236287_66 (sequence is synthesized)
atctgttgaatttgagcaaacaactcaaaaaagcaaaatggctatagaggccagatgggaacataaatgagtgaatcaagtcagatgcaactgtggagaaatcaaaacatcgagagaagg

SEQ ID NO: 771358 - DNA, 120 bp, Artificial Sequence
  ENSG00000236287_67 (sequence is synthesized)
tagttctacttagttatgcttgaatgttgccctatgagaatttcaggcccagtattgccatattttaagatttttcatgaaaagatggaaatctggatttgtatgcaaaaatttgtgtga

SEQ ID NO: 771359 - DNA, 120 bp, Artificial Sequence
  ENSG00000236287_68 (sequence is synthesized)
atatcaaattcaagtgtttaaaactactgtggctcaaactatggcttcaagtttgcatctctgagcaaaaggctgttggaaattcagaactggatgtaaagtgagagatctgggctgaag

SEQ ID NO: 771360 - DNA, 120 bp, Artificial Sequence
  ENSG00000236287_69 (sequence is synthesized)
gtaaatgattagggaattcataagcacagagaggatggtagatgcttccaaaacagtatgtgttagaatagtaaccagcacttgacatgattagttaaaataaggcaaaaatatatgagt

SEQ ID NO: 771361 - DNA, 120 bp, Artificial Sequence
  ENSG00000236287_70 (sequence is synthesized)
taacaagttagtcaggacttagagaaaactgataaaactagcagtggaaaactagcagacttaagtgggtatatttaaaattcaattttcaatgaactaaaagctaaattccagacaatg

SEQ ID NO: 771362 - DNA, 120 bp, Artificial Sequence
  ENSG00000236320_0 (sequence is synthesized)
ttcttttattgtttggagcacagaggggctgctgaaatggagagtctcaagactgatactgaaatgccgtatcctgaggtaatagtagatgtgggcagagtgatttttggagaagaaaac

SEQ ID NO: 771363 - DNA, 120 bp, Artificial Sequence
  ENSG00000236320_1 (sequence is synthesized)
aggaagaagatgaccaacagctgtttgaaaagatctgagaattctagaattatccgggctatatgtgcactgttaaattctggaggtggtgtgatcaaagcagagattgatgataaaacc

SEQ ID NO: 771364 - DNA, 120 bp, Artificial Sequence
  ENSG00000236320_2 (sequence is synthesized)
tatagttaccaatgccatgggctgggacaggatttggaaacttcttttcaaaagctccttccttcaggttcacagaaataccttgactacatgcagcaggggcacaatctcctgattttt

SEQ ID NO: 771365 - DNA, 120 bp, Artificial Sequence
  ENSG00000236320_3 (sequence is synthesized)
gtgaagtcatggagcccagatgttttcagccttccactaaggatttgcagcttgcgctccaatttgtatcggagagatgtgacttctgctatcaacttgagtgctagcagtgccctggag

SEQ ID NO: 771366 - DNA, 120 bp, Artificial Sequence
  ENSG00000236320_4 (sequence is synthesized)
cttctcagagagaaggggtttagagcccaaagaggaagaccaagggtgaagaagttgcatcctcagcaggttctcaatagatgcattcaggaagaggaagatatgaggatattggcctca

SEQ ID NO: 771367 - DNA, 120 bp, Artificial Sequence
  ENSG00000236320_5 (sequence is synthesized)
gaattttttaaaaaggacaaactcatgtataaggagaaactcaactttactgagtcaacacatgttgaatttaaaaggttcaccaccaaaaaagtcatacctcggattaaggaaatgctg

SEQ ID NO: 771368 - DNA, 120 bp, Artificial Sequence
  ENSG00000236320_6 (sequence is synthesized)
cctcattatgtttctgcatttgccaacactcaagggggatatgtcctcattggggtggatgataagagcaaagaagtggttggatgtaagtgggaaaaagtgaatcctgacttactaaaa

SEQ ID NO: 771369 - DNA, 120 bp, Artificial Sequence
  ENSG00000236320_7 (sequence is synthesized)
aaagaaatcgaaaactgcatagaaaaattgcctacattccacttctgctgtgagaagccaaaggtaaatttcactacaaaaatcctgaatgtgtaccaaaaagatgtcctggatggttat

SEQ ID NO: 771370 - DNA, 120 bp, Artificial Sequence
  ENSG00000236320_8 (sequence is synthesized)
gtctgtgtgattcaagtggagcccttctgttgcgtggtgtttgcagaggccccagattcctggatcatgaaagacaattctgtcacacggctgacagctgagcagtgggtggtcatgatg

SEQ ID NO: 771371 - DNA, 120 bp, Artificial Sequence
  ENSG00000236320_9 (sequence is synthesized)
ctggatactcagtcagctcctcccagtttggtcacagactacaactcttgcctgatttcatcagcttcatctgcacgaaaaagtcccggatatcccataaaagtccacaaatttaaggag

SEQ ID NO: 771372 - DNA, 120 bp, Artificial Sequence
  ENSG00000236320_10 (sequence is synthesized)
gctctgcaacgacatttgtttccagtgacacaggaagaggtacaatttaaaccagaatccctctgtaagaagctgttctcagatcataaagaactggagggtttaatgaagaccctgata

SEQ ID NO: 771373 - DNA, 120 bp, Artificial Sequence
  ENSG00000236320_11 (sequence is synthesized)
catccttgttctcaggggattgtgatattttctagaagctgggctggtgatgttggcttcaggaaagaacagaatgtcctgtgtgatgctctcctgatagcagttaacagccccgtggta

SEQ ID NO: 771374 - DNA, 120 bp, Artificial Sequence
  ENSG00000236320_12 (sequence is synthesized)
atcttaatagaccccaattggcctggaggacttgaatatgcccgaaacacagctcatcagttaaagcagaaactgcaaactgttggtggttacacagggaaagtgtgcatcattccaagg

SEQ ID NO: 771375 - DNA, 120 bp, Artificial Sequence
  ENSG00000236320_13 (sequence is synthesized)
ctgatacacctgagcagcacacagagtagacctggtgagatccccctgcgttaccccaggtcctacaggcttgctgatgaggaggaaatggaagacttgctgcaggctctggtggtggtc

SEQ ID NO: 771376 - DNA, 120 bp, Artificial Sequence
  ENSG00000236320_14 (sequence is synthesized)
tccctgtcctccagatctcttctgagtgaccagatgggctgtgaatttttcaacttgctcataatggagcagagccagttgctttctgagagtcttcagaagacacgtgaattattcatc

SEQ ID NO: 771377 - DNA, 120 bp, Artificial Sequence
  ENSG00000236320_15 (sequence is synthesized)
tactgctttccaggagtcaggaagacagccctagccataaagatcatggagaaaattaaggacttgtttcactgcaaaccaaaagagatcctctatgtttgtgaaagcgactccctaaag

SEQ ID NO: 771378 - DNA, 120 bp, Artificial Sequence
  ENSG00000236320_16 (sequence is synthesized)
gattttgtgacccaacaaaccacctgccaagctgtgaccaggaaaactttcatgcaaggggagtttctaaagattaaacacatagtgatggatgagactgagaatttctgcagcaaatat

SEQ ID NO: 771379 - DNA, 120 bp, Artificial Sequence
  ENSG00000236320_17 (sequence is synthesized)
ggcaattggtacatgaaggctaagaacatcacccatccaaaggcgaaggggactggaagtgaaaaccttcaccatgggattctctggctttttcttgacccttttcaaatccatcacgca

SEQ ID NO: 771380 - DNA, 120 bp, Artificial Sequence
  ENSG00000236320_18 (sequence is synthesized)
gatgtcaatggccttccccctccatctgctcagtttcctcgaaaaacaatcaccagtgggatccactgtgctctggaaatagcgaaggttatgaaagaagaaatgaagaggatcaaagaa

SEQ ID NO: 771381 - DNA, 120 bp, Artificial Sequence
  ENSG00000236320_19 (sequence is synthesized)
aatcctccctccaacatgtctccagacacattagcattgttcagcgagactgcctatgaggaagcaacgtgtgcccaggctctgcctggggtgtgtgagacaaagactaatctgacaaca

SEQ ID NO: 771382 - DNA, 120 bp, Artificial Sequence
  ENSG00000236320_20 (sequence is synthesized)
gaacaaatagctaactatgtggcaagaaaatgtcacagcctgttccagtgtggctatctgcccaaagatatagcaattctgtgcaggagaggggaggacagaggacgctataggcttgca

SEQ ID NO: 771383 - DNA, 120 bp, Artificial Sequence
  ENSG00000236320_21 (sequence is synthesized)
ctactcaaagcaatggaattaattgagacccacagaccatcagaggttgtgtttagcccggccaccggtgtttggggaagtcacattgttttagacagtattcagcaattttcaggcctg

SEQ ID NO: 771384 - DNA, 120 bp, Artificial Sequence
  ENSG00000236320_22 (sequence is synthesized)
gagaggactgtcgtgtttgggcttagtccagaatgtgaccagtcagaggaatttcataagctctgctttgcttcaagagccattaaacacctctacctgctttatgaaaagagggcagcc

SEQ ID NO: 771385 - DNA, 120 bp, Artificial Sequence
  ENSG00000236320_23 (sequence is synthesized)
tactgaaaattattacaaataatagaggaagacaggaagagcagagtcctttctcctagacaggtagcagtgactccattttaatattacaagtgaggaaatcaaggcacatcagtatgg

SEQ ID NO: 771386 - DNA, 120 bp, Artificial Sequence
  ENSG00000236334_0 (sequence is synthesized)
gaaatgaagactgccacaacttggaagcaaccaagatgtccttcaatgagtgactgcataagcaaactgtggtatattcctacagtggaatattattcagtgctaaaaggaaaaaactat

SEQ ID NO: 771387 - DNA, 120 bp, Artificial Sequence
  ENSG00000236334_1 (sequence is synthesized)
caagccacaaaaagatacagaaaaaacaaagacattttgctaagtgaaagaagccagtctgaaaagggtacatactgtgatttcaactatacgacattctagaaaaggccaaactataaa

SEQ ID NO: 771388 - DNA, 120 bp, Artificial Sequence
  ENSG00000236334_2 (sequence is synthesized)
gacagtaaaaagatcagtggttatctttgcagacgccgccatcgctgtgagccctgtactatcagccatggtcaactccgtcatcttttttgacatcaccgtcgacggcaagcccttggg

SEQ ID NO: 771389 - DNA, 74 bp, Artificial Sequence
  ENSG00000236334_3 (sequence is synthesized)
tcatcttttttgacatcaccgtcgacggcaagcccttgggccgcatctccatcaaacagtttgcagacaagatt

SEQ ID NO: 771390 - DNA, 120 bp, Artificial Sequence
  ENSG00000236334_4 (sequence is synthesized)
tttatgtgtcagggtggtgacttcacacaccctaatggcaccggtgacaagtccatctatggggagaaatttgatgatgagaacctcatccgaaagcatacaggttctggcatcttgtcc

SEQ ID NO: 771391 - DNA, 70 bp, Artificial Sequence
  ENSG00000236334_5 (sequence is synthesized)
ctttggcaaggtgaaagaacgtgtgaatattgtggaagccatggagcactttgggtacaggaatagcaag

SEQ ID NO: 771392 - DNA, 83 bp, Artificial Sequence
  ENSG00000236334_6 (sequence is synthesized)
tctaatgagtttgacttgtgttttattttcaccaccagacccattccttctgtagctcaggagagcacccctccaccacattt

SEQ ID NO: 771393 - DNA, 87 bp, Artificial Sequence
  ENSG00000236334_7 (sequence is synthesized)
aatgagtttgacttgtgttttattttcaccaccagacccattccttctgtagctcaggagagcacccctccaccacatttgcttgca

SEQ ID NO: 771394 - DNA, 120 bp, Artificial Sequence
  ENSG00000236334_8 (sequence is synthesized)
tttatgattatgaaataaaaactaagtaacaacaacaacaacaaaaaagctcagtggttgccaggagtttggggatgggtagggagataaatagttctgaaacaggcgatttttagggga

SEQ ID NO: 771395 - DNA, 120 bp, Artificial Sequence
  ENSG00000236334_9 (sequence is synthesized)
aacaggcgatttttaggggattgaaaatacgttggtaataatgtaatgatgggtacatgacattatgcgttttgcaaaactcctagacctgtaccacacaaagagtgaaccctaatgtaa

SEQ ID NO: 771396 - DNA, 120 bp, Artificial Sequence
  ENSG00000236334_10 (sequence is synthesized)
actgggggtgggataaaggtgacagtatgtgagaactctgtactttctgctcgatctttccataaagctaaaactgctcaaaaaataaagtctattattttgttaaatgaaagaaattaa

SEQ ID NO: 771397 - DNA, 120 bp, Artificial Sequence
  ENSG00000236334_11 (sequence is synthesized)
caatgaccatggcacgctcacacaaaaagattatcaaggacatttctctgtcaggaatgaatatttggtcatctcacaaggcaaaaccctgactagcagaggtgttagctgagggcacat

SEQ ID NO: 771398 - DNA, 120 bp, Artificial Sequence
  ENSG00000236334_12 (sequence is synthesized)
ggccatagatgccaatagtgacctgctggccacttgcagaaaggagagccttgacatccaaacacattgtttctcttgtattgtcctgtgcatacttatgtatcttaacaactttccttc

SEQ ID NO: 771399 - DNA, 120 bp, Artificial Sequence
  ENSG00000236334_13 (sequence is synthesized)
tttcctctccatttatccctctttttaaaacagggcttattgagggtgattaacttaatttttaaatgatatatggcagaatgtcaagagagtatagtgaagaacttcgtagaggaatgg

SEQ ID NO: 771400 - DNA, 120 bp, Artificial Sequence
  ENSG00000236334_14 (sequence is synthesized)
acataacccagaattcttagacttagagtacatgctgtgattgagaattttttattgtttcattgttcaagagattgtaggtacatgttcaattattagagaaatagttgcactctgtta

SEQ ID NO: 771401 - DNA, 120 bp, Artificial Sequence
  ENSG00000236334_15 (sequence is synthesized)
tttcatgtttactttcaaaagggaaagtttatattgatattgagcaagtgaaagcatgaatatttattatttgatgtttgtttctgtgtttgaggaattcctcagcctctcagttttgac

SEQ ID NO: 771402 - DNA, 120 bp, Artificial Sequence
  ENSG00000236334_16 (sequence is synthesized)
gaaaacaagaaaccacctcctgctttagaagctaaaatgccaaatgcttgctttctcagcctcctttgcagctagggtacaagcatatgacttaggttttgccaatctgtttgccagtgc

SEQ ID NO: 771403 - DNA, 120 bp, Artificial Sequence
  ENSG00000236334_17 (sequence is synthesized)
tgaatttcgacttcggaattaataaaaaaagaagcagattcagttatgctttctcttgtttctggtggaggccatgtagcagctgctacaatatctgttgcaaagcgaacaagtgggagt

SEQ ID NO: 771404 - DNA, 120 bp, Artificial Sequence
  ENSG00000236334_18 (sequence is synthesized)
ggtgctggtggctttgcagttagcctaggattgagcaattgctgcaattgttgctgtctgcatcttcggtgttacttcttactggtggtgacagtggtttcctccctggatgagttctac

SEQ ID NO: 771405 - DNA, 120 bp, Artificial Sequence
  ENSG00000236334_19 (sequence is synthesized)
agcatggtttggggtacatttcctggctgcctagctttgatctggctctctagccttctcaacagttctacaagttccccactatttctgtgataaacctatttattgttaatgtcagcc

SEQ ID NO: 771406 - DNA, 120 bp, Artificial Sequence
  ENSG00000236334_20 (sequence is synthesized)
ataattggcttctgtggtttatattttttaaaattccaagatataccaacgtaacagatagctcaacaaacatatgtctttttaaattaagatatattctgtgtcacatgaagtacaatg

SEQ ID NO: 771407 - DNA, 120 bp, Artificial Sequence
  ENSG00000236334_21 (sequence is synthesized)
cacatgaagtacaatggacaaaatgcaacaaattgaattgagctaaagaccaaatatatattaagcctggctggtcttaaaaatgtaactggatacagccaggcatggtggctcacgcct

SEQ ID NO: 771408 - DNA, 120 bp, Artificial Sequence
  ENSG00000236334_22 (sequence is synthesized)
aaaaaataaaaataaaaaaataaaaacgtaactggatagacctaaggttcttgaataagcagaaaataatttaggtaaaaaccaaataataaactaacattctgaaaggtttaggatttg

SEQ ID NO: 771409 - DNA, 120 bp, Artificial Sequence
  ENSG00000236334_23 (sequence is synthesized)
aggatttggaggcccaaatgtcttagctaaaagtgttcattctaacctcacaggaaaattgaaatatgaaaatatacagaaaaatcttaggcagtatttatcaattttaagaaacaacta

SEQ ID NO: 771410 - DNA, 120 bp, Artificial Sequence
  ENSG00000236334_24 (sequence is synthesized)
tttacaggtttttcaataggcattacattaaaaatgaaatatatagttaataaatatgaaaactgtggatataatcaacacatttattttacttcttgaagtgttaacatgtgctgtctc

SEQ ID NO: 771411 - DNA, 120 bp, Artificial Sequence
  ENSG00000236334_25 (sequence is synthesized)
aaatatcaacagtgtacacgtgagaaaaaacattttacatagattttctgcgacagaaaacagcatctcattagacatcccaagttttttcatttggaacacacacccattccccagtat

SEQ ID NO: 771412 - DNA, 120 bp, Artificial Sequence
  ENSG00000236334_26 (sequence is synthesized)
attaggggtaataataatttaaagagtttaattactttttactactagaaaactaattttatgtttggcacaaatttctgaaatgctattccactgcaaagaataatacctatatatggc

SEQ ID NO: 771413 - DNA, 120 bp, Artificial Sequence
  ENSG00000236334_27 (sequence is synthesized)
cagaattactttttttctataacattaagataatacttgtcagcctgagcaacaaagtgagacctcatctttacaaaaaataaataaattagacgggtgttgtggtgatgagggtctgta

SEQ ID NO: 771414 - DNA, 90 bp, Artificial Sequence
  ENSG00000236334_28 (sequence is synthesized)
taaataaattagacgggtgttgtggtgatgagggtctgtagtcccagatactcaaaggaggtcgcggttgcagtgaactatgattgcacc

SEQ ID NO: 771415 - DNA, 120 bp, Artificial Sequence
  ENSG00000236383_0 (sequence is synthesized)
atgggtagtgcctaccactgggaggcccggcgccggcagatggctttggaccgaaggagatggctgatggcccagcagcagcaggagctgcagcagaaagaacaggaactgaagaatcac

SEQ ID NO: 771416 - DNA, 120 bp, Artificial Sequence
  ENSG00000236383_1 (sequence is synthesized)
caggaggaagaacaacaatcggaggaaaaactccagccacataagaagttaaatgtgccgcaaccaccagtggcgaaattgtggacatcacaggagcaaccacagccatcacagcagcag

SEQ ID NO: 771417 - DNA, 120 bp, Artificial Sequence
  ENSG00000236383_2 (sequence is synthesized)
cacaggcacaggtgtggccagggccacagccaccacaaccacagccaccacctcagccaacacaaccaagtgctcaagcccgttgtactcagcacacctccaaatgcaatctccaggatt

SEQ ID NO: 771418 - DNA, 120 bp, Artificial Sequence
  ENSG00000236383_3 (sequence is synthesized)
cccaaaggccaggtctcatgaacccatgccaatctagccccatcagaaacactgggtattcacaactcaagtctaccaattacatacagcagtggtgatccagagattgaacccaggacc

SEQ ID NO: 771419 - DNA, 120 bp, Artificial Sequence
  ENSG00000236383_4 (sequence is synthesized)
ccatggccatccccaaaatgcagatgagcaaccacatcttctcagcatccagcaatatctccactccaaaagccacccactctagaagaggaggctgccaggaataaaatgtaatttttt

SEQ ID NO: 771420 - DNA, 120 bp, Artificial Sequence
  ENSG00000236383_5 (sequence is synthesized)
tccaggtaccctcggcctttaatgccttgctggtcaactccccctgggtgggttaatgccaacctacggctgcaaaggagccttccaacttctgcagagagtggttgagaagctgtcggc

SEQ ID NO: 771421 - DNA, 85 bp, Artificial Sequence
  ENSG00000236383_6 (sequence is synthesized)
cagtgattctcctgcctcagcctccttgggtagctgggattacaggtgtggaggtctcgccaagttggccaggctggtctcgaac

SEQ ID NO: 771422 - DNA, 120 bp, Artificial Sequence
  ENSG00000236383_7 (sequence is synthesized)
gggattacaggcgtgagccactgcgctgggcactttaattctgtctttactttctgagatagtctcgctcggacgctcaggttggactgcaatggcgtgatctcagctcgctgaaacttc

SEQ ID NO: 771423 - DNA, 120 bp, Artificial Sequence
  ENSG00000236383_8 (sequence is synthesized)
cgtctcagcctcccgagtagctgggattattgacgcgcagcaccacgcccggctaatttttgtggtttttgtatcttctgtcttctgctctttagtaccgcatagagccacagaagacta

SEQ ID NO: 771424 - DNA, 86 bp, Artificial Sequence
  ENSG00000236383_9 (sequence is synthesized)
tttttttgagacaaggtcttcctctgtcaccaaacctggagtgtgacggcccattcaccatcctccagcctcagcctcctgagtag

SEQ ID NO: 771425 - DNA, 88 bp, Artificial Sequence
  ENSG00000236383_10 (sequence is synthesized)
gcatgcaccaccatgcctagctaattttttgtaaagaccaggtctcactatgttgcccagtagttccagattacagtgagtcataaaa

SEQ ID NO: 771426 - DNA, 120 bp, Artificial Sequence
  ENSG00000236383_11 (sequence is synthesized)
caagtgaggaagcaggtgctcagagagagtgctatttcctgggctggggctgtgccacccagaaatcgttcttgggtgtcacagtgggtgaggcagacagcgtaggcccaatttcagcct

SEQ ID NO: 771427 - DNA, 120 bp, Artificial Sequence
  ENSG00000236383_12 (sequence is synthesized)
ccagctctagggaacagagaccactgccacctatacttctctactcacttgccttgttccctgaagtttctctggcagatgggtgattgggtggggagaggatgatgccacttgcccggg

SEQ ID NO: 771428 - DNA, 120 bp, Artificial Sequence
  ENSG00000236383_13 (sequence is synthesized)
tcatctcctgaaggctttcagatgacagcagctggacccaccgttttacctacctgtgtccactcacatgggctcaggatgtggacttagaggctctcctttaataaatatcttatacaa

SEQ ID NO: 771429 - DNA, 120 bp, Artificial Sequence
  ENSG00000236383_14 (sequence is synthesized)
ggcaatctctgtatcaacaacagattccaggatatactgagccccgtgaggtctggaacagggaaccacagcacagcttcctagttgagaatcttcaggaagggctcagtctgtgccctg

SEQ ID NO: 771430 - DNA, 120 bp, Artificial Sequence
  ENSG00000236383_15 (sequence is synthesized)
cacagacatttatgggggagatggagagaggagagattaaggagaaaaaggtaattccggagacctaagtggggagagatgagcagaggaagggtcagatgatgatgctggaaccctctg

SEQ ID NO: 771431 - DNA, 120 bp, Artificial Sequence
  ENSG00000236383_16 (sequence is synthesized)
aggaagaatgggggaaagaagccagagagaaaagactttactgctgaattgtccatggggcccattgagactcaaagctaaggtgggaaggtcttctatctgatcaggacccaggagaga

SEQ ID NO: 771432 - DNA, 120 bp, Artificial Sequence
  ENSG00000236383_17 (sequence is synthesized)
cagtttccttaccccacagaactctttccttccatcaggtgcccccaaaatgtcactcccaccccttcccacccttcaggtgagtgtagcagcatggctgcactatcactctgacctcca

SEQ ID NO: 771433 - DNA, 120 bp, Artificial Sequence
  ENSG00000236383_18 (sequence is synthesized)
ctcacttggcccaggcacatgctggacccccattcaggagacagacaaaacattcttcttcctcagcaatgcaggctgaagagcccaaggtcacatattgtaaagattaaccaaattcca

SEQ ID NO: 771434 - DNA, 120 bp, Artificial Sequence
  ENSG00000236396_0 (sequence is synthesized)
atggctggcagtcacccctacttcaacctgcctgactccacacacccatcgccgccctccactccacccagcctccactggcaccagcgctgccagccctctgatgccaccaatggcctg

SEQ ID NO: 771435 - DNA, 120 bp, Artificial Sequence
  ENSG00000236396_1 (sequence is synthesized)
ctggtggccctgctgggtgggggcctgcctgctggcttcgtgggccccctttctcgtatggcttaccaggcttccaacctgccctcgctggagctggtcatctgtcgatgcctcttccac

SEQ ID NO: 771436 - DNA, 120 bp, Artificial Sequence
  ENSG00000236396_2 (sequence is synthesized)
ctccctattgccctgctacttaaactgcgtggcgacccccttctgggacctcctgacatccgaggccgcacctgcttctgtgccctgctcaacgtcctcaacattggatgtgcctatagt

SEQ ID NO: 771437 - DNA, 120 bp, Artificial Sequence
  ENSG00000236396_3 (sequence is synthesized)
gcggttcaggtggtgcccactggcaatgctgccactgttcgcaaacattcttccaccgtctgctccgccatcctcaccctctgccttgagagccaggttctcagtggctacgactggtgt

SEQ ID NO: 771438 - DNA, 120 bp, Artificial Sequence
  ENSG00000236396_4 (sequence is synthesized)
ctacaggaggggaccacgggtgtctacaccggcctgggctatgtgcaggctttcctgggaggactggcgctgtccctggggcttctcgtctatcgttctctgcactttccctcctgcctc

SEQ ID NO: 771439 - DNA, 120 bp, Artificial Sequence
  ENSG00000236396_5 (sequence is synthesized)
ccaacagtggccttcctatctggcttggtggggctgctgggctctgtgccaggcctctttgtgctgcagtcccccgtgttgcccagtgacctcctgagttggagttgtgtgggggcagtg

SEQ ID NO: 771440 - DNA, 120 bp, Artificial Sequence
  ENSG00000236396_6 (sequence is synthesized)
gggatcctcaccttggtctccttcacatgtgtgggctatgcggtcaccaaggcccaccctgccctggtgtgtgctgtcctgcattccgaggtggtgatggcccttatactgcagtatttt

SEQ ID NO: 771441 - DNA, 120 bp, Artificial Sequence
  ENSG00000236396_7 (sequence is synthesized)
atgctccatgagactgtggcaccttctgacatcatgggggcaggggttgtgctgggcagcattgccatcattacagcccggaacctcatctgtgagaggacagggaaggtggaggagtga

SEQ ID NO: 771442 - DNA, 120 bp, Artificial Sequence
  ENSG00000236398_0 (sequence is synthesized)
atgctagggagatgttttcctccagacaccaaagagaagcaacagctcagaatgactaaactctgcgatcctgcagaaagtgaattgtcgccatttctcatcaccttaattttagcagtt

SEQ ID NO: 771443 - DNA, 120 bp, Artificial Sequence
  ENSG00000236398_1 (sequence is synthesized)
ttacttgctgaatacctcattggtatcattgcaaatggtttcatcatggctatacatgcagctgaatgggttcaaaataaggcagtttccacaagtggcaggatcctggttttcctgagt

SEQ ID NO: 771444 - DNA, 120 bp, Artificial Sequence
  ENSG00000236398_2 (sequence is synthesized)
gtatccagaatagctctccaaagcctcatgatgttagaaattaccatcagctcaacctccctaagtttttattctgaagacgctgtatattatgcattcaaaataagttttatattctta

SEQ ID NO: 771445 - DNA, 120 bp, Artificial Sequence
  ENSG00000236398_3 (sequence is synthesized)
aatttttgtagcctgtggtttgctgcctggctcagtttcttctactttgtgaagattgccaatttctcctacccccttttcctcaaactgaggtggagaattactggattgataccctgg

SEQ ID NO: 771446 - DNA, 120 bp, Artificial Sequence
  ENSG00000236398_4 (sequence is synthesized)
tgcactgtgtattgtaacaattctttccctatccactcctccaactccactaagaaaacatacttgtctgagatcaatgtggtcggtctggcttttttctttaacctggggattgtgact

SEQ ID NO: 771447 - DNA, 120 bp, Artificial Sequence
  ENSG00000236398_5 (sequence is synthesized)
cctctgatcatgttcatcctgacagccaccctgctgatcctctctctcaagagacacaccctacacatgggaagcaatgccacagggtccaacgaccccagcatggaggctcacatgggg

SEQ ID NO: 771448 - DNA, 120 bp, Artificial Sequence
  ENSG00000236398_6 (sequence is synthesized)
gccatcaaagctatcagctactttctcattctctacattttcaatgcagttgctctgtttatctacctgtccaacatgtttgacatcaacagtctgtggaataatttgtgccagatcatc

SEQ ID NO: 771449 - DNA, 120 bp, Artificial Sequence
  ENSG00000236398_7 (sequence is synthesized)
atggctgcctaccctgccagccactcaattctactgattcaagataaccctgggctgagaagagcctggaagcggcttcagcttcgacttcatctttacccaaaagagtggactctgtga

SEQ ID NO: 771450 - DNA, 120 bp, Artificial Sequence; identical to SEQ ID NO: 767937
  ENSG00000236424_0 (sequence is synthesized)

SEQ ID NO: 771451 - DNA, 80 bp, Artificial Sequence; identical to SEQ ID NO: 767938
  ENSG00000236424_1 (sequence is synthesized)

SEQ ID NO: 771452 - DNA, 120 bp, Artificial Sequence; identical to SEQ ID NO: 553818
  ENSG00000236424_2 (sequence is synthesized)

SEQ ID NO: 771453 - DNA, 120 bp, Artificial Sequence; identical to SEQ ID NO: 767940
  ENSG00000236424_3 (sequence is synthesized)

SEQ ID NO: 771454 - DNA, 120 bp, Artificial Sequence; identical to SEQ ID NO: 553820
  ENSG00000236424_4 (sequence is synthesized)

SEQ ID NO: 771455 - DNA, 120 bp, Artificial Sequence; identical to SEQ ID NO: 553821
  ENSG00000236424_5 (sequence is synthesized)

SEQ ID NO: 771456 - DNA, 120 bp, Artificial Sequence; identical to SEQ ID NO: 553822
  ENSG00000236424_6 (sequence is synthesized)

SEQ ID NO: 771457 - DNA, 120 bp, Artificial Sequence
  ENSG00000236424_7 (sequence is synthesized)
ggcagtactcagcatggtcttatgcacaggaactaaaggaaaaacagatcgagtcacaaaaattcaggaagagggggtaaatgtggattgtatggaatgaaaaataaacattctcaagga

SEQ ID NO: 771458 - DNA, 75 bp, Artificial Sequence; identical to SEQ ID NO: 553824
  ENSG00000236424_8 (sequence is synthesized)

SEQ ID NO: 771459 - DNA, 120 bp, Artificial Sequence; identical to SEQ ID NO: 553825
  ENSG00000236424_9 (sequence is synthesized)

SEQ ID NO: 771460 - DNA, 120 bp, Artificial Sequence; identical to SEQ ID NO: 553826
  ENSG00000236424_10 (sequence is synthesized)

SEQ ID NO: 771461 - DNA, 120 bp, Artificial Sequence; identical to SEQ ID NO: 553827
  ENSG00000236424_11 (sequence is synthesized)

SEQ ID NO: 771462 - DNA, 120 bp, Artificial Sequence; identical to SEQ ID NO: 768125
  ENSG00000236424_12 (sequence is synthesized)

SEQ ID NO: 771463 - DNA, 120 bp, Artificial Sequence; identical to SEQ ID NO: 553829
  ENSG00000236424_13 (sequence is synthesized)

SEQ ID NO: 771464 - DNA, 120 bp, Artificial Sequence; identical to SEQ ID NO: 553830
  ENSG00000236424_14 (sequence is synthesized)

SEQ ID NO: 771465 - DNA, 120 bp, Artificial Sequence
  ENSG00000236444_0 (sequence is synthesized)
atggcggccagcaggaggctgatgaaggagcttgaagaaatccgcaaatgtggaatggaaaacttccgtaacatccaggttgatgaagctaatttattgacttggcaagggcttattgtt

SEQ ID NO: 771466 - DNA, 120 bp, Artificial Sequence
  ENSG00000236444_1 (sequence is synthesized)
cacccgaacatcgacgaaaaggggcaggtctgtctgccagtaattagtgctgaaaactggaagccagcaaccaaaaccgaccaagtaatccagtccctcatagcactggtgaatgacccg

SEQ ID NO: 771467 - DNA, 120 bp, Artificial Sequence
  ENSG00000236444_2 (sequence is synthesized)
cagcccgagcacccgcttcgggctgacctagctgaagaatactctaacgaccgtaaaaaattctgtaagaatgctgaagagtttacaaagaaatatggggaaaagcgacctgtggactaa

SEQ ID NO: 771468 - DNA, 120 bp, Artificial Sequence
  ENSG00000236444_3 (sequence is synthesized)
actccgctccgtgaggcttccgggagagggaaagctgttctcctttgatgctctttggttttacagtggaaaactacaattaaaaaaacatagccgtgaaaataaatgagattagaacct

SEQ ID NO: 771469 - DNA, 120 bp, Artificial Sequence
  ENSG00000236444_4 (sequence is synthesized)
agattagaacctgctggcttcacttcctggaggctttttgttgtgtcttgaaactaggatctttgcgggtcatcccttttctgagtgcagtcaatcatagctcactgcagcctcgacctc

SEQ ID NO: 771470 - DNA, 120 bp, Artificial Sequence
  ENSG00000236444_5 (sequence is synthesized)
atcttcccggtccagcctcctgagcagctaggattacaggctttgatcaaaatcaaccattcctttccaaaattcagaagcttccacaacaagaacatgaactggattaatagaaatttc

SEQ ID NO: 771471 - DNA, 120 bp, Artificial Sequence
  ENSG00000236444_6 (sequence is synthesized)
tcagaaaaaaatattcaaacaccaaggatctcactttgtgctgtgaaatgcaagatgagcaatctgatctggacataccagccttcagtcaggcaacaggtgaatatgcaggtagaatta

SEQ ID NO: 771472 - DNA, 120 bp, Artificial Sequence
  ENSG00000236444_7 (sequence is synthesized)
tcaggcaacaggtgaatatgcaggtagaattataatgtgtaaagccgggtgcagtggctcacgtctataatctgagcactttgggagactaacgcgggcggatcacttgaggtcaggagt

SEQ ID NO: 771473 - DNA, 120 bp, Artificial Sequence
  ENSG00000236444_8 (sequence is synthesized)
tctactaaaaatacaaaaaaaagttagctgtgcatggtggcacgtgcctgtaatcacagccacttgggaggccgaggcgagaggatggcttgaacccgggaggctgaggttgcaatgagc

SEQ ID NO: 771474 - DNA, 120 bp, Artificial Sequence
  ENSG00000236444_9 (sequence is synthesized)
ccagcctgggcaacagagagagactctggctaaaaaaaaaaaaaattataatgtataggattgtggatgatcactctaaccaaccagtgggcaagttgctttgctcagcgtaagttcaaa

SEQ ID NO: 771475 - DNA, 120 bp, Artificial Sequence
  ENSG00000236444_10 (sequence is synthesized)
tgctttgctcagcgtaagttcaaactgccacatcagaacgttatttgagtgtatacatacacaaccattaaaagtggccgttaccacgatgcattctgggaaagaagcagcaccaaatcc

SEQ ID NO: 771476 - DNA, 120 bp, Artificial Sequence
  ENSG00000236444_11 (sequence is synthesized)
ctggcgttcgcttgcagcagttactaactttctacagttttcttaattaaaagtggtctaggtaacctgtaaagaaaggattaaaaatttaagatgttcttaaaaaaaaaaaaagtggcc

SEQ ID NO: 771477 - DNA, 120 bp, Artificial Sequence
  ENSG00000236444_12 (sequence is synthesized)
attaatagacggaactatacactggactagttgttgttttaaaaacataaaatctggctaccctaacgggataagagttcagacatcaggatgttgacacagtgtcctaccagaacccag

SEQ ID NO: 771478 - DNA, 120 bp, Artificial Sequence
  ENSG00000236444_13 (sequence is synthesized)
ggtttacttagagaacataaaagaaaagagattgtatgctatattccttgcttttttttttttttttttggtggatgtagataggagatgggatgagagtggccacaggaattcgatgag

SEQ ID NO: 771479 - DNA, 120 bp, Artificial Sequence
  ENSG00000236444_14 (sequence is synthesized)
tcgtaggaaatccatttttgttttaattgatgtttcccgttgaactgacatttagattgaaatacctgcgagccgggtttggtggctcacacctgtaatgctatcactttgggaagctga

SEQ ID NO: 771480 - DNA, 67 bp, Artificial Sequence
  ENSG00000236444_15 (sequence is synthesized)
aaataaataaacaaataaaagtagccgggcgtggtggcagactcctgtaatcccagctactcaggag

SEQ ID NO: 771481 - DNA, 74 bp, Artificial Sequence
  ENSG00000236444_16 (sequence is synthesized)
taaaagtagccgggcgtggtggcatttggaccctggaggcagaggctgcagtgagcccagattgcgccattgca

SEQ ID NO: 771482 - DNA, 120 bp, Artificial Sequence
  ENSG00000236444_17 (sequence is synthesized)
ctgtcccccccccacaaaaaaaaattgattgaaatacctggaattcacaccataattggggtgtctttaggctgaaatggagacaacagaaggtgaggtggcttggactcaggtggcatt

SEQ ID NO: 771483 - DNA, 120 bp, Artificial Sequence
  ENSG00000236444_18 (sequence is synthesized)
ggtaaaggaaatgaaacgcatgcaaatttcacagacaaaagagtagctttgccacctctcattttggctgggctgctctgaggtgctgcatcttttatagtgtctaggctctcatcctta

SEQ ID NO: 771484 - DNA, 120 bp, Artificial Sequence
  ENSG00000236444_19 (sequence is synthesized)
atgacattttcatattctccatcccccatcccccaccgcctctccagtaaggactttttgacaagctgcacttccctgctttagtaattggtgataagatttgtcctgtagaacatatac

SEQ ID NO: 771485 - DNA, 120 bp, Artificial Sequence
  ENSG00000236444_20 (sequence is synthesized)
atagaggattgttcactctcctccttttatgaaataatttttagaaattgagctgttaaaggttgtgtttgcacatgttttttggaacaagaactttaattaaaggatcaaaaagcccaa

SEQ ID NO: 771486 - DNA, 120 bp, Artificial Sequence
  ENSG00000236444_21 (sequence is synthesized)
gtatattcttttcttacataatattgcagagaagtcttattgaagccaagtgactgctgtcccatttttttgttgttctaatactgcttttctttttaagctccttagctcttatgccaa

SEQ ID NO: 771487 - DNA, 120 bp, Artificial Sequence
  ENSG00000236444_22 (sequence is synthesized)
atacaaaaataactctgactactttgcattcatattccataacttattttgagtagtgccattaataatttattgtaaaagataatcttacctttaaatatgtgattttaaaataagttt

SEQ ID NO: 771488 - DNA, 120 bp, Artificial Sequence
  ENSG00000236444_23 (sequence is synthesized)
tgctgccttcttactgagcttttcatgtcgttctgggtatacttgttctacagaaattcaagtccaattatataattaaaatgacaggtttcaatatattaaatattctacaaagtgagt

SEQ ID NO: 771489 - DNA, 120 bp, Artificial Sequence
  ENSG00000236444_24 (sequence is synthesized)
tatatctgaaaattcaggtaagcaagtataatttacatttgtactctaaagtgataagtttttgtgaaaatgccccaaaatatattatttctatccctttgcatgagtgtatttgtatat

SEQ ID NO: 771490 - DNA, 120 bp, Artificial Sequence
  ENSG00000236446_0 (sequence is synthesized)
gccaaccagaatctttcccgccttatctaagtcctctcaggccagacttggtgggaggttcctaggattcgctccctgcccttcccaccttagggtgtcctctgagacagactcttattt

SEQ ID NO: 771491 - DNA, 120 bp, Artificial Sequence
  ENSG00000236446_1 (sequence is synthesized)
cggcgggcattggcttcgtgttcctgtacctggtccactcccttctccgccgcctctatcacaacgaccacatccagatagcgaaccgtcacctcagccgcctgatggtggggccccacg

SEQ ID NO: 771492 - DNA, 120 bp, Artificial Sequence
  ENSG00000236446_2 (sequence is synthesized)
ctgctgtgcccaacctctgggacaaccctcccctgctgctgctgtcccagaggctgggtgcaggggctgcagccccagaaggcgagggcctcggcctgatccaggaggctgcgtcggtcc

SEQ ID NO: 771493 - DNA, 77 bp, Artificial Sequence
  ENSG00000236446_3 (sequence is synthesized)
gagaaacccccagaggaggccgcagaggagaagctcacagaggaggccacagaggaaccggccgcagaggaaccgac

SEQ ID NO: 771494 - DNA, 120 bp, Artificial Sequence
  ENSG00000236446_4 (sequence is synthesized)
acccccagaggaggccgcagaggagaagctcacagaggaggccacagaggaaccggccgcagaggaaccgacctcagaggaggccgtggcccccgaggaagtcactaaatctcagcccga

SEQ ID NO: 771495 - DNA, 120 bp, Artificial Sequence
  ENSG00000236543_0 (sequence is synthesized)
atggccctggagaaaggcccgctcctgctgctggcccttggcctgggcctggcgggtgcccagaaggctctggaagaggtaccggtacagccgggcttcaatgcgcagaaggtggagggg

SEQ ID NO: 771496 - DNA, 120 bp, Artificial Sequence
  ENSG00000236543_1 (sequence is synthesized)
cgctggctcaccctgcagctggcagccaaccacgcagacctggtctccccggccgaccccctgaggctcgctctccactccatccggaccagggacggcggggacgtggacttcgtgctg

SEQ ID NO: 771497 - DNA, 120 bp, Artificial Sequence
  ENSG00000236543_2 (sequence is synthesized)
cagtaccaaggctcattcgagggcggcagcatgcacgtatgcttcgtcagcaccgactacagcaacctcattctttacgtgcgctttgaggatgatgagatcaccaacctgtgggtgctg

SEQ ID NO: 771498 - DNA, 120 bp, Artificial Sequence
  ENSG00000236543_3 (sequence is synthesized)
ctggcgagaagaatgctggaggaccccaaatggctgggaagatacttggagtacgtggagaaattccacctgcagaaagccccggtcttcaacatagatggcccatgtcccccaccctga

SEQ ID NO: 771499 - DNA, 120 bp, Artificial Sequence
  ENSG00000236543_4 (sequence is synthesized)
taagagtcgcagattcttcctaaaccggattcttccgaggagttctggcctgggttttcaggcctgtttgctatggaagagcaggttcctggagcaccgccaaggcccgctgcctggatg

SEQ ID NO: 771500 - DNA, 120 bp, Artificial Sequence
  ENSG00000236543_5 (sequence is synthesized)
gaggcagcttccacgcggcatgtttgggtggaaacgtccaaagggagaatctgcagaatctggggcacctgacacccgacgcttctcgggctttctgcccatgtggccaggcttgggccc

SEQ ID NO: 771501 - DNA, 80 bp, Artificial Sequence
  ENSG00000236609_0 (sequence is synthesized)
caggctccgggcacctgtagcccccgaggacccgcgtcgcctggccgccgccgaccccaggcggggccaccccgtggtgc

SEQ ID NO: 771502 - DNA, 120 bp, Artificial Sequence
  ENSG00000236609_1 (sequence is synthesized)
cgcgatggtcccggggggccggccctgagccccgcgcgggattcggggccctgcctcccgccccagcccccgccggagagtctccaccaacttctgctcggccgctcctctcagcccctt

SEQ ID NO: 771503 - DNA, 120 bp, Artificial Sequence
  ENSG00000236609_2 (sequence is synthesized)
ccttcccttggcccagggcgacctcggcagcccagagggcgtggaccctccggagtgcccagaaagcccccggggtggccctgcgcctcctggctctttctggatggaggcgcctccgga

SEQ ID NO: 771504 - DNA, 120 bp, Artificial Sequence
  ENSG00000236609_3 (sequence is synthesized)
aggagccggctgcacgccgtggccttcacctcgcagcctctgctgaccacacctccctagcgcagaggctgcccgggagcaggaaatgctccaccagccgactcccgggaatcggggtct

SEQ ID NO: 771505 - DNA, 120 bp, Artificial Sequence
  ENSG00000236609_4 (sequence is synthesized)
gaccgccaggatggaagtggggccagccaccgagaccttcgtgctggaacttcaatgtcttgaggatgggggcccagggcctgacaccctctcaggtggcagcggtgggagcgagagtca

SEQ ID NO: 771506 - DNA, 120 bp, Artificial Sequence
  ENSG00000236609_5 (sequence is synthesized)
ggaggaggaagagcctcaggagaggaacagcagtccacagcggccagcagtctcggccccagtgggggccagtgaaatcgctgaggaaacccggccgggacaacgagagttgcaactgca

SEQ ID NO: 771507 - DNA, 120 bp, Artificial Sequence
  ENSG00000236609_6 (sequence is synthesized)
gcagttagaacagcagcccgagccgcagcaacagccgcaacacgagcagctgcaacagccgcagccacacctagaactgcaacagcagccgcagcaagatgggcaacaacagctatctca

SEQ ID NO: 771508 - DNA, 120 bp, Artificial Sequence
  ENSG00000236609_7 (sequence is synthesized)
actacaacaggaaaaacaccaatccgtgcaccatcaggaactgaaaccagaactgcagctaatgcaccagcagcaacagttacagccacagcaagtgcaagagcaacagcggttgcagca

SEQ ID NO: 771509 - DNA, 120 bp, Artificial Sequence
  ENSG00000236609_8 (sequence is synthesized)
gcagcaggagcagttacagacgcagcaagcacaagagcaacaggtattgcagcagcaggaacagctacagcagcaagtgcaagagcaacagctgttacagcaacagcaggaacagttaca

SEQ ID NO: 771510 - DNA, 120 bp, Artificial Sequence
  ENSG00000236609_9 (sequence is synthesized)
gcagcagcagctgctacaacagcaggaacagttacagcagcaacagtttcaacagcagcaggaacagttacagcagcagcagcagctactattgctgcagcagcagggacagttacagca

SEQ ID NO: 771511 - DNA, 120 bp, Artificial Sequence
  ENSG00000236609_10 (sequence is synthesized)
gcaactgttgcagcagcagcaggcacagttacaacagcagctgctggaacagcagcaggcacagttacagcagcagctactgctgcagcagcaggaacagttacagcagcagcagcaaca

SEQ ID NO: 771512 - DNA, 120 bp, Artificial Sequence
  ENSG00000236609_11 (sequence is synthesized)
gcagctgttgcaacagcagcaggaacaattgcagcagcaacaactgcagcctcctcccctggagcccgaggaggaggaagaggtggagctggagctcatgccggtggacctggggtcaga

SEQ ID NO: 771513 - DNA, 120 bp, Artificial Sequence
  ENSG00000236609_12 (sequence is synthesized)
gcaggagctggagcagcagcggcaggagttggagcggcagcaggagctggaacggcagcaggagcagcggcagctgcagctcaaactgcaggaggagctgcagcagctggagcaacagct

SEQ ID NO: 771514 - DNA, 120 bp, Artificial Sequence
  ENSG00000236609_13 (sequence is synthesized)
ggagcagcagcagcagcagctggagcagcaggaggtgcagctggagctgaccccggtggagctaggcgcccagcagcaggaggtgcagctggagctgacccccgtgcagccggagctgca

SEQ ID NO: 771515 - DNA, 120 bp, Artificial Sequence
  ENSG00000236609_14 (sequence is synthesized)
tgcagctggaactggtgccagccgcagggggcggcggagcggcggtcccgggggctccggccgcggtcgtggtggctcccccgggctacgtggtggtgcaggagctcatggtgctgcccg

SEQ ID NO: 771516 - DNA, 120 bp, Artificial Sequence
  ENSG00000236609_15 (sequence is synthesized)
cggcgttgacccctgcacggcagcggcggcggcggcgcgctcgggaccggccgaccatctgcggggagtgcggcaagggcttcagccgcagcacggacctggtgcgccaccaggccacgc

SEQ ID NO: 771517 - DNA, 120 bp, Artificial Sequence
  ENSG00000236609_16 (sequence is synthesized)
ggtgcgccaccaggccacgcacacgggtgagcggccacaccgctgcggcgagtgcggcaagggcttctcgcagcactcgaatctggtgacgcaccaacgcatccacacgggcgagaaacc

SEQ ID NO: 771518 - DNA, 120 bp, Artificial Sequence
  ENSG00000236609_17 (sequence is synthesized)
ctacgcctgctcctactgcgccaagcgcttcagcgagagctcggcgctcgtgcagcaccagcgcacgcacaccggggagcgaccctacgcctgcggggactgtggcaagcgcttcagcgt

SEQ ID NO: 771519 - DNA, 120 bp, Artificial Sequence
  ENSG00000236609_18 (sequence is synthesized)
ctcctccaacctgctgcgccaccggcgcacgcactcgggcgagcggccctacgtgtgcgaggactgtggcgagcgcttccgacacaaggtgcagatccgccgccacgagcgccagctgca

SEQ ID NO: 771520 - DNA, 80 bp, Artificial Sequence
  ENSG00000236609_19 (sequence is synthesized)
tcgcggccggcggccctcggtggcccagcccgcgcggagcaggccgctacagccactgcgcccgcagacaaggcgctgtg

SEQ ID NO: 771521 - DNA, 120 bp, Artificial Sequence
  ENSG00000236609_20 (sequence is synthesized)
agggccgtgatcggggctgcctggccgggaggggaccccccacccgcctccacctgaaaagctccttgacccgggttcatgggcgctggaggcgtcctggaatatccctggagtaaaagg

SEQ ID NO: 771522 - DNA, 120 bp, Artificial Sequence
  ENSG00000236609_21 (sequence is synthesized)
cttccaccatcatcatcatcatcatcttccggattccctgagaaaataccaggttcacagatttcaccgccagaaaaatccatccgccaaaagagaagtggaccggggctgaaacagcac

SEQ ID NO: 771523 - DNA, 120 bp, Artificial Sequence
  ENSG00000236609_22 (sequence is synthesized)
acgggacacgtttgtctgccctttgaggggtctgccaaaggttttccctccgggaaaactggacttactacgaacgaggaaaaacccccagtggcgagacgattaatgacactggccgag

SEQ ID NO: 771524 - DNA, 120 bp, Artificial Sequence
  ENSG00000236609_23 (sequence is synthesized)
gactggacacccaccagggaatcaagacgtggtgagacacacgtggaaaatcttcgatcctggtgaaaatgatcgcaaggagaaattcggggaggaagcaaacttgtttgcactatgtag

SEQ ID NO: 771525 - DNA, 120 bp, Artificial Sequence
  ENSG00000236609_24 (sequence is synthesized)
aaactgaccaaggcatcgaatcgtcctcagaggcatttgccttgaaaatactttccaagatgaaaattcatcagggtgggtataattctgatgaaaacgcctgtgttcatcaacacaggg

SEQ ID NO: 771526 - DNA, 120 bp, Artificial Sequence
  ENSG00000236609_25 (sequence is synthesized)
tcagagcgctcaccgggtcgatgtgcaaatccaagccaggaagtcctgctccgggtggaaggtaaaaccttccctccagggaaccaggggctccggcgggcatcggaggcagcttcttgg

SEQ ID NO: 771527 - DNA, 120 bp, Artificial Sequence
  ENSG00000236609_26 (sequence is synthesized)
cctctgctgctgtgtcccccagtccccccagcccgcattaatgtcctctggaataagagcctgtggctgaagcagagggccttctgggagagctctccaaggtctggaaggagggtcccc

SEQ ID NO: 771528 - DNA, 120 bp, Artificial Sequence
  ENSG00000236609_27 (sequence is synthesized)
cagaaggagctccggggtagccccactgtggcccccctggactccaccagcttcatgcttctcagatgctacccaggggccggcccggggagaccagggcagatttctcccgcaccaggc

SEQ ID NO: 771529 - DNA, 120 bp, Artificial Sequence
  ENSG00000236609_28 (sequence is synthesized)
tgtggaggtttggagggctgcctgagcagacactgtgccattgctggggctggggaaagaatatctgagacgacgtttgggagcaatgctctttaccacgttcaccaagtcgtctggggc

SEQ ID NO: 771530 - DNA, 120 bp, Artificial Sequence
  ENSG00000236609_29 (sequence is synthesized)
aggggttgtgagctgcagcagttgctggtgccttgtgggaaggtggggcagggaggaggctgcccgccacctctgcccccagtcacttcctgcttgacctgactcttcacatgtggctgc

SEQ ID NO: 771531 - DNA, 120 bp, Artificial Sequence
  ENSG00000236609_30 (sequence is synthesized)
ttaattcctgcccctctccccccagctgcttctcctttactaacacacctgctacattttacacatgtgttggtaagtgagaaacagaaacgaaaaataaattaaaatgcagaaatacaa

SEQ ID NO: 771532 - DNA, 120 bp, Artificial Sequence
  ENSG00000236637_0 (sequence is synthesized)
acaactagggaatttagaaaatggaaattagtatgttcactatttaagacctatgcacagagcaaagtcttcagaaaacctagaggccgaagttcaaggttatccatctcaagtagccta

SEQ ID NO: 771533 - DNA, 120 bp, Artificial Sequence
  ENSG00000236637_1 (sequence is synthesized)
gcaatatttgcaacatcccaatggccctgtccttttctttactgatggccgtgctggtgctcagctacaaatccatctgttctctgggctgtgatctgcctcagacccacagcctgggta

SEQ ID NO: 771534 - DNA, 120 bp, Artificial Sequence
  ENSG00000236637_2 (sequence is synthesized)
ataggagggccttgatactcctggcacaaatgggaagaatctctcatttctcctgcctgaaggacagacatgatttcggattccccgaggaggagtttgatggccaccagttccagaagg

SEQ ID NO: 771535 - DNA, 120 bp, Artificial Sequence
  ENSG00000236637_3 (sequence is synthesized)
ctcaagccatctctgtcctccatgagatgatccagcagaccttcaatctcttcagcacagaggactcatctgctgcttgggaacagagcctcctagaaaaattttccactgaactttacc

SEQ ID NO: 771536 - DNA, 120 bp, Artificial Sequence
  ENSG00000236637_4 (sequence is synthesized)
aagcatgtgtgatacaggaggttggggtggaagagactcccctgatgaatgaggactccatcctggctgtgaggaaatacttccaaagaatcactctttatctaacagagaagaaataca

SEQ ID NO: 771537 - DNA, 120 bp, Artificial Sequence
  ENSG00000236637_5 (sequence is synthesized)
ggttgtcagagcagaaatcatgagatccctctcgttttcaacaaacttgcaaaaaagattaaggaggaaggattgaaacctggttcaacatggaaatgatcctgattgactaatacatta

SEQ ID NO: 771538 - DNA, 120 bp, Artificial Sequence
  ENSG00000236637_6 (sequence is synthesized)
attgactaatacattatctcacactttcatgagttcttccatttcaaagactcacttctataaccaccacgagttgaatcaaaattttcaaatgttttcagcagtgtgaagaagcttggt

SEQ ID NO: 771539 - DNA, 120 bp, Artificial Sequence
  ENSG00000236637_7 (sequence is synthesized)
gtatacctgtgcaggcactagtcctttacagatgacaatgctgatgtctctgttcatctatttatttaaatatttatttatttttaaaatttaaattattttttatgtgatatcatgagt

SEQ ID NO: 771540 - DNA, 120 bp, Artificial Sequence
  ENSG00000236699_0 (sequence is synthesized)
agtcacagccaggtaaccctggagtgaagcggtttagttagaagggagcagataaactcgtcactctagtagctttaaccctcaccctgaggcaccttagcaatcagccattgcctgcaa

SEQ ID NO: 771541 - DNA, 120 bp, Artificial Sequence
  ENSG00000236699_1 (sequence is synthesized)
gcctccaaagcttgtctttgcctaatatggagcccaaagaagccactgggaaagaaaacatggtcaccaagaaaaagaatctggccttcttgaggtctagactctatatgctggagagaa

SEQ ID NO: 771542 - DNA, 120 bp, Artificial Sequence
  ENSG00000236699_2 (sequence is synthesized)
ggaagactgacactgtggttgagagcagtgtttctggggaccactctggcaccttgaggaggagccaatctgacaggaccgaatacaaccagaaattacaagaaaagatgactccacagg

SEQ ID NO: 771543 - DNA, 120 bp, Artificial Sequence
  ENSG00000236699_3 (sequence is synthesized)
gtgagtgttctgtagctgagaccttaaccccagaggaagagcatcatatgaagaggatgatggcaaagcgggaaaagatcattaaggagctgatacagacagaaaaggattatctcaatg

SEQ ID NO: 771544 - DNA, 120 bp, Artificial Sequence
  ENSG00000236699_4 (sequence is synthesized)
atctagagctgtgtgttagggaagtggttcagcccctgagaaataaaaagactgataggctggatgtggatagcttgtttagcaacattgagtccgtgcatcagatatcagccaagctgc

SEQ ID NO: 771545 - DNA, 120 bp, Artificial Sequence
  ENSG00000236699_5 (sequence is synthesized)
tgtcattgttggaagaggccacaacagacgtggaaccggccatgcaagtaattggagaagtattcttgcagattaaagggccactggaagatatttataaaatctactgctatcaccatg

SEQ ID NO: 771546 - DNA, 120 bp, Artificial Sequence
  ENSG00000236699_6 (sequence is synthesized)
atgaagcacatagtatactggagtcctatgaaaaggaagaagagctgaaggaacatttgagccactgtatccagtccttaaagaaaatatacatgcaagaaggcaaaccaaacttattgg

SEQ ID NO: 771547 - DNA, 120 bp, Artificial Sequence
  ENSG00000236699_7 (sequence is synthesized)
acatgggctctttgatgatcaaaccaattcaacgtgtgatgaaataccccctattactgtgcgaacttcggaattccacccctccctctcacccagattacagagcactggacgatgcct

SEQ ID NO: 771548 - DNA, 120 bp, Artificial Sequence
  ENSG00000236699_8 (sequence is synthesized)
ttgctgctgtgaaggacattaatgttaacatcaatgaacttaaaagaaggaaagatttagttctaaaatacaagaagaatgacgaggatgaatcacttaaagacaaattgtctaaactaa

SEQ ID NO: 771549 - DNA, 120 bp, Artificial Sequence
  ENSG00000236699_9 (sequence is synthesized)
atattcattcaattagcaagaaatcaaaaagagtgacaaatcatctgaagattctgaccagaggagaatcacaggttaaagacaatacctttaacagagaagaaaagctgtttagagctt

SEQ ID NO: 771550 - DNA, 120 bp, Artificial Sequence
  ENSG00000236699_10 (sequence is synthesized)
tagaaaagactgtgaggctttgtgtgaagaacatttcactctgtcttcaacacatacaggatgccatgcccctggctctgcagagtgtgatggaccttcaggagatttcatacaacaaag

SEQ ID NO: 771551 - DNA, 120 bp, Artificial Sequence
  ENSG00000236699_11 (sequence is synthesized)
acgatgagatggactattctgagaccctaagtaatgccttaaattcgtgtcatgactttgcatctcacttacagagactcatcctgacccccttgtcagccctgctgtccttattcccag

SEQ ID NO: 771552 - DNA, 120 bp, Artificial Sequence
  ENSG00000236699_12 (sequence is synthesized)
ggcctcacaagctcatccagaaacgctatgacaaactgctggattgcaacagctacctgcagcgatcaacgggagaggagtcagacttggccaaaaaggagtatgaggccctcaacgccc

SEQ ID NO: 771553 - DNA, 120 bp, Artificial Sequence
  ENSG00000236699_13 (sequence is synthesized)
agcttgtggaggagctccaggcattcaaccaggctgctcggaagattctgttgaactgtctatgcagcttcattaccctccttagggacctgatgctcgtggcacagcaggcttactcca

SEQ ID NO: 771554 - DNA, 120 bp, Artificial Sequence
  ENSG00000236699_14 (sequence is synthesized)
cacttgtgccgatgccactgttggtttcaagcatttctgagattcagaatcaagtactagaagagatccaaaatttgaattgtgtgaaagaaaacagtgccacctttattgagaggaaac

SEQ ID NO: 771555 - DNA, 120 bp, Artificial Sequence
  ENSG00000236699_15 (sequence is synthesized)
tcagttttgaaaagaagaaacctgtgcagattctgccagaaatgccacatcaaactgacattcatcgctccaaacttctatccacatatagtgcagaggaactctatcaagctaagcgca

SEQ ID NO: 771556 - DNA, 120 bp, Artificial Sequence
  ENSG00000236699_16 (sequence is synthesized)
agtgcaatgctacacaagaatatgacatcaatcttctggaaggagacttggtggctgtgatagaacagaaagatccactggggagtacaagcaggtggcttgtggacacaggaaatgtga

SEQ ID NO: 771557 - DNA, 120 bp, Artificial Sequence
  ENSG00000236699_17 (sequence is synthesized)
aaggatatgtttattcctccttcctaaaaccctacaatccagcaaaaatgcagaaagtggatgctgagaacaggttctgtgacgatgattttgagaacatcagcctcttcgtgtcttcac

SEQ ID NO: 771558 - DNA, 120 bp, Artificial Sequence
  ENSG00000236699_18 (sequence is synthesized)
ggccagctagtgacagtgtcacaggcacctcagaaagcagcattggtgatagcagctcatctcttagtggcacatgtggaaagtttgaaacaaatggtactgatgttgacagttttcaag

SEQ ID NO: 771559 - DNA, 120 bp, Artificial Sequence
  ENSG00000236699_19 (sequence is synthesized)
aagtagacgaacagattttctatgcagttcatgcttttcaagcacggagtgaccatgaactcagccttcaggaataccagagagttcatatactcaggttttgtgacctaagtggcaata

SEQ ID NO: 771560 - DNA, 120 bp, Artificial Sequence
  ENSG00000236699_20 (sequence is synthesized)
aagagtggtggttagctgaagctcaagggcagaaaggatacgtgccagctaactaccttggaaagatgacttatgcttaagaaaataagccttcaacttttattttccagcaagttgttg

SEQ ID NO: 771561 - DNA, 120 bp, Artificial Sequence
  ENSG00000236699_21 (sequence is synthesized)
attgactacctcataaaactgacattacaaaactttggaccagaaagcaagaaacctctgaactacagaaactgatactgtactgggttttcaggaatactgtacttcctaacaggatta

SEQ ID NO: 771562 - DNA, 120 bp, Artificial Sequence
  ENSG00000236699_22 (sequence is synthesized)
agcaaagcaaatgacccaagcttcaactatcaactatttaaaagtgaagatcttttgaaggagtaattatattcttttatcatcaagaaaggttggatccaaaggtttttcaatttactt

SEQ ID NO: 771563 - DNA, 120 bp, Artificial Sequence
  ENSG00000236699_23 (sequence is synthesized)
ttttttttactgtatgatgtattttgccttaaatgtttttgtttttcatattgctctcttgcaaatgcatacatgtttatatacatacatataaaccatatatattatgtagctttatac

SEQ ID NO: 771564 - DNA, 120 bp, Artificial Sequence
  ENSG00000236699_24 (sequence is synthesized)
acgtatgtggataatatgaattatacacctatatgtataaatcagagtatacaccaaatatacataagaagaatataccaccaactagaagtctttgataatatattttgttaatgtttc

SEQ ID NO: 771565 - DNA, 120 bp, Artificial Sequence
  ENSG00000236699_25 (sequence is synthesized)
gtttatatgttttgaactaaaactgaataacttgatattaacatgtaacattactgaatgcacactatatgccagacattgttctaagtgctttatatgtagtaacttgtttaatattca

SEQ ID NO: 771566 - DNA, 120 bp, Artificial Sequence
  ENSG00000236699_26 (sequence is synthesized)
aaacattatgaagaaaccatggcccaaaaaggtgaagtaatttaatccaaatcacattgctattaagtggtgggcctggacttaaacctaggtagtgtaaaccaaaaataaaattctaag

SEQ ID NO: 771567 - DNA, 82 bp, Artificial Sequence
  ENSG00000236699_27 (sequence is synthesized)
aagagacaataaaaggaggtttttttattcaaaggtataactggataagtagatttgtttacaatcattcttgtgaaatact

SEQ ID NO: 771568 - DNA, 120 bp, Artificial Sequence
  ENSG00000236699_28 (sequence is synthesized)
ggataagtagatttgtttacaatcattcttgtgaaatacttttttaaaaaaatacgatcaacttctttgcaaatagtagacacatacctcaacaatgatgacctaatttttgatccataa

SEQ ID NO: 771569 - DNA, 120 bp, Artificial Sequence
  ENSG00000236699_29 (sequence is synthesized)
tgtaagattaggtagaaataggcaagctcacactgctaaattaactatcaaatactcagtcaaaactccatttgtggcccccacttcttgatctatttctgttccacttcgtcttctacc

SEQ ID NO: 771570 - DNA, 120 bp, Artificial Sequence
  ENSG00000236699_30 (sequence is synthesized)
atcttgccgactttcctgagcaactgctttgtcgactctctctacctgaccaattgccagatcgacaacctgactggcctgaccagccactcctctgtctggaattaaaagatgtttcca

SEQ ID NO: 771571 - DNA, 120 bp, Artificial Sequence
  ENSG00000236699_31 (sequence is synthesized)
tcataatattctttaatttcaggtaatttagctggcactgagagtatccagccggaatcatgccactttgcctgtaacctttgactcaattggaggaatatcaaagcaaacacccatatt

SEQ ID NO: 771572 - DNA, 120 bp, Artificial Sequence
  ENSG00000236699_32 (sequence is synthesized)
tcctttcaggaggcacactctggtaatctgagacactgcattactattcagctttctaagttctttccaagcacagctgacatcctgtatttcctctaggctttccagagtcatggtcac

SEQ ID NO: 771573 - DNA, 120 bp, Artificial Sequence
  ENSG00000236699_33 (sequence is synthesized)
aaaccccttatcagagttgattaaagatcatggttcaaagcttgatacaccagaaatgtgggctaaagctgcagccaatgcatctatcgcccctttctcttctatcagtatctgagctga

SEQ ID NO: 771574 - DNA, 120 bp, Artificial Sequence
  ENSG00000236699_34 (sequence is synthesized)
tggttggaaaaaaatcaacagcagcataagaaatggaagccagagaccttatggcatccatgcttttaaatttaactaaatccattgtagaaggaacacctacacatttaaaagtaattt

SEQ ID NO: 771575 - DNA, 120 bp, Artificial Sequence
  ENSG00000236699_35 (sequence is synthesized)
gtgttttttgttccacatgtcttagttgacctttctcttggttgataaaaacatatacaaacccctgtctgtccagctttacccacgcatccagagagatggatataggactcaatatcc

SEQ ID NO: 771576 - DNA, 120 bp, Artificial Sequence
  ENSG00000236699_36 (sequence is synthesized)
tgaggaggagaactttgaatcaccaggtcaactacaggaatgtccaaaccacgaggagccacattggttgccaccaaaactttataattacctctctgaagccttttagtgtaatttctc

SEQ ID NO: 771577 - DNA, 120 bp, Artificial Sequence
  ENSG00000236699_37 (sequence is synthesized)
tttgtgactgtgcaatgtccccatgtaaacacagtgcattctgttttgtgcggattcatggccatgtcagttacattcttcttcgtctcacagaaaataatagccctcccttcagatcca

SEQ ID NO: 771578 - DNA, 120 bp, Artificial Sequence
  ENSG00000236699_38 (sequence is synthesized)
ctgtagacttgaaggacatctcattttcatctgtgttttataaaggaggaaattgaggacctcacatggagggactggaatttaaaaccaggtcttctgactttaaggcctttcttttag

SEQ ID NO: 771579 - DNA, 120 bp, Artificial Sequence
  ENSG00000236699_39 (sequence is synthesized)
tgttttcccttttcttttccttaagtcactaaaatctgtagttatataatcttacataaagcatatgcaaaatagaaaaatgatagtcaccacatatctactaatgggattaaaatgtac

SEQ ID NO: 771580 - DNA, 120 bp, Artificial Sequence
  ENSG00000236699_40 (sequence is synthesized)
aatcctaaaagcttacttgttagcacacttgcttatctgtccattcattcattgaaccagtaagtatttattgagagttagtgggaatacaatgctgtgcaagacaaacaagatccctcc

SEQ ID NO: 771581 - DNA, 120 bp, Artificial Sequence
  ENSG00000236699_41 (sequence is synthesized)
attcataccacttaaattctagtggggaaaacatctgcacataacaaactaaataaaatgatcataaaataataaatgctatttatataaaactggctactttcattactgctcagttaa

SEQ ID NO: 771582 - DNA, 120 bp, Artificial Sequence
  ENSG00000236699_42 (sequence is synthesized)
agggtcttgtagctcattttatgacatgaaaaaaatcaaggtctaaaagctccttgagacaatttaaactctaataccaaatatacctctataaaataccaaactgagctaaatacggta

SEQ ID NO: 771583 - DNA, 120 bp, Artificial Sequence
  ENSG00000236699_43 (sequence is synthesized)
tatgtgtacttatacatatgtacataacctaaatatacgtgtgcacacattatctatacaaagagccatactcagtgaaagataaattacctcctaaactaaagtcccctctgaggtaca

SEQ ID NO: 771584 - DNA, 120 bp, Artificial Sequence
  ENSG00000236699_44 (sequence is synthesized)
acagaaattaaaataattgcttctcttctcaactctatgtagcacgtattttccatgatgggataaatgttttcatttcaagtgccaatgtgtgaactgtaataaacattactgctttca

SEQ ID NO: 771585 - DNA, 120 bp, Artificial Sequence
  ENSG00000236699_45 (sequence is synthesized)
taagccaacagaaatagcaaagcaaatgacccaagcttcaactatcaactatttaaaagtgaagatcttttgaaggagtaattatattcttttatcatcaagaaaggtatggaggttaca

SEQ ID NO: 771586 - DNA, 120 bp, Artificial Sequence
  ENSG00000236699_46 (sequence is synthesized)
ttaactgttatagttgcggagctgagtttttatgtcagatgctttcaatcttctgaagatctcattgagaaccagtcattctaatcattgttttcacacactatggaaatcattagaata

SEQ ID NO: 771587 - DNA, 120 bp, Artificial Sequence
  ENSG00000236699_47 (sequence is synthesized)
ctgctgcttcctggaactaaactacttggactaggaagacctactttgctgacattgtcacaactaactgagcgactaaggccagttttacccaaggttagaggtggaggtggttttaaa

SEQ ID NO: 771588 - DNA, 120 bp, Artificial Sequence
  ENSG00000236699_48 (sequence is synthesized)
gttgtgaggaccttgccattattattaccagaaggaagactggatgatattttgggctcttgcttaatggaaatgttttttgtgcttgaaattttgggtggctccacatcctaaaagatg

SEQ ID NO: 771589 - DNA, 120 bp, Artificial Sequence
  ENSG00000236699_49 (sequence is synthesized)
aagtgaacatttagcacctttgatcaaaccccacccaatgccagccctggggatggaggtccttgcctgaaaagaatgtggtgcctctactttaggcatgcgcttctaactgttcaccag

SEQ ID NO: 771590 - DNA, 120 bp, Artificial Sequence
  ENSG00000236699_50 (sequence is synthesized)
aagtggagcagtctgttcagagaggaaagaacatcagtttactattcattaaacttttaacttttaagagaaagaaacagaccctgccagaagattccactaggcagtatagcccagtat

SEQ ID NO: 771591 - DNA, 120 bp, Artificial Sequence
  ENSG00000236699_51 (sequence is synthesized)
catatccccacaaagcagctaaaggcagaggtgattttagaacctcatgaagtctcagttactgaaaattattttcagacccaatggcttatttggtctttttctgcaagtttcaggaaa

SEQ ID NO: 771592 - DNA, 120 bp, Artificial Sequence
  ENSG00000236699_52 (sequence is synthesized)
tcagttgcctagcagggaacattttaaatggatgtagatgaaaggtctcacataaatcctatgttttatgagacttgctgggagctctgctttgcattccctttataaaaagctgacatg

SEQ ID NO: 771593 - DNA, 120 bp, Artificial Sequence
  ENSG00000236699_53 (sequence is synthesized)
ccagaagccctgattgactttttttccccctgcgagaatgactaaaaataacatggaagaagatttagagctctgcagcgattgaaaaatgcaatatcaaaatataaaatgtggaagaaa

SEQ ID NO: 771594 - DNA, 120 bp, Artificial Sequence
  ENSG00000236699_54 (sequence is synthesized)
agcctcttcttaaagctattgtaacttgcctggccccacgtagttcaaggattatgtgagataacacgtggccccatgaccactggagcacatgggttaatggagttaggggaatggcct

SEQ ID NO: 771595 - DNA, 120 bp, Artificial Sequence
  ENSG00000236699_55 (sequence is synthesized)
acaactctgcatggccgtcttctttccccaaactcactgtggggagatgggtgaagacaagtcaggccttgttaaagttagtttcagaacaattactcatgccttcctttctcatcccta

SEQ ID NO: 771596 - DNA, 120 bp, Artificial Sequence
  ENSG00000236699_56 (sequence is synthesized)
aaacattggtgggggagctacacaatgtactttttcttttctagaggaagtatctattcactgtgaaaatctgaaaaatataacaaagtatgtgtaagataaaaaccccttgctatttca

SEQ ID NO: 771597 - DNA, 120 bp, Artificial Sequence
  ENSG00000236699_57 (sequence is synthesized)
aagtaattgaggcaaaccaaacttattggacatgggctctttgatgatcaaaccaattcaacgtgtgatgaaataccccctattactgtgcgaacttcggaattccacccctccctctca

SEQ ID NO: 771598 - DNA, 120 bp, Artificial Sequence
  ENSG00000236699_58 (sequence is synthesized)
aatcaccaaaaagttattacaaataaaagtaaatttccttcttattcctgacaggcattatctagttccttccccctgaaacaactagcagtatcagttttctgtgtatccatatcgatg

SEQ ID NO: 771599 - DNA, 120 bp, Artificial Sequence
  ENSG00000236699_59 (sequence is synthesized)
cccaagcagctaggactacaggcatgcaccaccgtaaccatgcccagatccatttttcaccctacctggcaatctcaaaagaagtccaaagttgatcatatgcacgtgccccagatgaag

SEQ ID NO: 771600 - DNA, 120 bp, Artificial Sequence
  ENSG00000236699_60 (sequence is synthesized)
gaaacagaaactgttcacatagagtgcagtattatcgttgccatttcataatggctctaaaaaactttgttcttcatgacttcgcaagctcttgcaaccccttccaataaacattatttt

SEQ ID NO: 771601 - DNA, 120 bp, Artificial Sequence
  ENSG00000236699_61 (sequence is synthesized)
atccagtataccccatcatccccagatgaaaccgtctagctgcaggaaagcaagctcaaggttcccactgattctacattatgaatgtaagttccatgaaggcaggcagtggattggtct

SEQ ID NO: 771602 - DNA, 89 bp, Artificial Sequence
  ENSG00000236699_62 (sequence is synthesized)
ggcagtggattggtcttgcctactgttgtaacccctgtctggcagagttcctggaaaacagcaaataactacatctgagatcatggctc

SEQ ID NO: 771603 - DNA, 120 bp, Artificial Sequence
  ENSG00000236761_0 (sequence is synthesized)
atggaggagcctggtgctacccctcagccctacctggggctggtcctggaggagctaggcagagttgtggcagcactacctgagagtatgagaccagatgagaatccttatggttttcca

SEQ ID NO: 771604 - DNA, 120 bp, Artificial Sequence
  ENSG00000236761_1 (sequence is synthesized)
tgagagtatgagaccagatgagaatccttatggttttccatcggaactggtggtatgtgcagctgttattggattttttgttgttctcctttttttgtggagaagttttagatcggttag

SEQ ID NO: 771605 - DNA, 120 bp, Artificial Sequence
  ENSG00000236761_2 (sequence is synthesized)
acgctttctggactaattgaagaaaaatgtaaactacttgaaaagtttagccttattcaaaaagagtatgaaggctatgaagtagagtcatctttagaggatgccagctttgagaaggcg

SEQ ID NO: 771606 - DNA, 120 bp, Artificial Sequence
  ENSG00000236761_3 (sequence is synthesized)
gcagcagaagaagcacgaagtttggaggcaacctgtgaaaagctgagcaggtccaattctgaacttgaggatgaaatcctctgtctagaaaaagacttaaaagaagagaaatctaaacat

SEQ ID NO: 771607 - DNA, 120 bp, Artificial Sequence
  ENSG00000236761_4 (sequence is synthesized)
tctcaacaagatgaattgatggcggatatttcaaaaagtatacagtctctagaagatgagtcaaaatccctcaaatcacaaatagctgaagccaaaatcatctgcaagacatttaaaatg

SEQ ID NO: 771608 - DNA, 120 bp, Artificial Sequence
  ENSG00000236761_5 (sequence is synthesized)
agtgaagaacgacgggctatagcaataaaagatgctttgaatgaaaattctcaacttcagacaagccataaacagctttttcagcaagaagctgaagtatggaaaggacaagtgagtgaa

SEQ ID NO: 771609 - DNA, 120 bp, Artificial Sequence
  ENSG00000236761_6 (sequence is synthesized)
aaaataacatttgaagactccaaagtacacgcagaacaagttctgaatgataaagaaaatcacatcaagaccctgactggacacttgccaatgatgaaagatcaggctgctgtgcttgaa

SEQ ID NO: 771610 - DNA, 120 bp, Artificial Sequence
  ENSG00000236761_7 (sequence is synthesized)
gctgtgcttgaagaagacacaacggatgatgataacctggaattaaaagtgaacagtcaatgggaaaatggtgctaacttagatgatcctccgaaaggagctttgaagaaactgattcat

SEQ ID NO: 771611 - DNA, 120 bp, Artificial Sequence
  ENSG00000236761_8 (sequence is synthesized)
gctgctaagttaaatgtttctttaaaaagcttagaaggagaaagaaaccacattattattcagttatctgaagtggacaaaacaaaggaagagcttacagagcatattaaaaatcttcag

SEQ ID NO: 771612 - DNA, 85 bp, Artificial Sequence
  ENSG00000236761_9 (sequence is synthesized)
ataatgactgaattctatcaagaaaatgaaatgaaactctacaggaaattaacagtggaggaaaattaccgaatagaggaagaag

SEQ ID NO: 771613 - DNA, 120 bp, Artificial Sequence
  ENSG00000236761_10 (sequence is synthesized)
gaagaaaagatcagccatgccactgaagagctggagacctatagaaagctagccaaagatcttgaagaagaattggagagaactgttcatttttatcaaaagcaggttatttcctacgag

SEQ ID NO: 771614 - DNA, 120 bp, Artificial Sequence
  ENSG00000236761_11 (sequence is synthesized)
aaaagaggacatgataattggttggcagctcggactgctgaaagaaacctcagtgatttaaggaaagaaaatgctcacaacaaacaaaaattaactgaaagagagttgaaatttgaactt

SEQ ID NO: 771615 - DNA, 120 bp, Artificial Sequence
  ENSG00000236761_12 (sequence is synthesized)
ttagaaaaagatcctaatgcactcgatgtttcaaatacagcatttggcagagagcattccccatgtagtccctcaccattgggtcggccttcatctgaaacgagagcttttccctctcct

SEQ ID NO: 771616 - DNA, 120 bp, Artificial Sequence
  ENSG00000236761_13 (sequence is synthesized)
caaactttgttggaggatccactcagactctcacctgtgcttccagggggaggaggaagaggcccaagcagcccagggaatcccctggaccatcagattaccaatgaaagaggagaacca

SEQ ID NO: 771617 - DNA, 120 bp, Artificial Sequence
  ENSG00000236761_14 (sequence is synthesized)
agctatgacaggttaatcgatcctcacagggctccttctgacactgggtccctgtcatctccggtggaacaggaccgtaggatgatgtttcctccaccagggcaatcatatcctgattca

SEQ ID NO: 771618 - DNA, 120 bp, Artificial Sequence
  ENSG00000236761_15 (sequence is synthesized)
actcttcctccacaaagggaagacagattttattctaattctgaaagactgtctggaccagcagaacccagaagttttaaaatgacttctttggataaaatggataggtcaatgccttca

SEQ ID NO: 771619 - DNA, 120 bp, Artificial Sequence
  ENSG00000236761_16 (sequence is synthesized)
gaaatggaatccagtagaaatgatgccaaagatgatcttggtaatttaaatgtgcctgattcatctctccctgctgaaaatgaagcaactggccctggccttattcctccacctcttgct

SEQ ID NO: 771620 - DNA, 120 bp, Artificial Sequence
  ENSG00000236761_17 (sequence is synthesized)
ccaatcagcggtccattgtttccagtggatacaaggggcccattcatgagaagaggacctcctttccccccacctcctccaggaaccatgtttggagcttctcgaggttattttccacca

SEQ ID NO: 771621 - DNA, 120 bp, Artificial Sequence
  ENSG00000236761_18 (sequence is synthesized)
agggatttcccaggtccaccacatgctccatttgcaatgagaaacatctatccaccgaggggtttacctccttaccttcatccgagacctggattttaccccaaccccacattctgaagg

SEQ ID NO: 771622 - DNA, 120 bp, Artificial Sequence
  ENSG00000236761_19 (sequence is synthesized)
tagaagcgagttcccttcaggattgattccgccttcaaaggagcctgctactggacatccagaaccacagcaagacacctgacaatattgttgctttcttcaaaagtaattttgactgat

SEQ ID NO: 771623 - DNA, 120 bp, Artificial Sequence
  ENSG00000236761_20 (sequence is synthesized)
ctcattttcagtttaagtaactgctgttacttaagtgattgcacttttctcaaattgaagtttaatggaataatagttctcaggatagtattttgtaaataaagatggtttgaatatgaa

SEQ ID NO: 771624 - DNA, 120 bp, Artificial Sequence
  ENSG00000236782_0 (sequence is synthesized)
ggcaggcgcgggtgagcatcctctgagagcttgggtcttgcgtatgtggaaggccgccagggagaccagtgccgcccaccatgcgatttcgacgcttgacccctggttacttccgggtgt

SEQ ID NO: 771625 - DNA, 120 bp, Artificial Sequence
  ENSG00000236782_1 (sequence is synthesized)
tacagatgcaggtagctggtgagctgaaggcagagccccggagtctgctggcaggagttgtggctacagtgctagctgtcctcggcctgggtggctcctgctatgccgtctggaagatgg

SEQ ID NO: 771626 - DNA, 120 bp, Artificial Sequence
  ENSG00000236782_2 (sequence is synthesized)
gaaaaacaggagttgggagctgaccaggtgagagccctatctgctgagcacccatccatcaatcctctccttactccttcataccttttcttgtggtctttggatcggaagtgggtcttc

SEQ ID NO: 771627 - DNA, 120 bp, Artificial Sequence
  ENSG00000236782_3 (sequence is synthesized)
aggttggtggaatcgatgaagtacctcctgtaggaatggaagtgagaaggagagtgaggaggtgatagtctcccaagtgcacctatctccctagccctagcttgtccctgacgccaggat

SEQ ID NO: 771628 - DNA, 120 bp, Artificial Sequence
  ENSG00000236782_4 (sequence is synthesized)
ggcaggcgcgggtgagcatcctctgagagcttgggtcttgcgtatgtggaaggtcagagacccctctaccctagtttccacttcttggtgtcatgaagaccactggtcttcacgtccgct

SEQ ID NO: 771629 - DNA, 120 bp, Artificial Sequence
  ENSG00000236782_5 (sequence is synthesized)
gccggtaccgcggaccctcctccgccccaggccgggctcgtccgggactcacgcgcaggccagacagcggtgcagaccgccccctggcaggtcggggtcgaactcggcgtttgggtcggg

SEQ ID NO: 771630 - DNA, 120 bp, Artificial Sequence
  ENSG00000236782_6 (sequence is synthesized)
ctggggtcgtgcggatccctgaggccgcagctcgcggtgaatctcatccaagtccggccgccgccgcttcgccttcatctgccgggctagagagtgcgctcggtgcgcgcctgtccggcg

SEQ ID NO: 771631 - DNA, 120 bp, Artificial Sequence
  ENSG00000236782_7 (sequence is synthesized)
ggagcgacccatggccagaaacagcccggccggccaaggggccaggagcagggcagggagcacacgtgtgagcacttccgggccgatcagctacgtcaggccacgccggggggctaggca

SEQ ID NO: 771632 - DNA, 120 bp, Artificial Sequence
  ENSG00000236782_8 (sequence is synthesized)
ggctcggccggaccgcctctgatgacgtcactctcggccagcggctcgagcgccgccaggcggccgtcgacgtcagtgaccgagctcaggacgggctcccagaagtgtgcccactgaagg

SEQ ID NO: 771633 - DNA, 120 bp, Artificial Sequence
  ENSG00000236782_9 (sequence is synthesized)
gcatggccccgcgggccctcgctggggaggcgcggggtggtgcgtgcgcctgggggtttcggggccgtcttgctgccctgctcttcctggcctggtccaaccagtatcagtgccaacctg

SEQ ID NO: 771634 - DNA, 120 bp, Artificial Sequence
  ENSG00000236782_10 (sequence is synthesized)
tactcctgtcatcccttcctgtttcccagaccttggactccgcggtgggggtgggatgctttatctctggaaagcactgataaatgtctgtgtcatgaataaattagtaaatgactgaga

SEQ ID NO: 771635 - DNA, 120 bp, Artificial Sequence
  ENSG00000236782_11 (sequence is synthesized)
aacgaagaagagagactctcacttggatgctgggggtaggtgactcgggaggggggtgcaatctcagaagccttcttttctggggatcagtctctgtcagaagcaggacagagtaatctg

SEQ ID NO: 771636 - DNA, 120 bp, Artificial Sequence
  ENSG00000236782_12 (sequence is synthesized)
agtagacaccctaggcctggtgtacagaaagtagtagagaagcccttccagggcaggagtttgagacagcggcctggaagttagagttggaggcaagttctctttgtccagttcctttat

SEQ ID NO: 771637 - DNA, 120 bp, Artificial Sequence
  ENSG00000236782_13 (sequence is synthesized)
ttggggcagggcaccaagaagaggccctccgctccccaaacccagaggcaaaaggggttggcacgctccctcccagcctagtccttgcgtcactgtccatgggcaattcctctgccctgc

SEQ ID NO: 771638 - DNA, 120 bp, Artificial Sequence
  ENSG00000236782_14 (sequence is synthesized)
atcttcaggccatgtcaggtagaggtatccatctcagggacctcagtggacacttccgtgggcactgccagccgcctggggggcacataggatcccatacccgctgccctctccgcctct

SEQ ID NO: 771639 - DNA, 120 bp, Artificial Sequence
  ENSG00000236782_15 (sequence is synthesized)
tcctgactgtagggctcgacgctcagctgcttcagcctgggagaaagaaaaacaggagttgggagctgaccaggtgagagccctatctgctgagcacccatccatcaatcctctccttac

SEQ ID NO: 771640 - DNA, 120 bp, Artificial Sequence
  ENSG00000236980_0 (sequence is synthesized)
aaattgacctccagagattctctttcctgaagataccctccaaaagacaagaggaaagtttgccttttctgctcccttcttggaaagatgcaaagtgctttagtaggctcctggcacaac

SEQ ID NO: 771641 - DNA, 120 bp, Artificial Sequence
  ENSG00000236980_1 (sequence is synthesized)
aatggcttctatgggcactacagaagccaattcaagagtgaaagtgctagagaataccaccttgcagccaagccccagcctccagcagtgttcctgcagcgatgtcaggagccggcgcag

SEQ ID NO: 771642 - DNA, 120 bp, Artificial Sequence
  ENSG00000236980_2 (sequence is synthesized)
gcggcacaccttcctgcgctgggcaccctgtgagatagagttgcgccagcaggggcccctggaatcttcttaccaggctgatttcaggccaggcccaggactcagtggcctcccccagca

SEQ ID NO: 771643 - DNA, 120 bp, Artificial Sequence
  ENSG00000236980_3 (sequence is synthesized)
cctcatccactttgtgcaggtccagccttcccataccaggaccacctaccagcagaacttctgctgcccatcccagggtggccactatggcagctacaaggtagggccccaggcgccggt

SEQ ID NO: 771644 - DNA, 120 bp, Artificial Sequence
  ENSG00000236980_4 (sequence is synthesized)
cactgacgtactgcctgacctcccagggatcccaagacccaagctgctgcagcactaccttcatgctggggtctctgagtgtctaaactggtccagagcattaaacaaggacagctgaca

SEQ ID NO: 771645 - DNA, 120 bp, Artificial Sequence
  ENSG00000236980_5 (sequence is synthesized)
gtacaaggcagacctgaaggcagcgggggtgactagaccagttcttgcctctcccagaacccaaaagcatcatcccagcccttccatggctgtactgacacctatccctgggacaggctt

SEQ ID NO: 771646 - DNA, 120 bp, Artificial Sequence
  ENSG00000236980_6 (sequence is synthesized)
tacctttcttctctgagatgtcagatctttcccctacagacagggtggaaaagagagccggcgcagcgacacttcttctccaagcacgacaaccgtacttcctttgacaaagagggtccc

SEQ ID NO: 771647 - DNA, 120 bp, Artificial Sequence
  ENSG00000236981_0 (sequence is synthesized)
atgtccaagaccagcctcgtgacagcgttcatcctcacgggccttccccatgccccagggctggacgccccactctttggaatcttcctggtggtttacgtgctcactgtgctggggaac

SEQ ID NO: 771648 - DNA, 120 bp, Artificial Sequence; identical to SEQ ID NO: 647896
  ENSG00000236981_1 (sequence is synthesized)

SEQ ID NO: 771649 - DNA, 120 bp, Artificial Sequence
  ENSG00000236981_2 (sequence is synthesized)
atgaccttggtgtccccaagcggcagggctatctccttccacagctgcgtggctcagctctattttttccacttcctggggagcaccgagtgtttcctctacacagtcatgtcctatgat

SEQ ID NO: 771650 - DNA, 120 bp, Artificial Sequence
  ENSG00000236981_3 (sequence is synthesized)
ctgcactctgctgtccagaccatattgactttccatttgccctactgtggacccaaccagatccagcactatttgtgtgatgcaccgcccatcctgaaactggcctgtgcagacacctca

SEQ ID NO: 771651 - DNA, 120 bp, Artificial Sequence
  ENSG00000236981_4 (sequence is synthesized)
gccaacgagatggtcatctttgtggacattgggctagtggcctcgggctgctttctcctgatagtgctgtcttatgtgtccatcgtctgttccatcctgcggatccacacctcagagggg

SEQ ID NO: 771652 - DNA, 120 bp, Artificial Sequence
  ENSG00000236981_5 (sequence is synthesized)
aggcacagagcctttcagacctgtgcctcccactgcatcgtggtcctttgcttttttgttccctgtgttttcatttacctgagaccaggctccagggacgtcgtggatggagttgtggcc

SEQ ID NO: 771653 - DNA, 120 bp, Artificial Sequence
  ENSG00000236981_6 (sequence is synthesized)
attttctacactgtgctgacaccccttctcaaccctgttgtgtacaccctgagaaacaaggaggtgaagaaagctgtgttgaaactgagagacaaagtagcacattctcagggagaataa

SEQ ID NO: 771654 - DNA, 60 bp, Artificial Sequence
  ENSG00000237038_0 (sequence is synthesized)
tcaaccacttttcaaaactcacatctcctcggcctgagacccgtgtcgacctctgtgatg

SEQ ID NO: 771655 - DNA, 78 bp, Artificial Sequence
  ENSG00000237038_1 (sequence is synthesized)
cctctgagtagcaggagacctgctgctgtgggggctggtctccagaatatgggaaatacctgctacttgaatgcttcc

SEQ ID NO: 771656 - DNA, 85 bp, Artificial Sequence; identical to SEQ ID NO: 768583
  ENSG00000237038_2 (sequence is synthesized)

SEQ ID NO: 771657 - DNA, 120 bp, Artificial Sequence
  ENSG00000237038_3 (sequence is synthesized)
tatccttgcggtctttgtctccagagggcgccggcctccaacacgttaactttacacacttctgccaaggtcctcatccttgtcttgaagagattctgcgatgtcacaggcaacaaactt

SEQ ID NO: 771658 - DNA, 89 bp, Artificial Sequence; identical to SEQ ID NO: 771269
  ENSG00000237038_4 (sequence is synthesized)

SEQ ID NO: 771659 - DNA, 75 bp, Artificial Sequence; identical to SEQ ID NO: 771270
  ENSG00000237038_5 (sequence is synthesized)

SEQ ID NO: 771660 - DNA, 120 bp, Artificial Sequence
  ENSG00000237110_0 (sequence is synthesized)
atggtgaacaatttctcccaagctgaggctgtggagctgtgttacaagaacgtgaacgaatcctgcattaaaactccttactcgccaggtcctcgatctatcctctacgccgtccttggt

SEQ ID NO: 771661 - DNA, 120 bp, Artificial Sequence
  ENSG00000237110_1 (sequence is synthesized)
tttggggctgtgctggcagcgtttggaaacttactggtcatgattgctatccttcacttcaaacaactgcacacacctacaaactttctgattgcgtcgctggcctgtgctgacttcttg

SEQ ID NO: 771662 - DNA, 120 bp, Artificial Sequence
  ENSG00000237110_2 (sequence is synthesized)
gtgggagtcactgtgatgcccttcagcacagtgaggtctgtggagagctgttggtactttggggacagttactgtaaattccatacatgttttgacacatccttctgttttgcttcttta

SEQ ID NO: 771663 - DNA, 120 bp, Artificial Sequence
  ENSG00000237110_3 (sequence is synthesized)
tttcatttatgctgtatctctgttgatagatacattgctgttactgatcctctgacctatccaaccaagtttactgtgtcagtttcagggatatgcattgttctttcctggttcttttct

SEQ ID NO: 771664 - DNA, 120 bp, Artificial Sequence
  ENSG00000237110_4 (sequence is synthesized)
tgccaggctccactgaatcaaaactgggtcctactttgttttcttctattctttatacccaatgtcgccatggtgtttatatacagtaagatatttttggtggccaagcatcaggctagg

SEQ ID NO: 771665 - DNA, 120 bp, Artificial Sequence
  ENSG00000237110_5 (sequence is synthesized)
aagatagaaagtacagccagccaagctcagtcctcctcagagagttacaaggaaagagtagcaaaaagagagagaaaggctgccaaaaccttgggaattgctatggcagcatttcttgtc

SEQ ID NO: 771666 - DNA, 120 bp, Artificial Sequence
  ENSG00000237110_6 (sequence is synthesized)
tcttggctaccatacctcgttgatgcagtgattgatgcttatatgaattttataactcctccttatgtttatgagattttagtttggtgtgtttattataattcagctatgaaccccttg

SEQ ID NO: 771667 - DNA, 120 bp, Artificial Sequence
  ENSG00000237110_7 (sequence is synthesized)
atttatgctttcttttaccaatggtttgggaaggcaataaaacttattgtaagcggcaaggtcttaaggactgattcgtcaacaactaatttattttctgaagaagtagagacagattaa

SEQ ID NO: 771668 - DNA, 120 bp, Artificial Sequence
  ENSG00000237136_0 (sequence is synthesized)
gtcaattgcttcctgctactagaaggaaattaattcttcattatgcagaggacttgacaagttgttttccagagaggccgttcgtagttatgtcacactacttctacttgactccacaaa

SEQ ID NO: 771669 - DNA, 120 bp, Artificial Sequence
  ENSG00000237136_1 (sequence is synthesized)
ttcttctgccctttagccctcttacttctcaagagtttgatctgatcagacgcaaggctggagcatcttggcaggatgaaacacgatggtcagattcttccgtgacaacatacacaggca

SEQ ID NO: 771670 - DNA, 120 bp, Artificial Sequence
  ENSG00000237136_2 (sequence is synthesized)
gttaccggaaaaaacaactggacaagtccatgtgcagccaattttcttttagagcaggacagcatgagcctgagtgtaaacagatgtcattgacaaacagttctgcctgtcatcttctct

SEQ ID NO: 771671 - DNA, 120 bp, Artificial Sequence
  ENSG00000237136_3 (sequence is synthesized)
gtggcacatcaaatttgggattttggtgattgttttccgacacctccaaattatggaaaatactgtgtgagacctaaaaagccagcacaggaggccctgataaactacagtcgacgaggg

SEQ ID NO: 771672 - DNA, 120 bp, Artificial Sequence
  ENSG00000237136_4 (sequence is synthesized)
aaaggtgtcctaaagcatcttcatggacggtgcgattctgaaagcaaggtttgctcatctgaggattcagaagctgatcgatactccgattatggctggggaggaccctcatcgccattt

SEQ ID NO: 771673 - DNA, 120 bp, Artificial Sequence
  ENSG00000237136_5 (sequence is synthesized)
aactgagttggaaaatgaagccacaaggctggaggcgtggagtttgcttaataaacaactttgaggtatggggccctcccaacaccctccccccacccgccccgcccaggaacgtctgga

SEQ ID NO: 771674 - DNA, 120 bp, Artificial Sequence
  ENSG00000237136_6 (sequence is synthesized)
ccctggcaggttggctttctgggacaattccatgggcttcatttatcagttttttccctttttaattggtggagagagacaaaagtttttataatctttattaaattttcctttttaaat

SEQ ID NO: 771675 - DNA, 120 bp, Artificial Sequence
  ENSG00000237136_7 (sequence is synthesized)
gacaggacctcctcttggcttcaccaagtcgctcttgctgcctgcccagggcttctttgccacctcaatatttagtgtattctttcattatgttaaaactaaataaaatgtttcattata

SEQ ID NO: 771676 - DNA, 120 bp, Artificial Sequence
  ENSG00000237172_0 (sequence is synthesized)
cgtggcacggcaccggtcccccttcctgccaacgctgcatttggctcgggcccggtccatggcggcccctcggaccctgcgctgagccccggaggccagggcgtccggggctgcgccact

SEQ ID NO: 771677 - DNA, 120 bp, Artificial Sequence
  ENSG00000237172_1 (sequence is synthesized)
tccgagggccgagcgctgccggtcccggcggtgcgacacggccgggaggaggagaacaacgcaaggggctcaaccgtcggtcgctggagccccccccggggcgtggcctcccgccccctc

SEQ ID NO: 771678 - DNA, 120 bp, Artificial Sequence
  ENSG00000237172_2 (sequence is synthesized)
agctggggagggcggggctcgctgccccctgctgccgactgcgacccttacaggggagggagggcgcaggccgcgcggagatgaggaggaggctgcgcctacgcagggacgcattgctca

SEQ ID NO: 771679 - DNA, 120 bp, Artificial Sequence
  ENSG00000237172_3 (sequence is synthesized)
ctcacgctgctccttggcgcctccctgggcctcttactctatgcgcagcgcgacggcgcggccccgacggcgagcgcgccgcgagggcgagggagggcggcaccgaggcccacccccgga

SEQ ID NO: 771680 - DNA, 120 bp, Artificial Sequence
  ENSG00000237172_4 (sequence is synthesized)
gcgcgttccagttacccgacgcgggtgcagccccgccggcctacgaaggggacacaccggcgccgcccacgcctacgggaccctttgacttcgcccgctatttgcgcgccaaggaccagc

SEQ ID NO: 771681 - DNA, 120 bp, Artificial Sequence
  ENSG00000237172_5 (sequence is synthesized)
ggcggtttccactgctcattaaccagccgcacaagtgccgcggcgacggcgcacccggtggccgcccggacctgcttattgctgtcaagtcggtggcagaggacttcgagcggcgccaag

SEQ ID NO: 771682 - DNA, 120 bp, Artificial Sequence
  ENSG00000237172_6 (sequence is synthesized)
caagccgtgcgccagacgtggggcgcggagggtcgcgtgcagggggcgctggtgcgccgcgtgttcttgctgggcgtgcccaggggcgcaggctcgggcggggccgacgaagttggggag

SEQ ID NO: 771683 - DNA, 120 bp, Artificial Sequence
  ENSG00000237172_7 (sequence is synthesized)
cgcgaacccactggcgcgccctgctgcgggccgagagccttgcgtatgcggacatcctgctctgggccttcgacgacaccttttttaacctaacgctcaaggagatccactttctagcct

SEQ ID NO: 771684 - DNA, 120 bp, Artificial Sequence
  ENSG00000237172_8 (sequence is synthesized)
gggcctcagctttctgccccgacgtgcgcttcgtttttaagggcgacgcagatgtgttcgtgaacgtgggaaatctcctggagttcctggcgccgcgggacccggcgcaagacctgcttg

SEQ ID NO: 771685 - DNA, 120 bp, Artificial Sequence
  ENSG00000237172_9 (sequence is synthesized)
ctggtgacgtaattgtgcatgcgcggcccatccgcacgcgggctagcaagtactacatccccgaggccgtgtacggcctgcccgcctatccggcctacgcgggcggcggtggctttgtgc

SEQ ID NO: 771686 - DNA, 120 bp, Artificial Sequence
  ENSG00000237172_10 (sequence is synthesized)
tttccggggccacgctgcaccgcctggctggcgcctgtgcgcaggtcgagctcttccccatcgacgacgtctttctgggcatgtgtctgcagcgcctgcggctcacgcccgagcctcacc

SEQ ID NO: 771687 - DNA, 120 bp, Artificial Sequence
  ENSG00000237172_11 (sequence is synthesized)
ccctgcttttaccgtgagctggttgtagtgcacgggctctcggccgctgacatctggcttatgtggcgcctgctgcacgggccgcatgggccagcctgtgcgcatccacagcctgtcgct

SEQ ID NO: 771688 - DNA, 120 bp, Artificial Sequence
  ENSG00000237172_12 (sequence is synthesized)
gcaggccccttccaatgggactcctagctccccactacagccccaagctcctaactcagacccagaatggagccggtttcccagattattgccgtgtatgtggttcttccctgatcacca

SEQ ID NO: 771689 - DNA, 120 bp, Artificial Sequence
  ENSG00000237172_13 (sequence is synthesized)
ggtgcctgtctccacaggatcccaggggatgggggttaagcttggctcctggcggtccaccctgctggaaccagttgaaacccgtgtaatggtgaccctttgagcgagccaaggctgggt

SEQ ID NO: 771690 - DNA, 120 bp, Artificial Sequence
  ENSG00000237172_14 (sequence is synthesized)
ggtagatgaccatctcttgtccaacaggtcccagagcagtggatatgtctggtcctcctagtagcacagaggtgtgttctggtgtggtggcagggacttagggaatcctaccactctgct

SEQ ID NO: 771691 - DNA, 120 bp, Artificial Sequence
  ENSG00000237172_15 (sequence is synthesized)
ggatttggaaccccctaggctgacgcggacgtatgcagaggctctcaaggccaggccccacagggaggtggaggggctccggccgccacagcctgaattcatgaacctggcaggcacttt

SEQ ID NO: 771692 - DNA, 120 bp, Artificial Sequence
  ENSG00000237172_16 (sequence is synthesized)
gccatagctcatctgaaaacagatattatgcttcccacaacctctcctgggcccaggtgtggctgagcaccagggatggagccacacataagggacaaatgagtgcacggtcctacctag

SEQ ID NO: 771693 - DNA, 120 bp, Artificial Sequence
  ENSG00000237172_17 (sequence is synthesized)
tctttcctcacctcctgaactcacacaacaatgccagtctcccactggaggctgtatcccctcagaggagccaaggaatgtcttcccctgagatgccaccactattaatttccccatatg

SEQ ID NO: 771694 - DNA, 120 bp, Artificial Sequence
  ENSG00000237172_18 (sequence is synthesized)
cttcaaccacccccttgctcaaaaaaccaatacccacacttaccttaatacaaacatcccagcaacagcacatggcaggccattgctgagggcacaggtgctttattggagaggggatgt

SEQ ID NO: 771695 - DNA, 120 bp, Artificial Sequence
  ENSG00000237172_19 (sequence is synthesized)
gggcaggggataaggaaggttcccccattccaggaggatgggaacagtcctggctgcccctgacagtggggatatgcaaggggctctggccaggccacagtccaaatgggaagacaccag

SEQ ID NO: 771696 - DNA, 120 bp, Artificial Sequence
  ENSG00000237172_20 (sequence is synthesized)
tcagtcacaaaagtcgggagcgccacacaaacctggctataaggcccaggaaccatataggagcctgagacaggtcccctgcacattcatcattaaactatacaggatgaggctgtacat

SEQ ID NO: 771697 - DNA, 120 bp, Artificial Sequence
  ENSG00000237172_21 (sequence is synthesized)
gagttaattacaaaagagtcatatttacaaaaatctgtacacacatttgaaaaactcacaaaattgtcatctatgtatcacaagttgctagaccaaaatattaaaaatgggataaaatta

SEQ ID NO: 771698 - DNA, 120 bp, Artificial Sequence
  ENSG00000237190_0 (sequence is synthesized)
atccggtcctcggctgcggcgggcaccatggtcggtggcgaggcggctgccgcagtggaggagctggtttcgggggtgcggcaggcggccgacttcgcggagcagttccgctcctactca

SEQ ID NO: 771699 - DNA, 120 bp, Artificial Sequence
  ENSG00000237190_1 (sequence is synthesized)
gagagcgagaagcaatggaaggcccgcatggaattcatcctgcgccacctgcccgactaccgcgacccgcccgacggcagtggccgcctggaccagctgctctccctctccatggtctgg

SEQ ID NO: 771700 - DNA, 120 bp, Artificial Sequence
  ENSG00000237190_2 (sequence is synthesized)
gccaaccatctcttcctaggctgcagttacaataaagaccttttagacaaggtgatggaaatggccgatgggattgaagtggaagacctgccacaatttactaccagaagtgaattaatg

SEQ ID NO: 771701 - DNA, 120 bp, Artificial Sequence
  ENSG00000237190_3 (sequence is synthesized)
aaaaagcatcaaagctaagccagaagatttatcacattttcatcatcagctacaggattagaaaggaggctgggatgaatgtgacatagaccacagcagctctcttaagactcctggtat

SEQ ID NO: 771702 - DNA, 120 bp, Artificial Sequence
  ENSG00000237190_4 (sequence is synthesized)
taccaacataaagaggcaggtggaatgagaaggactctgtctagattggcttttttaacattctcattttcccaggagttatcactgtaaaagtatgcatggatatttatgtatttataa

SEQ ID NO: 771703 - DNA, 120 bp, Artificial Sequence
  ENSG00000237190_5 (sequence is synthesized)
cattgtaaaagccctcttttctgttttcaggtttttttttttcttatcgacaaggtctcactctgtcgcccaggcagaagcacaaaggtgcagtattggctcattgcagcctcgaactcc

SEQ ID NO: 771704 - DNA, 86 bp, Artificial Sequence
  ENSG00000237190_6 (sequence is synthesized)
agtagtgcagtggcgcgatatattttcagtttttaaacgtcagaatttttgtttaaaatgcctttttgggctgggcacagtggctt

SEQ ID NO: 771705 - DNA, 89 bp, Artificial Sequence
  ENSG00000237190_7 (sequence is synthesized)
gcagtggcgcgatatattttcagtttttaaacgtcagaatttttgtttaaaatgcctttttgggctgggcacagtggcttatgcccata

SEQ ID NO: 771706 - DNA, 78 bp, Artificial Sequence
  ENSG00000237190_8 (sequence is synthesized)
cctgggcgacaaaaatgaaacaccgtctcaaaaaaaataaaaataataaaataaaatgcctttttgttgttgatgtaa

SEQ ID NO: 771707 - DNA, 120 bp, Artificial Sequence
  ENSG00000237190_9 (sequence is synthesized)
gccaaccatctcttcctaggctgcagcccacggggtcctaagtaggaaccagcttcacctctctgctttccctcttatgaaaatggccgatgcctttttgtgaaggtctcaaagcccact

SEQ ID NO: 771708 - DNA, 120 bp, Artificial Sequence
  ENSG00000237190_10 (sequence is synthesized)
gaaggtggcaaatcttgagactccctattagagagcttcgattttcctgaaattgtgttaggaaaatagggtgacttggtttgatcttggtttctatacctattatggctgcctgactct

SEQ ID NO: 771709 - DNA, 120 bp, Artificial Sequence
  ENSG00000237190_11 (sequence is synthesized)
ggtcatttggcccctgcaggcctaagccacttggttttgcttcacatattggggtttattagaacagtacgtagggaagcaatgccagaggcacccgtcccttttccctgccttctaggt

SEQ ID NO: 771710 - DNA, 120 bp, Artificial Sequence
  ENSG00000237190_12 (sequence is synthesized)
gctcctgggaaatcctggttttccatggttaggcaaatgtcagagaattggggaaataaataatgtttttgttagactaacattccatgtatttaaaaaataaaaatattttggtcctca

SEQ ID NO: 771711 - DNA, 120 bp, Artificial Sequence
  ENSG00000237247_0 (sequence is synthesized)
caagagtggggtcagcaagagaaactctacggctatgggagagcctgcgttcacctcttttccgagcccacctgttctggggaagctcaaaagaaacatgatgccctgggctttacagaa

SEQ ID NO: 771712 - DNA, 120 bp, Artificial Sequence
  ENSG00000237247_1 (sequence is synthesized)
gaaacgagaaatccacatggccaaggcccatcggagacgagctgcgaggtctgctctccccatgagactcaccagctgcatcttccggaggccggtgacaaggatcaggtctcatcctga

SEQ ID NO: 771713 - DNA, 120 bp, Artificial Sequence
  ENSG00000237247_2 (sequence is synthesized)
caaccaggtcagacgcagaaaaggggacgagcacctggagaagccgcagcaactctgcgcctaccggagactgcaggccctgcagccctgcagcagccaaggagaaggttcaagtccact

SEQ ID NO: 771714 - DNA, 120 bp, Artificial Sequence
  ENSG00000237247_3 (sequence is synthesized)
agagctggtgctgagcgtgtgcgcatcccgcttgagcccacccctgggcggtttccagctgtggcaggggggccaaccccaggaatgggttgtcagctcccaccgcccctctctggccaa

SEQ ID NO: 771715 - DNA, 120 bp, Artificial Sequence
  ENSG00000237247_4 (sequence is synthesized)
ttggtgactcctgcagatatccggagacaggccaggagggtgaagaaagccagggagagactggccaaggccttgcaggcagacaggctggccaggcaggcagaaatgctgacaggtggg

SEQ ID NO: 771716 - DNA, 120 bp, Artificial Sequence
  ENSG00000237247_5 (sequence is synthesized)
tgaagctcagtcctgggctttcggtccctttcttttaatgcccatcctcattcctactctgaattgtcacacttttcccttccccaccagttctttaataaaagtatttgaaaggcaaca

SEQ ID NO: 771717 - DNA, 120 bp, Artificial Sequence
  ENSG00000237254_0 (sequence is synthesized)
ttcctctgctctggcagcagatctcccagagggagcagcctgaccacatcactggcccagaagaggaggcgtctgtcccccagactagctgaaggaaaggctggcttggatgatgctctg

SEQ ID NO: 771718 - DNA, 120 bp, Artificial Sequence
  ENSG00000237254_1 (sequence is synthesized)
gggcagcccgctctctctggagtgcactgtggagggaacatcaaaccccaacctatactggtaccgacaggctgcaggcaggggcctccagctgctcttctactccgttggtattggcca

SEQ ID NO: 771719 - DNA, 120 bp, Artificial Sequence
  ENSG00000237254_2 (sequence is synthesized)
gatcagctctgaggtgccccagaatctctcagcctccagaccccaggaccggcagttcatcctgagttctaagaagctccttctcagtgactctggcttctatctctgtgcctggagtgt

SEQ ID NO: 771720 - DNA, 120 bp, Artificial Sequence; identical to SEQ ID NO: 765439
  ENSG00000237289_0 (sequence is synthesized)

SEQ ID NO: 771721 - DNA, 120 bp, Artificial Sequence
  ENSG00000237289_1 (sequence is synthesized)
aacaggtgggcaagcttgccgagaaaacgcagagggcatcctgtgagcagcaaacacatctgagcctggaaaagacgcagagaagtaaaagatcaaagtctgattggcaccggctcccat

SEQ ID NO: 771722 - DNA, 120 bp, Artificial Sequence
  ENSG00000237289_2 (sequence is synthesized)
tccggctccagcctccaatccgacccccatttcggctgcagcctcggacctagctccggccctcggtctatccggttgcatcctccctccctgttccggatcttatcttgcgccagcgcc

SEQ ID NO: 771723 - DNA, 120 bp, Artificial Sequence
  ENSG00000237289_3 (sequence is synthesized)
tactccaggatcccgtagccagacctcaagccatggctggtcccttctcccgtctgctgtccgcccgcccgggactcaggctcctggctttggccggagcggggtctctagccgctgggt

SEQ ID NO: 771724 - DNA, 120 bp, Artificial Sequence
  ENSG00000237289_4 (sequence is synthesized)
ttctgctccgaccggaacctgtacgagctgccagtgaacgacggaggctgtatcccccgagcgctgagtacccagacctccgaaagcacaacaactgcatggccagtcacctgaccccag

SEQ ID NO: 771725 - DNA, 120 bp, Artificial Sequence
  ENSG00000237289_5 (sequence is synthesized)
cagtctatgcacggctctgcgacaagaccacacccactggttggacgctagatcagtgtatccagactggcgtggacaaccctggccaccccttcatcaagactgtgggcatggtggctg

SEQ ID NO: 771726 - DNA, 120 bp, Artificial Sequence
  ENSG00000237289_6 (sequence is synthesized)
gagatgaggagacctatgaggtatttgctgacctgtttgaccctgtgatccaagagcgacacaatggatatgacccccggacaatgaagcacaccacggatctagatgccagtaaaatcc

SEQ ID NO: 771727 - DNA, 120 bp, Artificial Sequence; identical to SEQ ID NO: 765432
  ENSG00000237289_7 (sequence is synthesized)

SEQ ID NO: 771728 - DNA, 120 bp, Artificial Sequence; identical to SEQ ID NO: 765433
  ENSG00000237289_8 (sequence is synthesized)

SEQ ID NO: 771729 - DNA, 120 bp, Artificial Sequence; identical to SEQ ID NO: 765434
  ENSG00000237289_9 (sequence is synthesized)

SEQ ID NO: 771730 - DNA, 120 bp, Artificial Sequence; identical to SEQ ID NO: 765435
  ENSG00000237289_10 (sequence is synthesized)

SEQ ID NO: 771731 - DNA, 120 bp, Artificial Sequence
  ENSG00000237289_11 (sequence is synthesized)
agatcctggagaacctaagactccaaaaacgtggtactggaggagtggacactgctgctacaggcggtgtctttgatatttctaatttggaccgactaggcaaatcagaggtggagctgg

SEQ ID NO: 771732 - DNA, 120 bp, Artificial Sequence; identical to SEQ ID NO: 765437
  ENSG00000237289_12 (sequence is synthesized)

SEQ ID NO: 771733 - DNA, 120 bp, Artificial Sequence
  ENSG00000237289_13 (sequence is synthesized)
gctgatgactcaagattcccaggagttctgctcattctaatgatggcccattctacttgctctggacctgcccccgcatcccctgcctccatcctagtaaagactccttgctatgctgca

SEQ ID NO: 771734 - DNA, 120 bp, Artificial Sequence
  ENSG00000237289_14 (sequence is synthesized)
agacgcgcgagtctcaggtcccgctaattacctggcgggtgctgcccacccctgccctcgcgcacctagcgcggtggcaggcgggaaggcggggcctgggggagccccacccctggagac

SEQ ID NO: 771735 - DNA, 120 bp, Artificial Sequence
  ENSG00000237289_15 (sequence is synthesized)
agatctgaagaaactgagctggccagccagaggcaactagaactattaggaaagcatagactctgaaagtccctaaagagattaccaaggtttaccctctttctaattccccctcctccc

SEQ ID NO: 771736 - DNA, 120 bp, Artificial Sequence
  ENSG00000237289_16 (sequence is synthesized)
gcggagcaaagccagacatggccaactggacagctcccaggtaactgcactaggtctaggcgtctgtgccctccctccatggttactgggtaccccctccccagcgctgagtacccagac

SEQ ID NO: 771737 - DNA, 120 bp, Artificial Sequence
  ENSG00000237289_17 (sequence is synthesized)
ccttgctatgctgcagctgtctgtgttacttctaatggtggggtgaggagggagcagccttcaggaaatgaaaagaggcagtgggattatttatgatggaaagagactccagatatggca

SEQ ID NO: 771738 - DNA, 120 bp, Artificial Sequence
  ENSG00000237289_18 (sequence is synthesized)
aggaatccaaccaaagggcctaaggtctccagcacttcccctgagactggagtctcctttggagcctggagaagagcatcagaacttggacaatgcacttctgactcagaataccagaca

SEQ ID NO: 771739 - DNA, 120 bp, Artificial Sequence
  ENSG00000237289_19 (sequence is synthesized)
gtttattccgcggtttccccgcggctgcccccgggagaccgaagaggtggctggggcaggccgaaagcagaggaaaggttgggcagtgtcacccttgcacacccacaggtctgattggca

SEQ ID NO: 771740 - DNA, 120 bp, Artificial Sequence
  ENSG00000237289_20 (sequence is synthesized)
atatcccctatggcatggttccttctgaactataaagaggatccctttactcatgttgggttgtggtctttgtgaccatcattctgctagatcccttgtctcttgaactctaatagtcat

SEQ ID NO: 771741 - DNA, 120 bp, Artificial Sequence
  ENSG00000237289_21 (sequence is synthesized)
cttcatgactacatggttaagtgaagccaaacgccttccccccgccccctattcctatgaatctggcttttctgctctgttttcatctttctctgcattcacacaggtgctccgttcaca

SEQ ID NO: 771742 - DNA, 120 bp, Artificial Sequence
  ENSG00000237289_22 (sequence is synthesized)
gctaacagaatgttatcttacctcttcctggcaaagcttacaccttcatcttctgtctgaagggacccttctaagctctaggctcattagcaaagcaaagataatcgatgcatgcagacc

SEQ ID NO: 771743 - DNA, 120 bp, Artificial Sequence
  ENSG00000237289_23 (sequence is synthesized)
tcattgaataatcagtcatctctcagttcagtttaccacctctgttcatttccctagatcatccttaatacaccactccttcgagttttcttcttccacataagatattttttcacaatc

SEQ ID NO: 771744 - DNA, 120 bp, Artificial Sequence
  ENSG00000237289_24 (sequence is synthesized)
tcattattatgcacatcataattttgcatcatgcatgcatgaaaacaataacaaacctttttcatttaaaaaaagaccaatgtcattcattcacagccaagtttctgttctagacatatt

SEQ ID NO: 771745 - DNA, 120 bp, Artificial Sequence
  ENSG00000237289_25 (sequence is synthesized)
tctagtgttcttgtgggtctagctaagggagggtccagggttaatgaaatatccctgatttttcgttaacaaaacctttgtggactcaggtggagagacttatccaagaacgtggctggg

SEQ ID NO: 771746 - DNA, 120 bp, Artificial Sequence
  ENSG00000237330_0 (sequence is synthesized)
gcaactcacacctgcctcagaccagagctctgtgcgggtgacggcgcacgcattccttgtgtccccgcctgtcttggacagagcagaagccacacctgccagaccagtgccaccgggaca

SEQ ID NO: 771747 - DNA, 120 bp, Artificial Sequence
  ENSG00000237330_1 (sequence is synthesized)
gctgctggtggccggccccggggagggatacctgctgggtgaagcacaggccgggccgggcccggagaagaggaagcagacactgccacggcagggcagcccagggccttggagcccaac

SEQ ID NO: 771748 - DNA, 120 bp, Artificial Sequence
  ENSG00000237330_2 (sequence is synthesized)
cgtggccggcgaggaggaccacgcccaggcccgctgacccccggccaccagctcagagacatgtcgtcaggccagcaggtgtggcacacggctgtgccaccccctcgccggagcagctcc

SEQ ID NO: 771749 - DNA, 120 bp, Artificial Sequence
  ENSG00000237330_3 (sequence is synthesized)
atagcctcgatgcccaggtcccccagctcggccggcagccccaggtcccctggcacccctggctcggagagggtggcctcccccctggagtgctccatctgtttctcaggctatgacaac

SEQ ID NO: 771750 - DNA, 120 bp, Artificial Sequence
  ENSG00000237330_4 (sequence is synthesized)
atcttcaagacacccaaggagctctcctgcacccacgtcttctgcctggagtgcctggcccggctggcggctgctcagcctgtgggccgccccggtggtgaggctgtaccttgccccttc

SEQ ID NO: 771751 - DNA, 120 bp, Artificial Sequence
  ENSG00000237330_5 (sequence is synthesized)
cttctgcaggcagcccacggccgtgccgcccgccggagcccccgcgctgtgcaccagccgccagctgcaggcccggatgccggcgcatttgcggcgtgaggagcctgtgtggctggaggg

SEQ ID NO: 771752 - DNA, 120 bp, Artificial Sequence
  ENSG00000237330_6 (sequence is synthesized)
aagctgtgctgccagccactgcccaccacacctggccgcgagcccggtttcgtatgcgtggacgtgggtttgagcaagcctgccgagccgcccgcgcccgcccgggaccctgccccccgc

SEQ ID NO: 771753 - DNA, 120 bp, Artificial Sequence
  ENSG00000237330_7 (sequence is synthesized)
cggtgcagtgcgcgctcaagaccgggaacctgcgctgcctgcccctgcccccccggcccccggccaccagcacagccgcctcccccctcgggcctctgactgataattagggccagcagc

SEQ ID NO: 771754 - DNA, 120 bp, Artificial Sequence
  ENSG00000237330_8 (sequence is synthesized)
ctctgcccaggtcagccgccctcgcccagctccatggggcgtcccccactggggggcccaagggcacagcagccactggaagtcggtccccgaggacgcgaaaggagcctggcatctctg

SEQ ID NO: 771755 - DNA, 120 bp, Artificial Sequence
  ENSG00000237330_9 (sequence is synthesized)
aggactccaccggggccccaccaagaccaggctccatttagcttgtccacccctcattctccaggctgggtcctgacggggtggacaagaggatccccaaagcctccaagaaccacagtc

SEQ ID NO: 771756 - DNA, 89 bp, Artificial Sequence
  ENSG00000237330_10 (sequence is synthesized)
tccaagaaccacagtctcaccgggctggagggctgaggcagaaagaccacttgaggtcgggattttgacaccagcctggccaacatggt

SEQ ID NO: 771757 - DNA, 80 bp, Artificial Sequence
  ENSG00000237330_11 (sequence is synthesized)
gggtgcctctggggaggtggaggtggcagtgagccaagattgcaccactgcatccagcctgggcgacagagggagaccct

SEQ ID NO: 771758 - DNA, 120 bp, Artificial Sequence
  ENSG00000237330_12 (sequence is synthesized)
gggcgacagagggagaccctgtctcaaaacaaaacaaaaaaaaacaggctcgtacaggaagggtccaggagagcagctggtcagcatcccccccacccacacaccctgtgaactgcctgc

SEQ ID NO: 771759 - DNA, 120 bp, Artificial Sequence
  ENSG00000237330_13 (sequence is synthesized)
tgaactgcctgccagggaagccccttgccaagaaggaaggggccttgccgtgcttccactcatgctgacatttccccgcagggctggtcctgccattgggtgggggtgctcatcttgccc

SEQ ID NO: 771760 - DNA, 120 bp, Artificial Sequence
  ENSG00000237330_14 (sequence is synthesized)
tcggactgtggggagagagtggaggcagggcagccccccagtgcaaggtaaccacagaaacttccagctacccctccaaccttgtgaattgtaccttttaaaataaattatttgtatcca

SEQ ID NO: 771761 - DNA, 120 bp, Artificial Sequence
  ENSG00000237353_0 (sequence is synthesized)
aatacctcactcagcacaccgtctgtcacccaaacaagcatccaatgaggaaaatgaacacactgctccttgtgagcttatcttttctctacctcaaagaggttatgggtctgaagtgta

SEQ ID NO: 771762 - DNA, 120 bp, Artificial Sequence
  ENSG00000237353_1 (sequence is synthesized)
atacctgcatatacacagaaggatggaagtgtatggcaggccgaggcacttgcattgcaaaagaaaatgagttatgttcaacaacagcctatttcaggggagacaaacatatgtactcaa

SEQ ID NO: 771763 - DNA, 120 bp, Artificial Sequence
  ENSG00000237353_2 (sequence is synthesized)
cacatatgtgtaagtataagtgccgggaagaggagtcctccaaaagaggcctgttgagagtgacactgtgctgtgacagaaacttctgtaatgtcttctaatggagcttaggaacttgca

SEQ ID NO: 771764 - DNA, 120 bp, Artificial Sequence
  ENSG00000237353_3 (sequence is synthesized)
gaggatcatctgatcaagatccagaatcaagaccaaccaacatgaactgttttatttcccacaccaaattccacactggcctaagatcccagagagagctgcaggggctgtcctcattgc

SEQ ID NO: 771765 - DNA, 120 bp, Artificial Sequence
  ENSG00000237353_4 (sequence is synthesized)
aatgaaggggctccccacaccccacctccaccactagattcctaaaatcatgagcattgaaacaaaatcctccatgagctatgcttattcttttgtcttctactcctgatttctgatttc

SEQ ID NO: 771766 - DNA, 120 bp, Artificial Sequence
  ENSG00000237353_5 (sequence is synthesized)
tatcccttgtaggctaaataatggacccccaaatatttctacatcctaatctctggaacctgtgaatgttaccttacatggcaaaagggactttgaaaatgtgattaaggatcttgagaa

SEQ ID NO: 771767 - DNA, 120 bp, Artificial Sequence
  ENSG00000237353_6 (sequence is synthesized)
ggggaggttatcttgcattatctgggggggccctaagtggaatcaaaatgcaaaatgcaataagatgcaagtaaagggagatatgacaaagaagaggaaaagatgatgtgataatggaag

SEQ ID NO: 771768 - DNA, 120 bp, Artificial Sequence
  ENSG00000237353_7 (sequence is synthesized)
cagagattggagccatgtgctttgaagatggaggaataggccataagctaaaactaggaggccactagaagctgaaaaagtcaaggaaataggttctcccctcagagcctccagaaacca

SEQ ID NO: 771769 - DNA, 120 bp, Artificial Sequence
  ENSG00000237353_8 (sequence is synthesized)
agcgggtgtggttttcagccacaaagtgtgtattgttttaagccactaagtttgcaataatttattatagcagcaatgggaaactaatacaatccaaataaacttctaggaattcaaatc

SEQ ID NO: 771770 - DNA, 120 bp, Artificial Sequence
  ENSG00000237353_9 (sequence is synthesized)
attggtaagcctgagtacccaggggccagtctaggtgacaacagtatccaccgctcagggcttacagtgacctgcaggaagagaggaataacagagcacatgctatgaataaatgtggag

SEQ ID NO: 771771 - DNA, 120 bp, Artificial Sequence
  ENSG00000237353_10 (sequence is synthesized)
atcaatttgtggattttaaacttcatgacatgctgcagataatcctttaggtgtatctgtggtaaatggtgccttgctatgttctgaagcaatcaaacatgatgtcctaatagctcaatt

SEQ ID NO: 771772 - DNA, 120 bp, Artificial Sequence
  ENSG00000237353_11 (sequence is synthesized)
tgaagcaatcaaacatgatgtcctaatagctcaatttatcagttcctcattagcttgtgtactcactgaaattcttttagcagttaatgtccttgtattagtctgttttcatgctgctga

SEQ ID NO: 771773 - DNA, 120 bp, Artificial Sequence
  ENSG00000237353_12 (sequence is synthesized)
ggaagcctcacaatcatggcagaaggtaaaaggcatgtctcacatagtgacagacaagagaagagagattgtgcaggaaaactctcccttataataaccatcagatcttgtgagacttac

SEQ ID NO: 771774 - DNA, 120 bp, Artificial Sequence
  ENSG00000237353_13 (sequence is synthesized)
tagtgacagacaagagaagagagattgtgcaggaaaactctcccttataataaccatcagatcttgtgagacttactcactatcacgagaatagcacaggaaaaacctgcccccatgatt

SEQ ID NO: 771775 - DNA, 120 bp, Artificial Sequence
  ENSG00000237353_14 (sequence is synthesized)
gtggggacacagccaaaccatatcagtccccttcttaaaactctcctctctagctcctatgactgtacatttgtagttctcccacctctctgaagaatcctctgtgagggtctctgggga

SEQ ID NO: 771776 - DNA, 120 bp, Artificial Sequence
  ENSG00000237353_15 (sequence is synthesized)
tgagggtctctggggactttgttttgatttgttattgtttttatattcagtctttaacctatgtgaagccacctttgtaatactgccttaagtaaagatccagtattatttttctccata

SEQ ID NO: 771777 - DNA, 120 bp, Artificial Sequence
  ENSG00000237353_16 (sequence is synthesized)
aatacctcactcagcacaccgtctgtcacccaaacaagcatccaatgaggaaaatgaacacactgctccttgtgagcttatcttttctctacctcaaagagggagacaaacatatgtact

SEQ ID NO: 771778 - DNA, 120 bp, Artificial Sequence
  ENSG00000237353_17 (sequence is synthesized)
aatacctcactcagcacaccgtctgtcacccaaacaagcatccaatgaggaaaatgaacacactgctccttgtgagcttatcttttctctacctcaaagaggatgaaaactggataacta

SEQ ID NO: 771779 - DNA, 120 bp, Artificial Sequence
  ENSG00000237353_18 (sequence is synthesized)
gctggcaagagtgggagatcaactttacacaacattctttttctattacttactatttagtcacatcaatgtattacctatttttaaataatgcatttttagaatgttgaaattggaaat

SEQ ID NO: 771780 - DNA, 120 bp, Artificial Sequence
  ENSG00000237353_19 (sequence is synthesized)
actcaggttaaagatcaaagagacaattattcgaagagcattatcagtgtactgcgcagcctgctcccaactcctctgaaagagagaagcctcatgaaagttgcttcagggagaaattga

SEQ ID NO: 771781 - DNA, 120 bp, Artificial Sequence
  ENSG00000237353_20 (sequence is synthesized)
tagtgtcctctggtgtttggaaggcacagtgagcttgaggaacccaaaggtgcgagggagccggagggtacagccctgaaatggtggaactgaaagacagctgagttgcattacatacaa

SEQ ID NO: 771782 - DNA, 120 bp, Artificial Sequence
  ENSG00000237353_21 (sequence is synthesized)
ccatgccatatcaagcaagtcaggcttgagctgtttaaagttctatccaagagcgctgtctggaggaaaaaggtattctagcaaggtgtgggccactaccttcttacagctgagagaaaa

SEQ ID NO: 771783 - DNA, 120 bp, Artificial Sequence
  ENSG00000237353_22 (sequence is synthesized)
tataaccaccagctgcaggaaatacaccactcacgatacagcagtggacttgaatattttttgtgggggaaatcctgaagaacccgcaaatgttctcctgactcaaggaactcaagaaaa

SEQ ID NO: 771784 - DNA, 120 bp, Artificial Sequence
  ENSG00000237353_23 (sequence is synthesized)
tgagttctcctggctcaagaaaatgagtcagctttcattaaatacaaagtccaagagattgggttttaagtaactaccatagacaaaagatgacggcaccagagccagtccgatgacatc

SEQ ID NO: 771785 - DNA, 120 bp, Artificial Sequence
  ENSG00000237353_24 (sequence is synthesized)
tttcctgtcctttacctgtccccctccttctcaccaactgaaatgggtcagaaactatcactcataagccagaggtgagtaggaggaaaccaagaagagaaatagagaaaaagttaaagc

SEQ ID NO: 771786 - DNA, 120 bp, Artificial Sequence
  ENSG00000237378_0 (sequence is synthesized)
gacgtccacacctcagaagcatcttcttgaaacccatctcaattctctcctcttgacaacatgtgttgcaactactacggcaactcctgtggctatggctccagctatggctgtggctat

SEQ ID NO: 771787 - DNA, 120 bp, Artificial Sequence
  ENSG00000237378_1 (sequence is synthesized)
ggctctggttatggctatggctatggctccagctatggctgtggctatggaactggctacagctgtggctatggctgtggctatggctctggttatggctgtggctatggctccagctat

SEQ ID NO: 771788 - DNA, 120 bp, Artificial Sequence
  ENSG00000237378_2 (sequence is synthesized)
ggctgtggctatggaactggctacagctgtggctatggctctggctacagctgtggctatggctctggctctggctgtggctatggaactggcttcggctgtgggtatggctgtggttat

SEQ ID NO: 771789 - DNA, 120 bp, Artificial Sequence
  ENSG00000237378_3 (sequence is synthesized)
ggaactggctatggctgtggatgtggctctggctctggctactgtggctaccggccattttgctttagaagatgctattcttcctgctaaaacatcactgtcagaggacaatttgcttct

SEQ ID NO: 771790 - DNA, 120 bp, Artificial Sequence
  ENSG00000237378_4 (sequence is synthesized)
aaaatgacacggctaaagataatactgattcaaggattcatactccaagatttctatatccaagaattacatgcttgacagagtcttggacctctagcctcacatttctttgaatgaaat

SEQ ID NO: 771791 - DNA, 120 bp, Artificial Sequence
  ENSG00000237378_5 (sequence is synthesized)
aagtcaatcatttgtaataaaaatggttctttattccaaaaaaaaatgttttagtacaaaagagtcaaaaagctaaaataaaatatagtttataaagcaaaaaattatcagtaagctaag

SEQ ID NO: 771792 - DNA, 120 bp, Artificial Sequence
  ENSG00000237378_6 (sequence is synthesized)
tttaatgtattattgaagaaataaaatgtattttatacatttaccctaatgcctaatgtttaagacatctactgtagtgtacagtaatatcccaggccttcacattcactcactaatcac

SEQ ID NO: 771793 - DNA, 120 bp, Artificial Sequence
  ENSG00000237378_7 (sequence is synthesized)
cacattcactcactaatcactcactgatccacccagaacaattttcagccctgtaagtgccattcgtgctaagtggtctatataggtactgttttattattattattattattattatta

SEQ ID NO: 771794 - DNA, 120 bp, Artificial Sequence
  ENSG00000237378_8 (sequence is synthesized)
actgtatcttttctagatttcaataagttgagatacacaaatatttattattgtgttacaattgcctatattatccaatatggtaacatgctgtgcaggtttgtattctagaagcaatag

SEQ ID NO: 771795 - DNA, 120 bp, Artificial Sequence
  ENSG00000237378_9 (sequence is synthesized)
gctataccttataatctaggtgtgttctaagctatatcatacaggtttatgtaagtacactgtgaaatctgcatggcaaacatcattgccttatgatacatttctcaaattttcagaaca

SEQ ID NO: 771796 - DNA, 120 bp, Artificial Sequence
  ENSG00000237378_10 (sequence is synthesized)
tatccctgttgtttagcagcacgtgaatgtatttgatttattgtcttgatgtccctttgctttccccatgtgttaccatcaactgcctaatgaaacagcctgggattgtgtaatgactaa

SEQ ID NO: 771797 - DNA, 120 bp, Artificial Sequence
  ENSG00000237378_11 (sequence is synthesized)
tgtgtctcctttatgtgtttttaaatagttacttggtcatgaactatttataagctttggaaacatgatttcatttattctgcaggataacttcaggaagtgggtattaattctcactgt

SEQ ID NO: 771798 - DNA, 120 bp, Artificial Sequence
  ENSG00000237378_12 (sequence is synthesized)
caactgtgtggaacctatgccgcggagaattgctttctgccattgttattgtccagcagttgccgaatagctctgacctgagcaaagcagtgaaacgcggtgctgttgagtgggttgcca

SEQ ID NO: 771799 - DNA, 120 bp, Artificial Sequence
  ENSG00000237378_13 (sequence is synthesized)
ctgcacctttttcaactactctagtcttgtggagaaaacaccccttctaaattttttcttcattgaatactctccctcagctccagggtaccatatagagttttcttgtattttagagtt

SEQ ID NO: 771800 - DNA, 120 bp, Artificial Sequence
  ENSG00000237378_14 (sequence is synthesized)
actgttttatcaaagtgtaccagtcttttgtattacatttctcctgtctaaatcaactgtgtggtttctactcattatggatatagattgacacaaactcaataaatatttttgaatgaa

SEQ ID NO: 771801 - DNA, 120 bp, Artificial Sequence
  ENSG00000237388_0 (sequence is synthesized)
tgcatttaaagatttccccccttgttttataggtaaactgcttatatgatctgaagtaagcagctgtaaagaatacatggagccaaggaaaaatgtgactgactttgtcctcttgggctt

SEQ ID NO: 771802 - DNA, 120 bp, Artificial Sequence
  ENSG00000237388_1 (sequence is synthesized)
cacacagaatccaaaggagcagaaagtactttttgttatgttcttgctcttctacattttgaccatggtgggcaacctgctcattgtagtgaccgtaactgtcagtgagaccctgggctc

SEQ ID NO: 771803 - DNA, 120 bp, Artificial Sequence
  ENSG00000237388_2 (sequence is synthesized)
accaatgtacttctttcttgctggcttatcatttatagatatcatttattcttcatccatttcccccagattgatttcaggcttgttctttgggaataattccatatccttccaatcttg

SEQ ID NO: 771804 - DNA, 120 bp, Artificial Sequence
  ENSG00000237388_3 (sequence is synthesized)
catggcccagctctttatcgagcacattttcggtgggtcagaggtctttctcctgttggtgatggcctatgactgctatgtggccatctgtaagcccttgcattatttggttatcatgag

SEQ ID NO: 771805 - DNA, 120 bp, Artificial Sequence
  ENSG00000237388_4 (sequence is synthesized)
atgtcattgatcattttttctgtgacatgtatcccttattgaaactggtctgcactgacacccatgctattggcctcttagtggtggccaatggaggactggcttgcactattgtgtttc

SEQ ID NO: 771806 - DNA, 120 bp, Artificial Sequence
  ENSG00000237388_5 (sequence is synthesized)
tgctcttactcatctcttatggtgtcatcttgcactctttaaagaaccttagtcagaaagggaggcaaaaagccctctcaacctgcagttcccacatgactgtggttgtcttcttctttg

SEQ ID NO: 771807 - DNA, 120 bp, Artificial Sequence
  ENSG00000237388_6 (sequence is synthesized)
ttccttgtatttttatgtatgctagacctgctaggaccttccccattgacaaatcagtgagtgtgttttatacagtcataaccccaatgctgaaccccttaatctacactctgagaaatt

SEQ ID NO: 771808 - DNA, 120 bp, Artificial Sequence
  ENSG00000237388_7 (sequence is synthesized)
ctgagatgacaagtgctatgaagaagctctggagaagagacctcatatcaagtagtacataagtgagttacccaccaggaagagagtcatttgactttacagcctttctccttgggaccc

SEQ ID NO: 771809 - DNA, 120 bp, Artificial Sequence
  ENSG00000237412_0 (sequence is synthesized)
gatgatttgagggacaagaattcagtgcccgggggccgaaaggcagcagaaggcgggcaccaaaggataggcacccggaaggtggactccgaggaggagagaggacaggggtctctcacc

SEQ ID NO: 771810 - DNA, 120 bp, Artificial Sequence
  ENSG00000237412_1 (sequence is synthesized)
ccagctcctggtcaccatgctgctggctgtgctgctgctgctacccctcccaagctcatggtttgcccacgggcacccactgtacacacgcctgccccccagcgccctgcaagttctgtc

SEQ ID NO: 771811 - DNA, 120 bp, Artificial Sequence
  ENSG00000237412_2 (sequence is synthesized)
ggcccaggggactcaggcgttgcaggcagcccagaggagcgcccagtgggcaataaaccgagtggcgatggagatccagcacagatcgcacgagtgccgaggatctgggcgccccaggcc

SEQ ID NO: 771812 - DNA, 120 bp, Artificial Sequence
  ENSG00000237412_3 (sequence is synthesized)
tcaagctctcctccaggacccacctgagccagggccgtgcggcgagaggcgtccgagcactgccaatgtgacgcgggcccacggccgcatcgtggggggcagcgcggcgccgcccggggc

SEQ ID NO: 771813 - DNA, 120 bp, Artificial Sequence
  ENSG00000237412_4 (sequence is synthesized)
ctggccctggctggtgaggctgcagctcggcgggcagcctctgtgcggcggcgtcctggtagcggcctcctgggtgctcacggcagcgcactgctttgtaggcgccccgaatgagcttct

SEQ ID NO: 771814 - DNA, 120 bp, Artificial Sequence
  ENSG00000237412_5 (sequence is synthesized)
gtggactgtgacgctggcagaggggtcccggggggagcaagcggaggaggtgccagtgaaccgcatcctgccccaccccaagtttgacccgcggaccttccacaacgacctggccctggt

SEQ ID NO: 771815 - DNA, 120 bp, Artificial Sequence
  ENSG00000237412_6 (sequence is synthesized)
ctgtggacgccggtgagcccggggggatcggcgcgccccgtgtgcctgccccaggagccccaggagccccctgccggaaccgcctgcgccatcgcgggctggggcgccctcttcgaagac

SEQ ID NO: 771816 - DNA, 120 bp, Artificial Sequence
  ENSG00000237412_7 (sequence is synthesized)
agacgggcctgaggctgaagcagtgagagaggcccgtgttcccctgctcagcaccgacacctgccgaagagccctggggcccgggctgcgccccagcaccatgctctgcgccgggtacct

SEQ ID NO: 771817 - DNA, 120 bp, Artificial Sequence
  ENSG00000237412_8 (sequence is synthesized)
gagccagggaagcccggggtctacacccgcgtggcagtgttcaaggactggctccaggagcagatgagcgcctcctccagccgcgagcccagctgcagggagcttctggcctgggacccc

SEQ ID NO: 771818 - DNA, 120 bp, Artificial Sequence
  ENSG00000237412_9 (sequence is synthesized)
gcctgggaccccccccaggagctgcaggcagacgccgcccggctctgcgccttctatgcccgcctgtgcccggggtcccagggcgcctgtgcgcgcctggcgcaccagcagtgcctgcag

SEQ ID NO: 771819 - DNA, 120 bp, Artificial Sequence
  ENSG00000237412_10 (sequence is synthesized)
gcgatgcgagctgcgctcgctggcgcacacgctgctgggcctgctgcggaacgcgcaggagctgctcgggcctcgtccgggactgcggcgcctggcccccgccctggctctccccgctcc

SEQ ID NO: 771820 - DNA, 120 bp, Artificial Sequence
  ENSG00000237412_11 (sequence is synthesized)
ctcagggagtctcctctgcaccccgcccgggagctgcggcttcactcaggatcgcgggctgcaggcactcggttcccgaagcggaggccggagccgcgcggagaagccaacggctgccct

SEQ ID NO: 771821 - DNA, 120 bp, Artificial Sequence
  ENSG00000237412_12 (sequence is synthesized)
gggctggagcccctgcgacagaagttggctgccctgcagggggcccatgcctggatcctgcaggtcccctcggagcacctggccatgaactttcatgaggtcctggcagatctgggctcc

SEQ ID NO: 771822 - DNA, 120 bp, Artificial Sequence
  ENSG00000237412_13 (sequence is synthesized)
aagacactgaccgggcttttcagagcctgggtgcgggcaggcttggggggccggcatgtggccttcagcggcctggtgggcctggagccggccacactggctcgcagcctcccccggctg

SEQ ID NO: 771823 - DNA, 120 bp, Artificial Sequence
  ENSG00000237412_14 (sequence is synthesized)
ctggtgcaggccctgcaggccttccgcgtggctgccctggcagaaggggagcccgagggaccctggatggatgtagggcaggggcccgggctggagaggaaggggcaccacccactcaac

SEQ ID NO: 771824 - DNA, 120 bp, Artificial Sequence
  ENSG00000237412_15 (sequence is synthesized)
cctcaggtaccccccgccaggcaaccctgagccatgtctgggcccccagcccctggggaggacctactgctcccaggggctgagaggggttcgggagcataatgacaaactgtcgctgcc

SEQ ID NO: 771825 - DNA, 120 bp, Artificial Sequence
  ENSG00000237412_16 (sequence is synthesized)
ccagtggctgggtgtgtgtgggtgggatggggtgggggtcctgggccccccgtgtcttcccaggtttacaatcagagaatcacagctgctttaataaatgttatttataatacacggaaa

SEQ ID NO: 771826 - DNA, 120 bp, Artificial Sequence
  ENSG00000237412_17 (sequence is synthesized)
cgctcgacccgcagcgccccgaatgagcttctgtggactgtgacgctggcagaggggtcccggggggagcaagcggaggaggtgccagtgaaccgcatcctgccccaccccaaggtgaga

SEQ ID NO: 771827 - DNA, 120 bp, Artificial Sequence
  ENSG00000237412_18 (sequence is synthesized)
ccagtctgatgagaaaaggccggctgagccttcccagggccactacggcctcttttccttccacgtctgtctgtcactcgacttctctgagcctctctgtcctcatccctaaaatggaca

SEQ ID NO: 771828 - DNA, 120 bp, Artificial Sequence
  ENSG00000237440_0 (sequence is synthesized)
gtctctgcagccggagctccaggtcttgtcttcactgctgtgtgtcctctgctcctagaggcccagcctctgtggccctgtgtcctgcaggtattgggagatccacagctaagacgcccg

SEQ ID NO: 771829 - DNA, 84 bp, Artificial Sequence
  ENSG00000237440_1 (sequence is synthesized)
tgtcctgcaggtattgggagatccacagctaagacgcccgggagcccctggaagcctagaaatggggccattgcaatttagaga

SEQ ID NO: 771830 - DNA, 120 bp, Artificial Sequence
  ENSG00000237440_2 (sequence is synthesized)
ttagagaactacagaaacctggtcttccttggtattgttgtctctaagccagacctcatcacctgtctggagcaaggaaaaaaacctttgaccatgaagaaacatgagatggtagccaac

SEQ ID NO: 771831 - DNA, 120 bp, Artificial Sequence
  ENSG00000237440_3 (sequence is synthesized)
ccctcagttacgtgttctcattttgcccgagatctttggccagagcagagcataaaagattctttccaaaaagtgacactgagaagatatgaaaactatggacatgacaatttacagttt

SEQ ID NO: 771832 - DNA, 120 bp, Artificial Sequence
  ENSG00000237440_4 (sequence is synthesized)
aaaaagggctgtgaaagtgtagatgagtgtaaggtgcacaaaagaggttataatggacttaaccaatatttgacaactactcaaagcaaaatatttcagtgtgataaatatgtgaaagtc

SEQ ID NO: 771833 - DNA, 120 bp, Artificial Sequence
  ENSG00000237440_5 (sequence is synthesized)
attcataaattttcaaattcaaacagacataagataagacatactggaaaaaaacctttcaaatgtatagaatgtggcaaagcttttaaccagtcttcaacccttactacacataagaaa

SEQ ID NO: 771834 - DNA, 90 bp, Artificial Sequence
  ENSG00000237440_6 (sequence is synthesized)
agcttttaaccagtcttcaacccttactacacataagaaaattcatactggggagaaacccttctggtcctcacaccttactacacataa

SEQ ID NO: 771835 - DNA, 86 bp, Artificial Sequence
  ENSG00000237440_7 (sequence is synthesized)
gagaattcatactggagagaaacggtacaaatgtgaagactgtggcaaagcctttagccggttttcataccttactgcacataaga

SEQ ID NO: 771836 - DNA, 76 bp, Artificial Sequence
  ENSG00000237440_8 (sequence is synthesized)
aaccctacaaatgtgaagaatgtggcaaggcctttaagcgctcctctatccttactgcgcataagataattcatag

SEQ ID NO: 771837 - DNA, 66 bp, Artificial Sequence
  ENSG00000237440_9 (sequence is synthesized)
tccttactacagcctttaagtacttctcatcccttactacacacaagataattcatagtggagaga

SEQ ID NO: 771838 - DNA, 65 bp, Artificial Sequence
  ENSG00000237440_10 (sequence is synthesized)
ctacaaatgtgaagaatgtggcagagcctttaagtacttctcatcccttactacacacaagactg

SEQ ID NO: 771839 - DNA, 120 bp, Artificial Sequence
  ENSG00000237440_11 (sequence is synthesized)
aaccctacaaatgtgaagaatgtggcgaagcctttaagtactcctcttcccttactacacataagataatccatactggacagcaacccttcaagtgtgaagaatgtggcaaggccttta

SEQ ID NO: 771840 - DNA, 75 bp, Artificial Sequence
  ENSG00000237440_12 (sequence is synthesized)
accttactcgatgtggcaaggcttttaagcgctcctttatccttactagacataagagaattcatactggagaga

SEQ ID NO: 771841 - DNA, 120 bp, Artificial Sequence
  ENSG00000237440_13 (sequence is synthesized)
tgtggcaaaggctttaagtgcccctctacccttactacacataaggtaattcatactggagagaaactataaatgtgaggaatgtggcaaagctttaagctatcccactatgcttttttc

SEQ ID NO: 771842 - DNA, 120 bp, Artificial Sequence
  ENSG00000237440_14 (sequence is synthesized)
acataagaaaattcatattggagggaaactgtacaagtgtgataaatgtggcaaagcctttatttcatcctcaaaccttagtagacattagataattcatgcgggaaagaaacccaacaa

SEQ ID NO: 771843 - DNA, 120 bp, Artificial Sequence
  ENSG00000237440_15 (sequence is synthesized)
ataagaaaatgcagcaaagcctttaaggacacctctgcccttactagacataagataattcgtactggagagaaaccctgtgagtttgatgaatgtcggaaagcctttaaccagctatca

SEQ ID NO: 771844 - DNA, 120 bp, Artificial Sequence
  ENSG00000237440_16 (sequence is synthesized)
acttttactaaatatgagaatttatatggaacataaaccctacaaatataaagaatgtgacaacgcttttaggaagttctgaacccttcttacacataattcatgctggacaaaaatcct

SEQ ID NO: 771845 - DNA, 120 bp, Artificial Sequence
  ENSG00000237440_17 (sequence is synthesized)
acaagtttgaggaatgtggcaaatcctataacaagttttcaatatttttttttttgagatgaagtttcatgcttgtcatccaagctggagtacagtgccatgatctcggctcactgcaac

SEQ ID NO: 771846 - DNA, 69 bp, Artificial Sequence
  ENSG00000237440_18 (sequence is synthesized)
cccagccacaagttctcaattcttaagaggcatggcaataattcatgttgaagaggaaatccgcaaagc

SEQ ID NO: 771847 - DNA, 120 bp, Artificial Sequence
  ENSG00000237440_19 (sequence is synthesized)
gcatggcaataattcatgttgaagaggaaatccgcaaagctaaaaaatgtgacattgcttttacgaacacctccaacttctctacacataacaataattatactagtgtgaaaccctaga

SEQ ID NO: 771848 - DNA, 120 bp, Artificial Sequence
  ENSG00000237440_20 (sequence is synthesized)
aatatataaaatgtgacaaagcctttatatggttgccactcttgattgtaggttggataattcatactggcaaaactcctacaagtgtgaagaatgtggcaaaacttttaatcagttctt

SEQ ID NO: 771849 - DNA, 120 bp, Artificial Sequence
  ENSG00000237440_21 (sequence is synthesized)
acaccttatctcacagaaaagctagtatccttgagaaaaattgtacaaatagaaggaatatggaaaacctattaattcctactcacatctaactcaacataaaaatcttccttttaataa

SEQ ID NO: 771850 - DNA, 120 bp, Artificial Sequence
  ENSG00000237440_22 (sequence is synthesized)
aagcattaaaatggcaattactgtcaaaactttcagcaagtataagcctttaaagtgaagaagagtatttattgtgaagacaagcattacaaatataaagggagttacatagtacattta

SEQ ID NO: 771851 - DNA, 120 bp, Artificial Sequence
  ENSG00000237440_23 (sequence is synthesized)
ctagtatcacagatcttattgcacacattttgtactggaggaaaatcctaaagcagttgctcaagtttgttcaacatcagggaatttatattggagatgagtcctacaaatgtattaagt

SEQ ID NO: 771852 - DNA, 120 bp, Artificial Sequence
  ENSG00000237440_24 (sequence is synthesized)
ttagaaacacttttttttccccagaaactacagcttagaaaacaacagagagtttatgctaaaatataattttgcagatgcagtaaatattaaaaaatatttaattcaaaatagattgta

SEQ ID NO: 771853 - DNA, 120 bp, Artificial Sequence
  ENSG00000237440_25 (sequence is synthesized)
tataaatatcaagagagtttacagtagaataactaaggccccgacacttcagacattacactaaatcagagcattgaatataaaaactaatccacaactgcagtttttaggtaaatgatt

SEQ ID NO: 771854 - DNA, 120 bp, Artificial Sequence
  ENSG00000237440_26 (sequence is synthesized)
tctatttaactttaaaaggagtagatttttggaagcattgtaattacgttgaaagtatacttgtttccttgaataaaattttttgaaagctgaataatgatgtaatacagctttcaaatt

SEQ ID NO: 771855 - DNA, 120 bp, Artificial Sequence
  ENSG00000237440_27 (sequence is synthesized)
atgctgttattttatttctattcacatgtgagaaagcatgtgatcagtggcttctgcatcagagatattcgatttttttacattatttggacattatgactttttctataaaatagtaag

SEQ ID NO: 771856 - DNA, 120 bp, Artificial Sequence
  ENSG00000237440_28 (sequence is synthesized)
aacattaaaatgtaagacgcataatgaaaatacaagtggagaagctgtttgtagtaaaattctattaagtaatgtataacgtaaatgttcagagcaatactttattatagtgacacaaag

SEQ ID NO: 771857 - DNA, 120 bp, Artificial Sequence
  ENSG00000237440_29 (sequence is synthesized)
aaataattaaaagtatattaaaataaatgagtatattactttactacttgtacttttatgtaataaaatgcagtgcattttaaaactgttagggccgggcttgatggctcatgcctgtaa

SEQ ID NO: 771858 - DNA, 120 bp, Artificial Sequence
  ENSG00000237440_30 (sequence is synthesized)
ccatggtaagactaccgtgcgtttaatgaaccattattgtgccactaactgtatcccactttactcaagggtgtaggtacaatattgtaggaatatactatttcatacattgtaaaataa

SEQ ID NO: 771859 - DNA, 120 bp, Artificial Sequence
  ENSG00000237440_31 (sequence is synthesized)
catctttagtaatcactgtcagtggctttaaactgcaaatgagttaaatattgttcccatagattaaattttgactctttattatttaaattttttatttgtattcgtgggtatataata

SEQ ID NO: 771860 - DNA, 120 bp, Artificial Sequence
  ENSG00000237440_32 (sequence is synthesized)
tgtgtatatatttatgccttatatggcatcttttgactcaggcctacaatatgtagtaattacattatggtaaataaggtatccatcacctctagcatttatcttttgtattaccaatag

SEQ ID NO: 771861 - DNA, 120 bp, Artificial Sequence
  ENSG00000237440_33 (sequence is synthesized)
tgtaattatatgcttttattcattttaaaatgtacaattaaattgttattgactacagaattatttctatgatcataataattatacaaaaatgtaaataaaatacggccaggcacagtg

SEQ ID NO: 771862 - DNA, 78 bp, Artificial Sequence
  ENSG00000237440_34 (sequence is synthesized)
cactttgggaggccgagacaggtggaatgcttgaggttaggagttcaagcacaaaaattaggcatggtggcacatgcc

SEQ ID NO: 771863 - DNA, 120 bp, Artificial Sequence
  ENSG00000237440_35 (sequence is synthesized)
ccatctcaaaaaataaaataaaaataaaatccatacatttctgagtcctgaaaaattataaatacttgtaatatagttttccttgaacatgtggtctctgcctgcaaacacatagacttt

SEQ ID NO: 771864 - DNA, 120 bp, Artificial Sequence
  ENSG00000237440_36 (sequence is synthesized)
tagttttaatttacatagagttaaatatacacatattactctgaagataaacctgaggtgtaagaaaattatgaattgagtgtttttgtgtgagtataggtttgtacatattttcagaat

SEQ ID NO: 771865 - DNA, 120 bp, Artificial Sequence
  ENSG00000237440_37 (sequence is synthesized)
aaaagcaattactgcaacaaaacaaattatgttatttaggtgattaacaaaactaaacacttttaaaatggtgaaagcaaatctatactttctgctttgtattgaatttattaatataaa

SEQ ID NO: 771866 - DNA, 120 bp, Artificial Sequence
  ENSG00000237440_38 (sequence is synthesized)
atgttctggcctgtgattcggattctccccagagtctgcctattaaagcacaggcaactttgtctccagaaacaactctcttgagtacaataataaaagccctcttaaaacaggaaaaaa

SEQ ID NO: 771867 - DNA, 120 bp, Artificial Sequence
  ENSG00000237440_39 (sequence is synthesized)
aaatcatttttaacacttatttgaatgaacattcaaccaaaattgaataattggatatatttttattgttctatgtgtgtgtgaatgtataaatggtgcataaaaaataatttaagccag

SEQ ID NO: 771868 - DNA, 120 bp, Artificial Sequence
  ENSG00000237440_40 (sequence is synthesized)
aaaaatagttatttgtaatgaataaaactaaaaagtagttaattattatatccagttgatatctttgtttatgtagataacaaaagcagcagaaagactctttttttttttccatgatgg

SEQ ID NO: 771869 - DNA, 85 bp, Artificial Sequence
  ENSG00000237440_41 (sequence is synthesized)
caaaagcagcagaaagactctttttttttttccatgatggagtgttgctctgtcttccaggctggagagcagtggcgtgatctca

SEQ ID NO: 771870 - DNA, 76 bp, Artificial Sequence
  ENSG00000237440_42 (sequence is synthesized)
gcctcatgatctgcctgcttcagcctcccacggtgctggtattagaatcatgagccaccgtgcccagcaaaagatg

SEQ ID NO: 771871 - DNA, 120 bp, Artificial Sequence
  ENSG00000237440_43 (sequence is synthesized)
tggtattagaatcatgagccaccgtgcccagcaaaagatgattttaaacatttatttaggtgggtaggcaacattctaagataataccctggattaccagtctgttgcacacgtgctgtg

SEQ ID NO: 771872 - DNA, 120 bp, Artificial Sequence
  ENSG00000237440_44 (sequence is synthesized)
tcatactttcctcttgagtgtaaaaaaaatgtgtgactgtggtgggaaatcacttatgaaattaggttactcatccgtagactttgtgtttatcaaaatggagattatcctgattgtgct

SEQ ID NO: 771873 - DNA, 120 bp, Artificial Sequence
  ENSG00000237440_45 (sequence is synthesized)
aaacttaatcagaggtgcttttaagagaaagagacacatcacagaaaaacacccctgctggcctgaaagtaagtgacttctaggtagaacatgttgtaagctgcttatggtggccacatg

SEQ ID NO: 771874 - DNA, 120 bp, Artificial Sequence
  ENSG00000237440_46 (sequence is synthesized)
gcgggaaaaatgtttgtatcttgccatcatttctgcctcctccatgttgcttccagtaaggaacataagaggattctatggcagagggaaaaaaaagggaatctcattcattcaagaaat

SEQ ID NO: 771875 - DNA, 120 bp, Artificial Sequence
  ENSG00000237440_47 (sequence is synthesized)
aatcacctctcatctgggatagcttaagagaaacaggagaccacaacaggtccacattaatgggaggaaaaaggtaacctgggtaaaagtgctcactggcattatggaacagtatttagt

SEQ ID NO: 771876 - DNA, 120 bp, Artificial Sequence
  ENSG00000237440_48 (sequence is synthesized)
aagctgtagtgaatgatcagcctctgggataccaatagtctaccaacaaggctgaactcattctaattcaatcagcatgtctgcaccattctggtgacacaggtttacactatttattac

SEQ ID NO: 771877 - DNA, 120 bp, Artificial Sequence
  ENSG00000237440_49 (sequence is synthesized)
agaaatgccatgaagaccagtgggtaatgtcctaaaattgaacttacttcaaaaagtatacctaattgtctgttttcatatttgaaaaaccttaaaaacaatgaatttataaataattaa

SEQ ID NO: 771878 - DNA, 120 bp, Artificial Sequence
  ENSG00000237440_50 (sequence is synthesized)
cttctaattatagaggattctactatactgtaatacaagattaaactgtaaacacattaatatgaatattttttgaatccatgattagttatgtagatagtttcttttagattcacatga

SEQ ID NO: 771879 - DNA, 120 bp, Artificial Sequence
  ENSG00000237440_51 (sequence is synthesized)
ccaaggtaacattagagaaaacatttgaaatggaataaaatttaccaagaccacattttttcaatggcttcgcataattgccgtacttacagaaatggccagatgactaacaagaaacaa

SEQ ID NO: 771880 - DNA, 120 bp, Artificial Sequence
  ENSG00000237440_52 (sequence is synthesized)
aggcaagatttaagctttgctcaatgattgtttttgaccttttgaaatctgaaatcctggctaaagtattcaaagggagtattttataggggcttcccagggtttccaagtaattgaaga

SEQ ID NO: 771881 - DNA, 120 bp, Artificial Sequence
  ENSG00000237440_53 (sequence is synthesized)
ccagggtttccaagtaattgaagaaagaatttcttttttttttttttagaaggattctcactctgtcactcacgctgcactgcaatggtacgtgctcagctcactgcaacctccacctcc

SEQ ID NO: 771882 - DNA, 83 bp, Artificial Sequence
  ENSG00000237440_54 (sequence is synthesized)
ttccgccattatgcccggataatttttgtagtagagatgggatttcatcatgttagccaggcttgtcttgaactcctgacctc

SEQ ID NO: 771883 - DNA, 120 bp, Artificial Sequence
  ENSG00000237440_55 (sequence is synthesized)
agtgctgggattacaggcatgagccacttttcccagccagaataattttggtaggcaggaaaatgcacattatgtacacacattgctcttctctgatttgctttaacactgaaaaactga

SEQ ID NO: 771884 - DNA, 120 bp, Artificial Sequence
  ENSG00000237440_56 (sequence is synthesized)
ctttaacactgaaaaactgaagattgtaaatgtagtctcaatttagagtgaattaacaaaagatttgtttttcaaaaaagcaaatgtataaaattaatgggtaacagatgccattagttg

SEQ ID NO: 771885 - DNA, 120 bp, Artificial Sequence
  ENSG00000237440_57 (sequence is synthesized)
ctaaaaaatagtatgactaaagttggtaattatctagctatgcaaataacagcccaattaaattaagactctattgggtgcatgtggaaagcattgatgtgcagtgtggtgcctccactc

SEQ ID NO: 771886 - DNA, 120 bp, Artificial Sequence
  ENSG00000237440_58 (sequence is synthesized)
agcatttccttactgtctctttacagagataccaattccccctgaattactcagggtccataatggttttagaaatgtttgttctctggagctgtaaagaaatagcacttgaaaataaat

SEQ ID NO: 771887 - DNA, 120 bp, Artificial Sequence
  ENSG00000237440_59 (sequence is synthesized)
ttaatttttcttagcaaggccatttttactttttgcagaaagcagttttgccacgagtacactgaacagaggagacagagtcatttataacttgacgtgtccaccctactgctgtgtctg

SEQ ID NO: 771888 - DNA, 88 bp, Artificial Sequence
  ENSG00000237440_60 (sequence is synthesized)
cctactgctgtgtctggttttgtcccaattgtttagcaacttagaactttttaaaagagacaaaggcagaggagaacaaaggaaggag

SEQ ID NO: 771889 - DNA, 87 bp, Artificial Sequence
  ENSG00000237440_61 (sequence is synthesized)
tttgcttctaagagaagttactattcataattaggtagaaaagtctttgaagaggaacctctacttcactttttacactgtgaactg

SEQ ID NO: 771890 - DNA, 120 bp, Artificial Sequence
  ENSG00000237440_62 (sequence is synthesized)
tgaagaggaacctctacttcactttttacactgtgaactgagaatgctgtgttcagagtgattactgaaaacatggttaatacacttcttccatatgataataaaatgttataaatctta

SEQ ID NO: 771891 - DNA, 120 bp, Artificial Sequence
  ENSG00000237440_63 (sequence is synthesized)
ccctacaaatgtgaagaatgtggcaaaggctttaagtgcccctctacccttactacacataagttttttgtttattgcagagaagtggctgtcctactagaaaactgctactctcatctg

SEQ ID NO: 771892 - DNA, 120 bp, Artificial Sequence
  ENSG00000237440_64 (sequence is synthesized)
tgaagcggataaaaggtaaatgtgtcttctctgtatcttttttcatccattggctgaagaacaggaaaatgtggaaaataaaagaaaatataacccctgaaaaatcctgaagaagctctc

SEQ ID NO: 771893 - DNA, 120 bp, Artificial Sequence
  ENSG00000237440_65 (sequence is synthesized)
ttaaccagacaaaaaaccttataggggattttttgtttgttttattattgtaccatctgcttctatgagtttaattttttttttttttttacactttacatagaaataggattatgtggg

SEQ ID NO: 771894 - DNA, 120 bp, Artificial Sequence
  ENSG00000237440_66 (sequence is synthesized)
tgctgtgtgtcctctgctcctagaggcccagcctctgtggccctgtgtcctgcaggtattgggagatccacagctaagacgcccgggagcccctggaagcctagaaatggtattgttgtc

SEQ ID NO: 771895 - DNA, 74 bp, Artificial Sequence
  ENSG00000237440_67 (sequence is synthesized)
gcaccccgcccggcccaattgtgtgggcttctatgtaggcagaactgaccataaactgtggctcaggtaaccga

SEQ ID NO: 771896 - DNA, 64 bp, Artificial Sequence
  ENSG00000237440_68 (sequence is synthesized)
tcctgcaggtattgggagatccacagctaagacgcccgggagcccctggaagcctagaaatggt

SEQ ID NO: 771897 - DNA, 120 bp, Artificial Sequence
  ENSG00000237441_0 (sequence is synthesized)
gactcggtccggggccggagaccgacggcaacagcggctcaggacccacgctgcccccacccctcccgagcaggcgcccccatggcccgaccccgctgattccttcactcggccatgctc

SEQ ID NO: 771898 - DNA, 120 bp, Artificial Sequence
  ENSG00000237441_1 (sequence is synthesized)
ccgcggcccctgcggctgcttttggacacgagcccccccgggggagtcgtactgagcagcttccgaagccgggaccccgaagagggtgggggcccaggtggcctggtcgtgggcgggggg

SEQ ID NO: 771899 - DNA, 120 bp, Artificial Sequence
  ENSG00000237441_2 (sequence is synthesized)
caggaggaagaggaggaggaagaagaagaggcccctgtgtccgtctgggatgaggaggaggatggtgccgtgtttaccgtcacaagccgccaatatcgacctcttgatcccttggtccct

SEQ ID NO: 771900 - DNA, 120 bp, Artificial Sequence
  ENSG00000237441_3 (sequence is synthesized)
atgcctcccccacgttcctcccgacggctccgagctggcactctggaggccctggtcagacacctactggatacccggacatcagggactgatgtgagcttcatgtcagccttcctggct

SEQ ID NO: 771901 - DNA, 120 bp, Artificial Sequence
  ENSG00000237441_4 (sequence is synthesized)
acccaccgggccttcacctccacgcctgccttgctagggcttatggctgacaggctggaagcccttgaatctcatcctaccgacgaactagagaggacaacagaggtagccatctctgta

SEQ ID NO: 771902 - DNA, 120 bp, Artificial Sequence
  ENSG00000237441_5 (sequence is synthesized)
ctgtcaacctggctggcctctcaccctgaggattttggctctgaggccaagggtcagcttgaccggcttgagagcttcttacttcagacagggtatgcagcagggaagggtgttgggggg

SEQ ID NO: 771903 - DNA, 120 bp, Artificial Sequence
  ENSG00000237441_6 (sequence is synthesized)
ggcagcgctgacctcatccgcaatctccggtcccgggtggacccccaggcccccgaccttcctaagcccctggccctccccggcgatccccctgctgaccccacggatgtcctggtgttc

SEQ ID NO: 771904 - DNA, 120 bp, Artificial Sequence
  ENSG00000237441_7 (sequence is synthesized)
ctcgctgaccacttggccgaacagctgaccctgctagatgcggaactttttctcaatttgatcccctctcagtgcctgggaggcctgtggggtcacagagaccggccaggacattctcac

SEQ ID NO: 771905 - DNA, 120 bp, Artificial Sequence
  ENSG00000237441_8 (sequence is synthesized)
ctctgcccatctgtccgagctactgtcacacagtttaacaaggtggcaggggcagtggttagttctgtcctgggggctacttccactggagagggacctggggaggtgaccatacggcca

SEQ ID NO: 771906 - DNA, 120 bp, Artificial Sequence
  ENSG00000237441_9 (sequence is synthesized)
ctccgtcccccacagagggcccggctcctggagaagtggatccgcgtggcagaggagtgccggctgctccgaaacttctcttcagtttatgccgtggtgtcagccctgcagtccagcccc

SEQ ID NO: 771907 - DNA, 120 bp, Artificial Sequence
  ENSG00000237441_10 (sequence is synthesized)
atccacaggcttcgggcagcctggggggaagcaaccagggacagcctcagagtcttttccagcctctgccagattttctccgaggaggataattattcccagagtcgggagctgctcgtg

SEQ ID NO: 771908 - DNA, 120 bp, Artificial Sequence
  ENSG00000237441_11 (sequence is synthesized)
caggaggtgaagctgcagtctcctctggagccacactccaagaaggccccgaggtctggctcccggggtgggggtgtggtcccataccttggcaccttcctgaaggaccttgtgatgctg

SEQ ID NO: 771909 - DNA, 120 bp, Artificial Sequence
  ENSG00000237441_12 (sequence is synthesized)
atgagttggagaatggatacatcaattttgacaagcggaggaaggagtttgcagtcctttctgagttgcgacggctccagaatgaatgtcgtggctataacctccaacctgaccatgata

SEQ ID NO: 771910 - DNA, 120 bp, Artificial Sequence
  ENSG00000237441_13 (sequence is synthesized)
tccagaggtggctacaggggctccggccactgacagaggctcagagccatcgtgtatcctgtgaggtggagccacctggttccagtgaccctcctgccccacgggtgcttcggccaacat

SEQ ID NO: 771911 - DNA, 120 bp, Artificial Sequence
  ENSG00000237441_14 (sequence is synthesized)
tggtcatctcgcagtggacagaggttttgggctctgttggggtccctaccccgcttgtgtcctgtgaccggcccagtactgggggagatgaggcgcctacaactcctgctcctctgctga

SEQ ID NO: 771912 - DNA, 120 bp, Artificial Sequence
  ENSG00000237441_15 (sequence is synthesized)
ctcggctggcccagcacatgaagtggccatctgtctcgtcactagactctgccttggaaagcagtccatccctgcacagtccagctgaccccagccacctctccccaccagcctcctccc

SEQ ID NO: 771913 - DNA, 120 bp, Artificial Sequence
  ENSG00000237441_16 (sequence is synthesized)
ctaggccttctcgaggtcaccgccgctcagcctcctgtggctccccgctgagtgggggtgcagaagaggcctccggggggactggatatgggggagagggatctgggccaggggcctctg

SEQ ID NO: 771914 - DNA, 120 bp, Artificial Sequence
  ENSG00000237441_17 (sequence is synthesized)
attgccgtatcatccgagtccagatggagttgggggaagatggcagtgtctataagagcattttggtgacaagccaggacaaggctccaagtgtcatcagtcgtgtccttaagaaaaaca

SEQ ID NO: 771915 - DNA, 120 bp, Artificial Sequence
  ENSG00000237441_18 (sequence is synthesized)
atcgtgactctgcagtggcttcagagtatgagctggtacagctgctaccaggggagcgagagctgactatcccagcctcggctaatgtattctacgccatggatggagcttcacacgatt

SEQ ID NO: 771916 - DNA, 120 bp, Artificial Sequence
  ENSG00000237441_19 (sequence is synthesized)
tcctcctgcggcagcggcgaaggtcctctactgctacacctggcgtcaccagtggcccgtctgcctcaggaactcctccgagtgagggaggagggggctcctttcccaggatcaaggcca

SEQ ID NO: 771917 - DNA, 120 bp, Artificial Sequence
  ENSG00000237441_20 (sequence is synthesized)
cagggaggaagattgcacgggcactgttctgaggaggaagccccgttggcttacagaagtcatggtgttcataccagatgtgggtagccatcctgaatggtggcaattatatcacattga

SEQ ID NO: 771918 - DNA, 120 bp, Artificial Sequence
  ENSG00000237441_21 (sequence is synthesized)
gacagaaattcagaaagggagccagccaccctggggcagtgaagtgccactggtttaccagacagctgagaaatccagccctgtgggaactggtgtcttataaccaagttggatacctgt

SEQ ID NO: 771919 - DNA, 120 bp, Artificial Sequence
  ENSG00000237441_22 (sequence is synthesized)
gtatagcttcccaccttccatgagtgcagcacacaggtagtgctggaaaaacgcatcagtttctgattcttggccatatcctaacatgcaagggccaagcaaaggcttcaaggctctgag

SEQ ID NO: 771920 - DNA, 120 bp, Artificial Sequence
  ENSG00000237441_23 (sequence is synthesized)
ccccagggcagaggggaatggcaaaatgtaggtcctcgcaggagctcttcttcccactctgggggtttctatcactgtgacaacactaagataataaaccaaaacactacctgaattcta

SEQ ID NO: 771921 - DNA, 120 bp, Artificial Sequence
  ENSG00000237441_24 (sequence is synthesized)
ccaggatcagaattcctgtactccatccacgcctccactgcagccccttcgactccaccggggccctgaggcggctggggtggggctgtctgggccccagtgggggagacctggggtcac

SEQ ID NO: 771922 - DNA, 120 bp, Artificial Sequence
  ENSG00000237441_25 (sequence is synthesized)
cagctcccccaacccttcctcgcactcgctggtactatgccctgccaccacaggtgaggggtacagagggaggagcagggcctggggtgaaggctgagggcaatggggggtggtgtggaa

SEQ ID NO: 771923 - DNA, 120 bp, Artificial Sequence
  ENSG00000237441_26 (sequence is synthesized)
gctgaccctgctagatgcggtgagaccctgacctctggcccctatgccccctgaccccttactaacctctccttgactccagatcctttccttgcttccaccccttcctgatccagctcc

SEQ ID NO: 771924 - DNA, 120 bp, Artificial Sequence
  ENSG00000237441_27 (sequence is synthesized)
tagcctcctccacctaccattttgattctccccttttccctttggtcgttacccttcaaaccctgtgcccctctggttccttggccacctgagatcctcagatccctgatattggaaggc

SEQ ID NO: 771925 - DNA, 120 bp, Artificial Sequence
  ENSG00000237441_28 (sequence is synthesized)
tgacctcacttgactatgaactttaacctctgacctctaccctgcaggaactttttctcaatttgatcccctctcagtgcctgggaggcctgtggggtcacagagaccggccaggacatt

SEQ ID NO: 771926 - DNA, 120 bp, Artificial Sequence
  ENSG00000237441_29 (sequence is synthesized)
accaagggcccccctattccacccttctgttgccccctcccccaaccttcctgcagaactcccttccggtcttcttgacacccacccacgtcccttccctgcccggttcccccgcgcctg

SEQ ID NO: 771927 - DNA, 120 bp, Artificial Sequence
  ENSG00000237441_30 (sequence is synthesized)
acttccccttttccttcctgtactgggattggagctgctaccttcgggggtcccttagggctgagatagtggaggcgctacccgagggaccagggtgaaaggggtcctgaaaaagactaa

SEQ ID NO: 771928 - DNA, 120 bp, Artificial Sequence
  ENSG00000237441_31 (sequence is synthesized)
ttctctgggctggtatagtccttggccgggaggggcggggcatgcggcagtgcctggactgaggtttcagctacccctagtcgctgcctctggcttgctgcctctcgcttccctctcctg

SEQ ID NO: 771929 - DNA, 120 bp, Artificial Sequence
  ENSG00000237452_0 (sequence is synthesized)
agcggctcacgccgaccaaggccttgtcagaaggctcgaggccgagctcacgctgtgcaagacgacagggcccttcccgaggcgcgcgtgcgcacggccacttgcaccctgccctttcaa

SEQ ID NO: 771930 - DNA, 120 bp, Artificial Sequence
  ENSG00000237452_1 (sequence is synthesized)
ccccgtcgtctcgtgcccagcacatcttggctggaactggtaggggcgtggcctggcctcaggaacgcactcttgctctgctcctcacgcctcgcgcaggatcctcgcgccgggaggatt

SEQ ID NO: 771931 - DNA, 120 bp, Artificial Sequence
  ENSG00000237452_2 (sequence is synthesized)
cgcacccaaccccaagcccggttgggaacgtggtgtccgagaccgtctgggatccccgcgcgcacggccggcttcccgggacccgcgcgagacgctgtctgatcgggctccctagagtgg

SEQ ID NO: 771932 - DNA, 120 bp, Artificial Sequence
  ENSG00000237452_3 (sequence is synthesized)
ggcccggagaaaccagaacggcgggggcagcctcacgccattttgcacgccctgagatgtttggttccagcagatacttgggttcctctgaacagcccagagctaattcactgggtccca

SEQ ID NO: 771933 - DNA, 120 bp, Artificial Sequence
  ENSG00000237452_4 (sequence is synthesized)
gtgacaggaccttggttttgtgctccctagtggaaggggaagataaggtcaacccctccgaaccacatggactgagaatggaggagaaatggttgctcaaaggaaaactgaggaatcaga

SEQ ID NO: 771934 - DNA, 120 bp, Artificial Sequence
  ENSG00000237452_5 (sequence is synthesized)
ggaaccaaaacaagctcctgtccccaaacaagaagcagaggaaaaaccacactagcaagctgcaagagttggcactgctgctgcccatagccctgaagacggggaccaagaagctcacaa

SEQ ID NO: 771935 - DNA, 120 bp, Artificial Sequence
  ENSG00000237452_6 (sequence is synthesized)
agaaggagattctggtgcatgtcctgcagtacattcagtacctccagagaaacatcgatgccgccaaggccttgttcaaatgccacatcaccactggggaaggtggacttgcggggctgg

SEQ ID NO: 771936 - DNA, 120 bp, Artificial Sequence
  ENSG00000237452_7 (sequence is synthesized)
gtcagaaaccagcctggggcccagccaggcggaggagacactctaccccctccagctccccaagctctcagaagtcctgtctccagggggcgtgccagaagcctcggaagaagaagctga

SEQ ID NO: 771937 - DNA, 120 bp, Artificial Sequence
  ENSG00000237452_8 (sequence is synthesized)
cccaggcatcagaaagccagactcggaccccgaagcctcgccgctctctggccctgaacaagcctgagaagctggtggccccatccccagaccagaaaggaagtggcacaggggggacca

SEQ ID NO: 771938 - DNA, 120 bp, Artificial Sequence
  ENSG00000237452_9 (sequence is synthesized)
ctacccctccaaggtgccctgactcctgcggtcacccgaggcctgcatcatcctcacctccaggtgacagaaaaggaggacagtcccagctgacgctgttggatctggccgaggacacca

SEQ ID NO: 771939 - DNA, 120 bp, Artificial Sequence
  ENSG00000237452_10 (sequence is synthesized)
tccactgtgacatctcaagctgctggtgccagggcagtgtccaggatgacgcacctttccctgcgctcctggctcaggaagatgtggcgaggatccattttctcaacaagacccagcccc

SEQ ID NO: 771940 - DNA, 120 bp, Artificial Sequence
  ENSG00000237452_11 (sequence is synthesized)
gagcccactgttcctggggcctccccagattgatgtctggagtggaacaggccacccaagtgagatcctcgggctcagccctagccttttcagctccccagggaaactgctgccagacga

SEQ ID NO: 771941 - DNA, 120 bp, Artificial Sequence
  ENSG00000237452_12 (sequence is synthesized)
gatcttggaggatgacatggagtacctgacccaagcggctttctttgaagaagtgtgcttagatctggagtcttcaccttcagcctacacgcaggaggctccacaggaaaaggacacagc

SEQ ID NO: 771942 - DNA, 120 bp, Artificial Sequence
  ENSG00000237452_13 (sequence is synthesized)
ctccaaggcccccaaagaccctcctgagtcccacagcctgcaccggtcctcagtctcgctggaccactgctacctctcgctgagcgggaacagcaaggcgccatccagctccagctccag

SEQ ID NO: 771943 - DNA, 120 bp, Artificial Sequence
  ENSG00000237452_14 (sequence is synthesized)
ctccagctccagctccagctcggaggacagcgactcggagcccctgtggaagcagcgagaggatatgcaggccaaccctgtgggcacgccgggctccagcgaagaggacgaagacaccac

SEQ ID NO: 771944 - DNA, 120 bp, Artificial Sequence
  ENSG00000237452_15 (sequence is synthesized)
atggacccccacccggctggcctcacccctgctggcagctgagaaaaaggccacgaagggccaagtagccagggcccctgtgaagcccaaggagaagaagaaaggcccctgcccacccca

SEQ ID NO: 771945 - DNA, 120 bp, Artificial Sequence
  ENSG00000237452_16 (sequence is synthesized)
gatgaagaagaagtgtgtcaacggcttcatcatgttctgcaggatgaaccggaagcagtacatccgatcctgccctggaaccgcttccacagctgccaccaaggagctggcccagctgtg

SEQ ID NO: 771946 - DNA, 120 bp, Artificial Sequence
  ENSG00000237452_17 (sequence is synthesized)
gcgggtgatgacccagcaggagcggaggccatactgcaccaaggctcgcaggttcagccgccagcacaaccgcatcgtgaagcaggacggctccagcagcgaggctgaggactgggagac

SEQ ID NO: 771947 - DNA, 120 bp, Artificial Sequence
  ENSG00000237452_18 (sequence is synthesized)
gccaaagcccttctaccagctgctggccgagaaggccttgccgctgcccccgcacctccagtgagagggcggcccctcgcctcgctcccctcacccctcatggcaaccgcggctcttgct

SEQ ID NO: 771948 - DNA, 120 bp, Artificial Sequence
  ENSG00000237452_19 (sequence is synthesized)
ggaagccaggacccatcgatgaacttgtccctcctgggcctccagcccctgagaatgcaggtcccatgggactggggaggggggcactgattagccccaaccgctgggcacatttgcctg

SEQ ID NO: 771949 - DNA, 120 bp, Artificial Sequence
  ENSG00000237452_20 (sequence is synthesized)
gagcaccagagtcacccacagctgccttgattctcccccaggcttaggaaggaaacccaaaatgaaatgcggggtgtcggaaggtgaagtttacccacccctctccccttcccttcccca

SEQ ID NO: 771950 - DNA, 120 bp, Artificial Sequence
  ENSG00000237452_21 (sequence is synthesized)
ccccagagccactcggttgcaaccctgttcatgctcacctcaccctactcctccctctcctgttctatttttagactatttattgttttaaataaaataaagcaagtggaacctttgtta

SEQ ID NO: 771951 - DNA, 120 bp, Artificial Sequence
  ENSG00000237489_0 (sequence is synthesized)
gtggtgcgcgggcctcggccaggcctgagatgccgggagggtttgaccctggggctgcatggacagcttagcgctcggccgctggcgacagcggagggcggaggatctgcaggttccggg

SEQ ID NO: 771952 - DNA, 120 bp, Artificial Sequence
  ENSG00000237489_1 (sequence is synthesized)
ggacgtgaaacgggtatgcaggagattagaagccagtgggcatgagcgtggctgccaccaggtgaatgcctgtgccctggcgtcctggggcccagaggaccgggagcttccatcaagagg

SEQ ID NO: 771953 - DNA, 120 bp, Artificial Sequence
  ENSG00000237489_2 (sequence is synthesized)
ctgcctcccagcaccaaggccagagagtggccaggggaggctaagtacagggatttctcagaatggtggaaggagctcagcccagccttgcccaagatgtattgcaggggaatctggaca

SEQ ID NO: 771954 - DNA, 120 bp, Artificial Sequence
  ENSG00000237489_3 (sequence is synthesized)
tagccataccaagaatcattagaagatgcaagctggaaaaaagaaggtcccagttttggttttgaacccttcatgttgcagcaaatgtgaatctcctacagatgggtttggggacttacc

SEQ ID NO: 771955 - DNA, 120 bp, Artificial Sequence
  ENSG00000237489_4 (sequence is synthesized)
tgttcaaatagcagcccggtgtcctctgtgggtggggggaggtttgtctgtcctttcattctagtaaatccaccatcctctgcacgagagccaggagaatccacatcacttcaaaagagc

SEQ ID NO: 771956 - DNA, 120 bp, Artificial Sequence
  ENSG00000237489_5 (sequence is synthesized)
ccccaaatccttactacgtactacagcctcctttcgaatgttcctggttgagagggagatcaattgcattatttacaagtcaaaaaattttgtatcaaacttcctatgagcttgggcact

SEQ ID NO: 771957 - DNA, 120 bp, Artificial Sequence
  ENSG00000237489_6 (sequence is synthesized)
catggcctatggaggcccacccagacgcagccccgccatcatgctttttcgttgttttgtggatgtacccagggctatttacacactctttcattaaaaggcttatttttatatttaaaa

SEQ ID NO: 771958 - DNA, 120 bp, Artificial Sequence
  ENSG00000237489_7 (sequence is synthesized)
ctcggccaggcctgagatgccgggagggtttgaccctggggctgcatggacagcttagcgctcggccgctggcgacagcggagggcggaggatctgcaggttccgggggacgtgacatgt

SEQ ID NO: 771959 - DNA, 120 bp, Artificial Sequence
  ENSG00000237489_8 (sequence is synthesized)
tttgagcgcctgctgtgtctcaagccctgtcctaggcactggagatgagatgaagaaacgatgagtagaggccttgcttacgtttatcctgcaactcatgatgaggcttactctgcaact

SEQ ID NO: 771960 - DNA, 120 bp, Artificial Sequence
  ENSG00000237489_9 (sequence is synthesized)
tatcctgcaactcatgatgaggcttactctgcaactccagtgctcggctttttacacaacagagtctctgttgcccaggctggagtacagtcgcacgatcttggctcactgcaacctctg

SEQ ID NO: 771961 - DNA, 120 bp, Artificial Sequence
  ENSG00000237489_10 (sequence is synthesized)
tacaggcgagagccaccgtgcccggccatgaccttctttagttctttgaccatatttaaaatggctgaggtgaagtctctggtaagttcatgtctgggctttgtgttctgtttgcccttc

SEQ ID NO: 771962 - DNA, 120 bp, Artificial Sequence
  ENSG00000237489_11 (sequence is synthesized)
ttgtgttctgtttgcccttccaggtcagatccactgcccacctttcctggcatctgcacaggaggccagcctgcatggcttacatccagggggtgccgggggcacctgggctctcccact

SEQ ID NO: 771963 - DNA, 120 bp, Artificial Sequence
  ENSG00000237489_12 (sequence is synthesized)
tccctttgggctcagccgctagggggatttggggcaggcaacaggaggctggagaacgagggcagggtatgtggccatgtcccctggccagtgtcactcagcagcatgtgtcatctcctc

SEQ ID NO: 771964 - DNA, 120 bp, Artificial Sequence
  ENSG00000237489_13 (sequence is synthesized)
cttccaggttctggtagccgctgctgccctttatcccttgggtctggcccctgcactgtccctcgcggctcccaggacaactttgtgacaaatccttttgtaataacccctttgtgaggt

SEQ ID NO: 771965 - DNA, 120 bp, Artificial Sequence
  ENSG00000237489_14 (sequence is synthesized)
tccaagaaggaagggaggaagatgaggcaagggtgtgacaggtgtccctcggcacagggcacagcaggtgctctaaagacatttcatcatacaaagatgcatgctggtaaagacggatga

SEQ ID NO: 771966 - DNA, 120 bp, Artificial Sequence
  ENSG00000237489_15 (sequence is synthesized)
ttgtcttagaggtccaagcttttactgtaggcctttgtagaattctcttgagaagggacagtgttttgtggtagtaaagacgaatatgctgttaaaggaagaaaaaatgactcctctggc

SEQ ID NO: 771967 - DNA, 120 bp, Artificial Sequence
  ENSG00000237489_16 (sequence is synthesized)
agatggtaatggcaggaatcgtcaacatctttaacccacagagggctgctgtcatcctgtcacacaggtactcggggagaagcagagagctagccacagccagggctctgcccattaagg

SEQ ID NO: 771968 - DNA, 120 bp, Artificial Sequence
  ENSG00000237489_17 (sequence is synthesized)
aaaaatggcttcagcaaaaagggaaggagatgtggggtgcagttctctcctcccccagtccacagggatgacttgcagctagatgtaccagaggtgagggcatcaatctgggtgtttcac

SEQ ID NO: 771969 - DNA, 120 bp, Artificial Sequence
  ENSG00000237489_18 (sequence is synthesized)
gtaatggtcccagatggagtgaggtgtgtccctgttggccctgctgtccttccggctccacagagaggtcatggagagcccagcgaggaaggcttccaaaaaggaaagggggacgttttg

SEQ ID NO: 771970 - DNA, 120 bp, Artificial Sequence
  ENSG00000237489_19 (sequence is synthesized)
agggagttcatgcgtggtggcaaaccccacaaagaagccgttgcagtgagagatgaaagaagggctgaggccacacacgtgtgccccaagggtgtggaggagaaggcgctgggcagcagg

SEQ ID NO: 771971 - DNA, 120 bp, Artificial Sequence
  ENSG00000237489_20 (sequence is synthesized)
tgcaaccagaagcagctggccctgggcccttttcattccaaggttagaagcaaataaaaactccctcttcacaaacatcgttctcttgctccgtggaattgtgttttaccaaaagtggaa

SEQ ID NO: 771972 - DNA, 120 bp, Artificial Sequence
  ENSG00000237489_21 (sequence is synthesized)
aagggttttcccattattgctgatcaaatcacttttcaagcctgaccaaacaggaggcaaggcattttaattgtctgcagtaagactcacagtcgaggcacaatgagcctgatgctcctc

SEQ ID NO: 771973 - DNA, 120 bp, Artificial Sequence
  ENSG00000237489_22 (sequence is synthesized)
gtcagacctgcctctggtggctggtgtgggccatctgtgagtcccagagtctgatgacttgaggtcccactggcccagccccagtctagattggggtcagtacgaggcttctctttgggt

SEQ ID NO: 771974 - DNA, 120 bp, Artificial Sequence
  ENSG00000237489_23 (sequence is synthesized)
gtcactgggggctgcttgctttgagagagacagagacaaactgggacgtgtcaagaagagagagtaggatgatgcggggacttgagatcatgccagggcagaggtttaaatgagcaattt

SEQ ID NO: 771975 - DNA, 120 bp, Artificial Sequence
  ENSG00000237489_24 (sequence is synthesized)
cgaaaggttcctttgtgtctaagagagagtagaatggtgcgggggcttgagatcacaccggggcaaaaggtctaaagagcaatttctaaaggttcctttgtgtctaagattctgggtctt

SEQ ID NO: 771976 - DNA, 120 bp, Artificial Sequence
  ENSG00000237489_25 (sequence is synthesized)
tgggtcttggccagctgcgttggttcacacctataatcccaagactttgggaggctaaggcgagtggatcgcctgaggccaggagttctagaccagcctggacaacatgatgaaaccctg

SEQ ID NO: 771977 - DNA, 120 bp, Artificial Sequence
  ENSG00000237489_26 (sequence is synthesized)
attggcaagccgggaaaggagggcttaccagaacccagccatgctggcagcatgatctcagacctccagcctccagaatggagagaaagacgacttcctgagcgaggacgtgaagtggga

SEQ ID NO: 771978 - DNA, 120 bp, Artificial Sequence
  ENSG00000237489_27 (sequence is synthesized)
gtgaagcctgtcgggaaggggccacacactgattctcaccaaggcacagtctgaatgaaggagaccgggcccagcgccctgtgggggcagaaccatcctcaccaccttggcttgcacaga

SEQ ID NO: 771979 - DNA, 120 bp, Artificial Sequence
  ENSG00000237489_28 (sequence is synthesized)
gaaggtgatgcctgtgatgcccccaaaggctcatgtgatatcgatgaatatcacaagtgttttgcattctccatgatgaaaacagcatgggcacggagttctgtctgggttagccgagca

SEQ ID NO: 771980 - DNA, 120 bp, Artificial Sequence
  ENSG00000237489_29 (sequence is synthesized)
gccctgtgcgttctcctctggggaggggaggcgcttcccccgaagcctaaactaagccctacagcagtgacaacggggcaatgggtggggaaggagctgctggcctcaggttccagctac

SEQ ID NO: 771981 - DNA, 120 bp, Artificial Sequence
  ENSG00000237489_30 (sequence is synthesized)
tgaagggctgagctcctcctggcatccctggacacaccattcttgcccctctctgctggttgcactcgctgcagcttccaccactgctttagattggacttatttaacggaacttcatag

SEQ ID NO: 771982 - DNA, 120 bp, Artificial Sequence
  ENSG00000237489_31 (sequence is synthesized)
ggctcatctgcttgcatgtggtagacacaaaacggaaactggctcaagcagaaagaatgactcagtgaaaacacttggagatgcctcaagagccactaagctactagaaaaagcaagaat

SEQ ID NO: 771983 - DNA, 120 bp, Artificial Sequence
  ENSG00000237489_32 (sequence is synthesized)
gagccagactctgaacacgagctccaggccacagatgcccctggggccctgcctgctccttccccactctcctcccttggcatatgggccattggcttctttcgcttgcactgcaaattg

SEQ ID NO: 771984 - DNA, 120 bp, Artificial Sequence
  ENSG00000237489_33 (sequence is synthesized)
tcagctgacagagagagccccactcccctctccaagtccagaaacctcagagcagcgactcattggtcagggcctcctaatcagcagaggccagccggggacaaggagcccccgcgggac

SEQ ID NO: 771985 - DNA, 120 bp, Artificial Sequence
  ENSG00000237489_34 (sequence is synthesized)
ggtgggggaccaggcaggcaaaccagggaagtccacaccacgctgccatcacacagtgatcttcggttccgggaatggcatttggaagcccctaggcaaacgtttgtcatttgaaactca

SEQ ID NO: 771986 - DNA, 120 bp, Artificial Sequence
  ENSG00000237489_35 (sequence is synthesized)
ttccctgtgcagggctgggcaagtgcctggtctggagctcagagcagccattggagccatttggctggcatctgcttgtgcttataagtgagtgatgctccagcgccggtgccaccagct

SEQ ID NO: 771987 - DNA, 120 bp, Artificial Sequence
  ENSG00000237489_36 (sequence is synthesized)
tcttccagggccttgaggtgcagtgaccagggagggtgtggaagcttctctaggccaggaacaccatgctctcagagggccttttccatcagcttgcccgcagccagcctgacagtcgcc

SEQ ID NO: 771988 - DNA, 120 bp, Artificial Sequence
  ENSG00000237489_37 (sequence is synthesized)
cccactccctgggttagggattccaagtccctgagcagacagtgctggctctcaccgatgacagcctcgtgttcctgcatgcttttcaagtgcaggcgagcccgtcaacagctcagagaa

SEQ ID NO: 771989 - DNA, 120 bp, Artificial Sequence
  ENSG00000237489_38 (sequence is synthesized)
gacagcaggaagtaaggggtggaagggagaggaggagaggcagacacagagcgcttgggccacacaggcaggggagtgttctcctgggacggagccagagagctgggaggaatctgtgga

SEQ ID NO: 771990 - DNA, 120 bp, Artificial Sequence
  ENSG00000237489_39 (sequence is synthesized)
ccagaggacctctgagggctgcccggtgcttctcagtgggggccagatttcaaaatggtaactctctgaattgggaatttttgatgacagcttgagcaagtttagaaagaggacttactg

SEQ ID NO: 771991 - DNA, 120 bp, Artificial Sequence
  ENSG00000237489_40 (sequence is synthesized)
ggttgaactagagagtctaaaaacatcagtggcttcaggcatggagtgacccatttcaggggttggcagcctgtggtccgaaggccagatctgccctgccacctacatgcggccatggac

SEQ ID NO: 771992 - DNA, 120 bp, Artificial Sequence
  ENSG00000237489_41 (sequence is synthesized)
atttgttcaagtattgtctttgtctgcttctactctaccgtggcaaggtggagtaggtgtggcagagactgttggcctgcaaagcctacaatatttattgtctgttcctttagagaagag

SEQ ID NO: 771993 - DNA, 120 bp, Artificial Sequence
  ENSG00000237489_42 (sequence is synthesized)
attgaccgacctctgccctgcagctctgctgtccaatatggcagccactggccacatgggactcttgttttctgcactctcgaaacgtgtctagtctgaatggagatgggctgtcagtgc

SEQ ID NO: 771994 - DNA, 120 bp, Artificial Sequence
  ENSG00000237489_43 (sequence is synthesized)
aaactacagaacacaccaggttttagacttagtgtgaagagaagaatgtgaagtatctcattagtaatgtttgtatattgattacatagtaagatgtttttaaattgttgggttaaataa

SEQ ID NO: 771995 - DNA, 120 bp, Artificial Sequence
  ENSG00000237489_44 (sequence is synthesized)
cgtcaggaataagtcacctcagtgaatagctgtttttaaaaaagaaatcattgtgtttttcaagttctgtggttggtgatgacgaaatgaattaaacagcatttccctgcagttcccctg

SEQ ID NO: 771996 - DNA, 120 bp, Artificial Sequence
  ENSG00000237489_45 (sequence is synthesized)
tccaagtgagcctcccaggcttccactgactctgccccttcagtgcacagcccagagccgtgatttgccagctgggctcctgcgttcagagtctcccaacagaacaggttcttgtccaga

SEQ ID NO: 771997 - DNA, 120 bp, Artificial Sequence
  ENSG00000237489_46 (sequence is synthesized)
gaagttcaggaaatgctacatactttcccctgccttttagagacttgatgtccattagactgtgaaagacctcgagaattgcatgaagaaactggtttccaaaatgtccttttgtaaagg

SEQ ID NO: 771998 - DNA, 120 bp, Artificial Sequence
  ENSG00000237489_47 (sequence is synthesized)
gatacctgctacacatgtgattctgggaatattctgggaagcgcaggcctgttgagtaaatgcagcacctgtattcaccatggcatccagggcccttcaaatctcagtgttgcttgacct

SEQ ID NO: 771999 - DNA, 120 bp, Artificial Sequence
  ENSG00000237489_48 (sequence is synthesized)
cccagacagctgctcccatccctgccatgtgcgccacaagcccctgctccagccgccacagcttctccgatcctggaacagtctgaccttgtactgtgcttactgcttgaggtatacctt

SEQ ID NO: 772000 - DNA, 120 bp, Artificial Sequence
  ENSG00000237489_49 (sequence is synthesized)
cccacctccaaagattctcttgctccttcgtggcccacccgagattcctgtcttgtgtgaagccttcttcaggcccctcaccaggtagggtcacgtgctgtcttccctggctcctgtagc

SEQ ID NO: 772001 - DNA, 120 bp, Artificial Sequence
  ENSG00000237489_50 (sequence is synthesized)
atttcgttctgatcactcgaaggagccatcagtatctgacgtcagtactctgctgtctgataatccctccaggcaagttcagagtctctcctgtctggtccctgtgggtcagggcagccc

SEQ ID NO: 772002 - DNA, 120 bp, Artificial Sequence
  ENSG00000237489_51 (sequence is synthesized)
ctgccttccaggaagcagggacatcatcaagaactggacttctttgtttccccactgcccagcctaccccacccttcctgggctgcagccagctcaggagcctgttgccctgatggtgga

SEQ ID NO: 772003 - DNA, 120 bp, Artificial Sequence
  ENSG00000237489_52 (sequence is synthesized)
gtcctttcaggacagggaggctgtgcctgtctctgcctgtgggccagagtgccacgctgctatgtgccaggatatgtggccaagtgtgacagagattcctagatgctgacgagcctctca

SEQ ID NO: 772004 - DNA, 120 bp, Artificial Sequence
  ENSG00000237489_53 (sequence is synthesized)
ttgcacagtggtacagtgtctggccaactgtctatccccagccatctggttctcccagttacttctgcgggtgaagggacattttagccataccaagaatcattagaagatgcaagctgg

SEQ ID NO: 772005 - DNA, 120 bp, Artificial Sequence
  ENSG00000237515_0 (sequence is synthesized)
attccacaagtgtcgcttcgctctcttcagcgcacttggcgagctggtgaggtgagagggatactgcgagagggctaggggcggccagtccggggctgccggccaaggctaggcgctgcc

SEQ ID NO: 772006 - DNA, 120 bp, Artificial Sequence
  ENSG00000237515_1 (sequence is synthesized)
gcgctgccagcccgattctcctctgctctccacccccgcctcacccagtggccggccggacctgcaccccgcgcttgaccccgctcatcctccccccgcccggccgggcgcgctcctccc

SEQ ID NO: 772007 - DNA, 80 bp, Artificial Sequence
  ENSG00000237515_2 (sequence is synthesized)
ccctcggcgcgcggcgcgctggaggcgaacgcgggctgaggcgaacgcgggctgagccgagcgcagtggccgccgaccac

SEQ ID NO: 772008 - DNA, 120 bp, Artificial Sequence
  ENSG00000237515_3 (sequence is synthesized)
cgcagctcccggcagcagcctcggcagcttcggccgcgcctcgagaggcggccgcagaggctccagcggcggccgagcggccgagcccgggctgggagacaccatgcgccgcgtccttcg

SEQ ID NO: 772009 - DNA, 120 bp, Artificial Sequence
  ENSG00000237515_4 (sequence is synthesized)
ttcggctgctcctcggttgcttcctcaccgagctgtgcgcccgcgtgtgccgggcgcaggagcgagcgggacacgggcagctggcgcaactgggcggcgtgttgctgctggcggggggca

SEQ ID NO: 772010 - DNA, 120 bp, Artificial Sequence
  ENSG00000237515_5 (sequence is synthesized)
accgctccggggccgcctccggagaggccagcgagggcgctgaggcatcggacgcgcccccgacccgggcgcccacgccggacttctgccggggctacttcgatgtcatgggccagtggg

SEQ ID NO: 772011 - DNA, 120 bp, Artificial Sequence
  ENSG00000237515_6 (sequence is synthesized)
acccgccgttcaactgcagctcgggcgacttcatcttctgctgcgggacttgtggcttccggttctgctgcacgtttaagaagcggcgactgaaccaaagcacctgcaccaactacgaca

SEQ ID NO: 772012 - DNA, 120 bp, Artificial Sequence
  ENSG00000237515_7 (sequence is synthesized)
cgccgctctggctcaacaccggcaagccccccgcccgcaaggacgaccccttgcacgaccccaccaaggacaagaccaacctgatcgtctacatcatctgcggggtggtggccgtcatgg

SEQ ID NO: 772013 - DNA, 120 bp, Artificial Sequence
  ENSG00000237515_8 (sequence is synthesized)
tgctcgtgggcatcttcaccaagctggggctggagaaagcgcaccggccccaaagggagcacatgtccagggcccttgcggatgtcatgagaccacagggccactgcaacactgatcaca

SEQ ID NO: 772014 - DNA, 120 bp, Artificial Sequence
  ENSG00000237515_9 (sequence is synthesized)
tggagagagacctaaacatcgttgtccacgtccagcattatgagaacatggacacgagaacccccataaataatcttcatgccacccagatgaacaacgcagtgcccacctctcctctgc

SEQ ID NO: 772015 - DNA, 120 bp, Artificial Sequence
  ENSG00000237515_10 (sequence is synthesized)
tccagcagatgggccatccacattcgtacccgaacctgggccagatctccaacccctatgaacagcagccaccaggaaaagagctcaacaagtacgcctccttaaaggcagtcggaagtt

SEQ ID NO: 772016 - DNA, 120 bp, Artificial Sequence
  ENSG00000237515_11 (sequence is synthesized)
ctgatggtgactgggcagtatcgacacttaagtcaccaaaagctgacaaggtcaatgacgacttctacaccaagcgacggcacctggctgagctggctgccaaggggaacttacctctgc

SEQ ID NO: 772017 - DNA, 120 bp, Artificial Sequence
  ENSG00000237515_12 (sequence is synthesized)
accccgtaagagtggaggacgagccccgggccttcagccctgagcacggtcctgccaagcagaatggacagaagtcccgcaccaacaagatgcccccacatcccctggcctacacctcta

SEQ ID NO: 772018 - DNA, 120 bp, Artificial Sequence
  ENSG00000237515_13 (sequence is synthesized)
ccaccaactttaagggctgggaccccaacgagcagtccctccggcggcaggcttacagcaacaagggcaagcttggcacggccgagacaggctccagcgaccccttgggaactcgccccc

SEQ ID NO: 772019 - DNA, 120 bp, Artificial Sequence
  ENSG00000237515_14 (sequence is synthesized)
agcactacccacccccacagccatacttcatcaccaacagcaaaacagaagtgactgtctgagctttcaccacagggagcaccctggagaccacactcaactgagagaggcaaaaaacaa

SEQ ID NO: 772020 - DNA, 120 bp, Artificial Sequence
  ENSG00000237515_15 (sequence is synthesized)
ccccgcccacaccctccccatcctcccctaatacatgcgtccacacactcactctcaacaagaaccaactctaaacctactggggacacagagtcgcgcttttcctaggtcatgcctgta

SEQ ID NO: 772021 - DNA, 120 bp, Artificial Sequence
  ENSG00000237515_16 (sequence is synthesized)
acgtgtcggcgggcagctgagaaagaccgaagcgtggacattcagcaatacagcaaaggggaaaatgaggcacactctttccacttcaggcccaagatggccaactcacatgcccaaacc

SEQ ID NO: 772022 - DNA, 120 bp, Artificial Sequence
  ENSG00000237515_17 (sequence is synthesized)
gtggggctgagttttcttttcctcctaacttgaaactgaaatccatggtgacaaaatataaaagtagcacaatttagagaaattgtccatttgagcacatacactacttgccacgtgctg

SEQ ID NO: 772023 - DNA, 120 bp, Artificial Sequence
  ENSG00000237515_18 (sequence is synthesized)
tctgtttctaggttcgaaagccagggtggaaatgggggtagagaatgagggaggacacaagagaagagtgtattctggaagaggagttgttctgggaggaatttgcccacattagaagca

SEQ ID NO: 772024 - DNA, 120 bp, Artificial Sequence
  ENSG00000237515_19 (sequence is synthesized)
tttttctaattccaagaagtggtgacgtggacgtaaaattttgacgagcatgaaacagtaactggaccccaaccattctatttatagtacttttcatatcatccatgttgaaagcaaaaa

SEQ ID NO: 772025 - DNA, 120 bp, Artificial Sequence
  ENSG00000237515_20 (sequence is synthesized)
acaacacaccctcaaactcacagaaagtaaatagaccctgaacccaccgacaatgatgggaaggaaaaaacaaaaaacaaaaaacattttagagaactcccataaggaccatgaccgtgg

SEQ ID NO: 772026 - DNA, 120 bp, Artificial Sequence
  ENSG00000237515_21 (sequence is synthesized)
aaatgggagggatgggcttttacggagagggtccggagagtatcaaataactttttaaaaagaggattaaaatgtaagcccactacaaaacagataaaaacggcaaattaggtgtttttt

SEQ ID NO: 772027 - DNA, 120 bp, Artificial Sequence
  ENSG00000237515_22 (sequence is synthesized)
ttttttcaaaaatcttgaagacttgttgacattaacaacaacaaatccacagttggaaaagtccacaggagatcagatgaggatccagaagcctctgatttctgggttttgcctccaaga

SEQ ID NO: 772028 - DNA, 120 bp, Artificial Sequence
  ENSG00000237515_23 (sequence is synthesized)
cctgaaacagccacagaaacaagtcctctataaactgtatgtccctgacatccctttcccttcagcgcgttgccgccgccgctgccaaacttcaactgctttggactgaaaatgtcataa

SEQ ID NO: 772029 - DNA, 120 bp, Artificial Sequence
  ENSG00000237515_24 (sequence is synthesized)
gcgtgggtggtgccttcaatgtgttactgttgtttaatgacagtcttgtttcccaagtgcaacctgtgttcttttagccttccttcctcttctttttctgcagtagtagaagatgtttcc

SEQ ID NO: 772030 - DNA, 120 bp, Artificial Sequence
  ENSG00000237515_25 (sequence is synthesized)
atccttcctttgtaggtgagcccaccccataacaccctctgaggggctgctacaatgtcaggggtacccaagaacgaagacctccctactctctacactatcaaaattagtccttccatt

SEQ ID NO: 772031 - DNA, 120 bp, Artificial Sequence
  ENSG00000237515_26 (sequence is synthesized)
ttctagccctctcaaacctgtcagatgtttcttggtcccgtaattcccatggtccctccaaattacctccccacatacttcatgtgttcatctcccatccagaatgtcctgaggttgttt

SEQ ID NO: 772032 - DNA, 120 bp, Artificial Sequence
  ENSG00000237515_27 (sequence is synthesized)
ttctggttggttctcataatccatagtccttggggtcccagcaaagtcagttttcctacaagttgtgtttgttttgtggaagcccaaagaagtggattgagagagaagagatttttatct

SEQ ID NO: 772033 - DNA, 120 bp, Artificial Sequence
  ENSG00000237515_28 (sequence is synthesized)
aaggtctttggtagttaattaacattcaacagacccacagcaactctggtgtcagaagctataaatggtctggccaaacaagactcagagtattttctgaaatcctgagctgcaaggttc

SEQ ID NO: 772034 - DNA, 120 bp, Artificial Sequence
  ENSG00000237515_29 (sequence is synthesized)
tgcctcacctgtctctccactctgacatcacgaaatcagcaaaaccagatatttattctcctcactcccagcagatacgaggacaccaacaatgcagttgatccctctgggcctgagtct

SEQ ID NO: 772035 - DNA, 120 bp, Artificial Sequence
  ENSG00000237515_30 (sequence is synthesized)
cccatctgaaacatggggaattggggtaggtcaagctttttgaaactgcaaaacctctacctgtttttaaaaatgagatcttttgaccaggcacagtggctcacacctaaaatcccagca

SEQ ID NO: 772036 - DNA, 88 bp, Artificial Sequence
  ENSG00000237515_31 (sequence is synthesized)
agaggctgaggcaggagaatcgcttaaacttggcctctagcctgggtgacggagtgagactatctcaaaaaaaaaaaaaaaaagaaaa

SEQ ID NO: 772037 - DNA, 120 bp, Artificial Sequence
  ENSG00000237515_32 (sequence is synthesized)
aaaaaaaaaaagaaaaaaaaagagatctttcaaagaacgcataataggagatctccatgtataaaaaggtaccatgctgtacaaagctggggtcagagatttagtgcccaccttctcagc

SEQ ID NO: 772038 - DNA, 120 bp, Artificial Sequence
  ENSG00000237515_33 (sequence is synthesized)
cagcctccttgggaagaccccagagcttcccagagtcaagtaaataccactgggcatggtcagagtttccttgacgttaatgagctatgtacctgcaacacactttggcatctctgtata

SEQ ID NO: 772039 - DNA, 120 bp, Artificial Sequence
  ENSG00000237515_34 (sequence is synthesized)
tcaccttcacaatatttgtatctaaattgattcattttaatgcattttgtttttaaaatgaaaacttcctgtcttcatcacaaatttaaaaaaaatcatcagttgccataaatagaaagc

SEQ ID NO: 772040 - DNA, 120 bp, Artificial Sequence
  ENSG00000237515_35 (sequence is synthesized)
aaacataaaaataagtacaaaggaaacaagcagcgatgattaaattccagctggagtctgttgtctgtgagtctgaactaaagcctggggttctttctttctctctccatctctctgttt

SEQ ID NO: 772041 - DNA, 120 bp, Artificial Sequence
  ENSG00000237515_36 (sequence is synthesized)
ctgtttctctctctctcttaaaatgatatcatcaggtattaaataattgttaaaaataccagcacccaatgaagactttctctttgtactaataagatggaccaaaaagtaaatgaaagg

SEQ ID NO: 772042 - DNA, 120 bp, Artificial Sequence
  ENSG00000237515_37 (sequence is synthesized)
ggaatcatttcctatgcaagtcagtgttgaacaatgctgtagctatgtactgcctatgatcattgtgcatacactaggggtgcatagcccacacttcagaaaaccctgggttgacttatc

SEQ ID NO: 772043 - DNA, 120 bp, Artificial Sequence
  ENSG00000237515_38 (sequence is synthesized)
tgtgaggctctttccagctcaaagtttccataattcttatctcccttttacctcgtggttgctctttgcccccagtccacttcgtcccacccttatctcaactctgattaagagtctttc

SEQ ID NO: 772044 - DNA, 120 bp, Artificial Sequence
  ENSG00000237515_39 (sequence is synthesized)
ttggcctctaaatctgtagtattgtattccttctgcatgctccttctcctctgaataaacttcatcaattgaactgggctccttggggtctgcagttgtaattttggcagcaaaggtgca

SEQ ID NO: 772045 - DNA, 120 bp, Artificial Sequence
  ENSG00000237515_40 (sequence is synthesized)
gactggtcattaagatgtagccacaatgatggcccaagaaggacacgtactttccaagtagtcctgtctaggatggaaagctcaggaagtgcttcatagtttattatcttccagttggtt

SEQ ID NO: 772046 - DNA, 120 bp, Artificial Sequence
  ENSG00000237515_41 (sequence is synthesized)
tatcttccagttggttttgggagatgaactgaagagggaagtttggatagggaaggtctttttattcttttttttttaatgtatccatggagtatttattattattattattattattat

SEQ ID NO: 772047 - DNA, 120 bp, Artificial Sequence
  ENSG00000237515_42 (sequence is synthesized)
agatcccatttgtcaattttggcttcctcttgggagggtagacagacctcacaatatggaaagacgggacaacctatggaactatctgtgacttccatgtaccaagacaaggacgctata

SEQ ID NO: 772048 - DNA, 120 bp, Artificial Sequence
  ENSG00000237515_43 (sequence is synthesized)
atgtaccaagacaaggacgctatagctagggtagtgagacctagaagagagaaaccagaacaaagcagacaggctgtcctcttcctaattccatgccctgacatcagcccctattttttg

SEQ ID NO: 772049 - DNA, 120 bp, Artificial Sequence
  ENSG00000237515_44 (sequence is synthesized)
cctttagctgtcccccagtttccaacccaatgggaccagagtctgacttccctttgccctttcacagtgtctcagcctccatctgccttgggctccgcctggcctccccatctaactctt

SEQ ID NO: 772050 - DNA, 120 bp, Artificial Sequence
  ENSG00000237515_45 (sequence is synthesized)
cccagttttttgtgtaaatggagcatattttatgtgcgaatattttagtaaccgtatgttctgcaagtaaacctgtgttaatacttgtcaacaactgcagagtttatgatacgaataatt

SEQ ID NO: 772051 - DNA, 120 bp, Artificial Sequence
  ENSG00000237515_46 (sequence is synthesized)
cttcctacaatgaagaaaaaaacacatttgtttgttttctaagaatgtttatttgtaaacatatgtattcactatattaatatgaatttcttacctggcaataaaactgattatatgtga

SEQ ID NO: 772052 - DNA, 120 bp, Artificial Sequence
  ENSG00000237515_47 (sequence is synthesized)
attccatcctcgggcacctcttggtgggtcatcgtagctctatgctcttttcttctggtctgaaaacagctgcagcagctgcacaatttccaccttcagcacatcccgttcacagaagag

SEQ ID NO: 772053 - DNA, 120 bp, Artificial Sequence
  ENSG00000237515_48 (sequence is synthesized)
cgcaccggccccaaagggagcacatgtccaggctctatgacaatctgctgtttatggaggcacagatttctttccaagaggacgaacctgcccctggagagtggagtgtcggacttcaaa

SEQ ID NO: 772054 - DNA, 120 bp, Artificial Sequence
  ENSG00000237515_49 (sequence is synthesized)
cctggacagtctgagtgcacggatccttggccgctaggctgcactgcgtttgagtgcaaacctgcaggaattccagacttctcagatcacagagaagtacgcgatgccctgcaaacaaca

SEQ ID NO: 772055 - DNA, 120 bp, Artificial Sequence
  ENSG00000237515_50 (sequence is synthesized)
gctcatgcatcggggccagttcaagaagctaccgtaagatgaagtctaggaatgctttctatatcggccccggcaggcccagacgtcttggtggaggcgttggtgagaaatgaccttggg

SEQ ID NO: 772056 - DNA, 120 bp, Artificial Sequence
  ENSG00000237515_51 (sequence is synthesized)
gacagaagcacatatgtgaagctctctacacttgaagccagtagggaacacatgtcattattttgtccaccttcaaacagaattggaaatccaagtggcaaatggcagataagggtcctg

SEQ ID NO: 772057 - DNA, 120 bp, Artificial Sequence
  ENSG00000237515_52 (sequence is synthesized)
tgtgtttttaaaacatgcttcagaagaactggcaccccttggaaagaaatagcaacaaataatgataaatgcacctcctcctcttgccttttgccttccagtttctctcctgcctctcat

SEQ ID NO: 772058 - DNA, 120 bp, Artificial Sequence
  ENSG00000237515_53 (sequence is synthesized)
ctttctatgcatttgtggttatcctaaggctttgaccagcttcccaggctggagaagtccatgtgtgcatgcatctactgttggccacagaaaagtcttaatttatttttctttgcaggg

SEQ ID NO: 772059 - DNA, 120 bp, Artificial Sequence
  ENSG00000237515_54 (sequence is synthesized)
tatgttgacttctctttgggcactgagtccttgcattttaaaaatcaacttcattgaagtataatttacacaataaaatgcacacattgtaagtgtgtagtttgatgagcttggacaaat

SEQ ID NO: 772060 - DNA, 120 bp, Artificial Sequence
  ENSG00000237515_55 (sequence is synthesized)
gtctatacctgtgtaatcattactctagaaagctcactcatgcccattgcccttgcatttttgaaaaataattgatgcttcttgtgcaagaagaagtgctcaggaactctattcaagtgt

SEQ ID NO: 772061 - DNA, 120 bp, Artificial Sequence
  ENSG00000237515_56 (sequence is synthesized)
ttaaaagtcaacacatagattggacattgggatacctggaggctttgaagcaagataccgggactctgagttctgtttggaaatattggtgtcatatatttgtcattgtaattggaaaga

SEQ ID NO: 772062 - DNA, 120 bp, Artificial Sequence
  ENSG00000237515_57 (sequence is synthesized)
gctggtccctcctcatcaccagggtcccagctccaatgtcatcttctctgagaagccgtccctgaccaggcttagttgcttcccaccccagcctgacacactccagcccatcacccagtc

SEQ ID NO: 772063 - DNA, 120 bp, Artificial Sequence
  ENSG00000237515_58 (sequence is synthesized)
agtgttatttgcttcatttttacattatggtctaaaattaacttgctagtttactggtttactagtttattatctgtctccttccattatccctctccttccctccttcccttccccttc

SEQ ID NO: 772064 - DNA, 89 bp, Artificial Sequence
  ENSG00000237515_59 (sequence is synthesized)
cttccttccttcgagacacagtcgttgatcttgcctcactacaacccctgcctcctgggttttagcgattcttctgcctcagcctcccg

SEQ ID NO: 772065 - DNA, 90 bp, Artificial Sequence
  ENSG00000237515_60 (sequence is synthesized)
tattattcatagtaagacacacagggaccacaattgtctcttctactcagtagttggattctgagtgcctagttcagtatttggcaagta

SEQ ID NO: 772066 - DNA, 120 bp, Artificial Sequence
  ENSG00000237515_61 (sequence is synthesized)
tagttggattctgagtgcctagttcagtatttggcaagtaagagttctgcatttgatatcctggtttacctggcacaacaaagtatctccaaattcattcattcattctttcattcattc

SEQ ID NO: 772067 - DNA, 120 bp, Artificial Sequence
  ENSG00000237515_62 (sequence is synthesized)
gataggtatttactgaacatctaacttatgcccaacactgtgctgagagatatgagataaccatgaatagtacaaaagcaatccctgcccttgaagagcaaacagccaaatatcaggaga

SEQ ID NO: 772068 - DNA, 120 bp, Artificial Sequence
  ENSG00000237515_63 (sequence is synthesized)
caggtaacacacaaggaaatgtacaagaaagttgagccagcacttttataagtactggttctagtactagctttcataagaaagtactggttctagtactagctttcagtactctcttgt

SEQ ID NO: 772069 - DNA, 120 bp, Artificial Sequence
  ENSG00000237515_64 (sequence is synthesized)
gaaattttcaatattcagtcatttcaacctcaaaaatggcaacataattatgtttcaacataattgttgttttaaacaaacaattttgtttcaacataattctcctgaactgggtggaag

SEQ ID NO: 772070 - DNA, 120 bp, Artificial Sequence
  ENSG00000237515_65 (sequence is synthesized)
gctatcaagaaaaagcttagcttcttcttcaggtaactgcaagagacagggttctctagagaaacagaacaaatatacaaagagattcattataaggaattggaagtccaaaatctccag

SEQ ID NO: 772071 - DNA, 120 bp, Artificial Sequence
  ENSG00000237515_66 (sequence is synthesized)
agcctctgtacttgtacaagtctgaaggccgacaggcaggagaattctctctttttggggcaaaggtcagtgttttgttctatccaggctttcagatgattggttgaggctcactcacat

SEQ ID NO: 772072 - DNA, 120 bp, Artificial Sequence
  ENSG00000237515_67 (sequence is synthesized)
tagaagggcaatctgtcttactgccattagaatgcaacctgttttacttagcttactgatttcaatgttaatctatttcaagagcaccctcacagaaacacccagaataatgtttgatga

SEQ ID NO: 772073 - DNA, 120 bp, Artificial Sequence
  ENSG00000237515_68 (sequence is synthesized)
aatatctgggcaccctgtgacccagtcaagttgacacatgacactaaccatcacagtacgcttagggtcttgtcactcggagtgtggcctgtgaaccagcagcatttttatcttctggga

SEQ ID NO: 772074 - DNA, 120 bp, Artificial Sequence
  ENSG00000237515_69 (sequence is synthesized)
gcttgggcacgatctcaggccccacctcctgcttattgattcagaatctgcattttaacaagatccccaggtgatctggatgcaccgtaacatctgagaagcactcaaactatgtgccgc

SEQ ID NO: 772075 - DNA, 120 bp, Artificial Sequence
  ENSG00000237515_70 (sequence is synthesized)
aaacaaacgccaaattcttaggcatttgtgtggcttggagcacatagttggttctttctactgtctaattcattacattttttcagcacattcctgtctataaaatgtttttttgtatgc

SEQ ID NO: 772076 - DNA, 120 bp, Artificial Sequence
  ENSG00000237515_71 (sequence is synthesized)
accccaatatatgcacatttataagcatatgcatgaacccacgaacaatgattaggtacattatgaagcatacgtaaggacagaaatttcaaaccaagcttgagggtgaaataaatatta

SEQ ID NO: 772077 - DNA, 120 bp, Artificial Sequence
  ENSG00000237515_72 (sequence is synthesized)
tttgaaaacctgttgctaattgtgatgacttcatactatcattagttactatctcaatgcataatgtacagtgacgggtgaagtttatcattaataaaaaaaatctggattttaaccatt

SEQ ID NO: 772078 - DNA, 120 bp, Artificial Sequence
  ENSG00000237515_73 (sequence is synthesized)
ctcaccctctggccgcctcctcccgctggtgactgaggcggacttgagacacgtagcctgggagcccgtggccccgaaatcttcgggtttggggagagggtccatggcacccctcggatt

SEQ ID NO: 772079 - DNA, 120 bp, Artificial Sequence
  ENSG00000237521_0 (sequence is synthesized)
tgggtttgtcacaactgagaactattgctgagggtgtataatcctatgtgaaaacttaatttcttaattgcttgtatccaaaatatagacacagtgctagatgctggtttacttatgtcc

SEQ ID NO: 772080 - DNA, 120 bp, Artificial Sequence
  ENSG00000237521_1 (sequence is synthesized)
tggtttacttatgtcctattttccaattctctttttttttttcctcaaaaggtgtccgagctacacagagccacagaatctcacaggtgtctcagaattcctcctcctgggactctcaga

SEQ ID NO: 772081 - DNA, 120 bp, Artificial Sequence
  ENSG00000237521_2 (sequence is synthesized)
acggtccccaagatgattgtggacatgcaaactcacagcagagtcatctcctatgaaggctgcctgactcagatgtctttttttgtcctttttgcatgtatggatgacatgctcctgagt

SEQ ID NO: 772082 - DNA, 120 bp, Artificial Sequence
  ENSG00000237521_3 (sequence is synthesized)
gagtgtgatggcctatgaccggtttgtggccatctgtcaccccctgcactaccgaatcatcatgaacccacgcctctgtggcttcttaatcttgttgtctttttttattagtcttttgga

SEQ ID NO: 772083 - DNA, 120 bp, Artificial Sequence
  ENSG00000237521_4 (sequence is synthesized)
atcttgttgtctttttttattagtcttttggactcccagttgcacaatttgattatgttacagctcacctgcttcaaggatgtggacatttctaatttcttctgtgacccttctcaactc

SEQ ID NO: 772084 - DNA, 87 bp, Artificial Sequence
  ENSG00000237521_5 (sequence is synthesized)
gcagttgtttgcttattttatggaacagggcttgtagggtacctcagttcagctgtgttaccatcccccaggaagagtatggtggct

SEQ ID NO: 772085 - DNA, 120 bp, Artificial Sequence
  ENSG00000237521_6 (sequence is synthesized)
tttgcttattttatggaacagggcttgtagggtacctcagttcagctgtgttaccatcccccaggaagagtatggtggcttcagtgatgtacactgtggtcacccccatgctgaacccct

SEQ ID NO: 772086 - DNA, 120 bp, Artificial Sequence
  ENSG00000237521_7 (sequence is synthesized)
gtgcaggctgcatggcagaatcatcaaatctcatcatctccatcctttttgttatatgggatagaaatggcagcaaaatttaacacctaggcctgcaaattctgcctccttggtcacatt

SEQ ID NO: 772087 - DNA, 120 bp, Artificial Sequence
  ENSG00000237521_8 (sequence is synthesized)
attttggttgcttgatggctttcattcctctctgggtttcgtatgtgaatattgcttgctttgttttgtctttaattgcaatgggtgagtattctggtatcctttgttcatcatacacat

SEQ ID NO: 772088 - DNA, 120 bp, Artificial Sequence
  ENSG00000237521_9 (sequence is synthesized)
catgaatgattccaatatacctagacagcctcctttagtatctgtgcaatgaccttgatatccaggtgcaatcacaatcttttctgatagacttgaaatcctcacttaactttgtcaaga

SEQ ID NO: 772089 - DNA, 120 bp, Artificial Sequence
  ENSG00000237521_10 (sequence is synthesized)
ggtttttggaaactgcaactttaaaaaaaaagcgcagcaggtcctgaaataagttcattttgttcaatgttgtttagttttaattttggtgagaaatgaataaattggtttcatggttca

SEQ ID NO: 772090 - DNA, 120 bp, Artificial Sequence
  ENSG00000237521_11 (sequence is synthesized)
gagcttccagtccagtgggctccacacctgtcgtctgcatcaggaggctcatgtctgaccctgtcttcctgccagtcctgaggacggagcctgagcctccatcgtgcaccacacagggag

SEQ ID NO: 772091 - DNA, 120 bp, Artificial Sequence
  ENSG00000237521_12 (sequence is synthesized)
attttctgtggaggatgttaagtgaggacttatcgtacttcgtatttacctccctttctacagttcctgtgtaatttctgtccaaatcgcatctaggaaatcactttaggcagcttacgt

SEQ ID NO: 772092 - DNA, 120 bp, Artificial Sequence
  ENSG00000237524_0 (sequence is synthesized)
gaagatgctgcctctcctgatcatctgtctcctgcctgccattgaagggaagaactgcctccgctgctggccagaactgtctgccttgatagactatgacctgcagatcctctgggtgac

SEQ ID NO: 772093 - DNA, 120 bp, Artificial Sequence
  ENSG00000237524_1 (sequence is synthesized)
cccagggccacccacagaactttctcaaaatcgtgaccatttggaagaagaaacagccaaattcttcactcaagtacaccaagccattaaaacgttacgagatgataaaacagtacttct

SEQ ID NO: 772094 - DNA, 120 bp, Artificial Sequence
  ENSG00000237524_2 (sequence is synthesized)
ggaagagatctacacgcacaagaatctctttactgagaggctgaataagatatctgatgggctgaaggagaaggacatacagtccacactgaaggtcaccagctgtgctgactgcaggac

SEQ ID NO: 772095 - DNA, 120 bp, Artificial Sequence
  ENSG00000237524_3 (sequence is synthesized)
aatgaccccactttctgcccagccaggaaccggcggacctccctgtgggctgtgagtctcagcagtgctctactcctggccatagctggagatgtttcttttactggcaaaggaagaagg

SEQ ID NO: 772096 - DNA, 120 bp, Artificial Sequence
  ENSG00000237524_4 (sequence is synthesized)
aggcagtaaagcaggaacagggcagcccgcatgtcttccagaagtgaacagaggccgcagctaccaccgtcacaaagttcactcatctctgggtcccggtgaccccatccccccataccc

SEQ ID NO: 772097 - DNA, 120 bp, Artificial Sequence
  ENSG00000237524_5 (sequence is synthesized)
tccatcctgggtcctggggccccaaagctctgaggcctaggagactgcgctgtctcgtggtttgcctactcctacacctttgtaaagagtctcttcattaaaacccctcttcatagccta

SEQ ID NO: 772098 - DNA, 120 bp, Artificial Sequence
  ENSG00000237524_6 (sequence is synthesized)
ctgagaggctgaataagatatctgatgggctgaaggagaaggcctgcaatgagtcctgtgacatacagtccacactgaaggtcaccagctgtgctgactgcaggactcacttcctctcct

SEQ ID NO: 772099 - DNA, 120 bp, Artificial Sequence
  ENSG00000237524_7 (sequence is synthesized)
agaaggaggcagtaaaggtactgggaaaggagaccccgacccaattctagggctcccagagggaaaagctgggtgtgccctgggagtctcagggcctggaaccccagtgctgacctcctg

SEQ ID NO: 772100 - DNA, 120 bp, Artificial Sequence
  ENSG00000237524_8 (sequence is synthesized)
gaggctgaataagatatctgatgggctgaaggagaaggccaggaaccggcggacctccctgtgggctgtgagtctcagcagtgctctactcctggccatagctggaggtgggtgagtgac

SEQ ID NO: 772101 - DNA, 120 bp, Artificial Sequence
  ENSG00000237524_9 (sequence is synthesized)
ccccagggccttggggcttgggttgacaaaggcccaccctccaaggcattctcagaggcccatgtggccatgggtgggaggtcttgtgaaggtgggagatgaatgcagtctgtctccgtg

SEQ ID NO: 772102 - DNA, 120 bp, Artificial Sequence
  ENSG00000237524_10 (sequence is synthesized)
gatttcactctgcagccccctcgatcatccccaggagccccacccctctccatgaatgccttcccggctccatctcctacttgcaccccagaaccccttggctctgtctgcctccccagc

SEQ ID NO: 772103 - DNA, 120 bp, Artificial Sequence
  ENSG00000237524_11 (sequence is synthesized)
acctcagtttctctaccttctcaccctccctggcagcctgcaatgagtcctgtggtgagtatgcatggggactgggcctgggggagggatgaaaggcacctggcaccccctagcccctgt

SEQ ID NO: 772104 - DNA, 120 bp, Artificial Sequence
  ENSG00000237524_12 (sequence is synthesized)
ccctcccctcccatagacatacagtccacactgaaggtcaccagctgtgctgactgcaggactcacttcctctcctgcaatgaccccactttctgcccaggtcagtggccaccaccctgt

SEQ ID NO: 772105 - DNA, 120 bp, Artificial Sequence
  ENSG00000237541_0 (sequence is synthesized)
acaattgctctacagctcagagcagcaactgctgaggctgccttgggaagaagatgatcctaaacaaagctctgctgctgggggccctcgccctgactgccgtgatgagcccctgtggag

SEQ ID NO: 772106 - DNA, 120 bp, Artificial Sequence
  ENSG00000237541_1 (sequence is synthesized)
gtgaagacattgtggctgaccatgttgcctcctatggtgtgaacttctaccagtctcacggtccctctggccagtacacccatgaatttgatggagacgaggagttctatgtggacctgg

SEQ ID NO: 772107 - DNA, 120 bp, Artificial Sequence
  ENSG00000237541_2 (sequence is synthesized)
agacgaaagagactgtctggcagttgcctatgtttagcaaatttataagttttgacccgcagagtgcactgagaaatatggctgtgggaaaacacaccttggaattcatgatgagacagt

SEQ ID NO: 772108 - DNA, 120 bp, Artificial Sequence
  ENSG00000237541_3 (sequence is synthesized)
ccaactctaccgctgccaccaatgaggttcctgaggtcacagtgttttccaagtttcctgtgacgctgggtcagcccaacaccctcatctgtcttgtggacaacatctttcctcctgtgg

SEQ ID NO: 772109 - DNA, 120 bp, Artificial Sequence
  ENSG00000237541_4 (sequence is synthesized)
tcaacatcacctggctgagcaatgggcactcagtcacagaaggtgtttctgagaccagcttcctctccaagagtgatcattccttcttcaagatcagttacctcaccttcctcccttctg

SEQ ID NO: 772110 - DNA, 120 bp, Artificial Sequence
  ENSG00000237541_5 (sequence is synthesized)
ctgatgagatttatgactgcaaggtggagcactggggcctggacgagcctcttctgaaacactgggagcctgagattccagcccctatgtcagagctcacagagactttggtctgcgccc

SEQ ID NO: 772111 - DNA, 120 bp, Artificial Sequence
  ENSG00000237541_6 (sequence is synthesized)
tcatgggcattgtggtgggcactgtcttcatcatccaaggcctgcgttcagttggtgcttccagacaccaagggctcttatgaatcccatcctgaaaaggaaggtgcatcaccatctaca

SEQ ID NO: 772112 - DNA, 120 bp, Artificial Sequence
  ENSG00000237541_7 (sequence is synthesized)
ggagaagaagaatggacttgctaaatgacctagcactattctctggcctgatttatcatatcccttttctcctccaaatgtttcttctctcacctcttctctgggacttaaggtgctata

SEQ ID NO: 772113 - DNA, 120 bp, Artificial Sequence
  ENSG00000237541_8 (sequence is synthesized)
ttccctcagagctcacaaatgcctttcaattctttccctgacctcctttcctgaatttttttattttctcaaatgttacctactaagggatgcctgggtaagccactcagctacctaatt

SEQ ID NO: 772114 - DNA, 120 bp, Artificial Sequence
  ENSG00000237541_9 (sequence is synthesized)
cctcaatgacctttatctaaaatctccatggaagcaataaattcccttttgatgcctctattgaatttttcccatctttcatctcagggctgactgagagcataacttagaatgggcgac

SEQ ID NO: 772115 - DNA, 120 bp, Artificial Sequence
  ENSG00000237541_10 (sequence is synthesized)
tcttatgttttaggccaatttcatatcattccccagatcatatttcaagtccagtaacacaggagcaaccaagtacagtgtatcctgataatttgttgatttcttaactggtgttaatat

SEQ ID NO: 772116 - DNA, 120 bp, Artificial Sequence
  ENSG00000237541_11 (sequence is synthesized)
ttctttcttccttttgttcctacccttggccactgccagccacccctcaattcaggtaccaacgaaccctctgcccttggctcagaatggttatagcagaaatacaaaaaaaaaaaaaaa

SEQ ID NO: 772117 - DNA, 120 bp, Artificial Sequence
  ENSG00000237649_0 (sequence is synthesized)
ggaattcaaaagtggcgggtgtggcgcggggctggtagcggccggagccgtgcgagttctctaccctgcttcgcgagcgggcgagagaacgcgagtcccaggatccccggcacccagttc

SEQ ID NO: 772118 - DNA, 120 bp, Artificial Sequence
  ENSG00000237649_1 (sequence is synthesized)
tcttccactgcattcccccggcgcgtgtgggaccgaggtggacatggatccgcagaggtcccccctattggaagtaaaggggaacatagaactgaagagacctctgattaaggccccttc

SEQ ID NO: 772119 - DNA, 120 bp, Artificial Sequence
  ENSG00000237649_2 (sequence is synthesized)
ccagctgcctctctcaggaagcagactcaagaggaggcctgaccagatggaagatggcctggagcctgagaagaaacggacaagaggcctgggtgcaacgaccaaaattaccacatccca

SEQ ID NO: 772120 - DNA, 120 bp, Artificial Sequence
  ENSG00000237649_3 (sequence is synthesized)
cccaagagttccatccctcactacagtgccacagacacaaggccagaccacagctcaaaaagtttccaagaagacaggaccccggtgttccacagctattgccacagggttgaagaacca

SEQ ID NO: 772121 - DNA, 120 bp, Artificial Sequence
  ENSG00000237649_4 (sequence is synthesized)
gaagccagttcctgctgttcctgtccagaagtctggcacatcaggtgttcctcccatggcaggagggaagaaacccagcaaacgtccagcctgggacttaaagggtcagttatgtgacct

SEQ ID NO: 772122 - DNA, 120 bp, Artificial Sequence
  ENSG00000237649_5 (sequence is synthesized)
aaatgcagaactaaaacggtgccgtgagaggactcaaacgttggaccaagagaaccagcagcttcaggaccagctcagagatgcccagcagcaggtcaaggccctggggacagagcgcac

SEQ ID NO: 772123 - DNA, 120 bp, Artificial Sequence
  ENSG00000237649_6 (sequence is synthesized)
aacactggaggggcatttagccaaggtacaggcccaggctgagcagggccaacaggagctgaagaacttgcgtgcttgtgtcctggagctggaagagcggctgagcacgcaggagggctt

SEQ ID NO: 772124 - DNA, 120 bp, Artificial Sequence
  ENSG00000237649_7 (sequence is synthesized)
ggtgcaagagcttcagaaaaaacaggtggaattgcaggaagaacggaggggactgatgtcccaactagaggagaaggagaggaggctgcagacatcagaagcagccctgtcaagcagcca

SEQ ID NO: 772125 - DNA, 120 bp, Artificial Sequence
  ENSG00000237649_8 (sequence is synthesized)
agcagaggtggcatctctgcggcaggagactgtggcccaggcagccttactgactgagcgggaagaacgtcttcatgggctagaaatggagcgccggcgactgcacaaccagctgcagga

SEQ ID NO: 772126 - DNA, 120 bp, Artificial Sequence
  ENSG00000237649_9 (sequence is synthesized)
tcctccaacccgccttagcctctcccggtctgacgagcggcgtgggaccctgagtggggcaccagctcccccaactcgccatgatttttcctttgaccgggtattcccaccaggaagtgg

SEQ ID NO: 772127 - DNA, 120 bp, Artificial Sequence
  ENSG00000237649_10 (sequence is synthesized)
acaggatgaagtgtttgaagagattgccatgcttgtccagtcagccctggatggctatccagtatgcatctttgcctatggccagacaggcagtggcaagaccttcacaatggagggtgg

SEQ ID NO: 772128 - DNA, 120 bp, Artificial Sequence
  ENSG00000237649_11 (sequence is synthesized)
gcctgggggagacccccagttggaggggctgatccctcgggccctgcggcacctcttctctgtggctcaggagctgagtggtcagggctggacctacagctttgtagcaagctacgtaga

SEQ ID NO: 772129 - DNA, 120 bp, Artificial Sequence
  ENSG00000237649_12 (sequence is synthesized)
gatctacaatgagactgtccgggacctgctggccactggaacccggaagggtcaagggggcgagtgtgagattcgccgtgcagggccagggagtgaggagctcactgtcaccaatgctcg

SEQ ID NO: 772130 - DNA, 120 bp, Artificial Sequence
  ENSG00000237649_13 (sequence is synthesized)
atatgtccctgtctcctgtgagaaagaagtggacgccctgcttcatctggcccgccagaatcgggctgtggcccgcacagcccagaatgaacggtcatcacgcagccacagtgtattcca

SEQ ID NO: 772131 - DNA, 120 bp, Artificial Sequence
  ENSG00000237649_14 (sequence is synthesized)
gctacagatttctggggagcactccagccgaggcctgcagtgtggggcccccctcagtcttgtggacctggccgggagtgagcgacttgaccccggcttagccctcggccccggggagcg

SEQ ID NO: 772132 - DNA, 120 bp, Artificial Sequence
  ENSG00000237649_15 (sequence is synthesized)
ggaacgccttcgggaaacacaggccattaacagcagcctgtccacgctggggctggttatcatggccctgagcaacaaggagtcccacgtgccttaccggaacagcaaactgacctacct

SEQ ID NO: 772133 - DNA, 120 bp, Artificial Sequence
  ENSG00000237649_16 (sequence is synthesized)
gctgcagaactctctgggtggtagtgctaagatgctcatgtttgtgaacatttctccactggaagagaacgtctccgagtccctcaactctctacgctttgcctccaaggtgaaccagtg

SEQ ID NO: 772134 - DNA, 84 bp, Artificial Sequence
  ENSG00000237649_17 (sequence is synthesized)
ccctcaactctctacgctttgcctccaaggtgaaccagtgtgttattggtactgctcaggccaacaggaagtgaagacggatcc

SEQ ID NO: 772135 - DNA, 120 bp, Artificial Sequence
  ENSG00000237649_18 (sequence is synthesized)
aggggtgggagggttgctggagggtgctttattgggtggagggcaccatgtcccagggctatcaaataaagaatagtttggttttttttttaaataaaggttttattagcatttgcccaa

SEQ ID NO: 772136 - DNA, 120 bp, Artificial Sequence
  ENSG00000237649_19 (sequence is synthesized)
ggcccttccagtcacccgttgccttggcaatgtcatcaccaaccttttttggagacagacccagggggccgatcttgggggccagggcagaagtggcaccgacttcacctctggtgcacc

SEQ ID NO: 772137 - DNA, 120 bp, Artificial Sequence
  ENSG00000237649_20 (sequence is synthesized)
tgtgcagaaaggttttgcaggtatctgaggcactgctcacctggttccatttttaattattagcttttgagttaagttttttaaaaaacgggtgattaatttaacctgagaaagctgatt

SEQ ID NO: 772138 - DNA, 120 bp, Artificial Sequence
  ENSG00000237649_21 (sequence is synthesized)
tgatgtcatctatgatgtcatgagggtggtggccatcaacattacagcccatagactgggcagtccccggaatctctttaatggttccagagagttctctggctaaggatcggtgccgca

SEQ ID NO: 772139 - DNA, 120 bp, Artificial Sequence
  ENSG00000237649_22 (sequence is synthesized)
tctgtcgagcaatgttgacgatctcatcaaaagtgatattcccattgtgtttaatgtttttctgtttctttctgtctcttggtggtttcttgagggctttgatgatcggggcagaggcag

SEQ ID NO: 772140 - DNA, 120 bp, Artificial Sequence
  ENSG00000237651_0 (sequence is synthesized)
atgagtcttctagctaaacctatgagctttgaaaccacagcaatcactttcttcatcatccttctaatttgcctcatttgcatcctcctcttattggtggtttttttatataaatgtttc

SEQ ID NO: 772141 - DNA, 120 bp, Artificial Sequence
  ENSG00000237651_1 (sequence is synthesized)
caaggcaggaaaggtaaagagacaaagaaagtgccttgtacagatgcaaacggaggtgtagactgtgcagctgccaaagtggtgacaagcaatccagaggaccatgaaaggatcttaatg

SEQ ID NO: 772142 - DNA, 120 bp, Artificial Sequence
  ENSG00000237651_2 (sequence is synthesized)
caagtcatgaacttgaatgtgccgatgaggcctggcattcttgtccagagacagagtaaggaagtgttggccacacccttagaaaacagaagggacatggaggcagaagaggagaaccaa

SEQ ID NO: 772143 - DNA, 120 bp, Artificial Sequence
  ENSG00000237651_3 (sequence is synthesized)
agaggatgatggtttgcagaaaatacacacatctgtcactagaactccttcagttgttgaaagccaaaaaagacctttaaaaggagtgacattttctagggaggtaattgttgtggatct

SEQ ID NO: 772144 - DNA, 120 bp, Artificial Sequence
  ENSG00000237651_4 (sequence is synthesized)
tgggaatgaataccctacacctcgaagctatactcgagaacataaagagaggaaatgaagctcaaaaaagggtaagagtgaaagaaaatgtaacgtttgactaacgttgaaagactgagg

SEQ ID NO: 772145 - DNA, 120 bp, Artificial Sequence
  ENSG00000237651_5 (sequence is synthesized)
gtacaaaatcatgttgaaacaacaaaacaatggggaattaagcaaataaagatattattttacctttgtgcagaaaggagtgagccatgtgcaaaattctgtaagtaaaatacttagagc

SEQ ID NO: 772146 - DNA, 120 bp, Artificial Sequence
  ENSG00000237651_6 (sequence is synthesized)
ttgaatataattttttaaaaattcaaatctgagttcaagaaattgattgtattgcccttaaaactatctactcaaacactgttctggcatgtgaataaagtgatttttgtttgtacaaat

SEQ ID NO: 772147 - DNA, 120 bp, Artificial Sequence
  ENSG00000237651_7 (sequence is synthesized)
tcctctctcctctgggtcctgatagtttttggggtgagggaggtgagctgcgtgatcacacatgtcccagctcagtctcccctctggccacctcagcccccaccacagttatggagagaa

SEQ ID NO: 772148 - DNA, 120 bp, Artificial Sequence
  ENSG00000237651_8 (sequence is synthesized)
ttgacgtcgtccgagagtcttaaaatcctgctctggccggattccagactcgtgggggaaaggctggatttcaacagatcacatggatcaaggccttagggaggtggttggggattcacg

SEQ ID NO: 772149 - DNA, 120 bp, Artificial Sequence
  ENSG00000237651_9 (sequence is synthesized)
tatgccctggaccatctggagcccaagttgctgcagatcctgtcaccacgagtggacaccctctggccaccatagcaaagaagtctgcaggcaggagatggagtctcgctctgttgccta

SEQ ID NO: 772150 - DNA, 120 bp, Artificial Sequence
  ENSG00000237651_10 (sequence is synthesized)
gcacacagatgttagggttcgggcgagctatttggagcctgcgcagtcagatccgaggacatgttgacgtcgtccgagagtcttaaaatcctgctctggccggattccagactcgtgggg

SEQ ID NO: 772151 - DNA, 64 bp, Artificial Sequence
  ENSG00000237693_0 (sequence is synthesized)
ccttccatgctgtggaagctttgtttttttgcactttgcagtaaatcttgctgctgctcatatc

SEQ ID NO: 772152 - DNA, 120 bp, Artificial Sequence
  ENSG00000237693_1 (sequence is synthesized)
gaaggtctgcagcatcactcctgaaacctgtgaaacaacgaaccccccggggagaaacgaacaactccagactcgccgcctgaagagctgtaactctcacttcgaaggtctgcagcttcg

SEQ ID NO: 772153 - DNA, 70 bp, Artificial Sequence
  ENSG00000237693_2 (sequence is synthesized)
tgaagagctgtaactctcacttcgaaggtctgcagcttcgctcctgagtcagtgaaaccacgaacccacc

SEQ ID NO: 772154 - DNA, 120 bp, Artificial Sequence
  ENSG00000237693_3 (sequence is synthesized)
tggcttcattcttgaagtcagtgagacgaagaacccaccaattccggtaggagtaggaaatcacatcaccttcttttaatcagtctcaaatacctggccccttgtggaacctgcaagagc

SEQ ID NO: 772155 - DNA, 120 bp, Artificial Sequence
  ENSG00000237693_4 (sequence is synthesized)
gagccaggtttggcgaatgcaatgataagcaattgtctaatcactgccttgaaaaagagcagagcatttgagtatgctgtctcctcctctccctcacttcagttgggcccaacatgacag

SEQ ID NO: 772156 - DNA, 120 bp, Artificial Sequence
  ENSG00000237693_5 (sequence is synthesized)
tcttaatggaagctcgggggtcaaaggctggtggcttacttcacgtatattgcagcatttcagtactgctctgcacgtgtgctcccccgcctgatgagcttactccagtgcccacagata

SEQ ID NO: 772157 - DNA, 89 bp, Artificial Sequence
  ENSG00000237693_6 (sequence is synthesized)
cccctgcctcagcctcctgtatgcagctaatttttttgtattttagtagagaaggtttcacgatgttggccaggatggtctcaatctcc

SEQ ID NO: 772158 - DNA, 120 bp, Artificial Sequence
  ENSG00000237693_7 (sequence is synthesized)
tacaggcatgagccacggcgcctggccagcattggggtattttattgaagatggaagccatgaatgttgagaaagcctcagcagatgggaacttgccagaggtgatctctaacatcaagg

SEQ ID NO: 772159 - DNA, 120 bp, Artificial Sequence
  ENSG00000237693_8 (sequence is synthesized)
aaggagactctgaagatagtgtccaggacaccagttaacatcactatggcaggggactctggcaatgggatgtccaccttcatcagtgcccttcgaaacacaggacatgagggtaaggcc

SEQ ID NO: 772160 - DNA, 120 bp, Artificial Sequence
  ENSG00000237693_9 (sequence is synthesized)
tcacctcctactgagctggtaaaagctacccaaagatgtgcctcctatttctcttcccacttttcaaatgtggtgttgtgggacctgcctggcacagggtctgccaccacaaccctggag

SEQ ID NO: 772161 - DNA, 120 bp, Artificial Sequence
  ENSG00000237693_10 (sequence is synthesized)
aactacctgatggaaatgcagttcaaccggtatgacttcatcatggttgcatctgcacaattcagcatgaatcatgtgatgcttgccaaaaccgctgaggacatgggaaagaagttctac

SEQ ID NO: 772162 - DNA, 120 bp, Artificial Sequence
  ENSG00000237693_11 (sequence is synthesized)
attgtctggaccaagctagacatggacctcagcacaggtgccctcccagaagtgcagctactgcagatcagagaaaatgtcctggaaaatctccagaaggagcgggtatgtgaatactaa

SEQ ID NO: 772163 - DNA, 120 bp, Artificial Sequence
  ENSG00000237693_12 (sequence is synthesized)
cttcaagtaagcaatgggaattggatgttttatgtcctctggcgccatcttcagcagagaaatatataggtcacttttacttgtctggttttggtcttgaaatatgtactgaaacttgtg

SEQ ID NO: 772164 - DNA, 120 bp, Artificial Sequence
  ENSG00000237693_13 (sequence is synthesized)
aaggagcagacctatattaggatagagtaaaagagggaaagacaaaaacctcttgggcttttcaggagacttggttcattctctgcttttcaagccatctcatggccacatgcctgcttt

SEQ ID NO: 772165 - DNA, 120 bp, Artificial Sequence
  ENSG00000237693_14 (sequence is synthesized)
aagccctagaaatagcaaggcccagctcagctggcctgccatgagaaatacctcaagagtactccagagaattccacaaggcccagaaatattccttccagaagaaaactatacgtaaat

SEQ ID NO: 772166 - DNA, 120 bp, Artificial Sequence
  ENSG00000237693_15 (sequence is synthesized)
ctgctcaggatattcaacagctagccagtgcatatgacatatactgggtacttaagaaacgtttgttaaatgaatcatgattataaagaaaaaataaattaaaacttatgtttagttaaa

SEQ ID NO: 772167 - DNA, 120 bp, Artificial Sequence
  ENSG00000237700_0 (sequence is synthesized)
ttagttcttcctgaggtctgagcaccctccaaactgagtccagatctgagtttttcctcggagatttgtcagaatgagcctccaggccccatccagactgctggagctggcagggcagag

SEQ ID NO: 772168 - DNA, 120 bp, Artificial Sequence
  ENSG00000237700_1 (sequence is synthesized)
cctgctgaggaaccagttcttgaccatcttcaccctggatgagctgcccagggaggtcttccctctgatgttcatggaggccttcagcatgagacgttttgaggccctgaagctgatggt

SEQ ID NO: 772169 - DNA, 120 bp, Artificial Sequence
  ENSG00000237700_2 (sequence is synthesized)
gcaggcctggcccttcctccgcctccctctgggatccctgatgaagacacctcatctggagaccttgcaagctgtcctgaggggacttgatacactggtggcccagaaggttcgccccag

SEQ ID NO: 772170 - DNA, 120 bp, Artificial Sequence
  ENSG00000237700_3 (sequence is synthesized)
gaggtggaaacttcaagtgctggatttgcaggatgttgatgagaatttctggaccatatggtctggagccagggtcctctcctgctccccagaggccatgagtaagaggcagacagtgga

SEQ ID NO: 772171 - DNA, 120 bp, Artificial Sequence
  ENSG00000237700_4 (sequence is synthesized)
ggactgtccaaggatgggagagcaccagcccttgaaggtgttcatagacctctgcctaaaggaaagtacactggatgaatgcctgagctacctttttgggtggatccactacagaagagg

SEQ ID NO: 772172 - DNA, 120 bp, Artificial Sequence
  ENSG00000237700_5 (sequence is synthesized)
attactcaatgcccacttcaagtttcagaaatctattggaaaggatatacccagacagtatccaggagttggaagtctggaaaaagtgctctctcaataaaacgggaaagtttgcccctt

SEQ ID NO: 772173 - DNA, 120 bp, Artificial Sequence; identical to SEQ ID NO: 685475
  ENSG00000237700_6 (sequence is synthesized)

SEQ ID NO: 772174 - DNA, 120 bp, Artificial Sequence
  ENSG00000237700_7 (sequence is synthesized)
gcacctggagcacctgctcaggtacctcaagaaccccttgggggcctttatattcagtgatgcttacctagctgatcgggacatggagtgtctgtctcagtacccaagcctcagtcagct

SEQ ID NO: 772175 - DNA, 120 bp, Artificial Sequence
  ENSG00000237700_8 (sequence is synthesized)
aaaggagctgcgtctgattcatatcctaatgtggaccaccaatcttcagccccttggagctctgctagagaaagttgctgctactctcaagaccctcgtcttaaaggactgtcggatcca

SEQ ID NO: 772176 - DNA, 120 bp, Artificial Sequence; identical to SEQ ID NO: 685478
  ENSG00000237700_9 (sequence is synthesized)

SEQ ID NO: 772177 - DNA, 120 bp, Artificial Sequence; identical to SEQ ID NO: 685479
  ENSG00000237700_10 (sequence is synthesized)

SEQ ID NO: 772178 - DNA, 120 bp, Artificial Sequence
  ENSG00000237700_11 (sequence is synthesized)
ggaagtcaggcagcccaagaggatcttctttggtcccgtcccttgccctacctgtggctcatggccatctgagaaagtggacttccatctttgctcctagggaaggcctggttcgtggga

SEQ ID NO: 772179 - DNA, 120 bp, Artificial Sequence
  ENSG00000237702_0 (sequence is synthesized)
agaccagaatcctgccctgggccttgcctggtctgcctcactctgccatgggctgcaggctcctctgctgtgtggtcttctgcctcctccaagcaggtcccttggacacagctgtttccc

SEQ ID NO: 772180 - DNA, 120 bp, Artificial Sequence
  ENSG00000237702_1 (sequence is synthesized)
aaacgacaagtccattaaatgtgaacaaaatctgggccatgatactatgtattggtataaacaggactctaagaaatttctgaagataatgtttagctacaataataaggagctcattat

SEQ ID NO: 772181 - DNA, 120 bp, Artificial Sequence
  ENSG00000237702_2 (sequence is synthesized)
aaatgaaacagttccaaatcgcttctcacctaaatctccagacaaagctcacttaaatcttcacatcaattccctggagcttggtgactctgctgtgtatttctgtgccagcagccaaga

SEQ ID NO: 772182 - DNA, 120 bp, Artificial Sequence
  ENSG00000237763_0 (sequence is synthesized)
gatttatctagaggctgggaagggctcctgaaccagttgtttccgtcttgtcggtctgtcagggttggaaagtccaagccataggacccagtttcctttcttagcttacgttatctacca

SEQ ID NO: 772183 - DNA, 120 bp, Artificial Sequence
  ENSG00000237763_1 (sequence is synthesized)
gagcaccgtgggctgttacttgccttgagttggaagcggttcgcatttataccggaatataaatagtttctggaaaggacactgacaacttcaaagcaaaatgaagctcttttggttgct

SEQ ID NO: 772184 - DNA, 120 bp, Artificial Sequence
  ENSG00000237763_2 (sequence is synthesized)
tttcaccattgggttctgctgggctcagtattcctcaaatacacaacaaggacgaacatctattgttcatctgtttgaatggcgatgggttgatattgctcttgaatgtgagcgatattt

SEQ ID NO: 772185 - DNA, 120 bp, Artificial Sequence
  ENSG00000237763_3 (sequence is synthesized)
agctcccaagggatttggaggggttcaggtctctccaccaaatgaaaatgttgccattcacaaccctttcagaccttggtgggaaagataccaaccagttagctataaattatgcacaag

SEQ ID NO: 772186 - DNA, 120 bp, Artificial Sequence
  ENSG00000237763_4 (sequence is synthesized)
atctggaaatgaagatgaatttagaaacatggtgactagatgcaacaatgttggggttcgtatttatgtggatgctgtaattaatcatatgtgtggtaatgctgtgagtgcaggaacaag

SEQ ID NO: 772187 - DNA, 120 bp, Artificial Sequence
  ENSG00000237763_5 (sequence is synthesized)
cagtacctgtggaagttacttcaaccctggaagtagggactttccagcagtcccatattctggatgggattttaatgatggtaaatgtaaaactggaagtggagatatcgagaactataa

SEQ ID NO: 772188 - DNA, 120 bp, Artificial Sequence
  ENSG00000237763_6 (sequence is synthesized)
tgatgctactcaggtcagagattgtcgtctgtctggtcttctcgatcttgcactggggaaggattatgtgcgttctaagattgccgaatatatgaaccatctcattgacattggtgttgc

SEQ ID NO: 772189 - DNA, 120 bp, Artificial Sequence
  ENSG00000237763_7 (sequence is synthesized)
tcatttaccaggaggtaattgatctgggtggtgagccaattaaaagcagtgactactttggtaatggccgggtgacagaattcaagtatggtgcaaaactcggcacagttattcgcaagt

SEQ ID NO: 772190 - DNA, 120 bp, Artificial Sequence
  ENSG00000237763_8 (sequence is synthesized)
ggaatggagagaagatgtcttacttaaagaactggggagaaggttggggtttcatgccttctgacagagcgcttgtctttgtggataaccatgacaatcaacgaggacatggcgctggag

SEQ ID NO: 772191 - DNA, 120 bp, Artificial Sequence
  ENSG00000237763_9 (sequence is synthesized)
gagcctctatacttaccttctgggatgctaggctgtacaaaatggcagttggatttatgcttgctcatccttatggatttacacgagtaatgtcaagctaccgttggccaagatattttg

SEQ ID NO: 772192 - DNA, 120 bp, Artificial Sequence
  ENSG00000237763_10 (sequence is synthesized)
aaaatggaaaagatgttaatgattgggttgggccaccaaatgataatggagtaactaaagaagttactattaatccagacactacttgtggcaatgactgggtctgtgaacatcgatggc

SEQ ID NO: 772193 - DNA, 120 bp, Artificial Sequence
  ENSG00000237763_11 (sequence is synthesized)
gccaaataaggaacatggttaatttccgcaatgtagtggatggccagccttttacaaactggtatgataatgggagcaaccaagtggcttttgggagaggaaacagaggattcattgttt

SEQ ID NO: 772194 - DNA, 120 bp, Artificial Sequence
  ENSG00000237763_12 (sequence is synthesized)
tcaacaatgatgactggacattttctttaactttgcaaactggtcttcctgctggcacatactgtgatgtcatttctggagataaaattaatggcaactgcacaggcattaaaatctacg

SEQ ID NO: 772195 - DNA, 120 bp, Artificial Sequence
  ENSG00000237763_13 (sequence is synthesized)
tttctgatgatggcaaagctcatttttctattagtaactctgctgaagatccatttattgcaattcatgctgaatctaaattgtaaaatttaaaattaaatgcaaatccgcaaagcaata

SEQ ID NO: 772196 - DNA, 70 bp, Artificial Sequence; identical to SEQ ID NO: 602211
  ENSG00000237763_14 (sequence is synthesized)

SEQ ID NO: 772197 - DNA, 120 bp, Artificial Sequence
  ENSG00000237763_15 (sequence is synthesized)
gggtttaggccaaccaggcccaggcctggttttgtgcctttgattttgcttccttgttgtttttactgaatagaaaacaatataaaacaagaggacagggtctttctctcttctcaatat

SEQ ID NO: 772198 - DNA, 120 bp, Artificial Sequence
  ENSG00000237763_16 (sequence is synthesized)
cagcactggattgtagaacttgttgctgattttggcctggcattcaagttaactcttccccttggtatctgtacatacctttgatgtcagtgtttagtacacgtggcttggtcacttcat

SEQ ID NO: 772199 - DNA, 120 bp, Artificial Sequence
  ENSG00000237765_0 (sequence is synthesized)
agaggcgcagctctgctggagagacctgaggcttgcagcgctgggcccggccgggtcgctgcggctgggctggaggtcaaggatgcattccaggaaagttctataaaaatataccatcaa

SEQ ID NO: 772200 - DNA, 120 bp, Artificial Sequence
  ENSG00000237765_1 (sequence is synthesized)
ctccaacctgatatttgacctagccatggaaaacctcattggctcctcactggatcagaccataaaaatgatccaggaatgaaaatctaagataaattcccaccacttcaagatgttctt

SEQ ID NO: 772201 - DNA, 120 bp, Artificial Sequence
  ENSG00000237765_2 (sequence is synthesized)
atacaagtcaacagtctagcagatcagccagtctctttcatcatcaagcagacatactcaaggtaccaacacagcaaaggcacaaaatgtctctatatcagtatttttcatggtatatgt

SEQ ID NO: 772202 - DNA, 120 bp, Artificial Sequence
  ENSG00000237765_3 (sequence is synthesized)
gagacccattagtgaggcatgaaatcaattctgtgagtcacaatgaacatttgtctaaaaaacaaaataaaatgtaaaataccaaagtgttttgcatgaatcctttgcctgaattgtgca

SEQ ID NO: 772203 - DNA, 120 bp, Artificial Sequence
  ENSG00000237765_4 (sequence is synthesized)
cattgcaaggaatgctgaggtcaatttcaatatgcgagaggggtatttgatggaggagatatgatgaatagaatgtatattggctaagaaatggttttcagtcattgattcctgggtgtc

SEQ ID NO: 772204 - DNA, 120 bp, Artificial Sequence
  ENSG00000237765_5 (sequence is synthesized)
ttgcttgattttcataatagcacggttaatgttctatagtcaagttttatattacaattacttgcaactagttgtgaagtctgaaatattcgattcaattgcaaactttgagtgtagttt

SEQ ID NO: 772205 - DNA, 120 bp, Artificial Sequence
  ENSG00000237765_6 (sequence is synthesized)
ttgaaaagatgttatttagactgtatatttttttcttcttttttgagttagtgccaattataacattttaatcaaactggaacaaattgctattaaaatggatcatttctttattaaaag

SEQ ID NO: 772206 - DNA, 120 bp, Artificial Sequence
  ENSG00000237765_7 (sequence is synthesized)
aaagaggaatagtgaagtgaaatatacagaagcatgttcaagttcatctgttgaatctggaattgtgaatagtgacaatattgagaaaaatactgactccaatctgcaaacttcaacttc

SEQ ID NO: 772207 - DNA, 120 bp, Artificial Sequence
  ENSG00000237765_8 (sequence is synthesized)
atttgagccacatttcaaaaagaaaaaagtaagtgcaagacgttataatgaagattacttaaaatatggctttatcaaatgtgaaaaaccctttgaaaatgacagacctcagtgtgttat

SEQ ID NO: 772208 - DNA, 120 bp, Artificial Sequence
  ENSG00000237765_9 (sequence is synthesized)
ttgtaataatattcttgcgaatgaaagcttaaaaccttcgaaattaaaaaggcacttagaaactcagcatgctgaacttattgataagcctcttgaatattttcaaagaaagaaaaaaga

SEQ ID NO: 772209 - DNA, 120 bp, Artificial Sequence
  ENSG00000237765_10 (sequence is synthesized)
cataaagttatcaacacaatttcttagttgttctactgctgttagtgagaaagccttattatcatcatatttagttgcatatcgtgtggcaaaagagaaaatagctaacacagctgctga

SEQ ID NO: 772210 - DNA, 120 bp, Artificial Sequence
  ENSG00000237765_11 (sequence is synthesized)
aaaaattattcttccagcatgtttggatatggtgcgtacaatatttgatgataaatcagctgataaattaaaaactatacctaatgataacacagtatctcttcgaatttgtactattgc

SEQ ID NO: 772211 - DNA, 120 bp, Artificial Sequence
  ENSG00000237765_12 (sequence is synthesized)
agaacatttagaaacaatgcttattactcgtttacagtctggtatagattttgcaatccagcttgatgaaagcactgatattggaagctgcacaacacttttagtttatgtcagatatgc

SEQ ID NO: 772212 - DNA, 120 bp, Artificial Sequence
  ENSG00000237765_13 (sequence is synthesized)
gtggcaagatgattttttggaggattttttgtgttttttaaatttaacctcacacctaagtggattagatatttttacagaattagaaaggcgcatagttggccaatataaattaaactg

SEQ ID NO: 772213 - DNA, 120 bp, Artificial Sequence
  ENSG00000237765_14 (sequence is synthesized)
gaaaaactgtaaaggaattacaagtgatggcacagcaaccatgactggaaaacatagcagagtaattaaaaaattactagaagttactaataatggtgctgtgtggaatcattgttttat

SEQ ID NO: 772214 - DNA, 120 bp, Artificial Sequence
  ENSG00000237765_15 (sequence is synthesized)
acatcgtgaaggtttagcatccagagaaattccacagaatctcatggaggtattgaaaaatgcagtgaaagttgttaattttattaaaggaagctcattgaatagccggcttcttgaaac

SEQ ID NO: 772215 - DNA, 120 bp, Artificial Sequence
  ENSG00000237765_16 (sequence is synthesized)
attttgttcagagattggaactaatcatacccacttactatatcataccaaaattcgttggttgtctcaagggaaaatactaagcagggtttatgagctcaggaatgagattcacttttt

SEQ ID NO: 772216 - DNA, 120 bp, Artificial Sequence
  ENSG00000237765_17 (sequence is synthesized)
cattcttaatgaactgagtttaaaactacaggggaaaaacagtgatgtattccaacatgttgaacgtatccagggatttcgaaagacattattgttatggcaagtaagacttaaaagtaa

SEQ ID NO: 772217 - DNA, 120 bp, Artificial Sequence
  ENSG00000237765_18 (sequence is synthesized)
tcgtcctagctattacatgtttccaagatttttgcagcatattgaagagaatattattaatgaaaacattttgaaagaaataaaattagagatattgttgcatctcacttctctgtctca

SEQ ID NO: 772218 - DNA, 120 bp, Artificial Sequence
  ENSG00000237765_19 (sequence is synthesized)
aacttttaaccatttctttccagaagaaaaatttgaaacattaagggaaaacagttgggtaaaagatccatttgcttttcgacaccctgaatcaataattgagctaaacttggtgcctga

SEQ ID NO: 772219 - DNA, 120 bp, Artificial Sequence
  ENSG00000237765_20 (sequence is synthesized)
agaagagaatgaattattgcagcttagttcttcatatacattgaagaatgattatgaaaccttaagtttatcagcattttggatgaaggtaaaggaagactttccattgttaagtagaaa

SEQ ID NO: 772220 - DNA, 120 bp, Artificial Sequence
  ENSG00000237765_21 (sequence is synthesized)
gagtgtcctgctattgctaccattcacaacaactagtttgtgtgaactagggttttccatcttaacgcagttaaaaacaaaggaaagaaatgggctgaattgtgcagcagttatgcgggt

SEQ ID NO: 772221 - DNA, 120 bp, Artificial Sequence
  ENSG00000237765_22 (sequence is synthesized)
agcattatcttcctgtgttccagactggaatgaacttatgaacaggcaagcacacccatcatagtaaataaaaatcttacctagcttttgtctttgtatttcttattttgtagtattttt

SEQ ID NO: 772222 - DNA, 120 bp, Artificial Sequence
  ENSG00000237765_23 (sequence is synthesized)
tggtactataatactgtgatacttttgttatgttttaatttttgttatatttaataaaattattttatgttcattgaacaaaaatttaatgaatttctgttagaggccaggaactattct

SEQ ID NO: 772223 - DNA, 120 bp, Artificial Sequence
  ENSG00000237765_24 (sequence is synthesized)
ggccaggaactattctagagacatttgggatacaaaagtgaacaaaacaggtaattccctagtagagtttatatcctggcaaggagaaattgacaataaacctaataaataaggtttata

SEQ ID NO: 772224 - DNA, 120 bp, Artificial Sequence
  ENSG00000237765_25 (sequence is synthesized)
atatttagaagctattaagtgctatggaaagagtagtaagaaggaaggtcagggaagtactggggaaccaaaccatgaagggttctgtagaccattattgggcctctggcttttgtcagt

SEQ ID NO: 772225 - DNA, 120 bp, Artificial Sequence
  ENSG00000237765_26 (sequence is synthesized)
ggactagagaacagttgaagggtttaagcgaaggagagaaatgatctgagctaggttttaaaagacactctggtcactattttaaattcttagggtaagtctgaattaaatgttactttc

SEQ ID NO: 772226 - DNA, 120 bp, Artificial Sequence
  ENSG00000237765_27 (sequence is synthesized)
ccctcactgggcatggtggctcagacctgtaatccccgcactttggcaggccatggcagaaggctctgttgagcccaggagttcaagaccatcctgggcaacatagtgagaccttatttc

SEQ ID NO: 772227 - DNA, 80 bp, Artificial Sequence
  ENSG00000237765_28 (sequence is synthesized)
ggtcgcttgacctcaggagtttgaagttgcagtcatctatgattgcaccactgcagtccagcctgagcaacagagtgaaa

SEQ ID NO: 772228 - DNA, 120 bp, Artificial Sequence
  ENSG00000237765_29 (sequence is synthesized)
gattgcaccactgcagtccagcctgagcaacagagtgaaaccctgtctcgagaaaattaaatgttacttccctaaaaaaaccttttctaaccaccctagggtaaatcctccattattcct

SEQ ID NO: 772229 - DNA, 120 bp, Artificial Sequence
  ENSG00000237765_30 (sequence is synthesized)
ttatttctttgttttccttgtagtatataatttgtaataattttgattactgattgtcattctgccaccctggagtatataatttttaattatctgattactgttattcttccatagtag

SEQ ID NO: 772230 - DNA, 120 bp, Artificial Sequence
  ENSG00000237765_31 (sequence is synthesized)
gggaggtgatatccatttgcctgatacatagtatgtgttcaatacacatttgctaaagaataaatgaatcaataatacctaacatctctaatttgcagtcattcccaagagtaattatta

SEQ ID NO: 772231 - DNA, 120 bp, Artificial Sequence
  ENSG00000237765_32 (sequence is synthesized)
aatatgtggcaaatttctttgcctttttacttttaaaaatctaattttgacataactgctgtaaccatccagaaacggcattgatgttgcttcacgttgctgatgcttaagcaatgtata

SEQ ID NO: 772232 - DNA, 120 bp, Artificial Sequence
  ENSG00000237765_33 (sequence is synthesized)
ttgtgtaatatacaatgtagtcttcaaactaatttcaacttctgcctttctgtgtactcccttatcccactgggtgatattatttggcatggtcattgtcattaaaatcatacaggatag

SEQ ID NO: 772233 - DNA, 120 bp, Artificial Sequence
  ENSG00000237765_34 (sequence is synthesized)
taattcctttccatctgctaccatgcctagccttatttaatttttcagattttctgttctattgaaggtaattgattttttctttttttttaatgcttgaaataaagtgttgaaaaacaa

SEQ ID NO: 772234 - DNA, 120 bp, Artificial Sequence
  ENSG00000237765_35 (sequence is synthesized)
gccgggtcgctgcggctgggctggaggtgaggcgaaagaagggcatcctctgatgggagtggaccggagtccgctaaagcgaagcattccagggtcaaggatgcattccaggaaagttct

SEQ ID NO: 772235 - DNA, 120 bp, Artificial Sequence
  ENSG00000237765_36 (sequence is synthesized)
ccgggtcgctgcggctgggctggagccaaggttaactatttgtaacatgtcatctttcaaggaagcatctaaccaagattaagtcaaaggcatctaccaggtcctgaattctctcccaga

SEQ ID NO: 772236 - DNA, 120 bp, Artificial Sequence
  ENSG00000237765_37 (sequence is synthesized)
gagcagaggcgcagctctgctggagagacctgaggcttgcagcgctgggcccggccgggtcgctgcggctgggctggaggaagcatctaaccaagattaagtcaaaggcatctaccaggt

SEQ ID NO: 772237 - DNA, 120 bp, Artificial Sequence
  ENSG00000237765_38 (sequence is synthesized)
gtagggaagtggaaaagtggagcctgcaccgcccgctcccggcacccccggacaccgccccggtctcacgcatgcgcagagggccgatccagttcttttcggctggaatggggaatttgt

SEQ ID NO: 772238 - DNA, 120 bp, Artificial Sequence
  ENSG00000237765_39 (sequence is synthesized)
agaaagagatctagatgcatttgcctttagcagtgtagttctgaatacattgatgaccacccactgtgctgggacatgcaagaggtcaaggatgcattccaggaaagttctataaaaata

SEQ ID NO: 772239 - DNA, 120 bp, Artificial Sequence
  ENSG00000237988_0 (sequence is synthesized)
agagcactcatcagcatgcttcctcctctctaactgtgtcctttagatccaggagggatatttgctaccaccaccagctaatgctgatttgctaccagcacaaggcccaggtccttgtct

SEQ ID NO: 772240 - DNA, 120 bp, Artificial Sequence
  ENSG00000237988_1 (sequence is synthesized)
ggtctgtaccccattacaaggttctccaggaacagacatcaccacctctgcctagatcctgaaatttcacaaatgtaggttctttcttacccgttctttttattcctctatttacaagca

SEQ ID NO: 772241 - DNA, 120 bp, Artificial Sequence
  ENSG00000237988_2 (sequence is synthesized)
caatgacacccacccctcgtcttcttcctgaaatacctggctctgatcccaggcatccattccagaaatcaacacagctatgcaattgcatcttttattaaatactcccaactccatttc

SEQ ID NO: 772242 - DNA, 120 bp, Artificial Sequence
  ENSG00000237988_3 (sequence is synthesized)
aaatccagagaatccagagcaggagcaagagaccaacctatcatctggaaactcaaggtgtaaacattagtgccaaagattagtcatgaaggccaactacagcgcagaggagcgctttct

SEQ ID NO: 772243 - DNA, 120 bp, Artificial Sequence
  ENSG00000237988_4 (sequence is synthesized)
cctgctgggtttctccgactggccttccctgcagccggtcctcttcgcccttgtcctcctgtgctacctcctgaccttgacgggcaactcggcgctggtgctgctggcggtgcgcgaccc

SEQ ID NO: 772244 - DNA, 120 bp, Artificial Sequence
  ENSG00000237988_5 (sequence is synthesized)
gcgcctgcacacgcccatgtactacttcctctgccacctggccttggtagacgcgggcttcactactagcgtggtgccgccgctgctggccaacctgcgcggaccagcgctctggctgcc

SEQ ID NO: 772245 - DNA, 120 bp, Artificial Sequence
  ENSG00000237988_6 (sequence is synthesized)
gcgcagccactgcacggcccagctgtgcgcatcgctggctctgggttccgccgaatgcgtcctcctggcggtgatggctctggaccgcgcggccgcagtgtgccgcccgctgcgctatgc

SEQ ID NO: 772246 - DNA, 120 bp, Artificial Sequence
  ENSG00000237988_7 (sequence is synthesized)
ggggctcgtctccccgcgcctatgtcgcacgctggccagcgcctcctggctaagcggcctcaccaactcggttgcgcaaaccgcgctcctggctgagcggccgctgtgcgcgccccgcct

SEQ ID NO: 772247 - DNA, 120 bp, Artificial Sequence
  ENSG00000237988_8 (sequence is synthesized)
gctggaccacttcatctgtgagctgccggcgttgctcaagctggcctgcggaggcgacggagacactaccgagaaccagatgttcgccgcccgcgtggtcatcctgctgctgccgtttgc

SEQ ID NO: 772248 - DNA, 120 bp, Artificial Sequence
  ENSG00000237988_9 (sequence is synthesized)
cgtcatcctggcctcctacggtgccgtggcccgagctgtctgttgcatgcggttcagcggaggccggaggagggcggtgggcacgtgtgggtcccacctgacagccgtctgcctgttcta

SEQ ID NO: 772249 - DNA, 120 bp, Artificial Sequence
  ENSG00000237988_10 (sequence is synthesized)
cggctcggccatctacacctacctgcagcccgcgcagcgctacaaccaggcacggggcaagttcgtatcgctcttctacaccgtggtcacacctgctctcaacccgctcatctacaccct

SEQ ID NO: 772250 - DNA, 120 bp, Artificial Sequence
  ENSG00000237988_11 (sequence is synthesized)
caggaataagaaagtgaagggggcagcgaggaggctgctgcggagtctggggagaggccaggctgggcagtgagtagttggggaggggagaaagtattaagccagaacccaaggatggaa

SEQ ID NO: 772251 - DNA, 120 bp, Artificial Sequence
  ENSG00000237988_12 (sequence is synthesized)
ataccccttagtgagtcagtttagacttcaggctgttcatttttgtatgataatctgcaagatttgtcctaaggagtccaatgggggatatgttttcctcccgtgaggaaatgtttagtt

SEQ ID NO: 772252 - DNA, 120 bp, Artificial Sequence
  ENSG00000237988_13 (sequence is synthesized)
cttgagggaaaatccctaaatcctctatatactcaggtttagggaaggaaaacctacccctcacaactccacgcgcagggaaaatgatggacgtgatgctcgcctttagcttcctcccta

SEQ ID NO: 772253 - DNA, 120 bp, Artificial Sequence
  ENSG00000237988_14 (sequence is synthesized)
tctgatggaagaccatggaagacctcttggtctctgcaatcagaagtctcaagttgacaagaaaatcatagtccctaccctgcaggagagggtacatccagaaaaagcgaccatggactc

SEQ ID NO: 772254 - DNA, 120 bp, Artificial Sequence
  ENSG00000237988_15 (sequence is synthesized)
tattctcagaaatcagtccaacttagtgcagacctggccagatgaccagtgccctccccggggcatttcacccataaatgtgatgaggaaagcccataaatggtggtgaattttgctgag

SEQ ID NO: 772255 - DNA, 120 bp, Artificial Sequence
  ENSG00000237988_16 (sequence is synthesized)
tggggttaagactggaaacccccctgcaggagttggttcttgagcaagttttaaagaaacaaggaactaggatgagtgtggaagaaggcgggcacgtctcagcccgtgaaaaaaactcac

SEQ ID NO: 772256 - DNA, 120 bp, Artificial Sequence
  ENSG00000237988_17 (sequence is synthesized)
aggtgatcagtagtgagtcatgagagagagagcaagagagagagtcagagagaggagtaaatggagggaggaagatggaggaagggactcaagttctcaagacaggaacagggatctcct

SEQ ID NO: 772257 - DNA, 120 bp, Artificial Sequence
  ENSG00000237988_18 (sequence is synthesized)
catgaaaaaaagaagagaggaaaatgctcaatcagcagaacctgagcagaatattgaggtcaacccagaagccagctcctcacccaccctcacccagactggcgccctcatcctggagaa

SEQ ID NO: 772258 - DNA, 120 bp, Artificial Sequence
  ENSG00000237988_19 (sequence is synthesized)
gacctgctagaccctaaggcaggtaggagagagggtggtccacagtcccccagctttagaaagtttgttcgctcccaatgtccatctacccctaggaatccccactagttaaacagaatt

SEQ ID NO: 772259 - DNA, 120 bp, Artificial Sequence
  ENSG00000237988_20 (sequence is synthesized)
ttgcccaccatcatccccagaaataataactattttagttgggtgtgagacatagagaataaaagggggcatggtgccagacttcatttcatacaaatagctttaaaggagaagaggggg

SEQ ID NO: 772260 - DNA, 120 bp, Artificial Sequence
  ENSG00000237988_21 (sequence is synthesized)
gaaggagtttaatttagtttctaaaatgtttagtaatttgattgtgatcatgtcagagcaactaattcattttataaaatatcatttcactatgctctataagtagaaattcaatttggt

SEQ ID NO: 772261 - DNA, 120 bp, Artificial Sequence
  ENSG00000237988_22 (sequence is synthesized)
tcaaccattattgagtgatataaataaagcactggacttaacaaagacagaaatacagaaatcagtagaacatggatcccaacctaaaacttactctcttgtcataaaggaaaggagata

SEQ ID NO: 772262 - DNA, 120 bp, Artificial Sequence
  ENSG00000237988_23 (sequence is synthesized)
ggagtttttgcataaataacaaggtatcaagacagaattaaattccaagctggctttgaatgctctattttgccttaaaaatttatttactagtctcagtaatacattagtaaaaatcat

SEQ ID NO: 772263 - DNA, 120 bp, Artificial Sequence
  ENSG00000237988_24 (sequence is synthesized)
gtcacttaattaattgtgttagaatcaaagaaacatagagttgggcaatatacttcatcctacccatcccacccaaatcttactctactcatctcattctcattaattttgggaaatcat

SEQ ID NO: 772264 - DNA, 120 bp, Artificial Sequence
  ENSG00000237988_25 (sequence is synthesized)
cagaagatgtgttcgttgagtaagagattaaaagaaataagctttttgacccctgccaacaccccatgcccagggtggtcaccctccaatacaataacatgccaggaagagtaagttgcc

SEQ ID NO: 772265 - DNA, 120 bp, Artificial Sequence
  ENSG00000237988_26 (sequence is synthesized)
ctttctgatgccgtaatctgccatcatcttcccatcttccagtctctttccattgcaagtcacaatctgggtctcagggattatacccgtcttagtctcgatcattgctttcacttgtgc

SEQ ID NO: 772266 - DNA, 120 bp, Artificial Sequence
  ENSG00000237988_27 (sequence is synthesized)
cactgagctggaccttcgcacctggaggaggtgcctctttgcctcatcacctgactccacaagaaacaagggcagctcctcatcactgggcttcaccactttcagggtaaggtggatggt

SEQ ID NO: 772267 - DNA, 120 bp, Artificial Sequence
  ENSG00000237988_28 (sequence is synthesized)
cttctctttgtcaatgccataagatgagaggcttctccgtggctttaagatcttggagcccagcaaaagaacctggtcctgcacaggaaccttggtcttagaccggacatgttctttgat

SEQ ID NO: 772268 - DNA, 120 bp, Artificial Sequence
  ENSG00000237988_29 (sequence is synthesized)
ttttttcacgctgtcatatgggttggcatcaaaggtcattaaatcccattcctcggaacggacatgcacctgggaagtgaaagccacaagacagttacctaggatgcctgcctcctttac

SEQ ID NO: 772269 - DNA, 120 bp, Artificial Sequence
  ENSG00000237988_30 (sequence is synthesized)
acttctactccccaccacaatggctccccctcttccactatctatctggtcctctagctcctattcagtagccagtgtccctctctttcttggaacttcttttttggaattaccaagtta

SEQ ID NO: 772270 - DNA, 120 bp, Artificial Sequence
  ENSG00000237988_31 (sequence is synthesized)
caacacaaataagataatttgtcccattcctttataatcacacctttttttcgatcttgagaatggaaaataaaatcctgagcccccaaccaactgaacggacgctcttttgctcagggg

SEQ ID NO: 772271 - DNA, 87 bp, Artificial Sequence
  ENSG00000237988_32 (sequence is synthesized)
agcccccaaccaactgaacggacgctcttttgctcagggggaccctagagaaactttaaaaacttagtcattgggccaagggtgagc

SEQ ID NO: 772272 - DNA, 72 bp, Artificial Sequence
  ENSG00000237988_33 (sequence is synthesized)
tgaggcaggctgatcaattgatgctgggagttcgagaccagcctggtggtggtggcaagtccctgtaatccc

SEQ ID NO: 772273 - DNA, 80 bp, Artificial Sequence
  ENSG00000237988_34 (sequence is synthesized)
tataaataaataaaacattcagtcatgatggaacaggaggttggatatgcctcattgtatcttctcccttttgcagttta

SEQ ID NO: 772274 - DNA, 120 bp, Artificial Sequence
  ENSG00000237988_35 (sequence is synthesized)
ttggatatgcctcattgtatcttctcccttttgcagtttagacacaactgaccagcaaagttagagattataagactgagagaatggattctttgtggcaataagatagcaaattataaa

SEQ ID NO: 772275 - DNA, 120 bp, Artificial Sequence
  ENSG00000237988_36 (sequence is synthesized)
caagaccgagggctataacaggcaaaagttaagtcatgcatcccttacacttaaagaataaactatgttctgccacaaagttttttcttttttctctagcagctaaacaagcactggcct

SEQ ID NO: 772276 - DNA, 120 bp, Artificial Sequence
  ENSG00000237988_37 (sequence is synthesized)
tgacaggaacaatattaaaacaattacagctcaccctgtgttggggaacacaggctaactgaccccgtgttccacaagccataactacagttttaattggacaaaagactgatttcagta

SEQ ID NO: 772277 - DNA, 120 bp, Artificial Sequence
  ENSG00000237988_38 (sequence is synthesized)
attttctcctgataagagaccactgaccatggactggttctggctagtttacagaagctgtgcatttgaatgcctttgtgtccctgcttcaccttttcatgtataaggcctaactgtaat

SEQ ID NO: 772278 - DNA, 120 bp, Artificial Sequence
  ENSG00000237988_39 (sequence is synthesized)
gcaattaaatgttaagtctccacttcagagtgaccatgggtggtatgtaacatgcaagcttattcaatatgcatgcattaggaccccctccatgaatattcattgcctctgctataacct

SEQ ID NO: 772279 - DNA, 120 bp, Artificial Sequence
  ENSG00000237988_40 (sequence is synthesized)
attggatatgtatacttagcaaaccccttcagcataaattcctgtgtcacctttcctcctgcaaagtgcttgcttttggttttcaatcagaagcaaaacttcccagcctgtcagaatggc

SEQ ID NO: 772280 - DNA, 120 bp, Artificial Sequence
  ENSG00000237988_41 (sequence is synthesized)
ttcagacatgcttgcaaatcaagcaaggttaaggtcacttaggaggcccaactggctctgtctgctcaaggattcttctggcctcgtctccattttacatgaactgttgcataaataaac

SEQ ID NO: 772281 - DNA, 120 bp, Artificial Sequence
  ENSG00000237988_42 (sequence is synthesized)
acagagtacctgaaacaacggaggtgatcattctgcctaccgagtgttggccaggccaagcttggagtgttgctcttattcttagggagtttatttttaagtaatctcatctgtaaatgg

SEQ ID NO: 772282 - DNA, 120 bp, Artificial Sequence
  ENSG00000237988_43 (sequence is synthesized)
gattacaatccacaaactgaccttgtatatgattccattccttctcccagcccagccccacactccaaggttttccctttgcttataaggggtagtcacccttttttatttcgaccttcc

SEQ ID NO: 772283 - DNA, 80 bp, Artificial Sequence
  ENSG00000238074_0 (sequence is synthesized)
ggctgcggcatgtgcgagtgccaaggagggcaccgccttcaggatggaggctgtacaggagggggcggccggggtggaga

SEQ ID NO: 772284 - DNA, 120 bp, Artificial Sequence
  ENSG00000238074_1 (sequence is synthesized)
ggtggagagtgagcaggcggctttgggggaggaggcggtgctgctgttggatgacataatggcggaggtggaggtggtggcggaggtggaggtggtggcggaggaggagggcctcgtgga

SEQ ID NO: 772285 - DNA, 120 bp, Artificial Sequence
  ENSG00000238074_2 (sequence is synthesized)
gaggtggaggtggtggcggaggtggaggtggtggcggaggaggagggcctcgtggagcggcgggaggaggcccagcgggcacagcaggctgtgcctggccctgggcccatgaccccagag

SEQ ID NO: 772286 - DNA, 120 bp, Artificial Sequence
  ENSG00000238074_3 (sequence is synthesized)
gaagaagagaagcatcctgttcatctctgcaagatcatgttgttctttcggagtaacccctacttccagaataaagtgattaccaaggaatatctggtgaacatcacagaatacagggct

SEQ ID NO: 772287 - DNA, 120 bp, Artificial Sequence
  ENSG00000238074_4 (sequence is synthesized)
tctcattccactccaattgagtggtatccggattatgaagtggaggcctatcgccgcagacaccacaacagcagccttaacttcttcaactggttctctgaccacaacttcgcaggatct

SEQ ID NO: 772288 - DNA, 120 bp, Artificial Sequence
  ENSG00000238074_5 (sequence is synthesized)
aacaagattgctgagatcctatgtaaggacctgtggcgcaatcccctgcaatactacaagaggatgaagccacctgaagagggaacagagacgtcaggggactcccagttgttgagttga

SEQ ID NO: 772289 - DNA, 120 bp, Artificial Sequence
  ENSG00000238083_0 (sequence is synthesized)
agaatgtcttctgctcagtgcccggcactagtgtgtgtcatgtcccggctgcgtttctggggcccatggcccctccttatgtggcaactattgtggctactagttaaggaggctcagcct

SEQ ID NO: 772290 - DNA, 120 bp, Artificial Sequence
  ENSG00000238083_1 (sequence is synthesized)
ctggagtgggtcaaggacccgctccagctcacctctaatcccctggggccgcctgactcctggtcttcccactcctcccatttcccacgggaatctccccatgcgcctactctcccagca

SEQ ID NO: 772291 - DNA, 120 bp, Artificial Sequence; identical to SEQ ID NO: 613554
  ENSG00000238083_2 (sequence is synthesized)

SEQ ID NO: 772292 - DNA, 120 bp, Artificial Sequence
  ENSG00000238083_3 (sequence is synthesized)
cccctggagccagagcagttcttggcttcacagcaggatttaaaggacaagctgagtccacaggaaagactccctgtttcgcccaagaagctgaagaaagatccagctcagcgttggagc

SEQ ID NO: 772293 - DNA, 120 bp, Artificial Sequence; identical to SEQ ID NO: 613556
  ENSG00000238083_4 (sequence is synthesized)

SEQ ID NO: 772294 - DNA, 120 bp, Artificial Sequence; identical to SEQ ID NO: 613557
  ENSG00000238083_5 (sequence is synthesized)

SEQ ID NO: 772295 - DNA, 120 bp, Artificial Sequence; identical to SEQ ID NO: 613558
  ENSG00000238083_6 (sequence is synthesized)

SEQ ID NO: 772296 - DNA, 120 bp, Artificial Sequence; identical to SEQ ID NO: 613559
  ENSG00000238083_7 (sequence is synthesized)

SEQ ID NO: 772297 - DNA, 120 bp, Artificial Sequence; identical to SEQ ID NO: 613560
  ENSG00000238083_8 (sequence is synthesized)

SEQ ID NO: 772298 - DNA, 120 bp, Artificial Sequence; identical to SEQ ID NO: 613561
  ENSG00000238083_9 (sequence is synthesized)

SEQ ID NO: 772299 - DNA, 120 bp, Artificial Sequence; identical to SEQ ID NO: 613562
  ENSG00000238083_10 (sequence is synthesized)

SEQ ID NO: 772300 - DNA, 120 bp, Artificial Sequence; identical to SEQ ID NO: 613563
  ENSG00000238083_11 (sequence is synthesized)

SEQ ID NO: 772301 - DNA, 120 bp, Artificial Sequence; identical to SEQ ID NO: 613564
  ENSG00000238083_12 (sequence is synthesized)

SEQ ID NO: 772302 - DNA, 120 bp, Artificial Sequence; identical to SEQ ID NO: 613565
  ENSG00000238083_13 (sequence is synthesized)

SEQ ID NO: 772303 - DNA, 120 bp, Artificial Sequence; identical to SEQ ID NO: 613566
  ENSG00000238083_14 (sequence is synthesized)

SEQ ID NO: 772304 - DNA, 120 bp, Artificial Sequence; identical to SEQ ID NO: 613567
  ENSG00000238083_15 (sequence is synthesized)

SEQ ID NO: 772305 - DNA, 120 bp, Artificial Sequence; identical to SEQ ID NO: 613568
  ENSG00000238083_16 (sequence is synthesized)

SEQ ID NO: 772306 - DNA, 120 bp, Artificial Sequence; identical to SEQ ID NO: 613569
  ENSG00000238083_17 (sequence is synthesized)

SEQ ID NO: 772307 - DNA, 120 bp, Artificial Sequence; identical to SEQ ID NO: 613570
  ENSG00000238083_18 (sequence is synthesized)

SEQ ID NO: 772308 - DNA, 120 bp, Artificial Sequence
  ENSG00000238083_19 (sequence is synthesized)
actacagagactagacattctacagccctggagaagactacagctcctcgtccagaccgggttcagactctgcatcgaagcctgactgaagtcacaggtccacctactgaactagaacct

SEQ ID NO: 772309 - DNA, 120 bp, Artificial Sequence; identical to SEQ ID NO: 613572
  ENSG00000238083_20 (sequence is synthesized)

SEQ ID NO: 772310 - DNA, 120 bp, Artificial Sequence; identical to SEQ ID NO: 613573
  ENSG00000238083_21 (sequence is synthesized)

SEQ ID NO: 772311 - DNA, 120 bp, Artificial Sequence
  ENSG00000238083_22 (sequence is synthesized)
gaaagcatacagttggaccgagaaactaattctcagagaaaataacttgactgaattacacaaggattcatttgaaggcctgctatccctccagtatttagatttatcctgcaataaaat

SEQ ID NO: 772312 - DNA, 120 bp, Artificial Sequence; identical to SEQ ID NO: 613575
  ENSG00000238083_23 (sequence is synthesized)

SEQ ID NO: 772313 - DNA, 120 bp, Artificial Sequence; identical to SEQ ID NO: 613576
  ENSG00000238083_24 (sequence is synthesized)

SEQ ID NO: 772314 - DNA, 120 bp, Artificial Sequence; identical to SEQ ID NO: 613577
  ENSG00000238083_25 (sequence is synthesized)

SEQ ID NO: 772315 - DNA, 120 bp, Artificial Sequence; identical to SEQ ID NO: 613578
  ENSG00000238083_26 (sequence is synthesized)

SEQ ID NO: 772316 - DNA, 120 bp, Artificial Sequence; identical to SEQ ID NO: 613579
  ENSG00000238083_27 (sequence is synthesized)

SEQ ID NO: 772317 - DNA, 120 bp, Artificial Sequence; identical to SEQ ID NO: 613580
  ENSG00000238083_28 (sequence is synthesized)

SEQ ID NO: 772318 - DNA, 120 bp, Artificial Sequence; identical to SEQ ID NO: 613581
  ENSG00000238083_29 (sequence is synthesized)

SEQ ID NO: 772319 - DNA, 120 bp, Artificial Sequence
  ENSG00000238083_30 (sequence is synthesized)
gctcgggagtccagccccaagggaggtggaacagccccacacacagcaggggcctgagaagttagcgggaaacgccgtctacaccaagccttccttcacccaagagcataaggcagcagt

SEQ ID NO: 772320 - DNA, 120 bp, Artificial Sequence
  ENSG00000238083_31 (sequence is synthesized)
ctctgtgctgaaacccttctccaagggcgcgccttctacctccagccctgcaaaagccctaccacaggtgagagacagatggaaagacttaacccacgctatttccattttagaaagtgc

SEQ ID NO: 772321 - DNA, 120 bp, Artificial Sequence
  ENSG00000238083_32 (sequence is synthesized)
aaaggctagagttacaaatacgaagacgtctaaaccaatcgtacatgccagaaaaaaataccgctttcacaaaactcgctcccacgtgacccacagaacacccaaagtcaaaaagagtcc

SEQ ID NO: 772322 - DNA, 120 bp, Artificial Sequence; identical to SEQ ID NO: 613585
  ENSG00000238083_33 (sequence is synthesized)

SEQ ID NO: 772323 - DNA, 120 bp, Artificial Sequence
  ENSG00000238083_34 (sequence is synthesized)
gagtcctcaagaaaacccttttctggaagtatctgctccttcagaacattttatagaaaacaataatacaaaacacacaactgcaagaaatgcctttgaagaaaatgattttatggaaaa

SEQ ID NO: 772324 - DNA, 120 bp, Artificial Sequence
  ENSG00000238083_35 (sequence is synthesized)
cactaacatgccagaaggaaccatctctgaaaacacaaactacaatcatcctcatgaggcagattccgctgggactgcattcaacttagggccaactgttaaacaaactgagacaaaatg

SEQ ID NO: 772325 - DNA, 120 bp, Artificial Sequence; identical to SEQ ID NO: 613588
  ENSG00000238083_36 (sequence is synthesized)

SEQ ID NO: 772326 - DNA, 120 bp, Artificial Sequence; identical to SEQ ID NO: 613589
  ENSG00000238083_37 (sequence is synthesized)

SEQ ID NO: 772327 - DNA, 120 bp, Artificial Sequence; identical to SEQ ID NO: 613590
  ENSG00000238083_38 (sequence is synthesized)

SEQ ID NO: 772328 - DNA, 120 bp, Artificial Sequence; identical to SEQ ID NO: 613591
  ENSG00000238083_39 (sequence is synthesized)

SEQ ID NO: 772329 - DNA, 120 bp, Artificial Sequence; identical to SEQ ID NO: 613592
  ENSG00000238083_40 (sequence is synthesized)

SEQ ID NO: 772330 - DNA, 120 bp, Artificial Sequence
  ENSG00000238083_41 (sequence is synthesized)
acagccgctctggtttaaagatatgtacaaacctctcagtgccacaagaataaataatcatgcatggaagctgcacaagaagtcatctaatgaggacaagatcctcaacagggaccctgg

SEQ ID NO: 772331 - DNA, 120 bp, Artificial Sequence; identical to SEQ ID NO: 613594
  ENSG00000238083_42 (sequence is synthesized)

SEQ ID NO: 772332 - DNA, 89 bp, Artificial Sequence
  ENSG00000238083_43 (sequence is synthesized)
tggcctcctgagtagctgggattgcaggtcagttgctctccctggaaggaagagtgttctcggatttcaccttaaaggaggaaggctgc

SEQ ID NO: 772333 - DNA, 120 bp, Artificial Sequence
  ENSG00000238083_44 (sequence is synthesized)
aagagtgttctcggatttcaccttaaaggaggaaggctgccagaactgaactagcacttctgaatatcctgaggcgaggtccggtgacttccttgggaagctctgccgcgcccccacccc

SEQ ID NO: 772334 - DNA, 120 bp, Artificial Sequence
  ENSG00000238083_45 (sequence is synthesized)
accctaccccaccctaccccaccacagcaggcgctggagtcctgggaccaccagggtctgaggcccaaatccttcctcactaaggggaggagaggggtgttccggcagggcaggatggga

SEQ ID NO: 772335 - DNA, 120 bp, Artificial Sequence
  ENSG00000238083_46 (sequence is synthesized)
aggcgtgcttgggcgggattgtgacataagagtgccctggtgacatggagcagatctgtgacataaataaaggtgtcataaagacagggcggggctcacgcttagaaggggcacgagcgt

SEQ ID NO: 772336 - DNA, 120 bp, Artificial Sequence
  ENSG00000238083_47 (sequence is synthesized)
tttgttaacctccttttacagatgaggaaaaacaagatcagaggtgctaagtgctgtagcctagtgccaggtcttctggccccaattctgggttctccccaagcccatgtttcttcccct

SEQ ID NO: 772337 - DNA, 120 bp, Artificial Sequence
  ENSG00000238083_48 (sequence is synthesized)
ttctcacaatctttacttcttcctctgaccctcaccaccacccaaagtacttttaattccagaaaagaaacccagctgcacactggcacacctgaccttcatgcagtcagaagctttgga

SEQ ID NO: 772338 - DNA, 120 bp, Artificial Sequence
  ENSG00000238083_49 (sequence is synthesized)
tgattccccatccaaaatattagagatgaaatgaaagcaaagtaggcatctgacaaaagttgctttttcccttctgcattttaggacctcaagtaatgtttatccagaaactgctatcat

SEQ ID NO: 772339 - DNA, 120 bp, Artificial Sequence
  ENSG00000238083_50 (sequence is synthesized)
accagggattcattgtgtatttaacaacataggcatacaatctggcaaatttgaaaaactcttaacatacaccccaaatccctgcccaaatttaagaactagggtggacacagtgcgttt

SEQ ID NO: 772340 - DNA, 120 bp, Artificial Sequence
  ENSG00000238083_51 (sequence is synthesized)
ttccatgtcgcatcttctgtgatggggctacgatacgtgggagcagagaatggggagggtggagcgcatgccagatgaggatctatcagcaatgggacggggcctccactttagcatctc

SEQ ID NO: 772341 - DNA, 120 bp, Artificial Sequence
  ENSG00000238083_52 (sequence is synthesized)
caccctgctcctctcagaggaccgcctttcattgcattcagctgtgatggtagcacgaacacaggtgcaccgaggacgaggagagcaggagccttgtgctctctctgcatctgaggcagg

SEQ ID NO: 772342 - DNA, 120 bp, Artificial Sequence
  ENSG00000238083_53 (sequence is synthesized)
acagcacagggtacggagcagtctgcagagaggccagctcatcagggaagcacttgtcttccaccttgggctttgactgagcactgggcaattggcctctggggatcaacgaaataatcc

SEQ ID NO: 772343 - DNA, 120 bp, Artificial Sequence
  ENSG00000238083_54 (sequence is synthesized)
taaacagagttactctatgtcacactatggaatgttccaagtaggtggccgtgttttcaaaagatgtattttctccttttgttgttgccatttcataggtttaggattgggtgtgtgttt

SEQ ID NO: 772344 - DNA, 120 bp, Artificial Sequence
  ENSG00000238083_55 (sequence is synthesized)
ctcctctctgaatggcactcgaatgtttgctgactcctactctgtgtgactggggtgtacagctatggactgatgcatcccatcccatcatctttcatgatcaaagcagtctcttctttt

SEQ ID NO: 772345 - DNA, 120 bp, Artificial Sequence
  ENSG00000238205_0 (sequence is synthesized)
atggcgaggatggcggtactgtggcggaagatgagagataacttccagagcaaggagttccgggaatacgtgagcagcactcacttctggggtcccgcgttcagctggggccttccgctg

SEQ ID NO: 772346 - DNA, 120 bp, Artificial Sequence
  ENSG00000238205_1 (sequence is synthesized)
gctgcctttaaagacatgaaggcgtcgccggagatcatcagtggccgcatgacaacagcgctcatcttgtactcggcgatcttcatgcgcttcgcctaccgcgtacagcctcgaaacctg

SEQ ID NO: 772347 - DNA, 120 bp, Artificial Sequence
  ENSG00000238205_2 (sequence is synthesized)
aggctaaagcccgcgaccctccggctaccgccgccgctgccaccagcccgggttcccagcccccgaaacaagcttcttaagaactgagagggcctgatctcatctctgcaggtcacaagc

SEQ ID NO: 772348 - DNA, 120 bp, Artificial Sequence
  ENSG00000238205_3 (sequence is synthesized)
actgaactgccattcctcctgaaaaaagaccaatgaagacctcggttttgactctaaaacagtgcgaatctgacttaaacctgcagtttgattaataaagaaatacaaagtaacattgaa

SEQ ID NO: 772349 - DNA, 120 bp, Artificial Sequence
  ENSG00000238210_0 (sequence is synthesized)
cagatctttcttcagaagaaacctgagtggtctcacaggggtttggagtaagattcatacctgcttcaccagtgattttcaaaggaggcaaatcctatttgaagctaaagtcacataaag

SEQ ID NO: 772350 - DNA, 120 bp, Artificial Sequence
  ENSG00000238210_1 (sequence is synthesized)
agatttggaatgaggaaacaaattatagcagcctgcaagttgtagaatgaagaaatgcaaatgtaaagtactgaactttgtcatggatagatttaccaaagagaattactctgcataaca

SEQ ID NO: 772351 - DNA, 120 bp, Artificial Sequence; identical to SEQ ID NO: 765656
  ENSG00000238210_2 (sequence is synthesized)

SEQ ID NO: 772352 - DNA, 120 bp, Artificial Sequence; identical to SEQ ID NO: 765657
  ENSG00000238210_3 (sequence is synthesized)

SEQ ID NO: 772353 - DNA, 120 bp, Artificial Sequence
  ENSG00000238210_4 (sequence is synthesized)
ctagggtggacatggccttggacaaaaagtcatgtggcttacgtgctgaagcctgcccatatttttgagaaattaaatataattagaacaataaactcctcccatgtttgagtcattaaa

SEQ ID NO: 772354 - DNA, 120 bp, Artificial Sequence
  ENSG00000238227_0 (sequence is synthesized)
acgccctcgggaagcgacgagtccgggacgcccagcgcgggcccggagcagggggaagggaagtgcggctcggtcggcgcgggtggagggggcgtgaggccgccctacggtggccgtcga

SEQ ID NO: 772355 - DNA, 120 bp, Artificial Sequence
  ENSG00000238227_1 (sequence is synthesized)
tcgagggacggcgctacggctcccacgctaggccaaacgcctccggcggccgcgcccgagagccccttcacctgcagggcgaccccagccggcgacgcgtgaaccacgccctcagccgcc

SEQ ID NO: 772356 - DNA, 80 bp, Artificial Sequence
  ENSG00000238227_2 (sequence is synthesized)
gaaccacgccctcagccgccttgccagcgcccccagccgcgcgccccagcaccatgcggccgccctgcgcacggagcccc

SEQ ID NO: 772357 - DNA, 120 bp, Artificial Sequence
  ENSG00000238227_3 (sequence is synthesized)
gccgcggagagggcaccgggccgacgcctccccccagggtcagctgcgggctcccaggcctaggcgcccatgacccctacgccaacagccgcctggacaccgccgccgccactgcgacct

SEQ ID NO: 772358 - DNA, 120 bp, Artificial Sequence
  ENSG00000238227_4 (sequence is synthesized)
ccactgcgacctagcgccgccgccgccggggcccaatgccggtcatgcccattccgcggcgggtgcgctccttccacggcccgcacaccacctgcctgcatgcggcctgcgggcccgtgc

SEQ ID NO: 772359 - DNA, 120 bp, Artificial Sequence
  ENSG00000238227_5 (sequence is synthesized)
gcgcctcccacctggcccgcaccaagtacaacaacttcgacgtgtacatcaagacgcgctggctgtacggcttcatccgcttcctactctactttagctgcagcctgttcactgcggcgc

SEQ ID NO: 772360 - DNA, 120 bp, Artificial Sequence
  ENSG00000238227_6 (sequence is synthesized)
tctggggtgcgctggccgccctcttctgcctacagtacctgggcgttcgcgtcctgctgcgcttccagcgcaagctgtcggtgctgctgctgctgctgggccgccggcgcgtggacttcc

SEQ ID NO: 772361 - DNA, 120 bp, Artificial Sequence
  ENSG00000238227_7 (sequence is synthesized)
gcctggtgaacgagctgctcgtctatggcatccacgtcaccatgctgctggtcgggggcctgggctggtgcttcatggtcttcgtggacatgtgagggccgtgggtgcgagcttgatgta

SEQ ID NO: 772362 - DNA, 120 bp, Artificial Sequence
  ENSG00000238227_8 (sequence is synthesized)
tcgtcccggcctgtggctgtgttctctccatgggtggggtcggccagcgccttcccttcgcccatcccccaggcagtcgctgctgcccggcgcccacggagagaaaagaaagggctgaga

SEQ ID NO: 772363 - DNA, 120 bp, Artificial Sequence
  ENSG00000238227_9 (sequence is synthesized)
cttctgtgatgggggcgcggacaccacccctaggctggcttcctggacccaccctccccgtatgcactctcaggggcagcgcccacctgccggtggctcctgctcacatgtcttcgggtc

SEQ ID NO: 772364 - DNA, 120 bp, Artificial Sequence
  ENSG00000238227_10 (sequence is synthesized)
gtactgcggggtgggccctccgttccgcctctctgtgggcctctctccaggaccacagctgccagggactttagacatcaccctgggaggcccctggacacagagggctgtgtgcccagg

SEQ ID NO: 772365 - DNA, 120 bp, Artificial Sequence
  ENSG00000238227_11 (sequence is synthesized)
caacgggacacggaaggctcccctcgctgacacaccacactgccacaaagctgcttactctgccctgggccgcctgaggcctggcactgcccgcggaccaccctgtgtgtgtcatcctga

SEQ ID NO: 772366 - DNA, 120 bp, Artificial Sequence
  ENSG00000238227_12 (sequence is synthesized)
ggggctgtgtgggtcctgagtccccagccagccttcagggtccccttggattgtgtagatgcagtctagcggggggccggagaagggctcaggtgggaggggcctcagcaggctcccagc

SEQ ID NO: 772367 - DNA, 120 bp, Artificial Sequence
  ENSG00000238227_13 (sequence is synthesized)
tcaggggctggcctggggggaaccctgggagccaggggctgactccagcaacactggcctgtctgcctgttctgggagggctgtgaggatgtcttgcagatgctctggatttctgcggag

SEQ ID NO: 772368 - DNA, 120 bp, Artificial Sequence
  ENSG00000238227_14 (sequence is synthesized)
gcacctccattcctttctggctttttttgcgggggagggctttgggcctctttctttgagggaacaccgtcaaagaaagcctgggagatcgaggcttcagtgagccaggatggaaacgcg

SEQ ID NO: 772369 - DNA, 120 bp, Artificial Sequence
  ENSG00000238227_15 (sequence is synthesized)
tgtcccaagtgtccggagcaggcggcagaggcctcagtgcggcaaacacagccccagagcctgtgtggcaccagcagcatcttagagccccaggtatatgctgagatcttatctcacgct

SEQ ID NO: 772370 - DNA, 120 bp, Artificial Sequence
  ENSG00000238227_16 (sequence is synthesized)
gtcctccagtgtctggggggcccaaatgatggcacaggggcaggtgggctggaggggcgcagatgcctgtgttcagggagggtggccaccatgggccgaggtctcacccaggaccccttg

SEQ ID NO: 772371 - DNA, 120 bp, Artificial Sequence
  ENSG00000238227_17 (sequence is synthesized)
ctctgctcctcagccttgcagtcacggcagcactatggtggactgcccatggccgtgtgactttgggggcaagtgggagggcgccctgaataatgattgcaaggacaacaggcagaggct

SEQ ID NO: 772372 - DNA, 120 bp, Artificial Sequence
  ENSG00000238227_18 (sequence is synthesized)
accctagagcaggacacagggtgtggtactgacaaccctagtgtcacctcaaatccatgtccccacactctgggcatgggtgggacttgtgaccctaccctgtcaggcggaccagtggcc

SEQ ID NO: 772373 - DNA, 120 bp, Artificial Sequence
  ENSG00000238227_19 (sequence is synthesized)
caggagccatgaggacagttgtgtgccactggaagagaaactttttgaaaaaccctaaatcaggtagagaaagcaaaaaatctctggccgtaaaccgtgctctctaatttatcggcagct

SEQ ID NO: 772374 - DNA, 120 bp, Artificial Sequence
  ENSG00000238227_20 (sequence is synthesized)
tctgtggatgacctctgatgagcccgggctgcgtccacgccctgggcaggtaggcgggagcttccctgcgtgggcctcatttcttgctgcagagaatcttttgcactaagtcatgctgtt

SEQ ID NO: 772375 - DNA, 120 bp, Artificial Sequence
  ENSG00000238227_21 (sequence is synthesized)
tcctcaaagaagctttgttttttgttaacgtattactcagagtcacccaagcctcttggctgagggtgaaggtgggacgggaggcgggagggggctggtggtgccgctcgtgcggtgtca

SEQ ID NO: 772376 - DNA, 120 bp, Artificial Sequence
  ENSG00000238227_22 (sequence is synthesized)
acgctgcagggagttgtggcaccttggtgccctctgagcacctggccgcctgctgtccccggtgcctgtgaaattcgtcatgccatgacccacctgcattaaacctatttttttaatgtg

SEQ ID NO: 772377 - DNA, 120 bp, Artificial Sequence
  ENSG00000238227_23 (sequence is synthesized)
aagtggctccggcaggggctctgcagccagggggcccggcgcggcgcggcgcaggcccggtgctcacgcggagttggccggggcccgttgcgtctctgcggccccgaggaaacagtcctg

SEQ ID NO: 772378 - DNA, 120 bp, Artificial Sequence
  ENSG00000238227_24 (sequence is synthesized)
cgaggaaacagtcctgggtccatgggccgggccgagcgggcgtctgcagaaacgcagggacccggatggagccgcgggccgcgagaccctgcggggacacagctccgccgagtcgcgttt

SEQ ID NO: 772379 - DNA, 120 bp, Artificial Sequence
  ENSG00000238227_25 (sequence is synthesized)
gagtggcaccgccatggccggggtcccggccggggcgagctccaggccaaggccggccttaaatagggccgctctggcccctgcaccccgtggaggagccgggcggagggagagggcgag

SEQ ID NO: 772380 - DNA, 120 bp, Artificial Sequence
  ENSG00000238227_26 (sequence is synthesized)
ggctgaatctgaaggcaggcgaagctcttggcaacagtcccctgtaatgttaccaactttcctgctcagattttatttcctgacctttgagttcattccgtctacagattatttcggcaa

SEQ ID NO: 772381 - DNA, 120 bp, Artificial Sequence
  ENSG00000238243_0 (sequence is synthesized)
atggatggaaccaatggcagcacccaaacccatttcatcctactgggattctctgaccgaccccatctggagaggatcctctttgtggtcatcctgatcgcgtacctcctgaccctcgta

SEQ ID NO: 772382 - DNA, 120 bp, Artificial Sequence
  ENSG00000238243_1 (sequence is synthesized)
acctccacacccccatgtacttcttcctcgcccacctttccttcctggacctcagtttcaccaccagctccatcccccagctgctctacaaccttaatggatgtgacaagaccatcagct

SEQ ID NO: 772383 - DNA, 120 bp, Artificial Sequence
  ENSG00000238243_2 (sequence is synthesized)
ctgctctacaaccttaatggatgtgacaagaccatcagctacatgggctgtgccatccagctcttcctgttcctgggtctgggtggtgtggagtgcctgcttctggctgtcatggcctat

SEQ ID NO: 772384 - DNA, 120 bp, Artificial Sequence
  ENSG00000238243_3 (sequence is synthesized)
tccttggccatgtctcctgtgaccctgcgcttaccccgctgtgggcaccacgaggtggaccacttcctgcgtgagatgcccgccctgatccggatggcctgcgtcagcactgtggccatc

SEQ ID NO: 772385 - DNA, 120 bp, Artificial Sequence
  ENSG00000238243_4 (sequence is synthesized)
gaaggcaccgtctttgtcctggcggtgggtgttgtgctgtcccccttggtgtttatcctgctctcttacagctacattgtgagggctgtgttacaaattcggtcagcatcaggaaggcag

SEQ ID NO: 772386 - DNA, 120 bp, Artificial Sequence
  ENSG00000238243_5 (sequence is synthesized)
aaggccttcggcacctgcggctcccatctcactgtggtctcccttttctatggaaacatcatctacatgtacatgcagccaggagccagttcttcccaggaccagggcatgttcctcatg

SEQ ID NO: 772387 - DNA, 120 bp, Artificial Sequence
  ENSG00000238243_6 (sequence is synthesized)
ctcttctacaacattgtcacccccctcctcaatcctctcatctacaccctcagaaacagagaggtgaagggggcactgggaaggttgcttctggggaagagagagctaggaaaggagtaa

SEQ ID NO: 772388 - DNA, 120 bp, Artificial Sequence
  ENSG00000238269_0 (sequence is synthesized)
cttctgtccacacacagctctgcaaggagagtgtcttcattctttccgccatcttgattctttgtcactgaccgagactcagccgtgggaaatatgagtgagcatgtgagaacaagatcc

SEQ ID NO: 772389 - DNA, 120 bp, Artificial Sequence
  ENSG00000238269_1 (sequence is synthesized)
caatcctcagaaagaggaaatgaccaagagtcttcccagccagttggatctgtgattgtccaggagcccactgaggaaaaacgtcaagaagaggaaccaccaactgataatcagggtatt

SEQ ID NO: 772390 - DNA, 120 bp, Artificial Sequence
  ENSG00000238269_2 (sequence is synthesized)
gcttttcaacaggaactggctctgcttaagatagaggatgagcctggagatggtcctgatgtcagggaggggattatgcccacttttgatctcactaaagtgctggaagcaggtgatgcg

SEQ ID NO: 772391 - DNA, 120 bp, Artificial Sequence; identical to SEQ ID NO: 770065
  ENSG00000238269_3 (sequence is synthesized)

SEQ ID NO: 772392 - DNA, 80 bp, Artificial Sequence
  ENSG00000239264_0 (sequence is synthesized)
ccgccgcgatgcccgcgcgcccaggacgcctcctcccgctgctggcccggccggcggccctgactgcgctgctgctgctg

SEQ ID NO: 772393 - DNA, 120 bp, Artificial Sequence
  ENSG00000239264_1 (sequence is synthesized)
cgggcccaggaggcggcggcggcggcggcggacgggccccccgcggcagacggcgaggacggacaggacccgcacagcaagcacctgtacacggccgacatgttcacgcacgggatccag

SEQ ID NO: 772394 - DNA, 120 bp, Artificial Sequence
  ENSG00000239264_2 (sequence is synthesized)
agcgccgcgcacttcgtcatgttcttcgcgccctggtgtggacactgccagcggctgcagccgacttggaatgacctgggagacaaatacaacagcatggaagatgccaaagtctatgtg

SEQ ID NO: 772395 - DNA, 120 bp, Artificial Sequence
  ENSG00000239264_3 (sequence is synthesized)
gctaaagtggactgcacggcccactccgacgtgtgctccgcccagggggtgcgaggataccccaccttaaagcttttcaagccaggccaagaagctgtgaagtaccagggtcctcgggac

SEQ ID NO: 772396 - DNA, 120 bp, Artificial Sequence
  ENSG00000239264_4 (sequence is synthesized)
ttccagacactggaaaactggatgctgcagacactgaacgaggagccagtgacaccagagccggaagtggaaccgcccagtgcccccgagctcaagcaagggctgtatgagctctcagca

SEQ ID NO: 772397 - DNA, 120 bp, Artificial Sequence
  ENSG00000239264_5 (sequence is synthesized)
agcaactttgagctgcacgttgcacaaggcgaccactttatcaagttcttcgctccgtggtgtggtcactgcaaagccctggctccaacctgggagcagctggctctgggccttgaacat

SEQ ID NO: 772398 - DNA, 120 bp, Artificial Sequence
  ENSG00000239264_6 (sequence is synthesized)
tccgaaactgtcaagattggcaaggttgattgtacacagcactatgaactctgctccggaaaccaggttcgtggctatcccactcttctctggttccgagatgggaaaaaggtggatcag

SEQ ID NO: 772399 - DNA, 120 bp, Artificial Sequence
  ENSG00000239264_7 (sequence is synthesized)
tacaagggaaagcgggatttggagtcactgagggagtacgtggagtcgcagctgcagcgcacagagactggagcgacggagaccgtcacgccctcagaggccccggtgctggcagctgag

SEQ ID NO: 772400 - DNA, 120 bp, Artificial Sequence
  ENSG00000239264_8 (sequence is synthesized)
cccgaggctgacaagggcactgtgttggcactcactgaaaataacttcgatgacaccattgcagaaggaataaccttcatcaagttttatgctccatggtgtggtcattgtaagactctg

SEQ ID NO: 772401 - DNA, 120 bp, Artificial Sequence
  ENSG00000239264_9 (sequence is synthesized)
gctcctacttgggaggaactctctaaaaaggaattccctggtctggcgggggtcaagatcgccgaagtagactgcactgctgaacggaatatctgcagcaagtattcggtacgaggctac

SEQ ID NO: 772402 - DNA, 120 bp, Artificial Sequence
  ENSG00000239264_10 (sequence is synthesized)
cccacgttattgcttttccgaggagggaagaaagtcagtgagcacagtggaggcagagaccttgactcgttacaccgctttgtcctgagccaagcgaaagacgaactttaggaacacagt

SEQ ID NO: 772403 - DNA, 120 bp, Artificial Sequence
  ENSG00000239264_11 (sequence is synthesized)
tggaggtcacctctcctgcccagctcccgcaccctgcgtttaggagttcagtcccacagaggccactgggttcccagtggtggctgttcagaaagcagaacatactaagcgtgaggtatc

SEQ ID NO: 772404 - DNA, 120 bp, Artificial Sequence
  ENSG00000239264_12 (sequence is synthesized)
tttctctaagtaaatgtgtaactcatggtcactgtgtaaacattttcagtggcgatatatcccctttgaccttctcttgatgaaatttacatggtttcctttgagactaaaatagcgttg

SEQ ID NO: 772405 - DNA, 120 bp, Artificial Sequence
  ENSG00000239264_13 (sequence is synthesized)
agggaaatgaaattgctggactatttgtggctcctgagttgagtgattttggtgaaagaaagcacatccaaagcatagtttacctgcccacgagttctggaaaggtggccttgtggcagt

SEQ ID NO: 772406 - DNA, 120 bp, Artificial Sequence
  ENSG00000239264_14 (sequence is synthesized)
attgacgttcctctgatcttaaggtcacagttgactcaatactgtgttggtccgtagcatggagcagattgaaatgcaaaaacccacacctctggaagataccttcacggccgctgctgg

SEQ ID NO: 772407 - DNA, 120 bp, Artificial Sequence
  ENSG00000239264_15 (sequence is synthesized)
agcttctgttgctgtgaatacttctctcagtgtgagaggttagccgtgatgaaagcagcgttacttctgaccgtgcctgagtaagagaatgctgatgccataactttatgtgtcgatact

SEQ ID NO: 772408 - DNA, 120 bp, Artificial Sequence
  ENSG00000239264_16 (sequence is synthesized)
tgtcaaatcagttactgttcaggggatccttctgtttctcacggggtgaaacatgtctttagttcctcatgttaacacgaagccagagcccacatgaactgttggatgtcttccttagaa

SEQ ID NO: 772409 - DNA, 120 bp, Artificial Sequence
  ENSG00000239264_17 (sequence is synthesized)
agggtaggcatggaaaattccacgaggctcattctcagtatctcattaactcattgaaagattccagttgtatttgtcacctggggtgacaagaccagacaggctttcccaggcctgggt

SEQ ID NO: 772410 - DNA, 120 bp, Artificial Sequence
  ENSG00000239264_18 (sequence is synthesized)
atccagggaggctctgcagccctgctgaagggccctaactagagttctagagtttctgattctgtttctcagtagtccttttagaggcttgctatacttggtctgcttcaaggaggtcga

SEQ ID NO: 772411 - DNA, 120 bp, Artificial Sequence
  ENSG00000239264_19 (sequence is synthesized)
ccttctaatgtatgaagaatgggatgcatttgatctcaagaccaaagacagatgtcagtgggctgctctggccctggtgtgcacggctgtggcagctgttgatgccagtgtcctctaact

SEQ ID NO: 772412 - DNA, 120 bp, Artificial Sequence
  ENSG00000239264_20 (sequence is synthesized)
catgctgtccttgtgattaaacacctctatctcccttgggaataagcacatacaggcttaagctctaagatagataggtgtttgtccttttaccatcgagctacttcccataataaccac

SEQ ID NO: 772413 - DNA, 120 bp, Artificial Sequence
  ENSG00000239264_21 (sequence is synthesized)
tttgcatccaacactcttcacccacctcccatacgcaaggggatgtggatacttggcccaaagtaactggtggtaggaatcttagaaacaagaccacttatactgtctgtctgaggcaga

SEQ ID NO: 772414 - DNA, 120 bp, Artificial Sequence
  ENSG00000239264_22 (sequence is synthesized)
agataacagcagcatctcgaccagcctctgccttaaaggaaatctttattaatcacgtatggttcacagataattctttttttaaaaaaacccaacctcctagagaagcacaactgtcaa

SEQ ID NO: 772415 - DNA, 120 bp, Artificial Sequence
  ENSG00000239264_23 (sequence is synthesized)
gagtcttgtacacacaacttcagctttgcatcacgagtcttgtattccaagaaaatcaaagtggtacaatttgtttgtttacactatgatactttctaaataaactctttttttttaaaa

SEQ ID NO: 772416 - DNA, 120 bp, Artificial Sequence
  ENSG00000239264_24 (sequence is synthesized)
gaaaaagaaaagattccttctctatgggaaggtgaatggacagcatcagtcaatgtcaaggatgttcttatagctggaaacttgaattctcacagtaactggatattcaggccttgtaag

SEQ ID NO: 772417 - DNA, 120 bp, Artificial Sequence
  ENSG00000239264_25 (sequence is synthesized)
agttgaatacctgccaggtggcctggaagaataccttaattgcaaaacaacaccgtgtctgctccagtcctaatttgaacacagacaacaactgctgaagccgggaaagcataacagtag

SEQ ID NO: 772418 - DNA, 120 bp, Artificial Sequence
  ENSG00000239264_26 (sequence is synthesized)
aaccagaaacttctgaaagtttaggattaactgaatgtattatctcctggaacgttatgtttgtttcctttttatcagagaggagcagatacatgcctggctgcagccccttgacagctc

SEQ ID NO: 772419 - DNA, 120 bp, Artificial Sequence
  ENSG00000239264_27 (sequence is synthesized)
attttctgattgtttcactaaatgagtttgctctctgataagacaactttctttttgctctgtctaatcctttgttattctttcagcttaaagcttttcaagccaggccaagaagctgtg

SEQ ID NO: 772420 - DNA, 120 bp, Artificial Sequence
  ENSG00000239264_28 (sequence is synthesized)
aattcaaccgcctcttgcacctcggcaccgagggaggggaaggtggggtcgtcgccctttcgggcagccgggagtccaaatgtcaccccgcggtccctgcccagcgccccaaacttcctg

SEQ ID NO: 772421 - DNA, 120 bp, Artificial Sequence
  ENSG00000239264_29 (sequence is synthesized)
tgccggccggacgcgcggcctgcccgtgggccacgtgcactcaccagagcggccttgctgctgccgcggccaccggggtcggctgggacagactgcgggcacgtccccttccagaggctt

SEQ ID NO: 772422 - DNA, 120 bp, Artificial Sequence
  ENSG00000239264_30 (sequence is synthesized)
caggctgagctactgagtggtttaatgggcacagtgaattgccaatcttgattgttagggcactggtttggagaaatgtgtataatgaaacaaacgtctttctcttaattgataagattt

SEQ ID NO: 772423 - DNA, 120 bp, Artificial Sequence
  ENSG00000239264_31 (sequence is synthesized)
gggttgtggagatgaaccttgaaacatttcagtggcccaggttatcactagaataacccacatcttacagtcacagggtaactgtgctctggttgtaaacacaaaccttcaggcctttga

SEQ ID NO: 772424 - DNA, 120 bp, Artificial Sequence
  ENSG00000239264_32 (sequence is synthesized)
acagagctaaggcttgcacttggtccggttctgcctgcctccctccctccttccctggccgatggtcagcagctcagagttccccatcagcacaacggcttgctggcaggcctctgcccc

SEQ ID NO: 772425 - DNA, 120 bp, Artificial Sequence
  ENSG00000239264_33 (sequence is synthesized)
agacttctgtgatgtgtaaccccgtggagggaagaggggcctgtacagttctctcaccaaagccgaggcattcagttatcctctctacattcccgtctaaatatgaacatgcagactttg

SEQ ID NO: 772426 - DNA, 120 bp, Artificial Sequence
  ENSG00000239264_34 (sequence is synthesized)
caccaccgctaagacatctgggagctctgacccgggcaagcaggggttgcaggaaggcttaagtgattcagaacacctcagtggactcactcagccgcgtgcccgtgtcttggccaggtg

SEQ ID NO: 772427 - DNA, 120 bp, Artificial Sequence
  ENSG00000239282_0 (sequence is synthesized)
gcgtggacgcggcagcgcagcggctcctttaaggctcgggcaccacccccgccgccccgcctcccgtgcggcctgggtctagttggcggcggggtcgggtccgcgcgagccgcgatggag

SEQ ID NO: 772428 - DNA, 120 bp, Artificial Sequence
  ENSG00000239282_1 (sequence is synthesized)
gcgagccgcgatggagctgcacatcctagaacaccgggtgcgggtgctgagcgtcgcccgtcccggtctctggctctacacccacccgctcatcaagctgctcttcctgccccgccgcag

SEQ ID NO: 772429 - DNA, 120 bp, Artificial Sequence
  ENSG00000239282_2 (sequence is synthesized)
ccggtgcaagttcttcagcctgacggagacccctgaggattacacgcttatggtggacgaggagggctttaaagagctgcccccatctgagttcctgcaagtagctgaggccacatggct

SEQ ID NO: 772430 - DNA, 120 bp, Artificial Sequence
  ENSG00000239282_3 (sequence is synthesized)
ggtgctgaacgtgtcgtctcacagcggtgcggcagtgcaggctgctggggtcaccaagatcgcccgttcggtcatcgcgccactggccgagcaccacgtgtctgtgctgatgctgtccac

SEQ ID NO: 772431 - DNA, 120 bp, Artificial Sequence
  ENSG00000239282_4 (sequence is synthesized)
ttaccagacggacttcatcctggtgcgggagcaggacctgtccgtggtgatccacacgctggcccaggagttcgacatttaccgcgaggtgggcggagagcctgtgcctgtgacgaggga

SEQ ID NO: 772432 - DNA, 120 bp, Artificial Sequence
  ENSG00000239282_5 (sequence is synthesized)
tgattccagcaatggctttccccgcactcagcatgggcccagccccacggtgcatcccatccagagcccacagaaccgcttctgtgtcctcacactggaccctgagacgcttccagccat

SEQ ID NO: 772433 - DNA, 120 bp, Artificial Sequence
  ENSG00000239282_6 (sequence is synthesized)
cagtcctgaacccagctccatcacgttctttgccttctccctcatcgagggttatatctccattgtcatggatgctgaaacacagaaaaagttccccagtgacctcctgctgaccagctc

SEQ ID NO: 772434 - DNA, 120 bp, Artificial Sequence
  ENSG00000239282_7 (sequence is synthesized)
ctcgggggagctgtggaggatggtgcgcatcggtggacagcccctgggctttgatgaatgtggcatcgtggcacagattgcaggtcccctggctgccgctgacatctctgcctactacat

SEQ ID NO: 772435 - DNA, 120 bp, Artificial Sequence
  ENSG00000239282_8 (sequence is synthesized)
cagcaccttcaacttcgaccacgccctggtgcccgaggacggtatcggcagcgtcatcgaggtcctccagcggcggcaggaaggcctggcttcctgaggcccatgggcaacagagcagcc

SEQ ID NO: 772436 - DNA, 120 bp, Artificial Sequence
  ENSG00000239282_9 (sequence is synthesized)
tccctgctctcccctcgacccaggcttccaaagacttctctaagctatttccttaagctctggaacgagccccctgttctgctggggaccctcgttccgctctctgtatgtaagctgcgt

SEQ ID NO: 772437 - DNA, 120 bp, Artificial Sequence
  ENSG00000239282_10 (sequence is synthesized)
gcaggcaccggcttttacgcggacacctgtgtacactcacaggtggagtgggcaggtgctagcctgactgcgtgtctgcccatgcaggggaacacggtgctcggggcttaagcccccaac

SEQ ID NO: 772438 - DNA, 120 bp, Artificial Sequence
  ENSG00000239282_11 (sequence is synthesized)
ccatcactccctgcgcagcctcggcgtttgcacagtccctgcctgaggcctgagccattccccaaaggcttcctgggccagctgccccgctgacctccgttctgcctctggtggggttgc

SEQ ID NO: 772439 - DNA, 120 bp, Artificial Sequence
  ENSG00000239282_12 (sequence is synthesized)
cttccctggccaggtgagtcctgacagtgcctctccctcctggggcctccaaggaaagtattttgacatctctctctcttctgtttttattgacttgttaataaaggactttgtagtgac

SEQ ID NO: 772440 - DNA, 120 bp, Artificial Sequence
  ENSG00000239282_13 (sequence is synthesized)
aaacagcctgggatgggcaatgcttaactcagtagtgtcaaatgggggcattcctacctggtcactgcggggagctccttccaggacgcctcccttcatgtcagaggggctggactaggg

SEQ ID NO: 772441 - DNA, 120 bp, Artificial Sequence
  ENSG00000239282_14 (sequence is synthesized)
tacactctgtcccaccactttccgcccatctatcagttttgcacctcttgcttgtcctctcttggggttcctggcagcccatgatgctcacttgtgcttcactgatgttcggggaaggtt

SEQ ID NO: 772442 - DNA, 120 bp, Artificial Sequence
  ENSG00000239282_15 (sequence is synthesized)
cttgccccaaagctggatccctttccagtggggtcgtctgagccatgccctggtctggccctctcaccgtggaatcctttgtttttggcacaggctgggttcattgtcctcccccatccc

SEQ ID NO: 772443 - DNA, 120 bp, Artificial Sequence
  ENSG00000239282_16 (sequence is synthesized)
ttgggcgggtagcagatatggcagagcctgcccaggccaccataccagctccttcccagggttctggaggctgatcgggagcaggggcagtaggctgggtgcctggtagagcccctaaac

SEQ ID NO: 772444 - DNA, 120 bp, Artificial Sequence
  ENSG00000239282_17 (sequence is synthesized)
ctcccatccctccccagcacccccaaggaggcagcctctagcagtcctgaacccagctccatcacgttctttgccttctccctcatcgagggttatatctccattgtcatggatgctgaa

SEQ ID NO: 772445 - DNA, 120 bp, Artificial Sequence
  ENSG00000239282_18 (sequence is synthesized)
agggccgccccctgacacttggacttgggcagggcctcctcttcccactgggtcccttcccttttgggccccagtggggcaggaggaccccggccagttcctggatagcaagacctgccc

SEQ ID NO: 772446 - DNA, 120 bp, Artificial Sequence
  ENSG00000239282_19 (sequence is synthesized)
cagacggacttcatcctggtgcgggagcaggacctgtccgtggtgatccacacgctggcccaggagttcgacatttaccgcgaggtggagtgggcaggtgctagcctgactgcgtgtctg

SEQ ID NO: 772447 - DNA, 120 bp, Artificial Sequence
  ENSG00000239305_0 (sequence is synthesized)
gttatgtctcggctccggccgcggccgccgctgatacacggttgtggagggtacggccgcggtctccggaggtggcgggggtgttggggacgggtgctgcgaccggcactgcccatccga

SEQ ID NO: 772448 - DNA, 120 bp, Artificial Sequence
  ENSG00000239305_1 (sequence is synthesized)
gcgggacgggcgctgagtggccgggaggcagccgggtagccgcctggaggagcagtctcggggcctattattggttttttccctccgagaccgattccatctgcagagaccgcgacgccc

SEQ ID NO: 772449 - DNA, 120 bp, Artificial Sequence
  ENSG00000239305_2 (sequence is synthesized)
ccgagaccgattccatctgcagagaccgcgacgccccatcctgggccgggccgcagtgcccgcccgcctgagaggcgccgcccgccagccggcccgagcgaacctggagccgccgccgtg

SEQ ID NO: 772450 - DNA, 80 bp, Artificial Sequence
  ENSG00000239305_3 (sequence is synthesized)
ccgctcttctcgcggagcctgggcggtcggcggggcctggggcctgggcttcgggcgcggcgttgcggcggccgctcctc

SEQ ID NO: 772451 - DNA, 120 bp, Artificial Sequence
  ENSG00000239305_4 (sequence is synthesized)
agtccggcccccacggcccctcgggccccggcctgccgcccggatccccgcctcctgggcggatctgagttattttttggtctccccctcccccttgagatcgcggcaccggagggccga

SEQ ID NO: 772452 - DNA, 120 bp, Artificial Sequence
  ENSG00000239305_5 (sequence is synthesized)
ccccgccacctgggtcagtgcccgccccgggggaagcgtccctcgttttgttcttccccgcgagctctccccgcgcccctctcctttctgtgcttaatggatgggggttttgagtttttc

SEQ ID NO: 772453 - DNA, 120 bp, Artificial Sequence
  ENSG00000239305_6 (sequence is synthesized)
ccctttatttttgtcggctcttgactgggaggcccggcgcgaggctctgcgtctctgcgtccctcgtcgccgcctcgcgcccgcgcggatcccgtcacctgcttccccgccggggatggc

SEQ ID NO: 772454 - DNA, 120 bp, Artificial Sequence
  ENSG00000239305_7 (sequence is synthesized)
cggccagtgacggcgccgggtggcccgcgcgtggacacggggccctcgcccaagctgccaccgagccgcggcccccgccctcgacccttctctctcccgtattccgagctctctggaaag

SEQ ID NO: 772455 - DNA, 120 bp, Artificial Sequence
  ENSG00000239305_8 (sequence is synthesized)
agaggaaactccagggaagatgtggctgaagctttttttcttgctcctctatttcctggtcctgttcgtcctggccaggttttttgaggccattgtgtggtatgaaactggcatctttgc

SEQ ID NO: 772456 - DNA, 120 bp, Artificial Sequence
  ENSG00000239305_9 (sequence is synthesized)
cacccagctggtggatccggtggcgctgagcttcaagaagctgaagaccattttggagtgccgggggttgggctactcagggttgcccgagaagaaggatgtccgggagctggtggaaaa

SEQ ID NO: 772457 - DNA, 120 bp, Artificial Sequence
  ENSG00000239305_10 (sequence is synthesized)
gtcaggtgacttgatggagggtgagctctattctgctctcaaggaagaagaagcatccgaatcggtttctagtaccaatttcagtggtgaaatgcacttctatgagcttgtggaagacac

SEQ ID NO: 772458 - DNA, 120 bp, Artificial Sequence
  ENSG00000239305_11 (sequence is synthesized)
aaaagatggcatctggctggttcaggtcatagcaaatgacagaagtcccttggtgggcaaaattcactgggagaaaatggttaaaaaggtgtcaagatttggaatacgtacaggcacatt

SEQ ID NO: 772459 - DNA, 120 bp, Artificial Sequence
  ENSG00000239305_12 (sequence is synthesized)
taactgttccagtgatcccagatattgcaggagaagaggctgggtccgatccacactcattatgtctgttccacaaacaagtacttcaaaagggaaagtcatgcttaaagaatacagtgg

SEQ ID NO: 772460 - DNA, 120 bp, Artificial Sequence
  ENSG00000239305_13 (sequence is synthesized)
acgcaagattgaagtagagcacatttttaaatggataactgctcatgcagcttctcggatcaaaaccatttataatgctgaacacttgaaagaagaatggaataaaagtgatcagtattg

SEQ ID NO: 772461 - DNA, 120 bp, Artificial Sequence
  ENSG00000239305_14 (sequence is synthesized)
taaaaatatacctatttgcaaaccttgaccagcccccagctttcttctctgcactaagtataaagtttactggaagagttgagtttatttttgttaatgtagaaaattgggacaacaaga

SEQ ID NO: 772462 - DNA, 120 bp, Artificial Sequence
  ENSG00000239305_15 (sequence is synthesized)
gttatatgacagatattggcatatataatatgccatcatacatacttagaactcctgaaggaatttacaggtatggaaaccacacaggcgaatttatatcccttcaggccatggattcat

SEQ ID NO: 772463 - DNA, 120 bp, Artificial Sequence
  ENSG00000239305_16 (sequence is synthesized)
ttttgcgctcattacaacccgaggtaaatgatctgtttgttttgagcttggttctagttaatcttatggcttggatggacttatttattacacaaggagctaccataaagcgatttgtgg

SEQ ID NO: 772464 - DNA, 120 bp, Artificial Sequence
  ENSG00000239305_17 (sequence is synthesized)
ttctcataagcactttagggacatataattctctattaattatttcctggctacctgtgttgggctttttacagctaccttacttagatagcttttatgaatatagcttaaaattgttga

SEQ ID NO: 772465 - DNA, 120 bp, Artificial Sequence
  ENSG00000239305_18 (sequence is synthesized)
gatattccaatacaaccacactggcttcatgggtaagggcagactggatgttttactcttcacacccagccctgtttctcagtacataccttggtcatggtttactaattgattactttg

SEQ ID NO: 772466 - DNA, 120 bp, Artificial Sequence
  ENSG00000239305_19 (sequence is synthesized)
agaagaagagaaggcgcaacaacaacaatgatgaagtcaatgccaataacttagaatggttatcaagtctgtgggactggtacaccagctacctcttccacccgattgcttcttttcaga

SEQ ID NO: 772467 - DNA, 120 bp, Artificial Sequence
  ENSG00000239305_20 (sequence is synthesized)
actttcctgtagaatctgattgggacgaagaccctgacttattcttggagcgcttagctttccctgacctttggcttcaccctctgataccaactgattatattaaaaacttaccaatgt

SEQ ID NO: 772468 - DNA, 120 bp, Artificial Sequence
  ENSG00000239305_21 (sequence is synthesized)
ggcgatttaaatgtcttggagtccagtctgaagaggaaatgtcggaggggtctcaagatactgaaaatgactcggaaagtgagaacacagacactttgagtagtgagaaggaagtatttg

SEQ ID NO: 772469 - DNA, 120 bp, Artificial Sequence
  ENSG00000239305_22 (sequence is synthesized)
aagataagcaaagcgtacttcacaattctccaggaacagcaagtcactgtgatgctgaggcttgttcatgtgccaataaatattgtcagaccagcccatgtgaaaggaaggggaggtcat

SEQ ID NO: 772470 - DNA, 120 bp, Artificial Sequence
  ENSG00000239305_23 (sequence is synthesized)
atggatcatataacactaatgaagatatggaacctgattggttaacttggcctgctgatatgctgcactgtactgaatgtgttgtttgcctagagaattttgaaaatggatgtttgctaa

SEQ ID NO: 772471 - DNA, 120 bp, Artificial Sequence
  ENSG00000239305_24 (sequence is synthesized)
tggggttgccttgtggtcatgtgtttcatcagaattgcattgtgatgtggttggctgggggccgacattgttgccctgtttgccggtggccttcttataaaaaaaagcagccatatgcac

SEQ ID NO: 772472 - DNA, 120 bp, Artificial Sequence
  ENSG00000239305_25 (sequence is synthesized)
aacaccagcccttgtcaaatgatgtcccatcttaaccatgtgcaatttgtcctttataagctttgagtatcttacagcttgcctttttaatgttagtcacaatgtttttgtggtttgaag

SEQ ID NO: 772473 - DNA, 120 bp, Artificial Sequence
  ENSG00000239305_26 (sequence is synthesized)
tttagtttaatgttagtgcagtgacgggaaatacacattatgctaatgttgatgacagaatttatttggttgccttgtgtgttaattgaatgcatacctaattgtaaaatttttttattt

SEQ ID NO: 772474 - DNA, 120 bp, Artificial Sequence
  ENSG00000239305_27 (sequence is synthesized)
acaacattggaaattcagaagttaatgtttttttgtaagcacaaaagaagtattatagaaatttatcctagcaagactttacaagataggatcaaattctaatggaattgagccggtttc

SEQ ID NO: 772475 - DNA, 120 bp, Artificial Sequence
  ENSG00000239305_28 (sequence is synthesized)
ttatcctaaatgtttcctccctttttacaatctctgtccagcacctcttggttaaataatgtatgctgtgagacatgaaattaaaacagacctatgaaataaattattttaaaaccagaa

SEQ ID NO: 772476 - DNA, 120 bp, Artificial Sequence
  ENSG00000239305_29 (sequence is synthesized)
ggctggcctggtctgaaagaacaatctctggcaggacaactgagaagaatgagattgaaaccctgtccttggcactgtgaactagccagctaagccaatcagcacagccaccttggttta

SEQ ID NO: 772477 - DNA, 120 bp, Artificial Sequence
  ENSG00000239305_30 (sequence is synthesized)
agcccttaaaagagggttgtactttttaaaactatgcttaaaattgaaaatatctactagaaacagaagagaaatattgtctccattgcttgccattctttcagctcagatcatatatat

SEQ ID NO: 772478 - DNA, 120 bp, Artificial Sequence
  ENSG00000239305_31 (sequence is synthesized)
taatctattgtaaaggataactttcaagaattgtttttaacaatttgaattgttgttattttctgtttacagtagtccccccttatctgagggggatgcgttccaagacccccagtggat

SEQ ID NO: 772479 - DNA, 120 bp, Artificial Sequence
  ENSG00000239305_32 (sequence is synthesized)
taaagtttaatgtgtaagttaggcacagtaacaacaacaactaataaaaatagaacaattataacagtatactgaaataacatttatgtaaatgtggtgtctctctctccgaatatctaa

SEQ ID NO: 772480 - DNA, 120 bp, Artificial Sequence
  ENSG00000239305_33 (sequence is synthesized)
ttgtatgtagtattttcggactgcagttgactgcagaaagtgaaactgagggtaaggggagaccactgtattttagaagaagctgactaatttgttctctgtcatttgttttaagtctat

SEQ ID NO: 772481 - DNA, 120 bp, Artificial Sequence
  ENSG00000239305_34 (sequence is synthesized)
gaggagtgttttcataaatgaagatgcacagatggcagccagttcaatcctcttcatatttttaagcttttccaggtccatgttacgtatagtctctgtaatgtgaacagaatttatttt

SEQ ID NO: 772482 - DNA, 120 bp, Artificial Sequence
  ENSG00000239305_35 (sequence is synthesized)
agttttcaaggtagcaacatacatatgacatctttaccaatgacacactatgaaatacatgtagaaccaagtgctcttttttctaagttattcctaacattgtttttctcctttgtccct

SEQ ID NO: 772483 - DNA, 120 bp, Artificial Sequence
  ENSG00000239305_36 (sequence is synthesized)
aacccaagctcatatctttcattagctattcatttaacagttttgtggattctttggccccagtcttcatagcattacaaatagaagatggttacttttctttcaaaagacccttggtca

SEQ ID NO: 772484 - DNA, 120 bp, Artificial Sequence
  ENSG00000239305_37 (sequence is synthesized)
gagaggcagatggcacagtggataggcttctgaagtggagaagttagcataatttatgggttttatggatttatcctcctcctaacatttctgtttctccgttttgacttttgtcatagt

SEQ ID NO: 772485 - DNA, 120 bp, Artificial Sequence
  ENSG00000239305_38 (sequence is synthesized)
tcaaagaaggacatatttgttccctactggctgtgttacatcatatggaatttaaagtcactggaattgaggtagcagtgagaagcatcatatgatttaaaataaagctttgggtcaata

SEQ ID NO: 772486 - DNA, 120 bp, Artificial Sequence
  ENSG00000239305_39 (sequence is synthesized)
tttactgaagtattacatcaatatatttcctgtttggctgacaagagttaatagctgattttaaacttgtttatctttgctcctagacaaaagttttgttcgaggagattctaaattacg

SEQ ID NO: 772487 - DNA, 120 bp, Artificial Sequence
  ENSG00000239305_40 (sequence is synthesized)
tatttctttcttgatactgctatggaggtgaagcacatagcaagccactttatcttatattttgtattggtaaaaaattttataaattctatgtaagaatacaaaaaaattaaaagacca

SEQ ID NO: 772488 - DNA, 87 bp, Artificial Sequence
  ENSG00000239305_41 (sequence is synthesized)
aaaaataaaataaaataaagaacaagaggcaataggcgcctgctttgcttgatcttcctaattttctaggtacaacttttttttctc

SEQ ID NO: 772489 - DNA, 120 bp, Artificial Sequence
  ENSG00000239305_42 (sequence is synthesized)
atgagccactgtacctggccttctaggtaaaacttataaagtacttttggaccagagaaaaatgtaaagctagggacttactgggtagggaaacgtgtgagcatccttcaaaagagcttt

SEQ ID NO: 772490 - DNA, 120 bp, Artificial Sequence
  ENSG00000239305_43 (sequence is synthesized)
cacctattaagtgcatgtccccagattgccttcttcctggttacttcagctgtctgagtatttgaataaattgtatctgcctcaataagaccacttattttcattaaaaagtactatcaa

SEQ ID NO: 772491 - DNA, 120 bp, Artificial Sequence
  ENSG00000239305_44 (sequence is synthesized)
aaccatggttgggtgcagtggttcatgcctgtaattccaacacttgggaggccgaggcagaaggaaccctgaggccaggtatttgaggctgcagtgagccatgattgagccattgcactt

SEQ ID NO: 772492 - DNA, 120 bp, Artificial Sequence
  ENSG00000239305_45 (sequence is synthesized)
cagcctggggaacagagtgagaccctgtcccttaaaaaaaaatgtaatatcaaaaccatttgcttaatgccctaaattgtgtatatgtattcattaagcttcaaacttatgtgataagat

SEQ ID NO: 772493 - DNA, 120 bp, Artificial Sequence
  ENSG00000239305_46 (sequence is synthesized)
gttatgtatgcacgtgtgtctcggtaagtatgaggatggtagtggagtgtcacagaggttatttggcacataaagtgaacttcaagtcacttgtcatcacaatgtgctgtttcttctgct

SEQ ID NO: 772494 - DNA, 120 bp, Artificial Sequence
  ENSG00000239305_47 (sequence is synthesized)
gccctctgacatttgttagacgttctagcacagaggccacagatgaggtggctgcaccacctcttgcgtctcccaaggagttgactgtcagcactcattttacacacccacctgcaactt

SEQ ID NO: 772495 - DNA, 120 bp, Artificial Sequence
  ENSG00000239305_48 (sequence is synthesized)
cacttcctggaggctttgtgagtgtgaaaatggtccttcctcccagaaagagtagaggcccccagagtattatgttgtaattttgaattgtatagtatcagaaatataacatttatgaaa

SEQ ID NO: 772496 - DNA, 120 bp, Artificial Sequence
  ENSG00000239305_49 (sequence is synthesized)
ataaacttggcctatataccctggacttaaacagatggtttcatgatgactttagacatttttggctttcctttaacttcccatttagttatttttatggtcttgtttttaatgtttttt

SEQ ID NO: 772497 - DNA, 120 bp, Artificial Sequence
  ENSG00000239305_50 (sequence is synthesized)
ggtttttactggtatctgcattgaaattctgccttcattaaaggcaggaagattaggagataaagggaaaaggtggtaatgattagaaaggctgacacttataagagaagtcttgacata

SEQ ID NO: 772498 - DNA, 85 bp, Artificial Sequence
  ENSG00000239305_51 (sequence is synthesized)
gattagaaaggctgacacttataagagaagtcttgacatattttgaaggcaacctctactcactgcaacctccacctcacaggtt

SEQ ID NO: 772499 - DNA, 71 bp, Artificial Sequence
  ENSG00000239305_52 (sequence is synthesized)
ttgtatttccgactcaagtgatgcatctgcctcggcctcccaacatgttgggattacaggcgtgagccacc

SEQ ID NO: 772500 - DNA, 120 bp, Artificial Sequence
  ENSG00000239305_53 (sequence is synthesized)
acaggcgtgagccaccacacctggcctctttttcttttcttaagaatcttttgcttttcctaatcctaattgtgtttgaaagctcttgcaaatttgaagtacaagttcaataatgtaaaa

SEQ ID NO: 772501 - DNA, 120 bp, Artificial Sequence
  ENSG00000239305_54 (sequence is synthesized)
gttcaataatgtaaaattcattacattaaagaatgaataagaagaatggtaattcttattgtatgttagagccgttcatgattaagcaaaaagccatagaactagtagtatttattgatt

SEQ ID NO: 772502 - DNA, 120 bp, Artificial Sequence
  ENSG00000239305_55 (sequence is synthesized)
tagtcaaagcaccctttaatagaaaacatgtgtttgactcttggctccataattatactttttaaaaagtgaaatttgaacttgttgaacctacatgtgataatttttagtaagctctat

SEQ ID NO: 772503 - DNA, 120 bp, Artificial Sequence
  ENSG00000239305_56 (sequence is synthesized)
ttggattattgtttaaaattttcttttcagagcaaagagaaattattccaagggccattttcttcctgtgtaacttaattagagagaagaggccacatggtggagaatgtggctagcctt

SEQ ID NO: 772504 - DNA, 120 bp, Artificial Sequence
  ENSG00000239305_57 (sequence is synthesized)
ttaatacagttttgactccctccctctctttgtaactgccacagagtgtgggagagtttaatttacgtttcagtgtttcaagtctttttcctattggatagttgctccttctataagaat

SEQ ID NO: 772505 - DNA, 120 bp, Artificial Sequence
  ENSG00000239305_58 (sequence is synthesized)
tgtaatgataatgtgatgatacagtaaacaagaactgggaacagaatatctttttttttaagtgaaattatattgttgatgtaaacggttggcttgactccattttaggtaattcaagtt

SEQ ID NO: 772506 - DNA, 120 bp, Artificial Sequence
  ENSG00000239306_0 (sequence is synthesized)
attggctaggccagggcgcctgcgcggcggggttctcggtcgccagccattcctgaggaggactgccggtcgttcggacgtcttgcctgtcgctggaggagaggtccgggctctccagga

SEQ ID NO: 772507 - DNA, 120 bp, Artificial Sequence
  ENSG00000239306_1 (sequence is synthesized)
aggtggctgcggcgacaaaatgaagatattcgtgggcaacgtcgacggggcggatacgactccggaggagctggcagccctctttgcgccctacggcacggtcatgagctgcgccgtcat

SEQ ID NO: 772508 - DNA, 120 bp, Artificial Sequence
  ENSG00000239306_2 (sequence is synthesized)
gaaacagttcgccttcgtgcacatgcgcgagaacgcgggcgcgctgcgcgccatcgaagccctgcacggccacgagctgcggccggggcgcgcgctcgtggtggagatgtcgcgcccaag

SEQ ID NO: 772509 - DNA, 120 bp, Artificial Sequence
  ENSG00000239306_3 (sequence is synthesized)
gcctcttaatacttggaagattttcgtgggcaatgtgtcggctgcatgcacgagccaggaactgcgcagcctcttcgagcgccgcggacgcgtcatcgagtgtgacgtggtgaaagacta

SEQ ID NO: 772510 - DNA, 120 bp, Artificial Sequence
  ENSG00000239306_4 (sequence is synthesized)
cgcgtttgttcacatggagaaggaagcagatgccaaagccgcaatcgcgcagctcaacggcaaagaagtgaagggcaagcgcatcaacgtggaactctccaccaagggtcagaagaaggg

SEQ ID NO: 772511 - DNA, 120 bp, Artificial Sequence
  ENSG00000239306_5 (sequence is synthesized)
gcctggcctggctgtccagtctggggacaagaccaagaaaccaggggctggggatacggccttccctggaactggtggcttctctgccaccttcgactaccagcaggcttttggcaacag

SEQ ID NO: 772512 - DNA, 120 bp, Artificial Sequence
  ENSG00000239306_6 (sequence is synthesized)
cactggtggctttgatgggcaagcccgtcagcccacaccacccttctttggtcgcgaccgcagccctctgcgccgttcacctccccgagcctcttatgtggctcctctgacggcccagcc

SEQ ID NO: 772513 - DNA, 120 bp, Artificial Sequence
  ENSG00000239306_7 (sequence is synthesized)
agctacctaccgggcccagccgtccgtgtcactgggagctgcctacagggcccagccttctgcctctttgggtgttggctatcggactcagcccatgacagcccaggcagcctcttaccg

SEQ ID NO: 772514 - DNA, 120 bp, Artificial Sequence
  ENSG00000239306_8 (sequence is synthesized)
cgctcagccctctgtctcccttggggcaccatacaggggccagctggctagtcctagctcccagtctgctgcagcttcttcactcggcccatatggtggagcccagccctcagcctcggc

SEQ ID NO: 772515 - DNA, 120 bp, Artificial Sequence
  ENSG00000239306_9 (sequence is synthesized)
cctttcctcctatgggggtcaggcagctgcagcttcttcgctcaactcctatggggctcagggttcctcccttgcctcctatggtaaccagccatcctcttacggcgcccaggctgcctc

SEQ ID NO: 772516 - DNA, 120 bp, Artificial Sequence
  ENSG00000239306_10 (sequence is synthesized)
ttcctatggggttcgtgcagctgcttcttcctacaacacccagggagcagcttcctccttaggctcctacggggctcaggcagcctcctatggggcccagtctgcagcctcctcactagc

SEQ ID NO: 772517 - DNA, 120 bp, Artificial Sequence
  ENSG00000239306_11 (sequence is synthesized)
atgctgcacagcaggctgcttcctactcttcccaacctgctgcctatgtggcacagccagccacagctgctgcctatgccagccagccagcagcctacgccgcacaagccactaccccaa

SEQ ID NO: 772518 - DNA, 120 bp, Artificial Sequence
  ENSG00000239306_12 (sequence is synthesized)
tggctggctcctatggggcccagccggttgtgcagacccagctgaatagttacggggcccaagcatcaatgggcctttcaggctcctatggggctcagtcggctgctgcggccactggct

SEQ ID NO: 772519 - DNA, 120 bp, Artificial Sequence
  ENSG00000239306_13 (sequence is synthesized)
cctatggtgccgcagcagcctacggggcccaaccttctgccaccctggcagctccttaccgcactcagtcatcagcctcattggctgcttcctatgctgcccagcagcatccccaggctg

SEQ ID NO: 772520 - DNA, 120 bp, Artificial Sequence
  ENSG00000239306_14 (sequence is synthesized)
ctgcctcctaccgcggccagccaggcaatgcctacgatggggcaggtcagccgtctgcagcctacctgtccatgtcccagggggccgttgccaacgccaacagcaccccgccgccctatg

SEQ ID NO: 772521 - DNA, 120 bp, Artificial Sequence
  ENSG00000239306_15 (sequence is synthesized)
agcgtacccgcctctccccaccccgggccagctacgacgatccctacaaaaaggctgtcgccatgtcgaaaaggtatggttccgaccggcgtttagccgagctctctgattaccgccgtt

SEQ ID NO: 772522 - DNA, 120 bp, Artificial Sequence
  ENSG00000239306_16 (sequence is synthesized)
tatcagagtcgcagctttcgttccgccgctcgccgacaaagtcctcgctggattaccgtcgcctgcccgatgcccattccgattacgcacgctattcgggctcctataatgattacctgc

SEQ ID NO: 772523 - DNA, 120 bp, Artificial Sequence
  ENSG00000239306_17 (sequence is synthesized)
gggcggctcagatgcactctggctaccagcgccgcatgtagggccatcctgggatggggcaccacagggagggagggagaaaagaggtgggtagggttacagatccaggttataactact

SEQ ID NO: 772524 - DNA, 120 bp, Artificial Sequence
  ENSG00000239306_18 (sequence is synthesized)
ctggcccatacctttcctggttgtggtttttcatgccctctaccatgtgggccttccccaggagatgatcctgttaagtgttcggcagtaacctactttgttccttcgcctcagcagcaa

SEQ ID NO: 772525 - DNA, 120 bp, Artificial Sequence
  ENSG00000239306_19 (sequence is synthesized)
atcttgctactggctctagatctgcggtttcccctctaccctgcctcccgtctccccagaatgggaatttcttttatgtttttatttttttcctggctcccttttatttttgtgcgcgat

SEQ ID NO: 772526 - DNA, 120 bp, Artificial Sequence
  ENSG00000239306_20 (sequence is synthesized)
atttaaggtcgtctggatggggaagcaacctgcagctgaggtcgccggcgcctttttctttttagatgggaaggaggccaggaaagggtcagcttaaccatttcctatgtgccaagctgt

SEQ ID NO: 772527 - DNA, 120 bp, Artificial Sequence
  ENSG00000239306_21 (sequence is synthesized)
gccagcagtccagggtaccctgactgtccctctgtagactgttgagactgagttcctgttgggacagtcagttggtatgtatccaagtccctgctgaccactaatgttctagctgatggt

SEQ ID NO: 772528 - DNA, 120 bp, Artificial Sequence
  ENSG00000239306_22 (sequence is synthesized)
gagcggcacagtcccacttccccatctccccaagtaggtggtgttagaaaaccttaattttttttcccttttgtatggactacaaataaaacttggggcaatttgcagtttggaaacctg

SEQ ID NO: 772529 - DNA, 120 bp, Artificial Sequence
  ENSG00000239306_23 (sequence is synthesized)
gggggtcggtcactgcgcggttgggaggggtggggaagtgcgcgggagcaggtcggaggtgttgggggcgcgttgggtagagccaccctcctcccctgcggtccaggaaccgtccaccaa

SEQ ID NO: 772530 - DNA, 120 bp, Artificial Sequence
  ENSG00000239306_24 (sequence is synthesized)
ccttctcctggtctcctgggcctggcacccagcggaaattgggaagtgacgggcacaagccggatcatgaagcggggaagatttctccacttccccacttcctctccagacgtcggtcag

SEQ ID NO: 772531 - DNA, 120 bp, Artificial Sequence
  ENSG00000239306_25 (sequence is synthesized)
agcaagggaagagggaaaaggtgggggctgacgccccaaggccgccctcctgttccctcccgatgaatgtgctcaagcggaaggttatacaagtccacgactatccggaatcgggctttc

SEQ ID NO: 772532 - DNA, 120 bp, Artificial Sequence
  ENSG00000239306_26 (sequence is synthesized)
atacttcgatgtaagagactgggaaagatttgaacatcatatcctccactgatgtctttttatctgtttgtgatgacggaaagtgagggttgaaagttgggagtgtagtagaagcgactg

SEQ ID NO: 772533 - DNA, 120 bp, Artificial Sequence
  ENSG00000239306_27 (sequence is synthesized)
gctctctaaagagcgtactcatttcttatgctgggaatggtcatttgattgagtctccttgtgttggctgacagggctttgaaaagcacagaagcttggtgttgcaccagacaaccagct

SEQ ID NO: 772534 - DNA, 120 bp, Artificial Sequence
  ENSG00000239306_28 (sequence is synthesized)
tcaatagcaacagtggattgtaaccactccacagcttcctcctattgggtgttcaaagatgaacagcttccggaaacatgtacagacttgtggggagatctgaaagacaaaagaggaaaa

SEQ ID NO: 772535 - DNA, 120 bp, Artificial Sequence
  ENSG00000239306_29 (sequence is synthesized)
tatcttctcttcatttttaatgtctggaggcccctccctgcaacaagtgcctatgagctccagcaactctgcttccccttcactttgggcctttctgcttgccatctccagactacgcgt

SEQ ID NO: 772536 - DNA, 120 bp, Artificial Sequence
  ENSG00000239382_0 (sequence is synthesized)
gcggaaatggctgggagggggatggggatgttgaatttggaaattggaggggacgctggtggacggattgggtgcaaggagttggtgttgatggaggagcaggacgccagagtcccagcc

SEQ ID NO: 772537 - DNA, 120 bp, Artificial Sequence
  ENSG00000239382_1 (sequence is synthesized)
ctggaaccgttcagagtggagcaggcaccacctgtaatctactatgtccctgacttcatctccaaagaagaggaggagtatttgcttcgacaggtttttaatgccccaaagccaaagtgg

SEQ ID NO: 772538 - DNA, 120 bp, Artificial Sequence
  ENSG00000239382_2 (sequence is synthesized)
acccagctctctgggagaaagttacagaactggggtgggcttcctcatccccgagggatggttcctgagcggctgcccccatggctccagcgctacgtggacaaagtgtcaaacctcagc

SEQ ID NO: 772539 - DNA, 120 bp, Artificial Sequence
  ENSG00000239382_3 (sequence is synthesized)
ctctttggaggcctcccagctaaccatgtcctcgtgaaccagtatctgcctggggagggcatcatgccccacgaggacggaccactgtactacccgactgtcagcaccatcagcctgggc

SEQ ID NO: 772540 - DNA, 120 bp, Artificial Sequence
  ENSG00000239382_4 (sequence is synthesized)
tggacttctacgagccgcggcggccagaggacgatgaccctacagaacagcctcggcctccgccccggcccaccacctcgctactgctggaaccgcgcagcctgctggtgctccgcggcc

SEQ ID NO: 772541 - DNA, 120 bp, Artificial Sequence
  ENSG00000239382_5 (sequence is synthesized)
ccgcctacacgcgtcttctccacggcatcgccgccgcccgcgtagacgcgctggacgccgcctcctcgccgcccaatgcggcagcctgcccgtcggcgcggccgggagcctgcctggtgc

SEQ ID NO: 772542 - DNA, 120 bp, Artificial Sequence
  ENSG00000239382_6 (sequence is synthesized)
gcggcacccgggtctcgctgaccatccgccgcgtgccccgcgtgctgcgcgccggcctcctgctgggcaagtgaccgccagggccgggacccctcggattcccaggttcctgcccctttg

SEQ ID NO: 772543 - DNA, 120 bp, Artificial Sequence
  ENSG00000239382_7 (sequence is synthesized)
gggctgctgtgactccgcgacctaggaaccgtgggcaaagggggctcccctgggttatttattttcccaataattttgtgtgagctacagaagaccccataccaaataaacaaaaaaatc

SEQ ID NO: 772544 - DNA, 120 bp, Artificial Sequence
  ENSG00000239382_8 (sequence is synthesized)
gggagggggatggggatgttgaatttggaaattggaggggacgctggtggacggggctctctgtgtggcttgtaagatgctgaagactcagattttagagaccaagtgcgtttcagaaga

SEQ ID NO: 772545 - DNA, 120 bp, Artificial Sequence
  ENSG00000239382_9 (sequence is synthesized)
gacttctgagctgtgctggggcaggggactctgtacccaccctcactcattaggcagccacatctcccaaacaggcattcacctccctgtccctggcttgggaagcccccctttgaccca

SEQ ID NO: 772546 - DNA, 120 bp, Artificial Sequence
  ENSG00000239382_10 (sequence is synthesized)
atgttgaatttggaaattggaggggacgctggtggacggattgggtgcaaggagttggtgttgatggaggagcaggacgccagagtcccagccctggaaccgttcagagtggagcaggtt

SEQ ID NO: 772547 - DNA, 120 bp, Artificial Sequence
  ENSG00000239382_11 (sequence is synthesized)
gtcagaactcagggtgcagagggtgaaggaggcaggctgattcctgagttcttgggttgggactgcccccttccaccaaattcattcttactgtcagagtccattctggaatggcactgg

SEQ ID NO: 772548 - DNA, 120 bp, Artificial Sequence
  ENSG00000239382_12 (sequence is synthesized)
tcccttgactttagaccctgacctgtctgaggacatcctgagcctgtctccaggcataggggttgctctgtgatgatatgtcctctgtgtgggttgaagggccacaccttcagggggtct

SEQ ID NO: 772549 - DNA, 120 bp, Artificial Sequence
  ENSG00000239382_13 (sequence is synthesized)
catattcctccccaatgtccatcctctgtatgagagcccccaaggctgcagtgaagaccccgacagaaggaacaaggaagttacagagctcatactccctctactgagatagcccaatcc

SEQ ID NO: 772550 - DNA, 120 bp, Artificial Sequence
  ENSG00000239382_14 (sequence is synthesized)
tgctagcttagagaatagggggttataaacataggctgagatagcccagttcagatcattgagactggggagtaaagaattttgtattcagatttctgtgctgagatagcccagtaaact

SEQ ID NO: 772551 - DNA, 120 bp, Artificial Sequence
  ENSG00000239382_15 (sequence is synthesized)
ctttcctgtgctaaaatagcccagcatagacccagagcacaataaggttaccaaatacagaccatctacgctgagatggcccagtctgcattctgttcttaaggtttggggaaagaagaa

SEQ ID NO: 772552 - DNA, 120 bp, Artificial Sequence
  ENSG00000239382_16 (sequence is synthesized)
ttttcaaagctcagagttcctgccctttgcagccccagtgcctaagttacagagcacagatcttccctgtgttggagtaacccactgatcttgagtccaggaaaaaattagctacagaac

SEQ ID NO: 772553 - DNA, 120 bp, Artificial Sequence
  ENSG00000239382_17 (sequence is synthesized)
acagacttttttgctgagatagcccattccagacctttgcgttcttggcattgaaaaatctacatattatagaattcctgggctgaaatagcccagtacagctccataaccatgaaggga

SEQ ID NO: 772554 - DNA, 120 bp, Artificial Sequence
  ENSG00000239382_18 (sequence is synthesized)
atgagtagattatcaactagagctagacttgttggactgagatagcccattctagatcattaggatcttggcagtggaagattttcaaagtactttctttgctgtgctgagatagcccag

SEQ ID NO: 772555 - DNA, 120 bp, Artificial Sequence
  ENSG00000239382_19 (sequence is synthesized)
ctttgcatactccctcccccaggcaataggaacaagtcggttgcagaactcaaactgtcctcagagagcccaggaatcaggaatttttgtttgtttgttttttgagacaatcttgctctg

SEQ ID NO: 772556 - DNA, 120 bp, Artificial Sequence
  ENSG00000239382_20 (sequence is synthesized)
gctggactgcagtggcgtgatctcggttcactgtagcctccgcctcctgggttcaactgattcttgtgtttcagtctcctgagtagcttggattgcaggcgtgtgacaccacaccgcctc

SEQ ID NO: 772557 - DNA, 120 bp, Artificial Sequence
  ENSG00000239382_21 (sequence is synthesized)
caggtttggcacggaatcaggaaattagaatgcagactatttgctgggctgaaagagccctgtccagccccagaactctgagtagattgtgagacccacaactctcagaccacggttgtg

SEQ ID NO: 772558 - DNA, 120 bp, Artificial Sequence
  ENSG00000239382_22 (sequence is synthesized)
cagccctgattcctaaatcctggtagacacaggtgggctttggggccaaaggcgttcccaggaaaaaaggcaaaccacaaaatcctaggaacccaccgccccagggaatggtcccacaga

SEQ ID NO: 772559 - DNA, 120 bp, Artificial Sequence
  ENSG00000239382_23 (sequence is synthesized)
cacagatgacccatttccatcccggaggtaaaggcccctatgttggtctaggtgggaggatcatagaggggtgatcctgagaaaggagtgacccccttcccacctcttaggtttttaatg

SEQ ID NO: 772560 - DNA, 120 bp, Artificial Sequence
  ENSG00000239382_24 (sequence is synthesized)
agacttaagacatcagagggtccctgacagctcaaggggccccaagagccaggaggattctgaaggggtcagtggaggtcctgagggattagggatttcctgatgagttgggagtatctg

SEQ ID NO: 772561 - DNA, 120 bp, Artificial Sequence
  ENSG00000239382_25 (sequence is synthesized)
aaagggacctgtggtctggagaagtgaggaaacctctgaaggacccagtggctatctccaaacggtcaggggtccctgagaggatcagggtgcttccagccactgtggaatccctaatgg

SEQ ID NO: 772562 - DNA, 120 bp, Artificial Sequence
  ENSG00000239382_26 (sequence is synthesized)
gattgggtgcaaggagttggtgttgatggaggagcaggacgccagagtcccagccctggaaccgttcagagtggagcaggttgtcagaactcagggtgcagagggtgaaggaggcaccac

SEQ ID NO: 772563 - DNA, 120 bp, Artificial Sequence
  ENSG00000239382_27 (sequence is synthesized)
ggggatggggatgttgaatttggaaattggaggggacgctggtggacggcaccacctgtaatctactatgtccctgacttcatctccaaagaagaggaggagtatttgcttcgacagcac

SEQ ID NO: 772564 - DNA, 120 bp, Artificial Sequence
  ENSG00000239382_28 (sequence is synthesized)
ggaaatggctgggagggggatggggatgttgaatttggaaattggaggggacgctggtggacggtcagttttggggagtgctgggggtagagatggatgtcaatagggctgaaagtgggg

SEQ ID NO: 772565 - DNA, 120 bp, Artificial Sequence
  ENSG00000239382_29 (sequence is synthesized)
atccgggggagcccagagtaggagtccgaggaggctcagagcttggagtcctaaaaggctcggagtcggggatctgaatggttcagggagggaagaagatttgggagtcagcctcagagc

SEQ ID NO: 772566 - DNA, 120 bp, Artificial Sequence
  ENSG00000239382_30 (sequence is synthesized)
taaagatctcagggtgctggagtgaaggggcgctcaggaggggaaatccgaggggcgtccaaatggggggatccgaggaggctgagggtggacatgtctgaggaggctcagattggggtc

SEQ ID NO: 772567 - DNA, 120 bp, Artificial Sequence
  ENSG00000239382_31 (sequence is synthesized)
acaggagtgcacagaatgggattcggtggggggcgggggtcgctgagtgttgatagccgggctcacagttgcaggtctgaagcggggtctcaaggtgtttaaaggggctctggagtgcag

SEQ ID NO: 772568 - DNA, 120 bp, Artificial Sequence
  ENSG00000239382_32 (sequence is synthesized)
ccctgggggctatgtgtagagcttttgagaaaggctccctgtgtgtggggccagagaatgttctctgtgggaggattgagaaggcatatgtgtagttggatgggcccttagtggacagag

SEQ ID NO: 772569 - DNA, 120 bp, Artificial Sequence
  ENSG00000239382_33 (sequence is synthesized)
cttcaacctcgcacatcctccaagatgacctggtcccacatgccttcggggtactcctggcactctcccagataccttcccttgtcccctcatggggtgtacccacttcctcccagacac

SEQ ID NO: 772570 - DNA, 120 bp, Artificial Sequence
  ENSG00000239382_34 (sequence is synthesized)
ccaacccatctgcttacagggtgtctgtcccacatgccatgattttcacaggctccccgatgccccaacctgctgaatggatacccctgactccccagcagacactgatatccttagata

SEQ ID NO: 772571 - DNA, 120 bp, Artificial Sequence
  ENSG00000239388_0 (sequence is synthesized)
gttagtccttaacagtgaaaacttcactgctgtcctagaggataaaacaaaagttgatctcttcacaactggaaaaatacttttaattcactctgactttaaagtaaacctgtccacgtt

SEQ ID NO: 772572 - DNA, 120 bp, Artificial Sequence
  ENSG00000239388_1 (sequence is synthesized)
tcacatggataattacaccagcgatgaagacatagatgaagactttgacacccagctcatcattcaacagagtttgcaggatatttataagccaggaacagcacaacatgcacctaagga

SEQ ID NO: 772573 - DNA, 120 bp, Artificial Sequence
  ENSG00000239388_2 (sequence is synthesized)
tgagagtttgcattcctttttgagcgctgactataagaagatagttgaaacaatagagaaaggtaaggaagatgcattgtcacacttaaccaagtaccattccgcatttggtgaagcaga

SEQ ID NO: 772574 - DNA, 120 bp, Artificial Sequence
  ENSG00000239388_3 (sequence is synthesized)
tgagataggctggattcctctgcataaggctgcagtgcaattaaataggaaaattttggaaataaccctaagcgcttcagaccccagtctgtgggagcaaaccactcacaatggtgaaac

SEQ ID NO: 772575 - DNA, 120 bp, Artificial Sequence
  ENSG00000239388_4 (sequence is synthesized)
gccactttttttggctgtcagcagttgcctcttagaaaatgccacttttcttcttctcaatggctgcaatccaaatgctaagaatttcgaaggcaattctcctcttcttgcagctgtgct

SEQ ID NO: 772576 - DNA, 120 bp, Artificial Sequence
  ENSG00000239388_5 (sequence is synthesized)
gcgtgactgctatgacatggctgccttgctgatcaactatggagcagatgtcaatctgcgttgtgccaacgagaggacagctctccacgaagcagccaaactgggcagagaggacatggt

SEQ ID NO: 772577 - DNA, 120 bp, Artificial Sequence
  ENSG00000239388_6 (sequence is synthesized)
gaagcttatgctggtttctggggcacaccctgacccacagagcacgtatggattcactcctcttgctcttgctgcccaaagtggacacactgaaatcatggaaatgttactgcggaaagg

SEQ ID NO: 772578 - DNA, 120 bp, Artificial Sequence
  ENSG00000239388_7 (sequence is synthesized)
agctaatgctcatggtcaggcctctgattcttcttccatcttacttgaagccgcaagtggaggaaatccagatgctgtggctctcttgctggagtatggagctgatgccaacatccctaa

SEQ ID NO: 772579 - DNA, 120 bp, Artificial Sequence
  ENSG00000239388_8 (sequence is synthesized)
gaattcaggccacctgcccatccatgtggcagctgacaggggccacttactagctctaaagatactgattccagttacggatcttgctgccattaagcagagtgggatcagtccagttca

SEQ ID NO: 772580 - DNA, 120 bp, Artificial Sequence
  ENSG00000239388_9 (sequence is synthesized)
ctgtgcagcagcaggagcacatcctcagtgcctggaactcctcatccaggctggatttgatgtgaacttcatgctggatcagagaattaacaaacactacgatgaccacaggaagtcagc

SEQ ID NO: 772581 - DNA, 120 bp, Artificial Sequence
  ENSG00000239388_10 (sequence is synthesized)
tttgtattttgctgtatcaaacagtgacctctcttcagtcaagctgcttctgagtgctggagctctgcctaatcaagacccggttaactgcctccagatagccctcaggatgggcaacta

SEQ ID NO: 772582 - DNA, 120 bp, Artificial Sequence
  ENSG00000239388_11 (sequence is synthesized)
tgagctgatcagtctgctgctaaggcatggggccaatgtcaattacttctgcagagttaaccctttacatttcccatcagcactgcaatacactctgaaagatgaagtcatgctcaggat

SEQ ID NO: 772583 - DNA, 120 bp, Artificial Sequence
  ENSG00000239388_12 (sequence is synthesized)
gctgctgaactatgggtatgacacagagcgatgttttgattgcccacatggagacaaagtccatccttcctatactgttgaaggctggacatctacagttatcaaagatactaagttctg

SEQ ID NO: 772584 - DNA, 120 bp, Artificial Sequence
  ENSG00000239388_13 (sequence is synthesized)
gttgatcaagttcggatctgttcaaagttgaaagctgtgctccaaaaacaggggatctggtcagaaatacattttatcttaacaaaccctcgctccctaaaacatttgtgccgcctaaag

SEQ ID NO: 772585 - DNA, 120 bp, Artificial Sequence
  ENSG00000239388_14 (sequence is synthesized)
atccggaaatgcatgggacggttacatttgcgctgccctgtcttcatgtcatttcttccattacccaatcgtctaaaagcatatgtcctttacaaagaatacgacctttatggacaagga

SEQ ID NO: 772586 - DNA, 120 bp, Artificial Sequence
  ENSG00000239388_15 (sequence is synthesized)
atttttacaggaacctggtaatcaaaccattctaatggaaaaggacaacaaactgcccctcactactggcttggtttggtctactggaagcagctatcaaccgactttgttcttccaagt

SEQ ID NO: 772587 - DNA, 120 bp, Artificial Sequence
  ENSG00000239388_16 (sequence is synthesized)
cctagtggaaaagacaaaaaagaaactaagttacttgtctgcagtcaaatggcaaattatgcagttaagatacattcttgagagccacttcttctgtcataaatatgtatgcatacttct

SEQ ID NO: 772588 - DNA, 120 bp, Artificial Sequence
  ENSG00000239388_17 (sequence is synthesized)
gacaacttgataaaaagaaaagctacacccaaacaatacaacaccaaaatgaattttggcaccatcctataaaagccagcattcaaactaaaatctaatattttatctttctttttttat

SEQ ID NO: 772589 - DNA, 120 bp, Artificial Sequence
  ENSG00000239388_18 (sequence is synthesized)
gaccaacaaccaaataaagcccatcatcaatcatctctcactatatattatagtaaaaccctcgaaagggatcacccccacactcctttcccttcccctctccagcccttttctccatcc

SEQ ID NO: 772590 - DNA, 120 bp, Artificial Sequence
  ENSG00000239388_19 (sequence is synthesized)
ctgtccaattcatctttgctaaatcaggtgtcaccttccctcagcctcgcctatcaagaaagcctcacttcaatgtcatctttgccacttccctcttctttgtccagagagccagcccac

SEQ ID NO: 772591 - DNA, 120 bp, Artificial Sequence
  ENSG00000239388_20 (sequence is synthesized)
agccaatgcttattgatctgttctaagcatcccagctgtctcctcttttctattcctactgtcaatctacaacccataacacgctcttacaatttcatggatcatttaatgcattcttca

SEQ ID NO: 772592 - DNA, 120 bp, Artificial Sequence
  ENSG00000239388_21 (sequence is synthesized)
agttttgctctgaaatttgtcttttaaaattattctgttggatggacaatgatttgacactcctggcaatattaaaaatatacatttcattatatatttcatataacatatatatttatt

SEQ ID NO: 772593 - DNA, 120 bp, Artificial Sequence
  ENSG00000239388_22 (sequence is synthesized)
tatttcccccccatagaaggcaaaatggctttcagcaatggcagttaagtctacacagcctctcaactgctttgacagagacaacctcctctgaaatattaaagttctggtatatttttg

SEQ ID NO: 772594 - DNA, 120 bp, Artificial Sequence
  ENSG00000239388_23 (sequence is synthesized)
aaacagtcatattacatgtcaacgtaactataatgtaaacatcatatcaaaaaacagatgtgacccttttctgctatggtatgaatcatctgtttatgaagtggctgaacaagcagaaac

SEQ ID NO: 772595 - DNA, 120 bp, Artificial Sequence
  ENSG00000239388_24 (sequence is synthesized)
agcccttcatttggaaattcaaatctgaaagtcatagtgctgaattaagtcttcacaaacaacacataaagatccagacattaggactgtataccttttcaatctgtttttgtttattga

SEQ ID NO: 772596 - DNA, 120 bp, Artificial Sequence
  ENSG00000239388_25 (sequence is synthesized)
gttctttctgttgcttctcttttactctctctatttctttttgtttttctgatgccctacgatcctaaagaacagatgaataaaactaatgaattaaatatgaaataactttaaatttta

SEQ ID NO: 772597 - DNA, 120 bp, Artificial Sequence
  ENSG00000239389_0 (sequence is synthesized)
cttcctgcagaaaatatagcagaaagcggaatacctcttgcgaatccttccgcactaggaagccataaaaattgggccttgagagacagtttgaggtaaggcgttgtatatattgcagat

SEQ ID NO: 772598 - DNA, 120 bp, Artificial Sequence
  ENSG00000239389_1 (sequence is synthesized)
agctctgaggtttttggagtgtaccatgctgtcttcctggcaaggaggcccaagaccgcggcaactactgctctggcttctgatcctcgcagcctgggagacgggtagtggccagctcca

SEQ ID NO: 772599 - DNA, 120 bp, Artificial Sequence
  ENSG00000239389_2 (sequence is synthesized)
ctactccgtccccgaggaagcaaaacacggcaccttcgtgggccgcatcgctcaggacctggggctggagctggcggagctggtgccgcgcctgttccgggtggcgtccaaaagacacgg

SEQ ID NO: 772600 - DNA, 120 bp, Artificial Sequence
  ENSG00000239389_3 (sequence is synthesized)
ttttgtttgtgaattctcggatcgaccgcgaggagctgtgtgggcggagcgcggagtgcagcatccacctggaggtgatcgtggacaggcctctgcaggttttccatgtggaggtgaagg

SEQ ID NO: 772601 - DNA, 120 bp, Artificial Sequence
  ENSG00000239389_4 (sequence is synthesized)
gcctctgcaggttttccatgtggaggtgaaggtgagggacattaacgacaacccgcccatattccctgaaagcaagaaacgaataatcattgcagaatctagacctccggaaactcgatt

SEQ ID NO: 772602 - DNA, 120 bp, Artificial Sequence
  ENSG00000239389_5 (sequence is synthesized)
tccactagatggcgcatccgatgcagatattggagtaaactcggcattgacctaccgactggatcccaacgattatttcactttggacgcacaaaacagtcttgagcaaatgtcttcatt

SEQ ID NO: 772603 - DNA, 120 bp, Artificial Sequence
  ENSG00000239389_6 (sequence is synthesized)
atcacttgtactgaggaaaacactggacagagaggaaattcaggaacatagtttattactgacagccagtgatggaggtaaacccgagctgactggcacagttcagctgctcatcacgat

SEQ ID NO: 772604 - DNA, 120 bp, Artificial Sequence
  ENSG00000239389_7 (sequence is synthesized)
tctggacgtgaatgacaacgccccggaattttaccaatccgtttataaagtgacggtgttagagaacgccttcaatggaacattagtgatcaagctaaatgccacagatcctgatgatgg

SEQ ID NO: 772605 - DNA, 120 bp, Artificial Sequence
  ENSG00000239389_8 (sequence is synthesized)
tacaaatggagatatagtttactcatttagaaggcctgtatggcctgcagtggtatatgcatttaccataaatccgaacaatggagaaattaggacaaaaggcaaactagatttcgaaga

SEQ ID NO: 772606 - DNA, 120 bp, Artificial Sequence
  ENSG00000239389_9 (sequence is synthesized)
aaagaaattatatgaaatatccgtggaggcagttgacaaaggaaatattccaatggcgggtcattgtacccttttggtggaagtactagatgtaaatgataacgccccagaggttaccat

SEQ ID NO: 772607 - DNA, 120 bp, Artificial Sequence
  ENSG00000239389_10 (sequence is synthesized)
cacttctttgtcactccccatcagagaagacactcagcctagcgccattattgccctaatcagtgtgtccgatcgtgactctggctcaaatggacaggtcacctgcaccttgacgccgca

SEQ ID NO: 772608 - DNA, 120 bp, Artificial Sequence
  ENSG00000239389_11 (sequence is synthesized)
tgtccccttcaagctggtgtccacctacaagaactactactcattagtgctggacagcgccctggaccgcgagagcgtatcagcctatgaactggtggtgaccgcgcgggacgggggctc

SEQ ID NO: 772609 - DNA, 120 bp, Artificial Sequence
  ENSG00000239389_12 (sequence is synthesized)
gccttcgctgtgggccacggccagcgtgtcggtgggggtggccgacgtgaacgacaacgcgccggcgttcgcgcagcccgagtacacggtgttcgtgaaggaaaacaatccgccgggctg

SEQ ID NO: 772610 - DNA, 120 bp, Artificial Sequence
  ENSG00000239389_13 (sequence is synthesized)
ccacatcttcacggtgtctgctcaggacgcggacgcacaggagaacgcgctggtctcctactcgctggtggagcggcgggtgggcgagcgtgcgctgtcgagctacgtgtcggtgcacgc

SEQ ID NO: 772611 - DNA, 120 bp, Artificial Sequence
  ENSG00000239389_14 (sequence is synthesized)
ggagagcggcaaggtgtacgcgctgcagccgttggaccacgaggagctggagctgttgcagttccaggtgagcgcgcgcgactctggcgtgccgcctctgggcagcaacgtgacgctgca

SEQ ID NO: 772612 - DNA, 120 bp, Artificial Sequence
  ENSG00000239389_15 (sequence is synthesized)
ggtgttcgtgctggacgagaacgacaacgctccggcgctgctgacgcccggggctggcagcgcgggaggcacagtgagcgagctgatgccgcggtcggtgggtgcaggccacgtggtggc

SEQ ID NO: 772613 - DNA, 120 bp, Artificial Sequence
  ENSG00000239389_16 (sequence is synthesized)
gaaggtgcgcgcggtggacgccgattcgggctacaatgcgtggctttcgtatgaattgcagctggcggcggtcggcgcgcgcatcccgttccgcgtggggctgtacactggcgagatcag

SEQ ID NO: 772614 - DNA, 120 bp, Artificial Sequence
  ENSG00000239389_17 (sequence is synthesized)
cacgacgcgccctctggacgaggtggacgcgccgcaccaccgccttctggtgctggtgaaggaccacggtgagcccgcgctgacggccacggcaacggtgctgttgtcgctggtggagag

SEQ ID NO: 772615 - DNA, 120 bp, Artificial Sequence
  ENSG00000239389_18 (sequence is synthesized)
cggccaagcgccacaggcttcgtcgagggcgtcggcaggcgctgtgggtccagaagcggcgctggtggatgtcaatgtttacttgatcattgccatctgcgcggtgtccagcctgttggt

SEQ ID NO: 772616 - DNA, 120 bp, Artificial Sequence
  ENSG00000239389_19 (sequence is synthesized)
gctcacgttgctgctgtatactgcgctgcggtgctcggcaccgcccaccgagggcgcgtgcgcgccgggcaagcccactctagtgtgctccagcgcggcagggagttggtcgtactcgca

SEQ ID NO: 772617 - DNA, 120 bp, Artificial Sequence
  ENSG00000239389_20 (sequence is synthesized)
gcagaggcggccgagggtgtgctctggggagggcccgcataagacggacctcatggccttcagtcccagccttcctccttgtctgggttctgcagagggaacaggccagagggaggagga

SEQ ID NO: 772618 - DNA, 120 bp, Artificial Sequence
  ENSG00000239389_21 (sequence is synthesized)
ctcagaatgcttgaaagagccacgacagcccaaccctgactggcgttactctgcctccctgagagcaggcatgcacagctctgtgcacctagaggaggctggcattctacgggctggtcc

SEQ ID NO: 772619 - DNA, 120 bp, Artificial Sequence
  ENSG00000239389_22 (sequence is synthesized)
ctgatcagcagtggccaacagtatccagtgcaacaccagaaccagaggcaggagaagtgtcccctccagtcggtgcgggtgtcaacagcaacagctggacctttaaatacggaccaggca

SEQ ID NO: 772620 - DNA, 120 bp, Artificial Sequence; identical to SEQ ID NO: 80633
  ENSG00000239389_23 (sequence is synthesized)

SEQ ID NO: 772621 - DNA, 120 bp, Artificial Sequence; identical to SEQ ID NO: 80634
  ENSG00000239389_24 (sequence is synthesized)

SEQ ID NO: 772622 - DNA, 120 bp, Artificial Sequence; identical to SEQ ID NO: 80635
  ENSG00000239389_25 (sequence is synthesized)

SEQ ID NO: 772623 - DNA, 120 bp, Artificial Sequence; identical to SEQ ID NO: 80636
  ENSG00000239389_26 (sequence is synthesized)

SEQ ID NO: 772624 - DNA, 120 bp, Artificial Sequence; identical to SEQ ID NO: 80637
  ENSG00000239389_27 (sequence is synthesized)

SEQ ID NO: 772625 - DNA, 120 bp, Artificial Sequence; identical to SEQ ID NO: 80638
  ENSG00000239389_28 (sequence is synthesized)

SEQ ID NO: 772626 - DNA, 120 bp, Artificial Sequence; identical to SEQ ID NO: 80639
  ENSG00000239389_29 (sequence is synthesized)

SEQ ID NO: 772627 - DNA, 120 bp, Artificial Sequence; identical to SEQ ID NO: 80640
  ENSG00000239389_30 (sequence is synthesized)

SEQ ID NO: 772628 - DNA, 120 bp, Artificial Sequence; identical to SEQ ID NO: 80641
  ENSG00000239389_31 (sequence is synthesized)

SEQ ID NO: 772629 - DNA, 120 bp, Artificial Sequence; identical to SEQ ID NO: 80642
  ENSG00000239389_32 (sequence is synthesized)

SEQ ID NO: 772630 - DNA, 120 bp, Artificial Sequence; identical to SEQ ID NO: 80643
  ENSG00000239389_33 (sequence is synthesized)

SEQ ID NO: 772631 - DNA, 120 bp, Artificial Sequence; identical to SEQ ID NO: 80644
  ENSG00000239389_34 (sequence is synthesized)

SEQ ID NO: 772632 - DNA, 120 bp, Artificial Sequence; identical to SEQ ID NO: 80645
  ENSG00000239389_35 (sequence is synthesized)

SEQ ID NO: 772633 - DNA, 120 bp, Artificial Sequence; identical to SEQ ID NO: 80646
  ENSG00000239389_36 (sequence is synthesized)

SEQ ID NO: 772634 - DNA, 120 bp, Artificial Sequence; identical to SEQ ID NO: 80647
  ENSG00000239389_37 (sequence is synthesized)

SEQ ID NO: 772635 - DNA, 120 bp, Artificial Sequence; identical to SEQ ID NO: 80648
  ENSG00000239389_38 (sequence is synthesized)

SEQ ID NO: 772636 - DNA, 120 bp, Artificial Sequence; identical to SEQ ID NO: 80649
  ENSG00000239389_39 (sequence is synthesized)

SEQ ID NO: 772637 - DNA, 120 bp, Artificial Sequence; identical to SEQ ID NO: 80650
  ENSG00000239389_40 (sequence is synthesized)

SEQ ID NO: 772638 - DNA, 120 bp, Artificial Sequence; identical to SEQ ID NO: 80651
  ENSG00000239389_41 (sequence is synthesized)

SEQ ID NO: 772639 - DNA, 120 bp, Artificial Sequence; identical to SEQ ID NO: 80652
  ENSG00000239389_42 (sequence is synthesized)

SEQ ID NO: 772640 - DNA, 120 bp, Artificial Sequence; identical to SEQ ID NO: 80653
  ENSG00000239389_43 (sequence is synthesized)

SEQ ID NO: 772641 - DNA, 120 bp, Artificial Sequence; identical to SEQ ID NO: 80654
  ENSG00000239389_44 (sequence is synthesized)

SEQ ID NO: 772642 - DNA, 120 bp, Artificial Sequence
  ENSG00000239474_0 (sequence is synthesized)
ctttttacagctagacctgtgtgctgcaaggagctaaggccttcagtgtccccttccttacccaggtttctcacagaatggattcccagcgggaacttgcagaggaactgcggctttacc

SEQ ID NO: 772643 - DNA, 120 bp, Artificial Sequence
  ENSG00000239474_1 (sequence is synthesized)
aatccacccttcttcaggatggtctaaaagatctcctggatgagaaaaaattcatcgattgcaccctaaaagcaggtgacaaaagtcttccttgccacagattgattttgtcagcttgta

SEQ ID NO: 772644 - DNA, 120 bp, Artificial Sequence
  ENSG00000239474_2 (sequence is synthesized)
gtccttacttccgtgagtactttttatctgaaattgatgaggcgaaaaaaaaggaggtagtgctagacaatgtggatcctgctatacttgatttaatcatcaaatacctgtactctgcca

SEQ ID NO: 772645 - DNA, 120 bp, Artificial Sequence
  ENSG00000239474_3 (sequence is synthesized)
gtattgatctcaatgacggaaatgtgcaagatatttttgcattggccagccgctttcagatcccctcagtgtttactgtctgcgtttcttatcttcagaaaagacttgctcctggtaact

SEQ ID NO: 772646 - DNA, 120 bp, Artificial Sequence
  ENSG00000239474_4 (sequence is synthesized)
gtctagccatcctaagattaggacttcttcttgactgcccgagactcgccatttctgcccgtgaatttgtgtctgatcgctttgtacagatttgtaaggaagaggactttatgcaactgt

SEQ ID NO: 772647 - DNA, 120 bp, Artificial Sequence
  ENSG00000239474_5 (sequence is synthesized)
ctccacaggaactgatctcagtcatttcaaatgacagcctaaatgtagaaaaagaagaagcagtatttgaggcagtgatgaaatgggtgcgaacagacaaggaaaacagggttaaaaacc

SEQ ID NO: 772648 - DNA, 120 bp, Artificial Sequence
  ENSG00000239474_6 (sequence is synthesized)
ttagtgaagtgtttgattgtatccgttttcgccttatgacagaaaaatattttaaggatcatgttgagaaagatgatataattaaaagcaacccagacctccagaaaaaaatcaaagttc

SEQ ID NO: 772649 - DNA, 120 bp, Artificial Sequence
  ENSG00000239474_7 (sequence is synthesized)
taaaagatgctttcgcaggcaaactcccagaacctagcaaaaatgccgcgaagactggggctggtgaggtgaatggtgatgttggtgatgaagatttacttcctggttacctgaatgaca

SEQ ID NO: 772650 - DNA, 120 bp, Artificial Sequence
  ENSG00000239474_8 (sequence is synthesized)
ttcccaggcatggaatgtttgtaaaagacctcatcctcttggttaatgacacagcagcagtggcttatgaccccacggaaaatgaatgctaccttactgcactggctgagcagattccca

SEQ ID NO: 772651 - DNA, 120 bp, Artificial Sequence
  ENSG00000239474_9 (sequence is synthesized)
gaaatcattccagcattgttacccagcaaaatcagatatatgtggtaggaggactatatgtggatgaagaaaataaggatcaacctctacagtcatacttcttccagctcgatagcatag

SEQ ID NO: 772652 - DNA, 120 bp, Artificial Sequence
  ENSG00000239474_10 (sequence is synthesized)
aggtggatgataaaatctatgtagttgcaggcaaagaccttcaaacagaggcttcgctggattcagtattatgctatgatcctgtggctgcaaaatggaacgaagtaaaaaaactcccta

SEQ ID NO: 772653 - DNA, 120 bp, Artificial Sequence
  ENSG00000239474_11 (sequence is synthesized)
tcaaagtctatggccataatgtgatttcacataaagggatgatatattgtctaggaggaaagacagatgacaaaaaatgtacaaacagggtgtttatcttcaaccccaaaaaaggagatt

SEQ ID NO: 772654 - DNA, 120 bp, Artificial Sequence
  ENSG00000239474_12 (sequence is synthesized)
ggaaagatctggctccaatgaaaattcctcgttccatgtttggagtagcagtccataaaggcaaaattgtgattgcaggaggtgtcactgaagatggtctttcagcttcagttgaagctt

SEQ ID NO: 772655 - DNA, 120 bp, Artificial Sequence
  ENSG00000239474_13 (sequence is synthesized)
ttgaccttacaacaaataaatgggatgtaatgaccgaatttccccaagaaagaagctccatcagtttggtcagcctggctggatctctgtatgcaattggtggttttgctatgattcaac

SEQ ID NO: 772656 - DNA, 120 bp, Artificial Sequence
  ENSG00000239474_14 (sequence is synthesized)
tggagtctaaagaatttgcacccactgaagtcaatgacatatggaagtatgaagatgataaaaaagaatgggctgggatgttgaaggaaatacgttatgcttcaggagctagttgcctag

SEQ ID NO: 772657 - DNA, 120 bp, Artificial Sequence
  ENSG00000239474_15 (sequence is synthesized)
caacacgtttaaatctcttcaaactgtctaaactgtgaacaaggtgacaaaacataatagattgggaggtggtttgtttggtgaatggggctttaatttattctgttttttaaaagcttg

SEQ ID NO: 772658 - DNA, 120 bp, Artificial Sequence
  ENSG00000239474_16 (sequence is synthesized)
tacagacactcatgtagaaattattcaagaagttattgtctaagagatgagcagtaggtaagaaaacctcagtcattgactcttcaatgtaatgatcagagtttaaaaccattttctaat

SEQ ID NO: 772659 - DNA, 120 bp, Artificial Sequence
  ENSG00000239474_17 (sequence is synthesized)
aataaattaaatcttcagttgaacaaattattttgtgaatctgtttcactcaatggattgtaaagaaggctcctaaatttgagttgtttgctaatcatttcatttgcatcattagggtat

SEQ ID NO: 772660 - DNA, 120 bp, Artificial Sequence
  ENSG00000239474_18 (sequence is synthesized)
ccttaaactgattttctattacaattggaagtggagaatatgtgcatctacactaaaaaaatgtttaagatatcaaaaacctctcctcgtgcttcaaaatgacaggaatcctgtgcatta

SEQ ID NO: 772661 - DNA, 120 bp, Artificial Sequence
  ENSG00000239474_19 (sequence is synthesized)
tactaagaattacatgccataagatgacttcagaaatcctacttcagaagtgtaataaatggatggggaaatcgtttgatggggaaaagtctcttgtaagtaaaagtagtcaaattcaaa

SEQ ID NO: 772662 - DNA, 120 bp, Artificial Sequence
  ENSG00000239474_20 (sequence is synthesized)
aaggcaatatgggagaaaatttgacaagaaacctcacagttgtaattaacctctggtgattctattttattttttcttttcttgaagccttgaagattttgatatctttatctgctcgat

SEQ ID NO: 772663 - DNA, 120 bp, Artificial Sequence
  ENSG00000239474_21 (sequence is synthesized)
agtgtcctaaaagtatgaggatctcctgtttcaaagctgaacaaggcaatatgggagaaaatttgacaagaaacctcacagttctcgatagcatagcatctgaatgggttggacttccac

SEQ ID NO: 772664 - DNA, 120 bp, Artificial Sequence
  ENSG00000239521_0 (sequence is synthesized)
ggcaagttgtttgttacagcgaacaccagctgctccccgcgccggcacccgcgcgccgctgctccgccggcgctgcctccctcgacccgtggctccccctcgcaacttggcgggcctcct

SEQ ID NO: 772665 - DNA, 80 bp, Artificial Sequence
  ENSG00000239521_1 (sequence is synthesized)
cgcaacttggcgggcctcctcccttttgtccggcccggtccggccgccgccgccccccgcgcctggcgccgagctcccgg

SEQ ID NO: 772666 - DNA, 120 bp, Artificial Sequence
  ENSG00000239521_2 (sequence is synthesized)
ccccagcggatgagctgccgcggacggggcgcgggcggacgatggaactccacatcctggagcaccggctgcaagttgccagcgtcgccaaggagagtatcccgctgttcacctacgggc

SEQ ID NO: 772667 - DNA, 120 bp, Artificial Sequence
  ENSG00000239521_3 (sequence is synthesized)
ctgatcaaacttgccttcctgttctccaagaccaggtgcaagttcttcagtctgactgagacaccagaggattacactatcattgtcgatgaggaaggattcctagagctgccctcctcg

SEQ ID NO: 772668 - DNA, 120 bp, Artificial Sequence
  ENSG00000239521_4 (sequence is synthesized)
gagcacctgagtgtggcggatgccacctggctggccctgaacgtggtgtccggcggtggcagcttctccagctcccagcctattggcatgaccaagatcgccaagtcagtcatcgcccca

SEQ ID NO: 772669 - DNA, 120 bp, Artificial Sequence
  ENSG00000239521_5 (sequence is synthesized)
ctggctgaccagaacatatccgtgttcatgctgtccacgtatcagacagacttcatcctggtgctcaagcgggacctgccctttgtcacccacacgttgtcatcagagttcaccatcctg

SEQ ID NO: 772670 - DNA, 120 bp, Artificial Sequence
  ENSG00000239521_6 (sequence is synthesized)
tggtcagtggctagactgtagcagccgagaacctcggcatcaccagtggcttcgtgaagcccaagctggggccttggtgtaccttgttgtagtgtttgaaaacatctgaggctgcatcca

SEQ ID NO: 772671 - DNA, 120 bp, Artificial Sequence
  ENSG00000239521_7 (sequence is synthesized)
tctccagcaccccataaagcaacagcttgcagaacccggctaggaggcggcgccgctggtgtagccgctctatctgtaaatgatcctcctgggaatcacctggctcacatggaaggcaaa

SEQ ID NO: 772672 - DNA, 120 bp, Artificial Sequence
  ENSG00000239521_8 (sequence is synthesized)
agggaatcacagacttaagcttcctgccctatatttctgagctacacccaagccccagcccttactgagccccaggtatagagtcactgcaccactgcccaggtctcccggctggatgaa

SEQ ID NO: 772673 - DNA, 120 bp, Artificial Sequence
  ENSG00000239521_9 (sequence is synthesized)
gacgtggtccatgaggaagctggctagctcagactggagagtagcttcaggaaaaaagacaagtggcctaaggaaatcacggcccccaacaatcatctgagggctaaagatgagaagtag

SEQ ID NO: 772674 - DNA, 120 bp, Artificial Sequence
  ENSG00000239521_10 (sequence is synthesized)
atcacttaataagacaaaagcctgtagggggaaaagaaaggatgtttaaaaggacagaatgtttcccaaggtagaaatgacactgtcaatttctccttggaatgggggcagggatactcg

SEQ ID NO: 772675 - DNA, 120 bp, Artificial Sequence
  ENSG00000239521_11 (sequence is synthesized)
ccattctgtccctcaaactcgacagctgcttctgtgggcacagtggcttgaaggggaagaatgaagacacagactcctctgttcccattatcccatctaagacccacactcacctgggaa

SEQ ID NO: 772676 - DNA, 120 bp, Artificial Sequence
  ENSG00000239521_12 (sequence is synthesized)
gcatctgatttagaaatgtgggttagtgtccagagaatggaaaaatagacaagagtcaaggctggcaggataacctgtaacaacaaagggtttgaaaaatgaggtttgggttaggagagg

SEQ ID NO: 772677 - DNA, 120 bp, Artificial Sequence
  ENSG00000239521_13 (sequence is synthesized)
gagagacagatagccagaaacacaccagtgaagaggagagaaaatgagtaaagggagagctaattccttttccagtggaaaatgagtgatattctggacattcttcagaggcatctacac

SEQ ID NO: 772678 - DNA, 120 bp, Artificial Sequence
  ENSG00000239521_14 (sequence is synthesized)
gaagtagaaatgtcaccgctccctaatttactctacgtcttctagaatccctcaatattatccttggcttccaggaaatccaagaagaccctggaagtagagtccaccttctaagagagg

SEQ ID NO: 772679 - DNA, 120 bp, Artificial Sequence
  ENSG00000239521_15 (sequence is synthesized)
aatgtaagaggtgacccccacccacctgatcttcctcgctttgtccactccacgcactgagacttgacacacctagtggccacctagaacgtaggtccttaaaatctagccccccagccc

SEQ ID NO: 772680 - DNA, 120 bp, Artificial Sequence
  ENSG00000239521_16 (sequence is synthesized)
ccaacccatctctagcctgtccactcacctggtgaggaacctctcctgtgtccacagccttctgcaggagttggcaacatggctcatagagctcccagcgagtcaggtcatgagtgcttt

SEQ ID NO: 772681 - DNA, 120 bp, Artificial Sequence
  ENSG00000239521_17 (sequence is synthesized)
gggggagaaaggggaatgttatactggaaaagaacagagggaaccaactccacagacaccagtaaaaacgggatggggaagaggaggaaagccactcacttgtagaaggcagagaggcgt

SEQ ID NO: 772682 - DNA, 120 bp, Artificial Sequence
  ENSG00000239521_18 (sequence is synthesized)
ttcagagtggctgccagattatatacctcatcctcatctaggaaggacgactgagaaggaaagaagatccacaatagcatttcccccagaactcatcagtccacatcccccgtcttgcag

SEQ ID NO: 772683 - DNA, 120 bp, Artificial Sequence
  ENSG00000239521_19 (sequence is synthesized)
cccctcccacccttgtttggggtgtcccattgtccagccccagctcctacctgtaacagctcttcaagctcctgctggaagcggtcagtcagcaaatctactagctggctgcgggcaaag

SEQ ID NO: 772684 - DNA, 120 bp, Artificial Sequence
  ENSG00000239521_20 (sequence is synthesized)
tccgcccggctgaagaaagtgaattcgggattacagagcaggtagagggcatgcgccccagcctcaagcaccgctggctctgcatgcttcaccaccacctcctggagttgctgcaggaac

SEQ ID NO: 772685 - DNA, 120 bp, Artificial Sequence
  ENSG00000239521_21 (sequence is synthesized)
agctccaggtgctgagaagaaaaggcagaagatggtgtgctgtggggatgggaggaggacactcttctggcgggaagtggaacggggttaaaagcattaaacttcaaggataagatgcct

SEQ ID NO: 772686 - DNA, 120 bp, Artificial Sequence
  ENSG00000239521_22 (sequence is synthesized)
gatgccggtcatccacccactgtccagcccgagcaacaggttctgtgtcaccagcctggaccccgacacgctgcctgctgttgccacactcctcatggatgtcatgtcctacttcaatgg

SEQ ID NO: 772687 - DNA, 120 bp, Artificial Sequence
  ENSG00000239521_23 (sequence is synthesized)
attttatctaaagagagaggctgaagcattccttaaaccacagaagaaaacagtgaaagtacaaaatgacaacagccgtcttcaaatactgcttgtcagagggacaagagagaacagagg

SEQ ID NO: 772688 - DNA, 120 bp, Artificial Sequence
  ENSG00000239521_24 (sequence is synthesized)
tgaggatacaactagaagccagcagtctacaggctggaagaaggccctcaccagaacccaacccttggacttcagcctccagaactgtgagaaatacatacctgctgtttgtaagacacc

SEQ ID NO: 772689 - DNA, 120 bp, Artificial Sequence
  ENSG00000239521_25 (sequence is synthesized)
agtctatggaattctgttacagtagcctgaactcagacatagcccttttccatttataagattcattcagcttttccagaccaggcatcaccgagcggagagaggggaaacaccctggct

SEQ ID NO: 772690 - DNA, 120 bp, Artificial Sequence
  ENSG00000239521_26 (sequence is synthesized)
ctcagacatagcccttttccatttataaggtggttttaccttatattttatgtaaaaggtccattttatttatttttgaattgttgatttttttttaagagacacgtgtttactatgtta

SEQ ID NO: 772691 - DNA, 120 bp, Artificial Sequence
  ENSG00000239521_27 (sequence is synthesized)
cccaggctggactccaactcctggactattgatcctcctgtctccacctcccgagttgctggaactacaggctaacagctctgttttaaagatgagaaaatgggccccacgcagtggctc

SEQ ID NO: 772692 - DNA, 75 bp, Artificial Sequence
  ENSG00000239521_28 (sequence is synthesized)
aaaatgggccccccaggtggagccacttgaggtcaggtgttcgagattagcctggccaacatggcaaaaccccgt

SEQ ID NO: 772693 - DNA, 63 bp, Artificial Sequence
  ENSG00000239521_29 (sequence is synthesized)
tgggagatgccactgcactccagcctaggtgacaaagagagactctacctcaaaaaataaaaa

SEQ ID NO: 772694 - DNA, 120 bp, Artificial Sequence
  ENSG00000239521_30 (sequence is synthesized)
cctaggtgacaaagagagactctacctcaaaaaataaaaataattaaaaaataaagatgagaaaatggaggctgaggaggggtaaaagcgctaacttgacatggagttgaggactagcac

SEQ ID NO: 772695 - DNA, 120 bp, Artificial Sequence
  ENSG00000239521_31 (sequence is synthesized)
tcatgtcacctcactccaaatgccaggcttttcccactacaccagcagcagttcctcctggggaaacaggctaggttagaaagggagtgagggaagggacagggaggggaagccctctag

SEQ ID NO: 772696 - DNA, 120 bp, Artificial Sequence
  ENSG00000239521_32 (sequence is synthesized)
tagggagatggaggatagggggtcatgttttgtggggagagacactgaaggggctgccacttggactgaatgacctcccacctccagcattaggactccttccaattcctagggggttcg

SEQ ID NO: 772697 - DNA, 120 bp, Artificial Sequence
  ENSG00000239521_33 (sequence is synthesized)
gaggcaacaatatttatttagggattgggagcgagagtgctattccaaccttctttggtatttgtaatttcttttccttattctttaataaaagtagagtccaagcaaagtccaaaccaa

SEQ ID NO: 772698 - DNA, 120 bp, Artificial Sequence
  ENSG00000239521_34 (sequence is synthesized)
atcgggctgggctcagggaggtcactgatgaacggagcgggatgccctggagggcttgaggacgtggcccaatggcaggtggtcggggtgcaagttcttcagtctgactgagacaccaga

SEQ ID NO: 772699 - DNA, 120 bp, Artificial Sequence
  ENSG00000239521_35 (sequence is synthesized)
agaaaagctcaccgcatcagctggttgcccaggccaggacctgaagggttgtgtggagtctggaaatattgtggacccaagaaccttgacctctcggtgcctgcgacgggctgactgctg

SEQ ID NO: 772700 - DNA, 120 bp, Artificial Sequence
  ENSG00000239521_36 (sequence is synthesized)
accctggcttctctttggcacatcagcccctagttcttgagagagaagggcagggtggtctactcaccatgtctgtatcctgccgttcttcatttgactcatcctggatttctaactctt

SEQ ID NO: 772701 - DNA, 120 bp, Artificial Sequence
  ENSG00000239521_37 (sequence is synthesized)
cttcctcgtcctcttccataaggctgagtctgatgtaggggcaaagagactggcttttcaaactgttctttgaggacccctgagagtttctcagacacccggggtgggggaagtggggag

SEQ ID NO: 772702 - DNA, 120 bp, Artificial Sequence
  ENSG00000239521_38 (sequence is synthesized)
cagtaagtacagcatagtagtttcccgattgtgctgacaggaagtgctctgtggctaaaacaagtccaaaaagcacccacagagaggcaatgggtgagacaggaatcccctcacagtggg

SEQ ID NO: 772703 - DNA, 82 bp, Artificial Sequence
  ENSG00000239571_0 (sequence is synthesized)
tcccaggatccagtggggatgttgtgatgactcagtctccactctccctgcccgtcacccttggacagccggcctccatctc

SEQ ID NO: 772704 - DNA, 120 bp, Artificial Sequence
  ENSG00000239571_1 (sequence is synthesized)
atctcctgcaggtctagtcaaagcctcgtatacagtgatggaaacacctacttgaattggtttcagcagaggccaggccaatctccaaggcgcctaatttataaggtttctaactgggac

SEQ ID NO: 772705 - DNA, 120 bp, Artificial Sequence
  ENSG00000239571_2 (sequence is synthesized)
tctggggtcccagacagattcagcggcagtgggtcaggcactgatttcacactgaaaatcagcagggtggaggctgaggatgttggggtttattactgcatgcaaggtacacactggcct

SEQ ID NO: 772706 - DNA, 120 bp, Artificial Sequence
  ENSG00000239590_0 (sequence is synthesized)
atgaagagggagaatcagagcagtgtgtctgagttcctcctcctggacctccccatctggccagagcagcaggctgtgttcttcaccctgttcttgggcatgtacctgatcacggtgctg

SEQ ID NO: 772707 - DNA, 120 bp, Artificial Sequence
  ENSG00000239590_1 (sequence is synthesized)
gggaacctgctcatcatcctgctcatccggctggactctcaccttcacacccccatgttcttcttcctcagccacttggctctcactgacatctccctttcatctgtcactgtcccaaag

SEQ ID NO: 772708 - DNA, 120 bp, Artificial Sequence
  ENSG00000239590_2 (sequence is synthesized)
atgttattaagcatgcaaactcaggatcaatccattctttatgcagggtgtgtaactcagatgtattttttcatatttttcactgatctagacaatttccttctcacttcaatggcatac

SEQ ID NO: 772709 - DNA, 120 bp, Artificial Sequence
  ENSG00000239590_3 (sequence is synthesized)
aatgccctgtctcacactctcctcctggcccagctgtccttttgtgctgacaacaccatcccccatttcttctgtgatcttgttgccctactcaagctctcatgctcagacatctccctc

SEQ ID NO: 772710 - DNA, 120 bp, Artificial Sequence
  ENSG00000239590_4 (sequence is synthesized)
aatgagctggtcattttcacagtgggacaggcagtcattactctaccactaatatgcatcttgatctcttatggccacattggggtcaccatcctcaaggctccatctactaagggcatc

SEQ ID NO: 772711 - DNA, 120 bp, Artificial Sequence
  ENSG00000239590_5 (sequence is synthesized)
ttcaaagctttgtccacctgtggctctcacctctctgtggtgtctctgtattatggcacaattattggactgtattttctcccctcatccagtgcctccagtgacaaggacgtaattgcc

SEQ ID NO: 772712 - DNA, 120 bp, Artificial Sequence
  ENSG00000239590_6 (sequence is synthesized)
tctgtgatgtacacggtgatcaccccattgctgaatcccttcatttatagcctaaggaacagggacataaagggagccctggagagactcttcaacagggcaacagtcttatctcaatga

SEQ ID NO: 772713 - DNA, 120 bp, Artificial Sequence
  ENSG00000239605_0 (sequence is synthesized)
acacccgcctcctagcaaccggagctcaggttcagcctagagagagaggaggccaccatggaccagccagccgtcgccaccgcttccacctcaataagggaagacctggtgggtggagaa

SEQ ID NO: 772714 - DNA, 120 bp, Artificial Sequence
  ENSG00000239605_1 (sequence is synthesized)
tcattcatcacagcttcgaaaccagcccaaaagacttcctcttttgaaagagaaggatggtggagaatagcattaacagatactcctatacctggcacttaccacttgaaaacttttatt

SEQ ID NO: 772715 - DNA, 120 bp, Artificial Sequence
  ENSG00000239605_2 (sequence is synthesized)
gaagaatccctattaaatccagtgatagcaacctacaattttaaaaacgaaggaaggaaaaagccacctcttgtgcaaagaaacaatccagtcctaaatgatcttccgcagtatatgcct

SEQ ID NO: 772716 - DNA, 120 bp, Artificial Sequence
  ENSG00000239605_3 (sequence is synthesized)
tcagctttctccggggcaatacaacgtgcttcctgcaccagttcccaaatatgcttccaggagctgtgtatttcgctcaacagttcaaagattcccaacaacctattttattccccatga

SEQ ID NO: 772717 - DNA, 120 bp, Artificial Sequence
  ENSG00000239605_4 (sequence is synthesized)
aggccctggtccaggtcattataatgtgaaaatgcctccaacaagctctgtcacttcttgttttcaatccagagtccctcgattcttgcccagctgttcaaaaaccccaggcccaggagc

SEQ ID NO: 772718 - DNA, 120 bp, Artificial Sequence
  ENSG00000239605_5 (sequence is synthesized)
atatacaactttaagacaattccctaagcagtctccgaccatagccaaaatgggccaagagcatagccttttcttcaacaacaacaattggcttttaaaataaagtgatcttggcaccaa

SEQ ID NO: 772719 - DNA, 120 bp, Artificial Sequence
  ENSG00000239605_6 (sequence is synthesized)
ggaacaggggatcctctggtcagtctaggtcccctacccatctctatgtgcggtgtgaggtgctctgccctacccacactgagggagtgaccttagttaaacagagactagggaaagaat

SEQ ID NO: 772720 - DNA, 120 bp, Artificial Sequence
  ENSG00000239605_7 (sequence is synthesized)
gccaggaagcgggacaacacctacctactacctggactgcaaaaagagggtgctcatgctatcttaagtgaaaggaatctccaggacagaggcatgaaaatgtgtccggaattggtgggt

SEQ ID NO: 772721 - DNA, 81 bp, Artificial Sequence
  ENSG00000239605_8 (sequence is synthesized)
ctaccttcgcgcctccaaatggaatgaggaaagaagtgacaggctccatgggctggaactcaggagacccaagttcaagtc

SEQ ID NO: 772722 - DNA, 120 bp, Artificial Sequence
  ENSG00000239605_9 (sequence is synthesized)
ggctccatgggctggaactcaggagacccaagttcaagtcccagcactaccacttaccaggcgagtgattctgggacagttaccgtgcaatgagagcaagcaacttcagaatttctttcg

SEQ ID NO: 772723 - DNA, 120 bp, Artificial Sequence
  ENSG00000239605_10 (sequence is synthesized)
aaatacgctgtgctttctggagtggagcaaggtggccacatagaaccctccagtgatcgttccccctagcaggaacaccattatccacacaattatccacacaagaaaacacctctgtaa

SEQ ID NO: 772724 - DNA, 120 bp, Artificial Sequence
  ENSG00000239605_11 (sequence is synthesized)
cactgaagagggtagggtagaaaagacagtcttgaattactgacactaccctcccccatcccctggcagcagccacgtggcatgaagagagaatctgcccttggggaagagggaatgccg

SEQ ID NO: 772725 - DNA, 120 bp, Artificial Sequence
  ENSG00000239605_12 (sequence is synthesized)
tgacggggggactttgcacgggaacaccgtgctgcctgtaacagggaaagcaacacaggacagaattcagctagtgcccatggagggagcatttagaccagcactagccagccaggaatt

SEQ ID NO: 772726 - DNA, 120 bp, Artificial Sequence
  ENSG00000239605_13 (sequence is synthesized)
gcccatcccagccgttcgatactgagttccagctctccctaccactgtgggctgaagtgctctgaggtcctaaataagcttgaaaggcagtctcggccacaaggactgcagttcctgggc

SEQ ID NO: 772727 - DNA, 120 bp, Artificial Sequence
  ENSG00000239605_14 (sequence is synthesized)
aagttcaggtgctctgctgggctcagaggcagtggacttagggtacacaagacctagtgagacaccagctggggcagccaaaggagtgcttgtagcagccatcccccagccccaggcagc

SEQ ID NO: 772728 - DNA, 120 bp, Artificial Sequence
  ENSG00000239605_15 (sequence is synthesized)
acagcttgcagcttcaagagagaggccttccttttgcttgagaggaggagaggggagagtaaagaggacttgtcttgaatctggataccagctcagccacagcagaatagggcacctcag

SEQ ID NO: 772729 - DNA, 120 bp, Artificial Sequence
  ENSG00000239605_16 (sequence is synthesized)
gcagagtcctgaggcccccataccaggccctagctcccagacaacatttctagacacatctctggctggaagagaatccactgccttaaagagaaggacccagttctggcaagattcatc

SEQ ID NO: 772730 - DNA, 120 bp, Artificial Sequence
  ENSG00000239605_17 (sequence is synthesized)
acctactgactaaagagcccttgggcttcgaataaacaccagcagtggccagacaacactcactgcaggccttagccagtgctgtgctgcttcaggtgtgatccagcactttcccagcta

SEQ ID NO: 772731 - DNA, 120 bp, Artificial Sequence
  ENSG00000239605_18 (sequence is synthesized)
ctcaggcagcactggcgaggggtgaacagaaagctcacaataaaatcatctcatcagaggtcacagagccaagacgctcctattgaactttcctgccaagcagaagcaagattccatgtc

SEQ ID NO: 772732 - DNA, 120 bp, Artificial Sequence
  ENSG00000239605_19 (sequence is synthesized)
ctctcatggcctagacccctctaagccacctgccacagctccggaaatgaacacagagaaagaagcctagagctggtggtgcgtcctggaccctgagacatggggcataagcagcagagg

SEQ ID NO: 772733 - DNA, 120 bp, Artificial Sequence
  ENSG00000239605_20 (sequence is synthesized)
ccactggccccaggaacccggtaccctgctgtttgtgcactgagccccacccagtgtcagggcacctccaaaatgccaggcactgagtgtcattcctcagctgctcggcacatccttcct

SEQ ID NO: 772734 - DNA, 120 bp, Artificial Sequence
  ENSG00000239605_21 (sequence is synthesized)
gctgggtcacatgccaggaatgcttcagtaactgcatcccaggaattaccaaattagccaaagctcatgcagagccatctccccactactgctggggtgcctgacagggagaggttctgg

SEQ ID NO: 772735 - DNA, 120 bp, Artificial Sequence
  ENSG00000239605_22 (sequence is synthesized)
agagcctggagctccctcaccaagaagaaagcatgaggaggggaggggctggggaaggggagggaccaggaaactcctcctctccagagtctgcccctgggagaagagggcagagtgcca

SEQ ID NO: 772736 - DNA, 120 bp, Artificial Sequence
  ENSG00000239605_23 (sequence is synthesized)
cccagacacctcgcttgtccactcatgcttgagggtgtcaagttgtctcttgcagtgcagacaagctgcaccaaagtgtccacactctccttagccaagctgagggcagggagagtgggt

SEQ ID NO: 772737 - DNA, 120 bp, Artificial Sequence
  ENSG00000239620_0 (sequence is synthesized)
agtcagctttctgccgggctccgaactaggactgctgggtgctccctcctacctgcctggtagggggcgcatttgagggcgacgtcggagccatagccgtgatcccgtggacacctccag

SEQ ID NO: 772738 - DNA, 120 bp, Artificial Sequence
  ENSG00000239620_1 (sequence is synthesized)
ctcctcaggcctctccccatagaagagagccagctgcagggagatcagattcctcatggaggaaccaaggcactcgaaacgacctcgcttcctggccccaaatcaagcttcaggtgggcc

SEQ ID NO: 772739 - DNA, 120 bp, Artificial Sequence
  ENSG00000239620_2 (sequence is synthesized)
tcctacagagccaggctgctctggtgtggaccgtgaagaccctgtagacccagtccaaccggcaaaacccactgcttatgtgaaacccatgagacgggagcccccagctcgcgcacagcc

SEQ ID NO: 772740 - DNA, 120 bp, Artificial Sequence
  ENSG00000239620_3 (sequence is synthesized)
agctcctcctgcaggaagaggccagcgtgggggaggaagctggcgggcaggtcgaggccgcggcagtggggctgggcttctcagggccctgggcgagagagtggggccaggcatgtacct

SEQ ID NO: 772741 - DNA, 120 bp, Artificial Sequence
  ENSG00000239620_4 (sequence is synthesized)
catctgaatgaccatggagagctaggctaccaggggcaactggaagccaggcagaccccagccttctcttttactgaagcagctcttatgcctggaattgtgcaggaaggccccggcccc

SEQ ID NO: 772742 - DNA, 120 bp, Artificial Sequence
  ENSG00000239620_5 (sequence is synthesized)
catgcagcccagcctgaggtggggcttcaggagccacctcctgctcctgggcctgtggctgtggccaggcagaccatgttggccccctctccctccctcagtttcaggcctccgggtggc

SEQ ID NO: 772743 - DNA, 120 bp, Artificial Sequence
  ENSG00000239620_6 (sequence is synthesized)
tcatctactttgtgcatcgtgcagacctctaatagcaccatcgtgcagagtgtcccagtgttccctgcccactctgcacactaacctctgtcatccgtattgctgccagccttcttttct

SEQ ID NO: 772744 - DNA, 120 bp, Artificial Sequence
  ENSG00000239620_7 (sequence is synthesized)
tccacctggtctttccccctatccccaaactctagccccatttctgctccactcctccctgcccatcccagtcagagcccttactttgtgttgtcatgagcctccaagtcctcctcccag

SEQ ID NO: 772745 - DNA, 120 bp, Artificial Sequence
  ENSG00000239620_8 (sequence is synthesized)
gatcctgacagtagtccatctgcttccaattcccctcttgcctccgctttgtatgttctgtcaaaaatacacatgcatggagttcctcaatgcttattcaaataaaccagcagctctctg

SEQ ID NO: 772746 - DNA, 120 bp, Artificial Sequence
  ENSG00000239642_0 (sequence is synthesized)
agttctggggcttttgctttcgctcgattagttgctgtgaggctgctccgcgggcctcgcctggacgctgactccctgtgacttagccctgatcctcaggaaggcaggccatcgagagtc

SEQ ID NO: 772747 - DNA, 120 bp, Artificial Sequence
  ENSG00000239642_1 (sequence is synthesized)
cagaggcacccgtggcctgggggtagggtgggatagcaatgtggccgctacgggtctatacccgcaaaaagcgggagggtcagaggctcaatctcaccccgacgccagacctaggctctc

SEQ ID NO: 772748 - DNA, 120 bp, Artificial Sequence
  ENSG00000239642_2 (sequence is synthesized)
cagcgaaggccgaggccccgccaggttcgaagagaaaaggcaaagtgcacggcttgtcgaagattgcagagaaagcagagcggagcaggcagggaggtagcggctctgggccgttcagcc

SEQ ID NO: 772749 - DNA, 120 bp, Artificial Sequence
  ENSG00000239642_3 (sequence is synthesized)
ctcgcttaggagttacaggagagaaaagcctgcaagaaaataggtctagtgaagacacccaggatgagaagattgcatcgttgcgtgaatcagttactgatgacctccaggttgatagta

SEQ ID NO: 772750 - DNA, 120 bp, Artificial Sequence
  ENSG00000239642_4 (sequence is synthesized)
gttcatcaaatagtgaactagtatcaggattaagtttgcaccatggtatggccagttctcttctgagctattcagtcacagactcttatgcagaatacaagagttttgaagagagctttc

SEQ ID NO: 772751 - DNA, 120 bp, Artificial Sequence
  ENSG00000239642_5 (sequence is synthesized)
catcacctgaactgttcagaaaatcagattatttagactgggagtgtcccaacttggaagaacacatgcagtggaagaattctactcttctggataccagtaaagcagtagcgatagaga

SEQ ID NO: 772752 - DNA, 120 bp, Artificial Sequence
  ENSG00000239642_6 (sequence is synthesized)
gtagcagatcaaaatgtttctccaaaagcaaagtgtgcttcaaattcagaatcagataatgcagcttgtgagattttacttgctgagaaaacttgcccttcaacccctgaaaaaacaaag

SEQ ID NO: 772753 - DNA, 120 bp, Artificial Sequence
  ENSG00000239642_7 (sequence is synthesized)
aaaaaaaaaacaaattccagtactcctggtaagaaaaacagaggccttttaacaagtactccatcttcagagacagctggttttgtgattgatttgtcctcagtgcaaaaagcatctttt

SEQ ID NO: 772754 - DNA, 120 bp, Artificial Sequence
  ENSG00000239642_8 (sequence is synthesized)
gaagaactatttccaaatgtcagcaattatgttaattcaaatgaaattgttcctgtgtcaagtttgcaggaaaattcttcaaatgagtttcctgcaaatgcatcagaaatatgttgtatt

SEQ ID NO: 772755 - DNA, 120 bp, Artificial Sequence
  ENSG00000239642_9 (sequence is synthesized)
attagaacatcaccaggaactagacaagtgaaaaataaaggtgttattgtaaagaagaagaaatattctcttcctaaggatacccctcaagatatcataataaaaatggcatgaaaaaac

SEQ ID NO: 772756 - DNA, 120 bp, Artificial Sequence
  ENSG00000239642_10 (sequence is synthesized)
agctgtggctgaattttcaccactttgaagacaggagtgtgaagtcaaagtctataaagcagaatgtctgcctgaaattatatgaaattaaaaattaaaaattctccagttatttgtgat

SEQ ID NO: 772757 - DNA, 120 bp, Artificial Sequence
  ENSG00000239642_11 (sequence is synthesized)
tccagttatttgtgatatatctctatgttgaaattctactgaggttcttgtcatttacttttaatcagttaagaaaaaaaattattccatatgcttcttaaatatatgtatttatattaa

SEQ ID NO: 772758 - DNA, 120 bp, Artificial Sequence
  ENSG00000239672_0 (sequence is synthesized)
gggctctccggcagcggatctgcgcagaagcgttccgtgcgtgcaagtgctgcgaaccacgtgggtcccgggcgcgtttcgggtgctggcggctgcagccggagttcaaacctaagcagc

SEQ ID NO: 772759 - DNA, 120 bp, Artificial Sequence
  ENSG00000239672_1 (sequence is synthesized)
tggaaggaaccatggccaactgtgagcgtaccttcattgcgatcaaaccagatggggtccagcggggtcttgtgggagagattatcaagcgttttgagcagaaaggattccgccttgttg

SEQ ID NO: 772760 - DNA, 120 bp, Artificial Sequence
  ENSG00000239672_2 (sequence is synthesized)
gtctgaaattcatgcaagcttccgaagatcttctcaaggaacactacgttgacctgaaggaccgtccattctttgccggcctggtgaaatacatgcactcagggccggtagttgccatgg

SEQ ID NO: 772761 - DNA, 120 bp, Artificial Sequence
  ENSG00000239672_3 (sequence is synthesized)
acaagttggcaggaacattatacatggcagtgattctgtggagagtgcagagaaggagatcggcttgtggtttcaccctgaggaactggtagattacacgagctgtgctcagaactggat

SEQ ID NO: 772762 - DNA, 120 bp, Artificial Sequence
  ENSG00000239672_4 (sequence is synthesized)
ctatgaatgacaggagggcagaccacattgcttttcacatccatttcccctccttcccatgggcagaggaccaggctgtaggaaatctagttatttacaggaacttcatcataatttgga

SEQ ID NO: 772763 - DNA, 120 bp, Artificial Sequence
  ENSG00000239672_5 (sequence is synthesized)
gggaagctcttggagctgtgagttctccctgtacagtgttaccatccccgaccatctgattaaaatgcttcctcccagcataggattcattgagttggttacttcatattgttgcattgc

SEQ ID NO: 772764 - DNA, 120 bp, Artificial Sequence
  ENSG00000239672_6 (sequence is synthesized)
ttttttttccttcttttcatgtacactgaataacctgacctaatagagagtgtaaatactataaaaatgatttattttgaggtctcacatacacacaggcattctttgcctgcccttctt

SEQ ID NO: 772765 - DNA, 120 bp, Artificial Sequence
  ENSG00000239672_7 (sequence is synthesized)
ggacatttttagggtgtatttctggcgctttagtcctgttttctcctggacaatttatgcttgccccgcaccccatcgtgcgattctccgcagtctttgggctttgtctctctctctttt

SEQ ID NO: 772766 - DNA, 120 bp, Artificial Sequence
  ENSG00000239672_8 (sequence is synthesized)
tttttttttggaagttgcagaatggtgataaatgattttctttgctcctattgactgctaggccctgtggctaggtaccatagagtctctacacaggactaagtcagcctggtgtgcagg

SEQ ID NO: 772767 - DNA, 120 bp, Artificial Sequence
  ENSG00000239672_9 (sequence is synthesized)
tacagtgctaagatgctgtaagaagaggttaactaaaggacaggaagatggggccaagagatggtgctactgtctactttagggatcgtctttcaaggcgaggggcctcctatctcaagc

SEQ ID NO: 772768 - DNA, 120 bp, Artificial Sequence
  ENSG00000239672_10 (sequence is synthesized)
aagtgctgcgaaccacgtgggtcccgggcgcgtttcgggtgctggcggctgcagccggagttcaaacctaagcagctggaagggccctgtggctaggtaccatagagtctctacacagga

SEQ ID NO: 772769 - DNA, 120 bp, Artificial Sequence
  ENSG00000239672_11 (sequence is synthesized)
gtcatctgtgctaggctctcttctagacactggggatacagccatgaatgagaccaaatagatacctgttttcatataccagctaatggttagtgataggcttcagaaatgaaatatgcc

SEQ ID NO: 772770 - DNA, 120 bp, Artificial Sequence
  ENSG00000239672_12 (sequence is synthesized)
cagaaatgaataggagtagcaaatgatcactttagattgggtgatcaaagaacgcaatttttaagctgtgatctgaatgacaagaagcagcgatctgaatgacaagaagcagccagccat

SEQ ID NO: 772771 - DNA, 120 bp, Artificial Sequence
  ENSG00000239672_13 (sequence is synthesized)
gtacagaatcacagtgaaaaacatttccagccaagcaaacagcatgtgcaaaggtcccagggtgggaatgagcttggctttttgaagtacgggaggagagttgaaatgcccgaagcctga

SEQ ID NO: 772772 - DNA, 120 bp, Artificial Sequence
  ENSG00000239672_14 (sequence is synthesized)
tgggtgggagggaagttgggaggtgaagagttcagaggcatgggcaggggccttctctcttaggggtgtgttgaccatatacttcctgagtgctgggaagctatgggacacttcacactt

SEQ ID NO: 772773 - DNA, 120 bp, Artificial Sequence
  ENSG00000239672_15 (sequence is synthesized)
ccaagcctgggaccatccgtggagacttctgcatacaagttggcaggtgagattttggtatttttcccccttttccaaaatctgatttagttgccacaaggatttgggtttccgaggctg

SEQ ID NO: 772774 - DNA, 120 bp, Artificial Sequence
  ENSG00000239672_16 (sequence is synthesized)
gaggtagacatgataccatatgcaggttgattttatcggagtttattgttttcctccctcttaagttggcgtttggctttggttgttaacatcacttagtcgtacctctgttacacgaag

SEQ ID NO: 772775 - DNA, 120 bp, Artificial Sequence
  ENSG00000239672_17 (sequence is synthesized)
tgtagaacctggtacaacacactttgctggccagtctttcctgaaggctctcactgtttgcaccagcgtggccgggagggctggatgtggggagggcatttttcagccttaagtgaatgg

SEQ ID NO: 772776 - DNA, 120 bp, Artificial Sequence
  ENSG00000239672_18 (sequence is synthesized)
attgtaggctttttcttttaacatggtctaatgtccatggagcttcagcttttatgctgctgtggctgtagatttctggcaatgggcgcattttaatccttctggtcttggtcatgtgac

SEQ ID NO: 772777 - DNA, 120 bp, Artificial Sequence
  ENSG00000239672_19 (sequence is synthesized)
gtgcagaggattcatcagaaatgaaagaaaacatgagggctgggtgtgctggcttgtgcttgtgataccagctacttgggaggctgagatgggagaccagcctgggtaacatagcaagac

SEQ ID NO: 772778 - DNA, 120 bp, Artificial Sequence
  ENSG00000239672_20 (sequence is synthesized)
cccattttgattccttcatagtataggagaacactgtgattaacctgtttctccccgtctttcttatttaaagttctccacggtagagtgaacacaagtgtcttgagacctggaaactcc

SEQ ID NO: 772779 - DNA, 120 bp, Artificial Sequence
  ENSG00000239672_21 (sequence is synthesized)
tcagtgccctagcgtttggctacatcttggaacaaaccaagttatttaggattttccaaaatagtctctgtaataggaggtgcattgctacgggaaaagcagtgcagagttccacatatg

SEQ ID NO: 772780 - DNA, 120 bp, Artificial Sequence
  ENSG00000239672_22 (sequence is synthesized)
agctgagcatgtttgagttcttggtcttgagcttcctgagcagataattttagagagatttttttccccctttgagacaggttgttttttagcaagaaagtctttccatcatcaattact

SEQ ID NO: 772781 - DNA, 120 bp, Artificial Sequence
  ENSG00000239672_23 (sequence is synthesized)
agacactaataaatgcttattgtttagcatatattaggtatcataggagctggtggaggaaaactatggttttggttttggggaggttcttcagaaacagcagagagcagatgtacctgc

SEQ ID NO: 772782 - DNA, 120 bp, Artificial Sequence
  ENSG00000239672_24 (sequence is synthesized)
aagctacttacaaagcaatcttttgataaatgcaaaggattgattgaccaataacccttcttcaaacaaattctagagataatccaaattctcggctgggtgaggcatagtggctcatac

SEQ ID NO: 772783 - DNA, 80 bp, Artificial Sequence
  ENSG00000239697_0 (sequence is synthesized)
ctctccccggcccgatccgcccgccggctccccctcccccgatccctcgggtcccgggatgggggggcggtgaggcaggc

SEQ ID NO: 772784 - DNA, 120 bp, Artificial Sequence
  ENSG00000239697_1 (sequence is synthesized)
ggcaccgccctgctggtcccgctcgcgctgggcctgggcctggcgctggcctgcctcggcctcctgctggccgtggtcagtttggggagccgggcatcgctgtccgcccaggagcctgcc

SEQ ID NO: 772785 - DNA, 120 bp, Artificial Sequence
  ENSG00000239697_2 (sequence is synthesized)
tcgctgtccgcccaggagcctgcccaggaggagctggtggcagaggaggaccaggacccgtcggaactgaatccccagacagaagaaagccaggatcctgcgcctttcctgaaccgacta

SEQ ID NO: 772786 - DNA, 120 bp, Artificial Sequence
  ENSG00000239697_3 (sequence is synthesized)
gttcggcctcgcagaagtgcacctaaaggccggaaaacacgggctcgaagagcgatcgcagcccattatgaagttcatccacgacctggacaggacggagcgcaggcaggtgtggacggg

SEQ ID NO: 772787 - DNA, 120 bp, Artificial Sequence
  ENSG00000239697_4 (sequence is synthesized)
acagtgagtggctgggaggaagccagaatcaacagctccagccctctgcgctacaaccgccagatcggggagtttatagtcacccgggctgggctctactacctgtactgtcaggtgcac

SEQ ID NO: 772788 - DNA, 120 bp, Artificial Sequence
  ENSG00000239697_5 (sequence is synthesized)
gccctgcgctgcctggaggaattctcagccactgcggcgagttccctcgggccccagctccgcctctgccaggtgtctgggctgttggccctgcggccagggtcctccctgcggatccgc

SEQ ID NO: 772789 - DNA, 120 bp, Artificial Sequence
  ENSG00000239697_6 (sequence is synthesized)
accctcccctgggcccatctcaaggctgcccccttcctcacctacttcggactcttccaggttcactgaggggccctggtctccccgcagtcgtcccaggctgccggctcccctcgacag

SEQ ID NO: 772790 - DNA, 120 bp, Artificial Sequence
  ENSG00000239697_7 (sequence is synthesized)
ctctctgggcacccggtcccctctgccccaccctcagccgctctttgctccagacctgcccctccctctagaggctgcctgggcctgttcacgtgttttccatcccacataaatacagta

SEQ ID NO: 772791 - DNA, 120 bp, Artificial Sequence
  ENSG00000239697_8 (sequence is synthesized)
ttcccactcttatcttacaactcccccaccgcccactctccacctcactagctccccaatccctgaccctttgaggcccccagtgatctcgactcccccctggccacagacccccagggc

SEQ ID NO: 772792 - DNA, 120 bp, Artificial Sequence
  ENSG00000239697_9 (sequence is synthesized)
attgtgttcactgtactctgtgggcaaggatgggtccagaagaccccacttcaggcactaagaggggctggacctggcggcaggaagccaaagagactgggcctaggccaggagttccca

SEQ ID NO: 772793 - DNA, 120 bp, Artificial Sequence
  ENSG00000239697_10 (sequence is synthesized)
aatgtgaggggcgagaaacaagacaagctcctcccttgagaattccctgtggatttttaaaacagatattatttttattattattgtgacaaaatgttgataaatggatattaaatagaa

SEQ ID NO: 772794 - DNA, 120 bp, Artificial Sequence
  ENSG00000239697_11 (sequence is synthesized)
cggccatcagtctcagaaccacagaagccagttcatgaaggtcttggttctctctgtgacccaggcgtgggaccccatgaaagacccctactcttccccagaactctgcccagttccccc

SEQ ID NO: 772795 - DNA, 120 bp, Artificial Sequence
  ENSG00000239697_12 (sequence is synthesized)
acaacttgtctgaggccatgagatactaagtggtggagccaagatttgaacccagctagaatgtgcctgtgtactggacatggtctgcatgaaaggcgaggtggctggtgcaggggtgag

SEQ ID NO: 772796 - DNA, 120 bp, Artificial Sequence
  ENSG00000239704_0 (sequence is synthesized)
actttggggcaggggcaagaggatggttagctgcagcaaagagagagccaaagagaagtgggattgagagcacaggggacagctggagacaaaatataaacgccgggcaggggaacagcc

SEQ ID NO: 772797 - DNA, 120 bp, Artificial Sequence
  ENSG00000239704_1 (sequence is synthesized)
aagatagtgcaggaaggatggggaatcacagaaacttctcaggaacccagtgaaatgagctgcaccaggaactttaagagagagttttcagctgggagaagaggaaggcaagatatcaga

SEQ ID NO: 772798 - DNA, 120 bp, Artificial Sequence
  ENSG00000239704_2 (sequence is synthesized)
acaagaatctgaacctgtgatgttaagaaatcagtaaatattaaaaagaagatggatgcaagaaggatgaagaaagaagaaggactcacagaaaacactggacttccccggaagctactt

SEQ ID NO: 772799 - DNA, 120 bp, Artificial Sequence
  ENSG00000239704_3 (sequence is synthesized)
gaaaaacatgacccctggccggcctatgtcacctatacctctcagacagtgaaaagactcattgagaaaagcaaaactagagaactggaatgcatgcgtgccctcgaggaaagaccctgg

SEQ ID NO: 772800 - DNA, 120 bp, Artificial Sequence
  ENSG00000239704_4 (sequence is synthesized)
gcatcaaggcagaataaaccttccagcgtcattcagccgaaaaggaggaagtcttccaagtcttctggcaaagctgtgttcagggacacgctgtcagaatccacgttatcaatgtggggc

SEQ ID NO: 772801 - DNA, 120 bp, Artificial Sequence
  ENSG00000239704_5 (sequence is synthesized)
gcttattcggtattggccatggctcctaccatgatcccagaacccacacacttacatgcggattccagagactgtccaactgaaaactataacaagatcatctttgcccgcaagcctatg

SEQ ID NO: 772802 - DNA, 120 bp, Artificial Sequence
  ENSG00000239704_6 (sequence is synthesized)
atgaggatgctccctacagttcgctactgaccaacaaggagaaacatgcaaatgttttagccaggggtccctgcagccattccccaagaacgtacaaaagttaagctccatttaccactc

SEQ ID NO: 772803 - DNA, 120 bp, Artificial Sequence
  ENSG00000239704_7 (sequence is synthesized)
acttgacagtgtcctttaaatctgaacttgctcttgctcatgcggagcttggctaagagaaaccagatcagaatgcaagctgtaggtgggtgggtgagtgtgtcccctcccacactgctc

SEQ ID NO: 772804 - DNA, 120 bp, Artificial Sequence
  ENSG00000239704_8 (sequence is synthesized)
tctggtgggtttgggcagtccctggctctagtctctgctgcagattctcaggaccaaaatgtgggtgatttgtctgggtccaggcaggagacagaaatcacacaagctcttttattagag

SEQ ID NO: 772805 - DNA, 120 bp, Artificial Sequence
  ENSG00000239704_9 (sequence is synthesized)
ataatataaagaatgattaaccaggtgacagtaaagggcaggaagggaatacaaaggtatccatggaggtagcaccacaggaagcaggcatcacacttgaggcttgggaacaaggggaag

SEQ ID NO: 772806 - DNA, 120 bp, Artificial Sequence
  ENSG00000239704_10 (sequence is synthesized)
agctctgaggagagtcctgtggggatggtgccccctcctctgaataggggagatgttttgttggtgtctctgaggggacccccatgaggctgcttttgtgagtgttggaaaaaccaaaaa

SEQ ID NO: 772807 - DNA, 120 bp, Artificial Sequence
  ENSG00000239704_11 (sequence is synthesized)
ctgcattgaaatgtttctgggaggagttgccactgcctgggtgaagaaaaagcactgctagggttagcaacctgtctggcaagggacaggaagctgatagaaagtgaacaggaagcaaac

SEQ ID NO: 772808 - DNA, 120 bp, Artificial Sequence
  ENSG00000239704_12 (sequence is synthesized)
aggaagtgagcaaggggccacttcctacttcctcctttagcctagcagattccttctagctccccctgggggctgagcctatcagggcacaaagccagaatgtggtttgtagaatcccag

SEQ ID NO: 772809 - DNA, 120 bp, Artificial Sequence
  ENSG00000239704_13 (sequence is synthesized)
ccccagcatctccaagcataggatggattttgaagccaagagggaattagctctcggccgggttctgagtgatcccatccagctgctcctggacctggtattgagaggtttttcccttgg

SEQ ID NO: 772810 - DNA, 120 bp, Artificial Sequence
  ENSG00000239704_14 (sequence is synthesized)
agggcaaacaaagtggcagtggggaccagggtgtcccctgctgagaaatggagagctcttttcccctgtacttctctggggtttgccttgtggaaccaagtgcttgggggaggagctcct

SEQ ID NO: 772811 - DNA, 120 bp, Artificial Sequence
  ENSG00000239704_15 (sequence is synthesized)
ggcaggactccagctgttatttgtcagaggacagctaggattggttcacccttgctctgagttggccccaaagcgagctatgctgaactcttctccatctccaagcagacaacctttgtc

SEQ ID NO: 772812 - DNA, 120 bp, Artificial Sequence
  ENSG00000239704_16 (sequence is synthesized)
tttacatgcaagagggatccaattatgacaggctgacccagctggtttcatgtttggggtttatctactgagtaaggctgaccttacctgagtttctgtatgtgtatttgcaagacagtt

SEQ ID NO: 772813 - DNA, 120 bp, Artificial Sequence
  ENSG00000239704_17 (sequence is synthesized)
aatactaatccatcatccctcacagagatgtagaggatgagatgtagtaacttatagcagtgtcatttggaaaagttgaatttgccctacaaggcatgttctccattcaagggtcttgtg

SEQ ID NO: 772814 - DNA, 120 bp, Artificial Sequence
  ENSG00000239704_18 (sequence is synthesized)
taaacgtttgcagacacaggtgcagctttggagaactcacctctggctcttgtgcttttatgttgggacagctgcctaaattaggagctctagacctgttattggttcccaactgttggc

SEQ ID NO: 772815 - DNA, 120 bp, Artificial Sequence
  ENSG00000239704_19 (sequence is synthesized)
cagaatgaattcttcgaaaaatataggtggtttccagggaatttgaatgattgtattttgtgtccatggaacgtttatagacatggaggcaggcaataaattcctccaataattttttta

SEQ ID NO: 772816 - DNA, 120 bp, Artificial Sequence
  ENSG00000239704_20 (sequence is synthesized)
gagagttaagggttgactgggtaaaatctgtcttgtgctccatcatgaaaacacaactcagagctggtttttgatgtacatctaagagaagtaacagacaactcaaaagatttgggccac

SEQ ID NO: 772817 - DNA, 120 bp, Artificial Sequence
  ENSG00000239704_21 (sequence is synthesized)
gacattctaatgtcaccaatttttcgacatgctaatgccagcaattttttttgaaagttgaaatagaacataataaggcaacaaaacgagactaagagggttctgcaccgtgttccaaca

SEQ ID NO: 772818 - DNA, 120 bp, Artificial Sequence
  ENSG00000239704_22 (sequence is synthesized)
atcttcagtccccttcactgttcatgtctaagcactgaggcgttctaaagcaggtcaccttttgcctcaaggacttttcttgaaatatcatggtcttgctctgtcgcccaggctggagtg

SEQ ID NO: 772819 - DNA, 120 bp, Artificial Sequence
  ENSG00000239704_23 (sequence is synthesized)
acttcctgggctgaagcgatcctcccatctcggcctgtcaagtagctggaaccacaggcgcgccactacacctggctaatttatttttattttattttttgtagagacggtctcgccaca

SEQ ID NO: 772820 - DNA, 120 bp, Artificial Sequence
  ENSG00000239704_24 (sequence is synthesized)
ttgcccagactggtctgaaagtcttgggctcaagagatcctcccgcttccgccttccaaagcgctgggataacaggcgtgagccgctgcccgggccatccctcgaggaagtttcatcagg

SEQ ID NO: 772821 - DNA, 120 bp, Artificial Sequence
  ENSG00000239704_25 (sequence is synthesized)
gcatttgaaagagcagctaacatccgttaacaacatacagaagatatccctggagccatatttggcggtgatgacacctggccctggtaaaagcacatattggacaaggactcacagaaa

SEQ ID NO: 772822 - DNA, 120 bp, Artificial Sequence
  ENSG00000239713_0 (sequence is synthesized)
gggctgtcctaaaaccagaagcttggagcagaaagtgaaaccctggtgctccagacaaagatcttagtcgggactagccggccaaggatgaagcctcacttcagaaacacagtggagcga

SEQ ID NO: 772823 - DNA, 120 bp, Artificial Sequence
  ENSG00000239713_1 (sequence is synthesized)
atgtatcgagacacattctcctacaacttttataatagacccatcctttctcgtcggaataccgtctggctgtgctacgaagtgaaaacaaagggtccctcaaggccccctttggacgca

SEQ ID NO: 772824 - DNA, 120 bp, Artificial Sequence
  ENSG00000239713_2 (sequence is synthesized)
aagatctttcgaggccaggtgtattccgaacttaagtaccacccagagatgagattcttccactggttcagcaagtggaggaagctgcatcgtgaccaggagtatgaggtcacctggtac

SEQ ID NO: 772825 - DNA, 120 bp, Artificial Sequence
  ENSG00000239713_3 (sequence is synthesized)
atatcctggagcccctgcacaaagtgtacaagggatatggccacgttcctggccgaggacccgaaggttaccctgaccatctttgttgcccgcctctactacttctgggacccagattac

SEQ ID NO: 772826 - DNA, 120 bp, Artificial Sequence
  ENSG00000239713_4 (sequence is synthesized)
caggaggcgcttcgcagcctgtgtcagaaaagagacggtccgcgtgccaccatgaagatcatgaattatgacgaatttcagcactgttggagcaagttcgtgtacagccaaagagagcta

SEQ ID NO: 772827 - DNA, 120 bp, Artificial Sequence
  ENSG00000239713_5 (sequence is synthesized)
tttgagccttggaataatctgcctaaatattatatattactgcacatcatgctgggggagattctcagacactcgatggatccacccacattcactttcaactttaacaatgaaccttgg

SEQ ID NO: 772828 - DNA, 120 bp, Artificial Sequence
  ENSG00000239713_6 (sequence is synthesized)
gaggacggcatgagacttacctgtgttatgaggtggagcgcatgcacaatgacacctgggtcctgctgaaccagcgcaggggctttctatgcaaccaggctccacataaacacggtttcc

SEQ ID NO: 772829 - DNA, 120 bp, Artificial Sequence
  ENSG00000239713_7 (sequence is synthesized)
ttgaaggccgccatgcagagctgtgcttcctggacgtgattcccttttggaagctggacctggaccaggactacagggttacctgcttcacctcctggagcccctgcttcagctgtgccc

SEQ ID NO: 772830 - DNA, 120 bp, Artificial Sequence
  ENSG00000239713_8 (sequence is synthesized)
aggaaatggctaaattcatttcaaaaaacaaacacgtgagcctgtgcatcttcactgcccgcatctatgatgatcaaggaagatgtcaggaggggctgcgcaccctggccgaggctgggg

SEQ ID NO: 772831 - DNA, 120 bp, Artificial Sequence
  ENSG00000239713_9 (sequence is synthesized)
ccaaaatttcaataatgacatacagtgaatttaagcactgctgggacacctttgtggaccaccagggatgtcccttccagccctgggatggactagatgagcacagccaagacctgagtg

SEQ ID NO: 772832 - DNA, 120 bp, Artificial Sequence
  ENSG00000239713_10 (sequence is synthesized)
ggaggctgcgggccattctccagaatcaggaaaactgaaggatgggcctcagtctctaaggaaggcagagacctgggttgagcctcagaataaaagatcttcttccaagaaatgcaaaca

SEQ ID NO: 772833 - DNA, 120 bp, Artificial Sequence
  ENSG00000239713_11 (sequence is synthesized)
ggctgttcaccaccatctccagctgatcacagacaccagcaaagcaatgcactcctgaccaagtagattcttttaaaaattagagtgcattactttgaatcaaaaatttatttatatttc

SEQ ID NO: 772834 - DNA, 120 bp, Artificial Sequence
  ENSG00000239713_12 (sequence is synthesized)
aagaataaagtactaagattgtgctcaatacacagaaaagtttcaaacctactaatccagcgacaatttgaatcggttttgtaggtagaggaataaaatgaaatactaaatctttctgta

SEQ ID NO: 772835 - DNA, 120 bp, Artificial Sequence
  ENSG00000239713_13 (sequence is synthesized)
acttcaacattaattaacataaaattcttgacaagataatgaagtttctttttcttgtcacaccgagtctttgaaatgagctgcgtgggtcacgtacagtgggtggctcgcacctctaat

SEQ ID NO: 772836 - DNA, 68 bp, Artificial Sequence
  ENSG00000239713_14 (sequence is synthesized)
gtgggtcacgtacagtgggtggctcgtagatattcaaaaccggcctgggcaacatggtgaaatcccat

SEQ ID NO: 772837 - DNA, 120 bp, Artificial Sequence
  ENSG00000239713_15 (sequence is synthesized)
aactccatctcaaaaaaaaaaaaagaaatgagtggtgtatttttcaggtgcccaggtctctaatcagagccccatttcaagtactcagtagtcccttggccatgtcaccccccccgacat

SEQ ID NO: 772838 - DNA, 120 bp, Artificial Sequence
  ENSG00000239713_16 (sequence is synthesized)
cccccccgacatggacagtgcaggtccagtgggctccccactgactgcaggcagggaacaaggcagaccctagagggccaggccacagtaggggctgaggatgtctggtgaatggatgcc

SEQ ID NO: 772839 - DNA, 120 bp, Artificial Sequence
  ENSG00000239713_17 (sequence is synthesized)
tgggagaatggatgctagaattcacacacgaggccatgaacagggctgggaaaacttccaaactcagggaagcacgtgtcttggtgcaccttgtgatgcttcaacagcaggactgagatg

SEQ ID NO: 772840 - DNA, 120 bp, Artificial Sequence
  ENSG00000239713_18 (sequence is synthesized)
gggacatttacaatgaacagaaatgtatgggctcgagttctggactctgggaagtcccctgtcaatgcaccagcaactttccagggcctgcgagctgcacagtcacgtgggggtgaaggt

SEQ ID NO: 772841 - DNA, 120 bp, Artificial Sequence
  ENSG00000239713_19 (sequence is synthesized)
tgttgccagaagctcaggggatgctccagacagagtggcctgggatgtcgagtcactgctgctccgtgacatgggggcaagaggaagcagtttagtctgacatactgcccccccagctag

SEQ ID NO: 772842 - DNA, 120 bp, Artificial Sequence
  ENSG00000239713_20 (sequence is synthesized)
agggcaagagacagaaagaggggctgaagtcgcccttgaataaccacagcagtggcacccacaaaggtgcagttcccacagcctcatagctgcttgtaggtgccacctcttaaggccatt

SEQ ID NO: 772843 - DNA, 120 bp, Artificial Sequence
  ENSG00000239713_21 (sequence is synthesized)
accatagcaattaatactgaacatgagctttggagcagacaaacactcaaaccgaacagggggatggaggaaaggagcttcaatggcaagatctcctggactcctgtcctggcccctcct

SEQ ID NO: 772844 - DNA, 120 bp, Artificial Sequence
  ENSG00000239713_22 (sequence is synthesized)
ccaggctcatcgcctcgctcctctcacctcctgctcatcctcttgaggcctcccctctgttccagaccaggtcctctcctggccaggccctcctgccttccctcctgccccctgcctgcc

SEQ ID NO: 772845 - DNA, 120 bp, Artificial Sequence
  ENSG00000239713_23 (sequence is synthesized)
ctcgtggttacactccctcacccacactcctcgtgctccctccacctccctgcctcccacctgctttcctgggcccttcctgtgagtgagaggccccttctgcctccagagcaacctcca

SEQ ID NO: 772846 - DNA, 120 bp, Artificial Sequence
  ENSG00000239713_24 (sequence is synthesized)
tccacccccacagcctgggagccccaacctggccccttccatctccctggcataaccgaatttgtcgtaaaactggacgtagtaagtgggcatgaatagtcacaagcccggcagtcagaa

SEQ ID NO: 772847 - DNA, 120 bp, Artificial Sequence
  ENSG00000239713_25 (sequence is synthesized)
gctttgagcaacatccttaaaggccaacctgagcccctgagaaggagctgcctccatggaaacagagcttcaggcttcggctgccatagaagatggccgggctgggtgcccacagggcag

SEQ ID NO: 772848 - DNA, 120 bp, Artificial Sequence
  ENSG00000239713_26 (sequence is synthesized)
gcatttattttctcacacatctggaggctgcaagtccaaggtggaggggtgggcggggttgtgtcttctgcagtcgctcctcctggctggcagggggtcccttccggccctgtcctctct

SEQ ID NO: 772849 - DNA, 120 bp, Artificial Sequence
  ENSG00000239713_27 (sequence is synthesized)
ggcctttcctctgtgcacctgcactcgtggggtctctctgcctccaaatgtcctcctcgtttatggaccccagtcatgtgaatttgggcccacactgaaggtctcatttaagttaatcat

SEQ ID NO: 772850 - DNA, 66 bp, Artificial Sequence
  ENSG00000239713_28 (sequence is synthesized)
aatttgggcccacactgaaggtctcatttaagttaatcatctgatgaaaggacctgtctccaggcc

SEQ ID NO: 772851 - DNA, 66 bp, Artificial Sequence
  ENSG00000239713_29 (sequence is synthesized)
gagttcgacaccagcctggccaacatgtcctataattctagctactcggaaggctgaggcaggaga

SEQ ID NO: 772852 - DNA, 120 bp, Artificial Sequence
  ENSG00000239713_30 (sequence is synthesized)
gttgcggtgagcccagactgcgccgctgcactccagcctgggcaaaaaagcgaaacttcttctcaaacaaacaaacaagaaagaaaggacctgtttccaaatacagccaccctttgaggg

SEQ ID NO: 772853 - DNA, 120 bp, Artificial Sequence
  ENSG00000239713_31 (sequence is synthesized)
aagacgggaatggcccctgccagcctagggcagcctcacatgagctcacccccgcgcagcacttagaagactggcctgggcctcagaattcggttctaccatgatttaacaataataata

SEQ ID NO: 772854 - DNA, 120 bp, Artificial Sequence
  ENSG00000239713_32 (sequence is synthesized)
aattgccttgggtcctgccgcacagagcggcctgtctttatcagaggtccctctgccagggggagggccccagagaaaaccagaaagagggtgagagactgaggaagataaagcgtccca

SEQ ID NO: 772855 - DNA, 120 bp, Artificial Sequence
  ENSG00000239713_33 (sequence is synthesized)
caatcactttgcaggcaggagctaagccagctgggaaagcaaaccacgcactgataagtgaagtgcccggcggcgggctatccagtgtgtccttctctcccacactttccaagtccgtgg

SEQ ID NO: 772856 - DNA, 120 bp, Artificial Sequence
  ENSG00000239713_34 (sequence is synthesized)
ctttccaagtccgtggccctgaccttcctgctggaccgtcctgggatcggatcgtggagggggtttgcctctgcacaaaaggccttgtgtttccgtttttcttttcttttcttttttctt

SEQ ID NO: 772857 - DNA, 120 bp, Artificial Sequence
  ENSG00000239713_35 (sequence is synthesized)
gcaagaagctgcagtcattgtgggcgggcctgggtggggagtgcaggggttcctgtcctgtgtgtctgtttcccaggggagtcctgacctgactctcacagcccctccacccagatgttc

SEQ ID NO: 772858 - DNA, 120 bp, Artificial Sequence
  ENSG00000239713_36 (sequence is synthesized)
ctgtgtgcttcacccaccccattccttctgcacccaacactcctgagcccctccttagctcccccgacaggctcccctgctcccccactcccgggctgctcctcttctcagcctctctct

SEQ ID NO: 772859 - DNA, 120 bp, Artificial Sequence
  ENSG00000239713_37 (sequence is synthesized)
gggcctctctggggtccggacatgacccctcagctgatgcctgtggcttccccagccagaatcttcccagttccaggctgggctctgcagagtcctatcaaaggtggcatcctcccctct

SEQ ID NO: 772860 - DNA, 120 bp, Artificial Sequence
  ENSG00000239713_38 (sequence is synthesized)
gtccactccagggtgaagatctggtgtttctggtttggaaatgcctctgcactgggtgctaataattcacttttacctttataattgtggttttgtaaggacaggtatttttggcaacag

SEQ ID NO: 772861 - DNA, 120 bp, Artificial Sequence
  ENSG00000239732_0 (sequence is synthesized)
ggaggtcttgtttccggaagatgttgcaaggctgtggtgaaggcaggtgcagcctagcctcctgctcaagctacaccctggccctccacgcatgaggccctgcagaactctggagatggt

SEQ ID NO: 772862 - DNA, 120 bp, Artificial Sequence
  ENSG00000239732_1 (sequence is synthesized)
gcctacaagggcagaaaaggacaagtcggcagccgctgtcctgagggcaccagctgtggtgcaggagccaagacctgagggtggaagtgtcctcttagaatggggagtgcccagcaaggt

SEQ ID NO: 772863 - DNA, 120 bp, Artificial Sequence
  ENSG00000239732_2 (sequence is synthesized)
gtacccgctactggtgctatccagaattcccatctctccctgctctctgcctgagctctgggccttagctcctccctgggcttggtagaggacaggtgtgaggccctcatgggatgtagg

SEQ ID NO: 772864 - DNA, 120 bp, Artificial Sequence
  ENSG00000239732_3 (sequence is synthesized)
ctgtctgagaggggagtggaaagaggaaggggtgaaggagctgtctgccatttgactatgcaaatggcctttgactcatgggaccctgtcctcctcactgggggcagggtggagtggagg

SEQ ID NO: 772865 - DNA, 120 bp, Artificial Sequence
  ENSG00000239732_4 (sequence is synthesized)
gggagctactaggctggtataaaaatcttacttcctctattctctgagccgctgctgcccctgtgggaagggacctcgagtgtgaagcatccttccctgtagctgctgtccagtctgccc

SEQ ID NO: 772866 - DNA, 120 bp, Artificial Sequence
  ENSG00000239732_5 (sequence is synthesized)
gccagaccctctggagaagcccctgccccccagcatgggtttctgccgcagcgccctgcacccgctgtctctcctggtgcaggccatcatgctggccatgaccctggccctgggtacctt

SEQ ID NO: 772867 - DNA, 120 bp, Artificial Sequence
  ENSG00000239732_6 (sequence is synthesized)
gcctgccttcctaccctgtgagctccagccccacggcctggtgaactgcaactggctgttcctgaagtctgtgccccacttctccatggcagcaccccgtggcaatgtcaccagcctttc

SEQ ID NO: 772868 - DNA, 120 bp, Artificial Sequence
  ENSG00000239732_7 (sequence is synthesized)
cttgtcctccaaccgcatccaccacctccatgattctgactttgcccacctgcccagcctgcggcatctcaacctcaagtggaactgcccgccggttggcctcagccccatgcacttccc

SEQ ID NO: 772869 - DNA, 120 bp, Artificial Sequence
  ENSG00000239732_8 (sequence is synthesized)
ctgccacatgaccatcgagcccagcaccttcttggctgtgcccaccctggaagagctaaacctgagctacaacaacatcatgactgtgcctgcgctgcccaaatccctcatatccctgtc

SEQ ID NO: 772870 - DNA, 120 bp, Artificial Sequence
  ENSG00000239732_9 (sequence is synthesized)
cctcagccataccaacatcctgatgctagactctgccagcctcgccggcctgcatgccctgcgcttcctattcatggacggcaactgttattacaagaacccctgcaggcaggcactgga

SEQ ID NO: 772871 - DNA, 120 bp, Artificial Sequence
  ENSG00000239732_10 (sequence is synthesized)
ggtggccccgggtgccctccttggcctgggcaacctcacccacctgtcactcaagtacaacaacctcactgtggtgccccgcaacctgccttccagcctggagtatctgctgttgtccta

SEQ ID NO: 772872 - DNA, 120 bp, Artificial Sequence
  ENSG00000239732_11 (sequence is synthesized)
caaccgcatcgtcaaactggcgcctgaggacctggccaatctgaccgccctgcgtgtgctcgatgtgggcggaaattgccgccgctgcgaccacgctcccaacccctgcatggagtgccc

SEQ ID NO: 772873 - DNA, 120 bp, Artificial Sequence
  ENSG00000239732_12 (sequence is synthesized)
tcgtcacttcccccagctacatcccgataccttcagccacctgagccgtcttgaaggcctggtgttgaaggacagttctctctcctggctgaatgccagttggttccgtgggctgggaaa

SEQ ID NO: 772874 - DNA, 120 bp, Artificial Sequence
  ENSG00000239732_13 (sequence is synthesized)
cctccgagtgctggacctgagtgagaacttcctctacaaatgcatcactaaaaccaaggccttccagggcctaacacagctgcgcaagcttaacctgtccttcaattaccaaaagagggt

SEQ ID NO: 772875 - DNA, 120 bp, Artificial Sequence
  ENSG00000239732_14 (sequence is synthesized)
gtcctttgcccacctgtctctggccccttccttcgggagcctggtcgccctgaaggagctggacatgcacggcatcttcttccgctcactcgatgagaccacgctccggccactggcccg

SEQ ID NO: 772876 - DNA, 120 bp, Artificial Sequence
  ENSG00000239732_15 (sequence is synthesized)
cctgcccatgctccagactctgcgtctgcagatgaacttcatcaaccaggcccagctcggcatcttcagggccttccctggcctgcgctacgtggacctgtcggacaaccgcatcagcgg

SEQ ID NO: 772877 - DNA, 120 bp, Artificial Sequence
  ENSG00000239732_16 (sequence is synthesized)
ggcagatggaggggagaaggtctggctgcagcctggggaccttgctccggccccagtggacactcccagctctgaagacttcaggcccaactgcagcaccctcaacttcaccttggatct

SEQ ID NO: 772878 - DNA, 120 bp, Artificial Sequence
  ENSG00000239732_17 (sequence is synthesized)
gtcacggaacaacctggtgaccgtgcagccggagatgtttgcccagctctcgcacctgcagtgcctgcgcctgagccacaactgcatctcgcaggcagtcaatggctcccagttcctgcc

SEQ ID NO: 772879 - DNA, 120 bp, Artificial Sequence
  ENSG00000239732_18 (sequence is synthesized)
gctgaccggtctgcaggtgctagacctgtcccacaataagctggacctctaccacgagcactcattcacggagctaccgcgactggaggccctggacctcagctacaacagccagccctt

SEQ ID NO: 772880 - DNA, 120 bp, Artificial Sequence
  ENSG00000239732_19 (sequence is synthesized)
tggcatgcagggcgtgggccacaacttcagcttcgtggctcacctgcgcaccctgcgccacctcagcctggcccacaacaacatccacagccaagtgtcccagcagctctgcagtacgtc

SEQ ID NO: 772881 - DNA, 120 bp, Artificial Sequence
  ENSG00000239732_20 (sequence is synthesized)
gctgcgggccctggacttcagcggcaatgcactgggccatatgtgggccgagggagacctctatctgcacttcttccaaggcctgagcggtttgatctggctggacttgtcccagaaccg

SEQ ID NO: 772882 - DNA, 120 bp, Artificial Sequence
  ENSG00000239732_21 (sequence is synthesized)
cctgcacaccctcctgccccaaaccctgcgcaacctccccaagagcctacaggtgctgcgtctccgtgacaattacctggccttctttaagtggtggagcctccacttcctgcccaaact

SEQ ID NO: 772883 - DNA, 120 bp, Artificial Sequence
  ENSG00000239732_22 (sequence is synthesized)
ggaagtcctcgacctggcaggaaaccagctgaaggccctgaccaatggcagcctgcctgctggcacccggctccggaggctggatgtcagctgcaacagcatcagcttcgtggcccccgg

SEQ ID NO: 772884 - DNA, 120 bp, Artificial Sequence
  ENSG00000239732_23 (sequence is synthesized)
cttcttttccaaggccaaggagctgcgagagctcaaccttagcgccaacgccctcaagacagtggaccactcctggtttgggcccctggcgagtgccctgcaaatactagatgtaagcgc

SEQ ID NO: 772885 - DNA, 120 bp, Artificial Sequence
  ENSG00000239732_24 (sequence is synthesized)
caaccctctgcactgcgcctgtggggcggcctttatggacttcctgctggaggtgcaggctgccgtgcccggtctgcccagccgggtgaagtgtggcagtccgggccagctccagggcct

SEQ ID NO: 772886 - DNA, 120 bp, Artificial Sequence
  ENSG00000239732_25 (sequence is synthesized)
cagcatctttgcacaggacctgcgcctctgcctggatgaggccctctcctgggactgtttcgccctctcgctgctggctgtggctctgggcctgggtgtgcccatgctgcatcacctctg

SEQ ID NO: 772887 - DNA, 120 bp, Artificial Sequence
  ENSG00000239732_26 (sequence is synthesized)
tggctgggacctctggtactgcttccacctgtgcctggcctggcttccctggcgggggcggcaaagtgggcgagatgaggatgccctgccctacgatgccttcgtggtcttcgacaaaac

SEQ ID NO: 772888 - DNA, 120 bp, Artificial Sequence
  ENSG00000239732_27 (sequence is synthesized)
gcagagcgcagtggcagactgggtgtacaacgagcttcgggggcagctggaggagtgccgtgggcgctgggcactccgcctgtgcctggaggaacgcgactggctgcctggcaaaaccct

SEQ ID NO: 772889 - DNA, 120 bp, Artificial Sequence
  ENSG00000239732_28 (sequence is synthesized)
ctttgagaacctgtgggcctcggtctatggcagccgcaagacgctgtttgtgctggcccacacggaccgggtcagtggtctcttgcgcgccagcttcctgctggcccagcagcgcctgct

SEQ ID NO: 772890 - DNA, 120 bp, Artificial Sequence
  ENSG00000239732_29 (sequence is synthesized)
ggaggaccgcaaggacgtcgtggtgctggtgatcctgagccctgacggccgccgctcccgctacgtgcggctgcgccagcgcctctgccgccagagtgtcctcctctggccccaccagcc

SEQ ID NO: 772891 - DNA, 120 bp, Artificial Sequence
  ENSG00000239732_30 (sequence is synthesized)
cagtggtcagcgcagcttctgggcccagctgggcatggccctgaccagggacaaccaccacttctataaccggaacttctgccagggacccacggccgaatagccgtgagccggaatcct

SEQ ID NO: 772892 - DNA, 120 bp, Artificial Sequence
  ENSG00000239732_31 (sequence is synthesized)
gcacggtgccacctccacactcacctcacctctgcctgcctggtctgaccctcccctgctcgcctccctcaccccacacctgacacagagcaggcactcaataaatgctaccgaaggcta

SEQ ID NO: 772893 - DNA, 120 bp, Artificial Sequence
  ENSG00000239779_0 (sequence is synthesized)
ctagttggtggagttctgcccggatggaagctccggccgcggagtgatggtggcctcagcgaagatgggccgggcagggaccatggcggtggcagcagaggtggcaggggcggggcggct

SEQ ID NO: 772894 - DNA, 120 bp, Artificial Sequence
  ENSG00000239779_1 (sequence is synthesized)
ggcggtagaggaggctgtggtcctcagggggctgtaggtggaggtatggctcgggccagcagcgggaacggcagcgaggaggcctggggggcacttcgggcgccgcaacagcagcttcga

SEQ ID NO: 772895 - DNA, 120 bp, Artificial Sequence
  ENSG00000239779_2 (sequence is synthesized)
gagctgtgcccaggagtgaacaaccagccctacctctgtgagagtggtcactgctgcggggagactggctgctgcacctactactatgagctctggtggttctggctgctctggactgtc

SEQ ID NO: 772896 - DNA, 120 bp, Artificial Sequence
  ENSG00000239779_3 (sequence is synthesized)
ctcatcctctttagctgctgttgcgccttccgccaccgacgagctaaactcaggctgcaacaacagcagcggcagcgtgaaatcaacttgttggcctatcatggggcatgccatggggct

SEQ ID NO: 772897 - DNA, 120 bp, Artificial Sequence
  ENSG00000239779_4 (sequence is synthesized)
accccccccttatactgtggccccaggccgccccttgactgcttccagtgaacaaacctgctgttcctcctcatccagctgccctgcccactttgaaggaacaaatgtggaaggtgtttc

SEQ ID NO: 772898 - DNA, 120 bp, Artificial Sequence
  ENSG00000239779_5 (sequence is synthesized)
ctcccaccagagtgccccccctcatcaggagggtgagcccggggcaggggtgacccctgcctccacacccccctcctgccgctatcgccgtttaactggcgactccggtattgagctctg

SEQ ID NO: 772899 - DNA, 120 bp, Artificial Sequence
  ENSG00000239779_6 (sequence is synthesized)
cccttgtcctgcctccggtgagggtgagccagtcaaggaggtgagggttagtgccaccctgccagatctggaggactactccccgtgtgcactacccccagagtctgtaccgcagatctt

SEQ ID NO: 772900 - DNA, 120 bp, Artificial Sequence
  ENSG00000239779_7 (sequence is synthesized)
tcccatggggctgtcttccagtgaaggggacatcccataagtagttttgagagggtggatgggttacttgcccaccagaaacagccctagtcccaactccttgcgttcctttggcccctc

SEQ ID NO: 772901 - DNA, 120 bp, Artificial Sequence
  ENSG00000239779_8 (sequence is synthesized)
cctgcctacctagaatctgcctgaaagggctggagaggggcagtattgggggactgtgctagctttacccccgcaggacatacacaggagcctttgatctcattaaagagatgtgaacca

SEQ ID NO: 772902 - DNA, 120 bp, Artificial Sequence
  ENSG00000239779_9 (sequence is synthesized)
cagctaccagtggccctccccaaaccagaaccccaaatcgtctcacattcccttttccacacatttcaaagtatttttccctaatataaaaactagcaccctatacctggttgtcttcaa

SEQ ID NO: 772903 - DNA, 120 bp, Artificial Sequence
  ENSG00000239779_10 (sequence is synthesized)
cacttcccccatctctccaagctgaacttggttcacagggtgggattgtgtatgtgcatgcaggaggtgggggtggacagtgccctgggctggaatcccccttagttctaagtgcctcct

SEQ ID NO: 772904 - DNA, 120 bp, Artificial Sequence
  ENSG00000239779_11 (sequence is synthesized)
tgaaagcaacttgctttggaaatgacctaccgctacccgttgtctgagactgagattatctcagactgtcttctggcttctgccaaaacactcccttaacagaaagcaccgaggggatgg

SEQ ID NO: 772905 - DNA, 120 bp, Artificial Sequence
  ENSG00000239779_12 (sequence is synthesized)
gggtaggggggttggggagagtgaggcttgagtgtgaaggaagtctcatatatgcagagctgaaatctccctctttgtatgtccacacttttgtcttgttctctagactgattcttgcta

SEQ ID NO: 772906 - DNA, 120 bp, Artificial Sequence
  ENSG00000239779_13 (sequence is synthesized)
ggaggaactcacggagccaaaggtactgtgaagttcctaaacatgtctcttccactctttgtctaaactttgtaacgtagatgcagctgactttgcctgtagcctcatagaacccatccc

SEQ ID NO: 772907 - DNA, 120 bp, Artificial Sequence
  ENSG00000239779_14 (sequence is synthesized)
tttttctatgtgcctattgtcacaacagagtccggcagcgtcttctcttgagggagcaatttggagaagagctggaacccagactcgcgccctggatgccatcctttatcatccacagca

SEQ ID NO: 772908 - DNA, 120 bp, Artificial Sequence
  ENSG00000239789_0 (sequence is synthesized)
atcccgctgcgaccggcgctccccggggcaggtggctgcatagtcttggcggaggtgaccaaagccacgtaatgtccgtagttcgctcatccgtccatgccagatggattgtggggaagg

SEQ ID NO: 772909 - DNA, 120 bp, Artificial Sequence
  ENSG00000239789_1 (sequence is synthesized)
tgattgggacaaaaatgcaaaagactgctaaagtgagagtgaccaggcttgttctggatccctatttattaaagtattttaataagcggaaaacctactttgctcacgatgcccttcagc

SEQ ID NO: 772910 - DNA, 120 bp, Artificial Sequence
  ENSG00000239789_2 (sequence is synthesized)
agtgcacagttggggatattgtgcttctcagagctttacctgttccacgagcaaagcatgtgaaacatgaactggctgagatcgttttcaaagttggaaaagtcatagatccagtgacag

SEQ ID NO: 772911 - DNA, 120 bp, Artificial Sequence
  ENSG00000239789_3 (sequence is synthesized)
gaaagccctgtgctggaactacctacctggagagtccgttgagttcggaaaccacccagctaagcaaaaatctggaagaactcaatatctcttcagcacagtgaagcgggagtggaagaa

SEQ ID NO: 772912 - DNA, 120 bp, Artificial Sequence
  ENSG00000239789_4 (sequence is synthesized)
ggatctaaagggaaaaactgacatgtttatgttatggaaaaagaaatttttctaagtttcatcacaaactgtgtccagtttctctgtggtgtttatgaaatagctaaaagcaaatgaagt

SEQ ID NO: 772913 - DNA, 120 bp, Artificial Sequence
  ENSG00000239789_5 (sequence is synthesized)
aaagggcatactatggtttttcacaaaggtttatggtcgtgtttcaaattttcatcatttcagtgaacatacttccacgttacattaagtgtgcctagcagtctgttgcattttgtaagc

SEQ ID NO: 772914 - DNA, 78 bp, Artificial Sequence
  ENSG00000239789_6 (sequence is synthesized)
agcaagctcactgttttagaaggttttatttttgtcttttgagacagggttttgctttgttgtgggggctggagtgca

SEQ ID NO: 772915 - DNA, 89 bp, Artificial Sequence
  ENSG00000239789_7 (sequence is synthesized)
gtggtatggctctagcatctttccaccccagccttctgagtagctgggaacacaggagcgtaccactacacttggctgattttttgtaa

SEQ ID NO: 772916 - DNA, 85 bp, Artificial Sequence
  ENSG00000239789_8 (sequence is synthesized)
ctctagcatctttccaccccagccttctgagtagctgggaacacaggagcgtaccactacacttggctgattttttgtaaattgg

SEQ ID NO: 772917 - DNA, 120 bp, Artificial Sequence
  ENSG00000239789_9 (sequence is synthesized)
acaggcctgagccactgtgcccagccggtttcctttatttcattcaaaggaattttgaatttatcttagaacctttattttgaaggaagaaagtcttttttttttttgagctggagtttc

SEQ ID NO: 772918 - DNA, 90 bp, Artificial Sequence
  ENSG00000239789_10 (sequence is synthesized)
atgtaatgaccagccactggtcagaattctttcaatcaagctgtgttaataagaatattgatgtgtggaaaataaaattttacaattctg

SEQ ID NO: 772919 - DNA, 120 bp, Artificial Sequence
  ENSG00000239789_11 (sequence is synthesized)
cggggtattgctgccgggggaggatttgctggggacccaaggcaccctcgcgtgagagccctgagagcgaatcgcttcgtctgacctcggggttgtctggggcgagggcacgaatcaccc

SEQ ID NO: 772920 - DNA, 120 bp, Artificial Sequence
  ENSG00000239789_12 (sequence is synthesized)
caacctttccgaagcctggtggaatggcttgtgaactgatctcaaaagcagcccaagtcatccgtcgctgggccggggagggggacaccgcggcggccccgccgagtgctacctgggcac

SEQ ID NO: 772921 - DNA, 120 bp, Artificial Sequence
  ENSG00000239810_0 (sequence is synthesized)
ttcctgcttggttcttcctgaggtctgagcaccttctagactacatccagatctgttttccctgcagattcatgaagatgagcatccggattccacccagactcctggagcttgcggggc

SEQ ID NO: 772922 - DNA, 120 bp, Artificial Sequence
  ENSG00000239810_1 (sequence is synthesized)
ggagcctgctgagggaccaagccttggccgtctccaccctggaggagctgcccacggaacttttccccccactgttcatggaggccttcagcaggagacgctgtgaggccctgaagctga

SEQ ID NO: 772923 - DNA, 120 bp, Artificial Sequence
  ENSG00000239810_2 (sequence is synthesized)
tggtgcaggcctggcccttccgccgcctccctctgaggcctctgataaagatgccttgtctggaggccttccaagctgtgctcgatgggctggatgcactgcttacccaaggggttcgtc

SEQ ID NO: 772924 - DNA, 120 bp, Artificial Sequence
  ENSG00000239810_3 (sequence is synthesized)
aacttcaagtgctggatttacaggatgtctgtgagaacttctggatggtttggtctgaagctatggcccatgggtgcttcctcaatgccaagaggaacaaaaaaccagtgcaggactgtc

SEQ ID NO: 772925 - DNA, 120 bp, Artificial Sequence
  ENSG00000239810_4 (sequence is synthesized)
tgcaggactgtccaaggatgagaggacggcagcccttgactgtgtttgtagaactttggctcaagaacaggactctggatgaatacctcacctgcctccttctatgggtcaagcagagga

SEQ ID NO: 772926 - DNA, 120 bp, Artificial Sequence
  ENSG00000239810_5 (sequence is synthesized)
gagatttactacacctgtgctgtaagaagctgaaaattttgggaatgcccttccgcaatatcagaagcatcctgaaaatggtgaacctagactgtatccaggaggtggaagtgaattgca

SEQ ID NO: 772927 - DNA, 120 bp, Artificial Sequence
  ENSG00000239810_6 (sequence is synthesized)
agtggatactgcccatcctgacacagtttaccccatacctgggccacttgaggaatcttcagaagctcgttctctcccacatggatgtctctcgctacgtttccccagagcagaagaagg

SEQ ID NO: 772928 - DNA, 120 bp, Artificial Sequence
  ENSG00000239810_7 (sequence is synthesized)
cccagttcaccactcagttcctcaagctgcgctgcctccaaaagctttatatgaactctgtttctttcctcgaaggccacctggaccagctgctcagctgtctgaagacctcgttaaagg

SEQ ID NO: 772929 - DNA, 120 bp, Artificial Sequence
  ENSG00000239810_8 (sequence is synthesized)
acttgaagcatctatcccagtgcccgagtatcagtcaactaaagaccctggacctgagtggcatcagactgaccaattacagtcttgtgcctctccaaattctcctagaaaaagttgcag

SEQ ID NO: 772930 - DNA, 120 bp, Artificial Sequence
  ENSG00000239810_9 (sequence is synthesized)
ccacccttgagtacctggatttagatgactgtggcatcatagactcccaagtcaacgccatcctgcctgccctgagccgctgctttgagctcaacaccttcagcttctgtggaaatccca

SEQ ID NO: 772931 - DNA, 120 bp, Artificial Sequence
  ENSG00000239810_10 (sequence is synthesized)
tctgcatggccaccctggagaacctgctgagccacacaatcatactcaaaaacttatgcctggagctgtatcctgccccgcaggaaagttatggtgctgatggtactctctgctggagca

SEQ ID NO: 772932 - DNA, 120 bp, Artificial Sequence
  ENSG00000239810_11 (sequence is synthesized)
gatttgctcaaattagggctgagctgatgaagaaagtgaggcacttaaggcaccccaagaggatcttgttctgtactgacaactgccctgaccatggcgacaggtcattttatgacctgg

SEQ ID NO: 772933 - DNA, 120 bp, Artificial Sequence
  ENSG00000239810_12 (sequence is synthesized)
aggcagatcaatactgctgttgaatgcctgcctatttggatgggtatgtcaaacgctttcttctggacacttggaaactaaaacctaggtcttaggtacatcctaaagggagcacagaac

SEQ ID NO: 772934 - DNA, 120 bp, Artificial Sequence
  ENSG00000239810_13 (sequence is synthesized)
ccatcgtttcacacatgggctctgaaagtgggaaaggaaagctgatcaagcaggggcaggacttgggggaaatgttgccatggattcaatgggactttgggaacctgtatcctgtagagt

SEQ ID NO: 772935 - DNA, 120 bp, Artificial Sequence
  ENSG00000239810_14 (sequence is synthesized)
cgaaaatgggaatctgaatgtctagagtggaattcaggcttgagaatacatgagggagttactcttgcatggatggttgtaaagaaacaatcagaaataaaggaaaactgagcagaatct

SEQ ID NO: 772936 - DNA, 120 bp, Artificial Sequence
  ENSG00000239819_0 (sequence is synthesized)
gggacacctggggacactgagctggtgctgagttactgagatgagccagctctgcagctgtgcccagtcagccccatcccctgctcatttgcatgttcccagagcacaacctcctgcact

SEQ ID NO: 772937 - DNA, 88 bp, Artificial Sequence
  ENSG00000239819_1 (sequence is synthesized)
ctgctcatttgcatgttcccagagcacaacctcctgcactgaagccttattaataggctggccacacttcatgcaggagtcagaccca

SEQ ID NO: 772938 - DNA, 120 bp, Artificial Sequence
  ENSG00000239819_2 (sequence is synthesized)
agacagagtcaccatcagttgtcggatgagtcagggcattagcagttatttagcctggtatcagcaaaaaccagggaaagcccctgagctcctgatctatgctgcatccactttgcaaag

SEQ ID NO: 772939 - DNA, 79 bp, Artificial Sequence
  ENSG00000239819_3 (sequence is synthesized)
cccctgagctcctgatctatgctgcatccactttgcaaagtggggtcccatcaaggttcaggcctgcagtctgaagatt

SEQ ID NO: 772940 - DNA, 120 bp, Artificial Sequence
  ENSG00000239839_0 (sequence is synthesized)
gctccttgctatagaagacctgggacagaggactgctgtctgccctctctggtcaccctgcctagctagaggatctgtgaccccagccatgaggaccctcgccatccttgctgccattct

SEQ ID NO: 772941 - DNA, 120 bp, Artificial Sequence
  ENSG00000239839_1 (sequence is synthesized)
cctggtggccctgcaggcccaggctgagccactccaggcaagagctgatgaggttgctgcagccccggagcagattgcagcggacatcccagaagtggttgtttcccttgcatgggacga

SEQ ID NO: 772942 - DNA, 120 bp, Artificial Sequence
  ENSG00000239839_2 (sequence is synthesized)
agcatccaggctcaaggaaaaacatggactgctattgcagaataccagcgtgcattgcaggagaacgtcgctatggaacctgcatctaccagggaagactctgggcattctgctgctgag

SEQ ID NO: 772943 - DNA, 120 bp, Artificial Sequence
  ENSG00000239839_3 (sequence is synthesized)
cttgcagaaaaagaaaaatgagctcaaaatttgctttgagagctacagggaattgctattactcctgtaccttctgctcaatttcctttcctcatctcaaataaatgccttgttacaaga

SEQ ID NO: 772944 - DNA, 65 bp, Artificial Sequence
  ENSG00000239855_0 (sequence is synthesized)
gagtcagacccactctggctcccaggtgccagatgtgccatccagatgacccagtctccatcctc

SEQ ID NO: 772945 - DNA, 90 bp, Artificial Sequence
  ENSG00000239855_1 (sequence is synthesized)
catctgttagtcagggcattagaaatgatttaggctggtatcagcagaaaccagggaaagcccctaagctcctgatctatgctgcatcca

SEQ ID NO: 772946 - DNA, 80 bp, Artificial Sequence
  ENSG00000239857_0 (sequence is synthesized)
agaagggcgtcgggcggccgtcgggacggaagccgggaggcgctgccgaccgcgcctgcgacagcgtcagccctgcgcgg

SEQ ID NO: 772947 - DNA, 120 bp, Artificial Sequence
  ENSG00000239857_1 (sequence is synthesized)
aggagagcgcccggaacggcggccgcaaccgcggcggcgtccagcgtgtggagggcaagctgcgcgccagcgtcgagaagggcgactactacgaggcgcaccagatgtaccggaccctgt

SEQ ID NO: 772948 - DNA, 120 bp, Artificial Sequence
  ENSG00000239857_2 (sequence is synthesized)
tcttcaggtacatgtcccagagcaagcacacggaggcccgggagctcatgtactcgggagccctgctcttcttcagccatggccagcaaaacagtgcagcagacttgtccatgctggtcc

SEQ ID NO: 772949 - DNA, 120 bp, Artificial Sequence
  ENSG00000239857_3 (sequence is synthesized)
tggagtccctggagaaggcggaagtggaggtggctgacgagctgctggaaaatctggctaaagtgttcagcctgatggaccccaactctcctgagcgcgtgacctttgtgtccagagccc

SEQ ID NO: 772950 - DNA, 120 bp, Artificial Sequence
  ENSG00000239857_4 (sequence is synthesized)
tgaagtggtccagtgggggctccgggaagctgggccacccccggctgcaccagctgctggccctcaccctgtggaaagaacaaaactattgtgagtcgaggtatcattttctgcactcag

SEQ ID NO: 772951 - DNA, 120 bp, Artificial Sequence
  ENSG00000239857_5 (sequence is synthesized)
cggacggggagggctgtgccaacatgctggtggagtattccacgtcccgcggcttccgcagcgaggtggacatgttcgtggcccaggccgtgctacagtttctctgtttaaaaaacaaaa

SEQ ID NO: 772952 - DNA, 120 bp, Artificial Sequence
  ENSG00000239857_6 (sequence is synthesized)
gtagcgcatcggtggtcttcacgacgtacacccagaagcacccgtccatcgaggacgggcctccgtttgtggagccgctgcttaacttcatctggttcctgctgctggctgtggacggtg

SEQ ID NO: 772953 - DNA, 120 bp, Artificial Sequence
  ENSG00000239857_7 (sequence is synthesized)
ggaagctgacggtgttcactgtgctgtgtgagcagtaccagccatccctccggcgggaccccatgtacaacgagtacctcgaccgcataggacagctgttcttcggcgtcccgcccaagc

SEQ ID NO: 772954 - DNA, 120 bp, Artificial Sequence
  ENSG00000239857_8 (sequence is synthesized)
ggctcctcagagcaggaggatggggaggagagccccagcgacggcagccccatcgagctggactgaactggccaggccacgtggagacaccacggtcgacgacggctggagggacgtttc

SEQ ID NO: 772955 - DNA, 120 bp, Artificial Sequence
  ENSG00000239857_9 (sequence is synthesized)
agaggcgagtcctgggtggctcctcgccttgggggctcctggccctgaggctggcggtggccgcatgccggcgcgtgtctgtttctgtgcggcggctcagggtggcgcggctgctgctca

SEQ ID NO: 772956 - DNA, 120 bp, Artificial Sequence
  ENSG00000239857_10 (sequence is synthesized)
ctgtgctgctgggacccaagagtggggcgtcgcccctgctggccgccgcgtcccccgagattgacccacaataaagcacaggccttaccgcggcgtcaccctctcccactcctttgttct

SEQ ID NO: 772957 - DNA, 120 bp, Artificial Sequence
  ENSG00000239857_11 (sequence is synthesized)
gggtcctttcgggagggctgatgggcagcacaggaggcccgtcctcggggggctgcgcacatcacgctccttgccgggcgtccggcacagctgcggtcaccaaagcaggtgctggccctc

SEQ ID NO: 772958 - DNA, 120 bp, Artificial Sequence
  ENSG00000239857_12 (sequence is synthesized)
ggacctgagagcccagccagggcccatgtggtctgcaaatgggagcggctgtttttgaacacggggtcattctgcagtcaggacgaaccggtccccgtcgcagacggagtgcacgtgccc

SEQ ID NO: 772959 - DNA, 120 bp, Artificial Sequence
  ENSG00000239857_13 (sequence is synthesized)
tgcgccacatcctcacgctcggtggagggacgcgtgcggcgggacggtgcctacgggtacttgcagctgtgtcccatgtggcatcccagagctgcgccctgctggtctctgtgagcgcca

SEQ ID NO: 772960 - DNA, 120 bp, Artificial Sequence
  ENSG00000239857_14 (sequence is synthesized)
cgctgctgtgctggaaatgccgctttaaaaagggataccgtgggactctgcccgtctctttcataacgcaatatttatttgtattgggtgatgattgattctttcgacctaacattttgg

SEQ ID NO: 772961 - DNA, 120 bp, Artificial Sequence
  ENSG00000239857_15 (sequence is synthesized)
gttttaaccaaataaccggtccaggagtgagcagctccgttctgtcagatgctactccaaatgttaccagaacgatgacaaaaggggagacgctctattttttcacagttaaatgacagt

SEQ ID NO: 772962 - DNA, 120 bp, Artificial Sequence
  ENSG00000239857_16 (sequence is synthesized)
tgtagattgatacgcagttgtgcatgggaaggggaaacgcacagctttatttactgtaaagtggaatttcaggaaggcttgtgtgaaccgttgcgcataaataaaccctttctaccgggc

SEQ ID NO: 772963 - DNA, 120 bp, Artificial Sequence
  ENSG00000239857_17 (sequence is synthesized)
tgttttggccggcagagagcaccagcgctcactggctctcagcgcctgtcagcaggcagaagccatttccctatctggaaggcacgtctgggtgtccacatggcacggccaatagtgcgc

SEQ ID NO: 772964 - DNA, 120 bp, Artificial Sequence
  ENSG00000239857_18 (sequence is synthesized)
agcatgcagagccgggccgggagaaggcccggccatgcccagctgccccccactctccccggcctcgggcttgagagggtacctgtcctggcttagtcacctggaaaccaaaatccttcg

SEQ ID NO: 772965 - DNA, 120 bp, Artificial Sequence
  ENSG00000239857_19 (sequence is synthesized)
cagcttccagaattctccagtacaggaggagaagccgtccacgttcagagccgccttagacggtttgcctgtcaccggcattcctggacctggaaacgggtgcccccagccaggccgggg

SEQ ID NO: 772966 - DNA, 120 bp, Artificial Sequence
  ENSG00000239857_20 (sequence is synthesized)
accactgtgtgcccagaattctcctcccgtcctttttccccttgcccggctcccagctgcccagggaagaagggagccggctgcaaggcgcagtccaaaccaggccgggggccgtgacca

SEQ ID NO: 772967 - DNA, 120 bp, Artificial Sequence
  ENSG00000239857_21 (sequence is synthesized)
tcggcagtgccccccagagcaggctcctcgtgcaggaatatgggtcactgccttccagggagtcctttttttcttctggtttctaagtcgccacctcttgctttacctcagatagaagca

SEQ ID NO: 772968 - DNA, 120 bp, Artificial Sequence
  ENSG00000239857_22 (sequence is synthesized)
tccagaacgctgtagtatcggcaaagcagaagctggtgtggtgcttgctcagggtcggtgcatgcggttctgcccgtggccccactggcggcatcgtgaggccaggcgtgtctgggagct

SEQ ID NO: 772969 - DNA, 120 bp, Artificial Sequence
  ENSG00000239857_23 (sequence is synthesized)
tgtttttccagagtgccctgtgccagacggctcccggcctcctctgagtcagtcatgtccctgcaggactggaactaggacggccggtcacagagtcagtggtcctgtcgaggctcctgc

SEQ ID NO: 772970 - DNA, 120 bp, Artificial Sequence
  ENSG00000239857_24 (sequence is synthesized)
tgtggtgttggggtgggtctccctccagaaccttcactgtgcggggagcacagcaaaaccggaggcctgccaacggcctgcaggctgacgggggtgcgggggcactttctctcttgggtg

SEQ ID NO: 772971 - DNA, 120 bp, Artificial Sequence
  ENSG00000239857_25 (sequence is synthesized)
cgggcttttccctcctggtgccctgcctctgtgcagcacgaagcggtctcctgtggggggagggcctgtgtgccaggctaatgagatgcccggatgtggcggggctgtctgtgtttgggg

SEQ ID NO: 772972 - DNA, 120 bp, Artificial Sequence
  ENSG00000239857_26 (sequence is synthesized)
tccctggctgtggtgccttctgaagaggagcccttttctgtggttaactgagcatccaaccctttgcgttctcggctggccttcccgtcctggcaacaccaaggtcattctggtcctcag

SEQ ID NO: 772973 - DNA, 120 bp, Artificial Sequence
  ENSG00000239857_27 (sequence is synthesized)
tggcgttgctgtggctctttatcacctccactgcaattggtttttgtttgtttgttttggggggatggcgcctcgctctgtcatccgtctaggcagtggtgcaatcatggcttactgcgg

SEQ ID NO: 772974 - DNA, 120 bp, Artificial Sequence
  ENSG00000239857_28 (sequence is synthesized)
cgatcctcccacctcagcctcccaaagggctgagattacaggtgtgagcccccgaatccggtgtgcactgctgtttacttagtatttttctttaactagatttatttttaaacaaggctt

SEQ ID NO: 772975 - DNA, 120 bp, Artificial Sequence
  ENSG00000239857_29 (sequence is synthesized)
tttttctttaactagatttatttttaaacaaggctttgtccaaggacatttggctcgcaggcacagagctgattaactcgttatgtatcttttgataataaggcagcgatcattaagaaa

SEQ ID NO: 772976 - DNA, 120 bp, Artificial Sequence
  ENSG00000239857_30 (sequence is synthesized)
aacgtgtagccaatgaaataacatgttctgggccccaccactggactgggaggtgcagcgcatccaagcagaggctgcctcctgccctccacgcctgctgctctcgcaggcaggggctct

SEQ ID NO: 772977 - DNA, 120 bp, Artificial Sequence
  ENSG00000239857_31 (sequence is synthesized)
gctgcttacagcagtgcggccatctcggcttctctccacatcgtctgtcacgcgctggtccccaccatacctctcgccaccccgtgcctctgtccccgtgcggcctgaggagctccagct

SEQ ID NO: 772978 - DNA, 120 bp, Artificial Sequence
  ENSG00000239857_32 (sequence is synthesized)
ttccctgccagcggtgctctgggagtggggacgtgatgcagggcgagcatgatgcaacggggcaccccagacccttccctcccgtggggggaggggtgtggcacgcagaggggcagaggg

SEQ ID NO: 772979 - DNA, 120 bp, Artificial Sequence
  ENSG00000239857_33 (sequence is synthesized)
cggggacactggccccgtgggggaagaaggtgctgtcacagccgttactgtcccccgtgggaccccagcctggagccccccatcctttggctcctgcctgtggccactcagctctcaggt

SEQ ID NO: 772980 - DNA, 120 bp, Artificial Sequence
  ENSG00000239857_34 (sequence is synthesized)
ctgccctgcccagtggcctttctggtcccagctactgaaaccggtgagctgctccagggtgaggctgctttctggctcctggtgtatttggacacagataggcccttagtgtccagaggc

SEQ ID NO: 772981 - DNA, 120 bp, Artificial Sequence
  ENSG00000239857_35 (sequence is synthesized)
gccccatgcagccctcatggtcagcaggacacccaggatagaccccctccacgcagcacctgggccctgggagcggctgcttttaggatgccacctgttcctgggcgccttgtttttagc

SEQ ID NO: 772982 - DNA, 120 bp, Artificial Sequence
  ENSG00000239857_36 (sequence is synthesized)
cttgcctcccccaccttcccccctggcctccacctgttccgcattcccccacctccctgcctccctcctcctggccttcaggttctccagccgggccctacaccgggctccgtaggaagt

SEQ ID NO: 772983 - DNA, 120 bp, Artificial Sequence
  ENSG00000239857_37 (sequence is synthesized)
cgctggcgttcctctcaccgagggtccaggctgagggtgaaaccgcttctctgttgacgccgcccggcctgccgaaccgagtcagccgcctctggacctaggctcggtgacacctgcacg

SEQ ID NO: 772984 - DNA, 120 bp, Artificial Sequence
  ENSG00000239857_38 (sequence is synthesized)
gccggtgtagcctggagggcgagcgcgagcagagctggctatgctgggttaactgcacgcccctcgggactgtgaccgcttggaagttccaggctgctgcgtggcttggttgattgtctt

SEQ ID NO: 772985 - DNA, 120 bp, Artificial Sequence
  ENSG00000239857_39 (sequence is synthesized)
actcctagtccctgctgctctgggagatgccccgggccagagccaggtacccagagcggccacagctgttcctggactccagctccccacggcaccttccccagcccccgcctcggccag

SEQ ID NO: 772986 - DNA, 120 bp, Artificial Sequence
  ENSG00000239857_40 (sequence is synthesized)
ggcgtccgtccttccttcctcgctgtgctctggggcacatggcgctggaactgcggtgggcagctcagtgtggtggtccacggctcactcagggacgcccagcagaaaatctggctaaag

SEQ ID NO: 772987 - DNA, 68 bp, Artificial Sequence
  ENSG00000239862_0 (sequence is synthesized)
gtcccactgctctgggtcccaggtgccagatgtgacatccagttgacccagtctccatcctccctgtc

SEQ ID NO: 772988 - DNA, 120 bp, Artificial Sequence
  ENSG00000239862_1 (sequence is synthesized)
ggagacagagtcaccatcacttgccgggtgagtcagggcattagcagttatttaaattggtatcggcagaaaccagggaaagttcctaagctcctgatctatagtgcatccaatttgcaa

SEQ ID NO: 772989 - DNA, 87 bp, Artificial Sequence
  ENSG00000239862_2 (sequence is synthesized)
tctggagtcccatctcggttcagtatcagcagcctgcagcctgaagatgttgcaacttattacggtcaacggacttacaatgcccct

SEQ ID NO: 772990 - DNA, 120 bp, Artificial Sequence
  ENSG00000239886_0 (sequence is synthesized)
tgacaccatgacccactgttgctccccttgctgtcagcctacctgctgcaggaccacctgctgcaggaccacctgctggaagcccaccactgtgaccacctgcagcagcacaccctgctg

SEQ ID NO: 772991 - DNA, 120 bp, Artificial Sequence
  ENSG00000239886_1 (sequence is synthesized)
ccagcccgcctgctgtgtgtccagctgctgccagccttgctgccgcccaacttgctgtcaaaacacctgctgtaggaccacctgctgccagcccacctgtgtgaccagctgctgccagcc

SEQ ID NO: 772992 - DNA, 120 bp, Artificial Sequence
  ENSG00000239886_2 (sequence is synthesized)
ttcctgctgcagcacaccctgctgccagcccacctgctgtgggtccagctgctgtggccaaaccagctgtgggtccagctgtggccagagcagctcctgtgcacctgtgtactgcagaag

SEQ ID NO: 772993 - DNA, 120 bp, Artificial Sequence
  ENSG00000239886_3 (sequence is synthesized)
aacctgctactaccccacgactgtctgcctgcctggttgcctaaaccagagctgtggctccaactgctgccagccctgctgccgcccagcctgctgtgagaccacctgctgcaggaccac

SEQ ID NO: 772994 - DNA, 120 bp, Artificial Sequence; identical to SEQ ID NO: 684385
  ENSG00000239886_4 (sequence is synthesized)

SEQ ID NO: 772995 - DNA, 120 bp, Artificial Sequence; identical to SEQ ID NO: 684386
  ENSG00000239886_5 (sequence is synthesized)

SEQ ID NO: 772996 - DNA, 120 bp, Artificial Sequence; identical to SEQ ID NO: 684387
  ENSG00000239886_6 (sequence is synthesized)

SEQ ID NO: 772997 - DNA, 120 bp, Artificial Sequence; identical to SEQ ID NO: 684388
  ENSG00000239886_7 (sequence is synthesized)

SEQ ID NO: 772998 - DNA, 120 bp, Artificial Sequence
  ENSG00000239887_0 (sequence is synthesized)
gcctggcggttccagggtgcacaccactcctcgtagcaggtcccctgtcttgtgtgctgtgtccccccgaggtatgctggtgctggtggcccaggcaggaggtgacactctcaaagtgac

SEQ ID NO: 772999 - DNA, 120 bp, Artificial Sequence
  ENSG00000239887_1 (sequence is synthesized)
tggtcactacgtaaaatgtgtctttcttttgtttgtttcccacctgctttccgagcccctttctcggacagttgaccacggcatgtttgagaatttgaacacagccctcactccaaagct

SEQ ID NO: 773000 - DNA, 120 bp, Artificial Sequence
  ENSG00000239887_2 (sequence is synthesized)
ccaggccagccgctccttcccccacttgtccaagcccgtggcccccggctctgcccctctgggctctggtgagcctggggggccaggactctgggtgggcagcagccagcacctcaagaa

SEQ ID NO: 773001 - DNA, 120 bp, Artificial Sequence
  ENSG00000239887_3 (sequence is synthesized)
cctgggcaaagccatgggggccaaagtgaatgacttcctgaggagaaaggagccctccagcctgggcagtgtgggtgtgacagagatcaacaagactgcaggagcacagctggccagtgg

SEQ ID NO: 773002 - DNA, 120 bp, Artificial Sequence
  ENSG00000239887_4 (sequence is synthesized)
ccagaaagcgaacccctcgggccctgaagaccacccaggacatgctgatttcatcacagcctgtcctcagcagtctggagtatgggacagagccatcacctgggcaggcccaggactccg

SEQ ID NO: 773003 - DNA, 120 bp, Artificial Sequence
  ENSG00000239887_5 (sequence is synthesized)
ctcccactgcccagcctgacgtcccagcagacgcttcacagccagaggccaccatggaaagagaagagagaggcaaagttctgcccaatggagaggtttccctgtcagtacctgacctaa

SEQ ID NO: 773004 - DNA, 120 bp, Artificial Sequence
  ENSG00000239887_6 (sequence is synthesized)
tccacaaggatagccaggacgaatccaagctaaagatgactgagtgcagaagggcctcctcccccagccttatcgagaggaatggcttcaaactcagcttgagccccatcagcctggctg

SEQ ID NO: 773005 - DNA, 120 bp, Artificial Sequence
  ENSG00000239887_7 (sequence is synthesized)
agtcctgggaggatggcagcccccctcctcaggcacggacctccagcctcgacaatgagggccctcacccagacctgctgtcctttgaatagagcctctgctctttcctgctgagctctg

SEQ ID NO: 773006 - DNA, 120 bp, Artificial Sequence
  ENSG00000239887_8 (sequence is synthesized)
acactggaaagttcaagagtgtctttgctggctctttcttgaatatttccaaagccttggaagttacaggttttgggtgtgggataaggaaaaactgaatgatagagcacaggtaccgct

SEQ ID NO: 773007 - DNA, 120 bp, Artificial Sequence
  ENSG00000239887_9 (sequence is synthesized)
ctgtgccctttgtcttccttgtatgaggcaccagcagagagccagtcgtccatcatgggattttgcaggactggaagtccttgagtagttctagttaaagagtctatccgcagaatggct

SEQ ID NO: 773008 - DNA, 120 bp, Artificial Sequence
  ENSG00000239887_10 (sequence is synthesized)
gaaggacttgatgccgttttgagcctaattttctgtaacctcctctgagtgggctgcagcccttggacattagagctcttccactcttgagcttgtcctgtcttctcagtgaattgcagg

SEQ ID NO: 773009 - DNA, 120 bp, Artificial Sequence
  ENSG00000239887_11 (sequence is synthesized)
gccaccagctcaggacaatggatcttacaggaattctttttgcctgtcccctacatgcgcctcctcccctgctgttctccctcccacacccctgtcccttctctctcctccttgatgggt

SEQ ID NO: 773010 - DNA, 120 bp, Artificial Sequence
  ENSG00000239887_12 (sequence is synthesized)
ccgatgcccctggcctcagcgggaggaaggctggatgaggaatgatgtgtttggcttgatgacaggccatggcctagaaagccacacaccctgaccacagcccagccatagctcctcttg

SEQ ID NO: 773011 - DNA, 120 bp, Artificial Sequence
  ENSG00000239887_13 (sequence is synthesized)
gtcccaggacagtgcaggcccctggttgccatgtttgctctgcccctggggtggaggccagaggagatgcttaccaggcctgagaccttgagagttcacccagggtttgaacgctgccac

SEQ ID NO: 773012 - DNA, 120 bp, Artificial Sequence
  ENSG00000239887_14 (sequence is synthesized)
ccagggttcccaaggtttctcccatctggtcagatgtcgaacacaaaatgtgggcattctgcacggaaggaaagatcaggcttctcttgctgagtgtgtgaagacagggagagccaggcc

SEQ ID NO: 773013 - DNA, 120 bp, Artificial Sequence
  ENSG00000239887_15 (sequence is synthesized)
ccagcagatgcggcctagcacactctgatttggttttgtggggagggcccaggaacttgggggtggtcttggcattcagagctggtgctaaaaacccagagcagaagcagggagaaggga

SEQ ID NO: 773014 - DNA, 120 bp, Artificial Sequence
  ENSG00000239887_16 (sequence is synthesized)
gtgaggatgggacagagaagagcgaccactggggatcagaacagcttttcaggggccaccttgcagcctaaaataatgccgtttcagggcctgggcctgctgtgagagccagaatgaagc

SEQ ID NO: 773015 - DNA, 120 bp, Artificial Sequence
  ENSG00000239887_17 (sequence is synthesized)
agttttaattaagtggaagtgctttgtgcttgtgctgaagttgcctgggcctcctgcagctctggacctcactggagcggccccgccctgcccttgcctgcctttcttttatgctgatgc

SEQ ID NO: 773016 - DNA, 120 bp, Artificial Sequence
  ENSG00000239887_18 (sequence is synthesized)
tggtgggctttttcctgcttcaggatccatgtaagggactgaccaggttcatccagccttaactggttcctgcaacccacttttaggtctcccaccaggggcctattgtgctgtcttcct

SEQ ID NO: 773017 - DNA, 120 bp, Artificial Sequence
  ENSG00000239887_19 (sequence is synthesized)
gtgaccagcagatcctgtaagggggtgatcctaattctggggctctttgcagcaagaggagaacgttctttttcttgaacaaggtggccggttccctgggagaaggctgggaatggcacg

SEQ ID NO: 773018 - DNA, 120 bp, Artificial Sequence
  ENSG00000239887_20 (sequence is synthesized)
tccggccagggcaggcggtgcggcatcctcctcctgggattcctgtggcctcccctgttctattcattgtttggcttcccacccataagctctgggatacccagggcttgcttcccagct

SEQ ID NO: 773019 - DNA, 120 bp, Artificial Sequence
  ENSG00000239887_21 (sequence is synthesized)
cttctcatctccaagcctctgctccccttcccaccaccactgccatataaaatggccatgctaactcctacacaactaggagcctcagcaggattgctaggatgtgggttccttcctgca

SEQ ID NO: 773020 - DNA, 120 bp, Artificial Sequence
  ENSG00000239887_22 (sequence is synthesized)
tgcttgcttctgcagctgtgtggccttgccatggccctcccaccactttcccttctaccttgccttccattgtcttccttctcccagaaagccaggtttcaccacgtgctcaccacaaac

SEQ ID NO: 773021 - DNA, 120 bp, Artificial Sequence
  ENSG00000239887_23 (sequence is synthesized)
tgtctcccctccctcgtaggagtcactgcagtagggcacctgcaggccctggtagagtgagcagggcttacgtgtacattctttctcactctaaggatgtgatatctgaccctgatgtca

SEQ ID NO: 773022 - DNA, 120 bp, Artificial Sequence
  ENSG00000239887_24 (sequence is synthesized)
gagaggaggtctcaggactagcattcggggtcctttgagtgttcccagaatggtttggggtatcacacaaaacaccagagctgaggatagggatagagtccccaaacacacatcctggga

SEQ ID NO: 773023 - DNA, 120 bp, Artificial Sequence
  ENSG00000239887_25 (sequence is synthesized)
gcaagccacttcatctgagcttcccataccaggagcatggtttgtgctttgatgggaaacctagcaagcccctgcactctggggcttctcctctcctggagcccagggcggctctggccc

SEQ ID NO: 773024 - DNA, 120 bp, Artificial Sequence
  ENSG00000239887_26 (sequence is synthesized)
gatgatatggcagccataggtacaggtattgcaggtgcagcctttcttaagtaccctgcctccactctatagcccagctgctgctggagtccaggaccttagacccaggatgagcaaaag

SEQ ID NO: 773025 - DNA, 120 bp, Artificial Sequence
  ENSG00000239887_27 (sequence is synthesized)
gatcccaccaggttgtccaggaccattgccagggtgaccccagagttcttcagacctgtgtctgatactgaatacagtgccatgggaccctgctccaatctaactgcctacaacctgccc

SEQ ID NO: 773026 - DNA, 120 bp, Artificial Sequence
  ENSG00000239887_28 (sequence is synthesized)
gtccccctgctgcagggatgttgctgctacctcgggaggctctctgagactggtgtctggtcttagatgctgcacatagtacctggtgctagggtctaggggctgcccaaagcccagcag

SEQ ID NO: 773027 - DNA, 120 bp, Artificial Sequence
  ENSG00000239887_29 (sequence is synthesized)
gaacagctactactcatcctgcagaggccttggcccagaccagctttccatccaaagcctcacctggtttccatgtccatctcaacagtctggccttcctgtgactgtagcctggcagcc

SEQ ID NO: 773028 - DNA, 120 bp, Artificial Sequence
  ENSG00000239887_30 (sequence is synthesized)
acaccctcagtaatcccgcacagtgagtccagcttctctgggagcttggccttcagttagcccagtccatgagagggcagggtaatgaggaggagtaaaggacctatcttctctgtccac

SEQ ID NO: 773029 - DNA, 120 bp, Artificial Sequence
  ENSG00000239887_31 (sequence is synthesized)
ataaggaagttgggaccacaaggtcttttatctccttgttactccccaaccccaccataacctcctactcagcacacagctgtatcctggtagattataaggtgagcttccagaacctgg

SEQ ID NO: 773030 - DNA, 120 bp, Artificial Sequence
  ENSG00000239887_32 (sequence is synthesized)
caggaggctggtgtatccccctgcacagagggaagtgtatctgaatgttgtgtatgtggctgatatggaagacatacatgtatgcaatccatcagcgtttaaagaagaagattggctcca

SEQ ID NO: 773031 - DNA, 120 bp, Artificial Sequence
  ENSG00000239887_33 (sequence is synthesized)
gttcggaggaggaggaggaagattacagatctattctgagtattttttagagagttaatatttatatttttagtaattttctggtagaaggaaattgcacaataaaatgatttggtttgg

SEQ ID NO: 773032 - DNA, 120 bp, Artificial Sequence
  ENSG00000239900_0 (sequence is synthesized)
aggtttccgcttccgctcttccctggtccagtccaccctggcggggtcgcagggttgggatggcggctggaggcgatcatggttcgcccgacagctaccgctcacctcttgcctcccgct

SEQ ID NO: 773033 - DNA, 120 bp, Artificial Sequence
  ENSG00000239900_1 (sequence is synthesized)
atgccagcccggagatgtgcttcgtgtttagcgacaggtataaattccggacatggcggcagctgtggctgtggctggcggaggccgagcagacattgggtttgcctatcacagatgaac

SEQ ID NO: 773034 - DNA, 120 bp, Artificial Sequence
  ENSG00000239900_2 (sequence is synthesized)
aaatccaggagatgaaatcaaacctggagaacatcgacttcaagatggcagctgaggaagagaaacgtttacgacatgatgtgatggctcacgtgcacacatttggccactgctgtccaa

SEQ ID NO: 773035 - DNA, 120 bp, Artificial Sequence
  ENSG00000239900_3 (sequence is synthesized)
aagctgcaggcattattcaccttggtgctacttcttgctatgttggagacaatactgacttgattattcttagaaatgcacttgacctgcttttgccaaagcttgccagagtgatctctc

SEQ ID NO: 773036 - DNA, 120 bp, Artificial Sequence
  ENSG00000239900_4 (sequence is synthesized)
ggcttgccgactttgctaaggaacgagccagtctacccacattaggtttcacacatttccagcctgcacagctgaccacagttgggaaacgttgctgtctttggattcaggatctttgca

SEQ ID NO: 773037 - DNA, 120 bp, Artificial Sequence
  ENSG00000239900_5 (sequence is synthesized)
tggatctccagaacttgaagcgtgtccgagatgacctgcgcttccggggagtaaagggtaccactggcactcaggccagtttcctgcagctctttgagggagatgaccataaggtagagc

SEQ ID NO: 773038 - DNA, 120 bp, Artificial Sequence
  ENSG00000239900_6 (sequence is synthesized)
agcttgacaagatggtgacagaaaaggcaggatttaagagagctttcatcatcacagggcagacatatacacgaaaagtggatattgaagtactgtctgtgctggctagcttgggggcat

SEQ ID NO: 773039 - DNA, 120 bp, Artificial Sequence
  ENSG00000239900_7 (sequence is synthesized)
cagtgcacaagatttgcaccgacatacgcctcctggcaaacctcaaggagatggaggaaccctttgaaaaacagcagattggctcaagtgcgatgccatataagcggaatcccatgcgtt

SEQ ID NO: 773040 - DNA, 120 bp, Artificial Sequence
  ENSG00000239900_8 (sequence is synthesized)
cagaacgttgctgcagtcttgcccgccacctgatgacccttgtcatggacccgctacagacagcatctgtccagtggtttgaacgcacactggatgatagtgccaaccgacggatctgtt

SEQ ID NO: 773041 - DNA, 120 bp, Artificial Sequence
  ENSG00000239900_9 (sequence is synthesized)
tggccgaggcatttcttaccgcagatactatattgaatacgctgcagaacatttctgaaggattggtcgtgtaccccaaagtaattgaacggcgcattcggcaagagctgcctttcatgg

SEQ ID NO: 773042 - DNA, 120 bp, Artificial Sequence
  ENSG00000239900_10 (sequence is synthesized)
ccacagagaacatcatcatggccatggtcaaagctggaggtagccgccaggattgccatgagaaaatcagagtgctttctcagcaggcagcttctgtggttaagcaggaagggggtgaca

SEQ ID NO: 773043 - DNA, 120 bp, Artificial Sequence
  ENSG00000239900_11 (sequence is synthesized)
atgacctcatagagcgtatccaggttgatgcctacttcagtcccattcactcccagttggatcatttactggatccttcttctttcactggtcgtgcctcccagcaggtgcagagattct

SEQ ID NO: 773044 - DNA, 120 bp, Artificial Sequence
  ENSG00000239900_12 (sequence is synthesized)
tagaagaggaggtgtatcccctgttaaaaccatatgaaagcgtgatgaaggtgaaagcagaattatgtctgtagagttggaagagaattaaacgaaaatcattgttaattgctgaggcat

SEQ ID NO: 773045 - DNA, 120 bp, Artificial Sequence
  ENSG00000239900_13 (sequence is synthesized)
gaaaattgtgttactataatgccttattttacctcgagaattgttaccttaaattagtacagcactttcttcttcccatggtgctttcctgtttctcagtctcacatttctcaacaaggc

SEQ ID NO: 773046 - DNA, 120 bp, Artificial Sequence
  ENSG00000239900_14 (sequence is synthesized)
aaaaacaaagagcgttgaagttgactctgctcttgcatagtaaatgtagttcatacttgatctctgttctttcaaggcatattttccagctgcctcaagtttagtccttttcacgtgttc

SEQ ID NO: 773047 - DNA, 120 bp, Artificial Sequence
  ENSG00000239900_15 (sequence is synthesized)
atttgcttgtaaagtagcaagaaatttctggtcctgtcttctaaaagtgaatttgatctaggtctagcaaaataacctggactcagtgattgagtcaatggtcagataccttttatttcg

SEQ ID NO: 773048 - DNA, 120 bp, Artificial Sequence
  ENSG00000239900_16 (sequence is synthesized)
gttatttttggctagtataagtgatgaagtttggaactacagtaaatacttaaaaaaaaaaaaaaaaagaaccaaaccctgatgtgaccatcaggctgattgagctgaagttgtgcccaa

SEQ ID NO: 773049 - DNA, 120 bp, Artificial Sequence
  ENSG00000239900_17 (sequence is synthesized)
gctcatttcatcttttgataaggcttatacagcagggaaatgctaattgagtatattgatttcatcagggccgctgacagtctttattccttgttgcatggattttgttgttgaggcttg

SEQ ID NO: 773050 - DNA, 86 bp, Artificial Sequence
  ENSG00000239900_18 (sequence is synthesized)
tctgggattatagacatgagccaccacacccagcctaatcttgttttctttttttacttgtttacagtgtaagcaagtgccattgg

SEQ ID NO: 773051 - DNA, 120 bp, Artificial Sequence
  ENSG00000239900_19 (sequence is synthesized)
tctttttttacttgtttacagtgtaagcaagtgccattggacaagaacgttgtctgtgtcattccttgttgtatttccaatagcaagagcacatcagatacttggcaactaggcagtctt

SEQ ID NO: 773052 - DNA, 120 bp, Artificial Sequence
  ENSG00000239900_20 (sequence is synthesized)
ccagcttctgccactgcgcccgacttccttgttgcatggatttatagctgattgaagcaactgtagccaaagattgagttaattacctacctgccaggagagcactagtgttatttagcc

SEQ ID NO: 773053 - DNA, 120 bp, Artificial Sequence
  ENSG00000239900_21 (sequence is synthesized)
cattctcatcctacatatttttcggcatagatgaaaatgaaagcttttgtttatcagatttgcagatgacacaaaactgggagaattaacaagtatgtttatttggtaaaataagttttc

SEQ ID NO: 773054 - DNA, 120 bp, Artificial Sequence
  ENSG00000239900_22 (sequence is synthesized)
atctctaacctaaatcggctgaaatgatgtgtcctaaactagaggaaaaagttaataaagatcaatgtaaataagttaatcttaaactcagtatgcaccagaactgagagaagactgttt

SEQ ID NO: 773055 - DNA, 120 bp, Artificial Sequence
  ENSG00000239900_23 (sequence is synthesized)
taggaggtgttaatggttgtccagtgcccaaaaagccaccagaggcttactgctccgcactcttggcattacattcaattttggatacccagtctgaggaatagagatgaactggagagc

SEQ ID NO: 773056 - DNA, 120 bp, Artificial Sequence
  ENSG00000239900_24 (sequence is synthesized)
caacctccaaaaagatcttgtggtggaggaatgttagggctctttatcctatacagaagaaaactcctcggcacttcaaatattgccaggtgcaggaagagtgacttgattgtgtgttgc

SEQ ID NO: 773057 - DNA, 120 bp, Artificial Sequence
  ENSG00000239900_25 (sequence is synthesized)
cccaagagacacactgagctcaatacccattactgagactggcttggggccagacattggaaccactgagattagcaacctacactcaatcccccaggtcaggcagaagctggaagactg

SEQ ID NO: 773058 - DNA, 120 bp, Artificial Sequence
  ENSG00000239900_26 (sequence is synthesized)
cctcgttaggaatgttgtgagggagaggaggctgaatcggttccagttttatttaaaagtagccaggaaatcaggttgcgatgatgcgcatttacagtcccagctacttgggaagctgag

SEQ ID NO: 773059 - DNA, 120 bp, Artificial Sequence
  ENSG00000239900_27 (sequence is synthesized)
gcgatagggtcacttgagcccaagagtttagtccaggctgggtgacagcgagcccttgtcacttaaagccaacctaagagaagagcttatccttttggaaaaacaatagaagacaattct

SEQ ID NO: 773060 - DNA, 120 bp, Artificial Sequence
  ENSG00000239900_28 (sequence is synthesized)
gaaaaccaaattctgaacataggctagtatagcaagcaagcagggatagcatagagccatttgctcaacttccagaaagagttactctgttcatctctaaaaaatcttgaaaagggccgg

SEQ ID NO: 773061 - DNA, 120 bp, Artificial Sequence
  ENSG00000239900_29 (sequence is synthesized)
tactccagcctgggcaacggagcgagactccatctgaaaaaacaaaacagaaaaaatcttgaaaggatactaagtctgacacaaggaaattaagtcatgggactctgaccagatattctg

SEQ ID NO: 773062 - DNA, 120 bp, Artificial Sequence
  ENSG00000239900_30 (sequence is synthesized)
tctacttccttctctgctatgggcaacttggaggcagcaactactatcagtttatctgtaatgtgagaatttatattacataacagatactggggatataggataccatggattttagtt

SEQ ID NO: 773063 - DNA, 120 bp, Artificial Sequence
  ENSG00000239900_31 (sequence is synthesized)
aatacatttcctcatagaaaataaggaaataacagtcttgttcctgtcctaacaattctgttagactaatgatctccagtgattggcgatttgacctggtttcttcctggactatttgaa

SEQ ID NO: 773064 - DNA, 120 bp, Artificial Sequence
  ENSG00000239900_32 (sequence is synthesized)
tgggtggatttgttggtgcatctcttgtcttctttccttttccattctcctttatttttgtatttacatacttgtatgcaactttgtaatctgattttcccatgtaacattttaatttga

SEQ ID NO: 773065 - DNA, 120 bp, Artificial Sequence
  ENSG00000239900_33 (sequence is synthesized)
atatgaaagcgtgatgaagacttgtccttaagaagcagactctacattcttctcttccatttactccttcattcattgcagtctgacttctaccctcaactctgttgaaactactctcat

SEQ ID NO: 773066 - DNA, 120 bp, Artificial Sequence
  ENSG00000239900_34 (sequence is synthesized)
gaattcctctcaacgatttattgaatatctactgtgtatatcatcttctagacttataaagacggctaagacatggatcttgccctcaggtttccttctgatacctccgtctactcactg

SEQ ID NO: 773067 - DNA, 120 bp, Artificial Sequence
  ENSG00000239900_35 (sequence is synthesized)
ccacagagtataatagcatatatactctataatactgtatatagtgtagtataattaccattctttagggtaatgttatgtaggtatgttcatatctgcaaatgaaacatttccggtaat

SEQ ID NO: 773068 - DNA, 120 bp, Artificial Sequence
  ENSG00000239900_36 (sequence is synthesized)
tatatagatggtaatggcaaataaatgatgtaaagatgagatagtttgttgacctgtgtagtttaattatatgaaaaatagcaactgtgtaaactatatttatgatctcctcttaggtgc

SEQ ID NO: 773069 - DNA, 65 bp, Artificial Sequence
  ENSG00000239900_37 (sequence is synthesized)
gatccgcccggcataggcttttaaacgaagagagtgcaaccaaaggcatgttgctgggatatgtg

SEQ ID NO: 773070 - DNA, 120 bp, Artificial Sequence
  ENSG00000239900_38 (sequence is synthesized)
cgaagagagtgcaaccaaaggcatgttgctgggatatgtgggtcaggattatgattttgttctgtttttctgccgtggtcttaaaatagttcatgacattttaggtagtcaactcagttt

SEQ ID NO: 773071 - DNA, 120 bp, Artificial Sequence
  ENSG00000239900_39 (sequence is synthesized)
tcaaattttggttactgtgaactcttccaggcactttagggtacaaagatggaaggatatggctgctgcctttcatgagttagcggtctaattttatacaaaattatctgaaagttttgt

SEQ ID NO: 773072 - DNA, 120 bp, Artificial Sequence
  ENSG00000239900_40 (sequence is synthesized)
gtgtaccccaaagtaagaagcctcaattcaaaagtaattgaacggcgcattcggcaagagctgcctttcatggccacagagaacatcatcatggccatggtcaaagctggaggtagccgc

SEQ ID NO: 773073 - DNA, 120 bp, Artificial Sequence
  ENSG00000239900_41 (sequence is synthesized)
aatcacttgtaggaaaagtccactcctagtgaaggaatgaggtctgacattctgtaggaaatgagcaggaaacgagcaaatgattcatgaggctttacagaagagggccagagcaaggtg

SEQ ID NO: 773074 - DNA, 120 bp, Artificial Sequence
  ENSG00000239900_42 (sequence is synthesized)
ggcatccatttcaggcttgtcctaagatgtgggcagagagttgagaagaccctggtacagatagacacaggaaccacctcagcctagaggggttttgtgtagagctgtgtagactgcatg

SEQ ID NO: 773075 - DNA, 120 bp, Artificial Sequence
  ENSG00000239900_43 (sequence is synthesized)
ttgtcaattttatttgatgttgtccagttgaggaagtgacactatagatcttttttttttttttgaggcagagtctccctctgtctcccagactggagtgcagtggcacggctcactgca

SEQ ID NO: 773076 - DNA, 120 bp, Artificial Sequence
  ENSG00000239900_44 (sequence is synthesized)
agccactgcccctggcctccaaatgctttctttagtcttaaatgaaacataattaaaggcatctttgtgtaactggcgagtcagatagtgggagaagaacagtcttcttacttggaaaat

SEQ ID NO: 773077 - DNA, 120 bp, Artificial Sequence
  ENSG00000239900_45 (sequence is synthesized)
tacttcttgctatgttggagacaatactagtctcattctgtcaaggggcgtgatcaaggcttattgcaacctccgcctcccaggctcagacagctctcctgtctcagtctcccaacttgc

SEQ ID NO: 773078 - DNA, 120 bp, Artificial Sequence
  ENSG00000239900_46 (sequence is synthesized)
ctttcactggtcgtgcctcccagcaggtgcagagattcttagaagaggaggtgtatcccctgttaaaaccatatgaaagcgtgatgaaggtggtaacacggttcaaaatgaaaaaggtac

SEQ ID NO: 773079 - DNA, 120 bp, Artificial Sequence
  ENSG00000239900_47 (sequence is synthesized)
tttaacaagtattttcacattcttctcactctcctttttttacttagcccctgtcagtgacagctgcacaccattttattctatagatatactgtaattaaacagtcctgtatcagtggg

SEQ ID NO: 773080 - DNA, 120 bp, Artificial Sequence
  ENSG00000239900_48 (sequence is synthesized)
ccaaagatgtgagccaccatacctggcctgactttttacttataaatattttccaatactttttaattaatcaatttaaatttaaatagccatatctggctagtagctcctttcttggat

SEQ ID NO: 773081 - DNA, 120 bp, Artificial Sequence
  ENSG00000239900_49 (sequence is synthesized)
aaaaaagatctaagatgcaagatccttcccggagtcactgtttgcaagtttcaagtgaggtttaaatcagtttcaccactgtttgtattcagcccttggatctaagttccgagctgcctg

SEQ ID NO: 773082 - DNA, 120 bp, Artificial Sequence
  ENSG00000239900_50 (sequence is synthesized)
agaaactcaatggtggagcctaagagacaaggctgcctttgaggatgataggagagattgactgtgggatgggtggggtctttcgactagaaggaagttgtgggggttagggagcgagac

SEQ ID NO: 773083 - DNA, 120 bp, Artificial Sequence
  ENSG00000239900_51 (sequence is synthesized)
ctgggtaggatgacaggttgaggcattctcacactggacacatggattattataaggatgtgtcttttctttccaaggtagagcagcttgacaagatggtgacagaaaaggcaggattta

SEQ ID NO: 773084 - DNA, 120 bp, Artificial Sequence
  ENSG00000239920_0 (sequence is synthesized)
actcaaatacagtatgacaaaaccaacgtcttggcagattttgagcaactgagagacatcctggactgggaggagagcaatgagctgcaaaacctggagaaggaggaggaagacattctg

SEQ ID NO: 773085 - DNA, 120 bp, Artificial Sequence
  ENSG00000239920_1 (sequence is synthesized)
aaaagccttacgaactctgaaactgagatggtgcagcagacccagtccctgagagagctcatctcagatctggagcatcggctgcaggggtcagtgatggagctgcttcagaagactaga

SEQ ID NO: 773086 - DNA, 120 bp, Artificial Sequence
  ENSG00000239920_2 (sequence is synthesized)
tgagatgaagagagcagttgtcacatctgggtaaaagtctcatcatcagggcaaagaacaggtgggaatgtatccagagaatcaacatacaatgagcaaaagtgaagcttttcctagact

SEQ ID NO: 773087 - DNA, 120 bp, Artificial Sequence
  ENSG00000239920_3 (sequence is synthesized)
acaatgagcaaaagtgaagcttttcctagacttgaccctcatcaaatctcctctgtccccactctcttctgaagaaggaaaggctggagtacaatggcgagatcttggctcactgcaacc

SEQ ID NO: 773088 - DNA, 78 bp, Artificial Sequence
  ENSG00000239920_4 (sequence is synthesized)
gcatccgccaccacacccggctaatttttgcatttttttagtagagacacatggtgatcttcctgccttgtcctccct

SEQ ID NO: 773089 - DNA, 120 bp, Artificial Sequence
  ENSG00000239920_5 (sequence is synthesized)
ctggtgatcttcctgccttgtcctccctaagtgctgggattacaagcgtgaaccaccgcgcctggtctgatgaatacatgtaaagcttattgagcctcagaactctaactacagggtttc

SEQ ID NO: 773090 - DNA, 120 bp, Artificial Sequence
  ENSG00000239920_6 (sequence is synthesized)
tcagaactctaactacagggtttcaatagcacagaaactctgagaagaaaaagaatgtcaaagttcctccctaaggagactgattagatgcaagtgtgtccggaattggtgggttcttgg

SEQ ID NO: 773091 - DNA, 120 bp, Artificial Sequence
  ENSG00000239920_7 (sequence is synthesized)
tccttctggtgggttcgtggtctcgctagctcaggagtgaagctgcataccttcgcgtcctaggacagaatatggatgctgaaaaatgattctttcaaagtgctgagttgttgcctcacg

SEQ ID NO: 773092 - DNA, 120 bp, Artificial Sequence
  ENSG00000239920_8 (sequence is synthesized)
cacgcccagttgtctggcatctcttcactgaaactattacagttagatctcatctctatgggtggaaggcctcactggagctacagacaagaaggtgaaaaacggctgacaaaagaagtc

SEQ ID NO: 773093 - DNA, 120 bp, Artificial Sequence
  ENSG00000239920_9 (sequence is synthesized)
ctggtatcttctatggtgggagaagaaaactagctaaagggaagaataaattagagaaaaattggaatgactgaatcggaacaaggcaaaggctataaaaaaaattaagcagcagtatcc

SEQ ID NO: 773094 - DNA, 120 bp, Artificial Sequence
  ENSG00000239920_10 (sequence is synthesized)
tcttgggggccccttccccacactatctcaatgcaaatatctgtctgaaacggtccctggctaaactccacccatgggttggccagccttgccttgaccaatagccttgacaaggcaaac

SEQ ID NO: 773095 - DNA, 120 bp, Artificial Sequence
  ENSG00000239920_11 (sequence is synthesized)
ttgaccaatagtcttagagtatccagtgaggccaggggccggcggctggctagggatgaagaataaaaggaagcacccttcagcagttccacacactcgcttctggaacgtctgaggtta

SEQ ID NO: 773096 - DNA, 120 bp, Artificial Sequence
  ENSG00000239920_12 (sequence is synthesized)
tcaataagctcctagtccagacgccatgggtcatttcacagaggaggacaaggctactatcacaagcctgtggggcaaggtgaatgtggaagatgctggaggagaaaccctgggaaggct

SEQ ID NO: 773097 - DNA, 120 bp, Artificial Sequence
  ENSG00000239920_13 (sequence is synthesized)
cctggttgtctacccatggacccagaggttctttgacagctttggcaacctgtcctctgcctctgccatcatgggcaaccccaaagtcaaggcacatggcaagaaggtgctgacttcctt

SEQ ID NO: 773098 - DNA, 120 bp, Artificial Sequence
  ENSG00000239920_14 (sequence is synthesized)
gaagagaaaaggggaaggagcgtctaggtgaaatgagctgtgtagtcctttagagcctctggacagaaggtctgatgaatacatgtaaagcttattgagcctcagaactctaactacagg

SEQ ID NO: 773099 - DNA, 120 bp, Artificial Sequence
  ENSG00000239920_15 (sequence is synthesized)
caaagtgctgagttgttgcctcacgcccagttgtctggcatctcttcactgaaactattacagttagatctcatctctatgggtggaagatagatgaggagccaacaaaaaagagcctca

SEQ ID NO: 773100 - DNA, 120 bp, Artificial Sequence
  ENSG00000239920_16 (sequence is synthesized)
ggatccagcacacattatcacaaacttagtgtccatccatcactgctgaccctctccggacctgactccacccctgagggacacaggtcagccttgaccaatgacttttaagtaccatgg

SEQ ID NO: 773101 - DNA, 120 bp, Artificial Sequence
  ENSG00000239920_17 (sequence is synthesized)
agaacagggggccagaacttcggcagtaaagaataaaaggccagacagagaggcagcagcacatatctgcttccgacacagctgcaatcactagcaagctctcaggcctggcatcatggt

SEQ ID NO: 773102 - DNA, 120 bp, Artificial Sequence
  ENSG00000239920_18 (sequence is synthesized)
gcattttactgctgaggagaaggctgccgtcactagcctgtggagcaagatgaatgtggaagaggctggaggtgaagccttgggcagagattttttgacagctttggaaacctgtcgtct

SEQ ID NO: 773103 - DNA, 120 bp, Artificial Sequence
  ENSG00000239920_19 (sequence is synthesized)
ccctctgccatcctgggcaaccccaaggtcaaggcccatggcaagaaggtgctgacttcctttggagatgctattaaaaacatggacaacctcaagcccgcctttgctaagctgagtgag

SEQ ID NO: 773104 - DNA, 120 bp, Artificial Sequence
  ENSG00000239920_20 (sequence is synthesized)
ctgcactgtgacaagctgcatgtggatcctgagaacttcaagctcctgggtaacgtgatggtgattattctggctactcactttggcaaggagttcacccctgaagtgcaggctgcctgg

SEQ ID NO: 773105 - DNA, 120 bp, Artificial Sequence
  ENSG00000239920_21 (sequence is synthesized)
cagaagctggtgtctgctgtcgccattgccctggcccataagtaccactgagttctcttccagtttgcaggtgttcctgtgaccctgacaccctccttctgcacatggggactgggcttg

SEQ ID NO: 773106 - DNA, 120 bp, Artificial Sequence
  ENSG00000239920_22 (sequence is synthesized)
gccttgagagaaagccttctgtttaataaagtcatcaggaaagtgggggaaagcaagcagtcacgtgacttgcccagctcccatgcaactcaaaaggtggttctgcaaaaaaaattcctg

SEQ ID NO: 773107 - DNA, 120 bp, Artificial Sequence
  ENSG00000239920_23 (sequence is synthesized)
atgggagacttcacatgctgctctgtgcatccgagtgggagctgcaatgtacttctgctgcctcccatctgccatcaccctctaatttgtcggcctcactggagctacagacaagaaggt

SEQ ID NO: 773108 - DNA, 120 bp, Artificial Sequence
  ENSG00000239920_24 (sequence is synthesized)
ggtgtggatggcgtcataaaaaggacggagaacgtgaccttgaagaagccagaaacttttccaaaaaatcaaaggagagtgtttcgagctcctgatctgaaaggaatgctagaagtgttt

SEQ ID NO: 773109 - DNA, 60 bp, Artificial Sequence
  ENSG00000239920_25 (sequence is synthesized)
ccttctggtgggttcgtggtctcgctagctcaggagtgaagctgcaacaaaatttattgc

SEQ ID NO: 773110 - DNA, 88 bp, Artificial Sequence
  ENSG00000239920_26 (sequence is synthesized)
caagtccccaccagacttacacaggggctgcaggtggagttgcctgccagtcctgcgccatgcacccgcactcctcagcccttgggtg

SEQ ID NO: 773111 - DNA, 120 bp, Artificial Sequence
  ENSG00000239920_27 (sequence is synthesized)
actgggcgccctggagcagggggtggcactcgttggggaggctccagccgcacaggagcccatggaggcgggggaaggctcacgcatggcgggctgcaggtcccgaggcctgccccgcag

SEQ ID NO: 773112 - DNA, 73 bp, Artificial Sequence
  ENSG00000239920_28 (sequence is synthesized)
cacgcatggcgggctgcaggtcccgaggcctgccccgcaggaaggcagctaaggcccggcaagaaatcgagcg

SEQ ID NO: 773113 - DNA, 80 bp, Artificial Sequence
  ENSG00000239920_29 (sequence is synthesized)
gcccgggtgctaagcccctcgttgcccgggccggcagggcaggccgcctgctcccagtgcggggcccgccaagcccacgc

SEQ ID NO: 773114 - DNA, 120 bp, Artificial Sequence
  ENSG00000239920_30 (sequence is synthesized)
ggactgccagcacgctgtcacctctcacaagtagaccattcctatagtccactaatttgtcttttttgttttagcctgatttctgttaaaagatgttttctttttttaaaaaaaatgaga

SEQ ID NO: 773115 - DNA, 120 bp, Artificial Sequence
  ENSG00000239920_31 (sequence is synthesized)
atgttttctttttttaaaaaaaatgagagtttatggacatataaaatgaacacatgccgaagatttatttagttaattaaggagagaatcagcaagatggtgtaaccaacccaaaggaga

SEQ ID NO: 773116 - DNA, 120 bp, Artificial Sequence
  ENSG00000239920_32 (sequence is synthesized)
atttaaaaacacacataaatacaagtgatcagaaaaacttgcaatgaatttacaaagagatgaaaacaagtcaacatccacaacagaatcatcaaatacatgtctatttgagacaattaa

SEQ ID NO: 773117 - DNA, 120 bp, Artificial Sequence
  ENSG00000239920_33 (sequence is synthesized)
tttgcatttctatgggcaaaatcacttgcatgattttcagctcaatataatttccataataaattatattaacctcaaagacgatacaaagctaagaaaactcagaagaggacactagat

SEQ ID NO: 773118 - DNA, 120 bp, Artificial Sequence
  ENSG00000239920_34 (sequence is synthesized)
gagtaagcatttttttattttaaaatctttcataatttttcctctaagattccatctacagtgactatttgaccagtttagaatacaaataaatatgctccactgtatttattataacct

SEQ ID NO: 773119 - DNA, 120 bp, Artificial Sequence
  ENSG00000239920_35 (sequence is synthesized)
ctcagcttggatttttgaggaaaagaaaaacttcaattgtctgagataggtatgataaaaatgtgtggcagggggccctggctcacgtctgtaaatccagcactttgggaggccgaggcg

SEQ ID NO: 773120 - DNA, 88 bp, Artificial Sequence
  ENSG00000239920_36 (sequence is synthesized)
ccagaggtctgcctaggcattgctggtcatcaggaaagtgggggaaagcaagcagtcacgtgacttgcccagctcccatgcaactcaa

SEQ ID NO: 773121 - DNA, 120 bp, Artificial Sequence
  ENSG00000239951_0 (sequence is synthesized)
cctgggtcagagctctggagaagagctgctcagttaggacccagagggaaccatggaaaccccagcgcagcttctcttcctcctgctactctggctcccagataccaccggagaaattgt

SEQ ID NO: 773122 - DNA, 120 bp, Artificial Sequence
  ENSG00000239951_1 (sequence is synthesized)
gaaagagccaccctctcctgcagggccagtcagagtgttagcagcagctacttagcctggtaccagcagaaacctggccaggctcccaggctcctcatctatggtgcatccagcagggcc

SEQ ID NO: 773123 - DNA, 120 bp, Artificial Sequence; identical to SEQ ID NO: 752548
  ENSG00000239951_2 (sequence is synthesized)

SEQ ID NO: 773124 - DNA, 120 bp, Artificial Sequence
  ENSG00000239961_0 (sequence is synthesized)
gtctgtctgtgtctacgggcaccgtggccacacctgcctgcacagccagggccaggaggaggagatgccatgaccctcattctcacaagcctgctcttctttgggctgagcctgggcccc

SEQ ID NO: 773125 - DNA, 120 bp, Artificial Sequence
  ENSG00000239961_1 (sequence is synthesized)
aggacccgggtgcaggcagaaaacctactcaaacccatcctgtgggccgagccaggtcccgtgatcacctggcataaccccgtgaccatctggtgtcagggcaccctggaggcccagggg

SEQ ID NO: 773126 - DNA, 120 bp, Artificial Sequence
  ENSG00000239961_2 (sequence is synthesized)
taccgtctggataaagagggaaactcaatgtcgaggcacatattaaaaacactggagtctgaaaacaaggtcaaactctccatcccatccatgatgtgggaacatgcagggcgatatcac

SEQ ID NO: 773127 - DNA, 120 bp, Artificial Sequence
  ENSG00000239961_3 (sequence is synthesized)
tgttactatcagagccctgcaggctggtcagagcccagcgaccccctggagctggtggtgacagcctacagcagacccaccctgtccgcactgccaagccctgtggtgacctcaggagtg

SEQ ID NO: 773128 - DNA, 120 bp, Artificial Sequence
  ENSG00000239961_4 (sequence is synthesized)
aacgtgaccctccggtgtgcctcacggctgggactgggcaggttcactctgattgaggaaggagaccacaggctctcctggaccctgaactcacaccaacacaaccatggaaagttccag

SEQ ID NO: 773129 - DNA, 120 bp, Artificial Sequence
  ENSG00000239961_5 (sequence is synthesized)
gccctgttccccatgggccccctgaccttcagcaacaggggtacattcagatgctacggctatgaaaacaacaccccatacgtgtggtcggaacccagtgaccccctgcagctactggtg

SEQ ID NO: 773130 - DNA, 120 bp, Artificial Sequence
  ENSG00000239961_6 (sequence is synthesized)
tcaggcgtgtctaggaagccctccctcctgaccctgcagggccctgtcgtgacccccggagagaatctgaccctccagtgtggctctgatgtcggctacatcagatacactctgtacaag

SEQ ID NO: 773131 - DNA, 120 bp, Artificial Sequence
  ENSG00000239961_7 (sequence is synthesized)
gagggggccgatggcctcccccagcgccctggccggcagccccaggctgggctctcccaggccaacttcaccctgagccctgtgagccgctcctacgggggccagtacagatgctacggc

SEQ ID NO: 773132 - DNA, 120 bp, Artificial Sequence
  ENSG00000239961_8 (sequence is synthesized)
gaccccctggatatcctgatcgcaggacagatctctgacagaccctccctctcagtgcagccgggccccacggtgacctcaggagagaaggtgaccctgctgtgtcagtcatgggacccg

SEQ ID NO: 773133 - DNA, 120 bp, Artificial Sequence
  ENSG00000239961_9 (sequence is synthesized)
atgttcactttccttctgaccaaggagggggcagcccatcccccgttgcgtctgagatcaatgtacggagctcataagtaccaggctgaattccccatgagtcctgtgacctcagcccac

SEQ ID NO: 773134 - DNA, 120 bp, Artificial Sequence
  ENSG00000239961_10 (sequence is synthesized)
gcggggacctacaggtgctacggctcacgcagctccaacccctacctgctgtctcaccccagtgagcccctggagctcgtggtctcaggagcaactgagaccctcaatccagcacaaaag

SEQ ID NO: 773135 - DNA, 120 bp, Artificial Sequence
  ENSG00000239961_11 (sequence is synthesized)
aagtcagattccaagactgccccacacctccaggattacacagtggagaatctcatccgcatgggtgtggctggcttggtcctgctgttcctcgggattctgttatttgaggctcagcac

SEQ ID NO: 773136 - DNA, 120 bp, Artificial Sequence
  ENSG00000239961_12 (sequence is synthesized)
agccagagaagccccccaaggtgcagccaggaggcaaacagcagaaaggacaatgcacccttcagagtggtggagccttgggaacagatctgatgatctgaggaggttctggaagactgg

SEQ ID NO: 773137 - DNA, 120 bp, Artificial Sequence
  ENSG00000239961_13 (sequence is synthesized)
ggcagcagttggggaagtgtctgctgagaatatcaaggggaagaagcatgggtcaggtgcaggaagatgtctgggtgtctgtagaagatgcttcctccattaaactgtggtgctttcctc

SEQ ID NO: 773138 - DNA, 120 bp, Artificial Sequence
  ENSG00000239961_14 (sequence is synthesized)
ctcattgtcgactctccttgactgccccttccttcgtttttcttccctatgatgtaaggcttcacccctatggtgggtttgggtccgcccctctgtgacctcatgctctgctccactttc

SEQ ID NO: 773139 - DNA, 120 bp, Artificial Sequence
  ENSG00000239961_15 (sequence is synthesized)
aggtaatacacctttctttatttctaactactgcattttctaatgtgtattactgggactatctcttcagctcataacatggaatttgcttttgataattaaatccatgggcaaaaatca

SEQ ID NO: 773140 - DNA, 120 bp, Artificial Sequence
  ENSG00000239961_16 (sequence is synthesized)
ggaggagatgccatgaccctcattctcacaagcctgctcttctttggtgagatcttaagagggggaggagagaccctagtctaggagagagaccccaatccatagccatgccttagtcaa

SEQ ID NO: 773141 - DNA, 120 bp, Artificial Sequence
  ENSG00000239975_0 (sequence is synthesized)
acagattttactttcaccatcagcagcctgcagcctgaagatattgcaacatattactgtcaacagtatgataatctccctcccacagttggcaaaggacatgaacagacacttaaaaga

SEQ ID NO: 773142 - DNA, 120 bp, Artificial Sequence
  ENSG00000239975_1 (sequence is synthesized)
atgttcgcagagcacagccccctgccctgaagacttattaataggctggtcgcaccctgtgcaggagtcagtcccaaccaggacacagcatggacatgagggtccctgctcagctcctgg

SEQ ID NO: 773143 - DNA, 88 bp, Artificial Sequence
  ENSG00000239975_2 (sequence is synthesized)
ttagcaactgcccctaagctcctgatctacgatgcatccaatttggaaacaggggtcccatcaaggttcagtggaagtggatctggga

SEQ ID NO: 773144 - DNA, 120 bp, Artificial Sequence
  ENSG00000239998_0 (sequence is synthesized)
ccgagtgtccacaccctgtgcgtctctctgtcctgccagcactgagggctcatccatccgcagagcagggcagtgggaggagacgccatgacccccatcctcacggtcctgatctgtctc

SEQ ID NO: 773145 - DNA, 120 bp, Artificial Sequence
  ENSG00000239998_1 (sequence is synthesized)
gggctgagtctgggccccaggacccacgtgcaggcagggcacctccccaagcccaccctctgggctgagccaggctctgtgatcatccagggaagtcctgtgaccctcaggtgtcagggg

SEQ ID NO: 773146 - DNA, 120 bp, Artificial Sequence
  ENSG00000239998_2 (sequence is synthesized)
agccttcaggctgaggagtaccatctatatagggaaaacaaatcagcatcctgggttagacggatacaagagcctgggaagaatggccagttccccatcccatccatcacctgggaacac

SEQ ID NO: 773147 - DNA, 120 bp, Artificial Sequence
  ENSG00000239998_3 (sequence is synthesized)
gcagggcggtatcactgtcagtactacagccacaatcactcatcagagtacagtgaccccctggagctggtggtgacaggagcctacagcaaacccaccctctcagctctgcccagccct

SEQ ID NO: 773148 - DNA, 120 bp, Artificial Sequence
  ENSG00000239998_4 (sequence is synthesized)
gtggtgacctcaggagggaacgtgaccctccagtgtgtctcacaggtggcatttgacggcttcattctgtgtaaggaaggagaagatgaacacccacaacgcctgaactcccattcccat

SEQ ID NO: 773149 - DNA, 120 bp, Artificial Sequence
  ENSG00000239998_5 (sequence is synthesized)
gcccgtgggtggtcctgggccatcttctccgtgggccccgtgagcccgagtcgcaggtggtcgtacaggtgctatgcttatgactcgaactctccctatgtgtggtctctacccagtgat

SEQ ID NO: 773150 - DNA, 120 bp, Artificial Sequence
  ENSG00000239998_6 (sequence is synthesized)
ctcctggagctcctggtcccaggtgtttctaagaagccatcactctcagtgcagccaggtcctatggtggcccctggggagagcctgaccctccagtgtgtctctgatgtcggctacgac

SEQ ID NO: 773151 - DNA, 120 bp, Artificial Sequence
  ENSG00000239998_7 (sequence is synthesized)
agatttgttctgtataaggagggagaacgtgacttcctccagcgccctggttggcagccccaggctgggctctcccaggccaacttcaccctgggccctgtgagcccctcccacgggggc

SEQ ID NO: 773152 - DNA, 120 bp, Artificial Sequence
  ENSG00000239998_8 (sequence is synthesized)
cagtacagatgctacagtgcacacaacctctcctccgagtggtcggcccccagtgaccccctggacatcctgatcacaggacagttctatgacagaccctctctctcggtgcagccggtc

SEQ ID NO: 773153 - DNA, 120 bp, Artificial Sequence
  ENSG00000239998_9 (sequence is synthesized)
cccacagtagccccaggaaagaacgtgaccctgctgtgtcagtcacgggggcagttccacactttccttctgaccaaggagggggcaggccatcccccactgcatctgagatcagagcac

SEQ ID NO: 773154 - DNA, 120 bp, Artificial Sequence
  ENSG00000239998_10 (sequence is synthesized)
caagctcagcagaaccaggctgaattccgcatgggtcctgtgacctcagcccacgtggggacctacagatgctacagctcactcagctccaacccctacctgctgtctctccccagtgac

SEQ ID NO: 773155 - DNA, 120 bp, Artificial Sequence
  ENSG00000239998_11 (sequence is synthesized)
cccctggagctcgtggtctcagcatccctaggccaacacccccaggattacacagtggagaatctcatccgcatgggtgtggctggcttggtcctggtggtcctcgggattctgctattt

SEQ ID NO: 773156 - DNA, 120 bp, Artificial Sequence
  ENSG00000239998_12 (sequence is synthesized)
gaggctcagcacagccagagaagcctacaagatgcagccgggaggtgaacagcagagaggacaatgcatccttcagcgtggtggagcctcagggacagatctgatgatcccaggaggctc

SEQ ID NO: 773157 - DNA, 120 bp, Artificial Sequence
  ENSG00000239998_13 (sequence is synthesized)
tggaggacaatctaggacctacattatctggactgtatgctggtcatttctagagacagcaatcaatatttgagtgtaaggaaactgtctggggtgattcctagaagatcattaaactgt

SEQ ID NO: 773158 - DNA, 120 bp, Artificial Sequence
  ENSG00000239998_14 (sequence is synthesized)
ggtacatttttttgtctatgaatgttgacttcccttgactggatcccctttttttcccatccccagacatgaggctccatcccacatggcaccgttgggtccacacctccacacacctgt

SEQ ID NO: 773159 - DNA, 120 bp, Artificial Sequence
  ENSG00000239998_15 (sequence is synthesized)
gtgctctggtccacggcatgtgacacagtcttccttattcctcattgtcacactccttgatgtcacttactgagtccccgtctcttcagttcagagatccaaacctgaaccaccaactaa

SEQ ID NO: 773160 - DNA, 120 bp, Artificial Sequence
  ENSG00000239998_16 (sequence is synthesized)
atcaacgacaggagatcagattccaaccaggaaaacataaatccaccctgctgccctgacaccctctctgtaccttatgagcccttccctctttctcagatgctatctgtgtaatttctc

SEQ ID NO: 773161 - DNA, 120 bp, Artificial Sequence
  ENSG00000239998_17 (sequence is synthesized)
ctgaaatatcaccacttggaatcatcacactggcatttcaagtgacaccacagctatgctgattcagaaaaagacatctctaaaatactgtaattagtggtatctaccaatttctgtgac

SEQ ID NO: 773162 - DNA, 120 bp, Artificial Sequence
  ENSG00000239998_18 (sequence is synthesized)
tggcacatcccactgagagctcacccatatacctacagtcctttctatttcagaggcaatgatcacttctacttcagtgttatggcacaggtcaaatgaaattctgacactgttatccta

SEQ ID NO: 773163 - DNA, 120 bp, Artificial Sequence
  ENSG00000239998_19 (sequence is synthesized)
attctgacactgttatcctagcatatccacaaaagacaaacctattaatatctgatgtgggagataacacggctcacctaaaaatcaaagtacatgccgggcgcggtggctcacgcctgt

SEQ ID NO: 773164 - DNA, 62 bp, Artificial Sequence
  ENSG00000239998_20 (sequence is synthesized)
tgaacctgggaggcggagcttgcaatgggccgagattgcgccaagtacaacataagaaaaat

SEQ ID NO: 773165 - DNA, 86 bp, Artificial Sequence
  ENSG00000239998_21 (sequence is synthesized)
ccaagtacaacataagaaaaatgttaacagaactatgcagtttcgatgaaagaattttttttgagatggagttttgctttgttgcc

SEQ ID NO: 773166 - DNA, 83 bp, Artificial Sequence
  ENSG00000239998_22 (sequence is synthesized)
caattctcctgcctctgcctcccgagttactggactacaggtgtgcaccaccattctcgccatgttagtgaggctggtcttga

SEQ ID NO: 773167 - DNA, 120 bp, Artificial Sequence
  ENSG00000239998_23 (sequence is synthesized)
tggaagaattcttaaatgactcgttctactttctgctggtccaggcactccttggcttggggcagcatcccaccagtttctgcctccatcttctcaatgcttacacctacctggttgcct

SEQ ID NO: 773168 - DNA, 120 bp, Artificial Sequence
  ENSG00000239998_24 (sequence is synthesized)
ctgtcttcacacccattcttctgtgtgtgtcttttctcttcttcagattatgatatcactcagatcagattaggactcatcctaattcgttatgatcccttgatcataacttaaatgcat

SEQ ID NO: 773169 - DNA, 120 bp, Artificial Sequence
  ENSG00000239998_25 (sequence is synthesized)
ttgcaaagactctatttccaactatgttcacatttatagctaatggggctcaggatttcaacgtgtatattagggggaacaagtcaatttatgacagtgtctacaagaaaagtatgcata

SEQ ID NO: 773170 - DNA, 71 bp, Artificial Sequence
  ENSG00000239998_26 (sequence is synthesized)
aagtcaatttatgacagtgtctacaagaaaagtatgcatagaaatacatttaaccaaatacaaaaattagg

SEQ ID NO: 773171 - DNA, 120 bp, Artificial Sequence
  ENSG00000239998_27 (sequence is synthesized)
cagagtgagactctgtctcaaaaaaagagaaatacatttaaccaaagagatgcaatacgtatacattgacaattttaaaatactgctcaaagaaataacaaaagacctaaatgaggaaaa

SEQ ID NO: 773172 - DNA, 120 bp, Artificial Sequence
  ENSG00000239998_28 (sequence is synthesized)
gctcaaagaaataacaaaagacctaaatgaggaaaaagtcatcccagtatcataaatcaaaaggcttaaaattagttatctccctctagggaacctagactaatacactcaccccgtctc

SEQ ID NO: 773173 - DNA, 120 bp, Artificial Sequence
  ENSG00000239998_29 (sequence is synthesized)
cttgttcggaggctctcctgcctatcagcttttctcctctgtgctttccatgtccctgtggttctctggtgagccccatcatgctgtcctagaagatccacttagaatttcggtatttac

SEQ ID NO: 773174 - DNA, 120 bp, Artificial Sequence
  ENSG00000239998_30 (sequence is synthesized)
tcaccattttgactcctcttaacgagacaggcacatgccagctgtttccattcatccaacctgaacctgagcccccgatcattttttctaccacttttcagtcctgggaaactcagtccc

SEQ ID NO: 773175 - DNA, 120 bp, Artificial Sequence
  ENSG00000239998_31 (sequence is synthesized)
aatgtgcttgtcattcatttgagaataattttcattttctccagtagttttaaaattactttgtatctattctagatatcgtttgctctatcatagttaagacattaatgttatttatga

SEQ ID NO: 773176 - DNA, 120 bp, Artificial Sequence
  ENSG00000239998_32 (sequence is synthesized)
atttgtgcacattaaactcatgatctttcatttctgtaaaaatgtcaactatttcctttgcaagtatttattgactaacatactccttatttccttcattctgaaagtgtgacacataga

SEQ ID NO: 773177 - DNA, 120 bp, Artificial Sequence
  ENSG00000239998_33 (sequence is synthesized)
gatatatctgtttcctcttctcactctattctttgtgtgcattaattatcttttctatttttttcatttctagtttttctccgatgactaatgaaaaatttaataaatattctacaccaa

SEQ ID NO: 773178 - DNA, 120 bp, Artificial Sequence
  ENSG00000239998_34 (sequence is synthesized)
gcgtctctgctgatctgagtctaactgcagcatggacctgggttttccctgaagcatctccagggctggagggacgaccgccatgcactgagggctcatccatccgcagagcagggcagt

SEQ ID NO: 773179 - DNA, 120 bp, Artificial Sequence
  ENSG00000239998_35 (sequence is synthesized)
acggtttggtaggaaggaaacacacactctcaagacagaacaaatatgttttattatagttaatccctgcatttccccttttgagacagggtctcactctgtcactgaggctggaatgct

SEQ ID NO: 773180 - DNA, 89 bp, Artificial Sequence
  ENSG00000239998_36 (sequence is synthesized)
ttgagacagggtctcactctgtcactgaggctggaatgctaaggggtgatcatagctccctgcagcctccgcctcccaggccgaagtat

SEQ ID NO: 773181 - DNA, 120 bp, Artificial Sequence
  ENSG00000239998_37 (sequence is synthesized)
gccatgcctggctaattttttgctttttttatacagacaaggtcttgctatgtggcccagggtaatctgaagctcctggcctctagccttcacccacctcagcctcctgaagtgctggga

SEQ ID NO: 773182 - DNA, 120 bp, Artificial Sequence
  ENSG00000239998_38 (sequence is synthesized)
gaccctgcattactcctctgtgctcactgccacacgcagctcaacctgagctacacagccaggtgtcaggtgcgtctctgctgatctgagtctaactgcagcatggacctgggttttccc

SEQ ID NO: 773183 - DNA, 120 bp, Artificial Sequence
  ENSG00000239998_39 (sequence is synthesized)
gtctctccccagtgaccccctggagctcgtggtctcagagcccctgagtataagcccttcacccacacctgcggggtccctgggccatctcaagacaagagaggaggctgcttgggcctc

SEQ ID NO: 773184 - DNA, 120 bp, Artificial Sequence
  ENSG00000239998_40 (sequence is synthesized)
ggtgggatctgactgtgatgaggctggagtccaccccagatgtgctcctttagagagaagcaccccagctgtgggtgccgctcacactgcccctcctgtgctcacctggaggcctctgtg

SEQ ID NO: 773185 - DNA, 120 bp, Artificial Sequence
  ENSG00000240021_0 (sequence is synthesized)
gacctgtaagttgcctaggacagtggcctggtcccaggggctgttgtggggagttgaagaacaccctggcctcctccatcatgtcggccaagagggcagaattgaagaaaacacatctga

SEQ ID NO: 773186 - DNA, 120 bp, Artificial Sequence
  ENSG00000240021_1 (sequence is synthesized)
gcaagaactacaaggcagtttgcctggaattgaagccagagccgaccaaaacatttgattacaaagcagttaaacaagaagggcggtttaccaaagcaggagtgacacaggacctaaaga

SEQ ID NO: 773187 - DNA, 120 bp, Artificial Sequence
  ENSG00000240021_2 (sequence is synthesized)
atgaactcagggaagtgagagaagagctcaaggagaaaatggaggagataaaacagataaaggatctaatggacaaggattttgataaacttcacgaatttgtggaaattatgaaggaaa

SEQ ID NO: 773188 - DNA, 120 bp, Artificial Sequence
  ENSG00000240021_3 (sequence is synthesized)
tgcagaaagatatggatgagaagatggacattttaataaatacacagaagaactataagcttccccttagaagagcaccaaaggagcagcaggaactcaggctgatgggaaagactcaca

SEQ ID NO: 773189 - DNA, 120 bp, Artificial Sequence
  ENSG00000240021_4 (sequence is synthesized)
ggagccagtggagtcaatggagcaccctgtgctcttcacaagaagacgatggcaccacaaaaaacaaaacagggctcactggatccccttcatcactgtgggacctgctgcgagaaatgt

SEQ ID NO: 773190 - DNA, 120 bp, Artificial Sequence
  ENSG00000240021_5 (sequence is synthesized)
ttgttgtgtgctctaaagaacaactacaatcgggggaacattccttcagaggcctcaggcctttacaaaggtggagaggagccagtgaccacccaaccttctgtgggccacgctgtgcct

SEQ ID NO: 773191 - DNA, 120 bp, Artificial Sequence
  ENSG00000240021_6 (sequence is synthesized)
gccccaaagtcccagactgagggaaggtgaagcttaactgccagcttgaaatgagagtaaagaagatacagagcaaacagtgtttcagaaactgtcctgccctgggtgtgattctttggc

SEQ ID NO: 773192 - DNA, 120 bp, Artificial Sequence
  ENSG00000240021_7 (sequence is synthesized)
ttcaatttgaaggacgaggaatgatgggatttcatattttatttcacaccagttcctccttgtttcatctctttgctaagctggctgcttctaccatctaataaataattggccaagttc

SEQ ID NO: 773193 - DNA, 120 bp, Artificial Sequence
  ENSG00000240021_8 (sequence is synthesized)
tgtgtgctctaaagaacaactacaatcggggtatatacgctgcagtgggactgctggatctatggtagctcaatttttagttttttgaggaacaacctccaaactgttctccatagtggc

SEQ ID NO: 773194 - DNA, 120 bp, Artificial Sequence
  ENSG00000240021_9 (sequence is synthesized)
gcgtaagtgaaaccctgcccgagcccagcactggtgccagacccctggctccggctccctggtgacttccccgagcttgtgctgtatcatagtgaagggacaggtccgcccgctgctgac

SEQ ID NO: 773195 - DNA, 120 bp, Artificial Sequence
  ENSG00000240021_10 (sequence is synthesized)
ttctgggtgccgcccgagcctgcgccctccctgacctgccttgccttctaggcctgtggagcctccttagctgtgaccatgcaggacttgaccctggatgggcctacccgccagctccac

SEQ ID NO: 773196 - DNA, 120 bp, Artificial Sequence
  ENSG00000240021_11 (sequence is synthesized)
cctcttattctgtccttccctttagcaagggcagataaggtgcctagcaggctgcccttcttggaccaggggaaattgatctttcttgtgccgtttctgtcctctgcaggagaaatgttt

SEQ ID NO: 773197 - DNA, 120 bp, Artificial Sequence
  ENSG00000240021_12 (sequence is synthesized)
gttgtgtgctctaaagaacaactacaatcggggtaggtagattcatacaagatgtgccttttctcgatcaggtgccttgttgtccccaaggccatgtgctcccagccgcattcacatcac

SEQ ID NO: 773198 - DNA, 120 bp, Artificial Sequence
  ENSG00000240021_13 (sequence is synthesized)
gggtcacccagcctagaggctgctgcctggggctcccatggtggggagggtgcaccactagtggcggaactgaccttgcctcaggtcctgccctttctccccatccagtgggaaatattc

SEQ ID NO: 773199 - DNA, 120 bp, Artificial Sequence
  ENSG00000240021_14 (sequence is synthesized)
acaccaggtctgggcacccttttcacccttggcttctggagctgccttctgatttatctgtacctcaaccccggtgacatcgaatatgtgtttccaacctagcgcagctgcagaacctac

SEQ ID NO: 773200 - DNA, 120 bp, Artificial Sequence
  ENSG00000240021_15 (sequence is synthesized)
cagcagttccgattcatcacctccaagctccttaagatgcacagtcagggcttcttgtcctgttaaataccaccccaaccccaggcctccactggagattaaaaaccttcattcaaagcc

SEQ ID NO: 773201 - DNA, 120 bp, Artificial Sequence
  ENSG00000240021_16 (sequence is synthesized)
aaaggggatgtcatggttttgagtaccagtccaaaacttgagtgtgtggaggttgattatttttggttctatatcagtgtatttcagactccaacccttccccctgcttcctgatggatt

SEQ ID NO: 773202 - DNA, 120 bp, Artificial Sequence
  ENSG00000240021_17 (sequence is synthesized)
ggtgggaaattacatcttagtcatcttagggtcctcccaaccaccacctccctccattccacctgggtctgcaaacgtcccaggtcatagcatggggagggcccctgatgatagcggacg

SEQ ID NO: 773203 - DNA, 120 bp, Artificial Sequence
  ENSG00000240021_18 (sequence is synthesized)
ccagtctgtgtggtctcaggagagaccctgctgcctggcccatccgctccctccacataatcagcctccacctgtgcatggggccagggtgtcttgggtgatgcagggaacccctcagcc

SEQ ID NO: 773204 - DNA, 120 bp, Artificial Sequence
  ENSG00000240021_19 (sequence is synthesized)
tcgagttctgcctgcaccacacccctctgaggtcttgtcaccaagcaggactcaggtccctgctgctcataggaactgggtagctttcttgggttctggggatccacccttctcaccccc

SEQ ID NO: 773205 - DNA, 120 bp, Artificial Sequence
  ENSG00000240021_20 (sequence is synthesized)
acaaggcagtttgcctggaattgaagccagagccgaccaaagtaagaagcccttttgaggccatgcaggcagccaggcctgagatccatggggaagtgaccaggagtcaggggtcatttg

SEQ ID NO: 773206 - DNA, 120 bp, Artificial Sequence
  ENSG00000240021_21 (sequence is synthesized)
ctgatcctagtggccaagatttgtcccagacatttgattacaaagcagttaaacaagaagggcggtttaccaaagcaggaaggacacccagactcttggaggagttgtctttgctcctac

SEQ ID NO: 773207 - DNA, 120 bp, Artificial Sequence
  ENSG00000240021_22 (sequence is synthesized)
tgcccctgtgacttggagtcaaggccttccatggccacccgtgtactggttatctccttgtcatgctgcaaaatgtctccccaactctctgcccctccctggccctcctcccccagtccc

SEQ ID NO: 773208 - DNA, 120 bp, Artificial Sequence
  ENSG00000240021_23 (sequence is synthesized)
gcagctcttgttcttctgattgagttcctgcttttgaccctggtaacaggtgcggcagccccaggccttgacgcatgtggtcatcagagaaacatgagggatgaaataaactcagagaga

SEQ ID NO: 773209 - DNA, 120 bp, Artificial Sequence
  ENSG00000240021_24 (sequence is synthesized)
gatacgtggcagagctgaaattcgaatcctagcattctgacttcagaacctgtttcctggacactctggcttctctcgatgtggtccccggcccggcagcatcagcactgtctgggagct

SEQ ID NO: 773210 - DNA, 120 bp, Artificial Sequence
  ENSG00000240021_25 (sequence is synthesized)
tgtgggaggtgcagcatctcaggctctaccccagacctactgaatcagaatctgcattttcacaatacttcctggggtcagagaaaaggaataggggaaggacagtgtggagaagagaga

SEQ ID NO: 773211 - DNA, 120 bp, Artificial Sequence
  ENSG00000240021_26 (sequence is synthesized)
gaaaggaagggagacaagtaggagcgagaggactggagagaaaaagaagctgggtttcaatcccatcatgaggcggagatctcaccacgttgccttggccggtctccaaccccttgtgag

SEQ ID NO: 773212 - DNA, 120 bp, Artificial Sequence
  ENSG00000240021_27 (sequence is synthesized)
acctcggcctcccaaagtgctgtgattataggtgtgagcccttacacccagcctgtttgcatcttttaatgagtacccaaattaacctctaattgggacttgattttctacaagtgctgc

SEQ ID NO: 773213 - DNA, 120 bp, Artificial Sequence
  ENSG00000240021_28 (sequence is synthesized)
tttctacaagtgctgctccaagaggcttctacacccccgcagggaggcaagcaccgttttgaggtggccgggctggcgaggagattgggggcaggagctgctttttcaatgagaagaatg

SEQ ID NO: 773214 - DNA, 120 bp, Artificial Sequence
  ENSG00000240021_29 (sequence is synthesized)
aacagacctagtgggcgttgcctttagacccaggatgtaaaaggtaatgccagcagacgttggcagtgctggagacacctggtgggcagaggttacctggctggagtggcaggtgtgagg

SEQ ID NO: 773215 - DNA, 120 bp, Artificial Sequence
  ENSG00000240021_30 (sequence is synthesized)
agatgcctcccagcataaggaatgtgggcttctgttggatctcttgttccaggcctcacacatgttcaaggcagcctgggtatgtcttggcccattcaatccctcaaagccctgtttaat

SEQ ID NO: 773216 - DNA, 120 bp, Artificial Sequence
  ENSG00000240021_31 (sequence is synthesized)
tctcatcttgctgtcacctatgtggtgccaagaaacaagtcaccaaaataatgaaatgcctacctaagcttaaaaacaaaaccatgaggtctttctaaataaattatgaaaaagtgcaaa

SEQ ID NO: 773217 - DNA, 120 bp, Artificial Sequence
  ENSG00000240038_0 (sequence is synthesized)
ggaaaataaagggttggagcctctgtgtttctttgttgaaaaatctgctactattattagatctgtgaaaacaattgaaaattcggttattatcaccttaaaagtacaaaacctatagat

SEQ ID NO: 773218 - DNA, 120 bp, Artificial Sequence
  ENSG00000240038_1 (sequence is synthesized)
tttgaaaatgtaattatttttctgtaggcatagttaaaaagattttgtaaatgttataaatcagtttctttataagcggtttatttagataaattttgttatactgacatgattcactaa

SEQ ID NO: 773219 - DNA, 120 bp, Artificial Sequence
  ENSG00000240038_2 (sequence is synthesized)
ttttctaaatataaatggttcagctcttagttatttttaaactaatgacctgtgttatacttcctatttttaatgggcttttatgatgttttaggtttttttgaatcccgtgtccttcaa

SEQ ID NO: 773220 - DNA, 120 bp, Artificial Sequence
  ENSG00000240038_3 (sequence is synthesized)
gtgctttctaactttgagaggaagaaattgaccacctggactatggaactttggttgaatctggcgatgtggaacccatggatatggagggctgactatatacaccatgttttttcctgg

SEQ ID NO: 773221 - DNA, 120 bp, Artificial Sequence
  ENSG00000240038_4 (sequence is synthesized)
cacatcactcaactactattagctggcgagtcaactcacgttgttggaatgactagggacaactagacttcaagtgatctttcatcccaggaatataaatagtttctggaaaggacactg

SEQ ID NO: 773222 - DNA, 120 bp, Artificial Sequence
  ENSG00000240038_5 (sequence is synthesized)
acaacttcaaagcaaaatgaagttctttctgttgcttttcaccattgggttctgctgggctcagtattccccaaatacacaacaaggacggacatctattgttcatctgtttgaatggcg

SEQ ID NO: 773223 - DNA, 120 bp, Artificial Sequence
  ENSG00000240038_6 (sequence is synthesized)
atgggttgatattgctcttgaatgtgagcgatatttagctcccaagggatttggaggggttcaggtctctccaccaaatgaaaatgttgcaattcacaaccctttcagaccttggtggga

SEQ ID NO: 773224 - DNA, 120 bp, Artificial Sequence
  ENSG00000240038_7 (sequence is synthesized)
aagataccaaccagttagctataaattatgcacaagatctggaaatgaagatgaatttagaaacatggtgactagatgtaacaatgttggggttcgtatttatgtggatgctgtaattaa

SEQ ID NO: 773225 - DNA, 120 bp, Artificial Sequence
  ENSG00000240038_8 (sequence is synthesized)
tcatatgtctggtaatgctgtgagtgcaggaacaagcagtacctgtggaagttacttcaaccctggaagtagggactttccagcagtcccatattctggatgggattttaatgatggtaa

SEQ ID NO: 773226 - DNA, 120 bp, Artificial Sequence
  ENSG00000240038_9 (sequence is synthesized)
tatcgagaactacaatgatgctactcaggtcagagattgtcgtctggttggtcttcttgatcttgcactggagaaagattatgtgcgttccaagattgccgaatatatgaatcatctcat

SEQ ID NO: 773227 - DNA, 120 bp, Artificial Sequence
  ENSG00000240038_10 (sequence is synthesized)
tgacattggtgttgcagggttcagacttgatgcttccaagcacatgtggcctggagacataaaggcaattttggacaaactgcataatctaaacagtaactggttccctgcaggaagtaa

SEQ ID NO: 773228 - DNA, 120 bp, Artificial Sequence
  ENSG00000240038_11 (sequence is synthesized)
acctttcatttaccaggaggtaattgatctgggtggtgagccaattaaaagcagtgactactttggaaatggccgggtgacagaattcaagtatggtgcaaaactcggcacagttattcg

SEQ ID NO: 773229 - DNA, 120 bp, Artificial Sequence
  ENSG00000240038_12 (sequence is synthesized)
caagtggaatggagagaagatgtcttacctaaagaactggggagaaggttggggtttcatgccttctgacagagcacttgtctttgtggataaccatgacaatcaacgaggacatggggc

SEQ ID NO: 773230 - DNA, 120 bp, Artificial Sequence
  ENSG00000240038_13 (sequence is synthesized)
tggaggagcctctattcttaccttctgggatgctaggctgtataaaatggcagttggatttatgcttgctcatccttatggttttacacgagtaatgtcaagctaccgttggccaagaca

SEQ ID NO: 773231 - DNA, 120 bp, Artificial Sequence
  ENSG00000240038_14 (sequence is synthesized)
gtttcaaaatggaaacgatgttaatgattgggttgggccaccaaataataatggagtaattaaagaagttactattaatccagacactacttgtggcaatgactgggtctgtgaacatcg

SEQ ID NO: 773232 - DNA, 120 bp, Artificial Sequence
  ENSG00000240038_15 (sequence is synthesized)
atggcgccaaataaggaacatggttaatttccgcaatgtagtggatggccagccttttacaaactggtatgataatgggagcaaccaagtggcttttgggagaggaaacagaggattcat

SEQ ID NO: 773233 - DNA, 120 bp, Artificial Sequence
  ENSG00000240038_16 (sequence is synthesized)
tgttttcaacaatgatgactggacattttctttaactttgcaaactggtcttcctgctggcacatactgtgatgtcatttctggagataaaattaatggcaattgcacaggcattaaaat

SEQ ID NO: 773234 - DNA, 120 bp, Artificial Sequence
  ENSG00000240038_17 (sequence is synthesized)
ctacgtttctgacgatggcaaagctcatttttctattagtaactctgctgaggatccatttattgcaattcatgctgaatctaaattataaaatttaaaattaaatgcatatcctcaaaa

SEQ ID NO: 773235 - DNA, 120 bp, Artificial Sequence
  ENSG00000240038_18 (sequence is synthesized)
tcggtctgtcagggttggaaagtccaagccataggacccagtttcctttcttagcttctgttgtctgccagaacaccatgggctgttactcgccttgagttggaagcggtttgcatttat

SEQ ID NO: 773236 - DNA, 120 bp, Artificial Sequence
  ENSG00000240038_19 (sequence is synthesized)
gagatatagtgtagtaagaagaggtggcagggcagcaaactgagcagaggagagaagacagtggtttgcttaggaaacaggagtgtggtgatcaacctgttgtaatactggagttcagag

SEQ ID NO: 773237 - DNA, 120 bp, Artificial Sequence
  ENSG00000240038_20 (sequence is synthesized)
aagattccttgtacaaatctgatttggagaattggagtaggactctagggccacatattgaaagtaagaggttatagaaaatctataagattctaaattcagcaattttttttccaactg

SEQ ID NO: 773238 - DNA, 120 bp, Artificial Sequence
  ENSG00000240038_21 (sequence is synthesized)
aagaaaaagcaaaaccagaactgtgagatttttattttatgattgtaaaacactcaactgtgggtttgggagattgctgattgagagaagttaatgtgttggttgaatctggcgatgtgg

SEQ ID NO: 773239 - DNA, 120 bp, Artificial Sequence
  ENSG00000240038_22 (sequence is synthesized)
agtgaatctcttttgacatagatagcaatagaagtatctttcttctttcccctttctttttctaaacaagagaagaaaagcgtaatagaggggagaacacataatgcccactaagggtag

SEQ ID NO: 773240 - DNA, 120 bp, Artificial Sequence
  ENSG00000240038_23 (sequence is synthesized)
tgcattaaggaaaaacagtcttggcaggtatataggaatagtggtttccagactggttgatgaccgtaatcaccaagaacagtggttctcagtcttggctgcacattgcagtgatctgga

SEQ ID NO: 773241 - DNA, 83 bp, Artificial Sequence
  ENSG00000240038_24 (sequence is synthesized)
agtggttctcagtcttggctgcacattgcagtgatctggaacttaaatactaattttaaaacaagtccgagatgggagaatca

SEQ ID NO: 773242 - DNA, 120 bp, Artificial Sequence
  ENSG00000240038_25 (sequence is synthesized)
aatacaaaaattagccaagtgtggtggcttgcacctctggtctcagctacttgggatgctaaggcaggaggattacttgagccccagaggttgaggttgcagtgaaccatgatcacacca

SEQ ID NO: 773243 - DNA, 120 bp, Artificial Sequence
  ENSG00000240038_26 (sequence is synthesized)
tagcctgggtgacagagtgagaccctctccctcctaaaaaaatccttaagaaatatattgatgcttggttcctttggtcagaattttgatttaaggtgttgggagtgtagcacagatgtt

SEQ ID NO: 773244 - DNA, 120 bp, Artificial Sequence
  ENSG00000240038_27 (sequence is synthesized)
aaggtgttgggagtgtagcacagatgttggaataaacctctcaaactgattttaatatacaaacaaggtcgagaaccaccaaggaagagtttttatgcataaagattcctgtactctacc

SEQ ID NO: 773245 - DNA, 120 bp, Artificial Sequence
  ENSG00000240038_28 (sequence is synthesized)
ctagaactaatacatctgaatctctgggaatggagtataacaatcagatttgaaaaggtttctttagtaattttaaggactgaccagtttagacactgctttgttagagtaaaatgatta

SEQ ID NO: 773246 - DNA, 120 bp, Artificial Sequence
  ENSG00000240038_29 (sequence is synthesized)
caccaagtctgttatatctcccctctctgttttacataaacatttcccctctattccaggggtatatgttccaagacccccagcaggtgcctgaaaccacagatagtaccaagccttttg

SEQ ID NO: 773247 - DNA, 120 bp, Artificial Sequence
  ENSG00000240038_30 (sequence is synthesized)
cagtcatctctccagtatctgtgggggattggttccaggacctcccatggataccaaaatctacagatgctcaagtgccttatataaaatagcatagtatttgcatataaccaatgcaca

SEQ ID NO: 773248 - DNA, 120 bp, Artificial Sequence
  ENSG00000240038_31 (sequence is synthesized)
tcctcctgtatactttaaatcatctctatattgctagagatgtaatatctactgtaatataaatgctatgcagatagttacattgtttagggaataatgacagaaaagtctatatgttca

SEQ ID NO: 773249 - DNA, 120 bp, Artificial Sequence
  ENSG00000240038_32 (sequence is synthesized)
aaatttatttatttagcattttgtcaggtacaagaaatatttgcctacagggagaaaaccaccaccaccaccaatcctactactatatgcactatattaagcacatgagttgatcaaggg

SEQ ID NO: 773250 - DNA, 120 bp, Artificial Sequence
  ENSG00000240038_33 (sequence is synthesized)
gaaaaaagttagtttctccaattcatgggctttgagattttaaacgttttcttaaatcattaatggagaaatttaaataaccaaaactttgaattaaggatgggaaacagggctgatttt

SEQ ID NO: 773251 - DNA, 120 bp, Artificial Sequence
  ENSG00000240038_34 (sequence is synthesized)
aaaaatggaaatatcacataatatgtctgtttgaaatggaaacatgacaaaaatttgaaaatagttaaatattttgagaattcagttggcttcaattgttattttctattagtgacggat

SEQ ID NO: 773252 - DNA, 120 bp, Artificial Sequence
  ENSG00000240038_35 (sequence is synthesized)
gttggcttcaattgttattttctattagtgacggatatcacaaacaaaagacagtccttatttgttattaggatttatatatatacacacatatataaagactatatagactatatatat

SEQ ID NO: 773253 - DNA, 120 bp, Artificial Sequence
  ENSG00000240038_36 (sequence is synthesized)
tttgtgtatatatatatgtttgtatgtatgtgtgtgtatatatatatgtttgttctcatgctgctataaagaagtgtccaagactgagtaatatataaaggaaaaagattcaatccactc

SEQ ID NO: 773254 - DNA, 120 bp, Artificial Sequence
  ENSG00000240038_37 (sequence is synthesized)
acagttccacatgactgaggaagcctcaggaaatgtacaatcatggtggaaggggaagcaaacccatccttcttcacttgatggcaggaaggagaaattctgagcaaaagggggaaaagc

SEQ ID NO: 773255 - DNA, 120 bp, Artificial Sequence
  ENSG00000240038_38 (sequence is synthesized)
cccttatgcaaccatgaggtcttgggagaactcactcactatcatgaaaacatctgtatgggattaccgcccccatgattcaatttcagttacctcctaccaggtccctctcataacaca

SEQ ID NO: 773256 - DNA, 120 bp, Artificial Sequence
  ENSG00000240038_39 (sequence is synthesized)
tttgggtggggacacagccaaaccatacatatatacatatatacacacacgcacacacacacagagtctatatatacatacacacacacacataaggactgtgtagatatgtgtgtgttt

SEQ ID NO: 773257 - DNA, 120 bp, Artificial Sequence
  ENSG00000240038_40 (sequence is synthesized)
cacataaggactgtgtagatatgtgtgtgtttgtgtatatatatatataaatacagtccttatgtgtttaaatatatatttactgtccttatttatgtgggtttgtgtgtgtgtgtgtgt

SEQ ID NO: 773258 - DNA, 120 bp, Artificial Sequence
  ENSG00000240038_41 (sequence is synthesized)
gtgtgtgtgtgtgtgtgtgtacactgccagaggtttaaaaaggttaagattttatcagtaagaaaaaaccagtcacctctgccagcccatgcaccatgttgtcctgccgctccactgtcc

SEQ ID NO: 773259 - DNA, 120 bp, Artificial Sequence
  ENSG00000240038_42 (sequence is synthesized)
cactcctccaccagtcgcaatggaagaagagattgccgtactggtgattgacaatggctccagcatgtgcaaagctggctttgctggggacgacaacccccagccatgtttccttccatc

SEQ ID NO: 773260 - DNA, 120 bp, Artificial Sequence
  ENSG00000240038_43 (sequence is synthesized)
atcggtgcccccggcaccagggcatgatggtgggcatgggccagagggactcctatgtgggctacatggctgagagcaagcacagtatcctgaccctgaagtacccccattaagcatggt

SEQ ID NO: 773261 - DNA, 120 bp, Artificial Sequence
  ENSG00000240038_44 (sequence is synthesized)
atcatgaccaactgggatgacatagagaagatctggcatcacaccttctacaagggactgcacatggccttggaggagcacctggtgctgctgaccgaggaccccctgaacctcaaggcc

SEQ ID NO: 773262 - DNA, 120 bp, Artificial Sequence
  ENSG00000240038_45 (sequence is synthesized)
aacagagagaagatgactcagatcatgtttgataccttcaacaccctggccatgtacgtggccatccaggctaggctgtccctctacacctgtggttgcacactggcattgtcatgggct

SEQ ID NO: 773263 - DNA, 120 bp, Artificial Sequence
  ENSG00000240038_46 (sequence is synthesized)
ttggagatggggtcacccacatggtgcccatctataagggctacgccctccctgacaccattctgcatctggacctggctggccaggacctgaccaactacctcatgaagatccttacca

SEQ ID NO: 773264 - DNA, 120 bp, Artificial Sequence
  ENSG00000240038_47 (sequence is synthesized)
aggttggctatagcttcagcaccactgccgagcgggagatcagacactacgtcaaggagaaactgtgctatgttgccctggactttgagcagtagatggccactgccacatcctcctcct

SEQ ID NO: 773265 - DNA, 120 bp, Artificial Sequence
  ENSG00000240038_48 (sequence is synthesized)
ccctggagaagagatatgagctgcctgatggccatgtcatcaccatcggcaatgaggttgcagtgtcccgagacgctgttccagccttccttcctggacatggaatcttgtggcatccac

SEQ ID NO: 773266 - DNA, 120 bp, Artificial Sequence
  ENSG00000240038_49 (sequence is synthesized)
ccagaccatcttcaactccatcatgaagtgtgacgtggacatccgcaaagacctgtaggccaacacggtgctatctggtggcaacatgtacccaggcatcaccgacaggatgcagaagga

SEQ ID NO: 773267 - DNA, 120 bp, Artificial Sequence
  ENSG00000240038_50 (sequence is synthesized)
gatcaccacccgggcacctagcaccatgaagatcaagatgatcgcatccccagagcacaagtactccgtgtggatcagcggctccatcctggcctcactgtcagccttccagcagatgtg

SEQ ID NO: 773268 - DNA, 120 bp, Artificial Sequence
  ENSG00000240038_51 (sequence is synthesized)
catcgtccaccgcaaatgcttctaaatggactgtgagcagatggctagcaattgcttcatgggttaattcagaagtaaaaatttgcccctggcaaatgcatacacctcatgctagcctca

SEQ ID NO: 773269 - DNA, 120 bp, Artificial Sequence
  ENSG00000240038_52 (sequence is synthesized)
ccaaactggaataagccttagaaaataagttgtctttaaagcttgtatctgatatcagcactggattgtagaacttgttcctgattttgacattgtattcaagttaactgttccccttgg

SEQ ID NO: 773270 - DNA, 120 bp, Artificial Sequence
  ENSG00000240038_53 (sequence is synthesized)
tatctgtacatatctttgatttcagtctttagtacatgtggcttggtcacttcatggctaaaaacgtacttgtggaagacaagtctggcttggtgagtctgcatggccagcagtctctga

SEQ ID NO: 773271 - DNA, 120 bp, Artificial Sequence
  ENSG00000240038_54 (sequence is synthesized)
tgtaaagtttttttgtatgcaattctcgatctttaaagagatgacaacaaattttggttttctactgttacgtgagaacattaggccccagcaatatatcattgtgtatggaaaaataaa

SEQ ID NO: 773272 - DNA, 120 bp, Artificial Sequence
  ENSG00000240038_55 (sequence is synthesized)
agtgctgccagaaccaaaaaaacattaatttctaaaaggtcatttagatgatttccatgagagactttttaatgttcttctcctgttaggattattattgataatccttttcagattatg

SEQ ID NO: 773273 - DNA, 120 bp, Artificial Sequence
  ENSG00000240038_56 (sequence is synthesized)
taagttttgaaattgttcaaactatccttttctcaagaaacagaaggcaatcttgttctaacttaatatgacaactattaattatatattcaacaaataattgattagaaacctgatata

SEQ ID NO: 773274 - DNA, 120 bp, Artificial Sequence
  ENSG00000240038_57 (sequence is synthesized)
gggctgcgattttagtaatgcaggttatattaaaggagtaaaatatatattttccattgacaaagagtatgcaagccttttcagacatatgataaacatccccctagcccacaggaaaaa

SEQ ID NO: 773275 - DNA, 120 bp, Artificial Sequence
  ENSG00000240045_0 (sequence is synthesized)
caaaagaaagaggtaagcgtggcctgacctagccacccaccaacaggaataatggctgaaaaagcggggtctacattttcacaccttctggttcctattcttctcctgattggctggatt

SEQ ID NO: 773276 - DNA, 120 bp, Artificial Sequence
  ENSG00000240045_1 (sequence is synthesized)
gtgggctgcatcataatgatttatgttgtcttctcttagaaaggcaagaagatatcagattgacatcatttagaagaattaagaaaactatgaacatgactgattattaaatgtctcatg

SEQ ID NO: 773277 - DNA, 120 bp, Artificial Sequence
  ENSG00000240045_2 (sequence is synthesized)
ttaaacaatgcaatgtttgacatcactttacaaacttggatcataaactggcactttggtatgcataagaatttcttcaggacaataagaaattatgagtgaatttctctatattctgag

SEQ ID NO: 773278 - DNA, 120 bp, Artificial Sequence
  ENSG00000240045_3 (sequence is synthesized)
tcattaaaaaaagtttgataaatttaatcacattacaaaaaattatccccccttccctctggaaaaaactatagagaaagtgggctgaggctgtgcaaggtggctcatgcctgtaatccc

SEQ ID NO: 773279 - DNA, 75 bp, Artificial Sequence
  ENSG00000240045_4 (sequence is synthesized)
gctagagataaaaacagacaattcagagaacatataatgtaaaagtacacttacttaatctcttgttcacaaaaa

SEQ ID NO: 773280 - DNA, 120 bp, Artificial Sequence
  ENSG00000240045_5 (sequence is synthesized)
aatgtaaaagtacacttacttaatctcttgttcacaaaaagagaaatgtaattaaaactacactgaggaattgttgctcacttatcagatgggaaaaaaataaagatgtttgacaacata

SEQ ID NO: 773281 - DNA, 120 bp, Artificial Sequence
  ENSG00000240053_0 (sequence is synthesized)
accaggacagatttgtgctcagtggattgggtggtgtttttagtatggagcagaacagaattcctaggactgcgtgtgatgaaatgcaaggtcaaaaggaaaagacaaagcatatttcaa

SEQ ID NO: 773282 - DNA, 120 bp, Artificial Sequence
  ENSG00000240053_1 (sequence is synthesized)
agatgagaaatatttgtttggatatctatgactgtctgtttatactgtaaggggcttaatcagcagctccatcttttagttttagttctaaaggaaaagtagcctaaagtcagtataact

SEQ ID NO: 773283 - DNA, 120 bp, Artificial Sequence
  ENSG00000240053_2 (sequence is synthesized)
aaagggtggaacgaggtgggacaaggtccggaattgctgctcagtgatgtgtgtgtgcctgccgctggtggagctgagactgctcatctcagaaggatggggatgcttgatttcctggcc

SEQ ID NO: 773284 - DNA, 120 bp, Artificial Sequence
  ENSG00000240053_3 (sequence is synthesized)
aggttgtcccagcacagtggggattggccctgttgtatgacgaagacagcacatggtggcagagatagatactaacccatggactttccaagggagggaataggtctttggagggtatgc

SEQ ID NO: 773285 - DNA, 120 bp, Artificial Sequence
  ENSG00000240053_4 (sequence is synthesized)
aagacaaaggtagacactggataaagaacccggtagtgcccaggtattaccccatctgggccattactcccacactcaggaaccagacgttgtgggtgaggacatgctgtccctcctgcc

SEQ ID NO: 773286 - DNA, 120 bp, Artificial Sequence
  ENSG00000240053_5 (sequence is synthesized)
aagtaataacttccttcccagccaggatcctgccccaagtaggaatatagctctgcatttacagcagctcctgctcagaccttgtcaaaaccaccctgcagcttaggattaaggagcatg

SEQ ID NO: 773287 - DNA, 120 bp, Artificial Sequence
  ENSG00000240053_6 (sequence is synthesized)
gtcacaggaaggtggggtttcagggcatcccctcaggaactgcccatctccccagaattccaaaatgaaggtccatatgcttgtaggtgtgctggtcatggtgggcttcacagtaggaaa

SEQ ID NO: 773288 - DNA, 120 bp, Artificial Sequence
  ENSG00000240053_7 (sequence is synthesized)
ggttcctgttcccgacatccggacgtgccacttctgcctcgtagaagacccttctgtaggatgcatttcaggctcagagaagtgtaccatcagcagctcatccctgtgcatggtgatcac

SEQ ID NO: 773289 - DNA, 120 bp, Artificial Sequence
  ENSG00000240053_8 (sequence is synthesized)
catctattatgatgtcaaggttcgcttcatcgttcgaggctgtggacagtacatttcctaccgctgccaagaaaaacgcaacacctactttgcagagtactggtatcaggcccagtgctg

SEQ ID NO: 773290 - DNA, 120 bp, Artificial Sequence
  ENSG00000240053_9 (sequence is synthesized)
tcagtacgattattgcaactcctggtcaagcccccaactccagagctctctgccggagccccatgacaggcccctggccctgcctctgtctgactcccagattcagtggttctaccaggc

SEQ ID NO: 773291 - DNA, 120 bp, Artificial Sequence
  ENSG00000240053_10 (sequence is synthesized)
cctgaacctctccctgcccctccccaatttccatgctgggacggagcctgatggcctggaccccatggtcacactgtccctgaacctgggcttgtcttttgctgagctgcgccgcatgta

SEQ ID NO: 773292 - DNA, 120 bp, Artificial Sequence
  ENSG00000240053_11 (sequence is synthesized)
gttcaggacttttggttcttccccaggctggactcttgacacctcacccttcctgaattccacagtgcaaatatctttctgtaacaccctcagcatcctgcactgccctctctgaaaaca

SEQ ID NO: 773293 - DNA, 120 bp, Artificial Sequence
  ENSG00000240053_12 (sequence is synthesized)
cccacattctttggtcactgtgatttcttaggcctccgtctgttgtaccactagcatctatatgacttttgtgtaattttctctcttgaactctggtgctgtttttttgtttgtttgaga

SEQ ID NO: 773294 - DNA, 120 bp, Artificial Sequence
  ENSG00000240053_13 (sequence is synthesized)
attacaggtgtgagccactgtgcctgtctgagctctggtgctgttcttccccctagaaaagaatctctagtgtggattctgcccagacaggctgacctgagaaaggcacagtggttcctc

SEQ ID NO: 773295 - DNA, 120 bp, Artificial Sequence
  ENSG00000240053_14 (sequence is synthesized)
ggttcctccattccttccccatcatctgagtgttccagtatcccccatccctctcaatccagtcacctgcctattgacatctagctctgtttcccctgtcttgtccatgtctctaagacc

SEQ ID NO: 773296 - DNA, 81 bp, Artificial Sequence
  ENSG00000240053_15 (sequence is synthesized)
ctagctctgtttcccctgtcttgtccatgtctctaagacccagtaccagactgaactagcagcaagaaggacgaggaggcc

SEQ ID NO: 773297 - DNA, 79 bp, Artificial Sequence
  ENSG00000240053_16 (sequence is synthesized)
cttgagactctctattaaaaatagaaaaatcagctgggtgtggtggcacacctctgtaatcccagctactcaggaggct

SEQ ID NO: 773298 - DNA, 81 bp, Artificial Sequence
  ENSG00000240053_17 (sequence is synthesized)
caaaaaaaaggatgaggaatagaattctgtgcagatgtcctgacttggcaattttgtgtccctgcctcactgtctccacca

SEQ ID NO: 773299 - DNA, 120 bp, Artificial Sequence
  ENSG00000240053_18 (sequence is synthesized)
gacttggcaattttgtgtccctgcctcactgtctccaccaacccccgcctgtcctagtgttgttctgcctcctgtcctctcttgctctcttgtcagtctctggcttcctcggccccattt

SEQ ID NO: 773300 - DNA, 120 bp, Artificial Sequence
  ENSG00000240053_19 (sequence is synthesized)
cacttcactgagtcctgacacccatctccctaggggcctgtgagaggagagggaagggtctgttctgctcagctccatgtcccccattttcctccacaataaactgggactgggctaaaa

SEQ ID NO: 773301 - DNA, 120 bp, Artificial Sequence
  ENSG00000240065_0 (sequence is synthesized)
agtgccccaggcggcgaggagagcggtgccttgcagggatgctgcgggcgggagcaccaaccggggacttaccccgggcgggagaagtccacaccgggaccaccatcatggcagtggagt

SEQ ID NO: 773302 - DNA, 120 bp, Artificial Sequence
  ENSG00000240065_1 (sequence is synthesized)
ttgacgggggcgttgtgatgggttctgattcccgagtgtctgcaggcgaggcggtggtgaaccgagtgtttgacaagctgtccccgctgcacgagcgcatctactgtgcactctctggtt

SEQ ID NO: 773303 - DNA, 120 bp, Artificial Sequence
  ENSG00000240065_2 (sequence is synthesized)
cagctgctgatgcccaagccgtggccgacatggccgcctaccagctggagctccatgggatagaactggaggaacctccacttgttttggctgctgcaaatgtggtgagaaatatcagct

SEQ ID NO: 773304 - DNA, 120 bp, Artificial Sequence
  ENSG00000240065_3 (sequence is synthesized)
ataaatatcgagaggacttgtctgcacatctcatggtagctggctgggaccaacgtgaaggaggtcaggtatatggaaccctgggaggaatgctgactcgacagccttttgccattggtg

SEQ ID NO: 773305 - DNA, 120 bp, Artificial Sequence
  ENSG00000240065_4 (sequence is synthesized)
ctcccgaggagtgcaggcgcttcaccacagacgctattgctctggccatgagccgggatggctcaagcgggggtgtcatctacctggtcactattacagctgccggtgtggaccatcgag

SEQ ID NO: 773306 - DNA, 120 bp, Artificial Sequence
  ENSG00000240065_5 (sequence is synthesized)
tcatcttgggcaatgaactgccaaaattctatgatgagtgaaccttccccagacttctctttcttattttgtaataaactctctagggccaaaacctggtatggtcattgggaaatgagt

SEQ ID NO: 773307 - DNA, 120 bp, Artificial Sequence
  ENSG00000240065_6 (sequence is synthesized)
gctcagggagatggagcttaggggaggtgggtgcttccctcctagatgtcagcatacactctttcttcttttgtcccaggtctaaaacatctttcctagagaaaacaaaagggactaaac

SEQ ID NO: 773308 - DNA, 120 bp, Artificial Sequence
  ENSG00000240065_7 (sequence is synthesized)
tagaaatataaagagccctatacatgacaggtgatcacgtactgaatgattttgaagtagtacaaacaataaaaattctcattccgcatcatcatgcggtccatgatgatgaggccgcaa

SEQ ID NO: 773309 - DNA, 120 bp, Artificial Sequence
  ENSG00000240065_8 (sequence is synthesized)
gtgcaggcgcttcaccacagacggtaaccagccaagtggaagggtacctggggagggctttgaaacatgggaaggaagtagattatgaggaacaggaagagaaatacaggggtggccatt

SEQ ID NO: 773310 - DNA, 120 bp, Artificial Sequence
  ENSG00000240065_9 (sequence is synthesized)
taagttaatgccgggcctggtacacttttaagagtgaaaaggggcaggacaaatgcaaagctcaatggggttcttgggcaatacggataaaccagggctgttctgagtaaatcaaatgag

SEQ ID NO: 773311 - DNA, 120 bp, Artificial Sequence
  ENSG00000240065_10 (sequence is synthesized)
aaagaagctaatggcctcaaatacacactttccttacccattcatgaaaagactggcaaactggagccttggaggaatggagttgaccttccccaaaagccactatgataagctatttgg

SEQ ID NO: 773312 - DNA, 120 bp, Artificial Sequence
  ENSG00000240065_11 (sequence is synthesized)
tgggtgcttgggtctctgaatttgtggaggaggatctggggtctgaatgtgtatgtgacctgtcccagtagtgtacagggatgagtaaaggaatagggtctgagagggggacaggagata

SEQ ID NO: 773313 - DNA, 120 bp, Artificial Sequence
  ENSG00000240065_12 (sequence is synthesized)
gatttttgagggtcttctttccatctgtgcttagggatcaaaaagatgattctgtcaagcagatacctggtttctcatttaccatatattgaactattttgtctcttctcccactcctaa

SEQ ID NO: 773314 - DNA, 120 bp, Artificial Sequence
  ENSG00000240065_13 (sequence is synthesized)
ccaatttcctcacatgcaaaatgagtatatggggttaggtcaatattactgacattatgttccatagaacataactctctcaagattgttaatagcaaagaaaattgatgaggcatattt

SEQ ID NO: 773315 - DNA, 120 bp, Artificial Sequence
  ENSG00000240065_14 (sequence is synthesized)
ttcttaccttagcattttttgctttgttataaaatctaagcctgaaaaataagcctaattttgattaacatctgcagtgattaataatatctgagatgattatttgcctcctgctttaat

SEQ ID NO: 773316 - DNA, 120 bp, Artificial Sequence
  ENSG00000240065_15 (sequence is synthesized)
ccaagcattaaacttcatgctattctcttgtcaaagaaatttgagagacattgaatgatcaccctcaaaaattcctgagttctggttgggtgcagtggctcacatctataatctcagcac

SEQ ID NO: 773317 - DNA, 77 bp, Artificial Sequence
  ENSG00000240065_16 (sequence is synthesized)
tctggttgggtgcagtggctcacatctataatctcagcactttgggatgccgaggtgggcagaggaccttgtctcta

SEQ ID NO: 773318 - DNA, 120 bp, Artificial Sequence
  ENSG00000240065_17 (sequence is synthesized)
aagccgtggccgacatggccgcctaccagctggagctccatgggtatgaagctctggagttctgactccccacccactagagctcccccaacctgcatgaatccctgtacagtgtgctgt

SEQ ID NO: 773319 - DNA, 120 bp, Artificial Sequence
  ENSG00000240065_18 (sequence is synthesized)
tccaggagctggacactgggaaatggaaaagtcttgtttcggctcttgctggcacttgaatctgtcagtttctgcatctgtaaagtggagataatatagtacctcatgagacggttattt

SEQ ID NO: 773320 - DNA, 120 bp, Artificial Sequence
  ENSG00000240065_19 (sequence is synthesized)
tgagaaccacattctatatgtgaacacagtttaaaagctgtaaatcactatcctgatataaataatcaggaagaaggtgatattgtgacccaccataatatcaggcagttaccatacgag

SEQ ID NO: 773321 - DNA, 120 bp, Artificial Sequence
  ENSG00000240065_20 (sequence is synthesized)
aaatcaaggtcgttgggacggaagtaaccttatctgcttttccccataagagcagggtccttgcagccaaaagaaagttatgtgggtggggctgagcaaaagagtgagcaattgaaagct

SEQ ID NO: 773322 - DNA, 120 bp, Artificial Sequence
  ENSG00000240065_21 (sequence is synthesized)
tcttaccagttggtggtgtgggactctggttcccctgtacatgtgggagggaggctgcagtttgagctattgcagttacagttttcaggggtcgtttagcagggatgatggtaacagtat

SEQ ID NO: 773323 - DNA, 71 bp, Artificial Sequence
  ENSG00000240065_22 (sequence is synthesized)
gtaatgccaacacagcctaggcaagatggtgaaaccctgtctccacaaaaaacaataaaaaaaagtaaaaa

SEQ ID NO: 773324 - DNA, 120 bp, Artificial Sequence
  ENSG00000240065_23 (sequence is synthesized)
ggaccatcacactggggaccggcttctctgctctcccgttatgggggtcgggggaatgatgggtcaagggtcttccgaagaaagcgagaaaggaacaggcgccttcaaaagcccacttgg

SEQ ID NO: 773325 - DNA, 120 bp, Artificial Sequence
  ENSG00000240184_0 (sequence is synthesized)
agagactgaacagccggcgagcaaatcaacggcatccagaaagccatgtcggactcggcgcccagcgcccaagcgctaacccgctgaaagtttctcagcgaaatctcagggacgatctgg

SEQ ID NO: 773326 - DNA, 120 bp, Artificial Sequence
  ENSG00000240184_1 (sequence is synthesized)
accccgctgagaggaactgcttttgagtgagatggtcccagaggcctggaggagcggactggtaagcaccgggagggtagtgggagttttgcttctgcttggtgccttgaacaaggcttc

SEQ ID NO: 773327 - DNA, 120 bp, Artificial Sequence
  ENSG00000240184_2 (sequence is synthesized)
cacggtcattcactatgagatcccggaggaaagagagaagggtttcgctgtgggcaacgtggtcgcgaaccttggtttggatctcggtagcctctcagcccgcaggttccgggtggtgtc

SEQ ID NO: 773328 - DNA, 120 bp, Artificial Sequence
  ENSG00000240184_3 (sequence is synthesized)
tggagctagccgaagattctttgaggtgaaccgggagaccggagagatgtttgtgaacgaccgtctggatcgagaggagctgtgtgggacactgccctcttgcactgtaactctggagtt

SEQ ID NO: 773329 - DNA, 120 bp, Artificial Sequence
  ENSG00000240184_4 (sequence is synthesized)
ggtagtggagaacccgctggagctgttcagcgtggaagtggtgatccaggacatcaacgacaacaatcctgctttccctacccaggaaatgaaattggagattagcgaggccgtggctcc

SEQ ID NO: 773330 - DNA, 120 bp, Artificial Sequence
  ENSG00000240184_5 (sequence is synthesized)
ggggacgcgctttccgctcgagagcgcgcacgatcccgatgtgggaagcaactctttacaaacctatgagctgagccgaaatgaatactttgcgcttcgcgtgcagacgcgggaggacag

SEQ ID NO: 773331 - DNA, 120 bp, Artificial Sequence
  ENSG00000240184_6 (sequence is synthesized)
caccaagtacgcggagctggtgttggagcgcgccctggaccgagaacgggagcctagtctccagttagtgctgacggcgttggacggagggaccccagctctctccgccagcctgcctat

SEQ ID NO: 773332 - DNA, 120 bp, Artificial Sequence
  ENSG00000240184_7 (sequence is synthesized)
tcacatcaaggtgctggacgcgaatgacaatgcgcctgtcttcaaccagtccttgtaccgggcgcgcgtcctggaggatgcaccctccggcacgcgcgtggtacaagtccttgcaacgga

SEQ ID NO: 773333 - DNA, 120 bp, Artificial Sequence
  ENSG00000240184_8 (sequence is synthesized)
tctggatgaaggccccaacggtgaaattatttactccttcggcagccacaaccgcgccggcgtgcggcaactattcgccttagaccttgtaaccgggatgctgacaatcaagggtcggct

SEQ ID NO: 773334 - DNA, 120 bp, Artificial Sequence
  ENSG00000240184_9 (sequence is synthesized)
ggacttcgaggacaccaaactccatgagatttacatccaggccaaagacaagggcgccaatcccgaaggagcacattgcaaagtgttggtggaggttgtggatgtgaatgacaacgcccc

SEQ ID NO: 773335 - DNA, 120 bp, Artificial Sequence
  ENSG00000240184_10 (sequence is synthesized)
ggagatcacagtcacctccgtgtacagcccagtacccgaggatgcccctctggggactgtcatcgctttgctcagtgtgactgacctggatgctggcgagaacgggctggtgacctgcga

SEQ ID NO: 773336 - DNA, 120 bp, Artificial Sequence
  ENSG00000240184_11 (sequence is synthesized)
agttccaccgggtctccctttcagccttacttcttccctcaagaattacttcactttgaaaaccagtgcagacctggatcgggagactgtgccagaatacaacctcagcatcaccgcccg

SEQ ID NO: 773337 - DNA, 120 bp, Artificial Sequence
  ENSG00000240184_12 (sequence is synthesized)
agacgccggaaccccttccctctcagcccttacaatagtgcgtgttcaagtgtccgacatcaatgacaaccctccacaatcttctcaatcttcctacgacgtttacattgaagaaaacaa

SEQ ID NO: 773338 - DNA, 120 bp, Artificial Sequence
  ENSG00000240184_13 (sequence is synthesized)
cctccccggggctccaatactaaacctaagtgtctgggaccccgacgccccgcagaatgctcggctttctttctttctcttggagcaaggagctgaaaccgggctagtgggtcgctattt

SEQ ID NO: 773339 - DNA, 120 bp, Artificial Sequence
  ENSG00000240184_14 (sequence is synthesized)
cacaataaatcgtgacaatggcatagtgtcatccttagtgcccctagactatgaggatcggcgggaatttgaattaacagctcatatcagcgatgggggcaccccggtcctagccaccaa

SEQ ID NO: 773340 - DNA, 120 bp, Artificial Sequence
  ENSG00000240184_15 (sequence is synthesized)
catcagcgtgaacatatttgtcactgatcgcaatgacaatgccccccaggtcctatatcctcggccaggtgggagctcggtggagatgctgcctcgaggtacctcagctggccacctagt

SEQ ID NO: 773341 - DNA, 120 bp, Artificial Sequence
  ENSG00000240184_16 (sequence is synthesized)
gtcacgggtggtaggctgggacgcggatgcagggcacaatgcctggctctcctacagtctcttgggatcccctaaccagagcctttttgccatagggctgcacactggtcaaatcagtac

SEQ ID NO: 773342 - DNA, 120 bp, Artificial Sequence
  ENSG00000240184_17 (sequence is synthesized)
tgcccgtccagtccaagacacagattcacccaggcagactctcacggtcttgatcaaagacaatggggagccttcgctctccaccactgctaccctcactgtgtcagtaaccgaggactc

SEQ ID NO: 773343 - DNA, 120 bp, Artificial Sequence
  ENSG00000240184_18 (sequence is synthesized)
tcctgaagcccgagccgagttcccctctggctctgccccccgggagcagaaaaaaaatctcaccttttatctacttctttctctaatcctggtttctgtggggtttgtggtcacagtgtt

SEQ ID NO: 773344 - DNA, 120 bp, Artificial Sequence
  ENSG00000240184_19 (sequence is synthesized)
aacaccagggccctccttgcacgcggacgccgtgcggggaggcctgatgtcgccgcacctttaccatcaggtgtatctcaccacggactcccgccgcagcgacccgctgctgaagaaacc

SEQ ID NO: 773345 - DNA, 120 bp, Artificial Sequence
  ENSG00000240184_20 (sequence is synthesized)
tggtgcagccagtccactggccagccgccagaacacgctgcggagctgtgatccggtgttctataggcaggtgttgggtgcagagagcgcccctcccggacagcaagccccgcccaacac

SEQ ID NO: 773346 - DNA, 120 bp, Artificial Sequence; identical to SEQ ID NO: 80682
  ENSG00000240184_21 (sequence is synthesized)

SEQ ID NO: 773347 - DNA, 120 bp, Artificial Sequence; identical to SEQ ID NO: 80683
  ENSG00000240184_22 (sequence is synthesized)

SEQ ID NO: 773348 - DNA, 120 bp, Artificial Sequence; identical to SEQ ID NO: 80684
  ENSG00000240184_23 (sequence is synthesized)

SEQ ID NO: 773349 - DNA, 120 bp, Artificial Sequence; identical to SEQ ID NO: 80685
  ENSG00000240184_24 (sequence is synthesized)

SEQ ID NO: 773350 - DNA, 120 bp, Artificial Sequence; identical to SEQ ID NO: 80686
  ENSG00000240184_25 (sequence is synthesized)

SEQ ID NO: 773351 - DNA, 120 bp, Artificial Sequence; identical to SEQ ID NO: 80687
  ENSG00000240184_26 (sequence is synthesized)

SEQ ID NO: 773352 - DNA, 120 bp, Artificial Sequence; identical to SEQ ID NO: 80688
  ENSG00000240184_27 (sequence is synthesized)

SEQ ID NO: 773353 - DNA, 120 bp, Artificial Sequence; identical to SEQ ID NO: 80689
  ENSG00000240184_28 (sequence is synthesized)

SEQ ID NO: 773354 - DNA, 120 bp, Artificial Sequence; identical to SEQ ID NO: 80690
  ENSG00000240184_29 (sequence is synthesized)

SEQ ID NO: 773355 - DNA, 120 bp, Artificial Sequence; identical to SEQ ID NO: 80691
  ENSG00000240184_30 (sequence is synthesized)

SEQ ID NO: 773356 - DNA, 120 bp, Artificial Sequence; identical to SEQ ID NO: 80692
  ENSG00000240184_31 (sequence is synthesized)

SEQ ID NO: 773357 - DNA, 120 bp, Artificial Sequence; identical to SEQ ID NO: 80693
  ENSG00000240184_32 (sequence is synthesized)

SEQ ID NO: 773358 - DNA, 120 bp, Artificial Sequence; identical to SEQ ID NO: 80694
  ENSG00000240184_33 (sequence is synthesized)

SEQ ID NO: 773359 - DNA, 120 bp, Artificial Sequence; identical to SEQ ID NO: 80695
  ENSG00000240184_34 (sequence is synthesized)

SEQ ID NO: 773360 - DNA, 120 bp, Artificial Sequence; identical to SEQ ID NO: 80696
  ENSG00000240184_35 (sequence is synthesized)

SEQ ID NO: 773361 - DNA, 120 bp, Artificial Sequence; identical to SEQ ID NO: 80697
  ENSG00000240184_36 (sequence is synthesized)

SEQ ID NO: 773362 - DNA, 120 bp, Artificial Sequence; identical to SEQ ID NO: 80698
  ENSG00000240184_37 (sequence is synthesized)

SEQ ID NO: 773363 - DNA, 120 bp, Artificial Sequence; identical to SEQ ID NO: 80699
  ENSG00000240184_38 (sequence is synthesized)

SEQ ID NO: 773364 - DNA, 120 bp, Artificial Sequence
  ENSG00000240184_39 (sequence is synthesized)
agcaagtcatgcttgaccctgttagtgcttttttattcctacatcatattgaggaaggaatggagctgtttttttagtgatgaagatgttttcctggtgatgcattcacactttcaactg

SEQ ID NO: 773365 - DNA, 120 bp, Artificial Sequence
  ENSG00000240184_40 (sequence is synthesized)
gcccttcctagatcaaagttagtgcctttgtgagatggtggcctgccagagtgtggtttgtggtcccatttcagggggaagatacttgactcatctgtggacctaattcacatcctcagc

SEQ ID NO: 773366 - DNA, 120 bp, Artificial Sequence
  ENSG00000240184_41 (sequence is synthesized)
tactctggagttgctgccttggccctgggatggggtaggttaagaggacagagggaggtcagggagctgggggctgagtttccctgagtagaggctggcacaggagagaaggcatcaccc

SEQ ID NO: 773367 - DNA, 120 bp, Artificial Sequence
  ENSG00000240184_42 (sequence is synthesized)
ttcctcgagctctgctttattcttccagatcagggttgccagataaaatacaggatgcccagttacagttgaatgtcagataaacagcaagtactatttcagcataagtcagtctcaaat

SEQ ID NO: 773368 - DNA, 120 bp, Artificial Sequence
  ENSG00000240204_0 (sequence is synthesized)
gcggcctaggtgccgcgtggggcaagcaggtgcctcgcgtccaggcggctccgcggctggctgcctcccgagccggccgcgctcctcccagcgaggcgtggcggggaggcgtagtgaggc

SEQ ID NO: 773369 - DNA, 120 bp, Artificial Sequence
  ENSG00000240204_1 (sequence is synthesized)
gaggcgtggcggggaggcgtagtgaggctgggcccgtggcggttccctgaggagggccgagaaggggccgggggtgctaggggaacgggcgctgggggcagcggccccggtggatgctaa

SEQ ID NO: 773370 - DNA, 120 bp, Artificial Sequence
  ENSG00000240204_2 (sequence is synthesized)
gggcttcgggatcgggagagtccaccacgcctgcctgctcggctgagaatcgccatgccagctaaagggaaaaaaggaaaaggccagggcaagtctcatgggaagaaacagaagaaacca

SEQ ID NO: 773371 - DNA, 120 bp, Artificial Sequence
  ENSG00000240204_3 (sequence is synthesized)
gaagtggacattctcagccccgcggccatgctgaacctctactacatcgcccacaacgtcgctgactgcctgcatctgcgaggcttccattggccgggtgctcccaaaggaaagaaaggg

SEQ ID NO: 773372 - DNA, 120 bp, Artificial Sequence
  ENSG00000240204_4 (sequence is synthesized)
tgacagcatttcacaacacatctctgttacagacaacaggacctggggaagagaagtcaggataacacaactgttgccagcaacatagactttactccagacgacttgagatgcaaatta

SEQ ID NO: 773373 - DNA, 120 bp, Artificial Sequence
  ENSG00000240204_5 (sequence is synthesized)
agtgtgcttttctgtgatggtggaagatcaggaaatgcaccttacttcctctgttatgccagatatggttagccactttggttttttaggagctataggatgggaaaagcctgagtaatt

SEQ ID NO: 773374 - DNA, 120 bp, Artificial Sequence
  ENSG00000240204_6 (sequence is synthesized)
cctacacagtgtgctgaaattaatagaactttcagaaattattataattctgggtcaggattaaactttgctctcagaaggcagttctagttgcattaattgttttcttttgccaaagag

SEQ ID NO: 773375 - DNA, 120 bp, Artificial Sequence
  ENSG00000240204_7 (sequence is synthesized)
cgtttgtcatttagagaagacacggcaagaaacactgggtttccttaggaacattcctctcttgggcaccatttccttttttttttttaatggaaaataataaatactttgtttctataa

SEQ ID NO: 773376 - DNA, 120 bp, Artificial Sequence
  ENSG00000240224_0 (sequence is synthesized)
atggccacaggactccaggttcccctgccgcagctggccacaggactgctgcttctcctcagtgtccagccctgggctgagagtgggaaggtgctggtggtgcccactgatggcagccac

SEQ ID NO: 773377 - DNA, 120 bp, Artificial Sequence
  ENSG00000240224_1 (sequence is synthesized)
tggctcagcatgcgggaggccttgcgggacctccatgcgagaggccaccaggtggtggtcctcaccctggaggtgaatatgtacatcaaagaagagaactttttcaccctgacaacgtat

SEQ ID NO: 773378 - DNA, 120 bp, Artificial Sequence
  ENSG00000240224_2 (sequence is synthesized)
gccatttcatggacccaggacgaatttgatcgccttttgctgggtcacactcaatcgttctttgaaacagaacatcttctgatgaaattttctagaagaatggcaattatgaacaatatg

SEQ ID NO: 773379 - DNA, 120 bp, Artificial Sequence
  ENSG00000240224_3 (sequence is synthesized)
tctttgatcatacataggtcttgtgtggagctactgcataatgaggccctgatcaggcacctgcatgctacttcctttgatgtggttctaacagacccctttcacctctgcgcggcggtg

SEQ ID NO: 773380 - DNA, 120 bp, Artificial Sequence
  ENSG00000240224_4 (sequence is synthesized)
ctggctaagtacctgtcgattcctgctgtgtttttcttgaggaacattccatgtgatttagactttaagggcacacagtgtccaaacccttcctcctatattcctagattactaacgacc

SEQ ID NO: 773381 - DNA, 120 bp, Artificial Sequence
  ENSG00000240224_5 (sequence is synthesized)
aattcagaccacatgacattcctgcaaagggtcaagaacatgctctaccctctggccctgtcctacctttgccatgctgtttctgctccttatgcaagccttgcctctgagctttttcag

SEQ ID NO: 773382 - DNA, 120 bp, Artificial Sequence
  ENSG00000240224_6 (sequence is synthesized)
agagaggtgtcagtggtggatcttgtcagccatgcatctgtgtggctgttccgaggggactttgtgatggattaccccaggccgatcatgcccaacatggtcttcattgggggcatcaac

SEQ ID NO: 773383 - DNA, 120 bp, Artificial Sequence
  ENSG00000240224_7 (sequence is synthesized)
tgtgccaacgggaagccactatctcaggaatttgaagcctacattaatgcttctggagaacatggaattgtggttttctctttgggatcaatggtctcagaaattccagagaagaaagct

SEQ ID NO: 773384 - DNA, 120 bp, Artificial Sequence
  ENSG00000240224_8 (sequence is synthesized)
atggcaattgctgatgctttgggcaaaatccctcagacagtcctgtggcggtacactggaacccgaccatcgaatcttgcgaacaacacgatacttgttaagtggctaccccaaaacgat

SEQ ID NO: 773385 - DNA, 120 bp, Artificial Sequence
  ENSG00000240224_9 (sequence is synthesized)
catatgcaatggcgttcccatggtgatgatgcccttgtttggtgatcagatggacaatgcaaagcgcatggagactaagggagctggagtgaccctgaatgttctggaaatgacttctga

SEQ ID NO: 773386 - DNA, 120 bp, Artificial Sequence
  ENSG00000240224_10 (sequence is synthesized)
agatttagaaaatgctctaaaagcagtcatcaatgacaaaagttacaaggagaacatcatgcgcctctccagccttcacaaggaccgcccggtggagccgctggacctggccgtgttctg

SEQ ID NO: 773387 - DNA, 120 bp, Artificial Sequence
  ENSG00000240224_11 (sequence is synthesized)
ggtggagtttgtgatgaggcacaagggcgcgccacacctgcgccccgcagcccacgacctcacctggtaccagtaccattccttggacgtgattggtttcctcttggccgtcgtgctgac

SEQ ID NO: 773388 - DNA, 120 bp, Artificial Sequence
  ENSG00000240224_12 (sequence is synthesized)
agtggccttcatcacctttaaatgttgtgcttatggctaccggaaatgcttggggaaaaaagggcgagttaagaaagcccacaaatccaagacccattgagaagtgggtgggaaataagg

SEQ ID NO: 773389 - DNA, 120 bp, Artificial Sequence
  ENSG00000240224_13 (sequence is synthesized)
taaaattttgaaccattccctagtcatttccaaacttgaaaacagaatcagtgttaaattcattttattcttattaaggaaatactttgcataaattaatcagccccagagtgctttaaa

SEQ ID NO: 773390 - DNA, 120 bp, Artificial Sequence
  ENSG00000240224_14 (sequence is synthesized)
aaattctcttaaataaaaataatagactcgctagtcagtaaagatatttgaatatgtatcgtgccccctctggtgtctttgatcaggatgacatgtgccatttttcagaggacgtgcaga

SEQ ID NO: 773391 - DNA, 120 bp, Artificial Sequence
  ENSG00000240224_15 (sequence is synthesized)
caggctggcattctagattacttttcttactctgaaacatggcctgtttgggagtgcgggattcaaaggtggtcccacggctgcccctactgcaaatggcagttttaatcttatcttttg

SEQ ID NO: 773392 - DNA, 120 bp, Artificial Sequence
  ENSG00000240224_16 (sequence is synthesized)
gcttctgcagatggttgcaattgatccttaaccaataatggtcagtcctcatctctgtcgtgcttcataggtgccaccttgtgtgtttaaagaagggaagctttgtacctttagagtgta

SEQ ID NO: 773393 - DNA, 120 bp, Artificial Sequence
  ENSG00000240224_17 (sequence is synthesized)
ggtgaaatgaatgaatggcttggagtgcactgagaacagcatatgatttcttgctttggggaaaaagaatgatgctatgaaattggtgggtggtgtatttgagaagataatcattgctta

SEQ ID NO: 773394 - DNA, 120 bp, Artificial Sequence
  ENSG00000240224_18 (sequence is synthesized)
tgtcaaatggagctgaatttgataaaaacccaaaatacagctatgaagtgctgggcaagtttactttttttctgatgtttcctacaactaaaaataaattaataaatttatataaattct

SEQ ID NO: 773395 - DNA, 120 bp, Artificial Sequence
  ENSG00000240230_0 (sequence is synthesized)
gtacgctcgcaaggcgctcgcagactccggagtcgccaacatgtcgaccgccatgaatttcgggaccaagagcttccagccgcggcccccggacaagggcagcttcccgctggatcactt

SEQ ID NO: 773396 - DNA, 120 bp, Artificial Sequence
  ENSG00000240230_1 (sequence is synthesized)
aggtgaatgtaaaagctttaaagagaaattcatgaagtgtcttcataacaataattttgaaaatgctttgtgcagaaaggaatcaaaagaatatttagaatgcaggatggagagaaaatt

SEQ ID NO: 773397 - DNA, 120 bp, Artificial Sequence
  ENSG00000240230_2 (sequence is synthesized)
gatgctacaagaaccattggagaaactgggatttggagacttgactagtggaaaatcagaggcaaaaaaatgaattttgatgagaagacccctgggccgtgttcagtggtctctcaggac

SEQ ID NO: 773398 - DNA, 120 bp, Artificial Sequence
  ENSG00000240230_3 (sequence is synthesized)
ggagggcatcatcctgcctcttaggttggctgaggcctgcgtgtggtgtccttagaaatgggcttcgaatagaagctccagccctgtgggggcgtctcctgggtagggagtggcgtcccg

SEQ ID NO: 773399 - DNA, 120 bp, Artificial Sequence
  ENSG00000240230_4 (sequence is synthesized)
ttttcccttaggagggtgtttctgcattgaacccctgagtgggacggcgttcccggcaaagctgggagggaggcgagcgtggggcaagacccttgtcttcgaggccggggccctcttgta

SEQ ID NO: 773400 - DNA, 120 bp, Artificial Sequence
  ENSG00000240230_5 (sequence is synthesized)
tggggcggttttatgttgcagtcctctgatactttctgagttcaaagaggtaaatgtataaatttcagtcccttctgaacacagatatcatcagaaaattaccattccctagcaggatgt

SEQ ID NO: 773401 - DNA, 120 bp, Artificial Sequence
  ENSG00000240230_6 (sequence is synthesized)
tttcgtgtttgtattcgtatatgccagttcatttcctttgaaaaaaaaaaaaagtggaacacaaagtaggaagtgagaaccttctggctttggatggattgacttcttgattctttctgg

SEQ ID NO: 773402 - DNA, 120 bp, Artificial Sequence
  ENSG00000240230_7 (sequence is synthesized)
ttttgcctgaacaccaagtagcttcataatcaaagggtcattttctggtttgtatcagaccgtatttataaagttgggtatttaatttcagtaactcctgtattttaacagaaaaagaac

SEQ ID NO: 773403 - DNA, 120 bp, Artificial Sequence
  ENSG00000240230_8 (sequence is synthesized)
ctgagtccatttgcagttaggctcgcaccagctgtcttctgtgccagccagctccgcccgagaccccggcacgtgttcgcagcacagcctggcaggggccctgagcggagttctcagccc

SEQ ID NO: 773404 - DNA, 120 bp, Artificial Sequence
  ENSG00000240230_9 (sequence is synthesized)
gtctgtgccaaagttgcctgtgggtcacggaaacccggcccatgtccacccagtgcgtcaggccagccggggcccaaacctgtggatggaacgcaggtgcctgcacatctggggcctcag

SEQ ID NO: 773405 - DNA, 120 bp, Artificial Sequence
  ENSG00000240230_10 (sequence is synthesized)
ccagacctgtctccttcccaggcactgtcggaaaggggctggctcctgtctggtcagtggaggatggtggcaggagacggggtggggaggtccaggtcacgtcctctctggcgaccctgg

SEQ ID NO: 773406 - DNA, 120 bp, Artificial Sequence
  ENSG00000240230_11 (sequence is synthesized)
cagtggctgtctccaagccctggcaggtggggccaccaatctggccgacctcaggctctgggaaacaggctgccctcgtccctctgcctgtgggtggctgaggcttctcagcccatctcc

SEQ ID NO: 773407 - DNA, 120 bp, Artificial Sequence
  ENSG00000240230_12 (sequence is synthesized)
agttctctgcagcaaaggccctctgtttctgtcctgcagtggtggccctttcgtggttaaacatgtccctcccctcctcacagaactgagtacctattgcggctgggcccgcccaaccct

SEQ ID NO: 773408 - DNA, 120 bp, Artificial Sequence
  ENSG00000240230_13 (sequence is synthesized)
gtgtccctgcacccatgggttctaccacctgattcggctgcagctgtcactgtcccgtgtctgctctctgtcaggcctctgagtgctgcagacgtattaacatatcaccgctagttgatg

SEQ ID NO: 773409 - DNA, 120 bp, Artificial Sequence
  ENSG00000240230_14 (sequence is synthesized)
gaaagtcttgtttcttattagaatattttgtgtaggcacagggttgccccagcactgtctatagcaaccccagtgtcctcacagtgcacgtgagccgtgacgcagccaccgtggagtcgg

SEQ ID NO: 773410 - DNA, 120 bp, Artificial Sequence
  ENSG00000240230_15 (sequence is synthesized)
cgctgacgcggtgtggccacgtgccatgagctcgccaacgcagtgcggctatatggcgtgagcttactgtgaagtggagacaggcagggacacaggaaactacaaacgagaaatccagaa

SEQ ID NO: 773411 - DNA, 120 bp, Artificial Sequence
  ENSG00000240230_16 (sequence is synthesized)
ggaggagctggaactgatgggcatagccggccgcgagcccctccgagcacccctgggggtggagttctggctgtcatggcagagggtttcacatgctcaaaaagtaaatgaaccaggatg

SEQ ID NO: 773412 - DNA, 120 bp, Artificial Sequence
  ENSG00000240230_17 (sequence is synthesized)
tgaggggaacacaacagaccatgccgacggagctcccgggcccaggccggggcctcttcccatcgcactctgacccgccgtcgggagtgcccaggcccgggtcgggcctgcctctccgct

SEQ ID NO: 773413 - DNA, 120 bp, Artificial Sequence
  ENSG00000240230_18 (sequence is synthesized)
cgcaccgcactctgacccatcaggagtgtggggaagaccgtcgaccaaaggtgggaaagacaggaaagatactgtactctaagtagtaaatttgttttttgcgtggacgattctgaagct

SEQ ID NO: 773414 - DNA, 120 bp, Artificial Sequence
  ENSG00000240230_19 (sequence is synthesized)
gtattctgagatggaaaaaactagaaatacatcgtggatgatgagagccaggtgtattgagctcctgcttttctaacgtacaaaggtaactggatagagaaacggagtgatcgccctcac

SEQ ID NO: 773415 - DNA, 120 bp, Artificial Sequence
  ENSG00000240230_20 (sequence is synthesized)
gccgcggatagtcccgaatcctgtccaggcgctgttttttcctgtacgtacctgtgatcaagtctgagatgtgacagcaaaactgacagaacttcgtgcttccctcttcaaaatgtcaca

SEQ ID NO: 773416 - DNA, 120 bp, Artificial Sequence
  ENSG00000240230_21 (sequence is synthesized)
gatgggcactgtgttcttaccggagatcttagcaacctcggcatctggctgtttttcttataggtcaggagtttccaccttttcccttaaaggaagcgcttggcagcttctctggtgtgt

SEQ ID NO: 773417 - DNA, 120 bp, Artificial Sequence
  ENSG00000240230_22 (sequence is synthesized)
ctgagtcgccagcatcaccactgtcctgttctggggccattcttaagtaaaataaaagcttcttggacccaagcaccacatcaccgcgatggctggtctgatcaccgagatggctgctga

SEQ ID NO: 773418 - DNA, 120 bp, Artificial Sequence
  ENSG00000240230_23 (sequence is synthesized)
gtgcctggcaggcagggtggcgtggatggcccgaaacgctggacggagggagggttgatgtcccagcaggacggctgctcagaacagcacagaatcaaaaactcatgaatggtttatttc

SEQ ID NO: 773419 - DNA, 120 bp, Artificial Sequence
  ENSG00000240230_24 (sequence is synthesized)
tggaattttccacttagtatttttggactgtggctgaccatgggtaactgaaaccgtgtgtaagggggactgttgtgaggggctgtgcacaaatgcttcccagctcttgagggcctggac

SEQ ID NO: 773420 - DNA, 120 bp, Artificial Sequence
  ENSG00000240230_25 (sequence is synthesized)
gcagtgacccgtgcactcagggtcttggccctgataccattctgtaaccaaaaggaaccagggccaggccagagaaggtatcagatgagctagagagtgaagaattgctgggatgaggag

SEQ ID NO: 773421 - DNA, 120 bp, Artificial Sequence
  ENSG00000240230_26 (sequence is synthesized)
acttgttgaaataacacggggggatgggaaggagcatacggtggccagcctggggcagtgtgagcgtgaaaataaacaggctgggcgcagcggctcacgcctgcaatcccagcactttag

SEQ ID NO: 773422 - DNA, 120 bp, Artificial Sequence
  ENSG00000240230_27 (sequence is synthesized)
gagttcaagaccagcctgggcaacatgggtgaaaccctgtctctacaaaacaagaaaagtcagccgtgcgtggtgtcacccgcctgtagtcccagatactcaggaagctgaggcaggagg

SEQ ID NO: 773423 - DNA, 120 bp, Artificial Sequence
  ENSG00000240230_28 (sequence is synthesized)
aagctgaggcaggaggatcacttgagccagaggttaagtctgcagtgagctgtgattgtaccactgctctccagcctgagcaacagagccggaccctgtctcaccaaaggaaaaaaaaaa

SEQ ID NO: 773424 - DNA, 120 bp, Artificial Sequence
  ENSG00000240230_29 (sequence is synthesized)
aaaaaaaaaaaagaaagaaaattaattattgtaatgggctgtagccctcagaataaattgatatccagtagtctatacaacataagtaattgcgtaaacatgtcagtggggggagggcca

SEQ ID NO: 773425 - DNA, 120 bp, Artificial Sequence
  ENSG00000240230_30 (sequence is synthesized)
gggggagggccaggtctgtcttattaattctaatatagaagaaattttgggaacaggaaactgctgttgcagaaaccacactggtgacaggtgcagattacaaccctcagcgggccgggc

SEQ ID NO: 773426 - DNA, 120 bp, Artificial Sequence
  ENSG00000240230_31 (sequence is synthesized)
caaaaattagctggggctggtggcgtgtgtctgtaatccagctattcgggaggccgaggtgggagaattgcctaaaccaggaggcagaggttgcagtgagcagggattgtgccaccacac

SEQ ID NO: 773427 - DNA, 120 bp, Artificial Sequence
  ENSG00000240230_32 (sequence is synthesized)
tccagcctgggcgacagaaccgtctcaaaaaaaaaccctcagttgccatgaagtgagtggtgacgtgtggtgtgaagcaggtgtctgctgtcttgagaaacctccccttgagatgcatag

SEQ ID NO: 773428 - DNA, 120 bp, Artificial Sequence
  ENSG00000240230_33 (sequence is synthesized)
tgacctccgaggagacagtcatgtcacagcagaacggcagaggcccccttaacccagcagccaccgccgggagcgagccgcacaggccgcaccgacctgggggcgtccctgagggcacgg

SEQ ID NO: 773429 - DNA, 120 bp, Artificial Sequence
  ENSG00000240230_34 (sequence is synthesized)
tatcacctctggttctcttgcccaactgcatggcctgaatgtaatcccaaggagacaacagacacagacccaaaccgaggagccttctgcgaagtgactggcagcgctggcccagtgtta

SEQ ID NO: 773430 - DNA, 120 bp, Artificial Sequence
  ENSG00000240230_35 (sequence is synthesized)
tgtaagatgttatttggggaactgggtatacacactgtcctatttttggaactttttggaagtctgaaattattttgaaatgaggaaaaaaaaatatgctttgtatgaaactatagtgga

SEQ ID NO: 773431 - DNA, 120 bp, Artificial Sequence
  ENSG00000240230_36 (sequence is synthesized)
atagattgagtcgattctcgtttcaaaataacttcaaagagtttccaataggcatgatgccggcatgaatggtttcagcaggtcacaggcagagaagccggaatcccaaaatagcgccat

SEQ ID NO: 773432 - DNA, 120 bp, Artificial Sequence
  ENSG00000240230_37 (sequence is synthesized)
tgtgtggacaacctgactccttacaaacgtgcagtggcttcccaacgctgcctttgagtttctgggtctggctgctgaatgtgttgtgcttaagaatccagacaccctgctgttcctgcc

SEQ ID NO: 773433 - DNA, 120 bp, Artificial Sequence
  ENSG00000240230_38 (sequence is synthesized)
agagcttctcacgagatatttcgggtagttcatcatctgtcatgtgcagaatgcattttatttctcatagacgcttgtcatgataagctggccacattattaaaaggctcccaaagacaa

SEQ ID NO: 773434 - DNA, 120 bp, Artificial Sequence
  ENSG00000240230_39 (sequence is synthesized)
gactgtggaattgtttgcccttgaaatggaggcttatcagatgaaattgtaccaaaagctgtttcacaatcttgggaacctcttcttgagcgatagcgttatacatgattgcattcctga

SEQ ID NO: 773435 - DNA, 120 bp, Artificial Sequence
  ENSG00000240230_40 (sequence is synthesized)
gagcattttctttccacatttggttgctaccgacctgtcattaaggtttccaaatcgtgcatcataatgctgactgagtcaaaagaccgaaggtcgtgggtacacagtttctttcttttg

SEQ ID NO: 773436 - DNA, 120 bp, Artificial Sequence
  ENSG00000240230_41 (sequence is synthesized)
cattctcagatgttaaaaatatgcactgggttgttttgctccactttgagttgttgggaatgtgacagggaggacaatagactatttaagaaatgatgaaagatgaatgattcttcctgt

SEQ ID NO: 773437 - DNA, 120 bp, Artificial Sequence
  ENSG00000240230_42 (sequence is synthesized)
actgggcctcctacactctgggcgtcttcatctgcctgagctgctcgggaatccaccggaatatcccccaggtcagcaaggtgaagtccgtccgcctggacgcctgggaggaggcccaag

SEQ ID NO: 773438 - DNA, 120 bp, Artificial Sequence
  ENSG00000240230_43 (sequence is synthesized)
tggagttcatggcctcccacgggaacgacgccgcgagagccaggtttgagtccaaagtaccctccttctactaccggcccacgccctccgactgccagctccttcgagagcagtggatcc

SEQ ID NO: 773439 - DNA, 120 bp, Artificial Sequence
  ENSG00000240230_44 (sequence is synthesized)
gggccaagtacgagcgacaggagttcatctacccggagaagcaggagccctactcggcagggtaccgtgagggttttctctggaagcgtggccgggacaacgggcagtttttgagccgga

SEQ ID NO: 773440 - DNA, 120 bp, Artificial Sequence
  ENSG00000240230_45 (sequence is synthesized)
cttccagccggccaagatcggccacccccacggcctgcaggtcacctacctgaaggacaacagcacccgtaacatcttcatctaccatgaggacgggaaggagattgtggactggttcaa

SEQ ID NO: 773441 - DNA, 120 bp, Artificial Sequence
  ENSG00000240230_46 (sequence is synthesized)
tgcactccgagctgctcgcttccactacctgcaggtggcattcccaggggccggcgacgcagatctggtgccaaagctctccaggaactacctgaaggaaggctacatggagaagacggg

SEQ ID NO: 773442 - DNA, 120 bp, Artificial Sequence
  ENSG00000240230_47 (sequence is synthesized)
gcccaagcaaacggaaggcttccggaagcgctggttcaccatggatgaccgcaggctcatgtacttcaaagaccccctggacgccttcgcccgaggggaagtcttcattggcagcaagga

SEQ ID NO: 773443 - DNA, 120 bp, Artificial Sequence
  ENSG00000240230_48 (sequence is synthesized)
gagtggctacacggtgctgcatgggttcccgccgtccacccagggccaccactggccacatggcatcaccatcgtcacgcccgaccgcaagtttctgtttgcctgcgagacggagtccga

SEQ ID NO: 773444 - DNA, 120 bp, Artificial Sequence
  ENSG00000240230_49 (sequence is synthesized)
ccagagggagtgggtggcggccttccagaaggcggtggacaggcccatgctgccccaggagtacgcagtggaggcgcacttcaagcataaaccttagcgagtgcggctggaggaccacgg

SEQ ID NO: 773445 - DNA, 120 bp, Artificial Sequence
  ENSG00000240230_50 (sequence is synthesized)
acattggactcactgtggctggacggaggggacccgtggatgggggggctctggcgtcctgaggccacctggccccacctgctcctcagggcagcccggcgcggccaggtagggcccgag

SEQ ID NO: 773446 - DNA, 120 bp, Artificial Sequence
  ENSG00000240230_51 (sequence is synthesized)
attcggcggccacgaagcccgcagctgcagccgaggcttagacggtgcctagcgatgtctgctgcaaagctcaaaagtgctgctgatctcccagtgcttctggccgtattccggtggggt

SEQ ID NO: 773447 - DNA, 120 bp, Artificial Sequence
  ENSG00000240230_52 (sequence is synthesized)
ggtgagtacagctaagcgttatgatttccacctcccactactccaattaaaactttttttttcctgaaaggccattacagtgtgtctttttcaggcctgggattcagcttgtgtttttca

SEQ ID NO: 773448 - DNA, 120 bp, Artificial Sequence
  ENSG00000240247_0 (sequence is synthesized)
ccttgctatagaagacctgggacagaggactgctgtctgccctctctggtcaccctgcctagctagaggatctgtgaccccagccatgaggaccctcgccatccttgctgccattctcct

SEQ ID NO: 773449 - DNA, 120 bp, Artificial Sequence
  ENSG00000240247_1 (sequence is synthesized)
ggtggccctgcaggcccaggctgagccactccaggcaagagctgatgaggttgctgcagccccggagcagattgcagcggacatcccagaagtggttgtttcccttgcatgggacgaaag

SEQ ID NO: 773450 - DNA, 120 bp, Artificial Sequence; identical to SEQ ID NO: 750714
  ENSG00000240247_2 (sequence is synthesized)

SEQ ID NO: 773451 - DNA, 120 bp, Artificial Sequence; identical to SEQ ID NO: 750715
  ENSG00000240247_3 (sequence is synthesized)

SEQ ID NO: 773452 - DNA, 120 bp, Artificial Sequence
  ENSG00000240303_0 (sequence is synthesized)
aggacttcggcactcgagacctgtggatgccgcgttgctgtggcctgcgggggtgatcatgaagccaggtgctactggcgagtccgatttggccgaagtgctgccccagcacaagttcga

SEQ ID NO: 773453 - DNA, 120 bp, Artificial Sequence
  ENSG00000240303_1 (sequence is synthesized)
cagcaagtccctggaggcctacctaaaccagcacttgtctggctttggggccgaacgtgaggctacgctgaccattgcccagtacagagcaggaaagtccaatccaaccttttatctcca

SEQ ID NO: 773454 - DNA, 120 bp, Artificial Sequence
  ENSG00000240303_2 (sequence is synthesized)
gaagggctttcaaacatatgtgctcaggaaaaaaccaccaggttcacttcttcctaaagcacatcagattgatagagaatttaaagtccagaaagccttgttttcaattggattccccgt

SEQ ID NO: 773455 - DNA, 120 bp, Artificial Sequence
  ENSG00000240303_3 (sequence is synthesized)
tcccaagcctatactgtactgcagtgatacttctgtcattggaacagaattttacgtaatggaacatgtgcagggtcgaatcttccgtgatttaacaattcctggacttagcccagcaga

SEQ ID NO: 773456 - DNA, 120 bp, Artificial Sequence
  ENSG00000240303_4 (sequence is synthesized)
acgttcagccatatatgtggccacggtagaaacattggctcagttacattccttgaatatacagtcactgcagctggaaggatatggtataggtgctgggtactgcaaaagacaggtatc

SEQ ID NO: 773457 - DNA, 120 bp, Artificial Sequence
  ENSG00000240303_5 (sequence is synthesized)
aacctggacaaagcaatatcaagctgcagctcatcaggacatccctgccatgcaacagctatcggagtggctaatgaagaacttgcccgataatgacaatgaagagaatttgattcatgg

SEQ ID NO: 773458 - DNA, 120 bp, Artificial Sequence
  ENSG00000240303_6 (sequence is synthesized)
agatttcagactagataacatagttttccaccctaaagagtgtcgagttatagcagtgctggattgggagctgtcaaccattggtcatcctttgtcagacttagctcatttttccctgtt

SEQ ID NO: 773459 - DNA, 120 bp, Artificial Sequence
  ENSG00000240303_7 (sequence is synthesized)
ctacttttggccaaggacagttccaatgataaatcaaggttcttatagtgaaaactcagggataccatcaatggaagaactgatttcaatatattgccgctgcaggggaattaattctat

SEQ ID NO: 773460 - DNA, 120 bp, Artificial Sequence
  ENSG00000240303_8 (sequence is synthesized)
tcttcctaactggaatttctttcttgccctttcatattttaagatggctggaatagcacagggagtatatagcagatatcttctgggaaataattcatctgaggatagctttttatttgc

SEQ ID NO: 773461 - DNA, 120 bp, Artificial Sequence
  ENSG00000240303_9 (sequence is synthesized)
caatattgtgcaacctctggcagaaactggactacaactctccaaacgaactttcagtactgtactaccacagattgatactactggacagttgtttgtacagactcggaaaggtcagga

SEQ ID NO: 773462 - DNA, 120 bp, Artificial Sequence
  ENSG00000240303_10 (sequence is synthesized)
agttcttattaaggtgaagcatttcatgaaacaacacattcttccagctgaaaaggaggtaactgagttctatgttcaaaatgaaaattcagtggacaagtggggaaaacctttagtgat

SEQ ID NO: 773463 - DNA, 120 bp, Artificial Sequence
  ENSG00000240303_11 (sequence is synthesized)
tgataaactcaaggaaatggccaaagtcgagggtctctggaacttgtttttgccagctgtcagcggactcagccacgtggactatgccttgattgctgaagaaacaggaaaatgcttttt

SEQ ID NO: 773464 - DNA, 120 bp, Artificial Sequence
  ENSG00000240303_12 (sequence is synthesized)
tgctccagatgtctttaactgccaagcaccagacacagggaatatggaggttctgcacctgtatggaagtgaggaacagaagaaacagtggcttgagcctcttcttcaagggaacattac

SEQ ID NO: 773465 - DNA, 120 bp, Artificial Sequence
  ENSG00000240303_13 (sequence is synthesized)
gagcagtggagctgggaatcccaagtgcaaaattgcaattgttttgggaagaactcaaaatacttctctctccagacacaaacagcacagcatgattcttgttcccatgaacacacctgg

SEQ ID NO: 773466 - DNA, 120 bp, Artificial Sequence
  ENSG00000240303_14 (sequence is synthesized)
agtaaaaataataaggcctttgtcagtttttggctacacagataattttcatggaggacattttgagatccattttaatcaagtgcgagttcctgccacaaatctaatactaggtgaagg

SEQ ID NO: 773467 - DNA, 120 bp, Artificial Sequence
  ENSG00000240303_15 (sequence is synthesized)
taggggatttgaaatttcccaaggccgccttggacctggcagaatccaccactgtatgagaacagtaggtttggcggaacgcgctttgcagatcatgtgtgagcgggcaacacaaaggat

SEQ ID NO: 773468 - DNA, 120 bp, Artificial Sequence
  ENSG00000240303_16 (sequence is synthesized)
agctttcaagaagaagttgtatgcacatgaggttgtggctcactggattgctgaaagccgcattgccattgagaagatccgcttgttgactctgaaagctgctcacagcatggacactct

SEQ ID NO: 773469 - DNA, 120 bp, Artificial Sequence
  ENSG00000240303_17 (sequence is synthesized)
gggcagtgctggcgctaagaaagagattgcaatgatcaaagtggctgccccacgggctgtcagcaaaatcgttgactgggccatccaggtgtgcggaggtgctggtgtttcccaggatta

SEQ ID NO: 773470 - DNA, 120 bp, Artificial Sequence
  ENSG00000240303_18 (sequence is synthesized)
ccctctggctaacatgtatgctataacccgagttttgcgtttagcagatggacctgacgaagttcatctttcagcaatcgcaacaatggagctgcgggaccaagccaaaagactgacagc

SEQ ID NO: 773471 - DNA, 120 bp, Artificial Sequence
  ENSG00000240303_19 (sequence is synthesized)
caagatataaggagggtggcactgccacatcccactggcagaaactctcctttatacaaacttcattggctccaacatttgaatctcatatttttgtagcagtttgagcacagggttaat

SEQ ID NO: 773472 - DNA, 120 bp, Artificial Sequence
  ENSG00000240303_20 (sequence is synthesized)
tattcatttgtggtaaagattatagcatctattttgatcagtgggttttattatttcaagggtcacacagggttaagttcagtaagaaatgctgtagctgttgtcattcaatctagtgcc

SEQ ID NO: 773473 - DNA, 69 bp, Artificial Sequence
  ENSG00000240303_21 (sequence is synthesized)
cagcctgggcaacatagcgagacccccattgctacaaaaaatttaaaaatgaaacaagtgtggtggcac

SEQ ID NO: 773474 - DNA, 120 bp, Artificial Sequence
  ENSG00000240303_22 (sequence is synthesized)
gctgaggcaggaggattgcttgagtctaggagtttgaggttacagtaagctgtgatcgtgacatggcctccagcctgggtgaccgagtgagactgtttctaaaaataaaaacaaaaaata

SEQ ID NO: 773475 - DNA, 120 bp, Artificial Sequence
  ENSG00000240303_23 (sequence is synthesized)
aatttcttcttgaggtggggtggaggtggggagcaagaatttgacctggctctgatccctggtgtgttgtgtgggcctctttaacgtttgccactgagccttaacctcactgtacttcac

SEQ ID NO: 773476 - DNA, 120 bp, Artificial Sequence
  ENSG00000240303_24 (sequence is synthesized)
tgtacttcacacgcattggtgttaacattttaatcttagaagaccctgacccactgagggtttgttgtgagaattgctgaagccacgtagaagcaccttgaaatctgtaaaaccacaaga

SEQ ID NO: 773477 - DNA, 120 bp, Artificial Sequence
  ENSG00000240303_25 (sequence is synthesized)
aagtactttataaaaggtatccttatttgaagtggataaatcttgtaactcgaaaagttgtgatttagaagacaggattgtttttgaacattaggaattaaaggctatatctggtcctta

SEQ ID NO: 773478 - DNA, 120 bp, Artificial Sequence
  ENSG00000240303_26 (sequence is synthesized)
gttgttccttacccgcaacgatgaccatggctttgccttctttaaaattgaggcctccaactctgacgctgactggagaattgaaacccgaacacacattgggctcttttggcacttgac

SEQ ID NO: 773479 - DNA, 120 bp, Artificial Sequence
  ENSG00000240303_27 (sequence is synthesized)
tagagctaaaacctcgggattcagcgggcaagcgttgctcagcaacggcgcgtaggctgtgtgcggttggctggagccagaccccaccccggcctcggcccatgctctagaggggacgtt

SEQ ID NO: 773480 - DNA, 120 bp, Artificial Sequence
  ENSG00000240303_28 (sequence is synthesized)
gtacagggataccatcaatggaagaactgatttcaatatattgccgctgcaggggaattaattctattcttcctaactggaatttctttcttgccctttcatattttaagatggctggaa

SEQ ID NO: 773481 - DNA, 120 bp, Artificial Sequence
  ENSG00000240303_29 (sequence is synthesized)
aacattgcttgaggtgatgccaggcctatatgttttccccaaatagtgctttaagcattaaagttaaatgtttaaaatggaagtgattctgcattcagtccataatatggaagacttttt

SEQ ID NO: 773482 - DNA, 120 bp, Artificial Sequence
  ENSG00000240303_30 (sequence is synthesized)
taaaatataaaatacagctactccttctgggggatgttttttgggtagctgaggaaacttcacattatattagaaatatgtaataatgatctttggacatctttgtaacctttttttcct

SEQ ID NO: 773483 - DNA, 120 bp, Artificial Sequence
  ENSG00000240303_31 (sequence is synthesized)
aaaattcactgtttggactcacaaatcataatgtaagatatgagagtaaatgtcatatatttgtatttcacaagtattttctaacaggtgtttttggaaaacattatagggagtattgct

SEQ ID NO: 773484 - DNA, 120 bp, Artificial Sequence
  ENSG00000240303_32 (sequence is synthesized)
gaacattcttcgctgtggaattttcagtattagaaagtgttgctaaattatcaaagctgtttggattaaattatcagacaaattttttcagacctgtgtaatgaagtgattagatgttta

SEQ ID NO: 773485 - DNA, 120 bp, Artificial Sequence
  ENSG00000240303_33 (sequence is synthesized)
ctgcatcagactatgttggtgtacgtcttttacacagttcccattccagtcatcactgcttacatgactacatgaaaacatcaaaaagacaattgtgattctgcttattatctgttttat

SEQ ID NO: 773486 - DNA, 120 bp, Artificial Sequence
  ENSG00000240303_34 (sequence is synthesized)
tccaataaatatgaccatgcattagcaagcaggaaggctagaatatgcagtaacattgaaggcaatagcattttaatgcataagatagattcttagatattcctttgtctgtgacaactg

SEQ ID NO: 773487 - DNA, 120 bp, Artificial Sequence
  ENSG00000240303_35 (sequence is synthesized)
actgtcttaatataaatgctggtggagttcagagtagagccaataaaaagaaatagtatagcatttatgtaatttataattatataaattatagaatttatagaatataaattctgcctt

SEQ ID NO: 773488 - DNA, 120 bp, Artificial Sequence
  ENSG00000240303_36 (sequence is synthesized)
gccaagcaccaggttactacattaattgaaaacataattttttctaatattttgatcagtgtttaaaatttctatatatgataagaatgtgtttttatacaaagttattgacttatgaat

SEQ ID NO: 773489 - DNA, 120 bp, Artificial Sequence
  ENSG00000240303_37 (sequence is synthesized)
aatataagaaatggatttgaaattttcattggactattcttttgttaaatatcattacaattaagagtattggtgaaaaaaattagccaccaaagggattggtcgtgtaaggatcatgga

SEQ ID NO: 773490 - DNA, 120 bp, Artificial Sequence
  ENSG00000240303_38 (sequence is synthesized)
tcatggatccatgggaattggatatttctattactagttggaatggatagagagtttcaaatcttttggttagcctcactattcattcaccaaatgaataaaccattcatttaccaatta

SEQ ID NO: 773491 - DNA, 120 bp, Artificial Sequence
  ENSG00000240344_0 (sequence is synthesized)
gcgcccaacttccgctggcccaaagaaactataattttgaaccaacagacctctgctggcatctgcgattgcatttttcctgttttaacaacggctgtgctagacgaagtggtgaagccc

SEQ ID NO: 773492 - DNA, 120 bp, Artificial Sequence
  ENSG00000240344_1 (sequence is synthesized)
aaagacttatttttgagctcgctgtaagactgagaaatcacgtagtccttcctgaaaccactaagaggaaaaatgtctgtgacactgcatacagatgtaggtgatattaaaattgaagtc

SEQ ID NO: 773493 - DNA, 120 bp, Artificial Sequence
  ENSG00000240344_2 (sequence is synthesized)
ttctgtgagaggacacccaaaacatgtgagaatttcttggctctttgtgccagtaattactacaatggctgtatatttcataggaatatcaagggtttcatggttcaaacaggagatcca

SEQ ID NO: 773494 - DNA, 120 bp, Artificial Sequence
  ENSG00000240344_3 (sequence is synthesized)
acaggaactggaagaggaggcaacagtatttggggcaagaagtttgaggatgaatacagtgaatatcttaagcacaatgttagaggtgttgtatctatggctaataatggcccgaacacc

SEQ ID NO: 773495 - DNA, 120 bp, Artificial Sequence
  ENSG00000240344_4 (sequence is synthesized)
ggaaactctagatgagttggagaagttgccagtaaatgagaagacataccgacctcttaatgatgtacacattaaggacataactattcatgccaacccatttgctcagtagctatgata

SEQ ID NO: 773496 - DNA, 120 bp, Artificial Sequence
  ENSG00000240344_5 (sequence is synthesized)
gacctggacaaataacttgacaaattgctggaacacacttattgtggtttacccggttttaattatgtcagagattgcatcatccttctgcttgtttacaactatgatcttctatgaaat

SEQ ID NO: 773497 - DNA, 120 bp, Artificial Sequence
  ENSG00000240344_6 (sequence is synthesized)
ggtggtaccaaggggcgcccaacagcttttatccccattcttagagcatattctttattataatgattatccaacatatttctttaattttaatacaaaaaatacatcatttaatttttg

SEQ ID NO: 773498 - DNA, 120 bp, Artificial Sequence
  ENSG00000240344_7 (sequence is synthesized)
ttacatatgaacattcatttttaaatgctcagcctcaagtgcaggcatttttgagtggcctgattacatattcctcccacagcaagtccgtatcctggaagtgttattttataataaaat

SEQ ID NO: 773499 - DNA, 120 bp, Artificial Sequence
  ENSG00000240344_8 (sequence is synthesized)
ttaaaaagttttaaagaattaaatcgtaggacaaattaattaaaatattgtgtaaaattaccttcaggctatgtgtataaggtatatatgaaacgtaaatgaacttcatgtttaaatttg

SEQ ID NO: 773500 - DNA, 120 bp, Artificial Sequence
  ENSG00000240344_9 (sequence is synthesized)
gtaaagcattgcttgaggttgcccaggtagtttcgccttacacttcttgtcccagtgcaattattagtagagctccctttcactgtcaaatttccggttggggataaattgcattgtcgt

SEQ ID NO: 773501 - DNA, 120 bp, Artificial Sequence
  ENSG00000240344_10 (sequence is synthesized)
aagaagtttgaggatgaatacagtgaatatcttaagataaagaaactagcaagagtccattgtatgtgagaagagattgtgggcattttggttttgttgcctgcctgatcatttcattcc

SEQ ID NO: 773502 - DNA, 120 bp, Artificial Sequence
  ENSG00000240344_11 (sequence is synthesized)
agcacactattccttaatataaatcacaatgttagaggtgttgtatctatggctaataatggcccgaacaccaatggatctcagttcttcatcacctatggcaaacagccacatttggac

SEQ ID NO: 773503 - DNA, 120 bp, Artificial Sequence
  ENSG00000240344_12 (sequence is synthesized)
ccgcactgcactccagcctggcgacatagcgagactccgtctcaaaatgaaaaaaaaagagaagttcatagtatattagtgataagtgctgtggtggaaaaaaaaaagttcatagtatat

SEQ ID NO: 773504 - DNA, 120 bp, Artificial Sequence
  ENSG00000240344_13 (sequence is synthesized)
tagtataagtgctgtggtgaaaaaaaaaaaaagcgaatttcatagtatattagtgataagtgctgtgggagaaggaaataggaatgtcctagggctgaagggctaaagcagttctgtgta

SEQ ID NO: 773505 - DNA, 120 bp, Artificial Sequence
  ENSG00000240344_14 (sequence is synthesized)
acaaatttgtgaagcttttcatacttaaatatatatgaacaatatttataaggagggttattcttttttgttttttgtaggtctgttttaatcttcaggtctgtgaagttaaatttgggg

SEQ ID NO: 773506 - DNA, 120 bp, Artificial Sequence
  ENSG00000240344_15 (sequence is synthesized)
aattaggaaaggccatatcaaattttatctatatttaagcagtcaaactataaagtattccttaagttttgggaaatgaacttgttttcaatttaattaaatacttcttttgatttgctt

SEQ ID NO: 773507 - DNA, 120 bp, Artificial Sequence
  ENSG00000240344_16 (sequence is synthesized)
tattcaacatcagttaatacaacaagataagcactttggaattgaataatctaacctaaataacaacaacaaaactttctgtaaaaccattgttagggaaaactagccatcctaacttct

SEQ ID NO: 773508 - DNA, 120 bp, Artificial Sequence
  ENSG00000240344_17 (sequence is synthesized)
ggcctgatttccacttatttgtccaatgtcaaaggtggatcaaagagaacgtagataatttttcggtaacgatagagtagccagtatctttttcttttgaactaattttcttcaggaaac

SEQ ID NO: 773509 - DNA, 76 bp, Artificial Sequence
  ENSG00000240344_18 (sequence is synthesized)
ccagtatctttttcttttgaactaattttcttcaggaaacgtaatcattaggacattatattacgagatggagtct

SEQ ID NO: 773510 - DNA, 120 bp, Artificial Sequence
  ENSG00000240382_0 (sequence is synthesized)
acagagtcaccatcacttgccgggcaagtcagggcattagaaatgatttaggctggtatcagcagaaaccagggaaagcccctaagcgcctgatctatgctgcatccagtttgcaaagtg

SEQ ID NO: 773511 - DNA, 75 bp, Artificial Sequence
  ENSG00000240382_1 (sequence is synthesized)
cctaagcgcctgatctatgctgcatccagtttggaattcactctcacaatcagcagcctgcagcctgaagatttt

SEQ ID NO: 773512 - DNA, 120 bp, Artificial Sequence
  ENSG00000240386_0 (sequence is synthesized)
atgtcttgccagcagagccagcagcagtgccagccccctcccaagtgcactcccaagtgccctcccaagtgccccacaccgaagtgccccccaaagtgtccccctaagtgccctcctgtc

SEQ ID NO: 773513 - DNA, 120 bp, Artificial Sequence
  ENSG00000240386_1 (sequence is synthesized)
cacagacggcgtaggtcccaccgccacagaccccagagctctgactgctgcagccagccctcagcgggctccagctgctgcggagggggcagtggccagcactctggaggctgctgctga

SEQ ID NO: 773514 - DNA, 120 bp, Artificial Sequence
  ENSG00000240403_0 (sequence is synthesized)
ggggcgcggcctcctgtctgcaccggcagcaccatgtcgctcacggtcgtcagcatggcgtgcgttgggttcttcttgctgcagggggcctggccactcatgggtggtcaggacaaaccc

SEQ ID NO: 773515 - DNA, 120 bp, Artificial Sequence
  ENSG00000240403_1 (sequence is synthesized)
ttcctgtctgcccggcccagcactgtggtgcctcgaggaggacacgtggctcttcagtgtcactatcgtcgtgggtttaacaatttcatgctgtacaaagaagacagaagccacgttccc

SEQ ID NO: 773516 - DNA, 120 bp, Artificial Sequence
  ENSG00000240403_2 (sequence is synthesized)
atcttccacggcagaatattccaggagagcttcatcatgggccctgtgaccccagcacatgcagggacctacagatgtcggggttcacgcccacactccctcactgggtggtcggcaccc

SEQ ID NO: 773517 - DNA, 120 bp, Artificial Sequence
  ENSG00000240403_3 (sequence is synthesized)
agcaaccccctggtgatcatggtcacaggaaaccacagaaaaccttccctcctggcccacccagggcccctgctgaaatcaggagagacagtcatcctgcaatgttggtcagatgtcatg

SEQ ID NO: 773518 - DNA, 120 bp, Artificial Sequence
  ENSG00000240403_4 (sequence is synthesized)
tttgagcacttctttctgcacagagaggggatctctgaggacccctcacgcctcgttggacagatccatgatggggtctccaaggccaacttctccatcggtcccttgatgcctgtcctt

SEQ ID NO: 773519 - DNA, 120 bp, Artificial Sequence
  ENSG00000240403_5 (sequence is synthesized)
gcaggaacctacagatgttatggttctgttcctcactccccctatcagttgtcagctcccagtgaccccctggacatcgtgatcacaggtctatatgagaaaccttctctctcagcccag

SEQ ID NO: 773520 - DNA, 120 bp, Artificial Sequence
  ENSG00000240403_6 (sequence is synthesized)
ccgggccccacggttcaggcaggagagaacgtgaccttgtcctgtagctcctggagctcctatgacatctaccatctgtccagggaaggggaggcccatgaacgtaggctccgtgcagtg

SEQ ID NO: 773521 - DNA, 120 bp, Artificial Sequence
  ENSG00000240403_7 (sequence is synthesized)
ctctttccgtgccctgccctgcgtgtggtcaaactcaagtgacccactgcttgtttctgtcacaggaaacccttcaagtagttggccttcacccacagaaccaagctccaaatctggtat

SEQ ID NO: 773522 - DNA, 120 bp, Artificial Sequence
  ENSG00000240403_8 (sequence is synthesized)
ctgcagacacctgcatgttctgattgggacctcagtggtcatcttcctcttcatcctcctcctcttctttctcctttatcgctggtgctccaacaaaaagaatgctgctgtaatggacca

SEQ ID NO: 773523 - DNA, 120 bp, Artificial Sequence
  ENSG00000240403_9 (sequence is synthesized)
agagcctgcgggggacagaacagtgaataggcaggactctgatgaacaagaccctcaggaggtgacgtacgcacagttggatcactgcgttttcatacagagaaaaatcagtcgcccttc

SEQ ID NO: 773524 - DNA, 120 bp, Artificial Sequence
  ENSG00000240403_10 (sequence is synthesized)
tcagaggcccaagacacccctaacagataccagcgtgtacacggaacttccaaatgctgagcccagatccaaagttgtctcctgcccacgagcaccacagtcaggtcttgagggggtttt

SEQ ID NO: 773525 - DNA, 120 bp, Artificial Sequence
  ENSG00000240403_11 (sequence is synthesized)
ctagggagacaacagccctgtctcaaaaccaggttgccagatccaatgaaccagcagctggaatctgaaggcatcagtctgcatcttaggggatcgctcttcctcacaccacgaatctga

SEQ ID NO: 773526 - DNA, 120 bp, Artificial Sequence
  ENSG00000240403_12 (sequence is synthesized)
acatgcctctctcttgcttacaaatgcctaaggtcgccactgcctgctgcagagaaaacacactcctttgcttagcccacaagtatctatttcacttgacccctgcccacctctccaacc

SEQ ID NO: 773527 - DNA, 120 bp, Artificial Sequence
  ENSG00000240403_13 (sequence is synthesized)
taactggcttacttcctagtcctacttgaggctgcaatcacactgaggaactcacaattccaaacatacaagaggctccctcttaacacggcacttacacacttgctgttccaccttccc

SEQ ID NO: 773528 - DNA, 120 bp, Artificial Sequence
  ENSG00000240403_14 (sequence is synthesized)
tcatgctgttccacctcccctcagactatctttcagccttctgtcatcagtaaaatttataaattttttttataacttcagtgtagctctctcctcttcaaataaacatgtctgccctca

SEQ ID NO: 773529 - DNA, 120 bp, Artificial Sequence
  ENSG00000240432_0 (sequence is synthesized)
ttaaaactcagaatcttcccaggtacactcagctgaactcacatcttcccgtcaacatgtcctacaactgttgctctagaaacttctcctcctgctcccacgggggttacttgcactacc

SEQ ID NO: 773530 - DNA, 120 bp, Artificial Sequence
  ENSG00000240432_1 (sequence is synthesized)
caggctcctcctgtggctcttcctaccccagcaacctggtctacagcactgacctctgctctcccagcacctgccagctgggttcctctctctataggggctgtcaggagacctgctgga

SEQ ID NO: 773531 - DNA, 120 bp, Artificial Sequence
  ENSG00000240432_2 (sequence is synthesized)
gttgggtctcggggttttggatccaatagctgctgctccctgagctgtggatccaggagctgctcctcactgggctgtggatccaatggcttcagatatctgaattatagaatccatacc

SEQ ID NO: 773532 - DNA, 120 bp, Artificial Sequence
  ENSG00000240432_3 (sequence is synthesized)
tccccttcccagagttatagatccagattctgccatccaatctattttccacctagaaggtggttccattcatcttgttatcagccattctgtagatctggtttctactgactaatgtgg

SEQ ID NO: 773533 - DNA, 120 bp, Artificial Sequence
  ENSG00000240432_4 (sequence is synthesized)
tgactggtaaaactcatttgagaaatgcatattctttagtaaggtcatctgttaatttcttcctttgagaagtattctaatattattgatcaccaggtcttccttactttccagccctca

SEQ ID NO: 773534 - DNA, 120 bp, Artificial Sequence
  ENSG00000240505_0 (sequence is synthesized)
agcatcctgagtaatgagtggcctgggccggagcaggcgaggtggccggagccgtgtggaccaggaggagcgctttccacagggcctgtggacgggggtggctatgagatcctgccccga

SEQ ID NO: 773535 - DNA, 120 bp, Artificial Sequence
  ENSG00000240505_1 (sequence is synthesized)
agagcagtactgggatcctctgctgggtacctgcatgtcctgcaaaaccatttgcaaccatcagagccagcgcacctgtgcagccttctgcaggtcactcagctgccgcaaggagcaagg

SEQ ID NO: 773536 - DNA, 120 bp, Artificial Sequence
  ENSG00000240505_2 (sequence is synthesized)
caagttctatgaccatctcctgagggactgcatcagctgtgcctccatctgtggacagcaccctaagcaatgtgcatacttctgtgagaacaagctcaggagcccagtgaaccttccacc

SEQ ID NO: 773537 - DNA, 120 bp, Artificial Sequence
  ENSG00000240505_3 (sequence is synthesized)
agagctcaggagacagcggagtggagaagttgaaaacaattcagacaactcgggaaggtaccaaggattggagcacagaggctcagaagcaagtccagctctcccggggctgaagctgag

SEQ ID NO: 773538 - DNA, 120 bp, Artificial Sequence
  ENSG00000240505_4 (sequence is synthesized)
tgcagatcaggtggccctggtctacagcacgctggggctctgcctgtgtgccgtcctctgctgcttcctggtggcggtggcctgcttcctcaagaagaggggggatccctgctcctgcca

SEQ ID NO: 773539 - DNA, 120 bp, Artificial Sequence
  ENSG00000240505_5 (sequence is synthesized)
tcccaggatcacgcgatggaagccggcagccctgtgagcacatcccccgagccagtggagacctgcagcttctgcttccctgagtgcagggcgcccacgcaggagagcgcagtcacgcct

SEQ ID NO: 773540 - DNA, 120 bp, Artificial Sequence
  ENSG00000240505_6 (sequence is synthesized)
gggacccccgaccccacttgtgctggaaggtgggggtgccacaccaggaccacagtcctgcagccttgcccacacatcccagacagtggccttggcattgtgtgtgtgcctgcccaggag

SEQ ID NO: 773541 - DNA, 120 bp, Artificial Sequence
  ENSG00000240505_7 (sequence is synthesized)
gggggcccaggtgcataaatgggggtcagggagggaaaggaggagggagagagatggagaggaggggagagagaaagagaggtggggagaggggagagagatatgaggagagagagacag

SEQ ID NO: 773542 - DNA, 120 bp, Artificial Sequence
  ENSG00000240505_8 (sequence is synthesized)
aggaggcagagagggagagaaacagaggagacagagagggagagagagacagagggagagagagacagaggggaagagaggcagagagggaaagaggcagagaaggaaagagacaggcag

SEQ ID NO: 773543 - DNA, 120 bp, Artificial Sequence
  ENSG00000240505_9 (sequence is synthesized)
agaaggagagaggcagagagggagagaggcagagagggagagaggcagagagacagagagggagagagggacagagagagatagagcaggaggtcggggcactctgagtcccagttccca

SEQ ID NO: 773544 - DNA, 120 bp, Artificial Sequence
  ENSG00000240505_10 (sequence is synthesized)
gtgcagctgtaggtcgtcatcacctaaccacacgtgcaataaagtcctcgtgcctgctgctcacagcccccgagagcccctcctcctggagaataaaacctttggcagctgcccttcctc

SEQ ID NO: 773545 - DNA, 120 bp, Artificial Sequence
  ENSG00000240505_11 (sequence is synthesized)
aagtccaggaaaacgaagccccctcctgtattgacagctgggaattgtggagtccaccgtcctccacctgagacgagcacagggtctccacgaggacagaggctgctttggactcaatag

SEQ ID NO: 773546 - DNA, 120 bp, Artificial Sequence
  ENSG00000240505_12 (sequence is synthesized)
aagagcttttgggataaggagaacttccaaggggagggctttcacctgggctgagtctgtctctggcatccaaacctggaggcacaagtcctgagtcatagggtggccaggtgccctgat

SEQ ID NO: 773547 - DNA, 120 bp, Artificial Sequence
  ENSG00000240505_13 (sequence is synthesized)
gtctgtggattcaaccaacagcagctggaaaatactcagaaaagataggggatagttgcatctgtactgaacctctgcagccattttttctcattgttatccctaaacaatacagtataa

SEQ ID NO: 773548 - DNA, 120 bp, Artificial Sequence
  ENSG00000240505_14 (sequence is synthesized)
cacccttctacatggcatctatattgtatttggtattataagtaatctagagatgactctaattgtataggaggatgtgcataggttatatgcaaatgccaggccgtcttgtatcaggca

SEQ ID NO: 773549 - DNA, 120 bp, Artificial Sequence
  ENSG00000240505_15 (sequence is synthesized)
cttggacatccgcggattttggtatctgtaggggatcctggaaccagtcccccatggataccaagggacgactgtaaacgctcactcaggaagctttctccttggaggaagggcccagtt

SEQ ID NO: 773550 - DNA, 120 bp, Artificial Sequence
  ENSG00000240505_16 (sequence is synthesized)
caggatgcacagagacatgctccctggagcatcgtctgttcgtctgtcgattcacccatcagcccatctccagcgctgtcccaattacagccctagcaagtggagacaacaagaaggcct

SEQ ID NO: 773551 - DNA, 120 bp, Artificial Sequence
  ENSG00000240505_17 (sequence is synthesized)
agctcacgtttccagctttgaggccttagaaagttgctgccaggatgggggagtggatcaacttcctccaggatccagagagcatcccagcagcctcagggtcagaaaaggagcccagcc

SEQ ID NO: 773552 - DNA, 120 bp, Artificial Sequence
  ENSG00000240505_18 (sequence is synthesized)
tctccaggagccagacaggctcacagcagggggatggggggatgtggattgcttgagcctaatgacgggaagagaagaaggcactgcagagaggggtctcatgctgtcttgcagctctcc

SEQ ID NO: 773553 - DNA, 120 bp, Artificial Sequence
  ENSG00000240505_19 (sequence is synthesized)
agcactaatcaaatctaagactagtaataagcatcctgagtaatgagtggcctgggccggagcaggcgaggtggccggagccgtgtggaccaggaggagcgctggtcactcagctgccgc

SEQ ID NO: 773554 - DNA, 120 bp, Artificial Sequence
  ENSG00000240505_20 (sequence is synthesized)
ggtgcctggaacagcccatcgtgggccctttaccctcagcaggtggacgccgttggtcctgccagggcaagtgtgtgtctgtcttagggcatttgggaacaatgggcctctctgtccagg

SEQ ID NO: 773555 - DNA, 120 bp, Artificial Sequence
  ENSG00000240505_21 (sequence is synthesized)
ggccaagtcttcccagggtgagtgcatgaaactggggtcctcgcccttctcgctgcttgggtgacaagcctcgggccatccctcggtcctgtcactgcccctgcttctaggtggagaggc

SEQ ID NO: 773556 - DNA, 120 bp, Artificial Sequence
  ENSG00000240505_22 (sequence is synthesized)
ccagggctcatccctgttacttgctataccttgataaaatcaggttaagacatcctggcagacagataactgggagagtggcacccgggaagggtgggtgtggggtgccggtcttcaggt

SEQ ID NO: 773557 - DNA, 120 bp, Artificial Sequence
  ENSG00000240505_23 (sequence is synthesized)
tgtccccttggggggcgtggcaggctcggtgctggacagaagtgagagccaagaattgcctgcccacccctgccccggcacaggttctggtcagcaactggcggacactgacacctgtct

SEQ ID NO: 773558 - DNA, 120 bp, Artificial Sequence
  ENSG00000240505_24 (sequence is synthesized)
gggggcgttctacgctggtgattgcccttagctcctgggtcgggggagagtgcggctgcccacaccgtcacccctaccctagtgcagggccaggcctggcccacgccctccactctcgcc

SEQ ID NO: 773559 - DNA, 120 bp, Artificial Sequence
  ENSG00000240505_25 (sequence is synthesized)
gtattgacagctgggaattgtggagtccaccgtcctccacctgagacgagcacagggtctccacgaggacagaggctgctttggactcaatagaaaactgggcatcttcatggtcctaga

SEQ ID NO: 773560 - DNA, 120 bp, Artificial Sequence
  ENSG00000240505_26 (sequence is synthesized)
cagggcaagatggagatggatgagcacccggatatcctgcccacccaggggcaaggcaacatcatcattactaagtatgagcagggacgctgagctggggcagcagtggacacagagcat

SEQ ID NO: 773561 - DNA, 120 bp, Artificial Sequence
  ENSG00000240505_27 (sequence is synthesized)
gagcgtgttgacatctggaaattcaccagtcgtctctgggttgtgtgtgagacagagctgcccgtgtcagtgccctggaggtgaagggaagagcctgtgcctgctgcgtgggagactggt

SEQ ID NO: 773562 - DNA, 120 bp, Artificial Sequence
  ENSG00000240505_28 (sequence is synthesized)
ccagggacagggaatcaggagtggttgcaaaggtgtcaggaaataaaatgtactgacaagtggctgaagatgcttggagactggccaaaatataagaacagcaagaaggtgacatggcgg

SEQ ID NO: 773563 - DNA, 120 bp, Artificial Sequence
  ENSG00000240542_0 (sequence is synthesized)
atgacccactgctgttccccttgctgtcagcctacatgctgcaggaccacctgctgcaggacaacctgctggaagcccaccactgtgaccacctgcagcagcacaccctgttgccagccc

SEQ ID NO: 773564 - DNA, 120 bp, Artificial Sequence
  ENSG00000240542_1 (sequence is synthesized)
tcctgctgtgtgcccagctgctgccagccttgctgccacccaacttgctgtcaaaacacctgctgcaggaccacctgctgccagcccacttgtgtggccagctgctgccagccttcctgc

SEQ ID NO: 773565 - DNA, 120 bp, Artificial Sequence
  ENSG00000240542_2 (sequence is synthesized)
tgcagcacaccctgctgccagcccacctgctgtgggtccagctgctgtggccaaaccagctgtgggtccagctgctgtcagcctatttgtgggtccagttgctgtcagccttgctgtcac

SEQ ID NO: 773566 - DNA, 120 bp, Artificial Sequence
  ENSG00000240542_3 (sequence is synthesized)
acctgctgccagcctacctgctgccagcccacctgctgcaggaacacctcttgccagcccacctgctgtgggtccagctgctgccagccttgctgccacccaacatgctgtcaaaccatt

SEQ ID NO: 773567 - DNA, 120 bp, Artificial Sequence
  ENSG00000240542_4 (sequence is synthesized)
tgtagatccacctgctgccaaccatcctgtgtgaccagatgctgcagcacaccctgttgccagccaacctgtggtgggtccagctgctgtagccaaacctgcaatgagtccagctattgt

SEQ ID NO: 773568 - DNA, 120 bp, Artificial Sequence
  ENSG00000240542_5 (sequence is synthesized)
ctgccttgctgccgtcccacctgctgccagaccacctgctacaggaccacctgttgccgccccagctgttgctgcagtccttgctgtgtctccagctgctgccagccttcctgctgctaa

SEQ ID NO: 773569 - DNA, 120 bp, Artificial Sequence
  ENSG00000240542_6 (sequence is synthesized)
tgctgtggccaaacctgcaatgagtccagctattgtctgccttgctgccgtcccacctgctgccagaccacctgctacaggaccacctgttgccgccccagctgttgctgcagtccttgc

SEQ ID NO: 773570 - DNA, 120 bp, Artificial Sequence
  ENSG00000240542_7 (sequence is synthesized)
cctccttgctgccgtcccacctgctgccagaccacctgctacaggaccacctgttgccgccccagctgttgctgcagtccttgctgtgtctccagctgctgccagccttcctgctgctaa

SEQ ID NO: 773571 - DNA, 120 bp, Artificial Sequence
  ENSG00000240563_0 (sequence is synthesized)
agtccttagttacaaggctccatcctcactttgttcgctcctcagtcgtccaggcggattcctttttcgccaggcaccaaggcacagcttagagtagacccgagtcctgctctgcggagt

SEQ ID NO: 773572 - DNA, 120 bp, Artificial Sequence
  ENSG00000240563_1 (sequence is synthesized)
tcgtcttcccagcgaaggtacagaggcggatgaactgctgagacttgattgacgtattttaagatttttttaacttctgaagtctagcaggcctgtaagaacaaaaatcattctgtagga

SEQ ID NO: 773573 - DNA, 120 bp, Artificial Sequence
  ENSG00000240563_2 (sequence is synthesized)
attaaaaacagaatccagtcttgacaacatatccacaatgtctgatgtatctactagtgtacaatcaaaatttgctagacttgcaaagaaaaaggaaaatatcacctatatgaaaagaga

SEQ ID NO: 773574 - DNA, 120 bp, Artificial Sequence
  ENSG00000240563_3 (sequence is synthesized)
gcagttaacagaaactgataaggacatagctccggtattagatttaaaatgcaaggacgtatcagcaattatgaataagtttaaggtcttaatggaaattcaagacctgatgtttgagga

SEQ ID NO: 773575 - DNA, 120 bp, Artificial Sequence
  ENSG00000240563_4 (sequence is synthesized)
gatgagggaaactcttaaaaatgacctaaaagcagttttagggggaaaagctacaatacctgaggtaaagaattcagagaactccagtagtaggacagagtttcagcaaataatcaattt

SEQ ID NO: 773576 - DNA, 120 bp, Artificial Sequence
  ENSG00000240563_5 (sequence is synthesized)
agcattacaaaaaacagggatggtagggaaaatagaaggagaaaactctaaaataggtgatgataatgaaaatttaacctttaaattagaagtaaatgagctgagtggtaaattagacaa

SEQ ID NO: 773577 - DNA, 120 bp, Artificial Sequence
  ENSG00000240563_6 (sequence is synthesized)
cactaacgaatacaatagtaatgatggtaagaaattaccccagggtgaatcacgaagttacgaagtcatgggaagtatggaagaaaccttatgcaatatagatgacagagatggaaatcg

SEQ ID NO: 773578 - DNA, 120 bp, Artificial Sequence
  ENSG00000240563_7 (sequence is synthesized)
caatgtccatttagaatttacagaaagagagagtaggaaggatggagaggatgaatttgtcaaagaaatgagagaggaaagaaaatttcagaaattgaagaataaagaggaggttttaaa

SEQ ID NO: 773579 - DNA, 120 bp, Artificial Sequence
  ENSG00000240563_8 (sequence is synthesized)
agcctccagagaagaaaaagtgttgatggatgaaggagcagtacttaccctggtagccgacctttcatcagcaacactggatattagtaagcaatggagtaatgtcttcaacattctgag

SEQ ID NO: 773580 - DNA, 120 bp, Artificial Sequence
  ENSG00000240563_9 (sequence is synthesized)
agaaaatgattttgaacctaaatttctgtgtgaagttaaattagcatttaaatgtgatggtgaaataaagacattttcagatctgcaaagccttagaaaatttgccagccaaaaatcttc

SEQ ID NO: 773581 - DNA, 120 bp, Artificial Sequence
  ENSG00000240563_10 (sequence is synthesized)
tgtgaaagaattactgaaagatgtactcccacaaaaggaagaaataaatcaaggaggaagaaaatatggaattcaagaaaaaagggataaaaccctaatagactcaaagcatagagctgg

SEQ ID NO: 773582 - DNA, 120 bp, Artificial Sequence
  ENSG00000240563_11 (sequence is synthesized)
agaaataaccagtgatggcttgagcttcctatttcttaaagaagtaaaagttgctaagccagaggagatgaaaaacttagagactcaagaggaagagttttccgagctagaggagctgga

SEQ ID NO: 773583 - DNA, 120 bp, Artificial Sequence
  ENSG00000240563_12 (sequence is synthesized)
tgaagaggcctcagggatggaggatgatgaagatacctcagggctggaggaggaggaggaagagccctcagggctggaggaggaagaagaagaagaggcttcagggttggaggaggatga

SEQ ID NO: 773584 - DNA, 120 bp, Artificial Sequence
  ENSG00000240563_13 (sequence is synthesized)
ggcctcagggctagaggaggaagaggaacagacttcagaacaggactcaacctttcagggtcatactttggtagatgcaaagcatgaagttgagataaccagtgatggcatggaaactac

SEQ ID NO: 773585 - DNA, 120 bp, Artificial Sequence
  ENSG00000240563_14 (sequence is synthesized)
tttcattgactctgtagaggattctgaatcagaggaggaagaagaaggaaagagctctgaaacaggaaaggtaaagactacctccctgactgagaaaaaagcctcacgtagacaaaaaga

SEQ ID NO: 773586 - DNA, 120 bp, Artificial Sequence
  ENSG00000240563_15 (sequence is synthesized)
aactggcacaccctgtctgaccttatgtttggcctctccctcaaagtcactagagatgagtcatgatgagcataaaaagcattcacatacaaatttgagtatttcaacaggagtcaccaa

SEQ ID NO: 773587 - DNA, 120 bp, Artificial Sequence
  ENSG00000240563_16 (sequence is synthesized)
acttaagaaaacagaagaaaagaaacacagaactctgcacacagaagaactaacatccaaagaagcagacttaacagaggaaacagaagaaaacttgagaagtagtgtgattaatagcat

SEQ ID NO: 773588 - DNA, 120 bp, Artificial Sequence
  ENSG00000240563_17 (sequence is synthesized)
cagagagataaaagaggagattggaaatttgaaaagttcccattcaggtgtcttggaaattgaaaattcagtagatgatctgagtagcagaatggacatacttgaagaaagaatagacag

SEQ ID NO: 773589 - DNA, 120 bp, Artificial Sequence
  ENSG00000240563_18 (sequence is synthesized)
tctagaagatcaaattgaagaattctctaaggatacaatgcaaatgaccaaacagataattagtaaagaaaggcaaagagatatagaggagagatctagaagttgcaacattcgtttgat

SEQ ID NO: 773590 - DNA, 120 bp, Artificial Sequence
  ENSG00000240563_19 (sequence is synthesized)
aggaattccagaaaaggagagttatgagaatagggcagaggacataattaaagaaataattgatgaaaactttgcagaactaaagaaaggttcaagtcttgagattgtcagtgcttgtcg

SEQ ID NO: 773591 - DNA, 120 bp, Artificial Sequence
  ENSG00000240563_20 (sequence is synthesized)
agtacctagtaaaattgatgaaaagagactgactcctagacacatcttggtgaaattttggaattctagtgataaagagaaaataataagggcttctagagagagaagagaaattaccta

SEQ ID NO: 773592 - DNA, 120 bp, Artificial Sequence
  ENSG00000240563_21 (sequence is synthesized)
ccaaggaacaagaatcaggttgacagcagacttatcactggacacactggatgctagaagtaaatggagcaatgtcttcaaagttctgctggaaaaaggctttaatcctagaatcctata

SEQ ID NO: 773593 - DNA, 120 bp, Artificial Sequence
  ENSG00000240563_22 (sequence is synthesized)
tccagccaaaatggcatttgattttaggggtaaaacaaaggtatttcttagtattgaagaatttagagattatgttttgcatatgcccaccttgagagaattactggggaataatatacc

SEQ ID NO: 773594 - DNA, 120 bp, Artificial Sequence
  ENSG00000240563_23 (sequence is synthesized)
ttagcacgccagggtgactacaaacaatatgctttcctcccccagcatgcatccaaaaatcaacaagtaaaacgaaaatacacttctacccagaaggatggacagctaatagcgtacttg

SEQ ID NO: 773595 - DNA, 120 bp, Artificial Sequence
  ENSG00000240563_24 (sequence is synthesized)
gggatgaggagcaaggaatattacagatattacctagatgttaataaagggtatgtttaaaaaaaataggctggtctcaatgtagtgagttatttcagttgatcacagtcagttacagat

SEQ ID NO: 773596 - DNA, 120 bp, Artificial Sequence
  ENSG00000240563_25 (sequence is synthesized)
gatcacagtcagttacagatagaattccttgttttacttcccccccaccacctccctactgcagttgactagtctttttagaatttatattatctggctgggcacggtggctcacacctg

SEQ ID NO: 773597 - DNA, 69 bp, Artificial Sequence
  ENSG00000240563_26 (sequence is synthesized)
gagccacagagcgacactccgtctcaaaaaaaagtatattgtgctagcttgtctaagaataaacttcta

SEQ ID NO: 773598 - DNA, 120 bp, Artificial Sequence
  ENSG00000240563_27 (sequence is synthesized)
aaaagtatattgtgctagcttgtctaagaataaacttctatactgttgggggagggctgcacctgtcaagataacctgtcaatgtagtaggaaaacaggaggggacagtaacagaaaagc

SEQ ID NO: 773599 - DNA, 120 bp, Artificial Sequence
  ENSG00000240563_28 (sequence is synthesized)
acgggaaaagatggcaaggttagttaaaatagaaaagtgctcagttcctcatacctgtaatcccagcagtttagggggccaaggcaggtgggtcacttgagcccaagagttcaaggccat

SEQ ID NO: 773600 - DNA, 120 bp, Artificial Sequence
  ENSG00000240563_29 (sequence is synthesized)
cctgggcaatgtggcgaaagtgtctacaaaaaaatacaaaaagaggaagaaatgatatttcacaagtttgtatcatttgtcatgatgtgactcgaatatattaaatctttttcctttgaa

SEQ ID NO: 773601 - DNA, 120 bp, Artificial Sequence
  ENSG00000240583_0 (sequence is synthesized)
aaggaaaaagttggcaggccgacagcacagccgtgtctgcatccatccagaggaggtctgtgtggtgtggggcgggccaggagcgaagagaggccttcctccctttgtgctccccccgcc

SEQ ID NO: 773602 - DNA, 120 bp, Artificial Sequence
  ENSG00000240583_1 (sequence is synthesized)
ccccggccctataaataggcccagcccaggctgtggctcagctctcagagggaattgagcacccggcagcggtctcaggccaagccccctgccagcatggccagcgagttcaagaagaag

SEQ ID NO: 773603 - DNA, 120 bp, Artificial Sequence
  ENSG00000240583_2 (sequence is synthesized)
ctcttctggagggcagtggtggccgagttcctggccacgaccctctttgtcttcatcagcatcggttctgccctgggcttcaaatacccggtggggaacaaccagacggcggtccaggac

SEQ ID NO: 773604 - DNA, 120 bp, Artificial Sequence
  ENSG00000240583_3 (sequence is synthesized)
aacgtgaaggtgtcgctggccttcgggctgagcatcgccacgctggcgcagagtgtgggccacatcagcggcgcccacctcaacccggctgtcacactggggctgctgctcagctgccag

SEQ ID NO: 773605 - DNA, 120 bp, Artificial Sequence
  ENSG00000240583_4 (sequence is synthesized)
atcagcatcttccgtgccctcatgtacatcatcgcccagtgcgtgggggccatcgtcgccaccgccatcctctcaggcatcacctcctccctgactgggaactcgcttggccgcaatgac

SEQ ID NO: 773606 - DNA, 120 bp, Artificial Sequence
  ENSG00000240583_5 (sequence is synthesized)
ctggctgatggtgtgaactcgggccagggcctgggcatcgagatcatcgggaccctccagctggtgctatgcgtgctggctactaccgaccggaggcgccgtgaccttggtggctcagcc

SEQ ID NO: 773607 - DNA, 120 bp, Artificial Sequence
  ENSG00000240583_6 (sequence is synthesized)
ccccttgccatcggcctctctgtagcccttggacacctcctggctattgactacactggctgtgggattaaccctgctcggtcctttggctccgcggtgatcacacacaacttcagcaac

SEQ ID NO: 773608 - DNA, 120 bp, Artificial Sequence
  ENSG00000240583_7 (sequence is synthesized)
cactggattttctgggtggggccattcatcgggggagccctggctgtactcatctacgacttcatcctggccccacgcagcagtgacctcacagaccgcgtgaaggtgtggaccagcggc

SEQ ID NO: 773609 - DNA, 120 bp, Artificial Sequence
  ENSG00000240583_8 (sequence is synthesized)
caggtggaggagtatgacctggatgccgacgacatcaactccagggtggagatgaagcccaaatagaaggggtctggcccgggcatccacgtagggggcaggggcaggggcgggcggagg

SEQ ID NO: 773610 - DNA, 120 bp, Artificial Sequence
  ENSG00000240583_9 (sequence is synthesized)
gaggggaggggtgaaatccatactgtagacactctgacaagctggccaaagtcacttccccaagatctgccagacctgcatggtcaagcctcttatgggggtgtttctatctctttcttt

SEQ ID NO: 773611 - DNA, 120 bp, Artificial Sequence
  ENSG00000240583_10 (sequence is synthesized)
ctctttctgtttcctggcctcagagcttcctggggaccaagatttaccaattcacccactcccttgaagttgtggaggaggtgaaagaaagggacccacctgctagtcgcccctcagagc

SEQ ID NO: 773612 - DNA, 120 bp, Artificial Sequence
  ENSG00000240583_11 (sequence is synthesized)
atgatgggaggtgtgccagaaagtcccccctcgccccaaagttgctcaccgactcacctgcgcaagtgcctgggattctaccgtaattgctttgtgcctttgggcacggccctccttctt

SEQ ID NO: 773613 - DNA, 120 bp, Artificial Sequence
  ENSG00000240583_12 (sequence is synthesized)
gagggggaagagatcccaggaggtgcagtggagggggcaagctttgctccttcagttctgcttgctcccaagcccctgacccgctcggacttactgcctgaccttggaatcgtccctata

SEQ ID NO: 773614 - DNA, 120 bp, Artificial Sequence
  ENSG00000240583_13 (sequence is synthesized)
tcagggcctgagtgacctccttctgcaaagtggcagggaccggcagagctctacaggcctgcagcccctaagtgcaaacacagcatgggtccagaagacgtggtctagaccagggctgct

SEQ ID NO: 773615 - DNA, 120 bp, Artificial Sequence
  ENSG00000240583_14 (sequence is synthesized)
ctttccacttgccctgtgttctttccccaggggcatgactgtcgccacacgcctctgtgtacatgtgtgcagagcagacaggctacaaagcagagatcgacagacagccaggtagttgga

SEQ ID NO: 773616 - DNA, 120 bp, Artificial Sequence
  ENSG00000240583_15 (sequence is synthesized)
actttctgttccctatggagaggcttccctacacagggcctgctattgcagaatgaagccatttagagggtgaaggagaaatacccatgttacttctctgagttttagttggtctttcca

SEQ ID NO: 773617 - DNA, 120 bp, Artificial Sequence
  ENSG00000240583_16 (sequence is synthesized)
tctatcactgcattatcttgctcattcttcagttctctactccctcttgtcagtgtagacacaggtcaccattatgctggtgtatgtttatcaaagagcacttgagctgtctgaagccca

SEQ ID NO: 773618 - DNA, 120 bp, Artificial Sequence
  ENSG00000240583_17 (sequence is synthesized)
aagcctgaggacagaaagaccctgatgcaggtcagcccatggaggcagatgcccttgctgggcctgggggttttccaagccctcagctggtcctgaccaggatggagcaagctcttccct

SEQ ID NO: 773619 - DNA, 120 bp, Artificial Sequence
  ENSG00000240583_18 (sequence is synthesized)
tgctcatgagctcctgatcagaggcatttgagcagctgaataacctgcacaggcttgctgtatgacccctggccacagccttccctctgcattgacctggaggggagaggtcagccttga

SEQ ID NO: 773620 - DNA, 120 bp, Artificial Sequence
  ENSG00000240583_19 (sequence is synthesized)
cctaatgaggtagctatagttgcagcccaaggacagttcagagatcaggatcagctttgaaggctggattctatctacataagtcctttcaattccaccagggccagagcagctccacca

SEQ ID NO: 773621 - DNA, 120 bp, Artificial Sequence
  ENSG00000240583_20 (sequence is synthesized)
ctgtgcacttagccatgatggcaacagaaaccaagagacacaattacgcaggtatttagaagcagagggacaaccagaaggcccttaactatcaccagtgcatcacatctgcacactctc

SEQ ID NO: 773622 - DNA, 120 bp, Artificial Sequence
  ENSG00000240583_21 (sequence is synthesized)
ttctccattccctagcaggaacttctagctcatttaacagataaagaaactgaggcccacggtttcagctagacaatgatttggccaggcctagtaaccaaggccctgtctctggctact

SEQ ID NO: 773623 - DNA, 120 bp, Artificial Sequence
  ENSG00000240583_22 (sequence is synthesized)
ccctggaccacgaggctgattcctctcatttccagcttctcagtttctgcctgggcaatggccaggggccaggagtggggagagttgtgatggaggggagaggggtcacacccaccccct

SEQ ID NO: 773624 - DNA, 120 bp, Artificial Sequence
  ENSG00000240583_23 (sequence is synthesized)
gcctggttctaggctgctgcacaccaaggccctgcatctgtctgctctgcatatatgtctctttggagttggaatttcattatatgttaagaaaataaaggaaaatgacttgtaaggtcc

SEQ ID NO: 773625 - DNA, 120 bp, Artificial Sequence
  ENSG00000240583_24 (sequence is synthesized)
aagcaatgggagacaggccttggaccaaggaaagagacggggtggagaaggagagagagagggtggagacaatagggaggcaggcacagaggagaaagaggggtggagggagccaggacc

SEQ ID NO: 773626 - DNA, 120 bp, Artificial Sequence
  ENSG00000240583_25 (sequence is synthesized)
gttctggacttttgggtatgaagccgtgtcccctgctgggccttcccacctttttgcatctcttctcctaggagtgctcctgaccatcaccttcatgcctggggctcgccccttgcctct

SEQ ID NO: 773627 - DNA, 120 bp, Artificial Sequence
  ENSG00000240654_0 (sequence is synthesized)
gcacagtatctgggtccagcctgcagccctagggtccagttcagagtctgtcatctgaaccatgaggatctggtggcttctgcttgccattgaaatctgcacagggaacataaactcaca

SEQ ID NO: 773628 - DNA, 120 bp, Artificial Sequence
  ENSG00000240654_1 (sequence is synthesized)
ggacacctgcaggcaagggcaccctggaatccctgggaaccccggtcacaatggtctgcctggaagagatggacgagacggagcgaagggtgacaaaggcgatgcaggagaaccaggacg

SEQ ID NO: 773629 - DNA, 120 bp, Artificial Sequence
  ENSG00000240654_2 (sequence is synthesized)
tcctggcagcccggggaaggatgggacgagtggagagaagggagaacgaggagcagatggaaaagttgaagcaaaaggcatcaaaggtgatcaaggctcaagaggatccccaggaaaaca

SEQ ID NO: 773630 - DNA, 120 bp, Artificial Sequence
  ENSG00000240654_3 (sequence is synthesized)
tggccccaaggggcttgcagggcccatgggagagaagggcctccgaggagagactgggcctcaggggcagaaggggaataagggtgacgtgggtcccactggtcctgaggggccaagggg

SEQ ID NO: 773631 - DNA, 120 bp, Artificial Sequence
  ENSG00000240654_4 (sequence is synthesized)
caacattgggcctttgggcccaactggtttaccgggccccatgggccctattggaaagcctggtcccaaaggagaagctggacccacggggccccagggtgagccaggagtccggggaat

SEQ ID NO: 773632 - DNA, 120 bp, Artificial Sequence
  ENSG00000240654_5 (sequence is synthesized)
aagaggctggaaaggagatcgaggagagaaagggaaaatcggtgagactctagtcttgccaaaaagtgctttcactgtggggctcacggtgctgagcaagtttccttcttcagatatgcc

SEQ ID NO: 773633 - DNA, 120 bp, Artificial Sequence
  ENSG00000240654_6 (sequence is synthesized)
cattaaatttgataagatcctgtataacgaattcaaccattatgatacagcagcggggaaattcacgtgccacattgctggggtctattacttcacctaccacatcactgttttctccag

SEQ ID NO: 773634 - DNA, 120 bp, Artificial Sequence
  ENSG00000240654_7 (sequence is synthesized)
agtaaaaatactgcacaccaaagatgcttacatgagctctgaggaccaggcctctggcggcattgtcctgcagctgaagctcggggatgaggtgtggctgcaggtgacaggaggagagag

SEQ ID NO: 773635 - DNA, 120 bp, Artificial Sequence
  ENSG00000240654_8 (sequence is synthesized)
gttcaatggcttgtttgctgatgaggacgatgacacaactttcacagggttccttctgttcagcagcccgtgacagaggagagtttaaaaatccgccacaccatccatcagaatcagctt

SEQ ID NO: 773636 - DNA, 120 bp, Artificial Sequence
  ENSG00000240654_9 (sequence is synthesized)
gggatgaacttattcagatggttttactttattaattcctccaattattacaataatcataaaaaggtgaaaatggaaaagttattcccaaaactgattctgtgtaacttactatttttc

SEQ ID NO: 773637 - DNA, 120 bp, Artificial Sequence
  ENSG00000240654_10 (sequence is synthesized)
caggagtaaatatttaaaatagctgcatggtttattctaatttatttcacatttcttattcctattatctgaagaatccctcgtctgtgcgtttcttgtgggaagagtgttttaatatca

SEQ ID NO: 773638 - DNA, 120 bp, Artificial Sequence
  ENSG00000240654_11 (sequence is synthesized)
ttttagtgctctgaggagtcatatgaagatgtatccctcatctgtgtttctgaggacattaaggggaaattagagggaaatgtttattcaatttagtactagcaacagctttaagctggt

SEQ ID NO: 773639 - DNA, 120 bp, Artificial Sequence
  ENSG00000240654_12 (sequence is synthesized)
gatgctgtcatactccagaaagctgtagacactgctcattttgtcttttaaaaaaattttattttattttaagttctgggatacatatgcaaaacatgcatgtttgttacataggtaaac

SEQ ID NO: 773640 - DNA, 83 bp, Artificial Sequence
  ENSG00000240654_13 (sequence is synthesized)
ggtgctctccctcccactttgctcattttctaacctaggttttaatcaccattttacccaacaaatcattgttcgatcattat

SEQ ID NO: 773641 - DNA, 120 bp, Artificial Sequence
  ENSG00000240654_14 (sequence is synthesized)
aatcaccattttacccaacaaatcattgttcgatcattatttgccagacttgaatctctatgtgttttctaggactgctctaataaagtacacaaactgggagtctttaaacaacagaaa

SEQ ID NO: 773642 - DNA, 81 bp, Artificial Sequence
  ENSG00000240671_0 (sequence is synthesized)
acacagcatactctggctcccaggtgccagatgtgccatccggatgacccagtctccatcctcattctctgcatctacagg

SEQ ID NO: 773643 - DNA, 120 bp, Artificial Sequence
  ENSG00000240671_1 (sequence is synthesized)
ggagacagagtcaccatcacttgtcgggcgagtcagggtattagcagttatttagcctggtatcagcaaaaaccagggaaagcccctaagctcctgatctatgctgcatccactttgcaa

SEQ ID NO: 773644 - DNA, 120 bp, Artificial Sequence
  ENSG00000240682_0 (sequence is synthesized)
tcctcagttcctgcgagcgtcggcttcgtccgggcacttccagtactctcattcacttcctgtccctttcttttacgtttccgacaaaacagtgtctgtgggcagttagaatcttcagtt

SEQ ID NO: 773645 - DNA, 120 bp, Artificial Sequence
  ENSG00000240682_1 (sequence is synthesized)
tctgtgagcgtccgcttcgtctgggcacttccggtactcccattcagttccggtccctgtcttttacgtttccggcaaaacatcagtgtctgtgggtagttggaatcttcagttcctgtg

SEQ ID NO: 773646 - DNA, 120 bp, Artificial Sequence
  ENSG00000240682_2 (sequence is synthesized)
agcgtcggcgtcttctgggcctgtggagtttcttggacaggggccgcggggctccaggacggcgcccttagcgacaccatggcccgaaatgcagaaaaggccatgacggccttagcaaga

SEQ ID NO: 773647 - DNA, 120 bp, Artificial Sequence
  ENSG00000240682_3 (sequence is synthesized)
tttcgccaggctcagctggaagagggaaaagtgaaggaacgaagaccctttctggcctcagaatgtactgaactgcctaaagctgagaagtggagacgacagatcattggagagatctct

SEQ ID NO: 773648 - DNA, 120 bp, Artificial Sequence
  ENSG00000240682_4 (sequence is synthesized)
aaaaaagtggctcagattcagaatgctggtttaggtgaatttcgaattcgtgacctgaatgatgaaattaacaagctgctaagggagaaaggacactgggaggtccggataaaggagctg

SEQ ID NO: 773649 - DNA, 120 bp, Artificial Sequence
  ENSG00000240682_5 (sequence is synthesized)
ggaggtcctgattatggaaaagttggccctaaaatgctggatcatgaaggaaaagaagtcccaggaaaccgaggttacaagtactttggagcagcaaaagatttgcctggtgttagagag

SEQ ID NO: 773650 - DNA, 120 bp, Artificial Sequence
  ENSG00000240682_6 (sequence is synthesized)
ctgtttgaaaaagaacctcttcctcctcccagaaagacacgtgctgagctcatgaaggcaatcgattttgagtactatggttacctagatgaagatgatggtgttattgtgcctttggaa

SEQ ID NO: 773651 - DNA, 120 bp, Artificial Sequence
  ENSG00000240682_7 (sequence is synthesized)
caggaatatgaaaagaaactcagagccgagttagtggaaaagtggaaagcagagagagaggctcggctggcaagaggagaaaaggaagaggaggaggaagaggaggaagagatcaacatc

SEQ ID NO: 773652 - DNA, 120 bp, Artificial Sequence
  ENSG00000240682_8 (sequence is synthesized)
tatgcagtcaccgaggaggagtcggacgaggaaggcagccaggagaaaggaggggacgacagccagcagaagttcattgctcacgtccctgttccctcgcagcaagagattgaggaggca

SEQ ID NO: 773653 - DNA, 120 bp, Artificial Sequence
  ENSG00000240682_9 (sequence is synthesized)
ctggtgcgaaggaagaaaatggaactcctccagaagtatgcaagcgagaccctgcaggcccaaagtgaagaagccagaaggctcctggggtattaggacccagctggggctctccttgga

SEQ ID NO: 773654 - DNA, 120 bp, Artificial Sequence
  ENSG00000240682_10 (sequence is synthesized)
gttcttccatcccccagtggtacctcaggacccagggctgcagacacaggctggtgctgcaagggctcctgccccattctcagccttccttccctctccttgtctcatgttgaccggagg

SEQ ID NO: 773655 - DNA, 120 bp, Artificial Sequence
  ENSG00000240682_11 (sequence is synthesized)
gtaggggtctgtccctggtcttcctggtaggttttgtacacatattttgctactgtgtggatccatttatttttattgtggagtgtatacaacaggttgcgaactggctgcctgtgtctt

SEQ ID NO: 773656 - DNA, 120 bp, Artificial Sequence
  ENSG00000240682_12 (sequence is synthesized)
attttgacttgcactgccattttgaggggagaagaatcaattagtggcaaacatttaaaaatgcaattttttgcagaccaaagtataattttaaaaaatgcaaattttctaaaagacaca

SEQ ID NO: 773657 - DNA, 79 bp, Artificial Sequence
  ENSG00000240682_13 (sequence is synthesized)
gggatgcacgcaacccacaagtcaatgaccaggtccctctgtgttggttgctgctctgggctctccgttagcccccctc

SEQ ID NO: 773658 - DNA, 120 bp, Artificial Sequence
  ENSG00000240682_14 (sequence is synthesized)
tgttggttgctgctctgggctctccgttagcccccctccacctgctccactcgctcctgcctgggtggcaggaatttgagtttgctattcctgttttataacctgttctgcagaaaccta

SEQ ID NO: 773659 - DNA, 120 bp, Artificial Sequence
  ENSG00000240682_15 (sequence is synthesized)
tttttattaaagatttttataagaaagggaaacctccatgtcttcagcttgttccctgggccaacggctctgaggtgacagtggcattaggatgtgaccagtcactaaggggcactgcct

SEQ ID NO: 773660 - DNA, 120 bp, Artificial Sequence
  ENSG00000240682_16 (sequence is synthesized)
tcctgcaggggagtccctgaagccccagccccaagtgtggcaaagacaggaccagatcccaggagtctaggtgggagtgagccgacccaccatggcgtccgtggccacagctgtagacag

SEQ ID NO: 773661 - DNA, 120 bp, Artificial Sequence
  ENSG00000240682_17 (sequence is synthesized)
ggctccttgcagtgggctgcaccgtggcctgctgaaagcacacagtggacacgagctgagtccagagcttcctctgaactggggcttagctctccagtggggaaccatggtcagcggctg

SEQ ID NO: 773662 - DNA, 120 bp, Artificial Sequence
  ENSG00000240682_18 (sequence is synthesized)
tagcccctgggcaagatggtgcctggcttcctgccctctgcagggtcatgggagtgtctgggaactcagggtcagggccagatggctgttcctggggcctggggctccagctcaggctgt

SEQ ID NO: 773663 - DNA, 120 bp, Artificial Sequence
  ENSG00000240682_19 (sequence is synthesized)
ttgggaataggaggaactcttggcttggagaagcccatcacacagcgggaggcctgggatggttggtctgcggggagcagctcagactgggggtggcagagccgtgtgtggctgtgtgtg

SEQ ID NO: 773664 - DNA, 120 bp, Artificial Sequence
  ENSG00000240682_20 (sequence is synthesized)
gccaagtcgggagagtggccagtgctgggccctctctaaggagcccgagggccacaaggactgtggaaaaggtctgagtgagggagtcgggagctagtggctaagggacttgcttgagga

SEQ ID NO: 773665 - DNA, 120 bp, Artificial Sequence
  ENSG00000240682_21 (sequence is synthesized)
cgctccgtgcggccacaaggagaggcccaggcaggaccaggtcaggaggaggctggggcagaggccctggcaggaggtgggtgggcttggtggggatgggagtagccagggtgtaggtga

SEQ ID NO: 773666 - DNA, 120 bp, Artificial Sequence
  ENSG00000240682_22 (sequence is synthesized)
ggatggggaaggggcccccctgcctcctggcttccctgagggctgggctggccaatcccagccctcagtcaagcccggaggcaaatgtgtgcagggaggagaggtgtccaggttgaagct

SEQ ID NO: 773667 - DNA, 120 bp, Artificial Sequence
  ENSG00000240682_23 (sequence is synthesized)
ttgggagcccttggaggcagcaaggcagactcgcctctgggacccagcacccagcttgggcctgcaggtggggactcaggagtgaatatcgtgggggctttgagcaagaccctctgggcc

SEQ ID NO: 773668 - DNA, 120 bp, Artificial Sequence
  ENSG00000240682_24 (sequence is synthesized)
cagcctcaccttccatactttgaagtcaaggagtggacctgtgctgtctcagtttgctctggggtctgggcagtcctgtggtttgggcagaggcctcagagggccctagggacagactga

SEQ ID NO: 773669 - DNA, 120 bp, Artificial Sequence
  ENSG00000240682_25 (sequence is synthesized)
cccaggtctgagcctcttgggagcgtgcggatggccggcctcagacaggcctggttgtgggtttgtcttccaaggggcacacgcgcactctggtgcttcctggcattcagaagagaatgg

SEQ ID NO: 773670 - DNA, 120 bp, Artificial Sequence
  ENSG00000240682_26 (sequence is synthesized)
ggaatccagacatcaggccttccttctccctgggaaggatggcaggtgcttggagccaggcctgtcttgagagccagggctctgggtcttcctcctccagtgccctgttccacgccttca

SEQ ID NO: 773671 - DNA, 120 bp, Artificial Sequence
  ENSG00000240682_27 (sequence is synthesized)
gtgcacaaagcactcccctcctgggatctcttcagggatccccgggatgcaaactggccagggattagaattccacatttgagcaaacagactgagagtggagaagcacccagctggaca

SEQ ID NO: 773672 - DNA, 120 bp, Artificial Sequence
  ENSG00000240682_28 (sequence is synthesized)
tcctctaggtgttcctggcagaggcccttgctacttgtctgtgcccaaaggccctagagggtcctagatgtgggacaaggtctcagcagggctccagtcccaggcctggaaacagctggg

SEQ ID NO: 773673 - DNA, 120 bp, Artificial Sequence
  ENSG00000240682_29 (sequence is synthesized)
ggtgggggaagctggctgggtgggtgtggttatcttttcccagcttgtggctccgaggtgacagaaccaatctcaggaggctttgtttggttaataaaatctactgaatggtttatttta

SEQ ID NO: 773674 - DNA, 120 bp, Artificial Sequence
  ENSG00000240694_0 (sequence is synthesized)
agaccaccagctaatggatgcggagcggagggcccgctgaccgctctccgcgcctggagcagcttggcttggctggagctaagagccagacacaccactgtgtggaggtgggtgatgtct

SEQ ID NO: 773675 - DNA, 120 bp, Artificial Sequence
  ENSG00000240694_1 (sequence is synthesized)
tcctgtgctaaaaggtgaataaataagctcctcacctctcgcggaacactcgggaacacatcaacaggggtccaagccgccctgctgggaggcttctcttcaagagttctgggtcccaga

SEQ ID NO: 773676 - DNA, 120 bp, Artificial Sequence
  ENSG00000240694_2 (sequence is synthesized)
gtggaaggcattttcccatcaactggagagagacgaaacatcagagaccaggaggctgtggagaaagcagctgtcccaggtgcctcaactatcagagaagggtcagcgtcacgtggctgc

SEQ ID NO: 773677 - DNA, 120 bp, Artificial Sequence
  ENSG00000240694_3 (sequence is synthesized)
cagcatctttgagaaaatcactggcaatcggacttcagagctgcgggcacaggtgtggttagaactgagatacgacctgcccacctgggtcaggcctaaagacaagaagtcctgagttct

SEQ ID NO: 773678 - DNA, 120 bp, Artificial Sequence
  ENSG00000240694_4 (sequence is synthesized)
tgccactgagtaggccagggtcatttgtccagaaaactttgtgactgtctttgagtgacctagtctgggacccattcattggtgggttctaaggttagaagctcatccaggatattttca

SEQ ID NO: 773679 - DNA, 120 bp, Artificial Sequence
  ENSG00000240694_5 (sequence is synthesized)
atattaagtcagtgcatagctgcaccactaacaaattggtgcctgtagagtcagagtgggtcaattcttaggacaatggcgctggcactgttagaggactggtgcaggataatgagtgtg

SEQ ID NO: 773680 - DNA, 120 bp, Artificial Sequence
  ENSG00000240694_6 (sequence is synthesized)
gatgagcagaagtcactgatggttacggggataccggcggactttgaggaggctgagattcaggaggtccttcaggagactttaaagtctctgggcaggtatagactgcttggcaagata

SEQ ID NO: 773681 - DNA, 120 bp, Artificial Sequence
  ENSG00000240694_7 (sequence is synthesized)
ttccggaagcaggagaatgccaatgctgtcttactagagcttctggaagatactgatgtctcggccattcccagtgaggtccagggaaaggggggtgtctggaaggtgatctttaagacc

SEQ ID NO: 773682 - DNA, 120 bp, Artificial Sequence
  ENSG00000240694_8 (sequence is synthesized)
cctaatcaggacactgagtttcttgaaagattgaacctgtttctagaaaaagaggggcagacggtctcgggtatgtttcgagccctggggcaggagggcgtgtctccagccacagtgccc

SEQ ID NO: 773683 - DNA, 120 bp, Artificial Sequence
  ENSG00000240694_9 (sequence is synthesized)
tgcatctcaccagaattactggcccatttgttgggacaggcaatggcacatgcgcctcagcccctgctacccatgagataccggaaactgcgagtattctcagggagtgctgtcccagcc

SEQ ID NO: 773684 - DNA, 120 bp, Artificial Sequence
  ENSG00000240694_10 (sequence is synthesized)
ccagaggaagagtcctttgaggtctggttggaacaggccacggagatagtcaaagagtggccagtaacagaggcagaaaagaaaaggtggctggcggaaagcctgcggggccctgccctg

SEQ ID NO: 773685 - DNA, 120 bp, Artificial Sequence
  ENSG00000240694_11 (sequence is synthesized)
gacctcatgcacatagtgcaggcagacaacccgtccatcagtgtagaagagtgtttggaggcctttaagcaagtgtttgggagcctagagagccgcaggacagcccaggtgaggtatctg

SEQ ID NO: 773686 - DNA, 120 bp, Artificial Sequence
  ENSG00000240694_12 (sequence is synthesized)
aagacctatcaggaggaaggagagaaggtctcagcctatgtgttacggctagaaaccctgctccggagagcggtggagaaacgcgccatccctcggcgtattgcggaccaggtccgcctg

SEQ ID NO: 773687 - DNA, 120 bp, Artificial Sequence
  ENSG00000240694_13 (sequence is synthesized)
gagcaggtcatggctggggccactcttaaccagatgctgtggtgccggcttagggagctgaaggatcagggcccgccccccagcttccttgagctaatgaaggtaatacgggaagaagag

SEQ ID NO: 773688 - DNA, 120 bp, Artificial Sequence
  ENSG00000240694_14 (sequence is synthesized)
gaggaagaggcctcctttgagaatgagagtatcgaagagccagaggaacgagatggctatggccgctggaatcatgagggagacgactgaaaaccacctgggggcaggacccacagccag

SEQ ID NO: 773689 - DNA, 120 bp, Artificial Sequence
  ENSG00000240694_15 (sequence is synthesized)
tgggctaagacctttaaaaaatttttttctttaatgtatgggactgaaatcaaaccatgaaagccaattattgaccttccttccttccttccttccctcccttcctccttctctccttct

SEQ ID NO: 773690 - DNA, 120 bp, Artificial Sequence
  ENSG00000240694_16 (sequence is synthesized)
ctcctcctctctcctctcctctcctctctttccttccttccttccttttttctttttctctttcttctttatttcttgggtctcactctcatcacccaggctagagtgcagtggcacaaa

SEQ ID NO: 773691 - DNA, 90 bp, Artificial Sequence
  ENSG00000240694_17 (sequence is synthesized)
ctcactgcagccttgacttcccaggctcaggctcaggtgatcctcacaccttagcctcccaagtacagctattcttttgtatttttggta

SEQ ID NO: 773692 - DNA, 89 bp, Artificial Sequence
  ENSG00000240694_18 (sequence is synthesized)
accaccatgcctagctattctgtgttgctcaggctggtctggaacccctaggctcaaatgatgtgcccaactcggcctcccaaagtgct

SEQ ID NO: 773693 - DNA, 120 bp, Artificial Sequence
  ENSG00000240694_19 (sequence is synthesized)
cctatgtagattattaatgaacaaaagattaaactccaaatattaaatagtaagcctgaaggaatctgaaacacttgtacttccaattttctttaaataatcccaaatagaccagaattg

SEQ ID NO: 773694 - DNA, 120 bp, Artificial Sequence
  ENSG00000240694_20 (sequence is synthesized)
gcccataccatagaagaaagaattggcagtcaaaaaaaaaaataccttttgtaatgtttgaaaaataaagctgtttgacttgtcaggtgttttcctttctcaaatcagcaaattctctct

SEQ ID NO: 773695 - DNA, 120 bp, Artificial Sequence
  ENSG00000240694_21 (sequence is synthesized)
gagtgcctggctttgtgagacactgtacaaggagttacaagactacagctataacctgcagttgagcagttataaacctacaaaatgggccctgccctcagagaggttccagtctagatg

SEQ ID NO: 773696 - DNA, 120 bp, Artificial Sequence
  ENSG00000240694_22 (sequence is synthesized)
aggagctgatctagacaggtaaaaggctaactaaccctttgtgtaaataagttcatcaccccagtaaaagtgtcatcacccagtgaataggaccacctctgcctgcagatttttgttgtt

SEQ ID NO: 773697 - DNA, 120 bp, Artificial Sequence
  ENSG00000240694_23 (sequence is synthesized)
gttgttgtcattgttgttgttgttttaacctgggaagtgttcttcctgcctttctgctaggtgtcagatagatggtcccagagctaggtgctgtgtcaggccctgaagacacagatgact

SEQ ID NO: 773698 - DNA, 120 bp, Artificial Sequence
  ENSG00000240694_24 (sequence is synthesized)
caacctaagctttactttccagaggtccacagcctgagaggtgtccccaaagaaagggggacatgaggggactgcatgcttgagagcagggttgtttagggcaggtttggatttagtgag

SEQ ID NO: 773699 - DNA, 120 bp, Artificial Sequence
  ENSG00000240694_25 (sequence is synthesized)
caggctggtttgcttagagaaggcttttagtggcaacaaaggatgaagaggagagaaaaggaactcacatttattgagggcctactgtgtgcaaagtgtttcatgtatatctcattgaat

SEQ ID NO: 773700 - DNA, 120 bp, Artificial Sequence
  ENSG00000240694_26 (sequence is synthesized)
gtatacagccaccctgttgtggtataattttgctctttataaagagaaagaccgaagctcagatgagttaagtggtctcctcaacaccaaaatgccaagaagtgatggagcctagacaga

SEQ ID NO: 773701 - DNA, 120 bp, Artificial Sequence
  ENSG00000240694_27 (sequence is synthesized)
agcccagaactttctgactcacactagtccatcctctaccatcacgatgactttcaaattgtgctctgcagttctgcagattttctagcagtgccatctccaaaatgtgttttaaactct

SEQ ID NO: 773702 - DNA, 88 bp, Artificial Sequence
  ENSG00000240694_28 (sequence is synthesized)
taaactctttaagtctctagtaaatgcagctagattcaaatgggctgataaccaaattttaacacatcagcattcaccaccaggttta

SEQ ID NO: 773703 - DNA, 120 bp, Artificial Sequence
  ENSG00000240694_29 (sequence is synthesized)
taaccaaattttaacacatcagcattcaccaccaggtttacttttattttcagattggctcattttgtgcagaccttagagcaaagtttcctttatggtatctgtgtacgtatccaaact

SEQ ID NO: 773704 - DNA, 120 bp, Artificial Sequence
  ENSG00000240694_30 (sequence is synthesized)
tcttttaattgttcacagattttaaaagcggtagcaccacatggttgtgtagatcagacctgtgtatttagatcagacctgtgtatcacgtaagtgtgtgagtgcagtgcagatgagcac

SEQ ID NO: 773705 - DNA, 120 bp, Artificial Sequence
  ENSG00000240694_31 (sequence is synthesized)
catttagttatatgtgctaggcaaatctccaacacagttgatgtgtagtcttgtggtagatttgtgcatactgtaagcaaattgcttagcttctctagacatcagtttccacatctgaaa

SEQ ID NO: 773706 - DNA, 120 bp, Artificial Sequence
  ENSG00000240694_32 (sequence is synthesized)
aataagaagatgagagtacacggttgttatgaacaaatgacttaatgctttttaagcacgttgcatgacatctggaacacagaaagccctcaatacattgaagctcttaggattttcacg

SEQ ID NO: 773707 - DNA, 120 bp, Artificial Sequence
  ENSG00000240694_33 (sequence is synthesized)
atgttcctgtctgctcaatgcatgctttctttattgttctgacagttgtgtggtaacaagctaatatgcttccagttgacttccagtctaccctggtgttagaaaccgtttcatctctta

SEQ ID NO: 773708 - DNA, 120 bp, Artificial Sequence
  ENSG00000240694_34 (sequence is synthesized)
ttgtaaatttgagtgcttgttgttttttatatttgtgatgactcttccagcagttgttgacaattgttagaggtttgacttttaaataattacttattttttctgattgtggttcagttt

SEQ ID NO: 773709 - DNA, 120 bp, Artificial Sequence
  ENSG00000240694_35 (sequence is synthesized)
aactgaagaatatcctgagattgtaagaaaagcattttttaaaaggtatcacttgtgatcatttatctttctaaattctatttttaatactgttccaccaaagtgatgcagtggttacca

SEQ ID NO: 773710 - DNA, 120 bp, Artificial Sequence
  ENSG00000240694_36 (sequence is synthesized)
tgacaccctaatttcatgtgtttttgtatttatgaaaatagtttcattgtcatttattggcggtatacaaagtaaaatgttataaatgtgaagttataaaataaatatatgctaataaaa

SEQ ID NO: 773711 - DNA, 120 bp, Artificial Sequence
  ENSG00000240694_37 (sequence is synthesized)
agaaaaaaaagtcacagtgagcaaagaaggggtctgacagagtgggacaaatgcaagcgcagtgtaaagcagaaccgccatctgcccccagttccattccagattagagtatggatgctt

SEQ ID NO: 773712 - DNA, 120 bp, Artificial Sequence
  ENSG00000240694_38 (sequence is synthesized)
ccaaggaaagagagtgctgtgtagtaaaactgaacattgtttcaccaggggtccaagccgccctgctgggaggcttctcttcaagagttctgggtcccagagtggaaggcattttcccat

SEQ ID NO: 773713 - DNA, 120 bp, Artificial Sequence
  ENSG00000240694_39 (sequence is synthesized)
gctcggggaagcggcaaagttggatctgggagggcgtccgctgcggctgcgggagccgaaaggctgccagttcccggcagcgctgggaggagggaggcgcgggcggggcgcggcgccggg

SEQ ID NO: 773714 - DNA, 120 bp, Artificial Sequence
  ENSG00000240694_40 (sequence is synthesized)
gaggggagcggtgctcaggggagggctggaggggagggaaggagagagagaggggagggcggcaccgcccctagccccgcgctccggaagtgaagcggccagaccaccagctaatggatg

SEQ ID NO: 773715 - DNA, 76 bp, Artificial Sequence
  ENSG00000240694_41 (sequence is synthesized)
gctccggaagtgaagcggccagaccaccagctaatggatgcggagcggagggcccgctgaccgctctccgcgcctg

SEQ ID NO: 773716 - DNA, 120 bp, Artificial Sequence
  ENSG00000240694_42 (sequence is synthesized)
aagtgcgggtgcgcatctggtgcggagtaggaggtaggatgtgggctgtgagtgccatgaattgtgtggggccaagcaggggaaaggtgtgtaggaacttggtgtgtgtgtgcagtagct

SEQ ID NO: 773717 - DNA, 120 bp, Artificial Sequence
  ENSG00000240694_43 (sequence is synthesized)
agccccgcgctccggaagtgaagcggccagaccaccagctaatggatgcggagcggagggcccgctgaccgctctccgcgcctggcttggcttggctggagctaagagccagacacacca

SEQ ID NO: 773718 - DNA, 120 bp, Artificial Sequence
  ENSG00000240694_44 (sequence is synthesized)
acagtcgcagcgtttcccgggttaccagatgccacgtgtttggggagtaagtgcgggtgcgcatctggtgcggagtaggagagcagcttggcttggctggagctaagagccagacacacc

SEQ ID NO: 773719 - DNA, 120 bp, Artificial Sequence
  ENSG00000240720_0 (sequence is synthesized)
attcaaaggaaaaaacatgaaaattaaaatcaagttacaattttgtattggcataaaacatatcagcaaataagatgtctgaaaaggagggtatgtcagaagtgctagaggatactatta

SEQ ID NO: 773720 - DNA, 120 bp, Artificial Sequence
  ENSG00000240720_1 (sequence is synthesized)
gtcaatttaggaaagaatctagatcacagtcaatgaaggagcctggctttattaaagaaacatcaaatttgataaacgaagcttctgattacctggaagggaaatcttctaaccagattt

SEQ ID NO: 773721 - DNA, 120 bp, Artificial Sequence
  ENSG00000240720_2 (sequence is synthesized)
atgaaacacatcctagacagaatacattagagtcaacatcttcctctggaaggaagtctaagagaaatgaagaacaaaagaaaaatcttcaattttctgaaacaagcactagaacaggaa

SEQ ID NO: 773722 - DNA, 120 bp, Artificial Sequence
  ENSG00000240720_3 (sequence is synthesized)
cttcacagagtttatcatcactaactgggaggactgcagaatatcaggctttggttaacttcctatctcatgaaacagtaggagaagttagtccacaagtctctgaagaaaatcagaaac

SEQ ID NO: 773723 - DNA, 120 bp, Artificial Sequence
  ENSG00000240720_4 (sequence is synthesized)
aacttggcctaggggcagataactttacagttaaccttgaggccaagggtttacaggaatttcctaaggacattttaaaaatcaaatatgtaaaatatctatatttagacaagaatcaaa

SEQ ID NO: 773724 - DNA, 120 bp, Artificial Sequence
  ENSG00000240720_5 (sequence is synthesized)
tcaaaacatttcaaggggcagactcaggtgatctgttaggacttgaaattctatccctgcaagaaaatggattatcatcacttccatctgaaattcagttacttcataatttaaggatat

SEQ ID NO: 773725 - DNA, 120 bp, Artificial Sequence
  ENSG00000240720_6 (sequence is synthesized)
taaatgtcagtcataaccacatatcacatatacctaaagaaatatctcagcttgggaatatcagacaactctttttttataacaattacattgaaaattttccttctgacttagaatgtc

SEQ ID NO: 773726 - DNA, 120 bp, Artificial Sequence
  ENSG00000240720_7 (sequence is synthesized)
ttggaaacttggaaattttaagtttgggtaaaaataagttaagacatataccagatactctgcctagtttaaaaaccttgagggttctcaatttggaatataatcagttaacaacatttc

SEQ ID NO: 773727 - DNA, 120 bp, Artificial Sequence
  ENSG00000240720_8 (sequence is synthesized)
ctaaagctctctgcttccttccaaagttaatttcactagaccttactggaaacctaataagcagtttgccaaaagaaattagagagcttaaaaatttagaaacacttttaatggatcaca

SEQ ID NO: 773728 - DNA, 120 bp, Artificial Sequence
  ENSG00000240720_9 (sequence is synthesized)
ataagcttacctttctggctgtagaaatttttcagttactcaaaataaaagaactccaactggccgacaataaattggaagttatttcacacaaaattgagaatttcagggaacttagga

SEQ ID NO: 773729 - DNA, 120 bp, Artificial Sequence
  ENSG00000240720_10 (sequence is synthesized)
ttcttatacttgataaaaatttattgaaaaatataccagagaaaatatcttgctgtgcaatgttggaatgccttagtcttagtgataataaattaacagaactccctaagtacatccata

SEQ ID NO: 773730 - DNA, 120 bp, Artificial Sequence
  ENSG00000240720_11 (sequence is synthesized)
tccatgtaaacagaaataatatggtaaaaataactgactgtatctcacatcttaataacatatgcagtctagaattttcaggaaacataatcacagatgttcccattgaaataaaaaact

SEQ ID NO: 773731 - DNA, 120 bp, Artificial Sequence
  ENSG00000240720_12 (sequence is synthesized)
gccaaaaaataattaaaattgaattgagttataacaaaataatgtattttccattgggactgtgtgctttagattctctttattatttgagtgttaatggaaattatatttcagaaatac

SEQ ID NO: 773732 - DNA, 120 bp, Artificial Sequence
  ENSG00000240720_13 (sequence is synthesized)
ctgtggatatatctttcagtaaacaactgcttcatttagaattgagtgaaaacaaactcctcatattttctgagcacttttgttctcttattaatcttaaatacctggatcttggtaaaa

SEQ ID NO: 773733 - DNA, 120 bp, Artificial Sequence
  ENSG00000240720_14 (sequence is synthesized)
accaaataaagaaaattccagcatcaatttctaatatgatatcactccacgtacttattttatgctgtaataaatttgaaactttccctagagaattgtgtactttagaaaatttgcaag

SEQ ID NO: 773734 - DNA, 120 bp, Artificial Sequence
  ENSG00000240720_15 (sequence is synthesized)
tacttgatctttcggaaaaccaattacagaaaatctcttcagacatctgtaatttaaaaggaatccagaaattaaacttctcaagcaatcaatttatacattttcctattgaactgtgcc

SEQ ID NO: 773735 - DNA, 120 bp, Artificial Sequence
  ENSG00000240720_16 (sequence is synthesized)
aacttcaatcactggaacagctgaatataagtcagataaaagggagaaagctaacaagacttccaggagagctatctaatatgactcaacttaaagaacttgatatctcaaataatgcaa

SEQ ID NO: 773736 - DNA, 120 bp, Artificial Sequence
  ENSG00000240720_17 (sequence is synthesized)
tcagagagattccaagaaatataggagaattgagaaatttggttagtttacatgcatacaataatcaaataagttatcttccaccatctttgctatctttaaatgatctgcagcaactaa

SEQ ID NO: 773737 - DNA, 120 bp, Artificial Sequence
  ENSG00000240720_18 (sequence is synthesized)
acctgagtggaaataatctgacagctctacctagtgctatctacaatattttttcactgaaggagataaattttgatgacaaccctttgctgagacctccagtggaaatctgtaaaggaa

SEQ ID NO: 773738 - DNA, 120 bp, Artificial Sequence
  ENSG00000240720_19 (sequence is synthesized)
aacagttgtatactattgcacgctatctacagagggcagatgaaagagatgagaaaattttagagaagatattcaagatagttgccaacaacatcactgaaaccaattttgaatttttat

SEQ ID NO: 773739 - DNA, 120 bp, Artificial Sequence
  ENSG00000240720_20 (sequence is synthesized)
gtcaaaaactaaacctggcaaactcagaaactgatatgcctacaaagagcactgtttcattaagtgagagagcccaccaagcacttgttatatggaaaacacaaagtaacaagttatcac

SEQ ID NO: 773740 - DNA, 120 bp, Artificial Sequence
  ENSG00000240720_21 (sequence is synthesized)
taactgctgctgctttaagagatcaactaattcgagcactaactatgataggagcatatgaaattatggacaaaataacagctttaaatctttttacgcgtgcaattaaattctaaccag

SEQ ID NO: 773741 - DNA, 120 bp, Artificial Sequence
  ENSG00000240720_22 (sequence is synthesized)
gagccacggcccggagaggcgtcagtgctgggctgcgcctgcggaggtcctcgcaattgctggactcaaccgcgcgcgccccctaccggtcctgcgaaggagccgcagccgccgcgggag

SEQ ID NO: 773742 - DNA, 120 bp, Artificial Sequence
  ENSG00000240720_23 (sequence is synthesized)
ggagggcctcggagcaagacaatcccaccaagatggactcgggttgattaacgtgagtgaacctctgaggaccagaatccagactagtaattctccatcccggctgctcgttagatgccc

SEQ ID NO: 773743 - DNA, 120 bp, Artificial Sequence
  ENSG00000240720_24 (sequence is synthesized)
ggaccgacccccccagaccaattcaatcagaacattcggaggggcttgtaaaatctcccggggagattccggtacgaaagccaaagactcagacgcccgttctccacccgcctgcagcgg

SEQ ID NO: 773744 - DNA, 120 bp, Artificial Sequence
  ENSG00000240720_25 (sequence is synthesized)
ccagcgcgggtccctcttagggaattgaatgcaggccccaggcctcctcctcgagtatcccagtgtgaccgatggccagctcacaaacgcgcagtgggtgcggccgcgccagggcgcagc

SEQ ID NO: 773745 - DNA, 120 bp, Artificial Sequence
  ENSG00000240720_26 (sequence is synthesized)
ttgtatactattgcacgctatctacagagggcagatgaaagagatggtctgcagcttcactcttgaagccagcaagaccaggaacccaccgggagaaaggaacaactccagacgcgccgc

SEQ ID NO: 773746 - DNA, 69 bp, Artificial Sequence
  ENSG00000240720_27 (sequence is synthesized)
gcgccatcttaagagctgtaacactgaccgtgagggtcggcttcatacttgaagtcagtgagacgaaga

SEQ ID NO: 773747 - DNA, 120 bp, Artificial Sequence
  ENSG00000240720_28 (sequence is synthesized)
gtgagggtcggcttcatacttgaagtcagtgagacgaagaacccaccaattccggacacaatttgacttaagccaggccattaacagtttcttttggatctttttgcagagctactatgg

SEQ ID NO: 773748 - DNA, 120 bp, Artificial Sequence
  ENSG00000240720_29 (sequence is synthesized)
aagatgcactctttctgcgggtaggttatgagtcttttagtcttggtatatcatgcacagtgtgtagtagtctgccgagagctggatgccaagagagagacagaaccttgtttatgttgt

SEQ ID NO: 773749 - DNA, 120 bp, Artificial Sequence
  ENSG00000240720_30 (sequence is synthesized)
ctgatcctcaatccccatacttctgcactttttacttttcacccacttaaggagtgtgacctgggtttccataactttgaatggaaagagacctaatacaagtggttaagaatattgtgg

SEQ ID NO: 773750 - DNA, 120 bp, Artificial Sequence
  ENSG00000240720_31 (sequence is synthesized)
cgagactctgtctcaaaaaaaaaaaaatattgtggacatagtgcagtttttgttaccttaaaaaataattttctatgtgagaccatattaaataaatttattttgcaggttaaaatttaa

SEQ ID NO: 773751 - DNA, 120 bp, Artificial Sequence
  ENSG00000240720_32 (sequence is synthesized)
taaatttattttgcaggttaaaatttaaagtgtatattttgttgccattttggaagtgcaacataacattggtttaacaactatacagcctgtgtctctaatccttccctattttaaaac

SEQ ID NO: 773752 - DNA, 120 bp, Artificial Sequence
  ENSG00000240720_33 (sequence is synthesized)
ttcttgcagtagggatgagaacctgtgggtttatattggcttaatgatggttgttgttaatgttttccactggaggcaaggtacttccatagaacattaaagtgtgaaggaccttggaaa

SEQ ID NO: 773753 - DNA, 120 bp, Artificial Sequence
  ENSG00000240747_0 (sequence is synthesized)
gtttttgtcgcgcgaggttttggtttgtgaggatcggcgagtggcgcccaccatctctgcttgctgaaaagctgcagaggccgccaggagcccacgcacctgagacttttacctttaccc

SEQ ID NO: 773754 - DNA, 120 bp, Artificial Sequence
  ENSG00000240747_1 (sequence is synthesized)
agaaaggaataaaagaggtcagatgatgacagctgtgtccttaacaaccaggccccaggaatcagtggcttttgaggacgtggctgtgtacttcactacgaaggaatgggccatcatggt

SEQ ID NO: 773755 - DNA, 120 bp, Artificial Sequence
  ENSG00000240747_2 (sequence is synthesized)
cttccaaaccagctttggtctctcatctggagcaagggaaagagtcctgtttcacccagccacagggagtcctaagcaggaatgactggagagcaggctggataggatacttggaactaa

SEQ ID NO: 773756 - DNA, 120 bp, Artificial Sequence
  ENSG00000240747_3 (sequence is synthesized)
gaagatatacttacttagctaaagcagtgttacgtagaatagtatcaaaaatttttcgaaatcgtcaatgctgggaagacaggagaaaagcttaattcttgacatttaaataccagtttt

SEQ ID NO: 773757 - DNA, 120 bp, Artificial Sequence
  ENSG00000240747_4 (sequence is synthesized)
ccaagtaaggagttgatgtaagagccaccttaaacgatgtcaaatacacattttctttttctgtagactggtagatttaatgtttttcattcattaaaataactcattttgatgtacaaa

SEQ ID NO: 773758 - DNA, 120 bp, Artificial Sequence
  ENSG00000240747_5 (sequence is synthesized)
agttattttcgcctgccatagtgtacaccagtcttgaaacttgttactgtcgtagagcaaccaaaaatttgagaataccgaattgtattccctacccgtccccaggatgtcccattttgg

SEQ ID NO: 773759 - DNA, 120 bp, Artificial Sequence
  ENSG00000240747_6 (sequence is synthesized)
aaaatatggagccctgcgatctggattggctcataagaatgttaaatctaaaaagactgatcgtatccgtcatgcacctaatgtgtgtccagtgtttaacatagtttcctatgtacagga

SEQ ID NO: 773760 - DNA, 120 bp, Artificial Sequence
  ENSG00000240747_7 (sequence is synthesized)
ttggagatgtcgaaagatttcttgacctcttaacattgttcattatattcttttctttagattctctgaacttttactccactgtcataatttaattgtcaaggttcataggataacatt

SEQ ID NO: 773761 - DNA, 120 bp, Artificial Sequence
  ENSG00000240747_8 (sequence is synthesized)
cgatgtccctgccattagtcaactatgttgggagtgtgatttgttctccaatgtggcttgttatttatgtttcatctccacttagctttccccataggaagacacttccatagggagtgt

SEQ ID NO: 773762 - DNA, 120 bp, Artificial Sequence
  ENSG00000240747_9 (sequence is synthesized)
tttgtgttttgtagggtgacctctgttgtagttctatttccagatgatttccctttcgcagattgtcagctgtgcagatcagacctttttgcttaagtccttttgtttgatacgctaatc

SEQ ID NO: 773763 - DNA, 120 bp, Artificial Sequence
  ENSG00000240747_10 (sequence is synthesized)
ctattaagtatccactgtaagggacatttactgccgatacaatgacagtatcatgattttagagaattagattccacaattacaagggttaactatttacttagtatgaatcactgcttt

SEQ ID NO: 773764 - DNA, 120 bp, Artificial Sequence
  ENSG00000240747_11 (sequence is synthesized)
tgttaccctttcttggacagaaaccatccatgaatttagcagcattacttgtgtaggtttacattgtgttttcttttaaagtacttctctttacactcataaatatttctccttactgga

SEQ ID NO: 773765 - DNA, 120 bp, Artificial Sequence
  ENSG00000240747_12 (sequence is synthesized)
ctccctgttaacttccaagatgccttttctggcgtctcctgacagctgtttctctgacaccttcagcttcctctaccttcctgaatggctttctggattcactaagaagagtcattggag

SEQ ID NO: 773766 - DNA, 120 bp, Artificial Sequence
  ENSG00000240747_13 (sequence is synthesized)
ggaggggcagtgcactggctttatagtgttttgtctgatgctgttgcagtaccctaagacttacagcaaactgcagatatggagttggaacggaagttgtttttaaggtctatgagtata

SEQ ID NO: 773767 - DNA, 120 bp, Artificial Sequence
  ENSG00000240747_14 (sequence is synthesized)
tgcacttttatgtgtttgtttatatgctttttgaatatctctgatccaactgttggcagctctttgtatttcaggtgttgtctttaatgcataaatattgatgattcactcttgaaaggc

SEQ ID NO: 773768 - DNA, 120 bp, Artificial Sequence
  ENSG00000240747_15 (sequence is synthesized)
agagttggaactagtttagaaatgaaattgttttgtttccttatactataacatttggaacttgaagtatttgggacatgttatgaagttgatggattcttttaatatggtaatgttttc

SEQ ID NO: 773769 - DNA, 120 bp, Artificial Sequence
  ENSG00000240747_16 (sequence is synthesized)
tttctcatcacccactccaaacacctttataaaactgaatgagtatcttgtatttaggggaaaaatagtagtagggaggcatcaaaatatttctgataactattttcaaagtctgttcaa

SEQ ID NO: 773770 - DNA, 120 bp, Artificial Sequence
  ENSG00000240747_17 (sequence is synthesized)
ctttcattacttcagtcatagaaactcttgttctaatattaagtagcataggaggaaaaacatgctgaggtcttacagtgtttaatggatttcttttatataactcattcctatctgtac

SEQ ID NO: 773771 - DNA, 120 bp, Artificial Sequence
  ENSG00000240747_18 (sequence is synthesized)
tacataactcattcttatctgtactgtatggatttcagggatcttaactgtttagaattccaactttcttttctgcctataacactctgtccactgtctaccttagtttccttttctgtt

SEQ ID NO: 773772 - DNA, 120 bp, Artificial Sequence
  ENSG00000240747_19 (sequence is synthesized)
tcctgtcctgtgatgtattctatggattagctgaaattatagttttctcagtccactttttcatcactcattccgtggatgattctacctcctttttgcatttctctgtatgcctgctat

SEQ ID NO: 773773 - DNA, 120 bp, Artificial Sequence
  ENSG00000240747_20 (sequence is synthesized)
ctcgcctttgtgagattgataataagcaataactaatgaacggttattgatatagccttcaaaacagatgggtcagaggttgtttgtaggacttatggtcaataaagttattatcgttaa

SEQ ID NO: 773774 - DNA, 120 bp, Artificial Sequence
  ENSG00000240747_21 (sequence is synthesized)
gggatcctttctggaatggaggtcttatgagctgctattgaacacggcagagcctgttggtgacctgcacacaggagccctccagtcagtactgattgaattactcaaggctgcctctct

SEQ ID NO: 773775 - DNA, 120 bp, Artificial Sequence
  ENSG00000240747_22 (sequence is synthesized)
gcaaagttgagcagcatttccatttcccaaaccggctctgatttcccagctggagcgaggggaaacaccctggtgctcggttcctcggggagctctggatggagaggccccaaggggcat

SEQ ID NO: 773776 - DNA, 120 bp, Artificial Sequence
  ENSG00000240764_0 (sequence is synthesized)
agcagtttttaagaggctggaaggagacataagagacttcagctgctgcattccaagccctgggtctaccttggagacaggacagcacagacttactctccacaaagggacttctgggtc

SEQ ID NO: 773777 - DNA, 120 bp, Artificial Sequence
  ENSG00000240764_1 (sequence is synthesized)
atggggcccaagacactcccacagctcgctgggaaatggcaagtgctgtgcatgttgtccttgtgctgctggggctgggtgtctgggcagcttcgttactcagtggtggaggagtctgag

SEQ ID NO: 773778 - DNA, 120 bp, Artificial Sequence
  ENSG00000240764_2 (sequence is synthesized)
ccggggacgctggtggggaatgttgctcaggatctgggcttaaagatgacagatctgttgagccggcggctgcaattgggctctgaggagaatgggcgctatttttccctgagcttgatg

SEQ ID NO: 773779 - DNA, 120 bp, Artificial Sequence
  ENSG00000240764_3 (sequence is synthesized)
agtggtgccctggcagtgaatcaaaagattgaccgagaaagcctatgtggagccagcaccagctgcctgctgccagtgcaggtggtgactgaacaccccctggagctaatccgtgtagag

SEQ ID NO: 773780 - DNA, 120 bp, Artificial Sequence
  ENSG00000240764_4 (sequence is synthesized)
gtagagatcctggatctcaatgacaactctcctagctttgccacccctgagcgagagatgcgcatctcagaatcagcagcatctggggcacgattcccactggacagtgcccaggatccg

SEQ ID NO: 773781 - DNA, 120 bp, Artificial Sequence
  ENSG00000240764_5 (sequence is synthesized)
gatgtgggcaccaatactgtgagcttttacactctaagccccaacagccacttctctctgaatgtgaagaccctaaaagatgggaagccattcccagagctggtgctagagcagcagctg

SEQ ID NO: 773782 - DNA, 120 bp, Artificial Sequence
  ENSG00000240764_6 (sequence is synthesized)
gatcgtgaagcccaggcaagacatcagctggtgcttactgctgtggatggggggaccccagcccgctcagggaccacccttatctctgtcatcgtgctggacatcaatgataatgctcca

SEQ ID NO: 773783 - DNA, 120 bp, Artificial Sequence
  ENSG00000240764_7 (sequence is synthesized)
accttccaatcctcagttctacgtgtgggaatcccagagaatgcacccattggtactctgctgctccgcctcaatgccactgatccagacgagggcaccaacggccaactagactattct

SEQ ID NO: 773784 - DNA, 120 bp, Artificial Sequence
  ENSG00000240764_8 (sequence is synthesized)
tttggagaccacacatctgaggcagtgcggaacctctttggcctagaccctagcagtggggcaatccatgtgttgggtcccatagactttgaggagtcacgtttctatgaaattcatgca

SEQ ID NO: 773785 - DNA, 120 bp, Artificial Sequence
  ENSG00000240764_9 (sequence is synthesized)
agagcccgtgaccagggacagcctgccatggagggccactgtgtgattcaagtggatgtgggggatgtcaatgacaatgccccagaggtgctattggcctctttggccaaccctgtccta

SEQ ID NO: 773786 - DNA, 120 bp, Artificial Sequence
  ENSG00000240764_10 (sequence is synthesized)
gagagcacaccagtgggcacagtagtggggttgtttaatgtgcgagaccgggactcaggtagaaatggtgaagtgagccttgatatctctccggacctgccatttcagattaagccttct

SEQ ID NO: 773787 - DNA, 120 bp, Artificial Sequence
  ENSG00000240764_11 (sequence is synthesized)
gagaaccactactcgctgctaaccagccagcctttggaccgggaggccacatcccactatatcatcgagctgctggccagcgatgctggttcaccttccctacacaaacatctcaccatc

SEQ ID NO: 773788 - DNA, 120 bp, Artificial Sequence
  ENSG00000240764_12 (sequence is synthesized)
aggctcaacatttcagatgtcaatgacaatgcaccccgcttcaaccagcagctttacactgcttacatcctagaaaaccggcctccgggctcccttctttgcactgtggctgcctcagat

SEQ ID NO: 773789 - DNA, 120 bp, Artificial Sequence
  ENSG00000240764_13 (sequence is synthesized)
ccagacactggggataatgcccgcctcacctactccattgtaggaaatcaggttcagggagccccagcctcctcctttgtgtatgtcaacccagaggatggacggatctttgcccagcgt

SEQ ID NO: 773790 - DNA, 120 bp, Artificial Sequence
  ENSG00000240764_14 (sequence is synthesized)
acctttgactatgaattgctgcagatgctgcagattgtggtgggggttcgagactccggctctcccccattgcatgccaacacatctctgcatgtgtttgtcctagacgagaatgataat

SEQ ID NO: 773791 - DNA, 120 bp, Artificial Sequence
  ENSG00000240764_15 (sequence is synthesized)
gccccagctgtgctgcacccacggccagactgggaacactcagccccccagcgtctccctcgctctgctcctcctggctccttggtcaccaaggtgacagccgtggatgctgatgcaggc

SEQ ID NO: 773792 - DNA, 120 bp, Artificial Sequence
  ENSG00000240764_16 (sequence is synthesized)
cacaatgcgtggctctcctactcactgttgccacagtccacagccccaggactgttcctcgtgtctacacacactggtgaggtgcgcacagcccgggccttactggaggatgactctgac

SEQ ID NO: 773793 - DNA, 120 bp, Artificial Sequence
  ENSG00000240764_17 (sequence is synthesized)
acccagcaggtggtggtcctggtgagggacaatggtgacccttcactctcctccacagccacagtgctgctggttctggaggatgaggaccctgaggaaatgcccaaatccagtgacttc

SEQ ID NO: 773794 - DNA, 120 bp, Artificial Sequence
  ENSG00000240764_18 (sequence is synthesized)
ctcatacaccctcctgagcgttcagaccttaccctttacctcattgtggctctagcgaccgtcagtctcttatccctagtcaccttcacctttctgtcagcgaagtgccttcagggaaac

SEQ ID NO: 773795 - DNA, 120 bp, Artificial Sequence
  ENSG00000240764_19 (sequence is synthesized)
aacctgcaggtgagctcggacggcacgctcaagtacatggaggtgacgctgcggcccacagactcgcagagccactgctacaggacgtgcttttcaccggcctcggacggcagtgacttc

SEQ ID NO: 773796 - DNA, 120 bp, Artificial Sequence
  ENSG00000240764_20 (sequence is synthesized)
acttttctaagacccctcagcgttcagcagcccacagctctggcgctggagcctgacgccatccggtcccgctctaatacgctgcgggagcggagccagcaagccccgcccaacacggac

SEQ ID NO: 773797 - DNA, 120 bp, Artificial Sequence
  ENSG00000240764_21 (sequence is synthesized)
tggcgtttctctcaggcccagagacccggcaccagcggctcccaaaatggcgatgacaccggcacctggcccaacaaccagtttgacacagagatgctgcaagccatgatcttggcgtcc

SEQ ID NO: 773798 - DNA, 120 bp, Artificial Sequence
  ENSG00000240764_22 (sequence is synthesized)
gccagtgaagctgctgatgggagctccaccctgggagggggtgccggcaccatgggattgagcgcccgctacggaccccagttcaccctgcagcacgtgcccgactaccgccagaatgtc

SEQ ID NO: 773799 - DNA, 120 bp, Artificial Sequence
  ENSG00000240764_23 (sequence is synthesized)
tacatcccaggcagcaatgccacactgaccaacgcagctggcaagcgggatggcaaggccccagcaggtggcaatggcaacaagaagaagtcgggcaagaaggagaagaagtaacatgga

SEQ ID NO: 773800 - DNA, 120 bp, Artificial Sequence
  ENSG00000240764_24 (sequence is synthesized)
ggccaggccaagagccacagggcggcctctccccaaccagcccagcttctccttacctgcacccaggcctcagagtttcagggctaacccccagaatactggtaggggccaaggccatgc

SEQ ID NO: 773801 - DNA, 120 bp, Artificial Sequence
  ENSG00000240764_25 (sequence is synthesized)
tccccttgggaaacagaaacaagtgcccagtcagcacctaccccttcccccccagggggttgaatatgcaaaagcagttccgctgggaacccccatccaatcaactgctgtacccatggg

SEQ ID NO: 773802 - DNA, 120 bp, Artificial Sequence
  ENSG00000240764_26 (sequence is synthesized)
ggtagtggggttactgtagacaccaagaaccatttgccacaccccgtttagttacagctgaactcctccatcttccaaatcaatcaggcccatccatcccatgcctccctcctccccacc

SEQ ID NO: 773803 - DNA, 120 bp, Artificial Sequence
  ENSG00000240764_27 (sequence is synthesized)
ccactccaacagttcctctttcccgagtaaggtggttggggtgttgaagtaccaagtaacctacaagcctcctagttctgaaaagttggaagggcatcatgacctcttggcctctccttt

SEQ ID NO: 773804 - DNA, 120 bp, Artificial Sequence
  ENSG00000240764_28 (sequence is synthesized)
gattctcaatcttcccccaaagcatggtttggtgccagccccttcacctccttccagagcccaagatcaatgctcaagttttggaggacatgatcaccatccccatggtactgatgcttg

SEQ ID NO: 773805 - DNA, 120 bp, Artificial Sequence
  ENSG00000240764_29 (sequence is synthesized)
ctggatttagggagggcattttgctaccaagcctcttcccaacgccctggggaccagtcttctgttttgtttttcattgtttgacgtttccactgcatgccttgacttcccccacctcct

SEQ ID NO: 773806 - DNA, 120 bp, Artificial Sequence
  ENSG00000240764_30 (sequence is synthesized)
cctcaaacaagagactccactgcatgttccaagacagtatggggtggtaagataaggaagggaagtgtgtggatgtggatggtgggggcatggacaaagcttgacacatcaagttatcaa

SEQ ID NO: 773807 - DNA, 120 bp, Artificial Sequence
  ENSG00000240764_31 (sequence is synthesized)
ggccttggaggaggctctgtatgtcctcaggggactgacaacatcctccagattccagccataaaccaataactaggctggacccttcccactacataatagggctcagcccaggcagcc

SEQ ID NO: 773808 - DNA, 120 bp, Artificial Sequence
  ENSG00000240764_32 (sequence is synthesized)
agctttgggctgagctaacaggaccaatggattaaactggcatttcagtccaaggaagctcgaagcaggtttaggaccaggtccccttgagaggtcagaggggcctctgtgggtgctggg

SEQ ID NO: 773809 - DNA, 120 bp, Artificial Sequence
  ENSG00000240764_33 (sequence is synthesized)
tactccagaggtgccactggtggaagggtcagcggagccccagcaggaagggtgggccagccaggccattcttagtccctgggttggggaggcagggagctagggcagggaccaaatgaa

SEQ ID NO: 773810 - DNA, 120 bp, Artificial Sequence
  ENSG00000240764_34 (sequence is synthesized)
cagaaagtctcagcccaggatggggcttcttcaacagggcccctgccctcctgaagcctcagtccttcaccttgccaggtgccgtttctcttccgtgaaggccactgcccaggtccccag

SEQ ID NO: 773811 - DNA, 120 bp, Artificial Sequence
  ENSG00000240764_35 (sequence is synthesized)
tgcgccccctagtggccatagcctggttaaagttccccagtgcctccttgtgcatagaccttcttctcccacccccttctgcccctgggtccccggccatccagcggggctgccagagaa

SEQ ID NO: 773812 - DNA, 120 bp, Artificial Sequence
  ENSG00000240764_36 (sequence is synthesized)
ccccagacctgcccttacagtagtgtagcgccccctccctctttcggctggtgtagaatagccagtagtgtagtgcggtgtgcttttacgtgatggcgggtgggcagcgggcggcgggct

SEQ ID NO: 773813 - DNA, 120 bp, Artificial Sequence
  ENSG00000240764_37 (sequence is synthesized)
ccgcgcagccgtctgtccttgatctgcccgcggcggcccgtgttgtgttttgtgctgtgtccacgcgctaaggcgaccccctcccccgtactgacttctcctataagcgcttctcttcgc

SEQ ID NO: 773814 - DNA, 120 bp, Artificial Sequence
  ENSG00000240764_38 (sequence is synthesized)
atagtcacgtagctcccaccccaccctcttcctgtgtctcacgcaagttttatactctaatatttatatggctttttttcttcgacaaaaaaataataaaacgtttcttctgaaaagctg

SEQ ID NO: 773815 - DNA, 120 bp, Artificial Sequence
  ENSG00000240764_39 (sequence is synthesized)
agcggagccaggtgaggggctcggcgccgccccgggcgacccctgggggcggcactggagaagccgcccgtcctcataagggattgaacttgcatccactcctctccggccggcttggtc

SEQ ID NO: 773816 - DNA, 120 bp, Artificial Sequence
  ENSG00000240764_40 (sequence is synthesized)
gctggctgcgctccacccgattctcgggatcattggaccgtttgcgcgaaaccagagtggccgattaagggatggggctccgagcaccgggggtggtggcgactgtgggcgaggggaggt

SEQ ID NO: 773817 - DNA, 120 bp, Artificial Sequence
  ENSG00000240771_0 (sequence is synthesized)
attcagctctccgctccgctgggacccgcacagcgccagtggctcgggggtcggccctcgcctcctccccggcccgggcctagagccacccctaaccagaggccggagacagctggagcg

SEQ ID NO: 773818 - DNA, 120 bp, Artificial Sequence
  ENSG00000240771_1 (sequence is synthesized)
gctgccgcatcccggcccagcctcccctaccatccctcccccttccactggacatctggaccctaggcccccgcaccgacagggttccggaaaccctccccgcccagcccggcggccggg

SEQ ID NO: 773819 - DNA, 120 bp, Artificial Sequence
  ENSG00000240771_2 (sequence is synthesized)
ccccgcgcctctctctctctagagcccccagccctcctcaagactagacttccgcctacccctggacacctcctcccggtcccctccctccccccctcccacagcctggaccggggtagg

SEQ ID NO: 773820 - DNA, 120 bp, Artificial Sequence
  ENSG00000240771_3 (sequence is synthesized)
cccccgtgattccccctgcatggccggcccgggtggggggcgcgggggggcccgggcgccatgcggggggggcacaaagggggtcgctgtgcctgtccccgtgtgatccgaaaagtgctg

SEQ ID NO: 773821 - DNA, 120 bp, Artificial Sequence
  ENSG00000240771_4 (sequence is synthesized)
gggtcgctgtgcctgtccccgtgtgatccgaaaagtgctggcaaaatgcggctgctgcttcgcccgggggggacgtgaatcctattccattgcgggcagtgaggggagtatatcggcttc

SEQ ID NO: 773822 - DNA, 120 bp, Artificial Sequence
  ENSG00000240771_5 (sequence is synthesized)
tgctgcctccggtctggctgccccctctggccccagctctggcctcagctctggcccctgttccccaggccccccagggcccgtcagtggcctgaggagatggttggatcattccaaaca

SEQ ID NO: 773823 - DNA, 120 bp, Artificial Sequence
  ENSG00000240771_6 (sequence is synthesized)
ttgtctcagtgtggaaactgaggcagacagtggtcaggcaggaccatatgagaactggatgttggagccagctctagccacaggagaggagctgccggaactgaccttgctgaccacact

SEQ ID NO: 773824 - DNA, 120 bp, Artificial Sequence
  ENSG00000240771_7 (sequence is synthesized)
gttggagggccctggagataagacgcagccacctgaagaggagactttgtcccaagcccctgagagtgaggaggaacagaagaagaaggctctggaaaggagtatgtatgtcctgagtga

SEQ ID NO: 773825 - DNA, 120 bp, Artificial Sequence
  ENSG00000240771_8 (sequence is synthesized)
actggtagaaacagagaaaatgtacgtggacgacttggggcagattgtggagggttatatggccaccatggctgctcagggggtccccgagagtcttcgaggccgtgacaggattgtgtt

SEQ ID NO: 773826 - DNA, 120 bp, Artificial Sequence
  ENSG00000240771_9 (sequence is synthesized)
tgggaatatccagcaaatctatgagtggcaccgagactatttcttgcaagagctacaacggtgtctgaaagatcctgattggctggctcagctattcatcaaacacgagcgccggctgca

SEQ ID NO: 773827 - DNA, 120 bp, Artificial Sequence
  ENSG00000240771_10 (sequence is synthesized)
tcagagcatgtggtgtcagagtttggggacagctactttgaggagctccggcagcagctggggcaccgcctgcagctgaacgacctcctcatcaaacctgtgcagcggatcatgaaatac

SEQ ID NO: 773828 - DNA, 120 bp, Artificial Sequence
  ENSG00000240771_11 (sequence is synthesized)
cagctgctgctcaaggattttctcaagtattacaatagagctgggatggatactgcagacctagagcaagctgtggaggtcatgtgctttgtgcccaagcgctgcaacgatatgatgacg

SEQ ID NO: 773829 - DNA, 120 bp, Artificial Sequence
  ENSG00000240771_12 (sequence is synthesized)
ctggggagattgcggggatttgagggcaaactgactgctcaggggaagctcttgggccaggacactttctgggtcaccgagcctgaggctggagggctgctgtcttcccgaggtcgagag

SEQ ID NO: 773830 - DNA, 120 bp, Artificial Sequence
  ENSG00000240771_13 (sequence is synthesized)
aggcgcgtcttcctctttgagcaaatcatcatcttcagtgaagccctgggaggaggagtgagaggtggaacacagcctggatatgtatacaagaacagcattaaggtgagctgcctggga

SEQ ID NO: 773831 - DNA, 120 bp, Artificial Sequence
  ENSG00000240771_14 (sequence is synthesized)
ctggaggggaacctccaaggtgacccttgccgctttgcactgacctccagagggccagagggtgggatccagcgctatgtcctgcaggctgcagaccctgctatcagtcaggcctggatc

SEQ ID NO: 773832 - DNA, 120 bp, Artificial Sequence
  ENSG00000240771_15 (sequence is synthesized)
aagcatgtggctcagatcttggagagccaacgggacttcctcaacgcattgcagtcacccattgagtaccagagacgggagagccagaccaacagcctggggcggccaagagggcctgga

SEQ ID NO: 773833 - DNA, 120 bp, Artificial Sequence
  ENSG00000240771_16 (sequence is synthesized)
gtggggagccctggaagaattcagcttggagatcaggcccagggcagcacacacacacccatcaatggctctctcccctctctgctgctgtcacccaaaggggaggtggccagagccctc

SEQ ID NO: 773834 - DNA, 120 bp, Artificial Sequence
  ENSG00000240771_17 (sequence is synthesized)
ttgccactggataaacaggcccttggtgacatcccccaggctccccatgactctcctccagtctctccaactccaaaaacccctccctgccaagccagacttgccaagctggatgaagat

SEQ ID NO: 773835 - DNA, 120 bp, Artificial Sequence
  ENSG00000240771_18 (sequence is synthesized)
gagctgtaactggtgaaaaccatgggggtggtgctgactcagccgcctattccccaaggagcttcagggcagtccttctggcactgctccagaattcctccttcttggtgtgtctggagg

SEQ ID NO: 773836 - DNA, 120 bp, Artificial Sequence
  ENSG00000240771_19 (sequence is synthesized)
gtgggcaaggctgggagggatatcaacttggaggagaacacctagacccaaggacttttttctgcccaaggaacacagtttccttcagctcccatccctatgcatgcatcatggtccccc

SEQ ID NO: 773837 - DNA, 120 bp, Artificial Sequence
  ENSG00000240771_20 (sequence is synthesized)
caaaaggaggatatgtgggtgggtgggagggctggggcaggggccagatagaaattattggttttgttttttaattttgtttttcctgttttctgagaataaaggttttgttatatcacc

SEQ ID NO: 773838 - DNA, 120 bp, Artificial Sequence
  ENSG00000240771_21 (sequence is synthesized)
ctcgaccctgaaacttggagcagggtgggggttcagtatgaagcccccggaccgccccgcccctggccgcactgaccggatactgggggtcatggggggcatgctgcgcgcatgcgccct

SEQ ID NO: 773839 - DNA, 120 bp, Artificial Sequence
  ENSG00000240771_22 (sequence is synthesized)
ccctgggcaggaggggcccccaaggagaagccctctagggttggtgggtaccgagccagagtctgaacgtacggagggagatcacagaagggatcgcgaacatgaggtcctcgccggggc

SEQ ID NO: 773840 - DNA, 120 bp, Artificial Sequence
  ENSG00000240771_23 (sequence is synthesized)
gggggtcgctgtgcctgtccccgtgtgatccgaaaagtgctggcaaaatgcggctgctgcttcgcccgggggggacgtggggtgccctggtgaaattttctatcctggccaactcaaatg

SEQ ID NO: 773841 - DNA, 120 bp, Artificial Sequence
  ENSG00000240771_24 (sequence is synthesized)
aggatggcaagagagtgagcccttggagagagaggctgagcatcatgaagagaagaccctgggagttccctggggaccctgagtctggagctggggcaaggccccccagggcccgtcagt

SEQ ID NO: 773842 - DNA, 120 bp, Artificial Sequence
  ENSG00000240771_25 (sequence is synthesized)
aggaatgggctgggattctctggagatgcgtcctccctccttgcccaccctgctctctcttaaacattacccctgttaggagcgccggctgcatatgtatgtggtgtactgtcagaataa

SEQ ID NO: 773843 - DNA, 120 bp, Artificial Sequence
  ENSG00000240771_26 (sequence is synthesized)
cccaacctcaactttcccacagggttatatggccaccatggctgctcagggggtccccgagagtcttcgaggccgtgacaggattgtgtttgggaatatccagcaaatctatgagtggca

SEQ ID NO: 773844 - DNA, 120 bp, Artificial Sequence
  ENSG00000240771_27 (sequence is synthesized)
ccgagagtgagtggtggaactctgacagctaggtgctggagaggggccctcatctggttgtcctgtatcctaacatcagcccattgcgacttaaggaatgtttggagaagttttgtaggg

SEQ ID NO: 773845 - DNA, 120 bp, Artificial Sequence
  ENSG00000240771_28 (sequence is synthesized)
cacactaccagggcagacagctcgaaactgctgggagtgggcgaggtgggggttgtgaaatgtatttgacctgctgcttctctaccaacccctccagctatttcttgcaagagctacaac

SEQ ID NO: 773846 - DNA, 120 bp, Artificial Sequence
  ENSG00000240771_29 (sequence is synthesized)
agctactttgaggtcagtagctgagatgtcttggtgggaaggaggacagaactggggctttccaggctgcataaccaccctgtccctgtccccaggagctccggcagcagctggggcacc

SEQ ID NO: 773847 - DNA, 120 bp, Artificial Sequence
  ENSG00000240849_0 (sequence is synthesized)
cgcggccctgccgccgccgccgccagcagagcgcaccgggccgatcgggcgagtggccatggcgggcgccgagaactggccgggccagcagctggagctggacgaggacgaggcgtcttg

SEQ ID NO: 773848 - DNA, 120 bp, Artificial Sequence
  ENSG00000240849_1 (sequence is synthesized)
tggagctggacgaggacgaggcgtcttgttgccgctggggcgcgcagcacgccggggcccgcgagctggctgcgctctactcgccaggcaagcgcctccaggagtggtgctctgtgatcc

SEQ ID NO: 773849 - DNA, 120 bp, Artificial Sequence
  ENSG00000240849_2 (sequence is synthesized)
tgtgcttcagcctcatcgcccacaacctggtccatctcctgctgctggcccgctgggaggacacacccctcgtcatactcggtgttgttgcaggggctctcattgctgacttcttgtctg

SEQ ID NO: 773850 - DNA, 120 bp, Artificial Sequence
  ENSG00000240849_3 (sequence is synthesized)
gcctggtacactggggtgctgacacatggggctctgtggagctgcccattgtggggaaggctttcatccgacccttccgggagcaccacattgacccgacagctatcacacggcacgact

SEQ ID NO: 773851 - DNA, 120 bp, Artificial Sequence
  ENSG00000240849_4 (sequence is synthesized)
tcatcgagaccaacggggacaactgcctggtgacactgctgccgctgctaaacatggcctacaagttccgcacccacagccctgaagccctggagcagctatacccctgggagtgcttcg

SEQ ID NO: 773852 - DNA, 120 bp, Artificial Sequence
  ENSG00000240849_5 (sequence is synthesized)
tcttctgcctgatcatcttcggcaccttcaccaaccagatccacaagtggtcgcacacgtactttgggctgccacgctgggtcaccctcctgcaggactggcatgtcatcctgccacgta

SEQ ID NO: 773853 - DNA, 120 bp, Artificial Sequence
  ENSG00000240849_6 (sequence is synthesized)
aacaccatcgcatccaccacgtctcaccccacgagacctacttctgcatcaccacaggctggctcaactaccctctggagaagataggcttctggcgacgcctggaggacctcatccagg

SEQ ID NO: 773854 - DNA, 120 bp, Artificial Sequence
  ENSG00000240849_7 (sequence is synthesized)
gcctgacgggcgagaagcctcgggcagatgacatgaaatgggcccagaagatcaaataacttctccgagcctgctacctggttgccaaccttccctagcccccaaaccgaagccatctgc

SEQ ID NO: 773855 - DNA, 120 bp, Artificial Sequence
  ENSG00000240849_8 (sequence is synthesized)
caaattccagcctctttgagctggcccctccagatggagaggacatctcctgggctgggcccaggtaccccagcccacccctcatgacacagaatacttgagccactgatttttcatttc

SEQ ID NO: 773856 - DNA, 120 bp, Artificial Sequence
  ENSG00000240849_9 (sequence is synthesized)
ttttttttttttttcctcggcccctcctcagccacctgagttgctctatctgcaagcctgactctgccagcctcccctggtagagaggaggtttacccactccctgcacgcctgccgtcc

SEQ ID NO: 773857 - DNA, 120 bp, Artificial Sequence
  ENSG00000240849_10 (sequence is synthesized)
ctgccccgctgggcagcccttcagtgtggctggcgttggggccagtgagttgcctctttccctccttgtctggccccagtggtctggggagcccccaggcacacctaagcgtcgtggagc

SEQ ID NO: 773858 - DNA, 120 bp, Artificial Sequence
  ENSG00000240849_11 (sequence is synthesized)
attgttctgccacagccctgcatactgaccccgggaggctgggcaggtggacagccccagccaccaccttcagcctagcctgtcccccaaggatggtgaagctcagcaggggtctgaggg

SEQ ID NO: 773859 - DNA, 120 bp, Artificial Sequence
  ENSG00000240849_12 (sequence is synthesized)
tagccggccagaagaggctggaacctcctgctcaagtctagacccctacttctctgctgcccccaccctgccagagctgatgtttccaataccaagatgtcttcacagggcacagcccct

SEQ ID NO: 773860 - DNA, 120 bp, Artificial Sequence
  ENSG00000240849_13 (sequence is synthesized)
gcagagcatcttggtcatttggaagaggacacggtatcccctctggccagagtatgtcagagaaggaagagtagggcttttttgttttgtttttttttaaaggtgcttgcttgtttaatg

SEQ ID NO: 773861 - DNA, 120 bp, Artificial Sequence
  ENSG00000240849_14 (sequence is synthesized)
taaataatagaaagccttaatatcttttctgtaacacggagtaatattttaatgtcatgttttggatgtacataatatatttataacaaagcagcaagagtctacttaaccttggctgcc

SEQ ID NO: 773862 - DNA, 120 bp, Artificial Sequence
  ENSG00000240849_15 (sequence is synthesized)
tcgtggtgtttcctggctgggtggggtggggggtatcaaggagcctgggacgtgaggccccactctcgccccattcccagctccccccaaccctggcctcaggatgagagctgtcacctg

SEQ ID NO: 773863 - DNA, 120 bp, Artificial Sequence
  ENSG00000240849_16 (sequence is synthesized)
agacagtgaattaatgttgacatctgctccaaagccttttggaggggattgggtgaggacagtggtctttcctgttgatcatgatgataaagtaatgatggctgatccctatttgtgact

SEQ ID NO: 773864 - DNA, 120 bp, Artificial Sequence
  ENSG00000240849_17 (sequence is synthesized)
tccttcagcaaatattcactggcacctggtgtgtgccaggctctgtcctgtacacaggtacagcggtgaaagaaccaacaaagacctatcctggtggagctgacctcctgggaaaagagt

SEQ ID NO: 773865 - DNA, 120 bp, Artificial Sequence
  ENSG00000240849_18 (sequence is synthesized)
caataaacaaataaatgcacatggaaattcaggtggtgatttgtgaagaaaatcaaacaggacagaaccacagcggaaaagcagggtcggtgctgctttggcagggtggtcatgaagggc

SEQ ID NO: 773866 - DNA, 120 bp, Artificial Sequence
  ENSG00000240849_19 (sequence is synthesized)
ctctgagctgagacctgggggaggagaggaggtcagacacgaaagaagtgagggaagaggcctcttgatgggacagcaagtacacaggccctgaggcaagaacaagcttggggccacgca

SEQ ID NO: 773867 - DNA, 66 bp, Artificial Sequence
  ENSG00000240849_20 (sequence is synthesized)
catggtgaaaccctgtctctactaaaatttacaaaaattagccaggcgtggtggcagacgacttaa

SEQ ID NO: 773868 - DNA, 120 bp, Artificial Sequence
  ENSG00000240849_21 (sequence is synthesized)
tcaaacctgggggataagagcgagacttcgcttagaaaaaaaaaaaaagaacaagcttgggattttaagagatggtgaggcagccactgtggctggactagagtgagctaaggaaaaatg

SEQ ID NO: 773869 - DNA, 120 bp, Artificial Sequence
  ENSG00000240849_22 (sequence is synthesized)
gaagacaaggttgggaaaacatggatttggtatacagagactcataggctgaggtgagtggggacctgctggtcattttatttatttgtatttattactatgtttttagagacagggtca

SEQ ID NO: 773870 - DNA, 120 bp, Artificial Sequence
  ENSG00000240849_23 (sequence is synthesized)
tgctctgtcacccaggctaaagtgcagaggtgaggtgtaatagctcacagcaaccttgaactcctggacacaaacgatcctcatgagtggctgggactagcacatgccgccacacctggc

SEQ ID NO: 773871 - DNA, 88 bp, Artificial Sequence
  ENSG00000240849_24 (sequence is synthesized)
tcatgagtggctgggactagcacatgccgccacacctggcttggctatttttttttttttttaaagaaatggggtctcactatgttgt

SEQ ID NO: 773872 - DNA, 120 bp, Artificial Sequence
  ENSG00000240849_25 (sequence is synthesized)
agccactgcaccgggtcaggacattatagaccaattagtaacttgtttatttgttgaataagtaattataaggcatctcctatgaactaggtactgcgattctgtagtgaacgctacaga

SEQ ID NO: 773873 - DNA, 120 bp, Artificial Sequence
  ENSG00000240849_26 (sequence is synthesized)
catagtcaatagctagtctaggctagatagtttctgcaatattagccagaaaaaagaaagcctgttggggacagggaaatgcctaaaggactccagagcagtcacagataatgacatttc

SEQ ID NO: 773874 - DNA, 120 bp, Artificial Sequence
  ENSG00000240849_27 (sequence is synthesized)
ttacaggcatgagccactgcgtccagccatgacatttattttttaaaacgtgacccataatgccattttcctttgccaactagacttttgatttgtgactatgcctgaggggaccacaca

SEQ ID NO: 773875 - DNA, 120 bp, Artificial Sequence
  ENSG00000240849_28 (sequence is synthesized)
ttgtgactatgcctgaggggaccacacaaggaagggtgttagaattcgacaactcataaatgacagaaatttaaagtaaacagctaaaataatcgtattagctcataaaacggaaaagtc

SEQ ID NO: 773876 - DNA, 120 bp, Artificial Sequence
  ENSG00000240849_29 (sequence is synthesized)
tacaggtgttctgaattaaggtttggcaggacccaggggctcacatgattcatcaaaacgtggtctctctaagctctgtttttctctttgagttgagacttactagaccagctcagcaat

SEQ ID NO: 773877 - DNA, 120 bp, Artificial Sequence
  ENSG00000240849_30 (sequence is synthesized)
tagttgcagtggaagtcccagggcaggctctcattggtctggactgggtcacgtgcccatccctgaaccaatcacattggccagtggggtgaaatgctctggttgcccagggctgaaaaa

SEQ ID NO: 773878 - DNA, 120 bp, Artificial Sequence
  ENSG00000240849_31 (sequence is synthesized)
tgtccatctggatttgcagggttgtgatcacctcttcctaaggcattactacaaaaagaagtcaatggtggatgggacaggcagctaaattctttagaggccataggagtagcctcacca

SEQ ID NO: 773879 - DNA, 120 bp, Artificial Sequence
  ENSG00000240849_32 (sequence is synthesized)
ctgtggtgttggtttccaggccccaccaatctgtgtcagttcccctggagccgacagaaaaaaaaccctcagcctgagtccagagaggtaaagtgactcccccaaggtcccacaggtagt

SEQ ID NO: 773880 - DNA, 120 bp, Artificial Sequence
  ENSG00000240849_33 (sequence is synthesized)
aagggtagagcagccctcagactcagaccatttcacttctgaattctgggggctggaaaaaaatccttctcaaaaccagaaggtgcgctgcattgggtctgagagtgttggggccacttg

SEQ ID NO: 773881 - DNA, 120 bp, Artificial Sequence
  ENSG00000240849_34 (sequence is synthesized)
tgagatcagggacttgcaaacaagtgcctatgagggccagacaggggaaaatgctacttaatattactgagcacttaactttgcaccagactgtgcagagagctctggcatgggtcctgt

SEQ ID NO: 773882 - DNA, 120 bp, Artificial Sequence
  ENSG00000240849_35 (sequence is synthesized)
caagcagtccctgcagctctgagaagtgagtactctttgcaccatttgcagatggggaaactgaggcacagaggtcatgtaatatgcccaaggtcacacagctggtaggtggcagaatca

SEQ ID NO: 773883 - DNA, 120 bp, Artificial Sequence
  ENSG00000240849_36 (sequence is synthesized)
ggatttgagccagcgtctgacccaaagcccctgtgctttaacgctcccattgtggagagggaggtgagacaggtggcacgtgagaaatgtgtccactatgaggcaactgcagcatgcctg

SEQ ID NO: 773884 - DNA, 120 bp, Artificial Sequence
  ENSG00000240849_37 (sequence is synthesized)
agaaagggccgctgacgctggggactgggatgacctggagacatcaggcctaaagggcagctgctactcacagcagctggttaaacaggagccagaaatctaaactttaaaaatgctggc

SEQ ID NO: 773885 - DNA, 120 bp, Artificial Sequence
  ENSG00000240849_38 (sequence is synthesized)
tccgtgtttaaaacgtactgtgggcaaaacaaaatgagtgcataggccaactgcctgcagcctccctcccagctgctgtgggatggcttggtttcaggtaggcatgtgctgctgtctggt

SEQ ID NO: 773886 - DNA, 120 bp, Artificial Sequence
  ENSG00000240849_39 (sequence is synthesized)
ggtggcacagggtagtggcatgcagggcaaacatggatttccagctcaaccgggggagctgtagtgaacttgcatacccctgtgtgctcactgttctttagaaggggcctgggcacatac

SEQ ID NO: 773887 - DNA, 120 bp, Artificial Sequence
  ENSG00000240849_40 (sequence is synthesized)
ctttgggcgcctgcccccaactgaaactccatcaccccgccttttttttttcctggagacggggtcttgctctgtcacccaggctggaacacagtggcatgatctgcgctcactgcagac

SEQ ID NO: 773888 - DNA, 89 bp, Artificial Sequence
  ENSG00000240849_41 (sequence is synthesized)
agatttcagcctcttgaatagcgggaacgacagacatgtgccaccacccccagctagtttctttttgtattttttgtagagatggggtt

SEQ ID NO: 773889 - DNA, 80 bp, Artificial Sequence
  ENSG00000240849_42 (sequence is synthesized)
tcaccatgttgcccaggctggtctcgaacgcctgagctcaagcgatcggcccacctcagccttcctaccctcctttgata

SEQ ID NO: 773890 - DNA, 120 bp, Artificial Sequence
  ENSG00000240849_43 (sequence is synthesized)
aaaaatatttttcaagctacccacatatatatatgggtatatatatatatatagcaatatatatattgctatataagcaataggtaatgcttgcataggtaaagaataagaatcacgccg

SEQ ID NO: 773891 - DNA, 120 bp, Artificial Sequence
  ENSG00000240849_44 (sequence is synthesized)
ggtacagtggctcatatcaaataatataaacagggctagagtatggataagctgaccctggacagtgggccaaatccagccacttgcttttctatagctcagaagcttttgtgggttgtt

SEQ ID NO: 773892 - DNA, 90 bp, Artificial Sequence
  ENSG00000240849_45 (sequence is synthesized)
agcctcctgagtagctaggactacagatggacaccaccacatccagctaattttttttttttttgtagtctcaaactcctggcctcaagt

SEQ ID NO: 773893 - DNA, 120 bp, Artificial Sequence
  ENSG00000240849_46 (sequence is synthesized)
ctgggattacaggtgtgagccaccatgtcagccacgagcattttttaaatggctgggggagggggaacaatatttcctaacacagaaaattcaaattccagtttgtaaagctgaattggc

SEQ ID NO: 773894 - DNA, 120 bp, Artificial Sequence
  ENSG00000240849_47 (sequence is synthesized)
gaaaattcaaattccagtttgtaaagctgaattggcacacagccatgcccctcatttacatattgtccgaggctgcttttgcactgcagtggcagaattgagtcgttgcatcggagacca

SEQ ID NO: 773895 - DNA, 120 bp, Artificial Sequence
  ENSG00000240849_48 (sequence is synthesized)
cgtggtccacacagcctaaaatatttacgatctggccctttacagagaaaagttaccaacctctccctagtctagaatgaagggtaaattgctccccattcatgttccctcaggtactca

SEQ ID NO: 773896 - DNA, 120 bp, Artificial Sequence
  ENSG00000240849_49 (sequence is synthesized)
gttcccctccttagaggccatcattttgacaagacacttgcaatgccttatgtaggcagaggggtatgtctgccccactccttttcacacaatatgtaggatattatgcacacagttctg

SEQ ID NO: 773897 - DNA, 120 bp, Artificial Sequence
  ENSG00000240849_50 (sequence is synthesized)
caccttgccttttttcacttaatatattttggagatagtgttatcattaatgttcacaaaccattattattttttacagctgcatagtgttccaccttcaggatggaatggacttgactt

SEQ ID NO: 773898 - DNA, 120 bp, Artificial Sequence
  ENSG00000240849_51 (sequence is synthesized)
ttttttttttgagacaaagtcttgctctattacctgggctagagtgcagtggtgcaatcccagctcactacagcctctgcctcctgggctcaagctatcctctctcagcctcccatccca

SEQ ID NO: 773899 - DNA, 120 bp, Artificial Sequence
  ENSG00000240849_52 (sequence is synthesized)
ccatcccaagtagttgggactacaggtgcatgccaccatgctgagctaatttttttttattatttttagagacgggggtcttgctttgttgcccagactcgtctcaaactcctgtgctca

SEQ ID NO: 773900 - DNA, 120 bp, Artificial Sequence
  ENSG00000240849_53 (sequence is synthesized)
agcaatcctcctgcctcagactcccaaactgctgggattacaggcttgaaccacgagtgtgttttaaattttgatagtgcataccaaattgtcttccagaggccatgccggtttaagttc

SEQ ID NO: 773901 - DNA, 120 bp, Artificial Sequence
  ENSG00000240849_54 (sequence is synthesized)
acaagttttcagagtccctgtttcctcacacccttgccaacacagcgtgttatcaaatgttttgttctttgccaatctgataggtggttttaatttgcattcctcttactgtatttcatt

SEQ ID NO: 773902 - DNA, 120 bp, Artificial Sequence
  ENSG00000240849_55 (sequence is synthesized)
tttaatttgcattcctcttactgtatttcattgattctaagatgtcactgattctaagatgcatcctgatttcagaagttcacatgtaaaaatgtggctgggtgtggtagctcacgcctg

SEQ ID NO: 773903 - DNA, 120 bp, Artificial Sequence
  ENSG00000240849_56 (sequence is synthesized)
aaacgtatagcttcaaatcactgaaatacaatatgttttgtgagattgggtatcttactgtgagtttaaaatgcatttgcatttcctcatctgttcatgtccttttcctatttttcttgg

SEQ ID NO: 773904 - DNA, 120 bp, Artificial Sequence
  ENSG00000240849_57 (sequence is synthesized)
aagggagggtagcattggttaagagtgtagggttcaaatcccagttctgccacttacaagcttgtgactttgggcaagttacttaaccgttctgtgtctcagtttcctcacctgcaaaat

SEQ ID NO: 773905 - DNA, 120 bp, Artificial Sequence
  ENSG00000240849_58 (sequence is synthesized)
gggaataataatggtacctacctcataggataggtgtgaagattaaatacattattatatgcaaaataccatgttcctggaatatggcaaatgctcaataaatatttgctgtaactgtca

SEQ ID NO: 773906 - DNA, 120 bp, Artificial Sequence
  ENSG00000240849_59 (sequence is synthesized)
caagtaacaggcaggaggagtgttaagcctgaggctccatcttcagggaagaaaacatcccaactagagaagaagggacaccttcccctcctaacaaatgaatgagcgggcaattgcagg

SEQ ID NO: 773907 - DNA, 120 bp, Artificial Sequence
  ENSG00000240857_0 (sequence is synthesized)
gtacaggtggtctcttgggttccggtaaggcggcggctgcggaactcccgtggaggggccggtgggccctcgggcctgacgatggcagtggccactgcggcggcagtactggccgctctg

SEQ ID NO: 773908 - DNA, 120 bp, Artificial Sequence
  ENSG00000240857_1 (sequence is synthesized)
ggcggggcgctgtggctggcggcccgccggttcgtggggcccagggtccagcggctgcgcagaggcggggaccccggcctcatgcacgggaagactgtgctgatcaccggggcgaacagc

SEQ ID NO: 773909 - DNA, 120 bp, Artificial Sequence
  ENSG00000240857_2 (sequence is synthesized)
gactgtgctgatcaccggggcgaacagcggcctgggccgcgccacggccgccgagctactgcgcctgggagcgcgggtgatcatgggctgccgggaccgcgcgcgcgccgaggaggcggc

SEQ ID NO: 773910 - DNA, 120 bp, Artificial Sequence
  ENSG00000240857_3 (sequence is synthesized)
gccgcggagtgcggcccagagcctggcgtcagcggggtgggcgagctcatagtccgggagctggacctcgcctcgctgcgctcggtgcgcgccttctgccaggaaatgctccaggaagag

SEQ ID NO: 773911 - DNA, 120 bp, Artificial Sequence
  ENSG00000240857_4 (sequence is synthesized)
cctaggctggatgtcttgatcaataacgcagggatcttccagtgcccttacatgaagactgaagatgggtttgagatgcagttcggagtgaaccatctggggcactttctactcaccaat

SEQ ID NO: 773912 - DNA, 120 bp, Artificial Sequence
  ENSG00000240857_5 (sequence is synthesized)
cttctccttggactcctcaaaagttcagctcccagcaggattgtggtagtttcttccaaactttataaatacggagacatcaattttgatgacttgaacagtgaacaaagctataataaa

SEQ ID NO: 773913 - DNA, 120 bp, Artificial Sequence
  ENSG00000240857_6 (sequence is synthesized)
agcttttgttatagccggagcaaactggctaacattctttttaccagggaactagcccgccgcttagaaggcacaaatgtcaccgtcaatgtgttgcatcctggtattgtacggacaaat

SEQ ID NO: 773914 - DNA, 120 bp, Artificial Sequence
  ENSG00000240857_7 (sequence is synthesized)
ctggggaggcacatacacattccactgttggtcaaaccactcttcaatttggtgtcatgggcttttttcaaaactccagtagaaggtgcccagacttccatttatttggcctcttcacct

SEQ ID NO: 773915 - DNA, 120 bp, Artificial Sequence
  ENSG00000240857_8 (sequence is synthesized)
gaggtagaaggagtgtcaggaagatactttggggattgtaaagaggaagaactgttgcccaaagctatggatgaatctgttgcaagaaaactctgggatatcagtgaagtgatggttggc

SEQ ID NO: 773916 - DNA, 120 bp, Artificial Sequence
  ENSG00000240857_9 (sequence is synthesized)
ctgctaaaataggaacaaggagtaaaagagctgtttataaaactgcatatcagttatatctgtgatcaggaatggtgtggattgagaacttgttacttgaagaaaaagaattttgatatt

SEQ ID NO: 773917 - DNA, 120 bp, Artificial Sequence
  ENSG00000240857_10 (sequence is synthesized)
ggaatagcctgctaagaggtacatgtgggtattttggagttactgaaaaattatttttgggataagagaatttcagcaaagatgttttaaatatatatagtaagtataatgaataataag

SEQ ID NO: 773918 - DNA, 120 bp, Artificial Sequence
  ENSG00000240857_11 (sequence is synthesized)
tacaatgaaaaatacaattatattgtaaaattataactgggcaagcatggatgacatattaatatttgtcagaattaagtgactcaaagtgctatcgagaggtttttcaagtatctttga

SEQ ID NO: 773919 - DNA, 120 bp, Artificial Sequence
  ENSG00000240857_12 (sequence is synthesized)
gtttcatggccaaagtgttaactagttttactacaatgtttggtgtttgtgtggaaattatctgcctggtgtgtgcacacaagtcttacttggaataaatttactggtacaaattcttaa

SEQ ID NO: 773920 - DNA, 79 bp, Artificial Sequence
  ENSG00000240864_0 (sequence is synthesized)
aggaatcagacccagtcaggacacagcatggacatgagagtcctcgctcagctcctggggctcctgctgctctgtttcc

SEQ ID NO: 773921 - DNA, 120 bp, Artificial Sequence
  ENSG00000240864_1 (sequence is synthesized)
ggagacagagtcaccatcacttgtcgggcgagtcagggcattagcaattatttagcctggtttcagcagaaaccagggaaagcccctaagtccctgatctatgctgcatccagtttgcaa

SEQ ID NO: 773922 - DNA, 63 bp, Artificial Sequence
  ENSG00000240864_2 (sequence is synthesized)
agcccctaagtccctgatctatgctgcatccagtttgcaaagtggggtcccatcaaagttcag

SEQ ID NO: 773923 - DNA, 120 bp, Artificial Sequence
  ENSG00000240871_0 (sequence is synthesized)
aaacccaagaacttcactctcttggaaacccacccagatcctccccgttctgacaccatggtcagctcctgttgtggctccgtgtgctctgaccagggctgcagccaagacctctgtcag

SEQ ID NO: 773924 - DNA, 120 bp, Artificial Sequence
  ENSG00000240871_1 (sequence is synthesized)
gagacctgctgccgccccagctgctgtcagaccacctgttgcaggaccacctgctaccgccccagctgttgtgtgtccagctgctgcaggccccagtgctgccagtctgtgtgctgccaa

SEQ ID NO: 773925 - DNA, 120 bp, Artificial Sequence
  ENSG00000240871_2 (sequence is synthesized)
cccacctgctgtcgccccacctgctgtgagacgacctgctgccaccctaggtgctgcatctccagctgctgccgccccagctgctgtatgtccagctgctgcaagccccagtgctgccag

SEQ ID NO: 773926 - DNA, 120 bp, Artificial Sequence
  ENSG00000240871_3 (sequence is synthesized)
tctgtgtgctgccagcccacctgctgccgccccagctgctgccgcccctgctgctgcctgcgtccagtctgtggccgagtctcctgccacaccacttgctatcgcccaacctgtgtcatc

SEQ ID NO: 773927 - DNA, 120 bp, Artificial Sequence
  ENSG00000240871_4 (sequence is synthesized)
ctcttgctgctgagcccactgccctggctcacgtcccccttcaccactggcccacagatgtagacccttctactgtgctgaccattaggatacatgaagtggggttgatgtcattcaata

SEQ ID NO: 773928 - DNA, 120 bp, Artificial Sequence
  ENSG00000240871_5 (sequence is synthesized)
ggatggaccttatgcttccaaagagcccaccaccatttcactgactctgtgagaacattctggttcattttaaactccctcctttgctttctttttcttctggtggtggcaccaaatgtg

SEQ ID NO: 773929 - DNA, 120 bp, Artificial Sequence
  ENSG00000240871_6 (sequence is synthesized)
aattaatttgtaatacactagctaagaaattattccaatcttctgatttccttattttctttatcactttaaggtacagattctccttctcagtgaggtagatattatctgcaggaccag

SEQ ID NO: 773930 - DNA, 120 bp, Artificial Sequence
  ENSG00000240871_7 (sequence is synthesized)
ttttgtcactgatgttgcaccctcagatccagccacccaattgtattctgtgtttctcctagggtgaatttcttatgctttgttgtatctctgctttctaataaacttttctgcacttaa

SEQ ID NO: 773931 - DNA, 120 bp, Artificial Sequence
  ENSG00000240871_8 (sequence is synthesized)
tctgtgtgctgccagcccacctgctgccgccccagctgctgccgcccctgctgctgccgcccaacctgtgtcatctccacctgtccccgccccttgtgctgtgcctcctcttgctgctga

SEQ ID NO: 773932 - DNA, 120 bp, Artificial Sequence
  ENSG00000240891_0 (sequence is synthesized)
gctgggagtcctggtgccgccggctgcacttctgtgtgtctttcaggaagccacagggcagggggcgtctgtgcagagaagcgggggagtgagtagcaggcaggcccagcttgtgtacca

SEQ ID NO: 773933 - DNA, 120 bp, Artificial Sequence
  ENSG00000240891_1 (sequence is synthesized)
gcccagtgacatatatagaaacataaatcaggctagagccggcgcgcccgggcgcgcacctgtgtatggacccgcaggcatgtctgtacactgggtgggcacctgtcttgtgagtggctc

SEQ ID NO: 773934 - DNA, 120 bp, Artificial Sequence
  ENSG00000240891_2 (sequence is synthesized)
cgggtgtggctgctcctcggactttcagtttatgtaagatttatctctaggggcctaccttcccccatctccagaggggaacataagaagtttaacggagctgggactgagcagattaag

SEQ ID NO: 773935 - DNA, 120 bp, Artificial Sequence
  ENSG00000240891_3 (sequence is synthesized)
ggagtggagcggaggctgggccggagagagtggggactgtgagtgctagtgggtaaggatccatctgtttgccccgtcccccagccagaaaggcattttggaaagactggcgtggcaagc

SEQ ID NO: 773936 - DNA, 120 bp, Artificial Sequence
  ENSG00000240891_4 (sequence is synthesized)
gtcgccctgaaacgtccacagagcccaagaagtgatgatcactgagtgagtggcactgggctgagactggccagtttgttaacaacagggatgctagcagttaggaaggccaggaggaaa

SEQ ID NO: 773937 - DNA, 120 bp, Artificial Sequence
  ENSG00000240891_5 (sequence is synthesized)
ctcaggatggggaccatctgctcccccaaccccagcgggacaaagacatcatcggaggtctgcaatgccgactggatggcctcgctcccccctcacctccacaacctccccctttccaat

SEQ ID NO: 773938 - DNA, 120 bp, Artificial Sequence
  ENSG00000240891_6 (sequence is synthesized)
ctggcaatcccaggctcacatgattcattcagctactgggtggatgaaaagtccccagtggggcctgaccaaacccaagctatcaaacgcctcgccaggatctccttggtgaagaagcta

SEQ ID NO: 773939 - DNA, 120 bp, Artificial Sequence
  ENSG00000240891_7 (sequence is synthesized)
atgaagaagtggtctgtgactcagaacctgacatttcgagaacagctggaagctgggatccgctactttgacctgcgtgtgtcttccaaaccaggggatgccgaccaggagatctacttc

SEQ ID NO: 773940 - DNA, 120 bp, Artificial Sequence
  ENSG00000240891_8 (sequence is synthesized)
atccatgggctttttggcatcaaggtctgggatgggctgatggaaattgactcgtttcttacacagcacccccaggagattatcttcctggatttcaaccacttctatgccatggatgag

SEQ ID NO: 773941 - DNA, 120 bp, Artificial Sequence
  ENSG00000240891_9 (sequence is synthesized)
acccatcacaaatgcctggttctgcggatccaggaggcctttggaaacaagctgtgcccagcctgcagtgtggaaagtttgacgctgcgaactctgtgggagaagaactgccaggttctt

SEQ ID NO: 773942 - DNA, 120 bp, Artificial Sequence
  ENSG00000240891_10 (sequence is synthesized)
attttctaccactgtcccttctacaagcagtaccccttcctgtggccaggaaagaagattccagcgccctgggcaaacaccacaagtgtgcgcaaactaatcctcttcttggagaccact

SEQ ID NO: 773943 - DNA, 120 bp, Artificial Sequence
  ENSG00000240891_11 (sequence is synthesized)
ctgagtgagcgggcctcacggggctccttccatgtctcccaagcgatcctcacccccagagtgaagaccattgcccggggcttggttgggggcctcaagaacacgctggttcataggaat

SEQ ID NO: 773944 - DNA, 120 bp, Artificial Sequence
  ENSG00000240891_12 (sequence is synthesized)
cttcctgccatcctggactgggtgaaaactcagaagcctggagccatgggtgtcaacatcatcacatctgacttcgtggacctggtggactttgctgcgactgtcatcaagttgaatgac

SEQ ID NO: 773945 - DNA, 120 bp, Artificial Sequence
  ENSG00000240891_13 (sequence is synthesized)
ctcctacaggaggacacagctctggctaaatgctgatttaatttttaatttaaccttaatgttgaatttgttgatccagggtagagttctaaaggatgtcctgttaggatggcccctggg

SEQ ID NO: 773946 - DNA, 120 bp, Artificial Sequence
  ENSG00000240891_14 (sequence is synthesized)
gcagtgatgatgaagtaagaggaagatggcttttttttctcccttcctcacagggccatttagataaaattacagggctattaattgcatttttcccaaatgagactttttttaaaactt

SEQ ID NO: 773947 - DNA, 120 bp, Artificial Sequence
  ENSG00000240891_15 (sequence is synthesized)
aagtccaagggaagaaagcacgcttcatgtgaccaaggtcaggacctccccagtggcttatggtggtgaatggaatttggaaataggatctctaggacccattggggtattgagtgtccc

SEQ ID NO: 773948 - DNA, 120 bp, Artificial Sequence
  ENSG00000240891_16 (sequence is synthesized)
cctaattggcccagctccctattgtcgtctggggtgttgtgtttgagccggtgaaaaagttgaaccagaaacacattcctggtgaaaaagactggctcattgcagctgtggaccaccatc

SEQ ID NO: 773949 - DNA, 120 bp, Artificial Sequence
  ENSG00000240891_17 (sequence is synthesized)
tggggtggatctaacatcaaccaggggctctgagggggaaaagagccaagcaccaggtctctctaggattgttggatgtcaccacttttctgagagagtaggactcatttatcactaaga

SEQ ID NO: 773950 - DNA, 120 bp, Artificial Sequence
  ENSG00000240891_18 (sequence is synthesized)
tgtttcaaacacaagctgttctttcatagcgtatactggtaactggtcacctcattcttcagataaacagtgcatactacccttagtatcagaaacatgcttcccagttttaaaacttgg

SEQ ID NO: 773951 - DNA, 120 bp, Artificial Sequence
  ENSG00000240891_19 (sequence is synthesized)
attcctttctatttcttttggccccttcttaaaagtgaaaagaacaatgatgggagatctttttagcgtggggcccaacaagagatagatatgcatgtttgctgcatgccagatatcttt

SEQ ID NO: 773952 - DNA, 120 bp, Artificial Sequence
  ENSG00000240891_20 (sequence is synthesized)
tatttaattctacagctttttccagaatggctgccaggtagagcacctgcatcattttggcaaagtcctctttggagtggggtcttcaagcctgatcttggaattgcgttttattattgt

SEQ ID NO: 773953 - DNA, 120 bp, Artificial Sequence
  ENSG00000240891_21 (sequence is synthesized)
ctgcctaggactcaggtctgcactgtgggacacaacgctaagtggaaggccccttatccatggcaccatggaagcaggcgcaggatgcatgggaaactgcaatggcattaaaggaggaag

SEQ ID NO: 773954 - DNA, 120 bp, Artificial Sequence
  ENSG00000240891_22 (sequence is synthesized)
ctccaagtggatttggagccattctataactccttgaaaacaagactacctcggggatatttaggatgactcgtgtgtcaccaagtgagaaatacctagtgttggaacatttccagtcct

SEQ ID NO: 773955 - DNA, 120 bp, Artificial Sequence
  ENSG00000240891_23 (sequence is synthesized)
tctcttgatggttctactttctgcaggttgttttgagcctaccaatcactactgcatgaggactttgaaactcgagagggaattttttttttatcgataagaggtgcttatctataagga

SEQ ID NO: 773956 - DNA, 120 bp, Artificial Sequence
  ENSG00000240891_24 (sequence is synthesized)
atttatttatttatttatttatttatagattaaatatctgccgtgcttcttacatcaagagcactcacacaggagcttactgaacttttcttacccaggatagatgctgctatggtcttt

SEQ ID NO: 773957 - DNA, 120 bp, Artificial Sequence
  ENSG00000240891_25 (sequence is synthesized)
aggatagatgctgctatggtctttctgtcctgaacaggaccacgcatctcagggctgtgagtgattcctgactctgctgttcatgtcctggctcccccagtcctcctggggacagtatac

SEQ ID NO: 773958 - DNA, 120 bp, Artificial Sequence
  ENSG00000240891_26 (sequence is synthesized)
atgtgtggatgtggtctagatctgagaagtcactaccaagccatgcccatgaacgaagataaaatgggtcgtgaagaactattagttcataagtagaccctccagaagagtgttgaaaag

SEQ ID NO: 773959 - DNA, 120 bp, Artificial Sequence
  ENSG00000240891_27 (sequence is synthesized)
aaaggctctagaaagaaaactaggcatggaaatgtgtgcactttgttgctcctcagcaccatctgagaatccctaaggaagtggcagcttctggattcttaagaaggaaatataaacatg

SEQ ID NO: 773960 - DNA, 120 bp, Artificial Sequence
  ENSG00000240891_28 (sequence is synthesized)
gagtcccgaatggatgtatgcatttataaagattgtcagactcttcttccagcagtttcctgtttctgtcttttgatgcccatagatggattttgcatgttgcttgcagagaggggtgtc

SEQ ID NO: 773961 - DNA, 120 bp, Artificial Sequence
  ENSG00000240891_29 (sequence is synthesized)
ctaggtgaggtactaaaagcacatccacacccccaactcttggtcttccaccctatacgttctgtaaaacaatttaagacctggcttttagcttgcacccttgaggaggtcataatagaa

SEQ ID NO: 773962 - DNA, 120 bp, Artificial Sequence
  ENSG00000240891_30 (sequence is synthesized)
atgcctctgggaaaatctggttgaactttcctttttttgcatttgaacccctccccaaagggttttctgggataatgtcaaattctgtagggccttctctggataagagtaagtaagtgt

SEQ ID NO: 773963 - DNA, 120 bp, Artificial Sequence
  ENSG00000240891_31 (sequence is synthesized)
gttccctcgttttctaaactttccttcaattctgatgctaaatgctaatgacaagctctgaaatccctggtctaccctcagggttttatttttgttgtcatttcattttgcttttgtttt

SEQ ID NO: 773964 - DNA, 120 bp, Artificial Sequence
  ENSG00000240891_32 (sequence is synthesized)
catttccccactttttaccctttgttacttggcaaagagataaggaggcaagaggagaattactgttctctgttttatttgagcctcggctttgtccaggtgtttggtgctatgaggcca

SEQ ID NO: 773965 - DNA, 120 bp, Artificial Sequence
  ENSG00000240891_33 (sequence is synthesized)
ggtgtgttgacaagtatctacacaggatgccagtaacacccaagggctgctgactgttccatgaaatgtttacatgattttgtcctttagttcttaaatatatggttgcacttcacttgg

SEQ ID NO: 773966 - DNA, 120 bp, Artificial Sequence
  ENSG00000240891_34 (sequence is synthesized)
gttgtaacatttaagtgcacctcagtgtttgcatgataaatgtcatcaagcatgacacaaaagcccagaaaactgtaccaaggttgcatgcacggagtcctgctctgcgtggtgcgtgca

SEQ ID NO: 773967 - DNA, 120 bp, Artificial Sequence
  ENSG00000240891_35 (sequence is synthesized)
ggtgctcactcctccatgctgcttggagctgccagccttgcttgcaatttgaaagtctgcacaagagttctgggagataggaggattatttacaattttcccttgataaacacctttgca

SEQ ID NO: 773968 - DNA, 120 bp, Artificial Sequence
  ENSG00000240891_36 (sequence is synthesized)
tcagcagaatctctgcctcaagaaaaagttgcttaacatattgtaaaggatgtgtgccttctgctccttgaccgtgagaccagacaggagaactcaggcatgtgggacagagggaaaaca

SEQ ID NO: 773969 - DNA, 120 bp, Artificial Sequence
  ENSG00000240891_37 (sequence is synthesized)
gattttaggttcatgactcattctgcaactgccaacaataaaatagtgacccaaccacatcacttattctcacaagttctggagacctttcagatcaaaacaaggctctcatacttgctc

SEQ ID NO: 773970 - DNA, 120 bp, Artificial Sequence
  ENSG00000240891_38 (sequence is synthesized)
agaactaacttcaagatcagctaagaagctacttgattgagccaaagaggactttagtttcacagaattttaggtcatatttattctgaaatacaactgagctattcatgagctccctgg

SEQ ID NO: 773971 - DNA, 120 bp, Artificial Sequence
  ENSG00000240891_39 (sequence is synthesized)
accatttcccacacagccatatttccatggctttgtggcaaaggggaccatcaaaggttttagttcggttagagtagtgtttacaggcttgaactttgagccttttagagagaccaccag

SEQ ID NO: 773972 - DNA, 120 bp, Artificial Sequence
  ENSG00000240891_40 (sequence is synthesized)
gatttcatggatacagaaggattggagagagaggtcgagatggacttaatggaagggaataagttattgaacattaaattttaaattagtggcagacctccaagagagtcatgccaaaaa

SEQ ID NO: 773973 - DNA, 120 bp, Artificial Sequence
  ENSG00000240891_41 (sequence is synthesized)
agtttttatatttgctgtattaaactcaatggtaattacttttagtcattttccttagcactgaatctaaaccctgaattaccgagagcagttaagccacagtcccaggattttattata

SEQ ID NO: 773974 - DNA, 120 bp, Artificial Sequence
  ENSG00000240891_42 (sequence is synthesized)
aactcaaagaaaagcacaaaatctgagcccaggtaatgatccatcttaggaatcctagttctttttacatgatctcatattcatccaaaaaaattgtttcttctcaataagacaacgtag

SEQ ID NO: 773975 - DNA, 120 bp, Artificial Sequence
  ENSG00000240891_43 (sequence is synthesized)
tagagtattctggaattaaatgcagttttatggcgtggcgggactttccatctctcgttttgagaatcttgccatgagaaagtgcttcccaatgagacattactacctcccagctaggag

SEQ ID NO: 773976 - DNA, 120 bp, Artificial Sequence
  ENSG00000240891_44 (sequence is synthesized)
gcttagcacaatgctaaaggtggagcaacagaagaaattcagatggaaatgaaactacttcttcctgggaagtaaaagagctacatgaaaccagtccatcctgcagatttagttcatgcc

SEQ ID NO: 773977 - DNA, 120 bp, Artificial Sequence
  ENSG00000240891_45 (sequence is synthesized)
acagttgaagtttgtgtgatgtttcttagtagctaatttcaaatttttactgttagattctaagaaacagagtgggctaatgattggagcacagccatgagactccgctccgttagctga

SEQ ID NO: 773978 - DNA, 120 bp, Artificial Sequence
  ENSG00000240891_46 (sequence is synthesized)
gcatgtgatcctgtgctaaatctttcttggttccttcatctttgaagatgctgtctgctactttagtgctgactgatttgcaaatcttggttgattagctccccaatcataaggtcccta

SEQ ID NO: 773979 - DNA, 120 bp, Artificial Sequence
  ENSG00000240891_47 (sequence is synthesized)
atgattagattaaatgccttatactcagggggtgtgcagatatgctattcttccttctgtggcttgggtggaaaagctgcttgggcttatttcccaacagtgtgatgtaggatggcagaa

SEQ ID NO: 773980 - DNA, 120 bp, Artificial Sequence
  ENSG00000240891_48 (sequence is synthesized)
cttatctaggaatggcacctttgatgatccatataatgaaatgtgtagagctcaaagaaatctgccaacatgtatgtggactcttgagaggtgggctttcccagtacatgctaaacagac

SEQ ID NO: 773981 - DNA, 120 bp, Artificial Sequence
  ENSG00000240891_49 (sequence is synthesized)
ttgttatgccaagaggaagtgaatagaaatgatagcatcaaatatccaaactgacaggaagtttcttttgcatagcatagaacatggttgtcttctgagttccactaatgttccaggata

SEQ ID NO: 773982 - DNA, 120 bp, Artificial Sequence
  ENSG00000240891_50 (sequence is synthesized)
tcttggccctctgcctctggctgctccctggtgtttggcaccatagcgttgtcacttacaaccattgccttgggacacacagagtgaactgtttgagtgataagtaatttaggtagaaac

SEQ ID NO: 773983 - DNA, 120 bp, Artificial Sequence
  ENSG00000240891_51 (sequence is synthesized)
tttacccttaatttcaaatgataccaaacagctcattactaccccaagggacgctctccgtagcttctggattccccagtttccttctagaaacaaggactccaatagcactataaccct

SEQ ID NO: 773984 - DNA, 120 bp, Artificial Sequence
  ENSG00000240891_52 (sequence is synthesized)
aaacaggccctaacccagaagaatacaccacaaaatgcgattgattttctcaaaatatcacagtcttagacactatacaaataattcaagaaaattctttctaccctgcagtggatatag

SEQ ID NO: 773985 - DNA, 120 bp, Artificial Sequence
  ENSG00000240891_53 (sequence is synthesized)
tattctattatattctccagcaaaacttttaggacttttcaaactcatttctaagccaaatagtttagataaatatttacccttatatttggggggaattcaggctcaccatttgccgag

SEQ ID NO: 773986 - DNA, 120 bp, Artificial Sequence
  ENSG00000240891_54 (sequence is synthesized)
gcaagcccatcaacagtctagaggcatattctgtgtcattccttcccgtctccttcatagaatactactttttccttttgtctcctggccattctccatcatctgctgattattgctaac

SEQ ID NO: 773987 - DNA, 120 bp, Artificial Sequence
  ENSG00000240891_55 (sequence is synthesized)
cacaggatgctggcaaagcttacagtgataggcacgtgtgttcagtgatgtccaatacactcttatcacagtggttattgcttcttactcttttcaaatgcattattctacccctcaacc

SEQ ID NO: 773988 - DNA, 120 bp, Artificial Sequence
  ENSG00000240891_56 (sequence is synthesized)
tacatccaatcattagaactatactggagcccagaacttgggaccaatacttaattcaaatagcaggggcttgctcacaaacattaagcccaacaagaagcacagcactttgaaaagtca

SEQ ID NO: 773989 - DNA, 120 bp, Artificial Sequence
  ENSG00000240891_57 (sequence is synthesized)
aataggcctttggtagctctgtacatttgcagttttacatttgttattagtttatagcactaataacacttcagtcgtgaatctacagtctcaatatgataagtcttagaacatgttcta

SEQ ID NO: 773990 - DNA, 120 bp, Artificial Sequence
  ENSG00000240891_58 (sequence is synthesized)
gaaatagtggtaccttgctgctattatacttagtaacttataccccaatataataataagtattaaatacagattgtgtatgcattctttgtgtgtatatgccaactgtactacttaacc

SEQ ID NO: 773991 - DNA, 120 bp, Artificial Sequence
  ENSG00000240891_59 (sequence is synthesized)
tcactgatgagcaattagaaaaatacagaaattgtcatagtgaaaataagtcttggtcaattcagatgatacgtgaacctgataaatgctctaatagatatgctattttgtcctgtattg

SEQ ID NO: 773992 - DNA, 120 bp, Artificial Sequence
  ENSG00000240891_60 (sequence is synthesized)
cttgttttacagtatggtgcatgttgtttgctaagtaaaatgataataataataaagtataccaattttaaggttagaattaaaattttgcacatatgcttcttgatattctgaaatgta

SEQ ID NO: 773993 - DNA, 120 bp, Artificial Sequence
  ENSG00000240891_61 (sequence is synthesized)
ttctgtggcttaattatcttattcatacacatttcacttggctttttacccctaggaaataattgtccaagtatatatctcgtcttctttcttgtaactttgattaaactgcttacttca

SEQ ID NO: 773994 - DNA, 120 bp, Artificial Sequence
  ENSG00000240891_62 (sequence is synthesized)
acttacaacattgtaaagccagaatacctcattttaacagtgaaaaaaaatatgatgacctgatgtgttctcttgtatttgatttgaactacctaaataggcttaactgtaataataaat

SEQ ID NO: 773995 - DNA, 120 bp, Artificial Sequence
  ENSG00000240891_63 (sequence is synthesized)
atacaattttggcaggcattttttcctttgtttggatgaacattttgttattggtccacttctaattttgtcttaaagagttataaactcagtgtcaataaaacatcttgttatataata

SEQ ID NO: 773996 - DNA, 120 bp, Artificial Sequence
  ENSG00000240891_64 (sequence is synthesized)
gagattcagcagaagatcctgatggaggaggaggataccaagagagaggtgcccaaggaagatggagttggtgatgtgcaacatttcggtgagaactttattgtcagaggttttcagtac

SEQ ID NO: 773997 - DNA, 120 bp, Artificial Sequence
  ENSG00000240891_65 (sequence is synthesized)
atatttacaagttcttactccatcatacatattgggaatgagctggcattttcaagcatatacccaggagtccagcaatcattggggaagagagcctgaggctggcaatccttgcccaga

SEQ ID NO: 773998 - DNA, 120 bp, Artificial Sequence
  ENSG00000240891_66 (sequence is synthesized)
actttggtcacctgcttgttcacaggccaccatatcttacttcactgaagtcatatgctgaggttttatttagtccagatgctgaaggatgggaagacccaagcagctggtgtggaggtc

SEQ ID NO: 773999 - DNA, 120 bp, Artificial Sequence
  ENSG00000240891_67 (sequence is synthesized)
tttcccagtgactcatcagtcattcagaaatcaaagcctgcacaagaaagggtgggatgggatgtatagagaaagacaccaagcctttagactccagcagagtagctgatattgacatat

SEQ ID NO: 774000 - DNA, 120 bp, Artificial Sequence
  ENSG00000240891_68 (sequence is synthesized)
ctgaggagggaggaggctccaatacgactactcccaattcacagggtttgtggttctggatgaaatctttgcaaagggtttccctggcactcaaacagaataaataggcttataaagtgt

SEQ ID NO: 774001 - DNA, 120 bp, Artificial Sequence
  ENSG00000240891_69 (sequence is synthesized)
tgtcaatatacctggctgcaagcaagttgctgcctgtgaccacagtctgcagaggccagagagagcaggaaaggaaatggaaaggaacctcaccttcatgcttggggaaaaggagaaacc

SEQ ID NO: 774002 - DNA, 120 bp, Artificial Sequence
  ENSG00000240891_70 (sequence is synthesized)
tcaggaaagaagctgagggaagagtcgggattgaaaagcagcagacaagggaaatgtggacacaagcacatgaagagaacaccatgtgaacataaagatggccatctacgagccaaggag

SEQ ID NO: 774003 - DNA, 120 bp, Artificial Sequence
  ENSG00000240891_71 (sequence is synthesized)
agaagcatggaatggatgcttccctcatagccttcagaagaaaccaactttgccaacaccttgatttcagacttctagcctccaaaactgtgagacaataaatttctgttgtttaagcca

SEQ ID NO: 774004 - DNA, 120 bp, Artificial Sequence
  ENSG00000240891_72 (sequence is synthesized)
tcctaagtttgcaaatgaagaaacagaattccaagtacaagtttggaagcccaggttcacagaagtaatcacagcagaaccagcactgggattcaggctcagctgtggaattacagactg

SEQ ID NO: 774005 - DNA, 120 bp, Artificial Sequence
  ENSG00000240972_0 (sequence is synthesized)
agtggtgtccgagaagtcaggcacgtagctcagcggcggccgcggcgcgtgcgtctgtgcctctgcgcgggtctcctggtccttctgccatcatgccgatgttcatcgtaaacaccaacg

SEQ ID NO: 774006 - DNA, 120 bp, Artificial Sequence
  ENSG00000240972_1 (sequence is synthesized)
tgccccgcgcctccgtgccggacgggttcctctccgagctcacccagcagctggcgcaggccaccggcaagcccccccagtacatcgcggtgcacgtggtcccggaccagctcatggcct

SEQ ID NO: 774007 - DNA, 120 bp, Artificial Sequence
  ENSG00000240972_2 (sequence is synthesized)
tacagcaagctgctgtgcggcctgctggccgagcgcctgcgcatcagcccggacagggtctacatcaactattacgacatgaacgcggccaatgtgggctggaacaactccaccttcgcc

SEQ ID NO: 774008 - DNA, 120 bp, Artificial Sequence
  ENSG00000240972_3 (sequence is synthesized)
taagagccgcagggacccacgctgtctgcgctggctccacccgggaacccgccgcacgctgtgttctaggcccgcccaccccaaccttctggtggggagaaataaacggtttagagacta

SEQ ID NO: 774009 - DNA, 120 bp, Artificial Sequence
  ENSG00000240972_4 (sequence is synthesized)
ggctcgggcccgaagtggacgttcggggcccgacgaggtcgctggggcgggctgaccgcgccctttcctcgcagtacatcgcggtgcacgtggtcccggaccagctcatggccttcggcg

SEQ ID NO: 774010 - DNA, 120 bp, Artificial Sequence
  ENSG00000241058_0 (sequence is synthesized)
gatagaaaagataaagggaccgagctgctgtcagcctggcttactgatctgcgtccgtttcaccacggattcagttactaagcatttttttctttttttggttctttgcaacgtgagtgg

SEQ ID NO: 774011 - DNA, 120 bp, Artificial Sequence
  ENSG00000241058_1 (sequence is synthesized)
cattggctcagtgatttccatgagcatctctaccagaaaacattgcctcgatgaggtgtggtggaagcccggcagccccttctaatcggctaggcttgagaaagcgtgtacctctgcatt

SEQ ID NO: 774012 - DNA, 120 bp, Artificial Sequence
  ENSG00000241058_2 (sequence is synthesized)
tccgaaattaactcagcgtgatcggcaagattttcctcagcatctggtgtcaagacactcgtcactattaattcggaaagaaaaaaaaaaacaaaacaccgttttccagcatttctcttg

SEQ ID NO: 774013 - DNA, 120 bp, Artificial Sequence
  ENSG00000241058_3 (sequence is synthesized)
gtggagaactaaacaacaggaaaaatgtctattttccctaagatatctttgagacctgaggttgaaaactatcttaaggaaggctttatgaataaggagattgtgactgctttaggtaaa

SEQ ID NO: 774014 - DNA, 120 bp, Artificial Sequence
  ENSG00000241058_4 (sequence is synthesized)
caagaagcagaaaggaagtttgaaactttgttaaagcacctgtcacatcctccatcatttacaactgtcagagtgaatacacatttagcctcagtacaacatgtgaaaaatctgttactt

SEQ ID NO: 774015 - DNA, 120 bp, Artificial Sequence
  ENSG00000241058_5 (sequence is synthesized)
gatgaacttcagaagcagtttaatggattaagtgttcctattcttcaacatccagaccttcaagatgtgttacttattcctgttattggacccagaaagaatattaaaaaacaacagtgt

SEQ ID NO: 774016 - DNA, 120 bp, Artificial Sequence
  ENSG00000241058_6 (sequence is synthesized)
gaagccattgttggagcccagtgtggcaatgcagttttaagaggagcccatgtctatgccccaggaattgtgtcagcatcacaatttatgaaagctggagatgttatttctgtatactct

SEQ ID NO: 774017 - DNA, 120 bp, Artificial Sequence
  ENSG00000241058_7 (sequence is synthesized)
gatattaaaggaaaatgtaagaaaggagccaaagaatttgatggaacaaaagtatttcttggaaatgggatttctgaactaagccgcaaagaaatcttcagtggattacctgaactgaaa

SEQ ID NO: 774018 - DNA, 120 bp, Artificial Sequence
  ENSG00000241058_8 (sequence is synthesized)
ggcatgggcataagaatgacagaaccagtatatctcagcccttcatttgacagtgtactgccccgttacttatttttacaaaatttgccatctgccttagtaagtcatgtactaaatcct

SEQ ID NO: 774019 - DNA, 120 bp, Artificial Sequence
  ENSG00000241058_9 (sequence is synthesized)
ggagagaagattctagacttgtgtgcagcacctggagggaaaacaacacacattgcagcactaatgcatgatcagggagaagttatagcactggataaaatcttcaacaaagtagaaaaa

SEQ ID NO: 774020 - DNA, 120 bp, Artificial Sequence
  ENSG00000241058_10 (sequence is synthesized)
atcaaacagaatgccttattgttagggctgaattccatcagggcattttgttttgatggaacaaaggcggttaaacttgatatggtggaggacacagaaggagaacctccatttctacca

SEQ ID NO: 774021 - DNA, 120 bp, Artificial Sequence
  ENSG00000241058_11 (sequence is synthesized)
gaatcctttgaccgaattcttctggatgcaccctgtagtggaatgggacagagaccaaacatggcctgtacttggtctgtgaaggaagtggcatcatatcagccattacagcgaaaactc

SEQ ID NO: 774022 - DNA, 120 bp, Artificial Sequence
  ENSG00000241058_12 (sequence is synthesized)
ttcactgcagcggttcagctgctgaagccagagggtgtgctggtttatagcacgtgcactataacactggccgaaaatgaagaacaggttgcctgggccctgacaaaatttccttgcctt

SEQ ID NO: 774023 - DNA, 120 bp, Artificial Sequence
  ENSG00000241058_13 (sequence is synthesized)
cagcttcagccccaggaaccgcagattggaggagaaggaatgaggggagctgggctctcatgtgaacagttgaaacagctgcagcgatttgatccatcggctgtgccattaccggacact

SEQ ID NO: 774024 - DNA, 120 bp, Artificial Sequence
  ENSG00000241058_14 (sequence is synthesized)
gacatggactctcttagagaggccagaagagaagacatgttgcgtctggctaataaggactctataggtttttttattgcaaaatttgtaaaatgcaaaagcacataggagagggatgga

SEQ ID NO: 774025 - DNA, 120 bp, Artificial Sequence
  ENSG00000241058_15 (sequence is synthesized)
tgctcagaaatgaaaattccaaacatttgctgtctgtggtttttttttttttaaccaaagtgttgtcaggccaactgaatgatgatgtggttgctatggaaacagaaaaggctgccagct

SEQ ID NO: 774026 - DNA, 120 bp, Artificial Sequence
  ENSG00000241058_16 (sequence is synthesized)
gttttaccagggatccagagacatagaggaagtagggggtggtatgagattatattttctgtttttaaaagattttttttttttatgtatttagtagagtataaagaaaagcagatgcct

SEQ ID NO: 774027 - DNA, 120 bp, Artificial Sequence
  ENSG00000241058_17 (sequence is synthesized)
atagatgtctggagcatattttcatttgtgatctaatgttttaatttgtaaagtgtacaagtcatttttaatgttaaaaattagtgaatctaacaaaaggaataaattagcaatatttga

SEQ ID NO: 774028 - DNA, 120 bp, Artificial Sequence
  ENSG00000241058_18 (sequence is synthesized)
ggcgttttcttcggtttcacttccggtaggagagtcccaaacggccagcggctgggaatttgcggtgggaaggatacgagcaagataaagcagcgagggatttaagtctggcaacagttg

SEQ ID NO: 774029 - DNA, 120 bp, Artificial Sequence
  ENSG00000241058_19 (sequence is synthesized)
gactgctggattttcagagaagtgttccccaaagcaaattatagtgctaatttccaatgttccataagcgtggcaagaaaaatgggaagttctcggtaaggtatatagtattatttctag

SEQ ID NO: 774030 - DNA, 78 bp, Artificial Sequence
  ENSG00000241058_20 (sequence is synthesized)
gcagtattcttaactaaattgtattcattcttccctttactttccagactgcccaggctggagtgcagtgccacaatc

SEQ ID NO: 774031 - DNA, 120 bp, Artificial Sequence
  ENSG00000241058_21 (sequence is synthesized)
gtagctgggactacaggcacgtgccatcacgccaggctaatttttgcatttttagtacagatggggttttacatattgatcaggctggtcttggactcctgacttggtgatccacccgcc

SEQ ID NO: 774032 - DNA, 120 bp, Artificial Sequence
  ENSG00000241058_22 (sequence is synthesized)
tgagactccatctcaaacaaacaaaaaagtctaaatgtcctcaattctgtccgtgtgtggcactagtgaagtaatttctggcaaatgctttatcagcattttctttccatagtttataga

SEQ ID NO: 774033 - DNA, 120 bp, Artificial Sequence
  ENSG00000241058_23 (sequence is synthesized)
acttccggtaggagagtcccaaacggccagcggctgggaatttgcggttctagcattgaaaagaaaagcttcacagcctggcatgaaacgaaactgaatgtccttgaaaccagttgacgg

SEQ ID NO: 774034 - DNA, 120 bp, Artificial Sequence
  ENSG00000241058_24 (sequence is synthesized)
aggagcaagcttaaaatttttttagactctgacttcagtcagatggttggattttaaccttggcaacgtggccttttaacatgccaaactcttgagttaacctgtacaaggagaatgtat

SEQ ID NO: 774035 - DNA, 120 bp, Artificial Sequence
  ENSG00000241106_0 (sequence is synthesized)
attctgaagaggctgacgattttactatctcatttttttcctttctccagaatgggttctgggtgggtcccctgggtggtggctctgctagtgaatctgacccgactggattcctccatg

SEQ ID NO: 774036 - DNA, 120 bp, Artificial Sequence
  ENSG00000241106_1 (sequence is synthesized)
actcaaggcacagactctccagaagattttgtgattcaggcaaaggctgactgttacttcaccaacgggacagaaaaggtgcagtttgtggtcagattcatctttaacttggaggagtat

SEQ ID NO: 774037 - DNA, 120 bp, Artificial Sequence
  ENSG00000241106_2 (sequence is synthesized)
gtacgtttcgacagtgatgtggggatgtttgtggcattgaccaagctggggcagccagatgctgagcagtggaacagccggctggatctcttggagaggagcagacaggccgtggatggg

SEQ ID NO: 774038 - DNA, 120 bp, Artificial Sequence
  ENSG00000241106_3 (sequence is synthesized)
gtctgtagacacaactacaggctgggcgcacccttcactgtggggagaaaagtgcaaccagaggtgacagtgtacccagagaggaccccactcctgcaccagcataatctgctgcactgc

SEQ ID NO: 774039 - DNA, 120 bp, Artificial Sequence
  ENSG00000241106_4 (sequence is synthesized)
tctgtgacaggcttctatccaggggatatcaagatcaagtggttcctgaatgggcaggaggagagagctggggtcatgtccactggccctatcaggaatggagactggacctttcagact

SEQ ID NO: 774040 - DNA, 120 bp, Artificial Sequence
  ENSG00000241106_5 (sequence is synthesized)
atgctagaaatgactcctgaacttggacatgtctacacctgccttgtcgatcactccagcctgctgagccctgtttctgtggagtggagagctcagtctgaatattcttggagaaagatg

SEQ ID NO: 774041 - DNA, 120 bp, Artificial Sequence
  ENSG00000241106_6 (sequence is synthesized)
ctgagtggcattgcagccttcctacttgggctaatcttccttctggtgggaatcgtcatccagctaagggctcagaaaggatatgtgaggacgcagatgtctggtaatgaggtctcaaga

SEQ ID NO: 774042 - DNA, 120 bp, Artificial Sequence
  ENSG00000241106_7 (sequence is synthesized)
gctgttctgctccctcagtcatgctaaggtcctcactgaagcttctctctctggagcctgaagtagtgatgagtagtctgggccctgggtgaggtaaaggacattcatgaggtcaatgtt

SEQ ID NO: 774043 - DNA, 120 bp, Artificial Sequence
  ENSG00000241106_8 (sequence is synthesized)
ctgggaataactctcttccctgatccttggaggagcccgaactgattctggagctctgtgttctgagatcatgcatctcccacccatctgcccttctcccttctacgtgtacatcattaa

SEQ ID NO: 774044 - DNA, 120 bp, Artificial Sequence
  ENSG00000241106_9 (sequence is synthesized)
tccccattgccaagggcattgtccagaaactcccctgagaccttactccttccagccccaaatcatttacttttctgtggtccagccctactcctataagtcatgatctccaaagctttc

SEQ ID NO: 774045 - DNA, 120 bp, Artificial Sequence
  ENSG00000241106_10 (sequence is synthesized)
tgtcttccaactgcagtctccacagtcttcagaagacaaatgctcaggtagtcactgtttccttttcactgtttttaaaaaccttttattgtcaaataaaatggagatacaaaaaatgta

SEQ ID NO: 774046 - DNA, 120 bp, Artificial Sequence
  ENSG00000241106_11 (sequence is synthesized)
atggtgctgtctacaaagaaggggacacacgcctcttccacccgctcatgctgttactgcatctgatcatctccgtgccgtgtccttgttcacttagcctgtgttgagtgtttgtctcca

SEQ ID NO: 774047 - DNA, 120 bp, Artificial Sequence
  ENSG00000241106_12 (sequence is synthesized)
atctcatttttttcctttctccagaatgggttctgggtgggtcccctgggtggtggctctgctagtgaatctgacccgactggattcctccatgactcaaggcacagactctccagtgat

SEQ ID NO: 774048 - DNA, 120 bp, Artificial Sequence
  ENSG00000241106_13 (sequence is synthesized)
tgatctgggacagtcacagaaaccagagtccttgggttagggtgggagaaaacatggcagatatctatcctcatatcttccaagaaatgaggagatctaatcacctcattatgtgcttcc

SEQ ID NO: 774049 - DNA, 120 bp, Artificial Sequence
  ENSG00000241106_14 (sequence is synthesized)
aaccctatgaactggtgtcctctaattctttggtcttagtatttaggaggcattcttatgggctgtgagaatctgtaaccgatggggggtaactccatgggtgccaactttggtttcgaa

SEQ ID NO: 774050 - DNA, 120 bp, Artificial Sequence
  ENSG00000241106_15 (sequence is synthesized)
gaaccttttctaaatttatttatttttctctagctagcattggatttggtgtctagtacagattctgggattccaagaaagtgctttaaatattgggatatttttactaatttaaagacc

SEQ ID NO: 774051 - DNA, 120 bp, Artificial Sequence
  ENSG00000241119_0 (sequence is synthesized)
agattcccagctgcttgctctcagctgcagttctctgatggcttgcacagggtggaccagcccccttcctctatgtgtgtgtctgctgctgacctgtggctttgccgaggcagggaagct

SEQ ID NO: 774052 - DNA, 120 bp, Artificial Sequence
  ENSG00000241119_1 (sequence is synthesized)
actggtagtgcccatggatgggagccactggttcaccatgaggtcggtggtggagaaactcattctcagggggcatgaggtggttgtagtcatgccagaggtgagttggcaactgggaag

SEQ ID NO: 774053 - DNA, 120 bp, Artificial Sequence
  ENSG00000241119_2 (sequence is synthesized)
atcactgaattgcacagtgaagacttattcaacttcatataccctggaggatctggaccgggagttcaaggcttttgcccatgctcaatggaaagcacaagtacgaagtatatattctct

SEQ ID NO: 774054 - DNA, 120 bp, Artificial Sequence
  ENSG00000241119_3 (sequence is synthesized)
attaatgggttcatacaatgacatttttgacttatttttttcaaattgcaggagtttgtttaaagacaaaaaattagtagaatacttaaaggagagttcttttgatgcagtgtttctcga

SEQ ID NO: 774055 - DNA, 120 bp, Artificial Sequence
  ENSG00000241119_4 (sequence is synthesized)
tccttttgataactgtggcttaattgttgccaaatatttctccctcccctccgtggtcttcgccaggggaatactttgccactatcttgaagaaggtgcacagtgccctgctcctctttc

SEQ ID NO: 774056 - DNA, 120 bp, Artificial Sequence
  ENSG00000241119_5 (sequence is synthesized)
ctatgtccccagaattctcttagggttctcagatgccatgactttcaaggagagagtacggaaccacatcatgcacttggaggaacatttattatgccaccgttttttcaaaaatgccct

SEQ ID NO: 774057 - DNA, 120 bp, Artificial Sequence
  ENSG00000241119_6 (sequence is synthesized)
agaaatagcctctgaaattctccaaacacctgttacggagtatgatctctacagccacacatcaatttggttgttgcgaacggactttgttttggactatcccaaacccgtgatgcccaa

SEQ ID NO: 774058 - DNA, 120 bp, Artificial Sequence
  ENSG00000241119_7 (sequence is synthesized)
catgatcttcattggtggtatcaactgccatcagggaaagccgttgcctatggaatttgaagcctacattaatgcttctggagaacatggaattgtggttttctctttgggatcaatggt

SEQ ID NO: 774059 - DNA, 120 bp, Artificial Sequence
  ENSG00000241119_8 (sequence is synthesized)
ctcagaaattccagagaagaaagctatggcaattgctgatgctttgggcaaaatccctcagacagtcctgtggcggtacactggaacccgaccatcgaatcttgcgaacaacacgatact

SEQ ID NO: 774060 - DNA, 120 bp, Artificial Sequence; identical to SEQ ID NO: 539842
  ENSG00000241119_9 (sequence is synthesized)

SEQ ID NO: 774061 - DNA, 120 bp, Artificial Sequence; identical to SEQ ID NO: 539843
  ENSG00000241119_10 (sequence is synthesized)

SEQ ID NO: 774062 - DNA, 120 bp, Artificial Sequence; identical to SEQ ID NO: 539844
  ENSG00000241119_11 (sequence is synthesized)

SEQ ID NO: 774063 - DNA, 120 bp, Artificial Sequence; identical to SEQ ID NO: 539845
  ENSG00000241119_12 (sequence is synthesized)

SEQ ID NO: 774064 - DNA, 120 bp, Artificial Sequence; identical to SEQ ID NO: 539846
  ENSG00000241119_13 (sequence is synthesized)

SEQ ID NO: 774065 - DNA, 120 bp, Artificial Sequence; identical to SEQ ID NO: 539847
  ENSG00000241119_14 (sequence is synthesized)

SEQ ID NO: 774066 - DNA, 120 bp, Artificial Sequence; identical to SEQ ID NO: 539848
  ENSG00000241119_15 (sequence is synthesized)

SEQ ID NO: 774067 - DNA, 120 bp, Artificial Sequence; identical to SEQ ID NO: 539849
  ENSG00000241119_16 (sequence is synthesized)

SEQ ID NO: 774068 - DNA, 120 bp, Artificial Sequence; identical to SEQ ID NO: 539850
  ENSG00000241119_17 (sequence is synthesized)

SEQ ID NO: 774069 - DNA, 120 bp, Artificial Sequence; identical to SEQ ID NO: 539851
  ENSG00000241119_18 (sequence is synthesized)

SEQ ID NO: 774070 - DNA, 120 bp, Artificial Sequence
  ENSG00000241123_0 (sequence is synthesized)
ccagctcacgtcttccccaccccagcatggccgcgtgcaccatgtccgtctgctccagcgcttgctctgactcctggcgagtggacgactgcccagagagctgctgtgagcccccctgcg

SEQ ID NO: 774071 - DNA, 120 bp, Artificial Sequence
  ENSG00000241123_1 (sequence is synthesized)
gcaccgccccctgcctgaccctggtctgcaccccagtgagctgtgtgtccagcccctgctgccaggcggcctgtgagcccagcccctgccaatcaggctgcaccagctcctgcacgccct

SEQ ID NO: 774072 - DNA, 120 bp, Artificial Sequence
  ENSG00000241123_2 (sequence is synthesized)
cgtgctgccagccggcttgctgcgcctcctccccctgccagcaggcctgctgcgtgcccgtctgctgcaagcctgtgtgctgcctgcccacctgctctaaggattcctcttcatgctgcc

SEQ ID NO: 774073 - DNA, 120 bp, Artificial Sequence
  ENSG00000241123_3 (sequence is synthesized)
agcagtctagctgccagccaacttgctgtgcctcttcctcctgccagcagtcctgctgtgtgcctgtctgctgcaagcccgtgtgctgtgtgcccacctgttctgaggattcctcttcat

SEQ ID NO: 774074 - DNA, 120 bp, Artificial Sequence
  ENSG00000241123_4 (sequence is synthesized)
tgtctgttgcaagcctgtctgctgcaaacccatctgctgtgtgcccgtctgctctggggcttccacttcatgctgccagcagtctagctgtcagccggcttgctgcaccacctcctgctg

SEQ ID NO: 774075 - DNA, 120 bp, Artificial Sequence
  ENSG00000241123_5 (sequence is synthesized)
cagaccctcctcctccgtgtccctcctctgccgccccatatgcaggcccgcctgctgcctgcccatctcctcctgctgtgcccctgcctcctcctaccaggccagctgctgccgcccggc

SEQ ID NO: 774076 - DNA, 120 bp, Artificial Sequence
  ENSG00000241123_6 (sequence is synthesized)
ctcctgcgtgtccctcctctgccgccccgcgtgctcccccctggcctgctgaggcctctgctcaggccaggagtccagttgctgatgtgcacatcccccagggccaactggtcctgactc

SEQ ID NO: 774077 - DNA, 120 bp, Artificial Sequence
  ENSG00000241123_7 (sequence is synthesized)
gggttaggaggttgcccccgcttgggacggggcccccatgtgctgaggtgacccccccctccatactcccaggaatctccatcctcgaagctccccagctcctgcctcccagcaggggcc

SEQ ID NO: 774078 - DNA, 120 bp, Artificial Sequence
  ENSG00000241123_8 (sequence is synthesized)
cacctgcctgttgggtcccctgtcctccctcccagcttctctgccccatgtcacttggcctcgacttgaacctgtcagcacctcctcctgctccccaataaactccccttggtcgcctga

SEQ ID NO: 774079 - DNA, 120 bp, Artificial Sequence
  ENSG00000241127_0 (sequence is synthesized)
gtaattgcctcggtgatgtcgtgggttcaagcagcctccttgatccagggccctggagacaaaggggacgtgtttgacgaagaagcagacgagtcgctcctggcgcagcgggaatggcag

SEQ ID NO: 774080 - DNA, 120 bp, Artificial Sequence
  ENSG00000241127_1 (sequence is synthesized)
agtaacatgcaaagacgagtcaaagaaggttatagagatggaatagatgctggcaaagcagttactcttcaacagggcttcaatcaaggttataagaaaggtgcagaagtcattttaaac

SEQ ID NO: 774081 - DNA, 120 bp, Artificial Sequence
  ENSG00000241127_2 (sequence is synthesized)
tatggacgactccgaggaacattgagtgctttgctctcctggtgtcaccttcataataataattcaactttgatcaataaaataaacaatcttctggatgcagttggccagtgtgaagag

SEQ ID NO: 774082 - DNA, 120 bp, Artificial Sequence
  ENSG00000241127_3 (sequence is synthesized)
caccgtcccatgttgtagatttattggactccattgaggatatggacctttgtcatgtagttccagctgagaaaaagattgatgaagctaaagatgaaagactctgtgaaaataatgctg

SEQ ID NO: 774083 - DNA, 120 bp, Artificial Sequence
  ENSG00000241127_4 (sequence is synthesized)
agtttaacaaaaactgtagcaagagccatagtgggatagattgttcatatgtagaatgttgtagaacacaggagcatgcacattcagaaaacccaagccccacatggattttggaacaga

SEQ ID NO: 774084 - DNA, 120 bp, Artificial Sequence
  ENSG00000241127_5 (sequence is synthesized)
cagccagtttagttaaacagctgggcctatcagtagatgtattacaacacctcaaacaactataaaattaccttcccttttctaatgaaaataatgttcagaacatttggtttcctaaca

SEQ ID NO: 774085 - DNA, 120 bp, Artificial Sequence
  ENSG00000241127_6 (sequence is synthesized)
atcgaaatttgtactggtttctgcatcaaacacctcaactgtagggttaccctttatggaagtttgaaattaacactattgtcttcaaaattaacactattaaatgtaatataagccttt

SEQ ID NO: 774086 - DNA, 120 bp, Artificial Sequence
  ENSG00000241127_7 (sequence is synthesized)
tggacgactccgaggaacattgaggaactcaacggattggagcctactgggcttgagagccccgctgaggagtccggaggttgggacgcaactactgccgcgtcccctcccggtccccgg

SEQ ID NO: 774087 - DNA, 120 bp, Artificial Sequence
  ENSG00000241127_8 (sequence is synthesized)
ccacatggcgagcggggcgacaccgaagcagcccacggagctcgaggcgacgctgctgagcctggttccccaaagcggccgcgccactccccgcttccccgcccggctccgggccccagg

SEQ ID NO: 774088 - DNA, 120 bp, Artificial Sequence
  ENSG00000241127_9 (sequence is synthesized)
cgccgagccaccgccggcgtttcagacgcaaaccccaccgcgaccctgcagcagcctgccccgcctggccgccagaggcaccttccaactccgaaacacatttttcaacatataatagaa

SEQ ID NO: 774089 - DNA, 120 bp, Artificial Sequence
  ENSG00000241127_10 (sequence is synthesized)
tcattatcagaggtggacacatttagaagttgttcttaatcagagggcagcttgtgcttaggaaagccagcctcagtcctcagcacccagcacccagtgctgcaggtttctcctgggtga

SEQ ID NO: 774090 - DNA, 120 bp, Artificial Sequence
  ENSG00000241127_11 (sequence is synthesized)
agatggaccagcccaccttggccctccggcaagctagaacaatatgtacacgtctctcaaactatgaagagaagatttgggaggagtatgagaaaatcctcaataccaaactagcagagc

SEQ ID NO: 774091 - DNA, 120 bp, Artificial Sequence
  ENSG00000241127_12 (sequence is synthesized)
aatacgagtcgtttgtgaaattcacacatgagcagattatgcgaccatgtgggacaagcccaacaaactatgtgtcttgaagctttttgttgcagatctcggtaccaggtttgacctcaa

SEQ ID NO: 774092 - DNA, 120 bp, Artificial Sequence
  ENSG00000241127_13 (sequence is synthesized)
aaaactgtgactatcagtgttttaaaaattgcccggtaactctagacttcaaaagtgggataagtaatgataaaccaataataaacttaggagaagcatagtctgctttagttatattgt

SEQ ID NO: 774093 - DNA, 120 bp, Artificial Sequence
  ENSG00000241127_14 (sequence is synthesized)
tatgccatattatggtcagtaacacagtaaaggcctaattcatctgctttctaaattggttctgtacttttctagaaaagcctacatgtatatacttagttacagctgcacttctccatt

SEQ ID NO: 774094 - DNA, 120 bp, Artificial Sequence
  ENSG00000241127_15 (sequence is synthesized)
taaatgctgaatcattttaacctcaatactactggaggatgtttctgtataaataaagtgtttaaactgaaatgcttttcctggtgctaaatacactaaagcgtgtcgcagatcatagaa

SEQ ID NO: 774095 - DNA, 120 bp, Artificial Sequence
  ENSG00000241127_16 (sequence is synthesized)
ttatattgccttcaaaaagtcaaaatctttatcagctcatctactttaatgtgtgaactacatattgtcttttcgtgcaaagaaatggtaagaagatgtatacttctgctacctgaacaa

SEQ ID NO: 774096 - DNA, 120 bp, Artificial Sequence
  ENSG00000241127_17 (sequence is synthesized)
ttatctatctcattgaaaggtcttcagattttgaataaaacttgtagtacttccacacagtatgacagacctctagactagaagtacatgatgaaaatagttggtaattaagataaaatt

SEQ ID NO: 774097 - DNA, 120 bp, Artificial Sequence
  ENSG00000241127_18 (sequence is synthesized)
atttctcgatggttacttgaaagcgtgtaaaacaacaagacgcattctttgagcgcctacgggatgcgttagaaactgaggaccgaccaaaattaactatgtgtagactttgaacagttt

SEQ ID NO: 774098 - DNA, 120 bp, Artificial Sequence
  ENSG00000241127_19 (sequence is synthesized)
tattatggctgtcaaaggacgtgtacgcagtttatatgggtggcttgaatgggtagggagcctaaagttaaggagtagtgttaatcaagacatattgaaaagatgaactaaagcatgctg

SEQ ID NO: 774099 - DNA, 120 bp, Artificial Sequence
  ENSG00000241127_20 (sequence is synthesized)
tcagaggacaataagggaaagctaatgtggaatactggtgtctaggaaggttatagagatggaatagatgctggcaaagcagttactcttcaacagggcttcaatcaaggttataagaaa

SEQ ID NO: 774100 - DNA, 120 bp, Artificial Sequence
  ENSG00000241128_0 (sequence is synthesized)
atggccaatgtcaccttggtgacaggatttcttcttatggggttttctaatatccagaagctgcggattttatatggtgtgctcttcctactgatttacctggcagccctaatgagtaac

SEQ ID NO: 774101 - DNA, 120 bp, Artificial Sequence
  ENSG00000241128_1 (sequence is synthesized)
cttctcatcattactctcattaccctggacgtaaagctccaaacacccatgtacttcttcctgaagaacttatcctttttggatgtcttcctggtgtctgttccaatcccaaaattcatt

SEQ ID NO: 774102 - DNA, 120 bp, Artificial Sequence
  ENSG00000241128_2 (sequence is synthesized)
gtcaacaacctaacccacaacaattccatttccattctaggatgtgccttccagctacttttaatgacttccttctcagcaggagagatatttatcctcactgccatgtcctatgaccgc

SEQ ID NO: 774103 - DNA, 120 bp, Artificial Sequence
  ENSG00000241128_3 (sequence is synthesized)
gcgtacacagctggcacattttccatgcctttctgtggctccagtgtgattccacagtttttctgtgatgttccttcattactaaggatttcctgttctgaaacactaatggtaatttat

SEQ ID NO: 774104 - DNA, 120 bp, Artificial Sequence
  ENSG00000241128_4 (sequence is synthesized)
gcaggtattggagttggtgcatgtttaagcatttcttgtttcatctgtattgtgatctcttacatttatatcttctccactgtactgaagatccctaccactaaaggtcagtccaaagct

SEQ ID NO: 774105 - DNA, 120 bp, Artificial Sequence
  ENSG00000241128_5 (sequence is synthesized)
ttttccacatgcttcccccatctcactgttttcactgtttttatcataactgcttattttgtttatcttaagccaccttcaaattcaccatctgttattgacaggctgctttctgtgatc

SEQ ID NO: 774106 - DNA, 120 bp, Artificial Sequence
  ENSG00000241128_6 (sequence is synthesized)
tacactgtgatgcctccagtatttaaccctgtaacctacagcctgcggaacaatgacatgaaatgtgctctgataaggttgctgcagaaaacatatggtcaggaggcttacttcatttaa

SEQ ID NO: 774107 - DNA, 120 bp, Artificial Sequence
  ENSG00000241128_7 (sequence is synthesized)
tgtgccttccagctacttttaatgacttccttctcagcaggagagatatttatcctcactgccatgtcctatgaccgctatgtagccatctgctgtcccctgaactacgaggtattggag

SEQ ID NO: 774108 - DNA, 120 bp, Artificial Sequence
  ENSG00000241128_8 (sequence is synthesized)
tacagtgccttacagatcacaagaaactttccttatttgtaactttggaaagacctgagaaaagaaagcaatatactcaaattattttttccctgaagaaataaatactcaagagcctaa

SEQ ID NO: 774109 - DNA, 120 bp, Artificial Sequence
  ENSG00000241149_0 (sequence is synthesized)
ctccagttcttttcttcagggctctgcattctctgctcctagaggccaagcctctgtggccttgtgtcctgcaggtattcgcagatttatggctgaaagaccgggatcccctggaagccg

SEQ ID NO: 774110 - DNA, 120 bp, Artificial Sequence
  ENSG00000241149_1 (sequence is synthesized)
agaaatgagactgttgacattcagagacatagctatagaattctctctggaggagtggcaatgcctggattgtgctcagcagaatttatatagagatgtgatgttagagaactacagaaa

SEQ ID NO: 774111 - DNA, 120 bp, Artificial Sequence
  ENSG00000241149_2 (sequence is synthesized)
cctggtctccctgggtattgctgactctaagccagacttgattacctgtctggagcaaaataaagaggcttggaatataaagagaaatgagatggtagccaaacacccagttacgtgttc

SEQ ID NO: 774112 - DNA, 120 bp, Artificial Sequence
  ENSG00000241149_3 (sequence is synthesized)
tcatttcacccaagaccttcatccagagcagggcataaaacattcactccaaaaagtaataccaagaacatatggaaaatgtggacatgagaatttacaatttaaaaaatgctgtaaaag

SEQ ID NO: 774113 - DNA, 120 bp, Artificial Sequence
  ENSG00000241149_4 (sequence is synthesized)
tgtgggtgagtgtgaggtgcacaaaggaggttataatgaagttaagcaatgtttgtcaaatacccaaaacaaaatatttcagactcataagtgtgtcatagtctttggtaaattttcaaa

SEQ ID NO: 774114 - DNA, 120 bp, Artificial Sequence
  ENSG00000241149_5 (sequence is synthesized)
ttgcaatagacatgaaacaagatatactggaaagaaacatttcaaatgtaaaaaatatggcaaatcgttttgcatgccttcacacctaaatcaacatcagataattcatactaaggagaa

SEQ ID NO: 774115 - DNA, 85 bp, Artificial Sequence
  ENSG00000241149_6 (sequence is synthesized)
acatcagataattcatactaaggagaagtcctacaaatgtgaagaatgcggcaaatcctttaaacgctcctcaaactgtactacg

SEQ ID NO: 774116 - DNA, 77 bp, Artificial Sequence
  ENSG00000241149_7 (sequence is synthesized)
gaaaccctacacatgtgaagaatgtggccaagcttttaggcgctcctcaacacttactaaccacaagagaattcata

SEQ ID NO: 774117 - DNA, 74 bp, Artificial Sequence
  ENSG00000241149_8 (sequence is synthesized)
ctaaccacaagagaattcatacgtatcctcaaccctcaatgaccacaagagaattcatactggagagaaaccct

SEQ ID NO: 774118 - DNA, 67 bp, Artificial Sequence
  ENSG00000241149_9 (sequence is synthesized)
gaaaccctacacatgtgaagaatgtggcagagcctttaactgctcctcaacccttaagcaaagcttt

SEQ ID NO: 774119 - DNA, 120 bp, Artificial Sequence
  ENSG00000241149_10 (sequence is synthesized)
actggagagaaaccctacaaaagtaaataatgtggcaaattctagccctcaggccttataatacatacaataatttatgctggaaaaaaacactacaagtgtagagaatatggacaaacc

SEQ ID NO: 774120 - DNA, 120 bp, Artificial Sequence
  ENSG00000241149_11 (sequence is synthesized)
tttaacaagttccaaaccttaatagaaaataagagaatccatattggacaaaaattttataaatgtaaaaaaatgtaacaaagcctttgaccaaccctcaaaccttaatgaacccaagag

SEQ ID NO: 774121 - DNA, 120 bp, Artificial Sequence
  ENSG00000241186_0 (sequence is synthesized)
agtttcccctggacgccttgctcctgcttctgctacgaccttctggggaaaacgaatttctcattttcttcttaaattgccattttcgctttaggagatgaatgttttcctttggctgtt

SEQ ID NO: 774122 - DNA, 120 bp, Artificial Sequence
  ENSG00000241186_1 (sequence is synthesized)
ttggcaatgactctgaattaaagcgatgctaacgcctcttttccccctaattgttaaaagctatggactgcaggaagatggcccgcttctcttacagtgtgatttggatcatggccattt

SEQ ID NO: 774123 - DNA, 120 bp, Artificial Sequence
  ENSG00000241186_2 (sequence is synthesized)
ctaaagtctttgaactgggattagttgccgggctgggccatcaggaatttgctcgtccatctcggggatacctggccttcagagatgacagcatttggccccaggaggagcctgcaattc

SEQ ID NO: 774124 - DNA, 120 bp, Artificial Sequence
  ENSG00000241186_3 (sequence is synthesized)
ggcctcggtcttcccagcgtgtgccgcccatggggatacagcacagtaaggagctaaacagaacctgctgcctgaatgggggaacctgcatgctggggtccttttgtgcctgccctccct

SEQ ID NO: 774125 - DNA, 120 bp, Artificial Sequence
  ENSG00000241186_4 (sequence is synthesized)
ccttctacggacggaactgtgagcacgatgtgcgcaaagagaactgtgggtctgtgccccatgacacctggctgcccaagaagtgttccctgtgtaaatgctggcacggtcagctccgct

SEQ ID NO: 774126 - DNA, 120 bp, Artificial Sequence
  ENSG00000241186_5 (sequence is synthesized)
gctttcctcaggcatttctacccggctgtgatggccttgtgatggatgagcacctcgtggcttccaggactccagaactaccaccgtctgcacgtactaccacttttatgctagttggca

SEQ ID NO: 774127 - DNA, 120 bp, Artificial Sequence
  ENSG00000241186_6 (sequence is synthesized)
tctgcctttctatacaaagctactattaatcgacattgacctatttccagaaatacaattttagatatcatgcaaatttcatgaccagtaaaggctgctgctacaatgtcctaactgaaa

SEQ ID NO: 774128 - DNA, 120 bp, Artificial Sequence
  ENSG00000241186_7 (sequence is synthesized)
gatgatcatttgtagttgccttaaaataatgaatacatttccaaaatggtctctaacatttccttacagaactacttcttacttctttgccctgccctctcccaaaaaactacttctttt

SEQ ID NO: 774129 - DNA, 64 bp, Artificial Sequence
  ENSG00000241186_8 (sequence is synthesized)
atgacgcgatcttggttcactgcaacctccgcatccggggttcaagccattctcctgcctcagc

SEQ ID NO: 774130 - DNA, 120 bp, Artificial Sequence
  ENSG00000241186_9 (sequence is synthesized)
cctgaccttgtgatccactcgcctcagcctctcgaagtgctgagattacacacgtgagcaactgtgcaaggcctggtgtttcttgatacatgtaattctaccaaggtcttcttaatatgt

SEQ ID NO: 774131 - DNA, 120 bp, Artificial Sequence
  ENSG00000241186_10 (sequence is synthesized)
tcttttaaatgattgaattatatgttcagattattggagactaattctaatgtggaccttagaatacagttttgagtagagttgatcaaaatcaattaaaatagtctctttaaaaggaaa

SEQ ID NO: 774132 - DNA, 120 bp, Artificial Sequence
  ENSG00000241186_11 (sequence is synthesized)
gaaaacatctttaaggggaggaaccagagtgctgaaggaatggaagtccatctgcgtgtgtgcagggagactgggtaggaaagaggaagcaaatagaagagagaggttgaaaaacaaaat

SEQ ID NO: 774133 - DNA, 120 bp, Artificial Sequence
  ENSG00000241186_12 (sequence is synthesized)
gggttacttgattggtgattaggtggtggtagagaagcaagtaaaaaggctaaatggaagggcaagtttccatcatctatagaaagctatataagacaagaactcccctttttttcccaa

SEQ ID NO: 774134 - DNA, 120 bp, Artificial Sequence
  ENSG00000241186_13 (sequence is synthesized)
aggcattataaaaagaatgaagcctccttagaaaaaaaattatacctcaatgtccccaacaagattgcttaataaattgtgtttcctccaagctattcaattcttttaactgttgtagaa

SEQ ID NO: 774135 - DNA, 120 bp, Artificial Sequence
  ENSG00000241186_14 (sequence is synthesized)
gacaaaatgttcacaatatatttagttgtaaaccaagtgatcaaactacatattgtaaagcccatttttaaaatacattgtatatatgtgtatgcacagtaaaaatggaaactatattga

SEQ ID NO: 774136 - DNA, 120 bp, Artificial Sequence
  ENSG00000241186_15 (sequence is synthesized)
ccttcatgtgtctcctgagtatctttccaacactctttcacctaaaagggcacctggttctggaactgtgcaggtgctggactgcttttggttttggaagtgagacaaggattgtgtatt

SEQ ID NO: 774137 - DNA, 120 bp, Artificial Sequence
  ENSG00000241186_16 (sequence is synthesized)
ttacttccctagagtgcagttttcctcccctgagtccacttcacactggggaacccagaaccaccactggcctatgcatgaaaatgacttctctgctcaaaggcacagagacttactctg

SEQ ID NO: 774138 - DNA, 120 bp, Artificial Sequence
  ENSG00000241186_17 (sequence is synthesized)
tctacggacggaactgtgagcacgatgtgcgcaaagagtaagcaattcagaggggcggggagccgtggagaggagagagaaagggaagtggaaatttcagacccaaggctatcgccttac

SEQ ID NO: 774139 - DNA, 120 bp, Artificial Sequence
  ENSG00000241224_0 (sequence is synthesized)
gtctcagctcacagggcttccaggatcatggcctataaaatgcttcaagtagtcctgtgctcaacattgcttatcggagcattgggagcgccatttttgttggaagaccctgcaaaccag

SEQ ID NO: 774140 - DNA, 120 bp, Artificial Sequence
  ENSG00000241224_1 (sequence is synthesized)
ttcctacgtctcaaaagacatgtaaatttgcaggattactgggacccagatcacagttcagatgtgtgggtaaacacactggctaagcaggctcgtgaaacatggattgctttgaaaaca

SEQ ID NO: 774141 - DNA, 120 bp, Artificial Sequence
  ENSG00000241224_2 (sequence is synthesized)
acagcacagtattatttggatatgaataccttcacctttgacatgtctactgcccagtaaatatgttttcctggttaaagcaggaggatgaagatggcagaggttggaatggcattgtgc

SEQ ID NO: 774142 - DNA, 120 bp, Artificial Sequence
  ENSG00000241224_3 (sequence is synthesized)
caaaaccatgggttttagagatctgagggtatatccatgctgtttactacattatttattatgtctgtctcaaagttgttgaaaacagtagttatgaaaacccatgtaggaaactggaat

SEQ ID NO: 774143 - DNA, 120 bp, Artificial Sequence
  ENSG00000241224_4 (sequence is synthesized)
aagacattctcaataaatggtagttctcaaaaaaagaactaaaaaaaaaaaaggctgtagtaataacatttaccaaaacgatggcatttatgggaaaaggaaagcaaaaacataaacaaa

SEQ ID NO: 774144 - DNA, 120 bp, Artificial Sequence
  ENSG00000241224_5 (sequence is synthesized)
gaaaagtagtttcattaaaccactctgttcatagcttttactctctattgcctcttctttgagagagttttttaattcaaagaaggacagggagctctcaaatggagctgatcctcttct

SEQ ID NO: 774145 - DNA, 120 bp, Artificial Sequence
  ENSG00000241224_6 (sequence is synthesized)
ctcttcttcagtgcttgtcgcattcttaagtcagtcgattttaaaaccatgactttgaaacgtttttcatcaaaggtgtactgctgagtggagaatacagccttaccttaatacaacaag

SEQ ID NO: 774146 - DNA, 120 bp, Artificial Sequence
  ENSG00000241224_7 (sequence is synthesized)
tggctaggaactcaatggaagtcattcacttgtaagtgcaaacttcttccaagttttgtaaaatttttgtaagctttgcattctgttccacaatttattgatgtttgttttaatgtgaaa

SEQ ID NO: 774147 - DNA, 120 bp, Artificial Sequence
  ENSG00000241224_8 (sequence is synthesized)
taacagttttgactcactggccaggcacattttataattttttcaattaaaactgaaaaattggccatagggaaaagtggactgcatttatcctataactttcctaatattcatggatta

SEQ ID NO: 774148 - DNA, 120 bp, Artificial Sequence
  ENSG00000241224_9 (sequence is synthesized)
ccacctcagtttgagaagcattgagatgatacaactaattgccaagattgccccccaaaatcacaggtaaatggaatttttgtcttcagaagtctatttatctccattctctattctcta

SEQ ID NO: 774149 - DNA, 120 bp, Artificial Sequence
  ENSG00000241224_10 (sequence is synthesized)
ttttagttgttctctcgaacaatttatttttaccttttaaggtaaatggaaacatttccctaagaccttagttgatcttatgtggtcttaaaacaatcttaagcactttttgagtggcaa

SEQ ID NO: 774150 - DNA, 120 bp, Artificial Sequence
  ENSG00000241224_11 (sequence is synthesized)
gtaaatcagaaaaaccaaatgccaagaagttgactggaaggactttggcctcagcaatttcttctccaaaaggacactgacagctgctcagtgtttcacatttcccatcctatggcctag

SEQ ID NO: 774151 - DNA, 120 bp, Artificial Sequence
  ENSG00000241224_12 (sequence is synthesized)
aggtgttttcagtgagaaatttaaggctaatttataacttattaagttaactgctatccatttccaataaatatgaacatagatttttaaattacatctgaacaaacaaaacaaagatga

SEQ ID NO: 774152 - DNA, 120 bp, Artificial Sequence
  ENSG00000241224_13 (sequence is synthesized)
tgaatcatttagttttgcagtgggaaataagtttgagattgtacataaatatatcttcagtgttttaccaataatatacattttactaacacaaagtttcattctttaattatttaataa

SEQ ID NO: 774153 - DNA, 88 bp, Artificial Sequence
  ENSG00000241224_14 (sequence is synthesized)
aaaattgagaatgtctgtgtattatgtatatatagagatgctcctcaacatacgatggcgttacatcccaataaacccgtcacacgct

SEQ ID NO: 774154 - DNA, 120 bp, Artificial Sequence
  ENSG00000241224_15 (sequence is synthesized)
cttcaccatttatctttttaaatagtcattgcattagctgaccactaattaacacatgactagcctagccctgatttttcctctctagacactctgaactatatctgctttttcttgccc

SEQ ID NO: 774155 - DNA, 120 bp, Artificial Sequence
  ENSG00000241224_16 (sequence is synthesized)
atgaagtggtttttgcctggtaaactctgcctcttgcttaaagactagactcaaatgtccctctgaagcctttcccttcttctcagggcgacatttgtctttccttctctccctttttgc

SEQ ID NO: 774156 - DNA, 120 bp, Artificial Sequence
  ENSG00000241224_17 (sequence is synthesized)
atgctctttcacaaataaatagctctcaaaatgtcaattggaattacttgttttgtgtacccaacctacctacctagactataaaggtagggtctgtatcttatccttcaaggtaattat

SEQ ID NO: 774157 - DNA, 120 bp, Artificial Sequence
  ENSG00000241224_18 (sequence is synthesized)
tctcgggaactagcaaaatgattgttatatagtcaaagcttaataaattattacatgtatgtgtagattgatgaatggatagtggtcggactttagttcactttcagttgttcagtagct

SEQ ID NO: 774158 - DNA, 120 bp, Artificial Sequence
  ENSG00000241224_19 (sequence is synthesized)
aaatatccccggtgacaattattcaaggctttaatgttgttcctccttttgcttgccttttgtacattttcctattcatttgcattctcgctgcaaaagaaacaaagaagaaatttgcat

SEQ ID NO: 774159 - DNA, 120 bp, Artificial Sequence
  ENSG00000241224_20 (sequence is synthesized)
tggccttttttattctatatttacttttctgatagaagaagacattaaaactccaggccaaatgaaattgctgaattatctgagtatttcaattattcatgatctccctcttacaattta

SEQ ID NO: 774160 - DNA, 120 bp, Artificial Sequence
  ENSG00000241224_21 (sequence is synthesized)
aatgaattctttcacttattctttctttctttccacatatctcaggatctgattatcatcaggcatgaggattgtataaagtcataaaaagttgaatgtccttgttttcatggggccttg

SEQ ID NO: 774161 - DNA, 120 bp, Artificial Sequence
  ENSG00000241224_22 (sequence is synthesized)
atcttgtccgtactccacataactgggtcttaaccggtctaccaggatctgcttgttttgcacttgctgatgaaaactactaactgaataatgcatccagttttatggctgtttttgtcc

SEQ ID NO: 774162 - DNA, 120 bp, Artificial Sequence
  ENSG00000241224_23 (sequence is synthesized)
aataggcattatttagcattattaaaacaagacatttgtttatttggtcaattaagtgattaagtaggctggtagactgtgtcttctttatagaatgttgacattttcaggtactctcct

SEQ ID NO: 774163 - DNA, 120 bp, Artificial Sequence
  ENSG00000241224_24 (sequence is synthesized)
gcctctacttgtagaccagatttgtaccaactgacaggcactatgtaatgtagcaagactctgctacattggtttatactgtggccccacaaatactgtaaaatatctgagtattgaaat

SEQ ID NO: 774164 - DNA, 120 bp, Artificial Sequence
  ENSG00000241224_25 (sequence is synthesized)
aaacagataattaaaagtatgaaaaccaaattctatttggtataattcttccattatatttttctcatcttttaggaatatctgtatgataatcagaataactgatgcaagatgtgttct

SEQ ID NO: 774165 - DNA, 120 bp, Artificial Sequence
  ENSG00000241224_26 (sequence is synthesized)
gcttggtcttggagccacaatttgagaatgacgtatctgagttagagtctcctggaattgaggtttatgtaactttttcagacggttgttccccaccctgctcctctcaatcactcccca

SEQ ID NO: 774166 - DNA, 120 bp, Artificial Sequence
  ENSG00000241224_27 (sequence is synthesized)
gctggaaaatggagcccaaaactggatcatggcctataaaatgcttcaagtagtcctgtgctcaacattgcttatcggaatatctgtatgataatcagaataactgatgcaagatgtgtt

SEQ ID NO: 774167 - DNA, 120 bp, Artificial Sequence
  ENSG00000241224_28 (sequence is synthesized)
gagcattgggagcgccatttttgttggaagaccctgcaaaccagttcctacgtctcaaaagacatgtaaatttgcaggattactgggacccagatcacagttcagatgtgctcgtgaaac

SEQ ID NO: 774168 - DNA, 120 bp, Artificial Sequence
  ENSG00000241233_0 (sequence is synthesized)
ctacctgctccaccctcaacccaccagaaccatgggctgctgtggctgctctggaggctgtggctccggctgtgggggctgcggctctggctgtgggggatgtggctctagctgctgtgt

SEQ ID NO: 774169 - DNA, 120 bp, Artificial Sequence
  ENSG00000241233_1 (sequence is synthesized)
gcccatctgctgctgcaagcccgtgtgctgctgtgtgccagcctgttcctgctccagctgtggctcctgtgggggctccaaggggggccgtggctcctgtgggggctccaagggggactg

SEQ ID NO: 774170 - DNA, 120 bp, Artificial Sequence
  ENSG00000241233_2 (sequence is synthesized)
tggctcctgtgggggctccaagggaggctgtggttcttgtggctgctcccagtgcagctgctataagccctgctgttgctcctcaggctgtgggtcatcctgctgccagtccagctgctg

SEQ ID NO: 774171 - DNA, 120 bp, Artificial Sequence
  ENSG00000241233_3 (sequence is synthesized)
caaaccctgctgttcccagtccagctgttgtaagccctgcagctgctcttcaggctgtgggtcatcctgctgccagtccagctgctgcaagccctgctgttcccagtccagctgctgtaa

SEQ ID NO: 774172 - DNA, 120 bp, Artificial Sequence
  ENSG00000241233_4 (sequence is synthesized)
caagatctgaggctctgcctacaaatctcagctggtcccacagatctgggctctccaggaatgactgtagctgtgtcctgaattcctgaagcacatctctgagtctgtcctcctctggac

SEQ ID NO: 774173 - DNA, 120 bp, Artificial Sequence
  ENSG00000241233_5 (sequence is synthesized)
taaggcagcctagcgtccagggctcagtactcagctgctcagcctctgaggtcatgagggcttctggcatgctgggtgctgcccatcaaccctcccagaatcccctcttcctttcctgac

SEQ ID NO: 774174 - DNA, 120 bp, Artificial Sequence
  ENSG00000241233_6 (sequence is synthesized)
ctcatcacttcaaccttctcagggcttcaagatcccacatccctgggcccctcctgtgagcctgctggaaacacactgaaactggaatcctccgacctgctgccgcctctccccggtccc

SEQ ID NO: 774175 - DNA, 120 bp, Artificial Sequence
  ENSG00000241233_7 (sequence is synthesized)
tgcaacctcctggctcctccacccttcatcttcatcctgcctgagctgccacagctccgattgtttttggagttgacctagaggactcagaattattagagaccccaggatcctctcctg

SEQ ID NO: 774176 - DNA, 120 bp, Artificial Sequence
  ENSG00000241233_8 (sequence is synthesized)
aggaggaggggcgcccagtctcctcttctacctctgacctggccttgtttctttccccagggcttcgccttgtaagtgcctaggctgaatcttctaaataaatacgatccacacctccca

SEQ ID NO: 774177 - DNA, 120 bp, Artificial Sequence
  ENSG00000241241_0 (sequence is synthesized)
atgtgcagttcaaagatgccatgcagccccagtgcttccagtctgtgtgctgccagcccacccaactgctgtcaccccagctgttgtcagaccacctgctgcagaaccacctcctgctcc

SEQ ID NO: 774178 - DNA, 120 bp, Artificial Sequence
  ENSG00000241241_1 (sequence is synthesized)
cacagctgctctgtgtccagctgctgcagaccccagtgctgccattccgtgtgctgccagcccacctgctgccgccccagctgctgtcagaccacctgctgcaggacgacctgctgccac

SEQ ID NO: 774179 - DNA, 120 bp, Artificial Sequence
  ENSG00000241241_2 (sequence is synthesized)
tcttgctgtgaatcgagctgctgctgcccctgctgctgcctgcgtccagtctgtggtcgagtctcctgccacgtcacttgctatcacccaacctgtgtcatctccacctgcccccacccc

SEQ ID NO: 774180 - DNA, 120 bp, Artificial Sequence
  ENSG00000241241_3 (sequence is synthesized)
ttgtgctgtgcctcccctccccttcccctccccttcccttccccacccgttcccctccctttcttcctttcccttgccctcccctcccctccccgcccttcccctcccctcctctcccca

SEQ ID NO: 774181 - DNA, 85 bp, Artificial Sequence
  ENSG00000241241_4 (sequence is synthesized)
cccctcccctccccgcccttcccctcccctcctctccccagtgttaatcccctccccttccccttccccttctctcccttcactt

SEQ ID NO: 774182 - DNA, 79 bp, Artificial Sequence
  ENSG00000241244_0 (sequence is synthesized)
aggaatcagacccagtcaggacacagcatggacatgagggtcctcgctcagctcctggggctcctgctgctctgtttcc

SEQ ID NO: 774183 - DNA, 120 bp, Artificial Sequence
  ENSG00000241244_1 (sequence is synthesized)
ggagacagagtcaccatcacttgtcgggcgagtcagggtattagcagctggttagcctggtatcagcagaaaccagagaaagcccctaagtccctgatctatgctgcatccagtttgcaa

SEQ ID NO: 774184 - DNA, 120 bp, Artificial Sequence
  ENSG00000241258_0 (sequence is synthesized)
ggcgagcaccttggcgcgcggagctggcaccttggcgctgttggtggcggcggagacagctgtgaagtgtgaggttctttgtctgctggcagctaggggcgacgaggcgggacgtcatgg

SEQ ID NO: 774185 - DNA, 120 bp, Artificial Sequence
  ENSG00000241258_1 (sequence is synthesized)
aagtgaaggatgccaattctgcgcttctcagtaactacgaggtatttcagttactaactgatctgaaagagcagcgtaaagaaagtggaaagaataaacacagctctgggcaacagaact

SEQ ID NO: 774186 - DNA, 120 bp, Artificial Sequence
  ENSG00000241258_2 (sequence is synthesized)
tgaacactatcacctatgaaacgttaaaatacatatcaaaaacaccatgcaggcaccagagtcctgaaattgtcagagaatttctcacagcattgaaaagccacaagttgaccaaagctg

SEQ ID NO: 774187 - DNA, 120 bp, Artificial Sequence
  ENSG00000241258_3 (sequence is synthesized)
agaagctccagctgctgaaccaccggcctgtgactgctgtggagatccagctgatggtggaagagagtgaagagcggctcacggaggagcagattgaagctcttctccacaccgtcacca

SEQ ID NO: 774188 - DNA, 120 bp, Artificial Sequence
  ENSG00000241258_4 (sequence is synthesized)
gcattctgcctgcagagccagaggctgagcagaagaagaatacaaacagcaatgtggcaatggacgaagaggacccagcatagaagagcacagctggccccggcgtttcatgaagtcaga

SEQ ID NO: 774189 - DNA, 120 bp, Artificial Sequence
  ENSG00000241258_5 (sequence is synthesized)
aggcctggcagccatttcctggacgttgagaggattgtttatttgatttttatcctcatcccagcaggcctggctttgtggttagttgggtacatcacaaaaataagttaaaaagaaata

SEQ ID NO: 774190 - DNA, 120 bp, Artificial Sequence
  ENSG00000241258_6 (sequence is synthesized)
tttgtgccttggggagaagaaacatggtgaaaacaggctgaggttgtcagggcagagagctgaaggtggggacagtgaccgcggacccctctgtgcttgaaagatttcctccacggcctt

SEQ ID NO: 774191 - DNA, 120 bp, Artificial Sequence
  ENSG00000241258_7 (sequence is synthesized)
tgccccagttgtggggaggtctctgtgcacagcggggaaaatgcttgtgtcgcctttggtgggccatgtcctaattagtttcatctgcttccctgggaacttactaaggggcccagagca

SEQ ID NO: 774192 - DNA, 120 bp, Artificial Sequence
  ENSG00000241258_8 (sequence is synthesized)
ctgttggaagtctggttagagtccccagagagttactctaagttaaaatgagccactgaccttggctcaccttagaggaatttcctcgagaacaacagagataagaaaagaaccggcctg

SEQ ID NO: 774193 - DNA, 120 bp, Artificial Sequence
  ENSG00000241258_9 (sequence is synthesized)
gccaatccttcaacagctctagagccccttttctctgctggcaggggctttgtttaccagctcactgtttaggctaaatgttagggaccagatcactgcagttgaaaacgggcactccag

SEQ ID NO: 774194 - DNA, 120 bp, Artificial Sequence
  ENSG00000241258_10 (sequence is synthesized)
gcttagtgacagtggcagcagaaacagtgttggctgcctttctgaccaccccactttcctgccctgagacagcagcccagggcaggtgcttcatattcagaccaggtaagcctcatttgc

SEQ ID NO: 774195 - DNA, 77 bp, Artificial Sequence
  ENSG00000241258_11 (sequence is synthesized)
attcagaccaggtaagcctcatttgcacaacagtcaaattgtttgttcctttaaaaaggacacaattagcctggcac

SEQ ID NO: 774196 - DNA, 90 bp, Artificial Sequence
  ENSG00000241258_12 (sequence is synthesized)
aaaaaacagaaaatattaagatgattaccatgtgaaaacctttttaatattcaggatttggaaagtatagttgccccaggcatgtggttg

SEQ ID NO: 774197 - DNA, 120 bp, Artificial Sequence
  ENSG00000241258_13 (sequence is synthesized)
tcaggatttggaaagtatagttgccccaggcatgtggttgttgccttaggtcctgcgaatattgctgaaaatcggattttccacattcactttcttccctgttttagggaagaaaatgat

SEQ ID NO: 774198 - DNA, 120 bp, Artificial Sequence
  ENSG00000241258_14 (sequence is synthesized)
catagacattcgattttccaaattggcgctcttattttcaatgctaattggattacttctcttccaaccctcctgcccgtccatccatcccagtccccaggcatcttaaccttaccatct

SEQ ID NO: 774199 - DNA, 120 bp, Artificial Sequence
  ENSG00000241258_15 (sequence is synthesized)
gtccccaggcatcttaaccttaccatctgagcttcagctgaaatctgtttataggcaacattgaaagtaccagattggggccaggtgtagcggcccacacctgtaatcccagcactttgg

SEQ ID NO: 774200 - DNA, 82 bp, Artificial Sequence
  ENSG00000241258_16 (sequence is synthesized)
acatggtgaaacccccatctctactaaagatataaaaaactagccgagcgtggtgtgggggaatcgcttgaaccggggaggc

SEQ ID NO: 774201 - DNA, 120 bp, Artificial Sequence
  ENSG00000241258_17 (sequence is synthesized)
ggggaggcagaggttgcagtgagccagatcgtgcattgcactccagcctggccgacagggtgagactccatctcaaaaaagagaaagtaccagattgtacttttaaatctgtctagcgta

SEQ ID NO: 774202 - DNA, 120 bp, Artificial Sequence
  ENSG00000241258_18 (sequence is synthesized)
aaatctgtctagcgtattgagaattttagtgggagctgttgatttatttctcagggcatacatgtgccaatctgtctcattgttgtctctctcttttttttttttttttttgagacagtc

SEQ ID NO: 774203 - DNA, 84 bp, Artificial Sequence
  ENSG00000241258_19 (sequence is synthesized)
ggtgccttagcctcctgagtagctgggacttacaggcacgtaccactataccctgctaaaatttgtatttttagtagagacagg

SEQ ID NO: 774204 - DNA, 120 bp, Artificial Sequence
  ENSG00000241258_20 (sequence is synthesized)
cagggttttgccatattggccaggctagtcgtaatgtctctttttaacactgaatatgttaggtggtttttcttgatggatttagggttaacctagttaataataaattgtttccaggta

SEQ ID NO: 774205 - DNA, 120 bp, Artificial Sequence
  ENSG00000241258_21 (sequence is synthesized)
gggttaacctagttaataataaattgtttccaggtaattatcaagttttgtcattttataaatctgaagagttaatattgtcatcgatacaaataaagtgaaatctgactgaggctaaaa

SEQ ID NO: 774206 - DNA, 120 bp, Artificial Sequence
  ENSG00000241258_22 (sequence is synthesized)
accaagtaagtaaatctcttaagtaggaagagcgtgacacatggtgaaatgatagttgctacattcgtagcaaccgtgtattgatattcggctgggtttggatttaaagaaggattatag

SEQ ID NO: 774207 - DNA, 120 bp, Artificial Sequence
  ENSG00000241258_23 (sequence is synthesized)
aggattgcaggcctgtcttattatcttgttttacttcagtctgccaggatttctttctggaactccctgtggtcccagttgccggatttcagagattgctgtggggaatgccatggaata

SEQ ID NO: 774208 - DNA, 120 bp, Artificial Sequence
  ENSG00000241258_24 (sequence is synthesized)
gaatctggccaccttgagctgagaaaggtgtttgtgattgatggttgatgccaccaagcaaacagggttaagcaacttgactgcctgcctgctgcttttaaaaaggcagctgacgaccta

SEQ ID NO: 774209 - DNA, 120 bp, Artificial Sequence
  ENSG00000241258_25 (sequence is synthesized)
ggcatgcagcgcggcgatcccggcgagcaccttggcgcgcggagctggcaccttggcgctgttggtggcggcggagacagctgtgaagtgaaggatgccaattctgcgcttctcagtaac

SEQ ID NO: 774210 - DNA, 120 bp, Artificial Sequence
  ENSG00000241258_26 (sequence is synthesized)
gactccgtctcaaaaaaaaaaaaaggttaaagaaaaaaagaaaagaaaacacaagataatcctgtccgcaaacgcttagcagtcttaaatcggcctggtggaaggatgcagggacactcc

SEQ ID NO: 774211 - DNA, 120 bp, Artificial Sequence
  ENSG00000241258_27 (sequence is synthesized)
agtcttaaatcggcctggtggaaggatgcagggacactcccccaccctgccccccgaaaaaggggaacgcgcagcgcgaggttccgggtccgccaagctcccggcatgcagcgcggcgat

SEQ ID NO: 774212 - DNA, 120 bp, Artificial Sequence
  ENSG00000241294_0 (sequence is synthesized)
aattaggactcctcaggtcaccttctcacaatgaggctccttgctcagcttctggggctgctaatgctctgggtccctggatccagtggggatattgtgatgacccagactccactctcc

SEQ ID NO: 774213 - DNA, 120 bp, Artificial Sequence
  ENSG00000241294_1 (sequence is synthesized)
atctcctgcaggtctagtcaaagcctcgtacacagtgatggaaacacctacttgagttggcttcagcagaggccaggccagcctccaagactcctaatttataagatttctaaccggttc

SEQ ID NO: 774214 - DNA, 120 bp, Artificial Sequence
  ENSG00000241294_2 (sequence is synthesized)
tctggggtcccagacagattcagtggcagtggggcagggacagatttcacactgaaaatcagcagggtggaagctgaggatgtcggggtttattactgcatgcaagctacacaatttcct

SEQ ID NO: 774215 - DNA, 120 bp, Artificial Sequence
  ENSG00000241322_0 (sequence is synthesized)
atggaaaacctggaatcaaggctcaagaatgccccctattttcgttgtgagaagggaaccgattccatccctctatgccggaagtgtgagacgcgtgtcttagcctggaagatcttctct

SEQ ID NO: 774216 - DNA, 120 bp, Artificial Sequence
  ENSG00000241322_1 (sequence is synthesized)
accaaagagtggttctgcaggatcaatgacatatcacagaggaggtttctagttggcattctgaagcagttaaatagcttatatttgttacactatttccaaaatatccttcagaccaca

SEQ ID NO: 774217 - DNA, 120 bp, Artificial Sequence
  ENSG00000241322_2 (sequence is synthesized)
cagggaaaggatttcatctataacaggtcccggatcgacctcagcaagaaagaggggaaagttgtgaagtcctccttgaaccaaatgttggataaaacagtagaacagaagatgaaagag

SEQ ID NO: 774218 - DNA, 120 bp, Artificial Sequence
  ENSG00000241322_3 (sequence is synthesized)
atcttgtattggtttgcgaacagcacccagtggaccaaggcgaattatactctcttactgctgcagatgtgcaaccccaaattactgctcactgctgccaatgtgatcagagtcctgttt

SEQ ID NO: 774219 - DNA, 120 bp, Artificial Sequence
  ENSG00000241322_4 (sequence is synthesized)
ctgagagaggagaacaatatctcagggctcaatcaagacatcacagatgtgtgtttttcccctgagaaagaccacagctccaagtctgcgacctcacaagtctattggacagccaaaact

SEQ ID NO: 774220 - DNA, 120 bp, Artificial Sequence
  ENSG00000241322_5 (sequence is synthesized)
cagcacacatcccttcctttgtccaaagccccagaaaatgaacacttccttggggcagcatctaaccctgaggaaccatggaggaattcactccggtgtatatccgaaatgaataggctg

SEQ ID NO: 774221 - DNA, 120 bp, Artificial Sequence
  ENSG00000241322_6 (sequence is synthesized)
ttttctggaaaagcagacataaccaagccagggtacgatccctgcaatctattggttgacctggatgacatcagagacctgtcttctgggttcagcaaataccgagacttcatccgttac

SEQ ID NO: 774222 - DNA, 120 bp, Artificial Sequence
  ENSG00000241322_7 (sequence is synthesized)
ctgcccatccacctctccaagtacattctaagaatgctggatagacacaccctgaacaagtgcgcctctgtgagccagcactgggccgccatggctcaacaggtcaagatggacttgtca

SEQ ID NO: 774223 - DNA, 120 bp, Artificial Sequence
  ENSG00000241322_8 (sequence is synthesized)
gcgcacggcttcattcagaaccagattaccttcttgcaggggtcctatacaagaggaattgatcctaattatgccaataaggtttctatcccagttcctaaaatggtagatgacgggaag

SEQ ID NO: 774224 - DNA, 120 bp, Artificial Sequence
  ENSG00000241322_9 (sequence is synthesized)
agcatgcgtgtgaaacatccgaagtggaagttgagaacgaagaatgagtacaacctgtggactgcataccagaacgaggaaacgcagcaggtcctgatggaggagagaaatgttttctgt

SEQ ID NO: 774225 - DNA, 120 bp, Artificial Sequence
  ENSG00000241322_10 (sequence is synthesized)
atccactattccgggggagatctgatagctgtgtcatctaatcgaaagatccatcttctggacatcatacaagtgaaagcgatacccgttgaattccgaggccatgctgggagtgtccgg

SEQ ID NO: 774226 - DNA, 120 bp, Artificial Sequence
  ENSG00000241322_11 (sequence is synthesized)
gccctcttcctgtgtgaggaggaaaactttctcctaagcgggagctatgacctaagtatcagatactgggatctgaaaagtggggtttgcacacgaatcttcggtggtcaccaggggact

SEQ ID NO: 774227 - DNA, 120 bp, Artificial Sequence
  ENSG00000241322_12 (sequence is synthesized)
atcacttgcatggacttgtgtaagaacaggctcgtatctggaggaagagattgccaggtaaaagtatgggatgtagacacagggaagtgcctgaagacgtttagacacaaagaccccatc

SEQ ID NO: 774228 - DNA, 120 bp, Artificial Sequence
  ENSG00000241322_13 (sequence is synthesized)
ttggccaccaggatcaatgatacctacattgtgagcagctgtgagcgagggctggtgaaagtgtggcacattgccatggcccagttggtaaagactctcagtggccacgagggagctgtg

SEQ ID NO: 774229 - DNA, 120 bp, Artificial Sequence
  ENSG00000241322_14 (sequence is synthesized)
aaatgcctgttctttgaccagtggcatctcctctcaggaagcactgatggcctggtcatggcctggagcatggtggggaagtacgagcgctgcctgatggccttcaagcatcccaaagag

SEQ ID NO: 774230 - DNA, 120 bp, Artificial Sequence
  ENSG00000241322_15 (sequence is synthesized)
gtgctcgacgtgtcccttctcttcctccgggtcatcagcgcctgtgcagatggcaagatccgaatttacaatttcttcaatgggaactgtatgaaggtgataaaagccaatggcagaggc

SEQ ID NO: 774231 - DNA, 120 bp, Artificial Sequence
  ENSG00000241322_16 (sequence is synthesized)
gatcctgtgctgtccttctttattcagggcaacagaatttcagtctgccacatcagcacatttgctaaaagaattaacgtgggatggaatggaatcgaaccaagtgctacagctcaggga

SEQ ID NO: 774232 - DNA, 120 bp, Artificial Sequence
  ENSG00000241322_17 (sequence is synthesized)
ggaaatgcctccttgaccgagtgtgctcatgtgagactccacatcgcaggacacttaccagcatcgaggctgcccgtggccgctgtccagcccatgacaggcgggatggccccaaccaca

SEQ ID NO: 774233 - DNA, 120 bp, Artificial Sequence
  ENSG00000241322_18 (sequence is synthesized)
gctccgacccatgtgttggcaatgctgatccttttcagtggtgtgtagcagcaggtatacaggaaaatgttgaagagccccagggctcctgtgagtggattcacccccaaggtcagaatg

SEQ ID NO: 774234 - DNA, 120 bp, Artificial Sequence
  ENSG00000241322_19 (sequence is synthesized)
gcaactcctggaacagcacaacaagtggcaaaggacacagctagcaacgggctggaaaaaggcagagaacgtggagtgatcatctccaactcaactcaatcacactgcctaaaatcggca

SEQ ID NO: 774235 - DNA, 120 bp, Artificial Sequence
  ENSG00000241322_20 (sequence is synthesized)
ctgacaaagtacaaataatccacctatccagtagaggcagcactgatctggctgattcctggatatggggaatcctctttatgaaacaaacttacaataagaaagaatatgtttgtggga

SEQ ID NO: 774236 - DNA, 120 bp, Artificial Sequence
  ENSG00000241322_21 (sequence is synthesized)
ggagggttaggaagaaggcagagaagtcagctgggatgtgctgtaataacccacgcaaaaccgatgatgggctgaagctaaagcactgagatgatgcggagaaagcacaaaaacaaggac

SEQ ID NO: 774237 - DNA, 120 bp, Artificial Sequence
  ENSG00000241322_22 (sequence is synthesized)
aattggaaactcctggaaaactgcccagtcacccaaagaaaaagtcttggaaaatccctatgtcacctgaccaattcctcctgactgttagcgccctgcagcacgcccgtaattccgggg

SEQ ID NO: 774238 - DNA, 120 bp, Artificial Sequence
  ENSG00000241322_23 (sequence is synthesized)
aatttgcctatccctgtaggccccaaacagaaattactgatgtctggggaccttcaatttcatacccaaggaaggtcttgaatttcaaaggaaaatcaatccaacgtgcagttgatcggt

SEQ ID NO: 774239 - DNA, 120 bp, Artificial Sequence
  ENSG00000241322_24 (sequence is synthesized)
tgagattgagcaatcctcctatagatgtgaaacgaaccagtattccccttgaaatccagaaactgcagcccaacttgaagatctctttgcacagtcctagagcccagtccaccatacccg
